United States Patent Application Publication US 2017/0009304 A1 - sequence listing, part 14

SEQ ID NO: 280332 - DNA, 50 bp, Homo sapiens
gggaggctcccgggcttgcgtggatgcatcatcccattcagatgaaacct

SEQ ID NO: 280333 - DNA, 50 bp, Homo sapiens
ccaaatcaatgcggagttcgtgacccagctgtccccgccctactccggac

SEQ ID NO: 280334 - DNA, 95 bp, Homo sapiens
cgacgtcatcatgctgaccaccaatcagatccgtaagatcttcgtgaagactctgactggtaagaccatcaccctcgaggttgagcccagtgaca

SEQ ID NO: 280335 - DNA, 100 bp, Homo sapiens
aaaacctgctcactgcctggaacagctctcaaagtttcctgctgctctgttaaaagcgaaaatgaaacaattgcctgcggcaacagttcgactcctttca

SEQ ID NO: 280336 - DNA, 83 bp, Homo sapiens
cttgactccgctgctcgccatgatcaatgtccgagttaccaccatggatgcagagctggagtttgcaatccagccaaatacaa

SEQ ID NO: 280337 - DNA, 90 bp, Homo sapiens
gcctggtggagctcaagaggcaggccctgaggttgctcctcccggggcccttcccgggcaagctcaccatctgctacctggatatgctga

SEQ ID NO: 280338 - DNA, 90 bp, Homo sapiens
ggaatggagaactccagaaatgattcaaccctatgaaaagataaaggccaggggcttgcctgataatatatcttccgtgttgaacaaact

SEQ ID NO: 280339 - DNA, 101 bp, Homo sapiens
gctgctgaagaacatggatgcccacaaggtcatgctggacctgctgcagatcccctatgacaagggtgtgggccgaagatatgctcatgtggtgttgagga

SEQ ID NO: 280340 - DNA, 74 bp, Homo sapiens
aggatctcacgcctctgaagctggccgccaaggagggcaagatcgagcactggatttcctggaacaaattttga

SEQ ID NO: 280341 - DNA, 100 bp, Homo sapiens
ccttaatgtgcatgatggttgtattcattcatggaggtgccattgcaaccatgattgatgctactgttggtatgtgtgcaatgatggctgggggaatcgt

SEQ ID NO: 280342 - DNA, 109 bp, Homo sapiens
gagaggccgtgtagcgtcgccgttactccgaggagataccagtcggtagagggttgtggcagcactgcctgaaggtatgagaccagattctaatctttatggttttcca

SEQ ID NO: 280343 - DNA, 75 bp, Homo sapiens
gcgcgggcacagggtgccgctgaccgaaatgcttcggttacccacagtctttcgccagatgagaccggtgtccag

SEQ ID NO: 280344 - DNA, 75 bp, Homo sapiens
cctcccagtacgttgtgtgaagagtatcattcgacaggactcatgaatcaagcaagcaaacgtgaaaaatggatt

SEQ ID NO: 280345 - DNA, 129 bp, Homo sapiens
ccggcgggaccataagggcttaactcatatatttaacccccctccaaaaagtactaggttttgacaagcttgcatcatgcgtgagtataagctagtcgttcttggctcaggaggcgttggaaagtctgc

SEQ ID NO: 280346 - DNA, 100 bp, Homo sapiens
gggccattgccttgcatcccatggagggtgagaaagatcagtctaaagaaaaggagaagaaagtgaaaaaaacaattccttcctgggctaccctttctgc

SEQ ID NO: 280347 - DNA, 100 bp, Homo sapiens
atccatttgtcttgcaaagtgttggaggacagacattaacagtatttactgagagctcatcagatgcagcatttaaaatcctgaaccctatgactgtccc

SEQ ID NO: 280348 - DNA, 82 bp, Homo sapiens
ggatccggttccttggtgtcatccagccttagcaaaccagagagaccaagaagcgtcagtgtaaagttctttttgagtacat

SEQ ID NO: 280349 - DNA, 78 bp, Homo sapiens
cgcgatcagcctgctcaactgctccaacgccacgcgccgtgccgtccctgcagtgacaccgaggtgctcctagccgtc

SEQ ID NO: 280350 - DNA, 51 bp, Homo sapiens
cccacaactcttgtcctaccacctcaaacacccatctcggctttctcgcaa

SEQ ID NO: 280351 - DNA, 98 bp, Homo sapiens
ccgggtgctgctggttagtgtgctctgagggagggtccgagccagccgctgttttgccggaggagcccctcaggcccatctgggctgatgggccgtac

SEQ ID NO: 280352 - DNA, 96 bp, Homo sapiens
tcgagaaatctcgtctcgaccaagagctgaagctgatcggtcccaggtgtgtgatggcggctgcaatctgtcttgtgggtattaatgcaatcttca

SEQ ID NO: 280353 - DNA, 100 bp, Homo sapiens
cgagcgggagcggctgcgggcggacagtctggactcctcaggcctctcctctgagcgctcagactcagaccaagtgtccctgctcaaggacctcaaacac

SEQ ID NO: 280354 - DNA, 100 bp, Homo sapiens
tggccccgacatgattccttacttctccgccaacgcggtcatctcgcagaacgccatcaaccagctgaatgaatctgaagtctgctgcagtaaaacacag

SEQ ID NO: 280355 - DNA, 98 bp, Homo sapiens
agaagttaaggagtatgcccaagttttccgtgaacatgccaacaaattgattgagggcatatctcttgttggatggctggacccaccatggtagatgg

SEQ ID NO: 280356 - DNA, 96 bp, Homo sapiens
cgagacctcgatgatgccctctcctgcaagccactcgctgacgaatatatcactgatgtccattcgaatgacctgtctacaccacagatccttcca

SEQ ID NO: 280357 - DNA, 100 bp, Homo sapiens
atgattttgagggaagaaacacagttcacaggttggcaaaagcagcttttgatgatgcaattgcagaactggatacgctgagtgaagaaagctataagga

SEQ ID NO: 280358 - DNA, 50 bp, Homo sapiens
tcctccagacctctcggcgcggctccccagaggcccatctcaacacagag

SEQ ID NO: 280359 - DNA, 88 bp, Homo sapiens
tcacctgtgcgggatggaacaaaaggttgcctgtggctggagaaaggaatgtgctcatcaccagtgccctcccttacgtcaacaatgt

SEQ ID NO: 280360 - DNA, 100 bp, Homo sapiens
gggattatctcctgaagaagattccactcgtggtatgagagtggataatataatcaactcctctgcctgttcatgccgtggaggaagtggtgaaggaggt

SEQ ID NO: 280361 - DNA, 50 bp, Homo sapiens
gtttggtgtttcggaagccaaggaacatccaatacttgggcaaccctttt

SEQ ID NO: 280362 - DNA, 100 bp, Homo sapiens
ttccaattatcaaagcaggaactgttattaaacttatagagaggcttacgtaccatatgtacgcaggtaaaatgtccagtgatcgagctttgaggaagca

SEQ ID NO: 280363 - DNA, 98 bp, Homo sapiens
aagctgaaggacatgaaagtgctgtacaccaaccgagcccagaaacccgcgctgaccgcagcaagaagcttttcaggcactacaccgtgggctcctat

SEQ ID NO: 280364 - DNA, 104 bp, Homo sapiens
cggggacccagaccctggagcctcagttggaagcagccgatccagcctgcggagcctgtggggcaggtgtgatgaatgcagactctgctaccattttggctgtt

SEQ ID NO: 280365 - DNA, 100 bp, Homo sapiens
gtgtccgccgagatgtccggctgcagcagcaagtcccatcggaggacctccctgccctgtataccgagggaacagaaataacatctgctttgctgccgag

SEQ ID NO: 280366 - DNA, 87 bp, Homo sapiens
gcccgatggtcttccgtaacctgcgggagaggtttggaattgatgatcaagatttccagattcagaatggacagtttagaagaacct

SEQ ID NO: 280367 - DNA, 74 bp, Homo sapiens
gacctcttcaccaactacatctcactctacaacacgtgtatgaaggtgaaggaccggacagacatcatctttga

SEQ ID NO: 280368 - DNA, 90 bp, Homo sapiens
cgcggagtatacaccatgagcaaagctcaccctcccgagttgaaaaaccatgtttcctgagagactgggagttgcaggtgcacttcaaaa

SEQ ID NO: 280369 - DNA, 100 bp, Homo sapiens
aaaatacaaatcacacgcataatggatgaaaggaaccgacagagtcctgtgtatggaaactcacatgagtcagctcagtctagaagggtagtaatttctc

SEQ ID NO: 280370 - DNA, 100 bp, Homo sapiens
gcagcgggagtgggtgcggcggcagcggcggcggcgcccgcgggtggtataaaatggcggatttcgaagagttgaggggaatgaaggatggcagcatgcc

SEQ ID NO: 280371 - DNA, 75 bp, Homo sapiens
gttagtgaacgtggacaaagctgttgtctcagggagcacagaaagtcctgtgtatggaaactcacatgagtcagc

SEQ ID NO: 280372 - DNA, 75 bp, Homo sapiens
ccctgtggggcctctacatgtccctggttaatgtgggccatgtctggtgttggagagcacaatggctgaacaagt

SEQ ID NO: 280373 - DNA, 100 bp, Homo sapiens
ggatgcggcgaaacgctgaggcgcggccttcgctgtgtggtggggactcacaagaccgacgtcaagatgaatatgaaatatctatgctgaaccagatgtc

SEQ ID NO: 280374 - DNA, 100 bp, Homo sapiens
aattttaaccatgagggaaatcgtgcacatccaggctggtcagtgtggcaaccagatcggtgccaaggtgaatgaaatcctgtgccgttcttcagtctgg

SEQ ID NO: 280375 - DNA, 75 bp, Homo sapiens
tcaggtgcctcattcacatacgtcaaggaaattgaggtgcacattctccacccacccctggttcccggcaagtac

SEQ ID NO: 280376 - DNA, 50 bp, Homo sapiens
atgaactctcccaacgagtcgggtcaaaatgcagatcttcgtgaaaaccc

SEQ ID NO: 280377 - DNA, 74 bp, Homo sapiens
ctcgtcctcatcctggtcactagcggactcttcttcgccttcgagaattgagtgatctacagcgcgatccacct

SEQ ID NO: 280378 - DNA, 100 bp, Homo sapiens
ccgggtacccatgcccggccggagagcgcttgcatcaaacacccctaactcagaagtgtgcagccacactgggactcagaacccaacaacagggacagaa

SEQ ID NO: 280379 - DNA, 83 bp, Homo sapiens
ccgacttcttgtatgcatactccacagcacctggagggcgctacgacccctcgctgactttctctgagaacgtggacctcaca

SEQ ID NO: 280380 - DNA, 87 bp, Homo sapiens
tgatcgagcaggcggcgcagtacaccaacgcggtgcgcgaccgggagctggacctccgggtgaagaactgaatgtcatcatgtctgg

SEQ ID NO: 280381 - DNA, 100 bp, Homo sapiens
actcagccctacggatgcttttgggaccattgagttccaaggaggtggccattccaacaaagccatgcacaaattgaagtgataccatgcaaaatttgtg

SEQ ID NO: 280382 - DNA, 89 bp, Homo sapiens
gagctccaaggacgctgggccactcaggtatttaaagaaggcatcacaggaggcctctgcatgatgtggcttccaaagactcaaggacc

SEQ ID NO: 280383 - DNA, 100 bp, Homo sapiens
agccaagctcatctctgagacccggaggaggttcgaagctgagtatgtgacaggatacttctacatagacataatcaagttttgactatttggaaaccaa

SEQ ID NO: 280384 - DNA, 83 bp, Homo sapiens
gatgttggatatttgcttggaaaaacgtgtgggtacgaccttgatcatccagacttgaaacatatcgacccagtggttttaaa

SEQ ID NO: 280385 - DNA, 100 bp, Homo sapiens
ccgggccctcttcgacagctacacaaatctggaacgggtggccgattactgcgagaacaactacatacaggtcaaagattctaaactgcctgcatataag

SEQ ID NO: 280386 - DNA, 82 bp, Homo sapiens
cctactacgatgcaatcctgagatggatagaatgacagaagatgctcttcgcttgaatctgttgaagcggagcttggaccca

SEQ ID NO: 280387 - DNA, 100 bp, Homo sapiens
agtttctttgtcatgtagccaagactggagaaacaattgtctttttctgaagaagagaagtatcagctacgaaaatttgtcaataaatcttatctgctgg

SEQ ID NO: 280388 - DNA, 98 bp, Homo sapiens
atctctttctccacccatcccgagaacagcagaatacttctatgaattcctgtccttgcgctccctggataaaggcatcatggcagatccaaccgtca

SEQ ID NO: 280389 - DNA, 76 bp, Homo sapiens
atctaggacccaggttgtgcagtgcctatgatgactgtccaagtgcctccaaagtgtacaaagcatcagattcagc

SEQ ID NO: 280390 - DNA, 85 bp, Homo sapiens
cttctcttccagaggatcactgtcgctgtcctttgagcgggaaccttcaaccagcgctccccaggtgtgtcctggtagacaactg

SEQ ID NO: 280391 - DNA, 90 bp, Homo sapiens
atggaagccatccactctgcgggagggaaggacagactacgcaagttgtatcacggactgattcaccgagcccaaccgtactcaactcac

SEQ ID NO: 280392 - DNA, 107 bp, Homo sapiens
gagcccaacttcagcgccaccaggaaggtgaacacgggcttcctcatgtcgtcctacacaatacgaggattctctccaccacatagaatctgcagttttgaagaggc

SEQ ID NO: 280393 - DNA, 75 bp, Homo sapiens
gaccccgcatcttcgccgtctggaaagtaagactttgaccccgacgcaggcttcagtgattgccgcggatcagaa

SEQ ID NO: 280394 - DNA, 75 bp, Homo sapiens
aaacgtagaccaaaggctcagcccacaactcttgtcctaccacctcagtctctaattaacagaagatggcaaagc

SEQ ID NO: 280395 - DNA, 98 bp, Homo sapiens
ccactcaaagctgagctcagggtaatggctgaggggcgagaactgatcctggacctggagaagaatgatgttttacctcaatcatatatccacacaag

SEQ ID NO: 280396 - DNA, 100 bp, Homo sapiens
ggaagccttgctccgggccgtgtttggggttgttgtggatgaggccattcagaaaggaaccagtgtctcccagaagatcaccaaggtgatgctgctcaag

SEQ ID NO: 280397 - DNA, 51 bp, Homo sapiens
cacaccgctggatcagtgtaagaaagcaaggagatggccaccaaggagaag

SEQ ID NO: 280398 - DNA, 98 bp, Homo sapiens
tgcatctgaactgtttcctgctgttgtgaagaatgtggccagtaaaaatattgagaggatggcattccctgtggatatgctggaaaattgcagccatg

SEQ ID NO: 280399 - DNA, 50 bp, Homo sapiens
cgcaaaaccaaagccctgctgcactttaccactcctgaaggccctaaacc

SEQ ID NO: 280400 - DNA, 97 bp, Homo sapiens
cttgacataacttcccatccagccaggagtctgcactcttcagtctttgcagaaatgcactcggtgatggaaagagagccactattctgaagaacac

SEQ ID NO: 280401 - DNA, 71 bp, Homo sapiens
tttattcagcggcagtggtgctttcccgaatctcagaatgccgtcgtaatctgaaggagtggctgagggag

SEQ ID NO: 280402 - DNA, 50 bp, Homo sapiens
cgagtctgaggcggagggagtaatggaagaccaacactgtcatctgaagt

SEQ ID NO: 280403 - DNA, 80 bp, Homo sapiens
gaaaacgaacttataaagttctgccgggaagcaagaggcaaagagaatcggttgttgaggagctcaagcttgggaaaatg

SEQ ID NO: 280404 - DNA, 120 bp, Homo sapiens
gaagaccgcgcgcagggcctgcagcgggagctggacggcgagcgcgagcggcgcgagaaactggagcagatccgcagggacatccgagacttccggtctagcgcggggctggacaaagtc

SEQ ID NO: 280405 - DNA, 100 bp, Homo sapiens
cacgactagaaggacgactgcctggcgcgatacaaaaatgtcctactgctctgttggctcatgaaataggttttggaagtaaagttacaacacaccctct

SEQ ID NO: 280406 - DNA, 82 bp, Homo sapiens
ccaagatggtgaagcagatcgagagcaaggcctccggtgtggctgtctctgatggtgtcatcaaggtgttcaacgacatgaa

SEQ ID NO: 280407 - DNA, 73 bp, Homo sapiens
cggagcccctcggcggcgccaccatgtactcgggagccggccccggtccagcaagactatgaatctctgttcc

SEQ ID NO: 280408 - DNA, 96 bp, Homo sapiens
tgctgatgcccgtcattggttacaactgagtcccaccgatgcttcaaatttaacagaggcgttggggctgaacctctgctcccatggaaccggatg

SEQ ID NO: 280409 - DNA, 75 bp, Homo sapiens
gctacaccagaggtggccgaatcatctccacttcttcgcgttcggttctagagccttctttccgccaggcctttc

SEQ ID NO: 280410 - DNA, 98 bp, Homo sapiens
aagatatggcaaaagcccatacctttatccactctatggccttggagaactgccccaaggatttgcaaggagaactgcgacacatcaccaagctgaag

SEQ ID NO: 280411 - DNA, 100 bp, Homo sapiens
gcgcgcgcaccatgggggagaaacccgggaccaggatggctgacttcaggctgcggaaactgaaggcaataatgttggcttttggaaggggcaagacgag

SEQ ID NO: 280412 - DNA, 50 bp, Homo sapiens
cgtggttcaagtcccatccacatgctggaagctctttgacatcctttgga

SEQ ID NO: 280413 - DNA, 101 bp, Homo sapiens
cgccactcccactgagattgagagacgcggcaaggaggcagcctgtggaggaactgggcagaggtggaggagacactgaagcgactgcagagccagaaggg

SEQ ID NO: 280414 - DNA, 82 bp, Homo sapiens
acaccagagcgactttcattagaaggagagcgacagcccaagtcaccaggatgttttagaagaatgtatgtctcttcccaag

SEQ ID NO: 280415 - DNA, 87 bp, Homo sapiens
ttctaagggctgtgcctcctgcattgcttatccacacggttgcccccaagtttcctggcagtgtgtgatactgaggaggtgagcttg

SEQ ID NO: 280416 - DNA, 100 bp, Homo sapiens
cattgtggctcccctgagggttcccttggatcagactcctcttttttatccatggcagggttgctcatcacccatggtggtaaaatttgctgatacacag

SEQ ID NO: 280417 - DNA, 83 bp, Homo sapiens
tggtggcccctgtccaggctgaagaagactctggtggtcttcgagggatagcacgaggtggtctgacaggactaacacttacc

SEQ ID NO: 280418 - DNA, 100 bp, Homo sapiens
gccctatgtgttattcgttgtttagtgaagaagaggcccagagcaagagaggcatcctcaccctgaagtaccccatcgagcacggcatcgtcaccaactg

SEQ ID NO: 280419 - DNA, 83 bp, Homo sapiens
gaaatggggcctgggggacggtaggagcctccgtgcggagaccactgttcaaggccacagaaatcatgaccaccccaggaaaa

SEQ ID NO: 280420 - DNA, 83 bp, Homo sapiens
cgagtgcagaagatctgggtgcccgtggaccacaggccctcgttgcccagattgcaagaagaaacacacgctgctgtgccccg

SEQ ID NO: 280421 - DNA, 90 bp, Homo sapiens
caagttcagagaatatcatgcttccagtctactgtaaaggggctggaattctcgcaatggccaatgcggggccagataccaatggcagcc

SEQ ID NO: 280422 - DNA, 83 bp, Homo sapiens
ccctgatcaagaacaggagcgcagagcttcgtgtcctatagttcttcgtaagtacatcttaaagctgtcaagatggttctagc

SEQ ID NO: 280423 - DNA, 100 bp, Homo sapiens
ttcttggaattggactgtgggcatggaatgaaaaaaacttgagagagatttgctgggataaggcgggacatttctttgatctcccggacttcttatcgtg

SEQ ID NO: 280424 - DNA, 90 bp, Homo sapiens
tttctcaaacgagagtcagcctttaacgggccaattcctgtccccccagcagcatggcatcgtgtgctgaaccctctgagccctctgccc

SEQ ID NO: 280425 - DNA, 75 bp, Homo sapiens
gttaaggattccaagtaactcttatttggagtctactcttcatcttgtgttgagacttcgtggtggtgctaagaa

SEQ ID NO: 280426 - DNA, 75 bp, Homo sapiens
cgcggagcccggagctggggcgacgaggcgattgcgggggcctgggctaggaagagaatggagactacacatatg

SEQ ID NO: 280427 - DNA, 83 bp, Homo sapiens
agcagcacgggatcccagcctcaggcctgcacggacggtgttggttgggtttggtgccctggttgtcagatgttggaaagcag

SEQ ID NO: 280428 - DNA, 100 bp, Homo sapiens
cagaatcgaatctcttctccctccccttcttgtacaaaacgtttaattgtggatgtcatccggttccagccaggagagaccttgactgaaatcctagaaa

SEQ ID NO: 280429 - DNA, 101 bp, Homo sapiens
aggatttaaccgctctctgcctcccagttccctgtattgaacactgatatacaaggaatgaatagaagtcaagaaaaacagacctggtgggaaaaagcctt

SEQ ID NO: 280430 - DNA, 98 bp, Homo sapiens
aagatgttgtcctgtgctggggctgacaggtcagaagccaatgacctggccctgaggctggctcgccactacacgggacaccaggacgtggtggtatt

SEQ ID NO: 280431 - DNA, 102 bp, Homo sapiens
accggccgcagtgccacttcgacatcgagatcaaccgggagccggaggagaaggcagagcccccccaggctatgaatgccctgatgcggttgaaccagctga

SEQ ID NO: 280432 - DNA, 80 bp, Homo sapiens
ctgagggcagctgttcccactggctctgctgaccttgtgccttggtgtgtgtctggggaagagacttacagaagtggagt

SEQ ID NO: 280433 - DNA, 80 bp, Homo sapiens
gcggagatgcctctttttgccaccaatcccttcgatcaggatgttgttggtagctggcagtgttgtgatggcttttgaag

SEQ ID NO: 280434 - DNA, 75 bp, Homo sapiens
gcggccccggcgccaagccgccgtcatcttcttcctgtgccagtatgccaccacgggctgttccctgaccctgca

SEQ ID NO: 280435 - DNA, 135 bp, Homo sapiens
cgttcagccaaccaatgtgtgcgcggggtatcctgtaggcaagatcgacacctgccagagagcctacgactagatttgcatctttacgtcctgcgcggaggctgctacacacatgcagaagtcatgctggtggcc

SEQ ID NO: 280436 - DNA, 75 bp, Homo sapiens
atgatgtagatcatcctggtgtgtccaatcaatttctgatcaatacaaccaagaaggatcaagaaggtggagaag

SEQ ID NO: 280437 - DNA, 87 bp, Homo sapiens
gggatcaagctgtgtgcattagtacaaatggacaaccctccatatgataagggagccttcagaatcgaaatcaactttccagcagag

SEQ ID NO: 280438 - DNA, 75 bp, Homo sapiens
tgcacgcccagcctcctggcacaccggaacaggagtacagctgtgtagtaaagatgccttctggtgaatttgcac

SEQ ID NO: 280439 - DNA, 100 bp, Homo sapiens
gtgtgtggacattcaggaattctcctgccaccgcgtggtgcttgccgcagccagcaactatttcaggtacagaggtgcagttccatggtacaccataaat

SEQ ID NO: 280440 - DNA, 74 bp, Homo sapiens
tgacccggatcgtgctcctgaaggccctagccttcgtgtactgaggactggaatgaaattgaccccattaaaaa

SEQ ID NO: 280441 - DNA, 75 bp, Homo sapiens
gaaaagggtcctcctgctcacagtgtgaataacaggctgtcagccagatgaaacagcaaaaatatccaacaaaag

SEQ ID NO: 280442 - DNA, 101 bp, Homo sapiens
tttgggaaacaaggcttccagtgccaagatgcctataagaaaatcttagaaaccacaatgactccaactggaatagatactgccaaactgtatcccattct

SEQ ID NO: 280443 - DNA, 100 bp, Homo sapiens
ccggcctgccggcccccagaacaaggccatggaagagctggtggatgaagggctggtgaaagctattggcatctccaacttcaaccatctccaggtggag

SEQ ID NO: 280444 - DNA, 82 bp, Homo sapiens
tggacaattcacctgcctcctatgtcttccatccagacaatgctgaacctaaggagatgctgactctaaggtgaaagagggc

SEQ ID NO: 280445 - DNA, 100 bp, Homo sapiens
gagtctcacagccaagcaggtccaggcggatttcataactctgggcacagaagtttacagacagttttggatctttgatgtgcaaaatccacaggaagtg

SEQ ID NO: 280446 - DNA, 50 bp, Homo sapiens
tgcgggccaaggtcagccttattgaaaggcaggtggacacgaacaccaaa

SEQ ID NO: 280447 - DNA, 100 bp, Homo sapiens
ttttcctgtatgaagcggttggcaccactgaagtgaccgaatgagcttctgcagaaagccgtcattacacctgattttgaaaaaaaccactgtgttccac

SEQ ID NO: 280448 - DNA, 83 bp, Homo sapiens
ggatcatgtctgcgagccaggattcccgcatcatggcagaacaggatgtggaaaacgatcttttggattacgatgaagaggaa

SEQ ID NO: 280449 - DNA, 75 bp, Homo sapiens
gtggagcgggacacgaacgtggtacggacattgctgcaggagaagaggttgccatcaagcttgaatgtgtcaaaa

SEQ ID NO: 280450 - DNA, 75 bp, Homo sapiens
gctggtgccagaactgcataacccagtgctgccaggttgccagatttctaagaaggagtttgaagaggagaaaag

SEQ ID NO: 280451 - DNA, 50 bp, Homo sapiens
gacagaccagagctacagcatgtgggcatgagccagaaggagagctctaa

SEQ ID NO: 280452 - DNA, 99 bp, Homo sapiens
cgacagacttcgctgtgagtgcccaaggtttcaaagcattatatgaagcatctgccacctccactgcccagcaaaactccgcctcctccccctccaaag

SEQ ID NO: 280453 - DNA, 71 bp, Homo sapiens
tcactacctgcatgctaactgggtgttgcacagagatttgagcacaccatggccacgcccctggaggatgt

SEQ ID NO: 280454 - DNA, 71 bp, Homo sapiens
tcccaggttgccttggaaaatgccaacgccgtgtctgaaggccaaggcagaggcttcctcaggagaccatc

SEQ ID NO: 280455 - DNA, 50 bp, Homo sapiens
aacagcagccacaggaaccttgagctacagatgcacatgttgaatggagc

SEQ ID NO: 280456 - DNA, 50 bp, Homo sapiens
cggaaaccccggaactagaactggtatgaggaccttgagattgaattggt

SEQ ID NO: 280457 - DNA, 100 bp, Homo sapiens
ctacaacagaaagctcaatcacttaccaagatgttggcaaaggatgaactgatgaccatacttgagaaatgtttcaaggtttttaagtcttattgtgaaa

SEQ ID NO: 280458 - DNA, 83 bp, Homo sapiens
gaccgcaacacgtgcgctggataaacgcttgttaactggatctttgatggaaaacagattccacagagaatggttgatggatg

SEQ ID NO: 280459 - DNA, 100 bp, Homo sapiens
agcctgggacgcgcttatcgtgcggccagtccggcgctggcgccgcgtggcagtggggactgcgagaactacatcactctcctggagaggcggagtgagg

SEQ ID NO: 280460 - DNA, 96 bp, Homo sapiens
agtgaagaacatggacctttgggatcagttcttaagagcagccccggtaactggaggaatgggagccgttttgatgagaaaaatgggctggagaga

SEQ ID NO: 280461 - DNA, 100 bp, Homo sapiens
tataatggactctcagaataaaggaaagacctcagagtgttctcagacagtcggcccaatatgtcaagacctctgatcactagatcccctgcatctccac

SEQ ID NO: 280462 - DNA, 140 bp, Homo sapiens
aggggtagcggagccatgggggacgctcccagccctgaagagaaactgcaccttatcacccggaacctgcaggctgattcaccccaagagtggccgttcctaccacgaggagttcaaccctccaaaagagcccatgaaag

SEQ ID NO: 280463 - DNA, 95 bp, Homo sapiens
aggagttcgtctcttacgtctgcggaagtgcagctgcctcagttcttagcgcagagtgacatcactgcctctcttcctgtgcgctggctttgaca

SEQ ID NO: 280464 - DNA, 102 bp, Homo sapiens
cagaacccgggagtaggagactcagaatcgaatctcttctccctccccttcttggaagatgatccctatgatcttgaagatgtttctgcacagaaatgaggg

SEQ ID NO: 280465 - DNA, 100 bp, Homo sapiens
gttgcggcggcctgggctgctgactgcgcacttggaatagtagcaggcggcggcggcggaacgccaggcagacgagatcatcagatgttcattcatctgg

SEQ ID NO: 280466 - DNA, 100 bp, Homo sapiens
gaccagggacctgcccgcctgcggctgctccggaatgggagctgactgatatggtggtgtgggtgactggagcctcgagtggaattggtgaggagctggc

SEQ ID NO: 280467 - DNA, 101 bp, Homo sapiens
ccgagatactggctactgatgtgtctgtggaggatgaggaagggactggaagccccaagaaaatatttacaccagcagctccagttcataccaataaagaa

SEQ ID NO: 280468 - DNA, 108 bp, Homo sapiens
caaggttcaaaaactaagcatccagaggccctgagcagctttcagcactggaggatgttgagaaagagaaggaaacccacagttacctcagcaaagaggagatcaaag

SEQ ID NO: 280469 - DNA, 100 bp, Homo sapiens
agaaaaactacctgtggtaggaattggaaagcatctgtgtggtatggcaacagtgagaaagatcagtctaaagaaaaggagaagaaagtgaaaaaaacaa

SEQ ID NO: 280470 - DNA, 50 bp, Homo sapiens
ccacagcatcctccagcacctcagggtggttctcttcccaaagtggaagc

SEQ ID NO: 280471 - DNA, 75 bp, Homo sapiens
ctgttacagttctgtgcataagaaggatctcaagagggatcatagacggtatttctatgtaaacgaacagtcggg

SEQ ID NO: 280472 - DNA, 82 bp, Homo sapiens
aactggattttttaactgaagatagtgcctttcagccctaccaggtctcataacaacaaactgcagtctacagcttcttaaa

SEQ ID NO: 280473 - DNA, 50 bp, Homo sapiens
gagaggtgaacagagcccctgggaccagttactctccacaagaaaattca

SEQ ID NO: 280474 - DNA, 100 bp, Homo sapiens
tgagaagacaatctctagcatcaaagcatggatcagacatcacacgatttttgatgttgggatgagagtcggagccgaataccaagctcggatccctgaa

SEQ ID NO: 280475 - DNA, 50 bp, Homo sapiens
aacagcctccgcggctccggggagaaggcagctgcattcagcctcagcgg

SEQ ID NO: 280476 - DNA, 75 bp, Homo sapiens
gggaaagtatggaaaacccaaattgggcagctgcaatgactctccgcacggtattattgtcattgcaagcactat

SEQ ID NO: 280477 - DNA, 100 bp, Homo sapiens
ctcatgttggatcaggagacctgttcagtggaatgaattcaggtggatcccgactgcccacatctcttggaggagccgatcttgaaatccattgccaaga

SEQ ID NO: 280478 - DNA, 90 bp, Homo sapiens
atgcaattaggaactgttctgccggaatttgaaaagtgccttcaagctgtattagtcgacaggaccatttacatttcaggacagataggc

SEQ ID NO: 280479 - DNA, 82 bp, Homo sapiens
cggcgggctggagacatggaccgcggcgagcaagggagtgcatccgccccaacccttttccccctcgtctcctgtgagaatt

SEQ ID NO: 280480 - DNA, 83 bp, Homo sapiens
acgaggtgtgggagatcgtgggcgagctgggcgacggcgccttcggcaaggtttacaagcccttgccagcatccagccatggg

SEQ ID NO: 280481 - DNA, 98 bp, Homo sapiens
gcagcaaggagaggcggcggcggcctcggctgaagaaagaaggtgggagcggagagcgcaggcgtgtcagagcaccataacatggtgtgggaagtgaa

SEQ ID NO: 280482 - DNA, 83 bp, Homo sapiens
aaaccgaagttggaagtgtctcttagcagcgcgcggagaagaacggggagccaggctgaccccgcactacatctacccaccag

SEQ ID NO: 280483 - DNA, 83 bp, Homo sapiens
agctgatggcccctacctggtgatcgtggaacagcctaagcaggatctggtggaacgagactgcaatggggacacgccaaacc

SEQ ID NO: 280484 - DNA, 90 bp, Homo sapiens
tgaagaataccagtttcaagcagtattaagagtaaatggtgggcatggtggccttcaaaatgaggtttaagacccaggagtacccggaag

SEQ ID NO: 280485 - DNA, 100 bp, Homo sapiens
ggcgcgtaggtcgcggggagctccgaaccgccggcgcccggccatggcggtctccagatttcaaaagaacaaggccttgaagttctaccagaacatgatc

SEQ ID NO: 280486 - DNA, 75 bp, Homo sapiens
gtggttgcttctgtgaacctcttccaggcgatctagggcagccctgcagaggtacctgttctactgtaatcgcta

SEQ ID NO: 280487 - DNA, 74 bp, Homo sapiens
gagctcaaagatttggtttgaatgtctcttcaatctccagaaagggctgtgtggagaagattgggggctggctg

SEQ ID NO: 280488 - DNA, 74 bp, Homo sapiens
gaaagagtcaacagcagtggcaacaggtctgggataaaagtgaaagtggtgattggcattgtactgctagctgg

SEQ ID NO: 280489 - DNA, 50 bp, Homo sapiens
ctttacctcgctgaccctatgaagccccctcggaaaaccacactgagagt

SEQ ID NO: 280490 - DNA, 100 bp, Homo sapiens
agaagagtgggcaaacatgaaatccaatcctgctatccaggctgccattgacctcacagcgggggctgcagtgagaaagatcagtctaaagaaaaggaga

SEQ ID NO: 280491 - DNA, 80 bp, Homo sapiens
gggacctgacagccgggtcagagacaatgcagatcttcgtgaagactctgactggtaagaccatcaccctcgaggttgag

SEQ ID NO: 280492 - DNA, 82 bp, Homo sapiens
gctgcggaacaggacgccctctgatatgccgacaaaaggatcaaggtggcgaagcccgtggtggagatggatggtgatgaga

SEQ ID NO: 280493 - DNA, 100 bp, Homo sapiens
gccagcaccttctctctaaagcccaagaggagtttgagtgaccaaagacttgaccactcaaagtccagctccccagaacactgctcgacatggacaccgg

SEQ ID NO: 280494 - DNA, 75 bp, Homo sapiens
gtcgagcagcggacgccggtctctgttccgcaggatggctcaaagtgctgacaaataaagcttctgtgatgctct

SEQ ID NO: 280495 - DNA, 100 bp, Homo sapiens
attccaactgccctttggttcacaaaccaggatgttcctccacgaagttgccagggcctgtccaggaaactcttatcactactattgattctagttccag

SEQ ID NO: 280496 - DNA, 82 bp, Homo sapiens
gctgtctgaagatagatcgccatcatgcaaaatgatgcttcaacacccaggccaggtctctgcctcggaagtgagtgcttct

SEQ ID NO: 280497 - DNA, 82 bp, Homo sapiens
tgcaaggactggttccacggcaggtgacttaagagattaaaattaatttggttgctgttggttctgaacaaataatgagttc

SEQ ID NO: 280498 - DNA, 80 bp, Homo sapiens
gaactgaaacggattgccagagaattggcagaagggaattcggcaccggttgagaggtagtgccaatgctgtgaggatcc

SEQ ID NO: 280499 - DNA, 85 bp, Homo sapiens
gtgtctcggctcgcgggaggcagctgcaccaagaaggtgaatgaaaactttgccattgatttgatagcagagcagcccgtgagcg

SEQ ID NO: 280500 - DNA, 75 bp, Homo sapiens
tcgctgggatttttgggtggtgcaaagttccacttgtcctacacagacaaggagcgctatgaaaatgaagaaaga

SEQ ID NO: 280501 - DNA, 100 bp, Homo sapiens
acccgttaagtcccccaaagatgagatttacctgtgagatgtttcatcccaacaggtttggattcaggatttgttcctagtgtccaagattttgataaga

SEQ ID NO: 280502 - DNA, 83 bp, Homo sapiens
cgccgcgggacctctccgggccatgggtcagaagttgagtagcaggggcctaggagggctcgaagccttcacagcgatggcag

SEQ ID NO: 280503 - DNA, 82 bp, Homo sapiens
gtccgcgggaagatggcggcgccgctcatccccctctcccagcagggggatatgagactttctactcggaatatcctgagtg

SEQ ID NO: 280504 - DNA, 97 bp, Homo sapiens
aggttgtttgcaacgaccgtctggggaagaaggtccgcgttaaatgcgctggcgtgctggttaccacagtggtggccggaggcattaccatcctaca

SEQ ID NO: 280505 - DNA, 82 bp, Homo sapiens
ctcgctactcgcttgcctacccgccggcccgcgggtctacttcctcaaaggtcgccatgggctactcacactccttggtgat

SEQ ID NO: 280506 - DNA, 75 bp, Homo sapiens
aatgaatttgcaaaacttactgtagttccgatgaagttaaattccgtcaagatttaatgaatattgcgggcacaa

SEQ ID NO: 280507 - DNA, 83 bp, Homo sapiens
gatcccaagttgtcgacgaccgacagggtggtgaaaggcctccggtgtggctgtctctgatggtgtcatcaaggtgttcaacg

SEQ ID NO: 280508 - DNA, 75 bp, Homo sapiens
agctcaggctgcccagatggtggctcccggagtccaggaagcggggagaggtggtgagagatgacccctgttgag

SEQ ID NO: 280509 - DNA, 82 bp, Homo sapiens
gaggccgagaacaccattgaccagctacgcctcggggccaagtccgtgcactggagaaggcgaggtcaagtgcccaactgca

SEQ ID NO: 280510 - DNA, 100 bp, Homo sapiens
tggaaattgtacagtgacatcttctgggatttagtctgcctgaaggtatgatctcagagtcacttgataacttggaatccatgatgcccaacaaggtcag

SEQ ID NO: 280511 - DNA, 97 bp, Homo sapiens
taagcggacgtttcctgtgctgcttcgacttgcgtgtgatgttgatcagattggtttttcagcagcagatgctgtaacaggactgaaattggtagaa

SEQ ID NO: 280512 - DNA, 50 bp, Homo sapiens
cctggtggatggcgaggatgagagagagaatagtaatctgcatcaccaag

SEQ ID NO: 280513 - DNA, 75 bp, Homo sapiens
ttcgagaaatctcgtctcgaccaagagctgaagctgatcgaggagaattctgcctaagccaactcgaaaaagccg

SEQ ID NO: 280514 - DNA, 89 bp, Homo sapiens
ttcgggggatggcacagaatgggataacagacgagtacctttggaaaggtcacgctctcgccacaatggagctatctcatctaagtgat

SEQ ID NO: 280515 - DNA, 95 bp, Homo sapiens
ctgtccacgcacctggacgacgcccggcgccagcacatcgcaggatgatggcttggaaaaaagtccaatgaaaaaaaaacagaagaagaaagaga

SEQ ID NO: 280516 - DNA, 90 bp, Homo sapiens
cggaggcgaccgccatggcgttcctcaaactccgtgaccagacattgggacctgtgcaatcactgctattccttttgagaagtccaaagt

SEQ ID NO: 280517 - DNA, 99 bp, Homo sapiens
gctttggctttgcagacagcacagtcttacagtgaagatagtgatccggggagacaggaacacgggcaagacagcgctgtggcaccgcctgcagggccg

SEQ ID NO: 280518 - DNA, 83 bp, Homo sapiens
ccctggatacggtcactttctacaaggttgtggcagcactgcctgaaggtatgagaccagattctaatctttatggttttcca

SEQ ID NO: 280519 - DNA, 76 bp, Homo sapiens
gtcaatgcccacgcctatcctgcccagtggaccctcggggacccagtggcctttgaggatgtggctgtgaacttca

SEQ ID NO: 280520 - DNA, 100 bp, Homo sapiens
attggaagtggccaagctggagggcgacctatggagacatggcttgccgctgttccgtaacccagtgattccagtcttggctgtggtatgaatcacttag

SEQ ID NO: 280521 - DNA, 98 bp, Homo sapiens
aacaccacgagaattccgcagcccacacgggactttgaacatgtcggggatcgccctcagcagactcgcccaggagaggaaagcatggaggaaagacc

SEQ ID NO: 280522 - DNA, 96 bp, Homo sapiens
gcctgccaggcgctcgggggccgaactggccctggactacctctgcaggaagaaaacaggcagattttggcgcggcaaaagtcaaactcacagtcg

SEQ ID NO: 280523 - DNA, 75 bp, Homo sapiens
caatgaggtcatccccatgtctcacccggggcttctggttgggactcttgattcagtcttggactctactgctaa

SEQ ID NO: 280524 - DNA, 100 bp, Homo sapiens
ccaatggcagtgatgatggagctcagccctccacctccacagtctattatcctcccagtccacaacgctgaaccgtggctggacgaatgtttgaggtctg

SEQ ID NO: 280525 - DNA, 82 bp, Homo sapiens
cccacgctaccgggagctggtcaagaactggtttggtgcacctcgatttggaggaagtagggcagggcccttatctggaaag

SEQ ID NO: 280526 - DNA, 74 bp, Homo sapiens
cctcgatccgcccacagacctcaaattcaaagttaacccagtatccactccagttgcacttcccacaccagctc

SEQ ID NO: 280527 - DNA, 89 bp, Homo sapiens
acccggagtgatgagcccgcccgagacgctgcatccaggtagtacacaaactgctctgctaccagaagaagtgtcgggtacgcctgcat

SEQ ID NO: 280528 - DNA, 100 bp, Homo sapiens
cccaagccaaagaagaggaaagagcccgtgaagatcgcggcgccggagttgcataagggagatcaacatggccaatctttcctaagctgctcagcttaca

SEQ ID NO: 280529 - DNA, 75 bp, Homo sapiens
tgcaaagaaagggaagctattgctgggattttgaggaggggaatcccggaggcaagacacttgaggagaggcgct

SEQ ID NO: 280530 - DNA, 98 bp, Homo sapiens
tgaccctcagcgccggtgcatgtcgatcaataagagctaactgccatcaagagccatcagtatgtcttcaagctgcatgcccagaaagctggattggt

SEQ ID NO: 280531 - DNA, 100 bp, Homo sapiens
ctcagttgtccatgaccctgaaggtccaggagtacccgaccctcaagttccagggtctccctccactgctgtagtaacccgggtccggggcctcggtggt

SEQ ID NO: 280532 - DNA, 100 bp, Homo sapiens
gcggcttcagcgactcggagagtcgaactggaaggtacacccttatagagaaatggagagatactgaaagacacttagcacctcatgaaaatcctatcat

SEQ ID NO: 280533 - DNA, 74 bp, Homo sapiens
ctgggcatcctcctgagactccggggtcagacgcccactccaggaattgaatgatctggcacgggaccctccag

SEQ ID NO: 280534 - DNA, 83 bp, Homo sapiens
ctggcctgggcgctccggtggcggcggagagcaaacgccctggaggagcagctgaaggagcaggagctgagagcctgcgagat

SEQ ID NO: 280535 - DNA, 97 bp, Homo sapiens
ttcagacagcatatttgagtcatttccttcgtacccacagtgcttcatgagaggtaatgcaggtggtgaaggagcaggttatgagagcacttacaac

SEQ ID NO: 280536 - DNA, 83 bp, Homo sapiens
gctgcccgcacgccccgaccttccatcgtaggaaggagtcaagactgagaacaacgatcatattaatttgaaggtggcggggc

SEQ ID NO: 280537 - DNA, 74 bp, Homo sapiens
caacacgcccctcaactggctggtcctcggcagcctgatcttctgcttcggcatctggatcctcattgacaaga

SEQ ID NO: 280538 - DNA, 99 bp, Homo sapiens
ctttcttggtttcatggatactgattcagcacttagtgaagttcctcaattgaagcaagagatttctgaatgatggagtttcactctgtcgcccaggct

SEQ ID NO: 280539 - DNA, 98 bp, Homo sapiens
gaagcagctccacgaaaggcagccgcggatcgccgcgctcagcgacaaacaaatcgtcagtatttaaacagatcacatcatgcgtgagtacaagctag

SEQ ID NO: 280540 - DNA, 99 bp, Homo sapiens
acgtgaacagagtgagcactattctaagcaactggaaaatgaattggagggactgaagaatcaaagaatcttcaggatggcagcaagtgtttacgagcc

SEQ ID NO: 280541 - DNA, 75 bp, Homo sapiens
tcggactccgcggccggcccggcgcggcccagcgccctcagttacagaatgtctgaaggggacagtgtgggagaa

SEQ ID NO: 280542 - DNA, 75 bp, Homo sapiens
gctgccagtttgcacagcagcaggagtgtggccatctggggccgtgtggtatttgccactcaggagacatgtccc

SEQ ID NO: 280543 - DNA, 74 bp, Homo sapiens
ggccaacacagcctggatggagattaagttgcttttacagagttaacaggtctccaagaaattttaaaaaaggt

SEQ ID NO: 280544 - DNA, 100 bp, Homo sapiens
gtggtaatcctgacgaaattgaaattacctccgagggaaacaagaaaacatcaaagaggtctagcaaaggtgtagaatgagccaaggagactcaaaccca

SEQ ID NO: 280545 - DNA, 74 bp, Homo sapiens
gcagtggtcgcttcttctccttggttcaagtgctggggccggcagtggagagttccacgtgtacagacatctgc

SEQ ID NO: 280546 - DNA, 75 bp, Homo sapiens
cccaggccccggcagcgcctgggacaagtcgggaagacgtctctgattacgaggttcatgtacgacagcttcgac

SEQ ID NO: 280547 - DNA, 99 bp, Homo sapiens
aatgccgctgccctgcgcttctcccagctgcaggccgccagcagaggacaagatcaatggcatcctcctgggcttccggatccgataccgggagctgct

SEQ ID NO: 280548 - DNA, 98 bp, Homo sapiens
ccaccatgtccgtggccttcgcgtctgcccggccaagaggcaaaggggaggttacgcagcaaaccatccagaagagacacctatggctgccgatgaag

SEQ ID NO: 280549 - DNA, 75 bp, Homo sapiens
agcagaaggagatggctttgcaaaagcgaaagggcgtgtggttgcgcctgaggaagatacttttctgtgttttgg

SEQ ID NO: 280550 - DNA, 98 bp, Homo sapiens
ctgcgccggcaggttatccaggtggtgctgaatggcatggaatcctaccaggaggtgacgtgagcaagaagaacccatcaggtgattgtcaggcctct

SEQ ID NO: 280551 - DNA, 98 bp, Homo sapiens
gacaccttatcacccacacccacacgtgttcaatacacctcccacctgtcctcaggcatatcaaagttcttcagtgccctactccacagccaaaacac

SEQ ID NO: 280552 - DNA, 75 bp, Homo sapiens
ttaagagatatgaagaagaattagagatcaatgacttcccacaggttttgcactgattgcaaaaataaagtcctc

SEQ ID NO: 280553 - DNA, 100 bp, Homo sapiens
ttggatccgcgggacaagaaaattcatgcggtatccgttacagcactgatgtgagtgtagatgaagtaaaagctttggcttctctgatgacatacaagtg

SEQ ID NO: 280554 - DNA, 74 bp, Homo sapiens
gaggtggaggtggaggcgaaagccaacggcgaggactgcctcaaccaggcccaggctgcaagcacaaaggaagt

SEQ ID NO: 280555 - DNA, 80 bp, Homo sapiens
ggcaggtctctccgcatcaaagtcatctccatgggcaacgccgaagtggggaaagaactgtggctgcaccatctgtcttc

SEQ ID NO: 280556 - DNA, 75 bp, Homo sapiens
ctgatagtctccagcgggcctggactgtgggctggtgtgtggaactggccaaggcagaggcttcctcaggagacc

SEQ ID NO: 280557 - DNA, 98 bp, Homo sapiens
gggaactgaaagatcagatagcagagctgaatcatgaggtgtcatggagaaactccagctgggcccagagattctgcagcgggaaaatccaaggctta

SEQ ID NO: 280558 - DNA, 99 bp, Homo sapiens
gaggaagccctttctcctcggcactgtattctttacctgcttcccaatcccactgatgaggatcagcccatggcttacgtgtatgaaatgggctcaagc

SEQ ID NO: 280559 - DNA, 51 bp, Homo sapiens
gtcgttgccttgtatttccagagaacagggaaaggaaaacctcttcagcgc

SEQ ID NO: 280560 - DNA, 50 bp, Homo sapiens
tgtgtacctctatgacacagaacgagagaatggatcttggagaatgtctg

SEQ ID NO: 280561 - DNA, 75 bp, Homo sapiens
ctgctgaaattcctgaataagcactacaatctggagaccacagtcccacaggaccagctttatccagggactcta

SEQ ID NO: 280562 - DNA, 75 bp, Homo sapiens
cgcttgatgagaaggacccacggcgtctgttcgaagttccagggtcacccccgagaggacaacaggcatctggaa

SEQ ID NO: 280563 - DNA, 50 bp, Homo sapiens
gtaaacagcttgaagactttttcaagcatacatctgtggatggatatact

SEQ ID NO: 280564 - DNA, 100 bp, Homo sapiens
gtccgaaatgccggtgcgaggagaccgcgggtttccaccccggcgggagctgtcaggttggctccgcgttttgagcaaaattttggactgtgaagcaagg

SEQ ID NO: 280565 - DNA, 98 bp, Homo sapiens
cgacatcaccaagctggaggtggacgccatcgtcaacgccggttattcagcttctcaaggctggaaaagcgaaggaagtttcctacaatgcactagcc

SEQ ID NO: 280566 - DNA, 100 bp, Homo sapiens
tgagcaccacccagacctaggccctgcagctgaggctgctgccagccaggacctgaaggagaagaaggagaaggtggaggagaaggcaagccggaaagag

SEQ ID NO: 280567 - DNA, 75 bp, Homo sapiens
ctatgaggagattttacatcagatcctgcttgatgaaactctgaaagaggaagacgctgttggtaaagagccgct

SEQ ID NO: 280568 - DNA, 100 bp, Homo sapiens
cggccaccgactactgtcagcagctgtgccagtgcagctgtctgcttcagaaagtgagggctccaggaatgaggagaatcttcaagaacttcctcgcact

SEQ ID NO: 280569 - DNA, 100 bp, Homo sapiens
aattagaaacaattcatttggaaaatgaaggcctgaaaaagaaacaagtaaaactggatgagcagctcatggaggcagtgctttcctcagtgctattttt

SEQ ID NO: 280570 - DNA, 100 bp, Homo sapiens
tggagacgcggcaggtggcctggagcaagaccgctgacaagatcgagggcttctagaagttgatgacgcctgagatgttttcagaaatcctctgtgacga

SEQ ID NO: 280571 - DNA, 75 bp, Homo sapiens
ataagccccagtgattttgcccagctgcaaaaatacatggaataaatgcagtttggttggtggagaattattgac

SEQ ID NO: 280572 - DNA, 100 bp, Homo sapiens
ccgggcactgttgctgctgcgggaggatgaatcaggcgccaaccgtgggctttgagcaggatgttggcagccgaaccacccaccatttcatgtaccctga

SEQ ID NO: 280573 - DNA, 100 bp, Homo sapiens
aggacacctggaagccgggaaatggaacaggagtacagctgtgtagtaaagatgccttctggtgaatttgcacgtatatgccgagatctcagccatattg

SEQ ID NO: 280574 - DNA, 75 bp, Homo sapiens
gccaggccgactacctcaacctggtgcagtgcgagacgctagagggtgaccccagggtttgaagaaaaggagggg

SEQ ID NO: 280575 - DNA, 97 bp, Homo sapiens
agactcccagctccgggagttgctgctgcctccaccagacaccaaaccaggtgtcagctgtgatgcatgtttaaaaggaaattttcgaggtcgcaga

SEQ ID NO: 280576 - DNA, 75 bp, Homo sapiens
gctatactcagccagtttgagaaagtctctacagaccttgggaccgacagacttgacaacggtgacagcactggg

SEQ ID NO: 280577 - DNA, 104 bp, Homo sapiens
gaaacttccttttaccatcccagaattggtgcaggcatccccatgccgaagttcagatggaatcctctacatggctcctcaagagttactgatctatgaaatgg

SEQ ID NO: 280578 - DNA, 88 bp, Homo sapiens
cgtcgacatgagtgatgtggaggaaaacaacttcgagggcagaagctattaagaatggcaaaggattgcatagcaagaaggaagtgcc

SEQ ID NO: 280579 - DNA, 75 bp, Homo sapiens
gctcatgatcggcgtgtttggatgtactttacagtggcggagcgagggctactgcacagctagcagagtcgtggc

SEQ ID NO: 280580 - DNA, 82 bp, Homo sapiens
cgagcagaactacggcgagcggataacgaaggaggcccaacttcattcaataaggagcctgacggatttatcccagacggta

SEQ ID NO: 280581 - DNA, 76 bp, Homo sapiens
agttgatccatccagatgaggatatatccctggcactactgcagtcttcagttaagcaacaagtagaagctattga

SEQ ID NO: 280582 - DNA, 50 bp, Homo sapiens
tctgtcctgaatgtggcttggttgtagaagacccttttgaggacttcttt

SEQ ID NO: 280583 - DNA, 98 bp, Homo sapiens
agatcatgatgtttaagaacatgacgccgtcacccttcctgcgattctacttagaagcatcagatggtgaaggagaaggagacacagaagtgatgcag

SEQ ID NO: 280584 - DNA, 101 bp, Homo sapiens
tctgatatttctgatcaagaggaagatgaagaaagtgaaggatgtccagtgtctattagtcagccaatcaaccctcaatgtcgaatctacccagaggaaat

SEQ ID NO: 280585 - DNA, 80 bp, Homo sapiens
ctcttcctcccttcgctcgcaccatgcggagcgtgctttggacaccatgaattttgatgttataaagggcaagccagtac

SEQ ID NO: 280586 - DNA, 83 bp, Homo sapiens
ctgctgtgggcgctgctggcgctctggctgtgctgcgcgacccccgcgcatgcactctcgagtggaccctgaggagctcttca

SEQ ID NO: 280587 - DNA, 80 bp, Homo sapiens
gcacagggtatcagccgaaccaagtactgggaggctatgtccaaactgggtcttcggcaggttacaggagttactagagt

SEQ ID NO: 280588 - DNA, 100 bp, Homo sapiens
ctggaacaacttcagtaacttcaaataatgagatcatcacttcaagtgaagaccatagcccatttgcttatgtggaccccttgcactgtaacatggccta

SEQ ID NO: 280589 - DNA, 80 bp, Homo sapiens
gcagccagtatactttctgtcagccagaaactggggttctttccagcccttgtcctcctaattggattatatatgagaag

SEQ ID NO: 280590 - DNA, 100 bp, Homo sapiens
ctggtttatcatcagggtggatgtgacaatatccatgtaaaagctcattttgactatgacccctcagatgacccttatgttccatgtcgagagttaggtc

SEQ ID NO: 280591 - DNA, 75 bp, Homo sapiens
cgcttcccgacgctgagggcagccccgtccagggaatttaaactttgggataatgagctgcagtatgtggaccaa

SEQ ID NO: 280592 - DNA, 98 bp, Homo sapiens
ggaagaaggcctccgtggaggccagattgaagaccccaccaacaactgaacgctttggtcaggctgctacaatggaaggaattggggcaattggtgga

SEQ ID NO: 280593 - DNA, 75 bp, Homo sapiens
cgactgtgcaggaagaaaacgagccagtgatttacaatagagcaagccttatgtttgatcatcggccaaggtcct

SEQ ID NO: 280594 - DNA, 100 bp, Homo sapiens
aggtgaatttccatgtcaacatagtcctgagtctttggatttgtggcccggaagcagggcagtgccacggataatgtgtgccacctgtttgcagagcatg

SEQ ID NO: 280595 - DNA, 83 bp, Homo sapiens
aacaagagtcctcaatccaacagcccagtgcttctgtctcgactgcactttgagaaggcacagcagtgaccaccacctcagcg

SEQ ID NO: 280596 - DNA, 100 bp, Homo sapiens
aggggctacgacccttgggatctgccctccgctcagctcgagcttccctcgtggccgacggaacaatgaaggaaaatgtttataggaggccttagctggg

SEQ ID NO: 280597 - DNA, 75 bp, Homo sapiens
gggacacaggttcccacgctggcgcccggcgaccgggtggggctgcgggttcaactcggtggccaccgccaggat

SEQ ID NO: 280598 - DNA, 50 bp, Homo sapiens
ggacgcggctgtgatatacgaagactttgccttcaaaagaaacagcattt

SEQ ID NO: 280599 - DNA, 90 bp, Homo sapiens
cacacggcagagcatggccaagtccagatatatggagctctacacgtatcctcctgcctagcgcaggttcctcaagccaggacctacgca

SEQ ID NO: 280600 - DNA, 101 bp, Homo sapiens
gttgcggcggcgctgagccagcggggccggcctccccatggccacccatggaccagtcggcattcacttcctcccttctgcggcccataaaagccctgggt

SEQ ID NO: 280601 - DNA, 98 bp, Homo sapiens
tgagaaaggcccacctgtgtcctggttgagggtctccagggttctttggggcccgagaaactggcaagatgtttacctggggccgagcagactatggt

SEQ ID NO: 280602 - DNA, 90 bp, Homo sapiens
gcatggagtctcccccgaccttcacctccagtttatgactgcctgcggccaggaggacagtttcctgtgcctggtccccgaggaagccaa

SEQ ID NO: 280603 - DNA, 98 bp, Homo sapiens
aggctccgaggcgaccactcctgtgatcgttgcggctggggctggaggggaggaagtgattacagtggcgagatcttgaacaactgctgcgtcatgga

SEQ ID NO: 280604 - DNA, 88 bp, Homo sapiens
cgattgcattggtaactggtggagaccaaattttgaacctcctcagcatctcaaagacaaattttggaattttattttctacaagttc

SEQ ID NO: 280605 - DNA, 50 bp, Homo sapiens
cttgccctgtctcctcgcagatgagggtatttgaagtataccatacaact

SEQ ID NO: 280606 - DNA, 97 bp, Homo sapiens
ccaccagcagcctcaacctcatggccgcagactgcaaacaggggagtttatcaaagctttgtatgagtccgatgagaactgtgaagtggatcccagc

SEQ ID NO: 280607 - DNA, 82 bp, Homo sapiens
ctgcaccatgagcgtcccggccttcatcgacatcagtgaagaagatcagggaacggcaggagcagctgatgggatatcggaa

SEQ ID NO: 280608 - DNA, 96 bp, Homo sapiens
gggtcttcctcctccgccgttgacaggtatcctgaagcagtttatgttgtttataccggcgatgttaatgtcaacggtcaacagatactagaaggt

SEQ ID NO: 280609 - DNA, 122 bp, Homo sapiens
gtgtgtgcctcatcccaactggccaaatcacacattagttctgcttgacaccgagggcctgggagatgtagagaaggccaaagaggtgctgaaaaaatatttggagtccaaggaggatgtgg

SEQ ID NO: 280610 - DNA, 90 bp, Homo sapiens
gaaagtgagcagtccagaaagcggcttatcgaacagagccgggagttcaagaagaacactccagaggagaaataaagtgtagtccttctg

SEQ ID NO: 280611 - DNA, 90 bp, Homo sapiens
ctgacgacgtgaaggagcagatttacaaactggccaagaagggccttactccttcacagatcgttccagaaagctgagtctgatctggat

SEQ ID NO: 280612 - DNA, 100 bp, Homo sapiens
agaggaagatgatgttgtgatgggagttcagtacaaggataaagagactggagatatcaaggaactcaacagaggcaattattatcccgactgcaaatcg

SEQ ID NO: 280613 - DNA, 90 bp, Homo sapiens
tgccttctgtgaggcaaagattaagactgtgaaaaggctggtgaaagttaaggtgtggcttacattctaaagcttttggatcagtatcgg

SEQ ID NO: 280614 - DNA, 87 bp, Homo sapiens
gcattcgtcttggtaaacttggtgtgaaatgacaatggatgctctgttggctcgattgaaacttctgaatccagatgaccttagaga

SEQ ID NO: 280615 - DNA, 100 bp, Homo sapiens
cttaatacagcaagaaagaccatcaagtttaccaaaggagaggacttgggtgaggagctgctgccacccgggctgggccaggacctgagatctcattgct

SEQ ID NO: 280616 - DNA, 49 bp, Homo sapiens
catgtacccggtggactcggtgaaggacccagatgatgtggtaccagtt

SEQ ID NO: 280617 - DNA, 98 bp, Homo sapiens
aactgtgtagcatggactcgaaagcaaatattgtacatggtatgaatttcagccctttatttccttctaattttggagatttttctcagaatatctct

SEQ ID NO: 280618 - DNA, 80 bp, Homo sapiens
cgggggactgcggggccagcctcagcttgcctgggaccagtggcagggaccccggaacctgaaggtgctgacaaagatga

SEQ ID NO: 280619 - DNA, 90 bp, Homo sapiens
gtttacaccaaaagctcccacttgaaagcacaccagcggacgcacacagaaactggcgatggaatatgagaggagccctctggaaagaaa

SEQ ID NO: 280620 - DNA, 83 bp, Homo sapiens
gaagcacagcaagaacatcacccagcgcggcaacgtcgccaagacctcgaggctgggaggcggcagaatgcagccagaggagg

SEQ ID NO: 280621 - DNA, 74 bp, Homo sapiens
tgggcaggtgtcttcctcgagaggcaggcaggggatcccggacgttctgaatgatgactgacgcgggtttgggt

SEQ ID NO: 280622 - DNA, 100 bp, Homo sapiens
ggggcgcaggaccggccgcagtgccacttcgacatcgagatcaaccgggagccggcctaatcacacggatgctacagagagatcccaagagaagggcttc

SEQ ID NO: 280623 - DNA, 101 bp, Homo sapiens
gccagatctgcgtttctcatcagcagactcactccggctgtggctattacgatatgtgtcacaaagatgtctacacggaactgccagggaatggactcagt

SEQ ID NO: 280624 - DNA, 75 bp, Homo sapiens
aaaatcttagctctctcaatctctgtctgaactggatcataaatgacagggcaattttgttgttacagactgcag

SEQ ID NO: 280625 - DNA, 100 bp, Homo sapiens
ttcggaacgattctgaatcatcgggtgttctctactccagagctccgacttatttctgtgggcagacattaacattcagatctcaggaaacaggctcgac

SEQ ID NO: 280626 - DNA, 101 bp, Homo sapiens
agaaggggaccacctgtctgacacctccacaacgtcgctggagctcgattcacggaatatgtgtgtcttctgatcaaaatcatttccgaggagaaattgag

SEQ ID NO: 280627 - DNA, 87 bp, Homo sapiens
cctcccagctacgagctgccccaggagaagatgtatggtcttatgcaaagggacttcctcacatgtttcagcagggtggtgtattct

SEQ ID NO: 280628 - DNA, 75 bp, Homo sapiens
ctagatgccatgatcatggatgggattcatttcggaatgaaaggcttcatcatgattaatccacttgagtataaa

SEQ ID NO: 280629 - DNA, 87 bp, Homo sapiens
cacagcacaagcaactgatttctcagaccaagaagaagcagtggaattatgatctagcccttaagtatttccagaaagctgctgaac

SEQ ID NO: 280630 - DNA, 82 bp, Homo sapiens
cttctccactttcgccagcccgtgccgcgagcgcggcctgcaggagatccagcacacggaagacatggagaacgagatcgac

SEQ ID NO: 280631 - DNA, 82 bp, Homo sapiens
ctaaagcagcgtgcgttcagccctgggttggagtcattcgttgcccagtttgcagccaagaatgtgcagagagacacatcat

SEQ ID NO: 280632 - DNA, 73 bp, Homo sapiens
agttctgttgtgaagaatgcatgtccaaatatacagttttgttctatcagggggtgaatctctacattaagaa

SEQ ID NO: 280633 - DNA, 90 bp, Homo sapiens
ggcggaacccgtgggcctgtggactgcagcctcggcggtcagcagaatatatacagccctgctctgggacacacctccattggatttaaa

SEQ ID NO: 280634 - DNA, 75 bp, Homo sapiens
ctcaccccgcggccgcaccttcccgccttctcagatttggtcgtattgggcgcctggtcaccagggctgctttta

SEQ ID NO: 280635 - DNA, 75 bp, Homo sapiens
agaaaccagtcccttggacagtctgcaccttctcttactgctggcctgaacggccggtttgtgggcgatgctgac

SEQ ID NO: 280636 - DNA, 75 bp, Homo sapiens
cgcgacggcggcgagcgtatcagcatgccactcgctgcccaggcattggcccagagtgagaggaagcgccatgag

SEQ ID NO: 280637 - DNA, 97 bp, Homo sapiens
gctgaaggaggaggacaaagagcccctcatcgagctcttcgtcaaggaaacatccatgtctgattagcatgaaggttatgaggagaacgtgatcaca

SEQ ID NO: 280638 - DNA, 88 bp, Homo sapiens
gagaaggatgtggactgcagtgctgcagtgccagggctcacacagtcgacaaaagaaaacgtttttcttgggagatgggcagaagctg

SEQ ID NO: 280639 - DNA, 51 bp, Homo sapiens
agaagaatctcaaccgatctgaggaggtggaaaagatgaataagaagatgg

SEQ ID NO: 280640 - DNA, 95 bp, Homo sapiens
cgtgagcccagccgaggtaccgctgaagaggaatcaattttggtaaaataccatgaagattttgaaaaaacaaaggggagaggctttactcccgt

SEQ ID NO: 280641 - DNA, 75 bp, Homo sapiens
actttcgacattggagtgcttcattaccacgagataggcaatacgaaagacgagctcatctgcgcctttgtttag

SEQ ID NO: 280642 - DNA, 90 bp, Homo sapiens
ttccttccttcttttctcattccccttagtggccattataggctaaagaacgtgccaatggaatggagcttgatgggcgtaggatcagag

SEQ ID NO: 280643 - DNA, 114 bp, Homo sapiens
aaactgtcggcttcaaagagaaaaggcaacatcctgtcacaggccatgctctggcaaaaacgagccttcacgtaaatgggtccagtcatgcctcccagtaagaagccagaaagc

SEQ ID NO: 280644 - DNA, 88 bp, Homo sapiens
tcttatatggtgtgattctgctgttcagcaggagaaaatttcagagctgcaaaattatcaggcatctgcagccctggctagaaagaag

SEQ ID NO: 280645 - DNA, 75 bp, Homo sapiens
tagaagttgagcactcggtcccaaaaaggcaaaggagccagcaccgctctttgaccttgccatgcttgccttaga

SEQ ID NO: 280646 - DNA, 83 bp, Homo sapiens
gaggattacctttccaagccaatgcccaagacattataaacaaaggacctaagtgtgaaataccccgaagacgtccccatcac

SEQ ID NO: 280647 - DNA, 95 bp, Homo sapiens
gtggtgcggagctcctgtttgacggtattaagaaacatcgagtcactttgcctggacaggaggaaccctggcaattgaaggaacagactaaaaat

SEQ ID NO: 280648 - DNA, 82 bp, Homo sapiens
cagaaccggtacctggatggcatgcagcagcagcagccacgacgaggcccccgtcctgaacgacaagcacctggacgtgccc

SEQ ID NO: 280649 - DNA, 101 bp, Homo sapiens
tttgaaacagatgcagaatccaaaggcagcgcaaaaaacagccaccgattttgctatgtctctgagctgcgagcttacagttgaacatgagtcttcttatg

SEQ ID NO: 280650 - DNA, 100 bp, Homo sapiens
cagaaatgactcggacgtttggcctcgaattacttgagtcagtcctcaatgattttccgcaggtctttttacaagcatcacgaaagagccaagttttatt

SEQ ID NO: 280651 - DNA, 75 bp, Homo sapiens
cacttcgtcatgttcttcgcgccctgactgtgccctgtccacggtgcctcctgcatgtcctgctgccctgagctg

SEQ ID NO: 280652 - DNA, 82 bp, Homo sapiens
ggcagaggtgatgtctgggagcccttccttgacagcccgggccgagaaggacacaactcagatgggaagttcatcgcccggg

SEQ ID NO: 280653 - DNA, 100 bp, Homo sapiens
caggctcggaggaaccggcagctctccacgcccctgcccgaagcctgacccgactgcctctctcagtgagtgccggtggtggtgtgcacattgagccccg

SEQ ID NO: 280654 - DNA, 75 bp, Homo sapiens
ctttgcgcagaagggttgccggctgctggctgtatgggagtttgtgtttggcgccctggcctcccacgactacat

SEQ ID NO: 280655 - DNA, 76 bp, Homo sapiens
ggacaggataaactgttacgcatatatgacttgaacaaacctgaagcaggagccggtgaaacctgaagaaggcaga

SEQ ID NO: 280656 - DNA, 75 bp, Homo sapiens
tcactgggaaatagaggataatcagctctgttagaacaaggcaataaactgcgtaatgccatggtgatttctgca

SEQ ID NO: 280657 - DNA, 83 bp, Homo sapiens
caaatattctcttctgttctacagacctctctcctcttcctgctcatggttacaacttcaacgactaccaccgccactttcac

SEQ ID NO: 280658 - DNA, 75 bp, Homo sapiens
attctttgtagcagacactgcaaatgaagctctcgaggctgctaagagactaactccaccgggggacggctacgt

SEQ ID NO: 280659 - DNA, 101 bp, Homo sapiens
attcacaacttagagctagtcagactttagaggcctccccatggccacccatggaccagtcggcattcacttcctcccttctgcggcccataaaagccctg

SEQ ID NO: 280660 - DNA, 100 bp, Homo sapiens
caattcgttttcaggagcatctccagacccctcttcagtgaatgaaaagaagaggagggagcgggaagaaaggcagaatattgtcctgtggagacagccg

SEQ ID NO: 280661 - DNA, 73 bp, Homo sapiens
aaacattctggcttttcttgttcctttcgtagcctgcattttccaggattcagagactgtttttgatattcag

SEQ ID NO: 280662 - DNA, 82 bp, Homo sapiens
accaggccgggaagcccatcgggcccatcttgacgattccaagaccacccccttgagcaagaatgccatcccctctgggtcc

SEQ ID NO: 280663 - DNA, 78 bp, Homo sapiens
tgcctcttcaccatgttcggaatgctgctgttcgctggtgggaagatggacacccgctccgggagccagtgttccgtc

SEQ ID NO: 280664 - DNA, 100 bp, Homo sapiens
cgcgcggctggtgtccgccccgcccgaaaggttgtttttcaccattcagaacattgcctgaagcaggtccaccatgccgttagtaacgaggaacatcgag

SEQ ID NO: 280665 - DNA, 98 bp, Homo sapiens
tttgatgcggagtgtcagaggactaaccaggttcaagaagaaaatgaagttctgcgtcagaaggtgggcccatctggggcagggaagagcacaatttt

SEQ ID NO: 280666 - DNA, 100 bp, Homo sapiens
agcaggagcagcttgaccgcatcgtgaaggaatctggaggaaagctgaccaggcggcttgtgaacagtcagttaattggccttggtcctcacagctccaa

SEQ ID NO: 280667 - DNA, 88 bp, Homo sapiens
aatcaaatggcatccggggatttctgctcacctggagaagggatggaaatacttcaacaagggcccttatattctcaagaccgaatcc

SEQ ID NO: 280668 - DNA, 51 bp, Homo sapiens
gaaggttctcaacttgaaacattgaggaagacacatggcagaaatactact

SEQ ID NO: 280669 - DNA, 75 bp, Homo sapiens
gcaagcaatgtggcaaaacgaaaaagctcaatgcctcagaaattcattggccctcgggaccaaggatcacgtcat

SEQ ID NO: 280670 - DNA, 90 bp, Homo sapiens
cgccgctgccccggctgcctcctccctgaggatctggagtgggagagcaggatgggggactgatcggtgccgaagagaaagtgattaaca

SEQ ID NO: 280671 - DNA, 73 bp, Homo sapiens
agctgtatggcagctaccctgaggatcattgaagagaacatccctgagggtacagctcaaggagagctctttc

SEQ ID NO: 280672 - DNA, 100 bp, Homo sapiens
gagcttctctccagagtagaaaggtggataagattgtggaccagctgcagcagttaatgcaggtgtatgacttggctgcccttcgggattattggagcta

SEQ ID NO: 280673 - DNA, 50 bp, Homo sapiens
ggaaaaagcagtaaagccagaggaagatgacgtccggttgtttgccttcg

SEQ ID NO: 280674 - DNA, 82 bp, Homo sapiens
gacctttgtttttacattctgtccggagtttgagacggcaaatggatacatcttgttttttcatattacatctacaagaggg

SEQ ID NO: 280675 - DNA, 101 bp, Homo sapiens
gattaatgtattccaccacctccgccagttaagaggaaaaagaacaccttccaccatgaccacctcagcaagttcccacttaaataaaggcatcaagcagg

SEQ ID NO: 280676 - DNA, 98 bp, Homo sapiens
ggcaactatgttatacagaagttttttgaggctgagggtaaaaagctgggattggtaggctgggtccagaacactgaccggggcacagtgcaaggaca

SEQ ID NO: 280677 - DNA, 96 bp, Homo sapiens
agctgagtggttgtgtggtcgcgtctcggaaaccggtagcgcttgcagcatggaattgaatgatctggcacgggaccctccagcacagtgttcagc

SEQ ID NO: 280678 - DNA, 100 bp, Homo sapiens
gagagaccgagcatcggggtataggaagagaggtccgaaacccaagcggcttctgctgcaggctgaattcggtcagaagagaatccatctgaatagccag

SEQ ID NO: 280679 - DNA, 75 bp, Homo sapiens
gcacacccttcctgggtgatggctcagaaatacagctcttcatgaagcaactctgcttggccttgcaggaagaga

SEQ ID NO: 280680 - DNA, 100 bp, Homo sapiens
tgtgtaacacagattctcctctgcgctatgtggacattgccatcccatgcaacaacaaggaaaccatcaagatctcattttacagctgggattctctggt

SEQ ID NO: 280681 - DNA, 75 bp, Homo sapiens
atcatcttatcagacgaaggcaaaatgtatgacttcccaagtaagaagcggaagaggagccgctggaaccaagac

SEQ ID NO: 280682 - DNA, 100 bp, Homo sapiens
cggaactgctgttccagaacaaccaggctttgtcaagactggtgaatcaccaggattttcaactgagaaatttaagaataattgaacctaacgaggtgac

SEQ ID NO: 280683 - DNA, 90 bp, Homo sapiens
acctgcaggtacttggatctccagtgggagctgccctctcgaaggcaggacagcggtggcggcagggcagagcggcttgggtaaatccac

SEQ ID NO: 280684 - DNA, 83 bp, Homo sapiens
gccgcgaggaggcgcgggaggtgttcgagaacgaccccgagacggtcggcagcttcactcccgagggtgccgcgagcccaggc

SEQ ID NO: 280685 - DNA, 124 bp, Homo sapiens
gagccagttggagttgcggcggcgggaacgattgggctgagcagaggacgacatgttgcttttcgtggagatggatactatgatgctgaatgtgcggaatctgtttgagcagcttgtgcgccgg

SEQ ID NO: 280686 - DNA, 100 bp, Homo sapiens
ctgtcattcctgctgctgccctagctggctacacagatacagtttatgtaacttgatggaagaaaatggaattactccaaaaagacaagtgctcaagcag

SEQ ID NO: 280687 - DNA, 48 bp, Homo sapiens
gttgatcactgatattccactcttgaccacctttcactcacctgagga

SEQ ID NO: 280688 - DNA, 100 bp, Homo sapiens
caggaggccaaatcaaccctaactctggctaccagtacaagagactagaagagtgtctacccacagggctgtagaaaatctctgttcttacaagatttct

SEQ ID NO: 280689 - DNA, 95 bp, Homo sapiens
cataaagcaattgagaattcaggcttacctatttctactccatgtaccaccataaacaaagtttgtgcttcaggaatgaaagccatcatgatggc

SEQ ID NO: 280690 - DNA, 98 bp, Homo sapiens
aaaccccgcctcttacagtcacgaggtagctacagcaagctgggtagcaggcagatccaaaggatatcatgaagtttccagggcctttggaaaaccag

SEQ ID NO: 280691 - DNA, 74 bp, Homo sapiens
acggcgctatgtacgccctcttcctcctggccagcctcctgggcgcgggtagaggggaagagattgaactttgc

SEQ ID NO: 280692 - DNA, 98 bp, Homo sapiens
ctcccttttacaaagccttgattgaatctggccttggcacagacttttctcctgatgttgggatagaatcacttgaattcctggatgaaatggagctg

SEQ ID NO: 280693 - DNA, 100 bp, Homo sapiens
gcatgggcagcgcccgcgccccgccgctgagccgtcgcggagccgcgcagccctcggagcacggcctccggtgtggctgtctctgatggtgtcatcaagg

SEQ ID NO: 280694 - DNA, 100 bp, Homo sapiens
aagtttctgagcatccctgcaatgaagagaacccagggaagttcctttttgaagtagttccaggagcagttggacatcatggagacaacttagtagagaa

SEQ ID NO: 280695 - DNA, 96 bp, Homo sapiens
ttcgacccaacagcatcgttcctctttccaagaagcagtcccagctatctgacttcatgtgaaagatggctaatgcagaagtgagtgtcccagtgg

SEQ ID NO: 280696 - DNA, 74 bp, Homo sapiens
caaagtggaagagcttactgtcacagcaactcctttgcaagatgccccgcccttcctttgaagaaaggaaacag

SEQ ID NO: 280697 - DNA, 100 bp, Homo sapiens
gggtcgaggcggacgcgcggctgcgtcagaaaggccttttccacctcatatccagctccctccagaaattcaagagtcccaggaagtcactctgacctgc

SEQ ID NO: 280698 - DNA, 74 bp, Homo sapiens
cttctgtatcttcatggtgcggctcatcttcgagaggcaaatgttctgaaaaagactctgcatgggaatggcct

SEQ ID NO: 280699 - DNA, 101 bp, Homo sapiens
acagctgaacgagactacctggatttaacagcgagtaattgcagcaggagagaagattcctttgagccaggaagaaataactctgcagggccatgccttcg

SEQ ID NO: 280700 - DNA, 94 bp, Homo sapiens
agctggtggatgctcttcagttcgtgtgtggagacaggggcttttatttcattatcctcaaaataagagacctgttcacatggatcgagcctgc

SEQ ID NO: 280701 - DNA, 75 bp, Homo sapiens
ttggcagctataacttacacaaaaaggcgacggcggattgacagaagtatgattggagagcccacaaactttgtg

SEQ ID NO: 280702 - DNA, 75 bp, Homo sapiens
caagtaaaactggctaatccttttcgaataggacaggcacatacagtgagggtgaccaagaatatggcccaggtg

SEQ ID NO: 280703 - DNA, 99 bp, Homo sapiens
gacatgagcagtttacacatctcacccaattcaggctttttatggaaattctcaatgactgttctgatgtagatgagatcaaattccaagaagatggtt

SEQ ID NO: 280704 - DNA, 75 bp, Homo sapiens
ggctggtgccgaccttgtcctgctggacaacttcaagccagaggtcatccacaactatggccatggaggctacgg

SEQ ID NO: 280705 - DNA, 100 bp, Homo sapiens
cctggccaaggaccccctggagggatcccgttgaagataccacattacacttaggctcctgttggccatgacagcttcttagacttgtttttaatgacct

SEQ ID NO: 280706 - DNA, 75 bp, Homo sapiens
tgtgtcctctgaaagatgaaccatggcctatacatccttgggaaccaggtaatgtgaggctacaggagatgatgg

SEQ ID NO: 280707 - DNA, 83 bp, Homo sapiens
gtgctactgtgcgctcgatccagcaccatggggaagcgggacaatcgggtgaaatcctaagtaatgcactgaagagaggagag

SEQ ID NO: 280708 - DNA, 98 bp, Homo sapiens
ggcagcagaagctaaagcaggccaaggccgtctacctggtgcggcaccgtgacacacggcagcgctttgccatcaagaagatcaacaaacagaacttg

SEQ ID NO: 280709 - DNA, 109 bp, Homo sapiens
aatgatcttttcaatgctgcgaaagctgccaaaagtgacatgcaggttatcaatactctggctgaccatcatcatcgtgggactgactttggtggaagtccttggttac

SEQ ID NO: 280710 - DNA, 50 bp, Homo sapiens
cgggtgggcgacctcttccagaagctgggaaatcgtgatgagaaccagag

SEQ ID NO: 280711 - DNA, 80 bp, Homo sapiens
tcgtttgatatttttggtcgcaccaccactccacagcagaccaaatatcatggtgacagagtacgtggagcacggacccc

SEQ ID NO: 280712 - DNA, 74 bp, Homo sapiens
ccagtttggttcttgaaagataaaaaatgcctgtcttaaaggctgaagcgtcacattataactctgacttaaat

SEQ ID NO: 280713 - DNA, 83 bp, Homo sapiens
ataaccctatcgcagccgggaggtttgccaataggattatcctgctgccatcatgtcttggtttgttgatcttgctggaaagg

SEQ ID NO: 280714 - DNA, 50 bp, Homo sapiens
acgttagctgaagatatccttcgaaagggtatgagtattatagaacaatt

SEQ ID NO: 280715 - DNA, 74 bp, Homo sapiens
ggttttcaggaaacttgcagcaaagccattcgggttggagtaattgagaatctggacgaggctagagaacagaa

SEQ ID NO: 280716 - DNA, 75 bp, Homo sapiens
ggccggacacgctctgcttcgacaaggacgagttcatgaagtctctgctcctgagtgtttggctttcaaaggaaa

SEQ ID NO: 280717 - DNA, 96 bp, Homo sapiens
ggcaatgggggcaggagctgttggagctttgcagctgacctacatctcgaagggagaaaactggttgtcctggatgtttgaaaagttggtcgttgt

SEQ ID NO: 280718 - DNA, 76 bp, Homo sapiens
gtgtcttcatccagaagggacagtttgtgccagctctccagagagaaaaggagcccgtaggtcatcttggagggtc

SEQ ID NO: 280719 - DNA, 90 bp, Homo sapiens
tttggggcagaatacagagatatggaatcagatgtgctggtggacggacagccatgtgaccgcgaggctgtggcggcctgccaggtgggc

SEQ ID NO: 280720 - DNA, 100 bp, Homo sapiens
acagcttctagtgttgctttggatcttgtggaaagtcagactgttcgggggtcttgtctggattttggttgcctcctccaatgttcctctacctctacta

SEQ ID NO: 280721 - DNA, 100 bp, Homo sapiens
ccagacatgatcaaagccatcaaccagggcaactatggctgtgcctgcagtttgtggtgaaggtgctggatgtggacttggtttgtgaggccctgcaggt

SEQ ID NO: 280722 - DNA, 100 bp, Homo sapiens
cttgaacagggctgacaacatttttccttttccgaaaatgatgcatcctgttgccagcagtaatccagctttctgtgggcctggcaagccttcctgcctc

SEQ ID NO: 280723 - DNA, 101 bp, Homo sapiens
ttgctttcagaatttcacccaggttctgacaggaactgcaagcacatgttgaccagataactgaaatggcagcagtaatgaggaaagccattgaaattgac

SEQ ID NO: 280724 - DNA, 100 bp, Homo sapiens
agtgaaaatgattggagtattaacattgggtcaacatatttcactggcacctattcacaagcttgaagaagctctgtatgaataccagccactgcagata

SEQ ID NO: 280725 - DNA, 75 bp, Homo sapiens
gtcctactacgcgtacgtggtggagctctgcgtgtgagaaatatggggagttgatgagcatcagaaaaaccagga

SEQ ID NO: 280726 - DNA, 75 bp, Homo sapiens
gtgcccacctcgtggggtgtgtgagggccgagtgaaatcgtgcatttgcgatttgcagatcaaggagaacccagg

SEQ ID NO: 280727 - DNA, 76 bp, Homo sapiens
ccatgaacttcaatcccatcatttccagaaaggacatcacagatatgaagagcattttaagaggtgcagcctctgg

SEQ ID NO: 280728 - DNA, 76 bp, Homo sapiens
cagccttgctgactatttcaagaagaatgaaatatgactgaggactctcagagaaactttcgttcagtatattatg

SEQ ID NO: 280729 - DNA, 100 bp, Homo sapiens
cctcctccttggtcgccgcgtccttggctggcgtgctaagtcctatcagccatggaaacaccattgctctcttcttccggtcactgttgccaaactatac

SEQ ID NO: 280730 - DNA, 75 bp, Homo sapiens
cgcaatgaggcgggcagcactgcgcaatgatgggacagaatttggaggatcaatttatcagaaagtttgtgaaga

SEQ ID NO: 280731 - DNA, 74 bp, Homo sapiens
agagtccgactcagacagcgacggtgtgggcaagagcagtttactgttgcgttttgcagacaacactttctcag

SEQ ID NO: 280732 - DNA, 100 bp, Homo sapiens
aggcggccaacgagaggaacgtgtccacgcgccagggcaacggacagccaagacgtagatccatccaagacttgactgtaactggaacagaacctggtca

SEQ ID NO: 280733 - DNA, 82 bp, Homo sapiens
cgtaaagattccagagaagcctgtgaacaaatgagaaagatcagtctaaagaaaaggagaagaaagtgaaaaaaacaattcc

SEQ ID NO: 280734 - DNA, 82 bp, Homo sapiens
aagcaattgagcaggctgatctactgcaggagccctgtatgatgagattcgtcagtttcgcaaggcctgtggggaggctcat

SEQ ID NO: 280735 - DNA, 50 bp, Homo sapiens
aattcccaagccaaagctttccaggcattaccacaggagtcttggttcga

SEQ ID NO: 280736 - DNA, 96 bp, Homo sapiens
gggagagtggcgggccgctgaataagcttccaaaatgatgggaaaggggctgtttgccacacagctcatccggaagggggagaccatcttcgtaga

SEQ ID NO: 280737 - DNA, 97 bp, Homo sapiens
ctacaatgaatgggatattcaggttcatgttgcaaatcacatgattggaccaccaccctacggtcacgaccacgagatggaatactgtgcagacttg

SEQ ID NO: 280738 - DNA, 100 bp, Homo sapiens
aagacctgttgcggaaggttcgcgccaaggagaccaggaagcgagcactcagcagctccccccacccgctgcctgcggttttgtttctgttaaaacgtca

SEQ ID NO: 280739 - DNA, 75 bp, Homo sapiens
ggagaggcagattggtatggccgaggctgaggttgggttcaatatacggagagtgccctgtgccaaagccacgag

SEQ ID NO: 280740 - DNA, 82 bp, Homo sapiens
gcggattcgccgaggcaccgaggcactcagaggaggaaatctggcattttttaaagtttgcgccccacaaagaggaaatatt

SEQ ID NO: 280741 - DNA, 102 bp, Homo sapiens
ccggacatctgctttatatttctctcagaccattcccatcagtgagcattacagtgttcagactgcatcacagtgcttccgatacaagcgacaaaaatcgag

SEQ ID NO: 280742 - DNA, 101 bp, Homo sapiens
gaacagaaaaattattatgtctgtgttcccttgggactcattggaaattgtacagtgacatcttctgggatttagtctgtggttggatttcatcccttact

SEQ ID NO: 280743 - DNA, 97 bp, Homo sapiens
tccagtggaagaccatctacatctcccacaggaagtgtcacacagcagtcaagtatgtcccaaacgtctcatatgagctatttgcattcatcagtca

SEQ ID NO: 280744 - DNA, 90 bp, Homo sapiens
cagagaaaggacgagcagcaagtcagggagcttaagttactcatccttcaaaactcagttcagagatcagctcctccaagaaggcttctg

SEQ ID NO: 280745 - DNA, 75 bp, Homo sapiens
ttgtgttgtgtgtggaaatggcgaactcggcaaatacaaacaccgtggaattgaatgatctggcacgggaccctc

SEQ ID NO: 280746 - DNA, 115 bp, Homo sapiens
cattatcctctgtttctctgctgcaccgacctcgacgtcttgcctgtgtcccacttgttcgcggcctataggatgtacagttacccagcacgtgtacctcctcctcctcctattg

SEQ ID NO: 280747 - DNA, 96 bp, Homo sapiens
tttccttgagcaaatgaaaaagtttgtagaatggctcaaaaatgctgaagaaggaatcggatataacatcatccgggtacccatggccagctgtga

SEQ ID NO: 280748 - DNA, 100 bp, Homo sapiens
ttccaagttcaggagaactcgaccgctgaatgccaagggaacagaagcacccgcagtagtgacagaggaggaggatgatgatgaagagactgctcctccc

SEQ ID NO: 280749 - DNA, 100 bp, Homo sapiens
ctgtgctcgtgagtgcatggggtataagataagccagaccccccagctggcacaccttgtgcctctgacattcggagctcctcactgaccctgtcctggt

SEQ ID NO: 280750 - DNA, 101 bp, Homo sapiens
ccaaagtgttgggattacaggcctgagccaccgtgcccggcagtgcttggtcttattaaacgctttatgaaaggtccactggctattctgaggtgatagtt

SEQ ID NO: 280751 - DNA, 100 bp, Homo sapiens
atttctgctggccagagacgtcgcgtccctggctgggcattcagtcacccccaggaaaggagaggaagccagatcgctgagggtccggtctccagtttgc

SEQ ID NO: 280752 - DNA, 75 bp, Homo sapiens
aagaggagattgagactttaaatgaaatgtctcacaagctaggtgatccaggttgcaaaacttcctcaagttgtt

SEQ ID NO: 280753 - DNA, 75 bp, Homo sapiens
cactgactcatgggccctggcggtggacgagcaggaagctgcggctgagtcgaacggtgtgctgctgaggactgt

SEQ ID NO: 280754 - DNA, 100 bp, Homo sapiens
gaccacgaacttcaaaggggaaagcaaggccaaagacagggagaagcctcccgagcacaacaaggagaggtgatgaggttggcatgtcgtttggatccca

SEQ ID NO: 280755 - DNA, 74 bp, Homo sapiens
cctgggccactttgagaacctgcagaccgctcgggcatggagaattccgcttcggtggagcagctccaggagac

SEQ ID NO: 280756 - DNA, 83 bp, Homo sapiens
ccctgatcatcctgctgggcttcgtccagatcgggaaggatgatatcatcaagttgaatcgaaaggaagggaagaagcagaat

SEQ ID NO: 280757 - DNA, 74 bp, Homo sapiens
agactatggggcctttatcaaaatcccaggctgtcggaagcaagagtgatcagcagctggactgtgccttggac

SEQ ID NO: 280758 - DNA, 95 bp, Homo sapiens
cccagggaaggcatttccagcccgcccacccaggttaatttggagtggcccctggagtcagtttcctacaccatccgaggccccacccagcacga

SEQ ID NO: 280759 - DNA, 50 bp, Homo sapiens
aagaagtactccagggaaacctcccagagttgcatgctgagaatttgaaa

SEQ ID NO: 280760 - DNA, 98 bp, Homo sapiens
tgacagtctccaaattcgcctccatctgtaccatggtcaaccaaatatgctgcaagtcttccagccctgctgcttgccagacacacagaaggcaaaat

SEQ ID NO: 280761 - DNA, 82 bp, Homo sapiens
atcacaagttgcatgttgactttaggagggctgaacatgtccgagtttgtctgtaacctgtcagcaaggccttatgtgtacg

SEQ ID NO: 280762 - DNA, 100 bp, Homo sapiens
ctcgaagaacagctgtggaaagaagttgcaaaacactgggtggttccttaaaaacagttattgctcaagatgaaaacctcccagaagatgttgtgagaga

SEQ ID NO: 280763 - DNA, 83 bp, Homo sapiens
ccgagggacaccgcagtatgaggcagaggaagcggggagaggtggtgagagatgacccctgttgaggatttcattggtgtctg

SEQ ID NO: 280764 - DNA, 129 bp, Homo sapiens
aaacaatcgcttcaatgatgggaaggtggatcccgccgggaggtactttgctgcacttttcaggattagaagaggctgtgtatagaaacatacaagcttgcaaggagcttgcccaaaccactcgtacag

SEQ ID NO: 280765 - DNA, 100 bp, Homo sapiens
ccttaaagacacagctgaaatcctggaaaccatgcctttcccctaaaagtggtgcagctaaatcaagtccagcagctaaaccaggatccacaccttctcg

SEQ ID NO: 280766 - DNA, 100 bp, Homo sapiens
ccatgatggcaaattctttgccagaatgaccctggatacgcttagcatctatgaaactcctcttttggcatctaccagaagggatcaagacaatatgcaa

SEQ ID NO: 280767 - DNA, 82 bp, Homo sapiens
gtcatggtcccagaaacgtcactatcaagaaggtctgtcgagttgcttatgaaattatgcaaacactacatcctgatgcctc

SEQ ID NO: 280768 - DNA, 51 bp, Homo sapiens
gctggtactagttctctggctgttcaagttctgctgagacacaacttcccc

SEQ ID NO: 280769 - DNA, 90 bp, Homo sapiens
cctgcgtcctttttcgtttttcggatgatgccttcaatactacctttatttccaccatagatattgaaatggattccaggcgtgtgcctc

SEQ ID NO: 280770 - DNA, 50 bp, Homo sapiens
gcccaatatagctttgacaagccgacttcgcagaactactgctccctgga

SEQ ID NO: 280771 - DNA, 98 bp, Homo sapiens
cgagacgatggcggagggagataatcgcagcaccaacctgctggttgaatcctgttccctgaaaaagacgtattcggatcctaacccccaggacctgt

SEQ ID NO: 280772 - DNA, 100 bp, Homo sapiens
cctcccaagtagctgagattatagaattccttgtgtggatatcagatccggatggaatctcgagcttgtgaatctaccaggttactctattgtacaacag

SEQ ID NO: 280773 - DNA, 75 bp, Homo sapiens
caggaccctaacgacaggcgcctccggcccatttacgacaagctgtaacccttcacgtgccttaccttcactcaa

SEQ ID NO: 280774 - DNA, 90 bp, Homo sapiens
atggttgttattggtgcaggagtaataggtgtagaattgctcattcttggaatcccagaacaggccttaagtcttctccacatggccatc

SEQ ID NO: 280775 - DNA, 100 bp, Homo sapiens
ttcatgccctggttactgccaatacaatggagaacgtcaaaaaggcagtggaacagatttctaacgacccaagtccaggatacaacattgaacagatggc

SEQ ID NO: 280776 - DNA, 88 bp, Homo sapiens
gaaattaagattctaagcataggcggaggtgcagaccttagctggatctccaaaatacaagtgaatcacccggcagttctgaggcgtg

SEQ ID NO: 280777 - DNA, 101 bp, Homo sapiens
ctgacatcacattgatacatgctggaggtctggctcagacacagataatgtacaagtggatagagcccaaaatctgccgggaggatctcacagatgctatt

SEQ ID NO: 280778 - DNA, 100 bp, Homo sapiens
cctgcggcgcctgggcgctctgaggctgttgagctaatggaccgaactgaaatgccatgccaggcattagtgaggatgctagccaagaaacctggatgga

SEQ ID NO: 280779 - DNA, 74 bp, Homo sapiens
agccatgcagactccacctttacaacagcctcaccaggaacaagcttcttggacacttaatgattgttggcaag

SEQ ID NO: 280780 - DNA, 100 bp, Homo sapiens
ctaccacaataacccggaagttgctcttctccttactaaagctccccagaggggttttgaagtggcctgatggaaagatgtattctggcatgttcaggaa

SEQ ID NO: 280781 - DNA, 100 bp, Homo sapiens
ctcagagctcagacacagagcagcagtcccctacaaggtatgatgtggaactcttccagcgcatagaacacttaattgggaagaaactaccaggttttcc

SEQ ID NO: 280782 - DNA, 50 bp, Homo sapiens
cttccaaagttcaggagcttcagaacttgaaaatgtctgatgaattttcg

SEQ ID NO: 280783 - DNA, 98 bp, Homo sapiens
ttctgggtgatactgaaggggtcgtcactgtactggtatagcaatcaaatgacaacgactgaaagacctttcattcagaagctgtttcgtcctgtggc

SEQ ID NO: 280784 - DNA, 75 bp, Homo sapiens
gatgaatataatccattctcggattctagaacagaatggaagttggatacactttgtgacttgtacgagacactg

SEQ ID NO: 280785 - DNA, 99 bp, Homo sapiens
agctgacagccctgtaggggtgagggagatggaaatctggctgagtgtgaaagattccgacaccatagctgagttacaggagctccagccttcggcaaa

SEQ ID NO: 280786 - DNA, 74 bp, Homo sapiens
agaaacagaaacgattgtggaaacaggcattgaatgccccagaggagcccgaaacctcccaggcttggtgcagg

SEQ ID NO: 280787 - DNA, 75 bp, Homo sapiens
atgattcagattttgaagctaaagttaagcaggtgctgggtaggccaggtttcagcatcgcagacaagaagcgca

SEQ ID NO: 280788 - DNA, 50 bp, Homo sapiens
gcgctgaagaggattcagaaaactgacatcaatttgccctatcttacaat

SEQ ID NO: 280789 - DNA, 116 bp, Homo sapiens
caacaatgaattggagaccattccaaatctgggaccagtctcggcaaatattacacttctctcctttgcatttgcccagtataacatggatcagttcacgcctgtgaagatagaag

SEQ ID NO: 280790 - DNA, 100 bp, Homo sapiens
aaaaactggagagcttcatcaaaaatagtgatagctttgataaatacttggttcactgtcttcaatcagaacttaataattacatgccagcctttctaga

SEQ ID NO: 280791 - DNA, 75 bp, Homo sapiens
cctcgcgacgcgcccggcccggagcccccagcgcagcggccgcggacctgctgaagttcccatgatgtcacccaa

SEQ ID NO: 280792 - DNA, 100 bp, Homo sapiens
acccacgagatcatggggcccaagaaaaagcacctggactctccagggttccttgaaaagaaaacaggtagttaacctatctcctgccaacagcaagcga

SEQ ID NO: 280793 - DNA, 95 bp, Homo sapiens
attttcagttaaagcggaaacccaagagcgccacgctgcgggcggagctgctgcagaagtgcagaagaattgtttttatgggttccacgaaaatt

SEQ ID NO: 280794 - DNA, 100 bp, Homo sapiens
gtcccctctgaaactggagcacttggctcttatctactttggaggcctgtctggctcctttctctacacaggaggttatcaatactctggctgaccatca

SEQ ID NO: 280795 - DNA, 90 bp, Homo sapiens
caacaagtttgcctccttcatagacaagccatgtgaagatgtgcttgcttcccctttgccttctgccatgattctaagtttcctgaggcc

SEQ ID NO: 280796 - DNA, 80 bp, Homo sapiens
tccttgtgaaacctcctagtagaaaaagttcttgggacaaacttcatttggtagttggcaaaaaaggagaaagccactaa

SEQ ID NO: 280797 - DNA, 78 bp, Homo sapiens
acagacgcacgggacaggagagcctgggcaagactggagaggcttggccttcgtgcctctgcagatctggtccaaagt

SEQ ID NO: 280798 - DNA, 95 bp, Homo sapiens
ccaagaccgagacctacgtggaggcaaacatggggctgaaccccagctcgctgtcgcctggttgggcccggaaatgggacgtcgcgctttctcag

SEQ ID NO: 280799 - DNA, 101 bp, Homo sapiens
cagcaatcagctggcctggtttgatactgacctgtaaatcatcctttaggcagacctgttatcctaaactaggtgagtcagcttttggtacatgtgatgat

SEQ ID NO: 280800 - DNA, 100 bp, Homo sapiens
ctttagtgaaatgggctaataatgctggcaaagtggaaaaatgtgcggtttatgctaaaactatcgatgggcaacagactattattgcatgtattgaaag

SEQ ID NO: 280801 - DNA, 100 bp, Homo sapiens
ggcgacaagattgaaagcaaattattagctaagaaagcagaggttaatacaatccctggctttgatggagtagtcaagcaaagagctcctgggaaggtgc

SEQ ID NO: 280802 - DNA, 50 bp, Homo sapiens
aaacagtttgaagctgaggattttagcatcctggccagaacaagccaagg

SEQ ID NO: 280803 - DNA, 80 bp, Homo sapiens
cctaccatccaaatcaaacaggagtcaggagttaaacatagatgtagctgatgtggagagcttgctggtgcagtgcatat

SEQ ID NO: 280804 - DNA, 97 bp, Homo sapiens
gagagaaggaaattagtgatgatgaggcagaggtggaggagacactgaagcgactgcagagccagaagggagtgcagggaatcatcgtcgtgaacac

SEQ ID NO: 280805 - DNA, 98 bp, Homo sapiens
gaggcgtcccccaccgtgccgctgcagctcgggcagagccgccaagctttggggtgaatctggattgggaaagtcgacattaatcaactcattattcc

SEQ ID NO: 280806 - DNA, 87 bp, Homo sapiens
aggatctcgggctcggaacgagactgcacgcctacaacacagcagtcccctcaggatgagcaggaaaagctcttggatgaagccata

SEQ ID NO: 280807 - DNA, 75 bp, Homo sapiens
cactacagttcatcaacatcaactacgtccctctgaaggtggcccgctgcaagcagctgatctgtgaccccagct

SEQ ID NO: 280808 - DNA, 100 bp, Homo sapiens
acaagatgcagatgaatacaaaccagctgacctcaatacatgctgatctctgccagatgtctttggtggacttgggaaagaggttgctagaagcagcaag

SEQ ID NO: 280809 - DNA, 100 bp, Homo sapiens
cgggccaggacctggactggatagatgcccagggtgccacactggtcctggctactgcatgggaattggacccctcatctcccacggcagattcctgtgg

SEQ ID NO: 280810 - DNA, 50 bp, Homo sapiens
ctgtactaggactgggaacgggcatctccttggaaacaatgccatctttg

SEQ ID NO: 280811 - DNA, 75 bp, Homo sapiens
tggaccctcgtgagcgacccggacaccgacgcgctcatctgctggagcccgtgtactaatggtcacttgatgtgc

SEQ ID NO: 280812 - DNA, 98 bp, Homo sapiens
tgggtcagaacccaacagaagctgaattgcaggatatgatcaatgaagtggatgctgatgctcctattcagacatatgtgcttggtgctaataaccag

SEQ ID NO: 280813 - DNA, 90 bp, Homo sapiens
aagcgactgagtccgcgatggagggtccccagccccaccccagccccaaaggaggctgttcgagagggacgtcctccggagccaacccca

SEQ ID NO: 280814 - DNA, 82 bp, Homo sapiens
tagatgggcaaagatggattgaagacaaccttgatttcagtgtggggagaaagggacatgctgctgctgatatacaacaggc

SEQ ID NO: 280815 - DNA, 95 bp, Homo sapiens
gacacatccgcacccacacgggcgagaagccctacgagtgcaacatctgcaaggtccgcttcaccaggtggatgaaagccaaactggagaacccg

SEQ ID NO: 280816 - DNA, 75 bp, Homo sapiens
ctcacaagcaaaagccttggagaggaggagaatgtatcaagaggtctgcggggtttccgagaggctcgccgggat

SEQ ID NO: 280817 - DNA, 99 bp, Homo sapiens
gccgaagtatacaatgtaccattggactctcaggtacaaagtgaaatcacttcagcaaacacagaagatgatgatgacgacgatgatgaggatgatgat

SEQ ID NO: 280818 - DNA, 83 bp, Homo sapiens
cagtatgggaaagatctaccttctggaagctactactacgtggtgcttggaaagacatctgaatgggactccgagtgccttac

SEQ ID NO: 280819 - DNA, 75 bp, Homo sapiens
gggcgtccgagtcaacaaccgcttcgagctggtgaggaaaatagcagctgaatactatgacaacctccctcacta

SEQ ID NO: 280820 - DNA, 74 bp, Homo sapiens
aaagctgccctgagacggtgtcccgccgaaaggttgcaacaaggacagtgtcagagcaggctgtaaaaaatgtg

SEQ ID NO: 280821 - DNA, 89 bp, Homo sapiens
gctgaagcaagcacgaaaaatgctaacaacagcttcacggatatgacagcgcgtgatctgctacagcagagatacacccttccaaatgg

SEQ ID NO: 280822 - DNA, 75 bp, Homo sapiens
gagggaggagccccccgacccaggtggccagacaagcacaaacctctcaggagccctaccacgacaaggccagag

SEQ ID NO: 280823 - DNA, 100 bp, Homo sapiens
gaagcagtgaaggagtgcagaggcatcacctgaaaggtttgcctgcaatgagatttcattctctacatttaaaggacatcctttctgagctgctgtgaat

SEQ ID NO: 280824 - DNA, 50 bp, Homo sapiens
gcagaacgccatcaaccagctaacaaagaactttgagtctggcaaggctt

SEQ ID NO: 280825 - DNA, 90 bp, Homo sapiens
gctggccaaagcctgcccagacggctcacctgtgcgggatggaacaaaaggcctgtttaaagaagaaaacccgtatgctagatttgaaaa

SEQ ID NO: 280826 - DNA, 96 bp, Homo sapiens
tccccgcaggcggcgtgggcatgggcatgtacaacaccgacgagtcagatgtccaatttgatgaatcaagcgagactcaaagtcctcagagcaaga

SEQ ID NO: 280827 - DNA, 75 bp, Homo sapiens
gcttttggatcgtatccacaatcctgtttctgatgaagaattgaaaagaagagtagctgaggagctggcattgga

SEQ ID NO: 280828 - DNA, 100 bp, Homo sapiens
acgttcaggatattttgggagaacttagagaaaaggcggaaatgagaaagcagagggagttctatcacaaattgggcatggaggtgccgggagacatcaa

SEQ ID NO: 280829 - DNA, 100 bp, Homo sapiens
ctgcaagaaacatggatttgatccacaaagtcccctttgtgttcacataatgctgtcaggaactgtgaccaaggaggactcagagagagtaatgataatt

SEQ ID NO: 280830 - DNA, 100 bp, Homo sapiens
attctccagggaaaggatgacatatttttggacctgaaacagaaattctggaacacctatatgcagaagatggctgtgccacccacgtatgccgatcttg

SEQ ID NO: 280831 - DNA, 75 bp, Homo sapiens
cccaagaccttcttcatactgcatggttggtttcagtgctgatgaaacttgggactctgcaatagatacatggag

SEQ ID NO: 280832 - DNA, 100 bp, Homo sapiens
ggcctcctgtgatgggccttcgcactcccagatggtggatgcttccaaaagcatcgaagctgtccatgaggacatccgcgtgctctctgaggacgccatc

SEQ ID NO: 280833 - DNA, 100 bp, Homo sapiens
tgtaatgttggtgtatccatggggcttacaaggaaattttatgctttggatccttcattcccaaggatgaatttgttaactcggactacagaagggaaga

SEQ ID NO: 280834 - DNA, 98 bp, Homo sapiens
tgaaagaaggagaagcccaatatgctgtggtccactgtacaggatacatcaaggcctggccaccagcagtgccagcaccagcgccaaccccccagcag

SEQ ID NO: 280835 - DNA, 80 bp, Homo sapiens
ggcagctagcgcgaccctgagccggcgcccgtggtccggccatggacgacctcggtatttcaggacagccaggagggggc

SEQ ID NO: 280836 - DNA, 98 bp, Homo sapiens
gacggtgcaggaggcccgggcgctcctccgctgtcgccgcgctgtagtttatgccaacgtgacttcattcatacagatgaaccaaggatcgggatagc

SEQ ID NO: 280837 - DNA, 100 bp, Homo sapiens
agcttggaggagggtcactatgtcattgggccaaagatagagattccggtacattatgcagggccttaaagcggctgacaatgaccccacagctccacca

SEQ ID NO: 280838 - DNA, 82 bp, Homo sapiens
cagctccccacgctgcatcatgagtgcagccggctgcaggagcagctagcgcaggtcatgtttccggatgcttcggaagtgg

SEQ ID NO: 280839 - DNA, 97 bp, Homo sapiens
tcagtggagagaaccaaccagaacatcggatggcttgtgctccctttacgaggcagcattatgtctctttgaagagaaagaatcttcaagagggaga

SEQ ID NO: 280840 - DNA, 83 bp, Homo sapiens
gcagagccgagtgcagaagatctgggtgcccgtggaccacaggccctcgttgcccagatatggatttgaagactatggtacag

SEQ ID NO: 280841 - DNA, 100 bp, Homo sapiens
tgcgctgttcgtgctgctgggattcgcgctgctgggcacccacggagcctccggggctggtgtttcagtcacctccagtaacacgggcgtgccagatatc

SEQ ID NO: 280842 - DNA, 98 bp, Homo sapiens
atggccacagtgtcccaccatcaaagagatcagagaccagggctcctgtggctcctgctgggttgacttccccagaaatctggccaagtctgtaactg

SEQ ID NO: 280843 - DNA, 100 bp, Homo sapiens
tggaattcacacaagaaaatcccttttgccgatttaaggtgatctgcaactctttcaccatctgtaatgcggagatgcaggaagttggtgttggcctata

SEQ ID NO: 280844 - DNA, 100 bp, Homo sapiens
gatgcaggaggtggtggcaaacctacagggtgtggtaactgcagccacaagtctgatcaccactttagcacagaagaacccagaagagtttaaaacctcc

SEQ ID NO: 280845 - DNA, 98 bp, Homo sapiens
ccttgactctgagctagaaagaccctctgttaaaggtgatgctagcgaggaggatcacccccaagtctgtgccaagtgctgcgcacaattcactgacc

SEQ ID NO: 280846 - DNA, 100 bp, Homo sapiens
actcttctgttaacagggtcctggcagttatccaagcattaggtgaacatcttaaattaagacaacaagttattgccactgctacggtatatttcaagag

SEQ ID NO: 280847 - DNA, 111 bp, Homo sapiens
acccaggtgaccaaccccaaggaggacgagggccggttgccgggcgcgggcgagaaagctcctctggtgcaagtgtggtagctattgacaacaaaatcgagcaagctatgg

SEQ ID NO: 280848 - DNA, 99 bp, Homo sapiens
ggaaacttgtctctagtgagaactttgacgattacatgaaagctctggcttcgccgacacgaggtgaccatctgcaattacgaagcatctgccaaccca

SEQ ID NO: 280849 - DNA, 83 bp, Homo sapiens
gaagccttttccgttgccggtgccggcctagcgtcctggaattacttcaatcaatatgaagtgaaggctcctgttccttctgc

SEQ ID NO: 280850 - DNA, 90 bp, Homo sapiens
ctggtttcgtggcctgaccaaggacctccaagggaagaaggagaaagggccaacccctgaagaagcaatacagaaactgaaggagacaga

SEQ ID NO: 280851 - DNA, 100 bp, Homo sapiens
cctggaagccacacttgaaggccttgcacacctgcagccctaccaattacgatatcagaagtgcttggtagccaggccgccttctcagaaagttcgacca

SEQ ID NO: 280852 - DNA, 102 bp, Homo sapiens
cggtccttccgaggaagctaaggccgcgttggggtgagaccctcacttcatccggtacggacattgctgcaggagaagaggttgccatcaagcttgaatgtg

SEQ ID NO: 280853 - DNA, 100 bp, Homo sapiens
ctggacagccagtggcgccagatagaaaacggcgagagtgggcgagaacgtccactgcgggccggcgaaagctgatgatatcatcaagttgaatcgaaag

SEQ ID NO: 280854 - DNA, 83 bp, Homo sapiens
caactaccttgagtacaacgctgacctcttccaggccatcacagagcaggtgttgccaatgctgcggttcgtgcagaagcggg

SEQ ID NO: 280855 - DNA, 75 bp, Homo sapiens
tgcccccgaagtgaaagagatggcctggtggaaagcctggggttaatgcctcttggaagtcaggagtcttcagac

SEQ ID NO: 280856 - DNA, 74 bp, Homo sapiens
aaaaagtggtgcagtttttgatgaaattgtagagaactgatgaagagactcggcacagccttgagtgcatccag

SEQ ID NO: 280857 - DNA, 83 bp, Homo sapiens
tagagaagaaagacagctttgtggaagagagtactattaatcccgtagatgcaatatatcaacctagtcctttggaacctgtg

SEQ ID NO: 280858 - DNA, 83 bp, Homo sapiens
taatacagaactgccccatcgatgtgcggcgtccgctgtataagacacctagctgttgggcagaagagggtgcagaaaagagg

SEQ ID NO: 280859 - DNA, 100 bp, Homo sapiens
ggaagatggcgaaggtctcagagctttacgatgtcacttgggaagtgctacagctagaatgaagcacatcaacctatcatttgcagcgtgtggatttctg

SEQ ID NO: 280860 - DNA, 100 bp, Homo sapiens
atgacgagggcctggagtgtgtgcccactgaggagtccaacatcaccatgcaggtgtacaagggagaagaagccacattccaaatctcaggcctccagac

SEQ ID NO: 280861 - DNA, 100 bp, Homo sapiens
ggaagccttctggctgttggttgctgtgtgtgagcggatgctgcccgattacttcaaccaccgagtgatcgttctaggcctgattcttcactacctgaga

SEQ ID NO: 280862 - DNA, 101 bp, Homo sapiens
gcaccgcgcccatggcagagccagaccctgtaattctgcccccattgagcccctacttcaagtactccgtcatgatcaacaaggccacgccctacaactac

SEQ ID NO: 280863 - DNA, 98 bp, Homo sapiens
gctcggcctcggggctccgcagggggcacccggcagggtgcagtacatgttaatgacaggattgtaccacagccacctcttcaaaaattgtctgcaga

SEQ ID NO: 280864 - DNA, 83 bp, Homo sapiens
ccctccccctcggcctcgcggcgacggcggcggtggcggcttggacgactcggagagccggacctgaaggagaagaaggagaa

SEQ ID NO: 280865 - DNA, 73 bp, Homo sapiens
cgggccagccccgccgccctcgcaacctggcagccgccgccgtggaaggaggctactcacagtcgaactacaa

SEQ ID NO: 280866 - DNA, 75 bp, Homo sapiens
ggcaccctgtccccgaggaggggaccatgacacaatgatgataattccgaagaaggcttccacactattcattca

SEQ ID NO: 280867 - DNA, 82 bp, Homo sapiens
ggtctgcgcagtgcaggcagataccgtttgacaccaccacgggctacattgagagacctcagctgattcgagcaaaagtgcc

SEQ ID NO: 280868 - DNA, 80 bp, Homo sapiens
aaacctacgtcctgccctcgcccggcctctccattcgtcccccgggtagagagcatcaacaacagcaacttgtgattggc

SEQ ID NO: 280869 - DNA, 100 bp, Homo sapiens
gcatctactcatgcctcgaaatctcctgacagtgttaatggaagtgaaccaagcattcctcaggcaatttctaaaccgggatgacattggcatcatcctc

SEQ ID NO: 280870 - DNA, 100 bp, Homo sapiens
agaaaaacagatgctaaaaatctcttctgaaaacagcaatccagggttgccatggtacggttcttcaattccgccaacgtgctgcagggatttcagatgc

SEQ ID NO: 280871 - DNA, 100 bp, Homo sapiens
attcgcaataagatcttaacaggagctgatggtaaaaacctcaccaagaatgatctttatccaaatccaaagcccacactgcaccggcggctggggaggc

SEQ ID NO: 280872 - DNA, 83 bp, Homo sapiens
ctcctctgacgtgccgttactcagagatgtctttggtggacttgggaaagaggttgctagaagcagcaagaaaaggccaagat

SEQ ID NO: 280873 - DNA, 100 bp, Homo sapiens
aggtggcctaccaggaggccaggggtgtcgccatgctggtgaaactgcgtgctgtaagctgggaccagctttgtccataactgctgagagaacttgctga

SEQ ID NO: 280874 - DNA, 96 bp, Homo sapiens
ccgcggcggaggacgcgcccggcgcccctgagccggccgagcggcgacggaccgcgaggttgtgtgtgtcccgctgtggattctcatgtcctttct

SEQ ID NO: 280875 - DNA, 95 bp, Homo sapiens
cgttcccgctgcgctaggggaagcgggcaggtgaagaacgaggtggagaagctcccccgacagcagcggaaggaaagcatgaagcagaagatgga

SEQ ID NO: 280876 - DNA, 51 bp, Homo sapiens
ctggagattgagagactggaggagcaggtttcattttttgaggaagagcgg

SEQ ID NO: 280877 - DNA, 75 bp, Homo sapiens
ctgctccaggaatgggacctcgagtcactgtgtacgaggatgtcgtccaggaaagattgtgcagatgactgaagc

SEQ ID NO: 280878 - DNA, 75 bp, Homo sapiens
cgtggtccttctccatattcgaggtctcctctgagcctccggcctccataagacccaaaacagatgacacctctt

SEQ ID NO: 280879 - DNA, 82 bp, Homo sapiens
gcgacgctaagttgctgatcgtggcggcctccggtgtggctgtctctgatggtgtcatcaaggtgttcaacgacatgaaggt

SEQ ID NO: 280880 - DNA, 98 bp, Homo sapiens
gtgtctcaaggcggcctgcatacactcgggcatgaccaggaagcaacgggaatctgtcctgcagaagaggcatttcatccttcatgaagccattcagg

SEQ ID NO: 280881 - DNA, 74 bp, Homo sapiens
ggaggattcactgggatattgagaaataccagaggcgaattgttccactgtagattcagtggtcccaatttaaa

SEQ ID NO: 280882 - DNA, 100 bp, Homo sapiens
aggaaaactcgtgtccatcaaaatccagatgctggatgacacccaggaggcatttgaagttccagtgggaccagggagattggatctgctctcaccagga

SEQ ID NO: 280883 - DNA, 124 bp, Homo sapiens
aggtgcctgcacagcggaagaagctcctcagagccccaactctggccgaactggacagctctgagtctgagctttaccgatttgttacaactcaagcaagggccagcagaaattctcttttgac

SEQ ID NO: 280884 - DNA, 90 bp, Homo sapiens
gggaaatatcaaacatcatcaaaattgttccagaactgcagtgaactctttaaaacacagaggcgaatctttagataacctggactcccc

SEQ ID NO: 280885 - DNA, 83 bp, Homo sapiens
ggaggaaggaacgaggcaaggagctaaagcagcgtgcgttcagccctggggggttgtgtccactgtggtccccgactctgccc

SEQ ID NO: 280886 - DNA, 139 bp, Homo sapiens
ctgaggcagacgttgtggcggagaagggcagtggctgtagctgccctttccgtttccagggttccgaccagaaatgagccgtcagactgctacagcattacctaccggtacctcgaagtgtccaccatcccagagggtg

SEQ ID NO: 280887 - DNA, 100 bp, Homo sapiens
ccgccgccgcctctgcgtgggccggccgggagggcctcgggggactgactgccaggcgggcaccacggcaggggctgagctaccctcatggaagggagag

SEQ ID NO: 280888 - DNA, 97 bp, Homo sapiens
ccacccgcccgcccaaggtctctcgcgggcgggagaacggaaaactcccaacttcctgtgggtaattccagaattgattggccataccattgtcact

SEQ ID NO: 280889 - DNA, 99 bp, Homo sapiens
caggtggctgccaggggcgtgccagtggctgaatttaacacggagaccaccccagctacgaacagattcagatatagcccttggcgaggtgcctggctc

SEQ ID NO: 280890 - DNA, 100 bp, Homo sapiens
ctggaaatcgacttcggtttcagttggagttggaatttgtgcaatgtttagccaacccaaattaccttaattgataattggacagcacttatatctgcat

SEQ ID NO: 280891 - DNA, 74 bp, Homo sapiens
ggcgatcttcctgtttgtggataagacagtcccacagtccagaactgataaatttcaaacggaagagagtggca

SEQ ID NO: 280892 - DNA, 83 bp, Homo sapiens
atggtggtcatggagtagaagggagcgatactacagaattcggttccctcaaaattataaaggcaggaaagctcaagacaaag

SEQ ID NO: 280893 - DNA, 100 bp, Homo sapiens
acagcacctcctcccagagcaccttcgtggcgcacagcagggtcaccaggatgccccagatgtgcaaggccacgtcagggtcacagaatgatcatactca

SEQ ID NO: 280894 - DNA, 74 bp, Homo sapiens
cgaggagaaggggtggcggagagggtacctgggactatgctgagaaggaaaataccatagcaaaagctctggaa

SEQ ID NO: 280895 - DNA, 100 bp, Homo sapiens
aaagtacttgtgttatttccaagatggtgacttctacgaaaaagccctggtggagctgaaggttgcaggagacgaaaccagacagagggtcaagtttaca

SEQ ID NO: 280896 - DNA, 100 bp, Homo sapiens
gcgccatgttcaagaaactgaagcaaaagatcagcgaggagcagcagcagctccagcaggcgctggctcctgctcaggtctgcaattaaggccttacgtc

SEQ ID NO: 280897 - DNA, 100 bp, Homo sapiens
cagtgaccgaaggctccgctcacgcccgggctgttagagaaacgctagcatccagaatagtgctgtttgggacctcagctctgattcctgaagtcttcac

SEQ ID NO: 280898 - DNA, 90 bp, Homo sapiens
cgtccggcttcggagcgggagtgttcgttgtgccagcgactaaaaagagctttctgttcaaaatcaggagtttgagataaataaagatgg

SEQ ID NO: 280899 - DNA, 74 bp, Homo sapiens
ttactaggccatgctttacaaggttgactatagtcaatggggccaatggagccaagtgtatggaaacccacaac

SEQ ID NO: 280900 - DNA, 101 bp, Homo sapiens
gtgacctttctcagcatgaccaagtcaccctgcttaaggctggcacctttgagggtggtgatcatgaactcgatcctggagcgcatgtgtgccgacgtgct

SEQ ID NO: 280901 - DNA, 117 bp, Homo sapiens
ctcccgcccacgtcccatttcgcccctcgcgtccggagtccccgtggccagattctagcttggggcttaagaaatatgaaaaacttccagatggcttctatcacatcccccagtctt

SEQ ID NO: 280902 - DNA, 100 bp, Homo sapiens
tttagaaataaaagaagatgatggtaaaggttattttaggcaaaagactggtttaaaagaattagagttcttgaaaaaacttaatgatgctgatcctgat

SEQ ID NO: 280903 - DNA, 100 bp, Homo sapiens
tgaatgtccaaagtttgaagagtgactgaagcaaggctgtgtgacattccatgttggagaaaaaaagaaaaaaaaaagctgaatgctctaagctggaacg

SEQ ID NO: 280904 - DNA, 100 bp, Homo sapiens
gatgcgtcaagtacactgaaattcatcctgagatgaggagcgctatagttatgtctgcccagatttagtaaaagaatttaacaagtatgatacagatggg

SEQ ID NO: 280905 - DNA, 100 bp, Homo sapiens
agctgcttggcacgtggctcccttggtgttccccttttactgccaggacactgagatttggagaggtgctgtctgaggtctgtgggcaggacatcaccac

SEQ ID NO: 280906 - DNA, 94 bp, Homo sapiens
cgcacttgctcaacaagggcctgccgcttgattacctaaaacctcgggcagaagaggagaggaggatagcagcagaagagaagaagaagcagga

SEQ ID NO: 280907 - DNA, 75 bp, Homo sapiens
ctgagaaccccaagatcccacatggagacaagttggatggcttgaggactggtactaaaaggaaacgtgactggg

SEQ ID NO: 280908 - DNA, 90 bp, Homo sapiens
gcgacacgccgtacctcgcagaggccaggatctcctttaacctgggggcaggtcatggcaaaaccccaaaagatgccgcgtcagttcgag

SEQ ID NO: 280909 - DNA, 75 bp, Homo sapiens
gccctcttctcccacctgttcgtgcatttgcccagtataacatggatcagttcacgcctgtgaagatagaaggat

SEQ ID NO: 280910 - DNA, 98 bp, Homo sapiens
gacaattcccacccatttgtaggcctggcttttaaactggaggcccaggatgttttggtgcaggagatggaagtggttaaacaaggaatgagccatgg

SEQ ID NO: 280911 - DNA, 100 bp, Homo sapiens
gaactacgtgaccgcgaaggatgcagagagagcgatcaacacgctgaacggcttgaggctccagtcaaaaaccattaagagcagcccgacggccatggag

SEQ ID NO: 280912 - DNA, 100 bp, Homo sapiens
gtcttgttagcaccctcacgccaggagaaagctgcctggatgagtgacatcagtcagggtatgacaaggcagcaaagattgctaagacagcacacaaaaa

SEQ ID NO: 280913 - DNA, 82 bp, Homo sapiens
gccagatagaaaacggcgagagtgggcgagaacgtccactgcgggccggcgaaagctgcccgttttacggagaagactttta

SEQ ID NO: 280914 - DNA, 100 bp, Homo sapiens
ctccatctcatctcaagtcactcccgccagcagatgaaggtatcgagaaccttccctgcgaacttcagaggaacttccagctgatgcgagagctggacca

SEQ ID NO: 280915 - DNA, 82 bp, Homo sapiens
gcggcaggagctcgggaaccgggactgcgagcggcccagctcaacattggcaatgtgctccctgtgggcaccatgcctgagg

SEQ ID NO: 280916 - DNA, 75 bp, Homo sapiens
tattggtctcctgctcctagagcttgcattgaaaggctctagttacagtggacttcttgaacgacatcatattca

SEQ ID NO: 280917 - DNA, 130 bp, Homo sapiens
caaactcccaggctcaagcaatcctaccatgtcagccttcccagtagctggaactacaggatctcatagatcagaacatactggagcctgtaacccgtgcacagagggtgtggattacaccaacgcttcc

SEQ ID NO: 280918 - DNA, 74 bp, Homo sapiens
tctcctcctgctctttagcctttgctcagcgttttaccaacgaggatcatttggctgtccataaacataaacat

SEQ ID NO: 280919 - DNA, 100 bp, Homo sapiens
cctgaccctcacaaagggatcggttgcagatttggatgatgaatttgctgacttggttttagaagaatttagtgagaattttgatttgttaccagctgaa

SEQ ID NO: 280920 - DNA, 96 bp, Homo sapiens
gggcggaggaggaagtaggggtgcacctcagcactatcccaagactgctggcaacagatggacgacgaagacacgttgttacctaggaagttacag

SEQ ID NO: 280921 - DNA, 100 bp, Homo sapiens
gtgttttcatgtagggtacttcagagcagtcataggcatcttacagatggatttgcagccgctgcaagtgtgtggaagggccgtgttcgtgttggcaaag

SEQ ID NO: 280922 - DNA, 100 bp, Homo sapiens
tgatcacagtaaatggacaagaatatcatcttcaacttgtagacacagccgggcaagacccattccaacaatctcgtaaaacatggtggattactatgaa

SEQ ID NO: 280923 - DNA, 83 bp, Homo sapiens
ataccttgggcattgctgaatatgaaaaggaatggtcctcgtccgaagtgagaatgggcagttgttaatgattcctcagcagg

SEQ ID NO: 280924 - DNA, 74 bp, Homo sapiens
ggtctgcaaaagatgattttacatccattattgggaaatgtcaagcttcagacagcaaagtcctgacatgtgca

SEQ ID NO: 280925 - DNA, 100 bp, Homo sapiens
cttgtggagcaaatgggaaaagcttattcagctgattctgaatcatcttacactaccagacctgtgtagattagcacagacttgcaaactactgagccag

SEQ ID NO: 280926 - DNA, 74 bp, Homo sapiens
tttcgatgtgaaggatattgacccggagggcaagaagtttgaccgaggttatcctaccttgcggatagagaaga

SEQ ID NO: 280927 - DNA, 82 bp, Homo sapiens
atgtggggggattctcgacctgctaacagaactggaccttttcggcctgagacctgggaggaagctggagaaaagatgccct

SEQ ID NO: 280928 - DNA, 75 bp, Homo sapiens
cgcctctcccgcggccccattttccttcgaaggagggaaggatccaaactactggatacaggtgcatcgcttgga

SEQ ID NO: 280929 - DNA, 75 bp, Homo sapiens
ctttgcagttgtgtgcgagtgtgtacagaccaagatcactccatggatgaaatgacagctgtggtgaaaattgaa

SEQ ID NO: 280930 - DNA, 100 bp, Homo sapiens
gggacacctcttcagtccgtggactttcccgctgcacactgccctccgaagtcggggacgcgggctcgagtcctcgaatgccaccttgctgaccaatgca

SEQ ID NO: 280931 - DNA, 80 bp, Homo sapiens
cccacctgtcctcaggcatatcaaagatcatggaagggaagtggttgctgtgtatgttactggtgcttggaactgctatt

SEQ ID NO: 280932 - DNA, 83 bp, Homo sapiens
ctcagctgcaaatggttctgctgaaacatctgccttggacacagggttctcgctcaaggaacccaccaagaccaacctggtca

SEQ ID NO: 280933 - DNA, 90 bp, Homo sapiens
gaggcctcccggctcgacaagttcaagcagctgcttgccggccccaacacggaccttggattcggaaacttcagatacgaaatatcccgc

SEQ ID NO: 280934 - DNA, 75 bp, Homo sapiens
ggcagagcgagactcggatgatgagaggcccagctttggaggcaaacggtacctgtttcccaggcaactactgat

SEQ ID NO: 280935 - DNA, 82 bp, Homo sapiens
ccgatccagcctgcggagcctgtggggcagaggagaagaagatgattctttggccatcaaaccaccccagcaaatgtctcgg

SEQ ID NO: 280936 - DNA, 82 bp, Homo sapiens
ccaaataaaatagccatctcacctttgaaatcgccaaataagcaatggctgccatccggaagaaactggtgattgttggtga

SEQ ID NO: 280937 - DNA, 76 bp, Homo sapiens
gtttgcaacatccttcttctggataacactgtacaagctttcaaagtcaatcttgaattcggagtgatttaccact

SEQ ID NO: 280938 - DNA, 75 bp, Homo sapiens
gctcgatctaggttctgcggcacgggatggcggaggcgcctcctgtctcaggagtctgcactatggaaacaacct

SEQ ID NO: 280939 - DNA, 87 bp, Homo sapiens
cctgcccaacagaatttatatagagatgtgatgttggagaactacagaaacctcgtctccctgggctggtgcagtggtgtcatcttg

SEQ ID NO: 280940 - DNA, 93 bp, Homo sapiens
tggatcattgtattactcatcacagatcggaacggaggcctgtgcaataggagtgaaacatccacatctgataacacagaaacttaccaagag

SEQ ID NO: 280941 - DNA, 100 bp, Homo sapiens
cgggtacatggctccggaggtcctgcagaagggcgcgaggacgaggaaagcgattcgtcttccaaatgttctctgtatgctgactcagatggcgaaaatg

SEQ ID NO: 280942 - DNA, 82 bp, Homo sapiens
aaaatagtaatcagattcccatcagcttgtattcgaagtctttaaggcaaaatcctgacagatgactttgcagacaaggagg

SEQ ID NO: 280943 - DNA, 99 bp, Homo sapiens
gacacttgtcatctgtgtactgtgtaacttttgatcgaactggcagacggatatttactgtacgcatagctgctaaattcatcactcatgcacccccag

SEQ ID NO: 280944 - DNA, 89 bp, Homo sapiens
gacagcgggtagcacaggcctttcgggagggagagaatacccagattccaactgatgcaccctgggaggctcaacatgctgacaaatgg

SEQ ID NO: 280945 - DNA, 100 bp, Homo sapiens
ccgcctcctttcccgggctcttccagcggctcccggggcgcgtctgagaaaagaggcacagttagatgaagaaggacagtttcttgtcagaataatatat

SEQ ID NO: 280946 - DNA, 74 bp, Homo sapiens
tcgttttcgagatcaggcctgaccgggataagctccagggtcagtatagaccttctgatttgctgtgccctgag

SEQ ID NO: 280947 - DNA, 99 bp, Homo sapiens
tacgaaaaggaacgatatgaaaaagtcataaaggcttgtgctctgaaaaagattgagaggatccagaatccagatctctggaatagctaccaggcaaag

SEQ ID NO: 280948 - DNA, 100 bp, Homo sapiens
gaaagagcctttattcatcgactcagtcagtctcttggtttggtctctaaaagtaaaggatgctgcacaacaaacatgtcatggtccgtgtgggaggagg

SEQ ID NO: 280949 - DNA, 95 bp, Homo sapiens
ctttaatcggttagacttctcaagtgcaattcaagatatccgaaggttcaattatgtggtcaaagtatctagaagagcagaagacagagaatgga

SEQ ID NO: 280950 - DNA, 100 bp, Homo sapiens
ccaaaagattgaaggaaggtgatacaatgatggggcagcaagtggccaaggcacagtcttttgctgagcgcctgcgcctgggaattgcagtgattcatgg

SEQ ID NO: 280951 - DNA, 75 bp, Homo sapiens
ctttattatctcattgaagcttggaattacatagctggaaaggatcttacaggtccggacactgtttgtcagcgg

SEQ ID NO: 280952 - DNA, 83 bp, Homo sapiens
gtggattgaggtctcaggttcctctgccaaagatagctggctttatgtgctggggcagaagagatccgatagctatgttctgc

SEQ ID NO: 280953 - DNA, 83 bp, Homo sapiens
aagcaaacgggaattctcgcgaggctgggatgcagatggaaaaggcccttgtgtctgggacacatttactcatcagggaggag

SEQ ID NO: 280954 - DNA, 76 bp, Homo sapiens
ggtgttccttgactggagacaacctgcagcctcctggcaccaaaggagtccaatgtgctgattgctgctaacagtc

SEQ ID NO: 280955 - DNA, 98 bp, Homo sapiens
acaaaattctggagttggtacatgaccacctgaaggatctctggaatgatggaaagttactgtggcccatgtcctaaaaactggatatgttacaaaaa

SEQ ID NO: 280956 - DNA, 75 bp, Homo sapiens
aaagcatttcctgcttttcttcagacgattcatactttagtggaaagtttgaaactttctatcacagatcaacaa

SEQ ID NO: 280957 - DNA, 73 bp, Homo sapiens
aatgccgggcagaggagcctgcagaaaacaagcatcgttgtgggtccaaggagacattttccgatccaaactg

SEQ ID NO: 280958 - DNA, 100 bp, Homo sapiens
cggccctcattgtgatttgccttttggggaagctgtatgttgcaaatgctggggatagcagttgccaaaacaaaggggatttggtgatggaggctttgtt

SEQ ID NO: 280959 - DNA, 100 bp, Homo sapiens
ttcattacctgctttcggcacaagattcctaatttggagaccaagatcactccatggatgaaatgacagctgtggtgaaaattgaaaaaggagttggtgg

SEQ ID NO: 280960 - DNA, 87 bp, Homo sapiens
aagcatgtcagggaacttgctgagcaactattcaaaaatgaagtagaccagttgcgtttggagagattacaaattgatgagcagttg

SEQ ID NO: 280961 - DNA, 100 bp, Homo sapiens
tgaggaggtcgctgagagctgggaagaggcggcagacagcgggtgcaccaattccagctggacatcactgtgaaaatgggacgggataaagtccgagaaa

SEQ ID NO: 280962 - DNA, 75 bp, Homo sapiens
ccgcgctgcggcctggcggcttccaggcgcactaccgcgtctctgctttctatccgtcaagatgataaagtcgtg

SEQ ID NO: 280963 - DNA, 74 bp, Homo sapiens
acagggtcaaaggagagcacaaccatcgcagttggaagcccatggggcagcatgaaaagggacaaggagtaata

SEQ ID NO: 280964 - DNA, 101 bp, Homo sapiens
accctgatttcctgcttctccttttcatgagtgttcctgtggtctctgcacctcctttctgacttccttcgctgggcatctggctgggattcttgttggac

SEQ ID NO: 280965 - DNA, 100 bp, Homo sapiens
ggggcagcgcgtgggcccagtgtccgctgtgggtgtgacaggtgaccaaccacataactcgagacagggacagcgggaggctcaaacctgccctcggacg

SEQ ID NO: 280966 - DNA, 100 bp, Homo sapiens
agtcggtgaccgcgcgactcggcgcccgcccgcggccttgaaaagaggatagaccaggctgtggaggagtggaatattgagaaggctgaggaactcagca

SEQ ID NO: 280967 - DNA, 100 bp, Homo sapiens
ggaaagtggatcccacctacggtctggagagcagctgcattgcaggcacagggcccgatgagccagagaagcttgctttcagcttatgtggagaagtcgc

SEQ ID NO: 280968 - DNA, 82 bp, Homo sapiens
cgagatctagaatcaactgagagagatgcttaaaaatcaccagttactttaatgatatcctagaaggaaaacatcaccatgg

SEQ ID NO: 280969 - DNA, 100 bp, Homo sapiens
tgagatcagccgcccggccaagctatcttctcgctagcagtggtagcaactgcccttgctaatcaccgtaacctcggctgagaaagaagaggaagcgaaa

SEQ ID NO: 280970 - DNA, 98 bp, Homo sapiens
aagagatgactccaaggacctagctctttgcaggctgtttttcttcaaataaagaacatggtgaaactgattcacacattagctgatcatggtgacga

SEQ ID NO: 280971 - DNA, 75 bp, Homo sapiens
caactttactgagaattttccacctcctgacacaacaccactcaaacggaaagatgctgaaggatgggagaccgt

SEQ ID NO: 280972 - DNA, 75 bp, Homo sapiens
agctgagaaaggagctcggggactcccccaaagacaagtgtgaaacagctgccctgtgtgggactgagtggcaag

SEQ ID NO: 280973 - DNA, 100 bp, Homo sapiens
gcgccggggaactgcagggcgctcgaggccaggttgacatcatggacatatgtgagtccatcctggagaggaagcggcatgacagcgaaaggtctacttg

SEQ ID NO: 280974 - DNA, 114 bp, Homo sapiens
gccgcaccatgccgctcctaagcctgcacagccgcggcggcagcagcagtgagaggtttacccaaggtccagcctagcccctaggcaccatgtcggacagtgatctaggtgagg

SEQ ID NO: 280975 - DNA, 100 bp, Homo sapiens
cggggcccgcccgctcatcccgttgggcccgcactttcatttggacccgtggatacccattgaacagatgcttgaaacctgcaagtaatcttcagatcct

SEQ ID NO: 280976 - DNA, 50 bp, Homo sapiens
acaagatcccgtccatgaatcagggcggtccctctcctgggctacctacc

SEQ ID NO: 280977 - DNA, 75 bp, Homo sapiens
ggaaatacaaatgaaccaagcacacgtgtccgaatggagtcatcagaacccactgtgaggaagtgacttctcctt

SEQ ID NO: 280978 - DNA, 75 bp, Homo sapiens
ctacctcgcccacgagagtcggagattctgtgaggagaccaggaggaattttgaagccaccttaggttggctaca

SEQ ID NO: 280979 - DNA, 128 bp, Homo sapiens
gaaacaaaatgtggatgggctagtgttggacacactggcagtaatacggactcttgtagataagtcagttctcctcgggtctcggggacttgacatatcccacatctcccagcgattggagagtctga

SEQ ID NO: 280980 - DNA, 90 bp, Homo sapiens
tgcgaggctcggagaaacaggcgccgcgggctccgcgcccggccggacccgggcccgaggtcctctccacccggatcctggccatgaagg

SEQ ID NO: 280981 - DNA, 97 bp, Homo sapiens
ggggacccgcggtccccaccgtgcagcggggcatcatcaagatgactatgtcttcagcagtggtgcagttatatgcagcagatcggaactgtatgtg

SEQ ID NO: 280982 - DNA, 88 bp, Homo sapiens
atcaacttgttggtgatcttcataccctccatgaaggatatttttggagtcgtagagctgaactagagaaacatggttataagatgga

SEQ ID NO: 280983 - DNA, 95 bp, Homo sapiens
atggccttggccaatgaaggcaactaccgcgagctgcgctggttcaccccgtggtcgaggagtcgggcgttgaagggcaagattaagaaggaaag

SEQ ID NO: 280984 - DNA, 73 bp, Homo sapiens
ctgacttttttcgcggctctcgggacctgatttcccatcgccttctgtccccctaaaggcttcagatcctgag

SEQ ID NO: 280985 - DNA, 100 bp, Homo sapiens
ctcggcgaaagcagcggaaaccccaacagttaatctcggactgcgaaggtcccagcgcgtctgagaacggtcagtcaggagatcctagagctattaaata

SEQ ID NO: 280986 - DNA, 100 bp, Homo sapiens
tcacactaattgccaacaacaatgactatgtcttcagcagtggtgcagttatatgcagcagatcggaactgtatgtggtcaaagaagtgcagtggtgttg

SEQ ID NO: 280987 - DNA, 75 bp, Homo sapiens
cgaagaaccttttccctaatacgtacctcattgtgggaggagagaagtggatgggccctatacctccagccgtga

SEQ ID NO: 280988 - DNA, 80 bp, Homo sapiens
gtaccaagtgggatgtttcaacaaccaaagctcgagtggttctgtacagagtaatgagatgtgtgacggctgcaaaccag

SEQ ID NO: 280989 - DNA, 75 bp, Homo sapiens
ggccccacaacaaaagaggtccagcccctcagagggattgtgtccacctgggtgaaaatcctatttataagagtg

SEQ ID NO: 280990 - DNA, 99 bp, Homo sapiens
ctggagagggagtgcgtggaggagctgtgcagccgcgaggaggcgcgggaggtgttcgagaacgaccccgagacggaggagccagaggccagagtcccg

SEQ ID NO: 280991 - DNA, 82 bp, Homo sapiens
ttttattaatcaagcggtcaggataccggccatcactggtgcaagctatatttaacggagatcctgatgaagttcgagcact

SEQ ID NO: 280992 - DNA, 100 bp, Homo sapiens
cgtcaaggagctggaagtgctgctgatgtgcaacaagtttttgagttccagttgactgcagaggacatgaaagccatagatggcctagacagaaatctcc

SEQ ID NO: 280993 - DNA, 82 bp, Homo sapiens
aagctgcccttccaagcagtcacagctcaacttgcaggtattactcagcacagaaattcaggagacacagacaagttcttcc

SEQ ID NO: 280994 - DNA, 100 bp, Homo sapiens
cgagagatcaccacactggccaacaaccagtgcatggctacagagagcgtggaccatgaagttgtgtcgccaggctggagggcagtggtgtcatctcggc

SEQ ID NO: 280995 - DNA, 50 bp, Homo sapiens
ccaagagattcaacaggggccatggctctggctgagaacatggccaatga

SEQ ID NO: 280996 - DNA, 75 bp, Homo sapiens
gatgaatcccagtccctgttacggggcagagcggcttgggtaaatccaccttaatcaacaccctcttcaaatcca

SEQ ID NO: 280997 - DNA, 75 bp, Homo sapiens
gagggagcgatgcggtgcagcgcggttatgaagacagtatggagtttccagaccatagtagacatttgctacagt

SEQ ID NO: 280998 - DNA, 76 bp, Homo sapiens
gataatgaagaattattttgcaccactggatgttgtttactgatgatactctccaagctgtaaggaagaagtcaag

SEQ ID NO: 280999 - DNA, 74 bp, Homo sapiens
gcaatagaagagctgaaactggtccaaatgaccctgtgactaacatctgtcaggcagctgacaaacagctattc

SEQ ID NO: 281000 - DNA, 90 bp, Homo sapiens
gagtttgacgaagaggtggtttttgaggtcagttcaccgggacctggaggcccagattgcgatcgtgacggagaaccaggccctgcagca

SEQ ID NO: 281001 - DNA, 80 bp, Homo sapiens
acgcggagagcacgccatgaaggcctcgggcacggttggatgattgactctgaatgtcggccaagattccgggagttggt

SEQ ID NO: 281002 - DNA, 52 bp, Homo sapiens
gagtggaaaggctctcagtgaaaaagggaaatcctcattgacgattcaattt

SEQ ID NO: 281003 - DNA, 100 bp, Homo sapiens
cgcagcccccgcacctcccaccccaggcgcagtatctgccgtcccagtcccagcagaggtaccagccgcagcagataagtttataccatggatagcacaa

SEQ ID NO: 281004 - DNA, 100 bp, Homo sapiens
accgccaacctggatggagagaccaacctgaagcggcggcaggtggtccgcggcttctcggagcttgttcacaataaaggtgctaagaaagagaatgtaa

SEQ ID NO: 281005 - DNA, 90 bp, Homo sapiens
acaattagggtgacgtgtgcattgagtaaacggtcctgtagcatccacagtatcagcgttttctgtcctctcctctgggcctggccttcc

SEQ ID NO: 281006 - DNA, 100 bp, Homo sapiens
catccacctgccccgagcccttcgcacagcttatggccgactggccaatcacaggcaggaagatgaaggttctgtgggctgcgttgctggtcacattcct

SEQ ID NO: 281007 - DNA, 89 bp, Homo sapiens
ctgagctacccgagcggcggcggcggcagcagcggcagcggcaagcaccatttctaccactccaaacgccggctgatcttctccaagag

SEQ ID NO: 281008 - DNA, 100 bp, Homo sapiens
actaccagagtttcgctgtcctgtacctggagcgggcggggcagctgtcagtgaagctctacgcaccctccaagtggaagtcacagctagtattccagag

SEQ ID NO: 281009 - DNA, 82 bp, Homo sapiens
ggtcctcagcgactcttctgacctccgcgcgacgtacccgccgccgccgttggctggaggcctgccttgctctgccaggaac

SEQ ID NO: 281010 - DNA, 100 bp, Homo sapiens
tggacctgaaggagaagcacctgagttttgcggcctccaggtggtggatccaatttttcattaggttttgatgaaccaacagaacaacctgtgaggaaga

SEQ ID NO: 281011 - DNA, 98 bp, Homo sapiens
cggagtcccgcccgacagcctccggaccgcgccagcaccatggacagctcagatgcctgtgaggagccaccaacatttgaagctatggagctcattgg

SEQ ID NO: 281012 - DNA, 80 bp, Homo sapiens
cgcgtccgccgattcctcctccttggtcgccgcgtccttggctggcgtgtctcggcgcggaagatggccggcggcgtgga

SEQ ID NO: 281013 - DNA, 100 bp, Homo sapiens
gagacgtgaaacatgtgaacactcaagtgaagcaaaagccttccatgattacctcctggcagccaccattctactctgtttctgtgagtttgactatttt

SEQ ID NO: 281014 - DNA, 90 bp, Homo sapiens
agaaaatggtgcttaccaactacatgttccctcaacagccaaggactgaggatgggaaaggcgtaggaggaggagcaggagttcttccag

SEQ ID NO: 281015 - DNA, 98 bp, Homo sapiens
tgccatccggacgttgctggagttcttgaagagagataaagaaggccggggtcagaaagaaaaaagagggtcccggggccgaggcaggaggacatcag

SEQ ID NO: 281016 - DNA, 82 bp, Homo sapiens
acctcgccaaagcagagaaataggtggatgtgaacactgaccggaagatcagtgccaaggagatgcagcgctggatcatgga

SEQ ID NO: 281017 - DNA, 95 bp, Homo sapiens
gaaatccgagccactgacctgcctgagaggttccaggaggaggaaaggcaagctctgactctgaggttggaggcagaacagcagcggtgctgtgt

SEQ ID NO: 281018 - DNA, 100 bp, Homo sapiens
gatggcaaaggccgagtacctctgccggataggtgacaaagagcgttcctgggtgcctgtgtggctgggtctgatgagcctggcccagagggcctcacct

SEQ ID NO: 281019 - DNA, 100 bp, Homo sapiens
ttggcaacgcagacaaagaaaggagtggcccgtatggatttcatgaggaataaaattgaagggtgtttttcttagagaacatcatttgtcatatttattt

SEQ ID NO: 281020 - DNA, 75 bp, Homo sapiens
acaggattcttctttgcagcaatgacagacatcacacctccagtgcaatccctgttcctaagagacaaagctcca

SEQ ID NO: 281021 - DNA, 75 bp, Homo sapiens
gggaagagaccctgcaaagatcctgggagaccaaggttctgtacagagtaatgagatgtgtgacggctgcaaacc

SEQ ID NO: 281022 - DNA, 82 bp, Homo sapiens
caagagcagaggccttctctagaccttgccaagatggcacaggggttgtagaaggtgatttagctgccatagaagcatacaa

SEQ ID NO: 281023 - DNA, 82 bp, Homo sapiens
ggataatgaagatggccctcagcacacgaatttcttcaggttgaattacctagaagtttgtcactgacttgtgttcctgaac

SEQ ID NO: 281024 - DNA, 83 bp, Homo sapiens
gactccagccccagccccaagggcagagattctgaaagtcaagaagacatcatccggaatattgccaggcacctcgcccaggt

SEQ ID NO: 281025 - DNA, 82 bp, Homo sapiens
tgcagcgggagctggacggcgagcgcgagcggcgcgagaaagcagattttttgaaaggactgcctgtctacaacaaaagcaa

SEQ ID NO: 281026 - DNA, 108 bp, Homo sapiens
gcttcctctacataggggacatcgtgtccctgtacgcggagggctcggtcaacggcttcatcagcaccttgggaggaagaaaagtatgcctttgtcaactggataaac

SEQ ID NO: 281027 - DNA, 100 bp, Homo sapiens
agtccagagacagagcactaattaggttcgggatgagtatcggcaggactacgatgctgggagaggaggctatggaaaactggcacagaaccagtgagtg

SEQ ID NO: 281028 - DNA, 75 bp, Homo sapiens
cagttcacatcctggagatgtacgagggagttaaagttcctcgtaattttcgcttgttggaagaacttgaagaag

SEQ ID NO: 281029 - DNA, 77 bp, Homo sapiens
catggtcacaaagaactcaagaaaatcttcgaagacttttcaccgtgttgaaatccttgtctcctgtagacccagtg

SEQ ID NO: 281030 - DNA, 90 bp, Homo sapiens
cgcaaggccggagaaggccgccgggcccgggcatggtggtctggggcaacgcggaaggtaacatttgtcgatcacccattgcagaagcag

SEQ ID NO: 281031 - DNA, 100 bp, Homo sapiens
aggacatcgtggtgggctgcggtggcttcgtcaagtcggacgtggagatcaactactcgctcatcgaggttatcaatactctggctgaccatcatcatcg

SEQ ID NO: 281032 - DNA, 101 bp, Homo sapiens
ctgattggctcttcctcaatgcttgtgtggaatttcttgaggttggcaaaaagcagcctgctctggatgttctttatgatgttatgaaaagtaaaaaacat

SEQ ID NO: 281033 - DNA, 82 bp, Homo sapiens
cccggctctgggctacggactatgggcgaatagctctgaccacccggcgaagggttccagaccatcaggatatagcttttgg

SEQ ID NO: 281034 - DNA, 83 bp, Homo sapiens
tgatgctcagtttgatgcgtcacactacgacagtgagaaaggaggtacaagaatattccacagatgtcctttgatgatacaga

SEQ ID NO: 281035 - DNA, 75 bp, Homo sapiens
actgccccggcggggaggacgagaatcggtgtgacacagctccgaattgattccttctttagattagcacaacag

SEQ ID NO: 281036 - DNA, 100 bp, Homo sapiens
aatccagtatttgcggatagctccaaactgggatatgcattgtttccaagtcgtacgagtgccgtctaaagggacaaggagccaccttcgtggagacaga

SEQ ID NO: 281037 - DNA, 100 bp, Homo sapiens
ctgggactgcaccgcaccgagggcgagctccagtgccctagagtccatccagagtgcccgtgctgcccaggccccgcactggaagagcctccagcagcaa

SEQ ID NO: 281038 - DNA, 75 bp, Homo sapiens
cagacatctacaaccttcgatctcctgacgaattgttgcctgccctgatgtgcttcctcggaagatggcaacacc

SEQ ID NO: 281039 - DNA, 83 bp, Homo sapiens
gggcaaatacgacatgggcatcctgggctattgagggcacctacattgacaagaaatgccccttcactggtaatgtgtccatt

SEQ ID NO: 281040 - DNA, 100 bp, Homo sapiens
ggcgccaggacgaaggccctactgggcaaggccgctttgtagttcagaatgtttctgcacagaaagatggagaaaaatctagagtaaaagtcaaagtgcg

SEQ ID NO: 281041 - DNA, 100 bp, Homo sapiens
tcagctgttgcagataaacatgaattgctcagccttgccagcaggtatggaaaatcgaggaccagggagagtaccttgccagcaattttgtagttatgat

SEQ ID NO: 281042 - DNA, 75 bp, Homo sapiens
ccttgcggtcaagatgctgcaaaacgtgactccccacaataactgcggttggatttctcacgatgtccagtgtta

SEQ ID NO: 281043 - DNA, 100 bp, Homo sapiens
tcaacggggtcatctttaactgcttggccgtgcttgccctgtcatcccacctgagaaccatgctcaccgaccctgatgtcacatgtacttcagtttgagg

SEQ ID NO: 281044 - DNA, 90 bp, Homo sapiens
ctggagaaactgcccccccacctccatctcctgtaagtgaaaagccattgattcttctgatgtagagcgactggaaagattcttcgactc

SEQ ID NO: 281045 - DNA, 90 bp, Homo sapiens
gaatttgatccagaagaagatgaacctacccttgaggcatcgtggccacacttacagaactacagttcctgaggaagaactaaatccaaa

SEQ ID NO: 281046 - DNA, 100 bp, Homo sapiens
tgagggcccgcgcctacttcctgtcccactgccacaaaggcctttttgcaaatgtgtaacttgcctatcaaagtagtttgtagggcaaatgcagaatata

SEQ ID NO: 281047 - DNA, 100 bp, Homo sapiens
accatcatcgtgtctatcgttcacagtgtcttcgagttcctggccttcaagaatggccggaaggtggtggtcgtacgctgtgaaggcatcaacatttctg

SEQ ID NO: 281048 - DNA, 50 bp, Homo sapiens
ggaacttctgcccagctctccttggtcctggtccgcgccagagcccagcg

SEQ ID NO: 281049 - DNA, 76 bp, Homo sapiens
acaacccgcagtgggcccatcttccgcacgacctcagcaaggcaaatggcgccattttgcggtacggaagctacac

SEQ ID NO: 281050 - DNA, 73 bp, Homo sapiens
agaaacgtaaagaaatgcaattgagttgttcaggggatgaaggaagctcaggaaaggctgacgggtgatgcct

SEQ ID NO: 281051 - DNA, 50 bp, Homo sapiens
agaaaatgccaaggtcgcttccttcaggcctgatggaattgggactgttt

SEQ ID NO: 281052 - DNA, 50 bp, Homo sapiens
gcgggaggcgcggcgagggcgccaggaattttggagagtaaaaggctgaa

SEQ ID NO: 281053 - DNA, 95 bp, Homo sapiens
cttagctgtgctcgcgctactctctctttctggcctggaggctatccagcatacacctatgaagattataagaacactgcagaatggcttctgtc

SEQ ID NO: 281054 - DNA, 74 bp, Homo sapiens
catatcctgtaagaccagaattgcaaggccaggagtctctaccacccgtccagtttgactggagtagcagtggc

SEQ ID NO: 281055 - DNA, 100 bp, Homo sapiens
cctgggtatttggggcctctgtgggctgctcctgtgtgccgcggatcccagcacaggttaccctacctgtaaagaaaaaattaagagaaggcctggcggc

SEQ ID NO: 281056 - DNA, 96 bp, Homo sapiens
ttagatgccagcgcagaagggacgtgagcccagccgaggtaccgctgaagaggaatcaattttggatcaaagtgcttgactttgttggttgaaatc

SEQ ID NO: 281057 - DNA, 74 bp, Homo sapiens
ctgaccccgcggccggacgacccaagcccgctgagcaggatgaggaaatacactttcgggaaatggcctctaaa

SEQ ID NO: 281058 - DNA, 75 bp, Homo sapiens
acattggctgttttcctcacattcctcaagcaggatctgcacaatttagacctaatgattggaattgcttccgcg

SEQ ID NO: 281059 - DNA, 80 bp, Homo sapiens
ggaggtggccccagtgctgcagcagacattacttcaggacaacctcttgggcagggtgtccaaggcagctgcagatttga

SEQ ID NO: 281060 - DNA, 100 bp, Homo sapiens
catccaatagcagcagagagacggagccccctccaaagaaactttgaaaagcaccccaaagaactgatcagggggcccatatggcttcgaggttggaaag

SEQ ID NO: 281061 - DNA, 119 bp, Homo sapiens
attttgaatgaagtgcgtaattacctgagttgtgatgttgaaggagttctttggaatttatcctcatgtgatgctgtaaaaatgacaatcattcgagatgctctctcaaccttaacaaa

SEQ ID NO: 281062 - DNA, 75 bp, Homo sapiens
ccaaagaatgccacagaatcaggggaggcatgcttcaggctctgatagccgaggagaccagcagcaggctcgccg

SEQ ID NO: 281063 - DNA, 82 bp, Homo sapiens
ttgacatttaattttagggtcctttatatagaagggagagtaggtcaccaagaagttctactcaatgggctgctacgagatc

SEQ ID NO: 281064 - DNA, 100 bp, Homo sapiens
cagatggcctgccagagtttgggagagcctggctgtacccaggcccaggtgacatcctagccctggtttttggcctcctttttgctgtcaccagcgtcgc

SEQ ID NO: 281065 - DNA, 98 bp, Homo sapiens
ggaacctcacctgcccaatctgcaaaggtctattcaccgccatcaacctcgggctgaagaacgatttactcttcttaaaagtcaccagccaactacat

SEQ ID NO: 281066 - DNA, 101 bp, Homo sapiens
cacagaccccacccccgccctgcgccagccttcgtccccgcagaggaccccccgacaccagcatggactgctgcaccatatttggagttcttacaacatgg

SEQ ID NO: 281067 - DNA, 100 bp, Homo sapiens
aggagcttttcgtaaagggaagtcatttctactggacttcatgcttagatacatgtataacaagatatggacatttctggaattacagagccccctctac

SEQ ID NO: 281068 - DNA, 78 bp, Homo sapiens
tgctggctctcagacccgcagtgaggtctgacgtcatttcctgccttaccttatcccatatcacacaactggtcctca

SEQ ID NO: 281069 - DNA, 74 bp, Homo sapiens
ggaaaagagccctggaatatgaagcaacatgagatggtggatgaacccacagccatgttcactgcccacttccc

SEQ ID NO: 281070 - DNA, 80 bp, Homo sapiens
gtcgattacttcctaaatgtggccactgcccaggtggcaagtgcaggcagctgtcccggttatgccggaatcgttgcagg

SEQ ID NO: 281071 - DNA, 95 bp, Homo sapiens
cagatagtaccatgatagctgtatcactccagtggctgttggacaattatgagacagcagaaggagtgagccttcccagaagcactctgtacaac

SEQ ID NO: 281072 - DNA, 90 bp, Homo sapiens
ggaggagccttctcaagaacagaggttaaagtattgcacaatcagctggtccttttccacaatgccattgccgcttactttgctgggaat

SEQ ID NO: 281073 - DNA, 100 bp, Homo sapiens
actcgctttctccatcttgtatgactcaaactgccaactgaacttcatcgctcctgacaagcatgagatgctattaactgagtacttggatatgaaaaat

SEQ ID NO: 281074 - DNA, 95 bp, Homo sapiens
ctggaaacgggcattgcctgcgaggctggccgagaaatcccgtacttaattcagtgcacaaatgagatgaatgtgaacatcccacagttggcaga

SEQ ID NO: 281075 - DNA, 101 bp, Homo sapiens
agagctacaacttggagaatggaaaagaaccattgaagcttgagagaaaagcccccaaaagcagctattcagagacgagttgtactgctgtcacaggaaat

SEQ ID NO: 281076 - DNA, 75 bp, Homo sapiens
caaagcctgcccagacggctcacctgtgcgggatggaacaaaaggacgtgagcctgcacttcgtgctctggggct

SEQ ID NO: 281077 - DNA, 100 bp, Homo sapiens
tcagctccatgaaccatttcttctgtatagaaatgcaagctttgaaaatcgagttcgtccgttagtgctggtgattaagaagtgggcaagtcaccatcag

SEQ ID NO: 281078 - DNA, 83 bp, Homo sapiens
cagcccggccggggcctgcgggcgcccagagccgcgccgtccgcgccgcccgttctgggcttgtcaatgaggcagatcagatt

SEQ ID NO: 281079 - DNA, 74 bp, Homo sapiens
aaagtaccctccttctactaccggcccacgccctccgactgccagaatactcccccagttgcaagaggcgcagg

SEQ ID NO: 281080 - DNA, 83 bp, Homo sapiens
ctgtgtcccacttgttcgcggcctatagctcgagcccagaaaactatcctctaagaccagacgtgacaaggagaagcagagct

SEQ ID NO: 281081 - DNA, 90 bp, Homo sapiens
cgggatcgtgaccgagaccgtgaccgagagcgtgaccgagagcgcgaatatcgtcatcgttagaagatgatgattattccccaccttcta

SEQ ID NO: 281082 - DNA, 88 bp, Homo sapiens
aaagtcagtaaaaaggagctcaactccaaccacgacggggccgacgagacctcagaacccagtgacttgattgtaaaaatttacagag

SEQ ID NO: 281083 - DNA, 98 bp, Homo sapiens
atcgaatgaaggaatcctctccatctggttcgaagtctcagcggtattctggtgcttatggtgcctcaggaaaaccaattctgtgtcctcggaggacc

SEQ ID NO: 281084 - DNA, 100 bp, Homo sapiens
tttgcaacagaattacagagtatgatgagggctctgggccaccatccgaggctctagtttggaaggtgttagcctgatattatttggatcttactcgtgt

SEQ ID NO: 281085 - DNA, 100 bp, Homo sapiens
gagtttgaaagcgtgctccacaaatatttacagtcggaggagtactcggtgaaatcctgtcctgaagactgtaagaaatgcatcttctgcagacaccggg

SEQ ID NO: 281086 - DNA, 75 bp, Homo sapiens
caaccagtgtggatcccttctctattacctcaccttggcatcgacagctggaggagcaccggaattcacagaagc

SEQ ID NO: 281087 - DNA, 50 bp, Homo sapiens
ccggaacaccctggaagccgagaaatgtccaagtggtaagaagttcagaa

SEQ ID NO: 281088 - DNA, 90 bp, Homo sapiens
tcgggatggtgccacaggaggctgtgcgggccccgctccgcttcgaatgggggagctgaatatgtatctgcaagagagtggatgaggatt

SEQ ID NO: 281089 - DNA, 100 bp, Homo sapiens
aaaatcaccgcccatggccagcccttggaagaggctacaacacagacatgcgtcgggatgtccaggaaatttttcgcatgaccccccacgagaagcaggt

SEQ ID NO: 281090 - DNA, 90 bp, Homo sapiens
cactgagatggaagttcatgaattgagtagacacttaacaaggtggtgtttccctacacaagcaagagctgcatgcgggccgtgctggaa

SEQ ID NO: 281091 - DNA, 75 bp, Homo sapiens
ccgccgctcaccccgcggccgcaccttcccgccttctcagaaccaagagccactgagagaggaagactctgattt

SEQ ID NO: 281092 - DNA, 82 bp, Homo sapiens
cgacactacctgggccatacagactgtgtgaaatggagcagcagagactcctcaggaagactcactggactgtacccaccac

SEQ ID NO: 281093 - DNA, 82 bp, Homo sapiens
ggagtctctcaaatctcaggaatttgttgaaacggggctttgctatgatactcgggtctatgtacagacatggagcactcag

SEQ ID NO: 281094 - DNA, 90 bp, Homo sapiens
ggactggcccccttgagcctgtcccaagccctggtgccaggtgtccatccccgtgctgagtgttctaagaacggaagcatctgggctgga

SEQ ID NO: 281095 - DNA, 75 bp, Homo sapiens
gtgccaagaggttctctccccctcctgctatggagaaggtcctcctagccagcagttttgtgcccatttatgcag

SEQ ID NO: 281096 - DNA, 100 bp, Homo sapiens
ccttggtgcagagggaaagtctgaatcatcactaccatctgaactgtggctgccaaaaccattccccttgcaatatgtatatccatggccattgtcacca

SEQ ID NO: 281097 - DNA, 82 bp, Homo sapiens
cgccccgcgagcacagagcctcgcctttgccgatccgccgcccgtccacacccgccgccagagttgcatgctgagaatttga

SEQ ID NO: 281098 - DNA, 75 bp, Homo sapiens
gttatatcctccaggaatactggccaggcagaaaccactaatactagcctcttgcaggtgcaactggaatgcagt

SEQ ID NO: 281099 - DNA, 97 bp, Homo sapiens
ggagagtgtggaagaagcaaccaaggtgtcatggagaaactccagctgggcccagagattctgcagcgggaaaatccaaggcttatttatgccaggc

SEQ ID NO: 281100 - DNA, 82 bp, Homo sapiens
gaattcctggatgacttgttcagcttcatgcagaagcgagtggctttacagtgggtaccctgtcagaaaccagcactggggg

SEQ ID NO: 281101 - DNA, 110 bp, Homo sapiens
accttcggctccaaagacgatgacaagatggtctttaagacagggattgagtgttgctatagtgggacccacgtttcaagatttggcaacaaacgtgaaccgaaatatca

SEQ ID NO: 281102 - DNA, 90 bp, Homo sapiens
tccgccgccccctaaagcggaaccggatcaccgagggcatttacggcagtatgatgctgtccgaataaaccaactctatgagcaagccag

SEQ ID NO: 281103 - DNA, 50 bp, Homo sapiens
cgacagcctcctccgagaagggcttgtttctggtgcaggtgacatcaaac

SEQ ID NO: 281104 - DNA, 50 bp, Homo sapiens
caggaaccaccagtgacagagctgaccggttccctgatgtgttacctgct

SEQ ID NO: 281105 - DNA, 100 bp, Homo sapiens
tccaagaccattcttcaagtttgcaaagtatcctaagaaatccggtaaccaataagaagcattacagattgtatgtgatttataaagttccgcaagtcag

SEQ ID NO: 281106 - DNA, 90 bp, Homo sapiens
cggatagcgagggcggccgcgccggctccaggatccgggagacagtggaccctggagagaggacccagggctggtctagggatgcagcct

SEQ ID NO: 281107 - DNA, 110 bp, Homo sapiens
caggaggctgtgcgggccccgctccgcttcgaatgggaggaggtgcgccagtctgtaactcctgccgagccagtccagtactatttcacgctggctcagcaacccaccgc

SEQ ID NO: 281108 - DNA, 74 bp, Homo sapiens
cgggcccctgagccatgcccatcgcagccgccccgaaggagccagatggtcagtaggacagaaggtaacattga

SEQ ID NO: 281109 - DNA, 98 bp, Homo sapiens
tgcgtcccggggacttggggccgcagggaggaccaagaatcgccttcagccctgtctggtgcatccttggcagaaagtgaggaggaaaacacccccat

SEQ ID NO: 281110 - DNA, 100 bp, Homo sapiens
atgagcaacaaatgcgacgtggtcgtggtggggggcggcatctcaggacggggaggtttactgcatcgacgcgcggttctacgggaacgtcagccggttc

SEQ ID NO: 281111 - DNA, 100 bp, Homo sapiens
cggccaccgcgactccggctctgcgctcggctgcctgacttcttcctgctgctgcttttcagggttcagcggaccaggagaggagaaattgaaacatgct

SEQ ID NO: 281112 - DNA, 100 bp, Homo sapiens
gggaatccaggacctccgggacgaaagaatgccagctgatgaagaccgagaggccgcgacccaacacctttgtcatacgctgcctgcagtggaccacagt

SEQ ID NO: 281113 - DNA, 98 bp, Homo sapiens
gagactgaaatcactgcaccttaaaaacaaaagattgagctgcactgtattcctatcagaggttggatttatgcaaacctgggccaaaggacagttag

SEQ ID NO: 281114 - DNA, 73 bp, Homo sapiens
tgttcttcttcgagtatttgtagaaggattttaaaactgaggaagagctgctatcatatatacgtgaaaatta

SEQ ID NO: 281115 - DNA, 126 bp, Homo sapiens
cagatgaggacacctgaggttcagattaagaaatctgccccaaagtcttagaactggatgtacagttacccagcacgtgtacctcctcctcctcctattgctcgggctgtagtgccctcgaaacgt

SEQ ID NO: 281116 - DNA, 89 bp, Homo sapiens
caggatgctgcaggcggagttcctgcaggccgccctggtcaccatctacgactactacgagccttcccacagaacttaattgcccaatc

SEQ ID NO: 281117 - DNA, 50 bp, Homo sapiens
cgcacgtgtaccctgggcgcaggggaggaagagttcatcgattggtggag

SEQ ID NO: 281118 - DNA, 73 bp, Homo sapiens
tgtatgaccttaacgtggagctctccaagtcatccgtccttggctcaggatttggagagcttgcaccaccaaa

SEQ ID NO: 281119 - DNA, 100 bp, Homo sapiens
gaaacagcagcggaagtagccgggttaacacagaaatctgcctcctgggccatgccgcttctaaggcctgtttcttctcatgagccccagcacaagacag

SEQ ID NO: 281120 - DNA, 75 bp, Homo sapiens
agacggctcacctgtgcgggatggaacaaaaggatccggagtgttggaacagcagctgttaatatgtgccttgtg

SEQ ID NO: 281121 - DNA, 76 bp, Homo sapiens
ccctgggccgggccccaccggacggcagtgacatcagtgtctggcccaggtgagcacctccgaaatgccctgtggc

SEQ ID NO: 281122 - DNA, 75 bp, Homo sapiens
ggcccttcgcgggagagcgtcgtgcacgcgggccagaggcgatgaactaaaccttaagatgacttcacaggatga

SEQ ID NO: 281123 - DNA, 100 bp, Homo sapiens
aagaaatacaggatgcctctcagctgccacctgcctttgacctttttgaagcctttgcaaaaggtaaagttctttacaaagttcgctggaaaggctatac

SEQ ID NO: 281124 - DNA, 88 bp, Homo sapiens
ggaagtgtgaagcggccaatggcacggaggcctgcgtgaaggtgggagtcaatcattttgacaagtctcctgaaaggaacagctagca

SEQ ID NO: 281125 - DNA, 75 bp, Homo sapiens
ttccattccagaaagatggcatcatttttgccctcaaaagaaatggcaggcacgtgtggttctcaaatataggca

SEQ ID NO: 281126 - DNA, 100 bp, Homo sapiens
catgccagcacctaccgagaagctgccacaaaccaggccaagatccacgctgacgcagagcggaaggaggttatcagtgagctgaatggaaaaaacattg

SEQ ID NO: 281127 - DNA, 100 bp, Homo sapiens
ggggcaggatggctgcgttgacacgtcttatttaatccacatcataggtgtcgttatttgtgcaacaacattgaaaaacaagcagaaataaaacattgac

SEQ ID NO: 281128 - DNA, 100 bp, Homo sapiens
ggaagaagcctggtctccggggccgctggattctgaggaccagcagatggccagtcacgagaacccaggtccctgtgcgttttattgcgacctgccggtg

SEQ ID NO: 281129 - DNA, 80 bp, Homo sapiens
cattctttgagggacccccattcaagttcaagttcacaattggcgtgtggacactgccagcggctgcagccgacttggaa

SEQ ID NO: 281130 - DNA, 100 bp, Homo sapiens
gcctcccgagcggctgggattacagttttgtcaaagcaacaggcttcacaagtcctggttaggaagcgtcgtgcaaattctttacttgaagaaaccaaac

SEQ ID NO: 281131 - DNA, 100 bp, Homo sapiens
gcttaacgtcccagtggatgactccttggttaaggagccgtgagacacacaaaatcgcagtgttttacattgctgaaggtcaagaagacaagtgttcaat

SEQ ID NO: 281132 - DNA, 82 bp, Homo sapiens
agatttatacagagatgtgatgttggagaattacagcaacctggtttcaatgggttctgatggtcctttggctaccagcaaa

SEQ ID NO: 281133 - DNA, 100 bp, Homo sapiens
ggaaactctgcattctcgcttcctggagttatgtgtctcggtaccacgtgaaagactcctcacgccacgtcatcctaggcacccagcagttcaagcctaa

SEQ ID NO: 281134 - DNA, 75 bp, Homo sapiens
cacggtcctaagagctgggcaccaggaagcgaaggctggtttgtggtaaatatgccagctctagaacacatgaat

SEQ ID NO: 281135 - DNA, 99 bp, Homo sapiens
atatgatctgtttagtgaacttggaccctacatgaaggatcttggtgcacagaatcgagagctccagatcatgagaaagctagatcactgtaacatagt

SEQ ID NO: 281136 - DNA, 100 bp, Homo sapiens
ttctgattaagcagttttacagtcttttgtgtttgagcaacacacctccacttactgagtatttcctcaatgataagtatcaagaagaactgaattttga

SEQ ID NO: 281137 - DNA, 83 bp, Homo sapiens
ctgggctgaggcgccgcggtaccatgaggcgccgatttaggtcgatctcgagaactacagtatgtatacgtggataacaacat

SEQ ID NO: 281138 - DNA, 90 bp, Homo sapiens
ttatcaaaatcccaggctgtcggaagcaagctggaagaagaactgagacagcagaaagaagcagcttgtttcaaggctcgtccaaacacc

SEQ ID NO: 281139 - DNA, 98 bp, Homo sapiens
gcgctgggagcaacgggagtgtcctggacccagctgagcgggcggtcattcgcatcgcaggctgaccccgcactacatctacccaccagccatcgtgc

SEQ ID NO: 281140 - DNA, 75 bp, Homo sapiens
ctgagggcatcatggtcaagacttttgaagatagaatggctcagggacctcaaagcgcaagtcccagcagcccag

SEQ ID NO: 281141 - DNA, 96 bp, Homo sapiens
agagacgagccccgagcccggctggacgccgctgcctcagcatgcttgagagttcaaaccggcttgatgaagaacacaggctaattgccaggtatg

SEQ ID NO: 281142 - DNA, 100 bp, Homo sapiens
atctggtccaaacaatcatgggaatttccaaggggattcaaacttcaacagaatgtggcaaccagaaagtgactgagaccgaagatgatagtgatagtga

SEQ ID NO: 281143 - DNA, 87 bp, Homo sapiens
ctgcctcctctgggaacctcaacaccctgagcagcctccacccaatgggaggggatcccaacaagccctcaggattcagaagtgtta

SEQ ID NO: 281144 - DNA, 75 bp, Homo sapiens
ttggagtgtgcgtgcgcgccgagcgagctgccatcagtcatgctcttaaacggggactgcccagagagcctgaag

SEQ ID NO: 281145 - DNA, 98 bp, Homo sapiens
ccgtcgttgccttgtatttccagagaacaggcagcacaacaagattcgcagcgtggaggggagccagctgaaggcctacctttccttagaagtgttag

SEQ ID NO: 281146 - DNA, 98 bp, Homo sapiens
cgtctgaggaggtgcgggagctcgagggcaagaccggctgtcaaaatgcagatcttcgtgaaaacccttaccggcaagaccatcacccttgaggtgga

SEQ ID NO: 281147 - DNA, 74 bp, Homo sapiens
taccgagagtttgaaagtgcgattgtggaagctgctcgggacaatctctatgggaagcagaaggcaaggacccc

SEQ ID NO: 281148 - DNA, 82 bp, Homo sapiens
gtcagaccagttctatcgctacaagatgccccgtctgattgccaaggacagagcgggatgccaccagcttgtccaaagggaa

SEQ ID NO: 281149 - DNA, 51 bp, Homo sapiens
cacttggagtccggacatctgaaacttggcttgcttccggcgtcatggctc

SEQ ID NO: 281150 - DNA, 100 bp, Homo sapiens
cagcaaggtgtcggtgttccacgtgaagctcaccgacagtgccctgagggccttcgagagctaccgcgccagacagggcagagcggcttgggtaaatcca

SEQ ID NO: 281151 - DNA, 75 bp, Homo sapiens
gtggaggcgccgctctagcggccgggactctgaactatggcggaactgacccaggagtgtgatgaaaagaaatcc

SEQ ID NO: 281152 - DNA, 96 bp, Homo sapiens
tggaaggtgcgcgagctggtggacaaagcttaccgaagtgcatgtttgggattttgttgaagaaagctggatacagtaaacggaaagaatcttgga

SEQ ID NO: 281153 - DNA, 97 bp, Homo sapiens
aacaggcatggacgtttccgggcaagagaccgactggcggagcaccgccttccggcagaagctggtcagtcaaatcgccgtgccgtccctgcagtga

SEQ ID NO: 281154 - DNA, 100 bp, Homo sapiens
tcaccaaataagctatatactttggttacctatgtacctgttaccactttcaaaagtgtcattccacacatccacaaatctctgattgggaagaaaggac

SEQ ID NO: 281155 - DNA, 89 bp, Homo sapiens
catgttccgtggcctcgcccaggccgacgggtatctcgggggagctttgtgccttgatggatcaagttcatcatatgcagcactcaaaa

SEQ ID NO: 281156 - DNA, 78 bp, Homo sapiens
gcgcagggcctgcagcgggagctggacggcgagcgcgagcggcgcgagaaattactgtggaatacacgatcctgcctg

SEQ ID NO: 281157 - DNA, 97 bp, Homo sapiens
ctatggttatgggggacaaaaaagacctttagaagatggagagactctccaacatgtgccttctgaccatacaaatgaaacttccaacagtactgtg

SEQ ID NO: 281158 - DNA, 51 bp, Homo sapiens
tgtgttcctcaatgaatcacgcaccaccaggaccagctgatcattccagcc

SEQ ID NO: 281159 - DNA, 74 bp, Homo sapiens
ggattttaagccaaacacataatatttttactcagcttctgcagaaagccgtcattacacctgattttgaaaaa

SEQ ID NO: 281160 - DNA, 96 bp, Homo sapiens
tgatttctgctgttcaaaaaagtccctaaaggatgaattgatccatgagttaaagcagacactaaatgctatcaaattagaagaaaaaggagtcta

SEQ ID NO: 281161 - DNA, 100 bp, Homo sapiens
tgaagcctggaaacgaggcactcagttggaagagtccagcaagaaagtccatgagatgctgaagaaggggtgggatgctgaaggttctcccttccgaggc

SEQ ID NO: 281162 - DNA, 76 bp, Homo sapiens
cgcaacaataagaaactcctgggccgcgtgaaggccttcgatagggtgtccgcaatgttgccagtgtctgtctgca

SEQ ID NO: 281163 - DNA, 73 bp, Homo sapiens
ggggtcatcctagggaaaacactatcctctgagatcccagatcatgagacatatctgaagagatggattaaga

SEQ ID NO: 281164 - DNA, 82 bp, Homo sapiens
cgcaccgcctgctgctgctggcaaaatgatgcttcaacacccaggccaggtctctgcctcggaagtgagtgcttctgccatc

SEQ ID NO: 281165 - DNA, 82 bp, Homo sapiens
cgtccccggcgcgaagaggctggactcggattcgttgcctgaggcagatcgggagcggtgccgagaaaaatttccttactag

SEQ ID NO: 281166 - DNA, 75 bp, Homo sapiens
cgggaggagcctgttcccctgagagtcctcgaatgccaccttgctgaccaatgcagagaagattgccaccatcac

SEQ ID NO: 281167 - DNA, 96 bp, Homo sapiens
agtacacctgtgtgcccagcaacagcctggggcgctccccctccgcctcggcgtacctgaccgtgcagttagagacggggtttcaccgtgttagcc

SEQ ID NO: 281168 - DNA, 83 bp, Homo sapiens
atttctttggagacaaaactatgccattcgtgtttagtaggagcacagtagctgtttggggaacgaccttaagtgaatagatg

SEQ ID NO: 281169 - DNA, 75 bp, Homo sapiens
cgccgaccggggagaaggtcacgcacactggccagataactggagtgccaaggctaaaagacgaaataccaccgg

SEQ ID NO: 281170 - DNA, 100 bp, Homo sapiens
caagctcgcgccggatgcggagcgcggtgctgccggtggagcttcagggtactagatggaaacttgagaaaggactgcttattgataacagctaaggtat

SEQ ID NO: 281171 - DNA, 80 bp, Homo sapiens
gggttccaggaggacacgctgcagttggccttcatcgacttgagacaagtgtcccgacccaggctaagcttgagcatggc

SEQ ID NO: 281172 - DNA, 100 bp, Homo sapiens
tcacttctcaccgcgccctccagcttcacccgtacaggtagccccgccgccgcgcacctgccttcgctcccgcaccgggattaatgaaaatcaagttcca

SEQ ID NO: 281173 - DNA, 80 bp, Homo sapiens
gaccctgttccatccaaactcttgccctttgagggaccaggggtcgggccccggctcagtggtcccaggcagctcgggtg

SEQ ID NO: 281174 - DNA, 100 bp, Homo sapiens
attttccccagagaatacctccttcaacagatccacctgtattcacttgccgacctgcagcaggtcttgggcgtctttggtactggcttttttaggggtc

SEQ ID NO: 281175 - DNA, 76 bp, Homo sapiens
cggtcaacggcttcatcagcaccttggggagctccggaatgctcaaagtgagcagctcatgggcatccgccgcgaa

SEQ ID NO: 281176 - DNA, 51 bp, Homo sapiens
agcgtggccggcagcgtcccggacgaggagcatttgcaagtgaggaagcag

SEQ ID NO: 281177 - DNA, 100 bp, Homo sapiens
tctgcaccctctgtccctggacagcccagaccgggaaccaggcttttaaggataccggaaaaacacccgtggagccggaggtggcaattcaccgaattcg

SEQ ID NO: 281178 - DNA, 75 bp, Homo sapiens
ggaggcggaggtccaagcggaaagtctgaaccggacggcttttctcatttccacttgtacgtgtgcgctgctttt

SEQ ID NO: 281179 - DNA, 74 bp, Homo sapiens
ggagcgtccggagctagctggatcctctaggcaggactttccttatcccagttgattgtgcagaatacactgcc

SEQ ID NO: 281180 - DNA, 82 bp, Homo sapiens
aatgtctgtggtgatgactatgatgaagcagcttacaaaacactacacagcaaaataatgatctgctagactgctaacccga

SEQ ID NO: 281181 - DNA, 98 bp, Homo sapiens
gcaggcctcgtgccgttacggccatcacggcggccgcagtggcgtcctggagccctcctcaggttacttcctcagaatgttggcctcctgtatgttgg

SEQ ID NO: 281182 - DNA, 82 bp, Homo sapiens
gcaaggagctaaagcagcgtgcgttcagccctggggcgcttcctcccatcaacacagtcggcggagacaaggttggctaaag

SEQ ID NO: 281183 - DNA, 90 bp, Homo sapiens
tttatgggaaaattaagcagatgctccagtttgagaaacctggatctgcgatctgtttgtgaactttttaacaacagtggctattctttt

SEQ ID NO: 281184 - DNA, 82 bp, Homo sapiens
cccaggcccggaagctggtggaacagctacgcatagaagccgggattgagcgcatcaaggaagctcttcgtgggcggtcttg

SEQ ID NO: 281185 - DNA, 51 bp, Homo sapiens
tgtggctcagttttcttggaaactacttgtgatggcatcagctgagaaggg

SEQ ID NO: 281186 - DNA, 100 bp, Homo sapiens
ttccccggcccacagtgggggtgtgcaaacccgagagaactggtttgtgaatagcacaatggaagaagctggactttgtgggttaagagagaaagcagat

SEQ ID NO: 281187 - DNA, 100 bp, Homo sapiens
caatgttccgggaagttcttccaaagcaaggaaaggccgagggggacggcaagatgcacatcaccctctgtgacttcatcgtgccctgggacaccctgag

SEQ ID NO: 281188 - DNA, 90 bp, Homo sapiens
gctgcctacagaaccgtcccaaaatatggcaaagaaacctattctgagattcctggtcgggtggcttccagtggtcttcagtctgtcgtg

SEQ ID NO: 281189 - DNA, 96 bp, Homo sapiens
ctgctcctcactttcttcctccgcacggatgctgagaactatgtcttcagcagtggtgcagttatatgcagcagatcggaactgtatgtggtcaaa

SEQ ID NO: 281190 - DNA, 100 bp, Homo sapiens
aacagcttcgtagtgaagagaggcgtctacaagagcgattgctacacatggacagtgatgatgaaattcctatcagtcaccattactttaagtactgcaa

SEQ ID NO: 281191 - DNA, 89 bp, Homo sapiens
ggagacatgagcaagaaaagcctctgggagcagaagggaggctccaagacctcatcaacaattaagattaacgtgacagtgtcaggtgg

SEQ ID NO: 281192 - DNA, 100 bp, Homo sapiens
cttcggtacaggagccccctcttgactactccttcagaagcatccacgtcattcaaggaatagatggacatggcctggcagatgatgcagctgctgcttc

SEQ ID NO: 281193 - DNA, 102 bp, Homo sapiens
aggagagtcatgattttgaatcacccagataaagcatgtgatagtgatggaagatatgctgaaagactttctccttggagaacacttattattggttggcaa

SEQ ID NO: 281194 - DNA, 75 bp, Homo sapiens
ccgactctcatacaggcgggcgccagtgcatcttctaggaaaatgttggggcttttcaggaagcataataagatt

SEQ ID NO: 281195 - DNA, 100 bp, Homo sapiens
ggagtccccggcaggcacagctcggccgtcgatcacctccgggcacaggatgcgagggccaattcctgtccccccagcagcatggcatcgtgtgctgaac

SEQ ID NO: 281196 - DNA, 98 bp, Homo sapiens
gctccggatggctccgcaagtcccccccggagaaaaagttgaagcgttattataaaagaacgtgtggatcactttgctgagtacatccaagatttgaa

SEQ ID NO: 281197 - DNA, 75 bp, Homo sapiens
gcagcagatggactgcgactcccgtcaggccaggtcagagcagcccaccatgggatggggagggggtggaggctg

SEQ ID NO: 281198 - DNA, 100 bp, Homo sapiens
cacggagcgccgcggccgcatctacatccaggcccacatcgacagggacgtcctcattgtcctcgatgacgtccggttgtttgccttcgtgcgcttcacc

SEQ ID NO: 281199 - DNA, 100 bp, Homo sapiens
agcacagaagcattaccatgacgctctgaacatcatcgacatggccctgagtgaatacccagaaaatttcataaggaacccagccagccggcggaatgca

SEQ ID NO: 281200 - DNA, 90 bp, Homo sapiens
cttatctctgtatggcacaggaaccattcaacagcaaagtactcctgccgggggccgggggccggagcgcgccgacgccgaacccgctgc

SEQ ID NO: 281201 - DNA, 98 bp, Homo sapiens
tgggatctctatgtcggcatgtagagaaatagcatgtgttggcatgcatcagcccagaagcagtgatctctggattaaactgcatgtcatttgctaat

SEQ ID NO: 281202 - DNA, 100 bp, Homo sapiens
ccctctctgagctgaagacatttcgggcgtccccctggataccagtaaactgtccactgaccagcggttacccccatacccatacagctccccaagtctg

SEQ ID NO: 281203 - DNA, 95 bp, Homo sapiens
gcctcagttggaagcagccgatccagcctgcggagcctgtggggcaggatctggaaatagtatattcctatttacatggtatggaagccttatca

SEQ ID NO: 281204 - DNA, 90 bp, Homo sapiens
ggatcctctggccagctgactgcacttcttttttgagaaaggaaggaatatatcctgactgattgtttgatcccatataatttcatctgt

SEQ ID NO: 281205 - DNA, 82 bp, Homo sapiens
ctaaggacttcatgcccgccagcaaaggcggctatgagaggttttcctccgagtacccagaattctgttctaaaaccaaggc

SEQ ID NO: 281206 - DNA, 100 bp, Homo sapiens
gcggttgaccaagaagcacacagtaagtcaggagagttttgccgaattgacaagcccctgtgtcacagtgaggatgagaaactcagcttcgaggcagtcc

SEQ ID NO: 281207 - DNA, 75 bp, Homo sapiens
cgggaagatttacacagatggaaccagaaaagatacgaggctctaggagaggtgacagatcagtcagtgaaagca

SEQ ID NO: 281208 - DNA, 50 bp, Homo sapiens
cctgggtgtctctagcctcaaagatgctccctcccatgccccagagctgc

SEQ ID NO: 281209 - DNA, 90 bp, Homo sapiens
gaaagacctcagagtgttctcagtttgaactgcactggtccactgatagacaaagtttcttctgactgtgccaccccaagacagcaagac

SEQ ID NO: 281210 - DNA, 99 bp, Homo sapiens
aagtacttccagggagacctgcagctcttctccatggaaggctttgggaccgatgctgtcatctatctcaagctggtgagcctggccagtgaagtccag

SEQ ID NO: 281211 - DNA, 90 bp, Homo sapiens
aatgccacatgagatgatcacctcagcagaaaactgctgtatagatcaattggagaatacgacgtcctccgtgggatttttaccagtgag

SEQ ID NO: 281212 - DNA, 99 bp, Homo sapiens
ctcggaaagcgctcagaagaacgcttcgcccgttggtgctatgcaggatggggaagcagaatagcaaactggcccctgaagtgatggaggacctggtga

SEQ ID NO: 281213 - DNA, 74 bp, Homo sapiens
cttttacgagtccctccctcccgaaatgaaggagttcacccctgaatacaaagatgcagacagacatgctgaac

SEQ ID NO: 281214 - DNA, 96 bp, Homo sapiens
atcagagtcaatcctagacattataatgcatgttacatggacacagaacagtatgaagaagcagtacgagactatgaaaaagtataccagacagag

SEQ ID NO: 281215 - DNA, 100 bp, Homo sapiens
ggaccctcgtcaatctctttcgaagccattcagtcctcaatctccttttccttggctacccgaagggaaaaggccgaggcatcagcgtgtgaagaccgca

SEQ ID NO: 281216 - DNA, 51 bp, Homo sapiens
aagaatgccggtcacagcccaggaggttaacttggataagctgaaggaaag

SEQ ID NO: 281217 - DNA, 90 bp, Homo sapiens
cgcggtcttcgtggtgttcgtggcaggttgacatcatggacatatgtgagtccatcctggagaggaagcggcatgacagcgaaaggtcta

SEQ ID NO: 281218 - DNA, 100 bp, Homo sapiens
agctgcgggagagccgggtaccggccgtggaagcggccaccgactactgtcagcagctgtgccaggccaagatcaaggctcgagatcttcgcgggaagaa

SEQ ID NO: 281219 - DNA, 82 bp, Homo sapiens
ggctcctcggccgtgggccagttcgtgtccctggacggtatcatgatattagctggtttgacatcaagtcatttgtgagtca

SEQ ID NO: 281220 - DNA, 74 bp, Homo sapiens
tacacgccatattcacaaataaagaagtccagcttgcacagatttttgagaagccggcaggagtgactctcggc

SEQ ID NO: 281221 - DNA, 90 bp, Homo sapiens
gcacctcctcgccagcagccgtccggagccagccaacgagcgccgaaaactaaatgtgacccttacgtacttgagcatggagatgaagtc

SEQ ID NO: 281222 - DNA, 75 bp, Homo sapiens
ctgactcaagcggaggcgcgcggaacagtcgccgaggcgattcccgcccaggctcaccagctggattccctcctg

SEQ ID NO: 281223 - DNA, 122 bp, Homo sapiens
ggcggcgtggaagctgtgagcgcccccatcccggaggtctccgccggctcccggggatcgcttacacctgagacgaactacagaacagcacgtaccagaggtggaagtccaagtcaaacgca

SEQ ID NO: 281224 - DNA, 82 bp, Homo sapiens
gcctttcggactgaggcccagcgcagcgcttgcaaagaggcatgtcgggccccaggcctgtggtgctgagcgggccttcggg

SEQ ID NO: 281225 - DNA, 82 bp, Homo sapiens
tccttcggcagtccacccaccgccgccgcctcccaggaagatgttaccgagtacttcagtgaattccttagtgcaggggaac

SEQ ID NO: 281226 - DNA, 75 bp, Homo sapiens
actcgatgctcaaagaggactgcgcctccgagctgaaggtatacgtaggtaacctttccagagatgtgacagaag

SEQ ID NO: 281227 - DNA, 75 bp, Homo sapiens
ggaggaactggcccggaaacaggaggacgctcgggacgtgtacgaggaggccatccggacagtgatgaccgtgcg

SEQ ID NO: 281228 - DNA, 82 bp, Homo sapiens
agaaacataagaaggaggaggaggatgaagaacttgacctcaataaaggtagaaaatccattagaggaagccgttaagttcc

SEQ ID NO: 281229 - DNA, 96 bp, Homo sapiens
gatgtgatgttggagaactacagaaacctggtctccctagggatggttttagattgtcatctcaagaagctgcttctagttttggcgatgatagac

SEQ ID NO: 281230 - DNA, 100 bp, Homo sapiens
ctggaggagatgaaagctttgtatgaacaaaaccagtctgatgtgtacaaacccgtagtgctgatgaaccaatgacaacatttgttgtctgtaatgaatg

SEQ ID NO: 281231 - DNA, 100 bp, Homo sapiens
cgtggggaagacgtcgctggtgctgcgctactgcgagaacaagtttaacgacaagcacatcaccactctgcaggttaccactacaacgacctggtgtctc

SEQ ID NO: 281232 - DNA, 85 bp, Homo sapiens
gactcctacttcctctgtatagagcaactgttgaactcagctgcctgtagttgttttttgaggacagcattgatgatgccaagta

SEQ ID NO: 281233 - DNA, 90 bp, Homo sapiens
ccaccgcctcatgcactgtgtaggctactgcagcactggggtgtcagttgttggtccgacccagaacgcttcagttctgctctgcaagga

SEQ ID NO: 281234 - DNA, 100 bp, Homo sapiens
tgctgagcaagcccccgttccgctacctgcacgacatcatcacggagccttgaaaagatcttttgaggtcgaggaggtcgagacacccaactccacccca

SEQ ID NO: 281235 - DNA, 100 bp, Homo sapiens
attttggtttaatatctgattgggacaacattcagacccatttccagtcatgatgggaaagaagcctaaggaataaagtcatctctctagaccataaaaa

SEQ ID NO: 281236 - DNA, 75 bp, Homo sapiens
cgcaaggtgtccacgtcgggtcagatccgacagaagtcaaataaagtgcccgtggtgcagccatcccatgcggtc

SEQ ID NO: 281237 - DNA, 99 bp, Homo sapiens
ctcctgagcagctgggattacagatcttagcaaagcaatgtctcaagatggtgcttctcagttccaagaagtcattcggcaagagctagaattatctgt

SEQ ID NO: 281238 - DNA, 75 bp, Homo sapiens
tttcagaggccggaaaatgccctcaaacgcgccaacgggagttgaccacatttggccatttcccagaagggcccc

SEQ ID NO: 281239 - DNA, 100 bp, Homo sapiens
gaccccttagtgcccagccctctgttgaaaaagagaacttggcaatagaaagtcaatcgtcatcttgcagctgtggcacacaaaacactacaaataaaag

SEQ ID NO: 281240 - DNA, 76 bp, Homo sapiens
agagactgcgactcgctcaaggggctctgccgcatcatgggcaacggcttcgtttcctccagcctggtggtgccct

SEQ ID NO: 281241 - DNA, 100 bp, Homo sapiens
cgcagcccgggcccaggccccggcagcgcctgggacaaggaactcgaatcatttatgacagaaagtttctgttggatcgtcgcaattctcccatggctca

SEQ ID NO: 281242 - DNA, 51 bp, Homo sapiens
atttactaactgtgtgaccttagagagctcagaaatatgctcagcaagtct

SEQ ID NO: 281243 - DNA, 98 bp, Homo sapiens
ccccgcagggatctttgaattggtggaacttgttggaaatggaacatacgggcaagtttataagcttcaaaagcagtggactgtcttttggattcaaa

SEQ ID NO: 281244 - DNA, 101 bp, Homo sapiens
ctctcctgggcggcggggatgggaggtactaggttttgacaagcttgcatcatgcgtgagtataagctagtcgttcttggctcaggaggcgttggaaagtc

SEQ ID NO: 281245 - DNA, 98 bp, Homo sapiens
tgtggtgtcctctacaccatctgtggtcatgtcaacagtagcacaaggaagggaaaaggccgaggcatcagcgtgtgaagaccgcaaagacgatcccg

SEQ ID NO: 281246 - DNA, 100 bp, Homo sapiens
cagccctgtgccaggaggctggctggaataaagcatcatcggctggttcgtgcgaagcttcaagtacttttacgggctccgcttcgaggtgcgggacccg

SEQ ID NO: 281247 - DNA, 100 bp, Homo sapiens
gacagaggaaaatcagaccatactggaagaattattttgaaaataccgatattcttgttgttcctcaaagtcattcaagctgtactcgccgaaggagccc

SEQ ID NO: 281248 - DNA, 98 bp, Homo sapiens
gccatcagcttcagctccagctccgctctcttcggctgccccaatccccggcagctctctcaggaacagcatctgttgcagttgcaggtctccttgca

SEQ ID NO: 281249 - DNA, 100 bp, Homo sapiens
atgctcagaagactattcttctgcaggtggatcagaactgtgttcgcaattcttacgatgtcttctctttgctacgggttctcatgtatcagccatcttc

SEQ ID NO: 281250 - DNA, 75 bp, Homo sapiens
ctagccaacatgcagttacaacagcatacagcatttctcccaccaggcaacggacagccaagacgtagatccatc

SEQ ID NO: 281251 - DNA, 100 bp, Homo sapiens
cgccagcggagcgaacccgagagcgtggagcgggctgggccaggtttgtcctggttgtggtcaagactggatgatgtaactggctctctaggaagcctca

SEQ ID NO: 281252 - DNA, 88 bp, Homo sapiens
gggaaccgcctgggaactccgccatgtcatccacttcgcccaacctccagggactttgaacatgtcggggatcgccctcagcagactc

SEQ ID NO: 281253 - DNA, 90 bp, Homo sapiens
tggattttatgtgctacagtctgcggaacggagcagtatttcaatgtggagtgccctagagtccatccagagtgcccgtgctgcccaggc

SEQ ID NO: 281254 - DNA, 101 bp, Homo sapiens
tgggccatgatccccgagctgctggagaactgaaggcggacagtctcctgcgaaaccaggcaatgggttcaaaatgagcctgtttggaacaacctcaggtt

SEQ ID NO: 281255 - DNA, 83 bp, Homo sapiens
ccgcctcagcgtccgccctcaggcccgtggccgctgtccaggagctctgctctcccctccagctcttttggtacaccagaagg

SEQ ID NO: 281256 - DNA, 75 bp, Homo sapiens
cacatcagatactggaaggacatacaacgtgtcctggagagacagcacaatgggctctatcttcatcacacaact

SEQ ID NO: 281257 - DNA, 74 bp, Homo sapiens
tgaggacccaaagtcatttcccaggctggcggagatcacccttctagacttcagaccacagacaacctgctccc

SEQ ID NO: 281258 - DNA, 83 bp, Homo sapiens
tggctctccggtctccatcgccctggcccagtacctcatcactgcctggaggtggtccaggccacgctggtggtcctggcctt

SEQ ID NO: 281259 - DNA, 145 bp, Homo sapiens
attcaacaaaagatggacaaaaaggcatatttcttggggatgatgaatggagagagactgcatggggagcttctcgaggagatgttaaagtaacccatcttgcaggacgacattgaagattggtcttctgttgatctaagatgat

SEQ ID NO: 281260 - DNA, 75 bp, Homo sapiens
agcggccaaccacgacctgacggacaccacccgggcgggtgacagagctgaatgaacctctctccaatgaagatc

SEQ ID NO: 281261 - DNA, 90 bp, Homo sapiens
tatctcagcaggacattaaagtgtcaatgtgtgcggataagaacaaaatccagtctcatagcagaggagaatataatgtttacagcacct

SEQ ID NO: 281262 - DNA, 75 bp, Homo sapiens
gtattggtttgatgctcctacctggaacaggaataagtcttgactgggatgaaaagagaccagaatttgttcgag

SEQ ID NO: 281263 - DNA, 100 bp, Homo sapiens
tgcttctggcggccatggtgttgctgctgtactccttctccggttccatgtatgatggcttggctgacaattacaactatgggaccaccagcaggagcag

SEQ ID NO: 281264 - DNA, 75 bp, Homo sapiens
gattgcagtgggggctgccagtgctaccctgagaaaggtggacgtgagactccatcctctgccaatggcccttcc

SEQ ID NO: 281265 - DNA, 50 bp, Homo sapiens
ctcctttacacagtatcagaacgtttctaagcatgaattgaggaacagaa

SEQ ID NO: 281266 - DNA, 100 bp, Homo sapiens
ataccatatttgttaagcaagttaaagaaggaggacctgcttttgaagctggattatgtacagaaacaggtgggtgagatgaaattacaacttgaaaatg

SEQ ID NO: 281267 - DNA, 100 bp, Homo sapiens
ttgaactactgccggagcttctgccagatggtccagtagtctatgcagcatatttaaaaatggagcacagtgacgagaatattcaattctggatggcatg

SEQ ID NO: 281268 - DNA, 113 bp, Homo sapiens
ccttggaggaaacaaacaggccctggaagaggcggcaacagaggaatcttcgagtatgcggacggccccaacgcccaggtcatgaatgccgaggagcatgcctttcgattttc

SEQ ID NO: 281269 - DNA, 96 bp, Homo sapiens
gggaagggaaggagtgggagacggtactcaccagccggatcctcactgctgcgggcagctgggacagaagatgctccagcatttgaggagatgagg

SEQ ID NO: 281270 - DNA, 118 bp, Homo sapiens
cggaggcggctttggaagccgtgcggagcgagttacgagaattcccggccgctgcaagggacaatgcagatcttcgtgaagactctgactggtaagaccatcaccctcgaggttgagc

SEQ ID NO: 281271 - DNA, 96 bp, Homo sapiens
tggtaatcctgacgaaattgaaattacctccgagggaaacaagaaaacatcaaagaggtctagcaaagggaccattgacatttatggatgtggcca

SEQ ID NO: 281272 - DNA, 141 bp, Homo sapiens
aagctgcacgtggagggcacggagtgtctccaagccagccagtgcactttgcttatcccggagaccatgctgagccggttggtgatttctccaacagggaagcttccttccagaggccctaagcatttgaagctcacacct

SEQ ID NO: 281273 - DNA, 100 bp, Homo sapiens
acagattactttgtgattgttagtggaacttctacccgacacttacatgccatggccttctacgttgtgaaaatgaatcctcactatggatgggctcatt

SEQ ID NO: 281274 - DNA, 90 bp, Homo sapiens
ctgcagaaggtctctggagacatcttcagcagacgaaagtaggcggtacgaaccctaatggaggcagttttgaggaggtcctcagctcca

SEQ ID NO: 281275 - DNA, 75 bp, Homo sapiens
tacctcgtgggattctgcccggaggggccctcgtgtaaattcatgcagttccccttctactttgaactgaagatc

SEQ ID NO: 281276 - DNA, 98 bp, Homo sapiens
gaggctgctgagaaacgacgccccagaggaagctggagagggatgtgtggctgcgatcctcggggaaaccgagttccagaaacgccgctggactgcga

SEQ ID NO: 281277 - DNA, 46 bp, Homo sapiens
agtctcgactttcctgggctcagatggagtctcgcactgtcgccca

SEQ ID NO: 281278 - DNA, 101 bp, Homo sapiens
ctggccggagagagagggaaggacggggcctggcccccgggactccctgtgccttgcttggagctgacgccgacggggcagagcggcttgggtaaatccac

SEQ ID NO: 281279 - DNA, 74 bp, Homo sapiens
gttgaatttgcgatgggttctgtcttttggcatgtgctcttctgcattagtgaaatgagccgtcagactgctac

SEQ ID NO: 281280 - DNA, 100 bp, Homo sapiens
gaccattcagatgggatctttccggatcaatccagatggcagccagtcagtggtggaggtactggaggccacagctgccctgtacaaccaggacttatcc

SEQ ID NO: 281281 - DNA, 74 bp, Homo sapiens
gcagtggtcgcttcttctccttggatgtacagttacccagcacgtgtacctcctcctcctcctattgctcgggc

SEQ ID NO: 281282 - DNA, 100 bp, Homo sapiens
gttcgtcgggcctgtggaagaagcgccgcgcacggacttcggcagaggttttgaacgaagaatgtgatcagaactggtacaaggcagagcttaatggaaa

SEQ ID NO: 281283 - DNA, 88 bp, Homo sapiens
ccacagttcctaccttatgagctcggttttcttatgcttataagagtggaacagttttagaaagagcgttttcgctacgtaaagcaca

SEQ ID NO: 281284 - DNA, 51 bp, Homo sapiens
aaggcactcaaaagtggggggcaggaaagggaaatgaggcaagttatcctt

SEQ ID NO: 281285 - DNA, 101 bp, Homo sapiens
aggcagggctgaagaaatccatgactccaacccagaaccgggagaaatggatctactactgcaatggccatgctcaactacagaacacctacactctgaaa

SEQ ID NO: 281286 - DNA, 95 bp, Homo sapiens
ggcaaccgcctacgagacactcaaggtttctgtcaggatgaattggcagagcttgacccaggcactagtaagttctcaatgttacccaatattct

SEQ ID NO: 281287 - DNA, 50 bp, Homo sapiens
atcgacttggtggaagcacacagtgaaggaatacgactccatctcccggc

SEQ ID NO: 281288 - DNA, 101 bp, Homo sapiens
ttccgcggcatcaccgatgtgaagaacctagttgccggccttctgatgcttccgctaccagatctcgacctctggccactggaccgtcttcccagtcccat

SEQ ID NO: 281289 - DNA, 100 bp, Homo sapiens
atctcaagcacaaggacaagcaggaaaacggcgagaggactggaggggtgcctctgatcaaagcccccaagagaggcactacaagggcccccagggatgg

SEQ ID NO: 281290 - DNA, 100 bp, Homo sapiens
acgtcgtcatcgacttgtacaccgaagaacggccgcgtgcgagtaaccagctcataaatcacatcgaacagtttttggatactaatgaaacaccgtattt

SEQ ID NO: 281291 - DNA, 90 bp, Homo sapiens
aaacccttcaatagatcctcaccagatgtcaaatttgtttgtcagggcttccgttacaagatgaggtctgtgtatgctcacttccccatc

SEQ ID NO: 281292 - DNA, 101 bp, Homo sapiens
cagctctccaaatcggagccggcatttcacccatgtgatacaggttctctttggtttccagcaagatgcatcaaaccttaccatagcatggctaggaccca

SEQ ID NO: 281293 - DNA, 87 bp, Homo sapiens
atggctattgctactggtggtgcagctctgtggatagcaactggatcgtgggtgccacgctggagaagaagctcccacccctgcccc

SEQ ID NO: 281294 - DNA, 74 bp, Homo sapiens
ttggatgtagcaaggaagaaattgttcagttcttctcagaaggacagaataacgggctcccagattcacaagcc

SEQ ID NO: 281295 - DNA, 98 bp, Homo sapiens
gcttccggagccctcggggcggcggactggctcgcggtgcagcttacgaggaaatatttcagtaaaagcagttaaaaaagaagtagaaaagaaactcc

SEQ ID NO: 281296 - DNA, 101 bp, Homo sapiens
tggggactctgcctcgtgccgctgagcctggcgcagatcgagacggaacctcactatgttgcccaggctggtctcgaactccttgtctcaagggatcctcc

SEQ ID NO: 281297 - DNA, 100 bp, Homo sapiens
gagtcttccaaccagagcttgtgtagcgtcagatccttgagtgataaaggagtagagtctgaagttgcagccggagtgaagaagagcggaccgctgccca

SEQ ID NO: 281298 - DNA, 74 bp, Homo sapiens
actcacacaaggcaggtgggtgaggaaatccagttcatagccctgatgaagcaagttactctgctctcctaata

SEQ ID NO: 281299 - DNA, 100 bp, Homo sapiens
cttcgctaacgcctcccggctctcgtcagcctcccgccggccgtctccttaacaccgaacaccgtgatttgatgaaggctgctgcaggagagttcgcaga

SEQ ID NO: 281300 - DNA, 74 bp, Homo sapiens
ccaagttgaaaatggacgagtaatcgcctgctttgattcattgaaaaggacaagaattttgggcagatttgaat

SEQ ID NO: 281301 - DNA, 75 bp, Homo sapiens
tgaaattttcagcatgtggcaaaacctaggtatctcagatgaagacatcatcaacattactcttcctactggagt

SEQ ID NO: 281302 - DNA, 51 bp, Homo sapiens
cggaaatgtgtcatcgaaagccagaaggtggtcttctgccctgttaaagaa

SEQ ID NO: 281303 - DNA, 88 bp, Homo sapiens
agcctatctattggaattcctcgaactccaaaaaaacacaccttgactttagtcagatacatcactgtctgttaaaggaaaccaagcg

SEQ ID NO: 281304 - DNA, 111 bp, Homo sapiens
caaccattgacgccatgtcgggttattcgagtgaccgagaccgcggccgggaccgagggtacctcaagcattgatacgacatgcaccatctgggggctggagacagggcag

SEQ ID NO: 281305 - DNA, 128 bp, Homo sapiens
tgcagaaggaagttggcaaagatgtgtcagatgagaagttacgagactacatctggaacacactcaactcaggacggatgctgagggttggaaaagcaaaagcagatgtgtggcccaaaactgctcca

SEQ ID NO: 281306 - DNA, 75 bp, Homo sapiens
gtaaatgttgagcctttttggcctggcttgtttgcaaagacgctgaccggaaaggagattgagattgacattgaa

SEQ ID NO: 281307 - DNA, 83 bp, Homo sapiens
acaaagccacgaataacctataatggtgattgaattactcagatatgaagatcatcatctaggttttgtgtaaaaggccctgg

SEQ ID NO: 281308 - DNA, 83 bp, Homo sapiens
ccggtccccgccgcacccagcccagacaatgcagatcttcgtgaagactctgactggtaagaccatcaccctcgaggttgagc

SEQ ID NO: 281309 - DNA, 90 bp, Homo sapiens
aagagtatcccagtatgtacctgtggagcagcttctttatcccttcatctgtggataagcagaccattcctcaagaattttgtatccaag

SEQ ID NO: 281310 - DNA, 75 bp, Homo sapiens
gggcctgcagcgggagctggacggcgagcgcgagcggcgcgagaaaggcaagctggagtacctggtcaagtggcg

SEQ ID NO: 281311 - DNA, 80 bp, Homo sapiens
ctgcgctgtcctaaatgtggcgacttgtgcacacatgtagagacctttgtatgtgtccatcctggtcagaagatgaaact

SEQ ID NO: 281312 - DNA, 75 bp, Homo sapiens
ctcaatgccaagtctatgacatgcgcccagaaacggacccgcagaggtggataagattgtggaccagctgcagca

SEQ ID NO: 281313 - DNA, 100 bp, Homo sapiens
cgtccatcatccgcctcaccacgagctacctgaagatgcgcgccgtcttccccgaaggttaaacccatccagagtaatggctgcggccttacccaggacc

SEQ ID NO: 281314 - DNA, 90 bp, Homo sapiens
ctatggccggcctgcggaacgaaagtgaacaggagccgctcttaggcgacacacctggaagcagtgctggtcccaaaggcgataacatct

SEQ ID NO: 281315 - DNA, 99 bp, Homo sapiens
cacagggctactgttttccaatcctcagtttggaaattttagcattcaggtgccaggaatgcagatgggacagccagtgccagaaacaggcccagctat

SEQ ID NO: 281316 - DNA, 100 bp, Homo sapiens
tctccctcgggacccaaggccacaaaggagagctccgtggagagaagcacatcccgctctgggctttaaacgtgacccctcgcctcgactcgccctgccc

SEQ ID NO: 281317 - DNA, 82 bp, Homo sapiens
acaagagcgaggagaagcgagaaaagatgaaacggaccctgcaatttgaatcaacccatagaagtgacagcgctgtattcat

SEQ ID NO: 281318 - DNA, 96 bp, Homo sapiens
caggcttcttctggatctgaaacagagtttatgacctcagagactcctgaggtaacctgtctggtcagagtgcagcttcagtcttgcacccccagc

SEQ ID NO: 281319 - DNA, 100 bp, Homo sapiens
aggacgactcacatcaacaccgtctcctcctatcctgatgagctgcttcagaaagagcaaaactattcagatgacgtcttggccaacatgattagtgaac

SEQ ID NO: 281320 - DNA, 83 bp, Homo sapiens
ttgtgattcaggagaactggtcgccatcaagaaagtattgcaggacaagagatttaaggatggctggctgtggtgaaattgat

SEQ ID NO: 281321 - DNA, 101 bp, Homo sapiens
aatggggtggaactgagtgccactcgtaagaatgccagcaacatggagtacagttgggatgaatgggttccggagagcagagtactcaaatacgtggacac

SEQ ID NO: 281322 - DNA, 96 bp, Homo sapiens
ggtccggggcttgccctggtcttgctcggccgatgaagtgcagaggtttttttctggtgaagcatatatgcgtttaagcaaactccccgaagcaga

SEQ ID NO: 281323 - DNA, 83 bp, Homo sapiens
gacacgaagcctcccgggtggcttacagacgctgccagcatcgccgccgccaggttatcagtgagctgaatggaaaaaacatt

SEQ ID NO: 281324 - DNA, 82 bp, Homo sapiens
ctgcaaaccacccaagtctgcaatcttaccagggaggccaagcgaccacccaaagaaggcatgcatgtagggaataccggat

SEQ ID NO: 281325 - DNA, 85 bp, Homo sapiens
agaaaatcataccatatcagatgcctcgcagagcaccaggcccaccgtgaaagcttccacctaccgaaagagttttaggttggca

SEQ ID NO: 281326 - DNA, 74 bp, Homo sapiens
cgagtcctgagcggccaggacgacgaggagcagggcctgactgcgcagacctgcctagagctggaacgttacct

SEQ ID NO: 281327 - DNA, 100 bp, Homo sapiens
cgcggcgctggactggagcagaaccccaggactgcgcccccgggagcgggcgcccagagggacttcagtactagtgctaataacatccagattgataaaa

SEQ ID NO: 281328 - DNA, 100 bp, Homo sapiens
ggaggaggggagaaactcccacttcctacacaggaccaaagggagatcacactactggggtaggtgacttcatggtcatgacgattttcttcaatgtgag

SEQ ID NO: 281329 - DNA, 103 bp, Homo sapiens
gcaatgtttgaacaaactcgaagaacagctgtggaaagaagttgcaaaacactgggttatgatgtgattgctcaagcccaatctgggactgggaaaacggcca

SEQ ID NO: 281330 - DNA, 88 bp, Homo sapiens
gctgcagctcctcctgtgcggtctctaacgaagtgccggagcacccatgtgtatcccctgtctctaatcatgtttatgagcggcggct

SEQ ID NO: 281331 - DNA, 75 bp, Homo sapiens
tgaaatgagaatgaagagagctcagttccatgccattgcagtgtcaactaggcctcagttacttttcagtttgcc

SEQ ID NO: 281332 - DNA, 50 bp, Homo sapiens
gaaggctctccatcgaaggcaacattgcccaggatccggttgtggccgtg

SEQ ID NO: 281333 - DNA, 75 bp, Homo sapiens
acctctcagatcccaaacaactggcagaatttgctaggtggctatggaccgccccctgcaggaagaggagccccc

SEQ ID NO: 281334 - DNA, 75 bp, Homo sapiens
agaatcgtggttcaagtcccatccacatggtgtgaatcatggcaatacagtgaaagacagtgatttactgctttt

SEQ ID NO: 281335 - DNA, 51 bp, Homo sapiens
agccacccgttcctcatcaggctctccagggttccttgaaaagaaaacagg

SEQ ID NO: 281336 - DNA, 100 bp, Homo sapiens
atactccaagaaaaaaaccacaaatgtttttctgttttgcctgaatacatgatttaaacaagagatttccacagaaggcaatcttgctgccaatgatctc

SEQ ID NO: 281337 - DNA, 82 bp, Homo sapiens
ccagggaaaggatgacatatttttggacctgaaacagaaattctggaacacctatatgaactcctctttcctaaaatggagt

SEQ ID NO: 281338 - DNA, 75 bp, Homo sapiens
cttcaactatggcagcagcgtggcctccgccaccgtgcacatccgaatggtgtaagaagaagcttgggaagctgc

SEQ ID NO: 281339 - DNA, 100 bp, Homo sapiens
gcggccacctggttcctgcgtgctacggccctgtgggcctgggagctgcctctgaggaacacgccgcaggggatggactgaacggacagttccagaagtg

SEQ ID NO: 281340 - DNA, 100 bp, Homo sapiens
cctgagcgcaacacttctccgagccagcgagccagcgagccgccgacccgccgagcaaaatggtttatcttgcagattatggactttcctacagatattg

SEQ ID NO: 281341 - DNA, 100 bp, Homo sapiens
tgagcgaattgtggcagagtgtaatgctgtccgccaggccctgcaggacctgctttcggagtacatgggcaatatggtatacctcaagtttactatttcg

SEQ ID NO: 281342 - DNA, 82 bp, Homo sapiens
tctggagtgaagaacgccgccatccagccaccattccaaggatggtgctgctccactggtgcctgctgtggctcctgtttcc

SEQ ID NO: 281343 - DNA, 83 bp, Homo sapiens
ttcagtgatatcattaagtccagatctggtcagtttacgttgcgagacatgtatgagcaatttcaaaatatcatgaaaatggg

SEQ ID NO: 281344 - DNA, 74 bp, Homo sapiens
tgcaaagtgtgaccagtgtggaaacccaaaggtatctcccaataagtcaccccagattcgttcgaaccatcccg

SEQ ID NO: 281345 - DNA, 100 bp, Homo sapiens
tttcacttattcatctgtccagcatgactcatccccgggagtgttgatatccagtccagccagaagaagagccaaaagctctcagcacctcttgaccaag

SEQ ID NO: 281346 - DNA, 73 bp, Homo sapiens
gggagttgagccacgagctgttgtgcatccagaggtggaattggggcccgaggtcatgacgccagtcagatca

SEQ ID NO: 281347 - DNA, 100 bp, Homo sapiens
ccaatcatcttacaaaactggaaactgaggcatctaatatgaagaagatgcaagtggaccaggaggaaccacatgttgaagagcaacagcagcagacacc

SEQ ID NO: 281348 - DNA, 83 bp, Homo sapiens
aacggggttcgggtgtctcgtgtgtgaacatcacaggttttaaaatcaaagatgggaaaatcggagaaaattgcccttcccca

SEQ ID NO: 281349 - DNA, 88 bp, Homo sapiens
caggtatcttatgaagagtatctctgtatgaaaaccttactgcttctctcttcagcggagattctggagctggctggcaatgcagcga

SEQ ID NO: 281350 - DNA, 121 bp, Homo sapiens
tcattcaattgatgggagagtagttgagccaaaacgtgctgtagcaagagaggtcacggtctagatcacattctcgatccagaggaaggcgatactctcgctcacgcagcaggagcagggg

SEQ ID NO: 281351 - DNA, 100 bp, Homo sapiens
cgcaggcccccccgcgccgaccgcgttcctatggacagacgcacagacacctgcaggtgaaaggtgtagcagtcactcggcctacacccacagcatcgac

SEQ ID NO: 281352 - DNA, 74 bp, Homo sapiens
ttggaaatgttattgataactatgtttatgaacataccctggaatcccgttctgcttccagaagtggaagtgct

SEQ ID NO: 281353 - DNA, 75 bp, Homo sapiens
ccaaggattatgaagagcatgacaagaaacctgctcctccaaagccagagcccaagcctaaaaaggcccctgcaa

SEQ ID NO: 281354 - DNA, 100 bp, Homo sapiens
cgccccgggccaccgcgcaaccaagtgttgcctggtgaggtactccaaagattcaggtttactcacgtcatccagcagagaatggaaagtcaaatttcct

SEQ ID NO: 281355 - DNA, 88 bp, Homo sapiens
gaatacctcaaacgtctaccattacagtgtgagggccccaaggctgttgcagctcctcgacctgatcggttggtcaatcgcttgaaga

SEQ ID NO: 281356 - DNA, 87 bp, Homo sapiens
tgatttgatgcataaaggcagctttgaaacagatactagttccacacgtgctcccgggaaaaccctgccagaaataagccgaattag

SEQ ID NO: 281357 - DNA, 80 bp, Homo sapiens
ggcggaggatcgacctcaacctggatatcagcccccagcggcccaggcccagaccaagaatcgccttcagccctgtctgg

SEQ ID NO: 281358 - DNA, 82 bp, Homo sapiens
gctgcgtggggctcggccgcgcggactgaaggagactgaagccttatgccagcctggaccatcttggaggcagtgtaggatc

SEQ ID NO: 281359 - DNA, 75 bp, Homo sapiens
atcaggacatggagtatgaaagacgggcagcagagaagaaagtggtgaaaattacatctgaaataccacagactg

SEQ ID NO: 281360 - DNA, 100 bp, Homo sapiens
aaaccaggacgtgctggatgacagcgttcagactcctcaagaacaagagccccaagacccgggacatccaggaggaggagctggaggtgctgctggagga

SEQ ID NO: 281361 - DNA, 100 bp, Homo sapiens
acccagatggaccagtttgggcaggcagcaggggtcctcattcacaggtgagcacctgcggatctgtccccagggctacacctgctgcaccagcgagatg

SEQ ID NO: 281362 - DNA, 83 bp, Homo sapiens
ctgtgtgtgcttctgcgccccaggtgttgtgtgtgggggtgcaggtgtccctggccagtgtccttccacctgtccacaagcat

SEQ ID NO: 281363 - DNA, 101 bp, Homo sapiens
ggcgcttgctgttctccatgatcctctttgtcatcatggttctctggcgaccatctgcaaacaaccagaggttgctccttgagggcaggacagttcttatg

SEQ ID NO: 281364 - DNA, 80 bp, Homo sapiens
tgttgctcaccaccctttctgggcttcagcatgtactcccaccgtcatcgctgttctttaagtggagaggatttgaatag

SEQ ID NO: 281365 - DNA, 75 bp, Homo sapiens
gggaagttaatgtttacggcgaagtctactcaacgtttccaaggtgagcgagtgctgtgctttcatgggcctctt

SEQ ID NO: 281366 - DNA, 100 bp, Homo sapiens
accccagagcctcccgcggcccacagagcacagaatttatccagttggcgaaggactttgaggatttccgtaaaaagtggcagaggactgaccatgagct

SEQ ID NO: 281367 - DNA, 100 bp, Homo sapiens
ccagattctgccaattcgttttcaggagcatctccagatatatttttgccatcatggatcagtttggagatatattagaaggtgaagtggaccattcttt

SEQ ID NO: 281368 - DNA, 89 bp, Homo sapiens
ggaccgccgggcggcggaaagcaggtatggcgactacccgaagctccctgaccgctcacagcatgagagagatccatggtatagctggg

SEQ ID NO: 281369 - DNA, 100 bp, Homo sapiens
ctatcatgagaacattgtgaagtacaaaggaatctgcacagaagacgccctgattgagtccctcaaccagaaaccacagactgccggtgaccaaccccca

SEQ ID NO: 281370 - DNA, 80 bp, Homo sapiens
ccggcgagatgcctttgttcaccgccaaccccttcgagcaagacgtgggttcagccgtctgtatatctccccagatacct

SEQ ID NO: 281371 - DNA, 98 bp, Homo sapiens
ttcagcccctgcagcccgagccgccccccgagcccgccttctccgaggcgcagaagtggattgaggaatactcccccagttgcaagaggcgcaggacc

SEQ ID NO: 281372 - DNA, 75 bp, Homo sapiens
ggcccctgtctcccagcctgatgcccctggccaccagaggaaagggcattttgtcagtgatgctgatctttgcct

SEQ ID NO: 281373 - DNA, 100 bp, Homo sapiens
agactagccactttgcattgactggaaacaatggcatttacagaaagagtcaacagcagtggcaacagaaatcctgcaggacggactggactggtgggcc

SEQ ID NO: 281374 - DNA, 100 bp, Homo sapiens
acgaaactgactttgagctgtacttttgtggacgcaagcaatttttcaagtctaactatgcagacctagaaccgaacaatattttgggagtccaagtgac

SEQ ID NO: 281375 - DNA, 100 bp, Homo sapiens
agttgtggaaccaaagagagctgtctccagagaagaggttgctcaaagaagtacagtctttaaaacaaccatacctgaagaagaggaggaggaggaagaa

SEQ ID NO: 281376 - DNA, 50 bp, Homo sapiens
tacccacattaggtttcacacatttccaaagcggaatggaaatgtgggca

SEQ ID NO: 281377 - DNA, 90 bp, Homo sapiens
ggcacctacattgacaagaaatgccccttcactggtaatgtgtccattcgagggcggatcctctctggttcagccgtctgtatatctccc

SEQ ID NO: 281378 - DNA, 80 bp, Homo sapiens
ggcaaaggcaagagtaacagcagcgccgtcccgtccgacagccaggcccgggagaaatatttggagttcttacaacatgg

SEQ ID NO: 281379 - DNA, 75 bp, Homo sapiens
ccaactgccacaataccaactaaacagacaggatgcaccacatctagtaaagaattagtaagctgtgtgggctgg

SEQ ID NO: 281380 - DNA, 97 bp, Homo sapiens
ccgaggctgcagacagctaccggatgaatgctgagaggatcctggcaggaagtgatatgacggtatcacagatcttgctgacgcagcatggaatccc

SEQ ID NO: 281381 - DNA, 75 bp, Homo sapiens
ggcaacttcggggagctccgcctaggtctccaaagcggcgtctgacctcatgagctactgtgagcaacatgcccg

SEQ ID NO: 281382 - DNA, 96 bp, Homo sapiens
cgagagtcatgccgctgcgtggaggaacatgctgaacctctggaggaacggctctacctccaggtgctggagaatctggtaaaagcaccattgtga

SEQ ID NO: 281383 - DNA, 90 bp, Homo sapiens
aacaatatcggcattctgtgctacgaagttgctgtctctgctggccttcatctgtgaagaagttgtatcacaatgtactttatgtggagg

SEQ ID NO: 281384 - DNA, 96 bp, Homo sapiens
tacgtggacccgcaaggccggagggcacgcgcgcaggagctcatgtggcctgcggctcctgtcgcctgtagtgaccattgtgaggtagatattttg

SEQ ID NO: 281385 - DNA, 97 bp, Homo sapiens
acagcgggcccgaagcggatcagccttgtggggaacgggaggatgaaattgctactatggagtgcatcaacaatggcaagtccatctttgaggcccg

SEQ ID NO: 281386 - DNA, 74 bp, Homo sapiens
taactataagcagcttcggaaaggagccaatgaggtgtatccaaagtgtgtacatcagtaagatcataagcagt

SEQ ID NO: 281387 - DNA, 90 bp, Homo sapiens
ctgaagagctatggtgaaacaccactgaagcattgccaaggttaatttggagtggcccctggagtcagtttcctacaccatccgaggccc

SEQ ID NO: 281388 - DNA, 98 bp, Homo sapiens
ccagaggactcgcgtgggagcgaggtgccggccccgacaggacggtgaggttaagtatcaattgcgcttcagttactttcagaagaattttatactgg

SEQ ID NO: 281389 - DNA, 95 bp, Homo sapiens
tataaattgaagctgggggagactgtgcctgccgtccctacagtaggctcttcctggtcagcagcactgctatttcctcaacaaggatgctcctc

SEQ ID NO: 281390 - DNA, 100 bp, Homo sapiens
ctgagagtgacctttgcatctgcctgtccagccagcatggaaccaaagcggatcagagagggctaccttgtgaagaagcagtgtttggccagcgcttgga

SEQ ID NO: 281391 - DNA, 75 bp, Homo sapiens
ctgctcttgagaaaggctgcagcttcctgccagacccttaccagaagcagacccagcacactccaggcagcatcc

SEQ ID NO: 281392 - DNA, 96 bp, Homo sapiens
ggtggccgggctgaagaagcagttccacaaagccagccagattgatgaactcccagagggcgctgtgaagcctccagcaaacaagtatcctatctt

SEQ ID NO: 281393 - DNA, 90 bp, Homo sapiens
tggatattgatgaccacacagacctcgccattgagtatgaggaagagagaagggcacagttacctaagtatcaacgtaatcttcctcggc

SEQ ID NO: 281394 - DNA, 74 bp, Homo sapiens
ttttgaagaaatctggaagttttccacctaccatgctctcggggaggaagttgccttgtactgtgccaaatatc

SEQ ID NO: 281395 - DNA, 98 bp, Homo sapiens
tgcattggatgcaatccattccatgggttttattcacaggcttgagaaggagaaagcagaaattgaacgcatgcgaaacctgactgaggaagagagga

SEQ ID NO: 281396 - DNA, 83 bp, Homo sapiens
aagtctcactagataccttcaatcatcattttgagctcaaagcggctgtggacaaattgaatgtaattgatgatgatgtggag

SEQ ID NO: 281397 - DNA, 101 bp, Homo sapiens
aaaatttcttccaaggttgatgcatctctctcagaggatgttcttgaggagagaatttccctggaagttcaactggaacaacttcgaccattctctcacct

SEQ ID NO: 281398 - DNA, 82 bp, Homo sapiens
ttaaagatctcaaaaactttcatgtagacctttgtcgtccatttgctgctcactgtggagaagagtttttcccaacatccaa

SEQ ID NO: 281399 - DNA, 101 bp, Homo sapiens
ctgcggcctcaaactcctgggctcaagtgatcctcctgcctcagcctcccgagtacctgagattagcccaggatctagtgaaaagccatttgatgtatgcg

SEQ ID NO: 281400 - DNA, 82 bp, Homo sapiens
tgagggtgtacaaatacccctttgaattaattatggctaaaaggtggacaagtcctattttcaagagaagatgacttttaac

SEQ ID NO: 281401 - DNA, 73 bp, Homo sapiens
cgagccactggcaggttccgcggcaccgagcccgagccccgagacgggctcgtgcaatccgcttcagacagga

SEQ ID NO: 281402 - DNA, 100 bp, Homo sapiens
tggccgagcaggcggagcgctacgacgacatggcctccgctatgaaggcgtttgcagatggcgtgtacctggttctgctcatgggccttctggaagacta

SEQ ID NO: 281403 - DNA, 75 bp, Homo sapiens
ctgctggccctggctgcgctgctggcctttgtgagcctcagcctgcagttctaggaattcagaaaagcagctcag

SEQ ID NO: 281404 - DNA, 51 bp, Homo sapiens
tctccagcttgggtgacagaaatgaagaagcagtacgacgtctcatctggg

SEQ ID NO: 281405 - DNA, 98 bp, Homo sapiens
aattccttaattgtcatgagcaaacatatgatgaagaatttctgaacacttttactcatctttcacaaggtgcccttcgttttaaaagaaagattatt

SEQ ID NO: 281406 - DNA, 50 bp, Homo sapiens
cagatgctccaaaggaaatgagcaaggatttttcgggattgtcaccctac

SEQ ID NO: 281407 - DNA, 96 bp, Homo sapiens
gaacttctctggaccaacttgaccgtctactggaaatctgaatgctgttatcactgtggcaaagcgctccctggcctttcaaagcaagaggactgc

SEQ ID NO: 281408 - DNA, 100 bp, Homo sapiens
gtcgctgagagctgggaagaggcggcagacagcgggcttctcaataggtttggcatggacaagatctatgaaggccaagtggaggtgactggtgatgaat

SEQ ID NO: 281409 - DNA, 75 bp, Homo sapiens
ccggagcctggccagctgcacttcaaccagatctgcaactatgtgggaccagcaaaggttattgttcagttggtc

SEQ ID NO: 281410 - DNA, 83 bp, Homo sapiens
cagagaagcacagagacttgctcctttgctcttgagagctatttgtccaagaactctgaagatgatgagctagctaaagaatc

SEQ ID NO: 281411 - DNA, 80 bp, Homo sapiens
atatgatcaagttctcgtggagtcagacaatgagggcaagttaaagtcttcagagccctgtatacgtttgaacccagaac

SEQ ID NO: 281412 - DNA, 80 bp, Homo sapiens
gctgtgaagatcattgacaagactcaactgaactcctccagcctccagaaagtgactgggtacctggatatgtgatcgag

SEQ ID NO: 281413 - DNA, 109 bp, Homo sapiens
cagagctgtgcctcccagcaccacagtccttctgcagtccctcgtccagccacccccaggtggagcagctcctgtacgaaagccctgagcggtactcccgctcagtgct

SEQ ID NO: 281414 - DNA, 98 bp, Homo sapiens
acttacgcacttaaaataattgggcagaagagaagcagtgaaggagtgcagaggcatcacctgaaaggcgaacagctgcttggagaactacaagtgaa

SEQ ID NO: 281415 - DNA, 75 bp, Homo sapiens
ggcgcggcagagtccccgtacgcctacagtaacggtgcccaacgctctgggagagccccaggtgccctcccagca

SEQ ID NO: 281416 - DNA, 106 bp, Homo sapiens
tgggagcctctgtgtctcattatctacttgagacctccagggtggtgtttcaggtgaccatcttggtgctgcagggccggctggatgaggcccgacagatgctctc

SEQ ID NO: 281417 - DNA, 83 bp, Homo sapiens
cgacttcggttcgggtgcgctgctcaaggacacggtctacaccgacttcgacgaccatggtgaatccgggcagcagctcgcag

SEQ ID NO: 281418 - DNA, 75 bp, Homo sapiens
attacccaagtgggccacaagcctttactcaggcgcttaaattcctagcgaagtgccgtaagaaaaagaaactat

SEQ ID NO: 281419 - DNA, 100 bp, Homo sapiens
cagggacatgtctcgggagatgcaggatgtagacctcgctgaggtgaagcctttggtggagaaaggggagtgttcagcctgcaggacctctgctgccggg

SEQ ID NO: 281420 - DNA, 50 bp, Homo sapiens
ttagaatctatttcttctgaccagcagaaagcgaaattattattgacgat

SEQ ID NO: 281421 - DNA, 50 bp, Homo sapiens
gctaaagcagcgtgcgttcagccctgggcttttcttgcctggagaagagg

SEQ ID NO: 281422 - DNA, 73 bp, Homo sapiens
tgaaactgactgagagccagtggatttgccagcagtctgcccagggcagtgttgctgcatattgcatggatga

SEQ ID NO: 281423 - DNA, 88 bp, Homo sapiens
aaaaggagaacttcttaagaagagtgctgaaactgatgtaaatgtggtcatgcttcaggaatcccaagtttgtgaaaagcgtgccagc

SEQ ID NO: 281424 - DNA, 73 bp, Homo sapiens
ggcacttactgaaggccgtcttaaagttacgttgttagaatgtagcagcatgatggaagtggttcattgcatg

SEQ ID NO: 281425 - DNA, 100 bp, Homo sapiens
cggggatacagcctggaaggtgcgtgtggggctgggtctcggagtgggagacgtggagtgcaggcagcctggcatcctcgctacaacctcattgttgtgg

SEQ ID NO: 281426 - DNA, 100 bp, Homo sapiens
ccgggggagcccagcccagccagcctccaggctcttgtcaggatggtgaagctgttcatcggaaacctgccccgggaggctacagagcaggagattcgct

SEQ ID NO: 281427 - DNA, 75 bp, Homo sapiens
tctgccgtcccagtcccagcagaggtaccagccgcagcaggttatggaaacaaaggacatgctttacatcgtcac

SEQ ID NO: 281428 - DNA, 104 bp, Homo sapiens
acggcgctatgtacgccctcttcctcctggccagcctcctgggcgcgggtccggtggcagccttcaaggtcgccacgccgtattccctgtatgtctgtcccgag

SEQ ID NO: 281429 - DNA, 74 bp, Homo sapiens
ggagctggagtgcggggcgcccggcgccaggggagccgccacaggcgtcacctcctcctgtcgcctggccctcg

SEQ ID NO: 281430 - DNA, 80 bp, Homo sapiens
gaagattttaggcggtatcaaatggaaagtttttccaaatattcatctgtacaggaatctggtgaacagtaacaaacttt

SEQ ID NO: 281431 - DNA, 103 bp, Homo sapiens
gcagatattggtgccctggaagacattagagaggagctcaccatggcaatattgcatgaagagctaatgctaggggatccctgccttaaggatttgaaaaaag

SEQ ID NO: 281432 - DNA, 90 bp, Homo sapiens
acctggatgacaacgagaggaggatgctccagaccttgtatgattacttctggtgggaacgtctgtggctgcctgtgaacttgacctggg

SEQ ID NO: 281433 - DNA, 111 bp, Homo sapiens
cttggaacctaaccatgctggtaccctgatctcggacttgcagcctccggaactggggatatgagactttctactcggaatatcctgagtgttgcgtggatgtaaaaccca

SEQ ID NO: 281434 - DNA, 75 bp, Homo sapiens
ctgacctatcatcccagtttacatatttttgtggtcaacaaccaggaggagcttgagaggctgaacacccaaaac

SEQ ID NO: 281435 - DNA, 51 bp, Homo sapiens
tagatgcttttggagccactggtggataatattaatgcagctgtgatggat

SEQ ID NO: 281436 - DNA, 98 bp, Homo sapiens
gcgtccccgggccgcagctgcggacgggctctacgagtgcattctctgtgcctgctgtagcaccagctgccccagctactggtggaacggagacaaat

SEQ ID NO: 281437 - DNA, 90 bp, Homo sapiens
gaagtgacctcagcagggcatccaggtgttggagcgggccggagagaagtagagtgggctgcgaggagaaggaaacaggcctttcggagg

SEQ ID NO: 281438 - DNA, 100 bp, Homo sapiens
acaaatgtttttctgttttgcctgaatacatgatttaaacaagagatttccacagaagacgtttgatgcaaatgatttgtatcaggggcagaattttaac

SEQ ID NO: 281439 - DNA, 100 bp, Homo sapiens
ctttcatccacaccatctgccctctgcaagaagacagctctggggaggacatcgtcaccaagcttctgttgaccactgaaaaacacacatactatctgac

SEQ ID NO: 281440 - DNA, 83 bp, Homo sapiens
ttagcacagggcaaggcttcccagacaaatggtggcccggagtttgctcgataccttgagggaagtctgcgatgatgaaagag

SEQ ID NO: 281441 - DNA, 98 bp, Homo sapiens
acggctgaaggccctacgggagaaaaccgggcgcaaggtcaccatcagaaaagctaagtttgctgtatagtgaggatcaggagatctgatcctgattg

SEQ ID NO: 281442 - DNA, 100 bp, Homo sapiens
taaaaaacccgtagtgagcgcaggcagaaaccacggaataccctctaccatctgctttggtcagggtgccgctcgaggatttaaaagcaacaagaagaaa

SEQ ID NO: 281443 - DNA, 82 bp, Homo sapiens
ccggaggctccagaaacgggtcctgctgctcaccaaggtcaaaatgcagatcttcgtgaaaacccttaccggcaagaccatc

SEQ ID NO: 281444 - DNA, 87 bp, Homo sapiens
ttattggagaaacatgcagattatatcgcatcctatggctcaaagaaagatgattatgctgtctcctggttcggacatctatgtgac

SEQ ID NO: 281445 - DNA, 75 bp, Homo sapiens
gaggtggctcacgttgaccaactctttgatgatgcatccaggtcagaatggcggcagtggagcatcgtcattctt

SEQ ID NO: 281446 - DNA, 102 bp, Homo sapiens
ttgatgtggccaaggtcaacaccctgattcggatgaccggaaagaagggatgaccgcgtttgtggaaaagagaaaggccaacttcaaagaccagtgagaacc

SEQ ID NO: 281447 - DNA, 82 bp, Homo sapiens
ccacagaacttacctgcctcttcatgcagttctccatcgtgccatgccctctggtggtcagaagatgctgtgctgtctcgtt

SEQ ID NO: 281448 - DNA, 80 bp, Homo sapiens
gggtgtgagcagggctgagatgggcaccgcggatctggggccgtcctcaggtgacagtggatagtggaaacaggagatcg

SEQ ID NO: 281449 - DNA, 75 bp, Homo sapiens
aagtaatcagtctttgacaagtgatgagaagctgtcggagcttcccaagcttcccaaatgattcagcagtctcat

SEQ ID NO: 281450 - DNA, 82 bp, Homo sapiens
acgttccatctgtggaaggacctaccaaccagggaacggcaggagcagctgatgggatatcggaagagagggccgaagccca

SEQ ID NO: 281451 - DNA, 75 bp, Homo sapiens
gagaattcgtgtggctgaggcagagactccaaagtaatgcgttgctggtgaaagattcagatgaggcagacttgg

SEQ ID NO: 281452 - DNA, 75 bp, Homo sapiens
cgccactcacgctccactgcaacatcacggtactccaaagattcaggtttactcacgtcatccagcagagaatgg

SEQ ID NO: 281453 - DNA, 100 bp, Homo sapiens
aaccctgctgatgtcaccgaggccagatggcccactgcgtgaccttggttcagctgtccatttcctgtgaccatctcattgacaaggacatcggctccaa

SEQ ID NO: 281454 - DNA, 98 bp, Homo sapiens
gttccctgagctggagcgggtgctgcaggcgccgccgccggacgtcggcaacggagaaggtgaatgaaaactttgccattgatttgatagcagagcag

SEQ ID NO: 281455 - DNA, 90 bp, Homo sapiens
gctgaggagttttcaatcccagtaaattggcaggatgaggagcagcaaatcaaaagaggtgcctttaccaaatccaaggaactctcaaag

SEQ ID NO: 281456 - DNA, 75 bp, Homo sapiens
cagacagcagcctcactgcagatcctagcagccctctaccagctggtggcaaagtggtggacttgctttgtgaag

SEQ ID NO: 281457 - DNA, 83 bp, Homo sapiens
cgtcccgaccctggccgccccgagcggagcctggaggttctactgggacttcaccatgctgctgttcatggtgggaaacctca

SEQ ID NO: 281458 - DNA, 100 bp, Homo sapiens
ttgcctttctggacacagaagtatttgtgacagccaaagtcatacactggctatcagaaaattatgctggaagaattgcagtggaaaaactgaacagaag

SEQ ID NO: 281459 - DNA, 127 bp, Homo sapiens
cgcgtggctgccggggaggccagagcgtggagcgctgcgcggcgcggcggccgggccctcgagacggggacgtaattcgccaaaatgacgaacacaaagggaaagaggagaggcacccgatatatgt

SEQ ID NO: 281460 - DNA, 90 bp, Homo sapiens
agaagcgcagcaacgtgcggtgggaccacgagagcgaatactcccccagttgcaagaggcgcaggaccgtggaagacttcaacaaattct

SEQ ID NO: 281461 - DNA, 100 bp, Homo sapiens
ctttaatcctgaaagccatgcagcgggtactccaaagattcaggtttactcacgtcatccagcagagaatggaaagtcaaatttcctgaattgctatgtg

SEQ ID NO: 281462 - DNA, 101 bp, Homo sapiens
tcgagatcaaccgggagccgggaatgcgatgttaattctggggcattgatgttttacaatgcctgatcaagataaaaaggtgaagaccacagaaaaatcaa

SEQ ID NO: 281463 - DNA, 100 bp, Homo sapiens
atccgtgcgagaacagctattccacgagaggatccgcgagtgtattctagagacatgacctaacaccctgatgaccactctcagggaccttgagtgactg

SEQ ID NO: 281464 - DNA, 90 bp, Homo sapiens
agcgaataaagtttatcacgccgggctgtttttggaaggaagaaagatggaaagcggtgcagttctgctggaatccaaatcctccccatt

SEQ ID NO: 281465 - DNA, 90 bp, Homo sapiens
ctgattggctcttcctcaatgcttgtgtggggtttcatcaccttaaatggttttgaaccaatgaaggtgtattcccttaaaaagacggac

SEQ ID NO: 281466 - DNA, 75 bp, Homo sapiens
tcgcgatgtgtggcgactgtgtggagaaggaatatcccaaccggttttcggctttgtgagaaaccttaccatcaa

SEQ ID NO: 281467 - DNA, 100 bp, Homo sapiens
gcgaatgcttgaagactgtgtccaggaaacgattcatgaacataacaagcttgctgcaaattcagatcaaaaagatgttggtttaaagcgattttttcct

SEQ ID NO: 281468 - DNA, 100 bp, Homo sapiens
ttataccatgaaatgattgaatctggtgttatcaacttaaaagatgccacctctaagatgtctgtgatcatgatctgcatgtttctggtggcatggtccc

SEQ ID NO: 281469 - DNA, 51 bp, Homo sapiens
aaagcctcctacaagagtcctaccaaaaagggaggaagaaggagacttcag

SEQ ID NO: 281470 - DNA, 100 bp, Homo sapiens
cagcatccgaccaccgaggctggagggggagaacacccagactcatgtagacaaagcctgcaagcttggggaagccaggcacccccaggtcagcctcggg

SEQ ID NO: 281471 - DNA, 82 bp, Homo sapiens
ctccacctgtcattatggtgcaaaatgtgagcttcaagtatacaaaagatgggaatgcaagttctagccggtttttcctaca

SEQ ID NO: 281472 - DNA, 50 bp, Homo sapiens
tgaggatccggagcagacgcctcggggcatggagggatttttgaaatcag

SEQ ID NO: 281473 - DNA, 75 bp, Homo sapiens
ggtgatgacatgggacttggaaaaacagtacagctagccgatggcggagtctcttctcttcaactgcctcactgg

SEQ ID NO: 281474 - DNA, 75 bp, Homo sapiens
gcggcgagcgagctcctgaggtacggcgtcggggaggaattaattccaatgagtgtgaaaatgtatcaagaaaaa

SEQ ID NO: 281475 - DNA, 88 bp, Homo sapiens
ttcatcttgtgaaagcagtccttgttcctatggcctaatgaacaacttccagagagtgactcagacatctcctctacaagtacctaac

SEQ ID NO: 281476 - DNA, 75 bp, Homo sapiens
ttcagactggggcactgccatcccctccgcatcatggggtctgtggaccaagagcggttccgccaccccagccgc

SEQ ID NO: 281477 - DNA, 102 bp, Homo sapiens
atttacaatgctaccctgctttttctggtgtcctgaacctggaagttgtgctttttaagtggaggccatagtggagtttgactaccaggcccagcacgatga

SEQ ID NO: 281478 - DNA, 82 bp, Homo sapiens
cggcgccgcgtagcttccatccgccagctgccatgagcgagcgcctccgtcccagaaatatggacagacttcttagacttgg

SEQ ID NO: 281479 - DNA, 96 bp, Homo sapiens
ctgtggtgcagtttaagattaagaggcatacaccacttagtaaactaatgaaagcctattgtgaacgacagggcaccagtgtcttgtcacctggac

SEQ ID NO: 281480 - DNA, 100 bp, Homo sapiens
tcggcttgtataacctgaaaacgctcctgtttttctcatctgtgcagtgggtatggcgactacccgaagctccctgaccgctcacagcatgagagagatc

SEQ ID NO: 281481 - DNA, 73 bp, Homo sapiens
tgcgcgtgcgcctgggggcaccgctgccgttccgagacgttggaacttgccaggaatccagcaatgatgcagg

SEQ ID NO: 281482 - DNA, 101 bp, Homo sapiens
tggattccagtattcgtcgcataaggatccttctttgtctgcgaaggaaaaacacactgattatcataatgagtaattgacctgctgactgtgggcgagtc

SEQ ID NO: 281483 - DNA, 50 bp, Homo sapiens
ccgcccgtccacacccgccgccagtcctcccagaaaaagagctgtgtgga

SEQ ID NO: 281484 - DNA, 82 bp, Homo sapiens
cctcagtacgccacctactattacccccagtatctgcaagccaaggaaataatgcaaaaggtgtcccaaggctcctgaccag

SEQ ID NO: 281485 - DNA, 97 bp, Homo sapiens
gtggagaatttctgtcatttgcatgatctggatatccaggaatgattttcagagtatttgagaaaatgagaggtgcagatggttttcactgaggcat

SEQ ID NO: 281486 - DNA, 83 bp, Homo sapiens
aagtgattccccggaatcgtgtgctgggctggtcccccttgatatgtgtcacaaagatgtctacacggaactgccagggaatg

SEQ ID NO: 281487 - DNA, 101 bp, Homo sapiens
tttcttcactcctcttcacttcttcagcgttgccttcttgccagctagtatctcttatctcattggaaccaatatttttgggatacttgcacacaaaatgg

SEQ ID NO: 281488 - DNA, 83 bp, Homo sapiens
ccaagctcctggccctggccctgatcatcctgctgggcttcgtccagatcgggaagggaagacctggaagcgctcatagccca

SEQ ID NO: 281489 - DNA, 75 bp, Homo sapiens
agaaaggattcgttacagccagagattgctgccactgcagagccccgccatggaagacacgccgttggtgatatc

SEQ ID NO: 281490 - DNA, 90 bp, Homo sapiens
ctgcgcagcgcctaggcgacctggagtttgtgacgctgtgatgatgatcagtagaattgaatatgtgcatacaaagaattttatacacag

SEQ ID NO: 281491 - DNA, 82 bp, Homo sapiens
ctgcaaacttcctcctcaacgccagcgggagcacatcgatgtgttcagagcaacattgttttgttgacacaagcatttagaa

SEQ ID NO: 281492 - DNA, 98 bp, Homo sapiens
attaacaaggagcatgtactggccgcagcaaaggtgatcagcttgaaattcagctaaccgagcagctacggtccctcatccccaacgaggatgtgaga

SEQ ID NO: 281493 - DNA, 75 bp, Homo sapiens
catcgcagagggaaggcgaatccccataagtaagggatgtccgtcgcttggtagtggccatgtctagagccagac

SEQ ID NO: 281494 - DNA, 83 bp, Homo sapiens
cttattttttctcatggatgttcttcttcgagtatttgtagaagggcagctcactttgctggtggccagtgaggactcaagct

SEQ ID NO: 281495 - DNA, 75 bp, Homo sapiens
tgacccagaacaaagcattgccagaaaacgttaaggctgattatgtggtccccgtggaagataatgatgaaaact

SEQ ID NO: 281496 - DNA, 75 bp, Homo sapiens
agctcaggctgcccagatggtggctcccggagtccaggtcagcccaaggccaaccccactgtcactctgttcccg

SEQ ID NO: 281497 - DNA, 75 bp, Homo sapiens
attgtacggcacttggcgtaaagccgcttccctcaagagtaactacaaggtgaagtgatgaacctcctgatgttc

SEQ ID NO: 281498 - DNA, 150 bp, Homo sapiens
ccggaacagctccagtctgcagctcccagcgtgatcgacgcagaagacaggtgatttctgcatttccgactgaggcttccttggtgaaggggacgctgtcaccaaagccatccaggatgctcggcagctgctgcacagccacagtggggc

SEQ ID NO: 281499 - DNA, 74 bp, Homo sapiens
tccaaatgagacccttcctggagaaccgggcccagcagcactgggatcgacctgatgccccatgacctcatcac

SEQ ID NO: 281500 - DNA, 100 bp, Homo sapiens
gtgcgccgcgggccaccgcgccgaactgctccggttcccgggtacaggtttgcagattccgccagcagcacagcaagctctacagatgagtggctctttg

SEQ ID NO: 281501 - DNA, 100 bp, Homo sapiens
tcgctgagcagattggctgtgtggagttgcaccagcgtgcccgggagtacatctacatgcattttggggagcaaattcaacacccaacagcttccttaat

SEQ ID NO: 281502 - DNA, 100 bp, Homo sapiens
tctgtccctccagctggccctgaggcatctgagtcaacaacggatgaaaatgaagacgacattcagtttgtcagtctttggacatcagacagtgcaggag

SEQ ID NO: 281503 - DNA, 75 bp, Homo sapiens
gagtggttatgagtttgcagatgaccggcatacttgcatctctgccactgcagagccccgccatggaagacacgc

SEQ ID NO: 281504 - DNA, 90 bp, Homo sapiens
tgtacttccagggagacaccgattataagaagagaaactcagcgctggggaagaaggatatgaacgagactgccaaacaagaagatattt

SEQ ID NO: 281505 - DNA, 86 bp, Homo sapiens
ctcactatccgatccaggcagggaaatgccggatcgagctgggagatgtgacaccacacaatattaaacagttgaaaagattgaat

SEQ ID NO: 281506 - DNA, 75 bp, Homo sapiens
gactgccgccgcggcctcggacgactcgccttcagaaggtttctaccatgaatgaaatgaagagttattctcaag

SEQ ID NO: 281507 - DNA, 90 bp, Homo sapiens
agtcatgtatcaaagactgtttgttcaacatatctacaatctcggtactacaggtgtcttcaaaaacaaacatatttaaaagattttact

SEQ ID NO: 281508 - DNA, 75 bp, Homo sapiens
gaagaagcatcgttaaagtctctcttcaccctgccgtcatgtctaagtcagagacacctcctgtgtgaatccgcc

SEQ ID NO: 281509 - DNA, 90 bp, Homo sapiens
cccgcttcgatcgcctcgcgccggctgctctttccggggcagcgggtggcatgagacgtgggaacatgggccacctcacacggatcgcca

SEQ ID NO: 281510 - DNA, 75 bp, Homo sapiens
ccttcgaattcgctccaagaaaaatgaaattatggttgcaccagccgcagccgccgtgctcagcgcgagccccgg

SEQ ID NO: 281511 - DNA, 74 bp, Homo sapiens
gagcagttgggaatcaggtctggaatactcctaaccaagaagttgcccaggtagtgggcagcagtcagtgacag

SEQ ID NO: 281512 - DNA, 96 bp, Homo sapiens
gctggtccatagggacggcttctcactggctgctggagccagttctgcttctcggcaaggagcgatttgctggtgtagacatccgtgtccgtgtaa

SEQ ID NO: 281513 - DNA, 75 bp, Homo sapiens
caattacacccagaagattacctttgactcttgtcccaggttttgatgatgatggttcagaatttcatgaacata

SEQ ID NO: 281514 - DNA, 50 bp, Homo sapiens
atacagaccaacttgattatggaaaaccatccccttggttatccgttgat

SEQ ID NO: 281515 - DNA, 100 bp, Homo sapiens
tgtcccaatgccatccagagctgtgcctcccagcaccacagtccttctgcagtccctcgtccagccacccccagagacgtctcccacaacctgctccggg

SEQ ID NO: 281516 - DNA, 83 bp, Homo sapiens
caccgatgctgcaagagatcagtaacttgttcttgattctgctcatgatgggtgaaatgacaatggatgctctgttggctcga

SEQ ID NO: 281517 - DNA, 75 bp, Homo sapiens
acagcggatgattctggaactgggagaagatggctttaaagaatacacttcaaatggagtctcactcttgtcacc

SEQ ID NO: 281518 - DNA, 75 bp, Homo sapiens
atttgattaactcattcaaggttacccagttgaccatatactccttgacgacagggactaccaccttcaccttca

SEQ ID NO: 281519 - DNA, 98 bp, Homo sapiens
ctccgtctggcgacgcccgccgcctcactgtttctagccttcaggctccgggctcgagtgccctgtgtgcaaggacgactacgcgctgggtgagcgtg

SEQ ID NO: 281520 - DNA, 100 bp, Homo sapiens
aaactacaaagagagactttttgtacttacaaagtccatgctaacctactatgagggtcgagcagaggacggctgtcctcagcgaggggccgtgcacccg

SEQ ID NO: 281521 - DNA, 88 bp, Homo sapiens
aggcctgctgaactgggtgctttatatagggtgaaagaactcttttcttctttgggagtcgaatgtaatgtcttggaacttgatcaag

SEQ ID NO: 281522 - DNA, 87 bp, Homo sapiens
ccctctctccgcgcggagccgagccggaactgcggcagtctctccctgccaggctcttcatccaagctgagatgagtgaactgagtg

SEQ ID NO: 281523 - DNA, 74 bp, Homo sapiens
ttcaaaatttgtggcgcatcttattaaccaaaatgtgggtggagagattcaaccagttagcgtgaaagttggag

SEQ ID NO: 281524 - DNA, 96 bp, Homo sapiens
gtgacaagaacagtgggccacaggggccccgaagaactcccacaatgccacaggaggaggcagcaggtgtcatggagaaactccagctgggcccag

SEQ ID NO: 281525 - DNA, 100 bp, Homo sapiens
gccctgggtcactttcagtgagtcatcgctgacagctgaggaagtctgcatccacattgcacataaagttggagagtgaatgcaaagcatataatcctag

SEQ ID NO: 281526 - DNA, 74 bp, Homo sapiens
cttacagacgctgccagcatcgccgccgccaggagcatcagatccatgctgctgctgactcggagccccacagc

SEQ ID NO: 281527 - DNA, 98 bp, Homo sapiens
cccagagaaaaatcggcagatgttacagctgctcatgaaccacttggcaaagccaataacggaaaactgcctgacaacaaagtcattgctagtgaact

SEQ ID NO: 281528 - DNA, 74 bp, Homo sapiens
atgcacagcaggaggatttcggaatcttccagattgactggggcgactttggggtagaggcagtgtctgagggg

SEQ ID NO: 281529 - DNA, 98 bp, Homo sapiens
ttctcagtgattcttaatcagcgcactggcaagtgcagcgcctgtaatgtttggcgagtctggtgttggggatgtcctttgcactgaccctgaactgc

SEQ ID NO: 281530 - DNA, 74 bp, Homo sapiens
tctcttcagaacagagccaatggcttggaatgaggtcctagcagaagatgtgactcagactgcctctgggtggg

SEQ ID NO: 281531 - DNA, 87 bp, Homo sapiens
aaccgcagcagggacgtcggtttgctatcgggactcggcgaggacgtaatctatgccagcaattatgacaatgttagcagaccatgc

SEQ ID NO: 281532 - DNA, 89 bp, Homo sapiens
agctctttgtgtatgaccttcacgcagtcaagaacgacttccaggggagtaggttgcatctttgttgaaatgatccaaggagttgctgc

SEQ ID NO: 281533 - DNA, 60 bp, Homo sapiens
aatagaagagctgaaactggtcacggatgataccatcggggaccttaagaagctgattgc

SEQ ID NO: 281534 - DNA, 134 bp, Homo sapiens
cagatgtggtggaatatgccaaggaaaaactggagagcttcatcaaaaatagtgatagctttgataatctccggagtagagatgaagagagaatttctaaacctggggctgtctcaactcctgtaaagcatgct

SEQ ID NO: 281535 - DNA, 98 bp, Homo sapiens
tgggcagaggcgaagggctggtgggcgatgggcccgtggacatgcgcacctcacacaggtcattcaacatttattcaaccaaaaatactaagtcagct

SEQ ID NO: 281536 - DNA, 95 bp, Homo sapiens
gctgctgtcccgggcctaccccctggactccctggagaagcagatggaaaaggtgaagcaaatcatggaggaggctgtcaccaggaagtttgtgc

SEQ ID NO: 281537 - DNA, 82 bp, Homo sapiens
cgtgtggagccccggcagcaggagcgtcgcagtaagactttgaccccgacgcaggcttcagtgattgccgcggatcagaagc

SEQ ID NO: 281538 - DNA, 75 bp, Homo sapiens
cccagctctgccaggaagcaaagagtgaagatagtccaagtcctaagagacagcgcctctctcattcagtctttg

SEQ ID NO: 281539 - DNA, 75 bp, Homo sapiens
gtcaggagctgtatgaccttaacgtggagctctccaaggcccgccaagctgccccctgtgtgctattctttgatg

SEQ ID NO: 281540 - DNA, 83 bp, Homo sapiens
tggatgccctggttgctgaagaggaggcggaagccaagacctccacaatctaaattgcttcgtgaagataagaaccataacat

SEQ ID NO: 281541 - DNA, 100 bp, Homo sapiens
ggatatttcctggagtcctgtggatgagattcttcaaatccctccactctcttcaactgcaactctggcactggtgaggtggattgatgatgaatcttct

SEQ ID NO: 281542 - DNA, 75 bp, Homo sapiens
gcacgaccacaccgctgatgaagacaaggactcacagtggctgcaagataaagaaatgggggctcagagcagtca

SEQ ID NO: 281543 - DNA, 80 bp, Homo sapiens
gctcccgcaccatggaggaggacgacagctacgtgtctttggtgcaacactaacaaggcttgtctggactacccagttac

SEQ ID NO: 281544 - DNA, 51 bp, Homo sapiens
gtgacatgtccagcatgaatcccgaatagggcccatcctgatggagctgca

SEQ ID NO: 281545 - DNA, 90 bp, Homo sapiens
cagcagaacaactaaaacagtatgaaataaacgccactcctaaaggctggtcctgccactgggacagaggtgccccaactcactgaccta

SEQ ID NO: 281546 - DNA, 101 bp, Homo sapiens
ctatgttctgctggagcattctgtgaagaaggcagtacattttgggttaccggactcagtgacctttgaagatgtggctgtgaacttcacccaggaggaat

SEQ ID NO: 281547 - DNA, 100 bp, Homo sapiens
caaccagaaggaggctgtggcctatgcagtcaactcctggaccactagtgccaatgagtgccaggagcgccctgttgagtgtaagttctgcaaactggac

SEQ ID NO: 281548 - DNA, 100 bp, Homo sapiens
gcggatccaaagacccaggaatgacagatttctaccactccaaacgccggctgatcttctccaagaggaagccctaatccgcccacaggaagcctgcagt

SEQ ID NO: 281549 - DNA, 100 bp, Homo sapiens
ccgaggaggagccaagtgtggcagcagttcgtgaagtctgtgaggagcggaccatgtgtcaacttatgccgcgtttgtacagacgcatagaccaacaggg

SEQ ID NO: 281550 - DNA, 75 bp, Homo sapiens
gcgatggcagcgaccgatatagctcgccaggtggagctgtgcggtcttatgcattggaacttaatttgacagatt

SEQ ID NO: 281551 - DNA, 82 bp, Homo sapiens
agaataagatttttggaagaaaagattcagaatctgataattcagataacaacacaatctttgtgcaaggacttggggaggg

SEQ ID NO: 281552 - DNA, 82 bp, Homo sapiens
tgggacctgggaacctactgtggggccgcggccggaccgagcgcctcgacctcggtctgagcctgagcggtgcatccccgtt

SEQ ID NO: 281553 - DNA, 101 bp, Homo sapiens
tcggaatccattatctttcgggaaagctctctggggcaggtcaaggttgcagctagatcacgctattccaaagatccatttgagttcaagaaggagactcc

SEQ ID NO: 281554 - DNA, 100 bp, Homo sapiens
cggaactggtcgaatgaggcacctaaaaattgtataccgcagattcaggctcggatgaggtgcaggttggacagcagcgcacgttcatcagccccatcaa

SEQ ID NO: 281555 - DNA, 82 bp, Homo sapiens
actgctgtgcagcccctcagagtaccgcttggagatcctagagtggatgtgtacccggctcaccagctggattccctcctgg

SEQ ID NO: 281556 - DNA, 83 bp, Homo sapiens
gggaaatacttcctgtttggcttcaacattgtcttctggacaatgcagatcttcgtgaagactctgactggtaagaccatcac

SEQ ID NO: 281557 - DNA, 98 bp, Homo sapiens
cttgctacagggttgaacaatgggcgtatcaaaatatgggatgtatatacaggatgttgtacctcaggcgttgttagatcagtatttatctatgactg

SEQ ID NO: 281558 - DNA, 98 bp, Homo sapiens
ctgccctgagacggtgtcccgccgaaaggtgtgatgaatgcagactctgctaccattttggctgtttggatcctcctttgaaaaagtctcctaaacag

SEQ ID NO: 281559 - DNA, 146 bp, Homo sapiens
ggaagtgcgagtccgggccctgtatgactatgaggggcaggagcatgatgagctgagcttcaaggctgattcagaagaagatgttgttgaaactcctgcagtgtctcatgatgaacatacacaccaagagataaagggccgaaaaa

SEQ ID NO: 281560 - DNA, 110 bp, Homo sapiens
gcagtaacaacagcgaggaagaagaggacgacgacgacgaggaagaggaggtttctgaggaacttagtgatttggcccgtgaccctccagcacaatgttctgcaggtcca

SEQ ID NO: 281561 - DNA, 97 bp, Homo sapiens
ttcggcaagatccagatcgggatttacgtggagatcaagcgcagcgatggttaaacccatccagagtaatggctgcggccttacccaggaccctggg

SEQ ID NO: 281562 - DNA, 87 bp, Homo sapiens
gccagttgcttgatcaggtggaacagattcagaaggagcaggattaccaaagggactggacctacagagacatctgggattttctgc

SEQ ID NO: 281563 - DNA, 95 bp, Homo sapiens
tcccagcgtgagcgacgcagaagacgggtgatttctgcatttccatctgaggtccccctggtccttgtgaaaaactccggtgttcctggtaacca

SEQ ID NO: 281564 - DNA, 100 bp, Homo sapiens
tgatatctgaacactcctcacttcttccccagaaactaatctggattcactccctctggttgatacccactcaaaaaggacacttctgattaagacggtt

SEQ ID NO: 281565 - DNA, 100 bp, Homo sapiens
gtggtcgacctgacttcttttgagcagttggcactacccgtcttgaggaatagcatgaataatctttcatttagtgagctatgttgcctcttctgctgtc

SEQ ID NO: 281566 - DNA, 75 bp, Homo sapiens
taacggcaaaaaatggtggagcagtgaggagaggagacgccgtgagcgggacgaccagatgtaccgagagcggct

SEQ ID NO: 281567 - DNA, 100 bp, Homo sapiens
tgtaatggtaaaattatatccaaatatgactgcggtactgcttcataacacacaacttgatcaacgaaagagctaagttcctaggaacgtcacatactgg

SEQ ID NO: 281568 - DNA, 75 bp, Homo sapiens
tggataaggaccagtacctgcccaggaaactggttccagcaacagatagaaatgctttaagttcactctggggaa

SEQ ID NO: 281569 - DNA, 74 bp, Homo sapiens
gaagttggtgaagggccatgcctactctgtgaccggggccaagcaggaacagcgacatctcactcatgaaaatg

SEQ ID NO: 281570 - DNA, 100 bp, Homo sapiens
gtcttcttcttaatcccatatctggacatctggaacatccatggccttggatggtatactgtaaattcagcatatggagataccattatcataccttgcc

SEQ ID NO: 281571 - DNA, 49 bp, Homo sapiens
gccgctgccaccggcgcgcccgacggccctccaggcactgaagcgtaag

SEQ ID NO: 281572 - DNA, 97 bp, Homo sapiens
agaccctggagcctcagttggaagcagccgatccagcctgcggagcctgtggggcagattctgaaggaagatttccattaggtaatttgtttaatca

SEQ ID NO: 281573 - DNA, 83 bp, Homo sapiens
tacagcccttacggaagctgccttttagagcctttcgcacaggtactccaaagattcaggtttactcacgtcatccagcagag

SEQ ID NO: 281574 - DNA, 82 bp, Homo sapiens
tgctgcaggcggcccactggcagttcgaggtggggcaggagaccctgtaggaggaccccgggccgcaggcccctgaggagcg

SEQ ID NO: 281575 - DNA, 98 bp, Homo sapiens
gacctcgctgcgctcatggcgtcgcccgggacacatgttcaaagagcataattaactttttaaaagaagctagtaagtactgaaatagttttttaagt

SEQ ID NO: 281576 - DNA, 99 bp, Homo sapiens
ccctgagctcccattaggagccgctggctgcggcagcaggggactagcgtgagaggtttttcttcccccagtccctcagctgctgctgctgctcaggag

SEQ ID NO: 281577 - DNA, 83 bp, Homo sapiens
gagctatccacatccaggaactgacaatctgttgatgttaaatgctttggcagcatgtaagcagctgtttgccaagaacccag

SEQ ID NO: 281578 - DNA, 82 bp, Homo sapiens
gagctgttccgccggagcccccggcccaagggcgacttctccagccgggcccgcgaagtgttgctgattgttggaggttctt

SEQ ID NO: 281579 - DNA, 100 bp, Homo sapiens
ctcaaggactgtccaagtgggaggctaaatctcgaggaatttcagcagctctatgtgaaggatgtaataggaaaagcactgcagtaccttggaacatttg

SEQ ID NO: 281580 - DNA, 75 bp, Homo sapiens
cttgggtattgtcgtggagaagcggtctactccagatggaggagatgtataagaaagctcatgctgctatacgag

SEQ ID NO: 281581 - DNA, 96 bp, Homo sapiens
aggaacactgaagagccctcccaaaggatttgatacgactgccataaacaaaagctattacaatgtggagctgtgccgcatggagtcaaaaactgg

SEQ ID NO: 281582 - DNA, 75 bp, Homo sapiens
gccgccttcccgcgccccgcagcgccccgcagagcagtcgagctcccagttgaggataaaatcaggatcattgca

SEQ ID NO: 281583 - DNA, 83 bp, Homo sapiens
tgcgggccggggcgcggaccgcggagcggccttggttgaatctggcgatgtggaacccatggatatggagggctgactatata

SEQ ID NO: 281584 - DNA, 74 bp, Homo sapiens
ccaggaaataaagatcctgagagaaagagactcttcaagagaggcttctaatgtagatgtgaagatgacgtggc

SEQ ID NO: 281585 - DNA, 100 bp, Homo sapiens
acaggagctgtagagaggaccccggtacatctgaaagccgggaaatgtgacatattcgatgccatgttccctgtcactcacatcgctggggagactgtta

SEQ ID NO: 281586 - DNA, 50 bp, Homo sapiens
ctaggggttcatgttaaccaggccaaacaccaaaactggacaagccaagg

SEQ ID NO: 281587 - DNA, 75 bp, Homo sapiens
cgagggggcttgaagggtatccagatgataagagaagtacaacagttccatcctgctgttagaaactcatctgag

SEQ ID NO: 281588 - DNA, 75 bp, Homo sapiens
ggctcggccgggccgtcccggcctgcgcagcctgagtcttccgtgtgtgctaagatcgtgcagctcctggggcag

SEQ ID NO: 281589 - DNA, 100 bp, Homo sapiens
ctccgtctgccacacgctgatggtgcagcaccgcatgatggtacccaaagtcaggttgattcttcaccacactgaaaccattaggaaaaatccttgtggt

SEQ ID NO: 281590 - DNA, 83 bp, Homo sapiens
ggaaggaacgaggcaaggagctaaagcagcgtgcgttcagccctggggtgaggagcctggggcctggaggggcttggccgatc

SEQ ID NO: 281591 - DNA, 100 bp, Homo sapiens
gcatcaccaaagctagatgtttcatatgaaccaatgatagtgaaggaagctcgatatattgccataacaatgatgaagatactggactaagcatgcccag

SEQ ID NO: 281592 - DNA, 76 bp, Homo sapiens
ggcatttggctttgcctttctggacacagaagtatttgtgacaggttgaactcccaccacctgatcttggaccaag

SEQ ID NO: 281593 - DNA, 96 bp, Homo sapiens
cagagggcaaggggctggttgcaggtggtgctgggaggatggaggaggtggatgccagtgtggtacgtgagatctgctccaagtacatctatgacc

SEQ ID NO: 281594 - DNA, 75 bp, Homo sapiens
catgaatatcattgccaatgagattgggtcagagatgcaaccttaaaatcagtgacaagaaacattccaaacaag

SEQ ID NO: 281595 - DNA, 115 bp, Homo sapiens
ttcatggcaccatggcaagaagaagctgtatcttatctatggaagataaagcatggagttggctaatggatgctgaaatgggacgtcggtcatcagatactgaagaagaaagcag

SEQ ID NO: 281596 - DNA, 75 bp, Homo sapiens
gcttgaacatcctttgactggttagccagtgccggtggtggtgtgcacattgagccccggtatagacagttcccc

SEQ ID NO: 281597 - DNA, 75 bp, Homo sapiens
gggaggaccctgagggctcagacatcctggctggcctgccactcctcctgctatgatgcctgggcagatcccgga

SEQ ID NO: 281598 - DNA, 100 bp, Homo sapiens
gtggagtgtccgctgtgcccgggcctgcaccatgagcgtcccggccttcatcgacatcagtgaagaagatcaggtggaagtttagctgatgctataagtg

SEQ ID NO: 281599 - DNA, 75 bp, Homo sapiens
ctcctgagtggctgggactacagctgctacaggccagagcggatggtcatttccagcagagagccctgcctgctg

SEQ ID NO: 281600 - DNA, 101 bp, Homo sapiens
cgacaagccgctggcagccgcggatctcaccgccgctcagggcggcggcggcggcgcccgggagccggagccttcgcggcgtccacgtccctcccccgctg

SEQ ID NO: 281601 - DNA, 74 bp, Homo sapiens
gtccggcagacttgtggctacacttctggccagtttgacctgggggagccttagcatcatcaaatctaaaattc

SEQ ID NO: 281602 - DNA, 82 bp, Homo sapiens
tccccggcgcgaagaggctggactcggattcgttgcctgaggtggctattatcatggaaaactaatttttcccagagaattt

SEQ ID NO: 281603 - DNA, 74 bp, Homo sapiens
attttcctcaccactgaatctacaggtgtccagtgtcaggtgcagctggtggagtctgggggaggcgtggtcca

SEQ ID NO: 281604 - DNA, 100 bp, Homo sapiens
tgtctggagcaaggaaaagatccctggaatatgaagagacacagtatggtagccacacccccagtatgtccgtggttcagaccctgtattaaagcttttg

SEQ ID NO: 281605 - DNA, 90 bp, Homo sapiens
cacaggtgaagctgagacccgcgtccccactatgagacacgatgaggcgagtggtacgacagagcaagtttcggcatgtatttgggcaag

SEQ ID NO: 281606 - DNA, 100 bp, Homo sapiens
gggtttgctcccaacatcctggagaataaagaaggcctaaagaatgtatttgacgaagcaatattggctgccctggagcctccagaaccgaagaagagcc

SEQ ID NO: 281607 - DNA, 75 bp, Homo sapiens
cccgcggctgggcgttcatctaccacgctttcgtaattgagcccctgagtcctgagttggtggcagctgcatctg

SEQ ID NO: 281608 - DNA, 98 bp, Homo sapiens
ggagattcatcgaggtgccctgctctgaggactacgacagtcaccgcaggttcgaagagagaactcgatgccaccgcaacggtattggcgaaccggca

SEQ ID NO: 281609 - DNA, 100 bp, Homo sapiens
aacacttaggcaggaggatcactcgagcccagaagatcaagactagtgtgagcaacaaaaaaataatgttgagtttccatgaagaacaggaagtactgcc

SEQ ID NO: 281610 - DNA, 90 bp, Homo sapiens
cagctgactgaggagcagattgcagcgtgctcaggcagttcttcaagctgtgacagctgtccagacagcaaatactcctcttagtggcac

SEQ ID NO: 281611 - DNA, 51 bp, Homo sapiens
caggatgctgatctaaacgtggaaaaagcaggaagttatgttcgtgatgat

SEQ ID NO: 281612 - DNA, 100 bp, Homo sapiens
caaggaatgactcatcttgaagcccagaataagattaagggttgtacaggctctttgaatatgactctgcaaaggtagtgtcagtggctgagtatcaccg

SEQ ID NO: 281613 - DNA, 100 bp, Homo sapiens
cgcaggcggtggtccctgaggcccgtggaaggagtcaaacttgcgggaattttgcagacgcaaacatgcagatctttgtgaagaccctcactggcaaaac

SEQ ID NO: 281614 - DNA, 75 bp, Homo sapiens
ccgcaaggtcttccgagctgctgcagcccagctttctccagtctggctgaagctgcttatgaagctgcagacgtt

SEQ ID NO: 281615 - DNA, 75 bp, Homo sapiens
caaaagagtctttggaggatgcggctttgatggggaagatcagttttcctgccatccaggctgctccctccttca

SEQ ID NO: 281616 - DNA, 75 bp, Homo sapiens
atccttttggcttagagatcactaatccatcttcagcttcaattacaagtgactccccggacagctcaacaccaa

SEQ ID NO: 281617 - DNA, 100 bp, Homo sapiens
gctgcatcaagaaacccaagctgctgaggagaactgcctgaactcggatgtggtggaacagatttacaagcggaacccgatccttcgatacacccatcac

SEQ ID NO: 281618 - DNA, 82 bp, Homo sapiens
ggaggagctgtgcagccgcgaggaggcgcgggaggtgttcgagaacgaccccgagacggttaattatagaaaatgccaagta

SEQ ID NO: 281619 - DNA, 74 bp, Homo sapiens
ctcaggcgtgcgcggacggtgtgcggatgtgctcatcttttgctacgggacccagacaatacgatggaatattc

SEQ ID NO: 281620 - DNA, 100 bp, Homo sapiens
ctgaccagagctgatcccgagcagcgtcatgtacccctgttgtaaacatgttaaaggcatcctgttatatggacccccaggttgtggtaagactctcttg

SEQ ID NO: 281621 - DNA, 100 bp, Homo sapiens
gacctaatgaggcgcctgcctccccagcaaatcgagaaaaacctcagcgacctgatcgacctgcacagtccaggaggctggggtccaagagggccatggc

SEQ ID NO: 281622 - DNA, 82 bp, Homo sapiens
tgatgacctgctgctcgtgctgatctcaggtactccaaagattcaggtttactcacgtcatccagcagagaatggaaagtca

SEQ ID NO: 281623 - DNA, 100 bp, Homo sapiens
cgcctgaggagcgggatctaacccaggagcagacagagaagctgctgcagtttcagtattgactcggagacaaaaagaggccaagaccaagagtgacagt

SEQ ID NO: 281624 - DNA, 100 bp, Homo sapiens
tgcggcagggccagctgaccggccggggcctggtccgggcggtgcagattttggggaatgtctcagaattccaaagagtggttgaagtgctccaggacag

SEQ ID NO: 281625 - DNA, 88 bp, Homo sapiens
gccctggaggtggggagaaaaggacccgcattttatccttgatgttccccttggagtgatcagcagagtggagaagattggagcacag

SEQ ID NO: 281626 - DNA, 100 bp, Homo sapiens
agtcatggcggcagcagccgctctgagggcgcctgctcagatcatggaagggaagtggttgctgtgtatgttactggtgcttggaactgctattgttgag

SEQ ID NO: 281627 - DNA, 89 bp, Homo sapiens
aggctatgtttgaatctcagagtgaagatgagttgacaccttttgacatgagcatccaggctttggcactgatagaactctataatgca

SEQ ID NO: 281628 - DNA, 100 bp, Homo sapiens
aagtcgagtatctggtgaagtggaaaggatggcccccaaacaagagtgagccatggagctacgtgtggggaacaagtaccgcctgggacggaagatcggg

SEQ ID NO: 281629 - DNA, 46 bp, Homo sapiens
cggcggctgcggcccaatataggaccaagaatcgccttcagccctg

SEQ ID NO: 281630 - DNA, 75 bp, Homo sapiens
atgacatacaagtgtgcagtggttgattatgtttgagaccttcaacaccccggccatgtacgtggccatccaggc

SEQ ID NO: 281631 - DNA, 83 bp, Homo sapiens
ggcagatgtttgtcgactggaatggcagcccctgtcaaagggaacaggaagcagtccacggagggtgacgccctagacccacc

SEQ ID NO: 281632 - DNA, 74 bp, Homo sapiens
aacgtgtcaactctgcttaattaagcactttgatgatttaagaaatcttggcctgcactgcccaaagtcttgga

SEQ ID NO: 281633 - DNA, 75 bp, Homo sapiens
agagccagggcactcaccaggctgcaagaacagtgctgggttacagacgttccacgttccgtctccctgtgccag

SEQ ID NO: 281634 - DNA, 90 bp, Homo sapiens
cacgtgggcaacgtacgtcagacggcagtggtggaaaagatccatgccaagaaaaggttgaaagctgctgaagcagacagcaaactgaaa

SEQ ID NO: 281635 - DNA, 100 bp, Homo sapiens
gaaaaactggagagcttcatcaaaaatagtgatagctttgataatgtcttctacaaatgcttctgggaactggaggacccagttaaccatagggctgtcg

SEQ ID NO: 281636 - DNA, 98 bp, Homo sapiens
tggctgggacggagcctgacctcttacttcctgtgggaatgggtaccacagaccatgtcatcgtcctggcgtccacgaaccgagctgacattttggac

SEQ ID NO: 281637 - DNA, 50 bp, Homo sapiens
cggtaggagtggccttttaccaaagagaagagcaagttagtaccttgtac

SEQ ID NO: 281638 - DNA, 100 bp, Homo sapiens
acaaatgcttcaagacttgcaagctgctggatttgatgagcccttgccagcatccagccatgggggatatgaaaaccccagattttgatgaccttctggc

SEQ ID NO: 281639 - DNA, 74 bp, Homo sapiens
ccggggcgccataaacgcccccaatttcccagctgctaaaggaagaggaagtactatactggcaattgctggag

SEQ ID NO: 281640 - DNA, 101 bp, Homo sapiens
gcacagctgcctgtcaccccagatgtcctcatcatcccgtcagagctgaggtacttcgtgaaggagcttggctaccaccatagcacgatgccgaccagaac

SEQ ID NO: 281641 - DNA, 100 bp, Homo sapiens
tacacgttcacggtgccccggcgccacctggagagaggccgcgtcctgggcagaggggcttccatcgttggcgtgaactgccgctttgggcccgacacca

SEQ ID NO: 281642 - DNA, 82 bp, Homo sapiens
ccacccaccgccgccgcctcccaggtctattctggataagcaggttttgtgaagacatttattctttcttggacctcagatt

SEQ ID NO: 281643 - DNA, 51 bp, Homo sapiens
cagagctacccttcttggagcccacaggggctggagtgcagtggcgcaatc

SEQ ID NO: 281644 - DNA, 88 bp, Homo sapiens
cgtcagccgccaccggcagcagcagcaccaccggacggtgctggagaatctggtaaaagcaccattgtgaagcagatgaggatcctgc

SEQ ID NO: 281645 - DNA, 98 bp, Homo sapiens
tcgcgatgagtggtctcggcaggctcttcgggaaggatgagtaacgaaagaggctttgaaaatgtagaactgggagtcataggaaaaaagaagaaagt

SEQ ID NO: 281646 - DNA, 99 bp, Homo sapiens
ttcatcaaggacaattgcatgcacttacagagtgtgcccagctggctggaaacctggcagtgataccatcaagcctgatgtccaaaagagcaaagaata

SEQ ID NO: 281647 - DNA, 97 bp, Homo sapiens
ctttggcaacttgctaagataactgaaagcagctctacaaagtttgcatttatgtcggatcctcagtgaaaataaaagccatgatagttcaacatac

SEQ ID NO: 281648 - DNA, 75 bp, Homo sapiens
gaagaatgtggagagttttctagaagcctgtcgaaaaatgggggtgcctgagaacatacggtccctaatgagcac

SEQ ID NO: 281649 - DNA, 100 bp, Homo sapiens
tgagcggcgagtttccgatttaaagctgagctgcgaggaaaatggcggcgggagggtgtcaaattgagaaccaggtagatccccaccacctacagtaaaa

SEQ ID NO: 281650 - DNA, 98 bp, Homo sapiens
ggacattctgactgcactctatgtcctgggccatggcctgcgggtcacagtctccctgaaggagctgcagagcaccagtggcagttcgcagcctccag

SEQ ID NO: 281651 - DNA, 100 bp, Homo sapiens
aaaaaaaattcatctgggcggtatctggaacttgaactcacgtgctgtgtgtcagactgagctttccctgattcattctacaatccaagacttgctgcac

SEQ ID NO: 281652 - DNA, 73 bp, Homo sapiens
ccaatcaggaaatcgaaattgtctacaagtcctgaatcctgggcgttttccactgcgccgtggagacagcgaa

SEQ ID NO: 281653 - DNA, 82 bp, Homo sapiens
cgcgctcggcggccgccagcagtttctgtgtttgaagaacatacgcaccttcctgaaagtctgccacgataaatttggatta

SEQ ID NO: 281654 - DNA, 74 bp, Homo sapiens
aaattgaagctcaagaaggtgaagatgatacctttctaacagcccaagctaggcagctggaagagaaagaccga

SEQ ID NO: 281655 - DNA, 75 bp, Homo sapiens
tgacctatggcgagcggccctactgggagttgtccaaccacgaggaaatagctcgtctgctggccctggaggagg

SEQ ID NO: 281656 - DNA, 82 bp, Homo sapiens
atttgcctttagtgcactcttctccttcacagtaaagtggctgcttcttggacacttaatgattgttggcaagaaatgtgct

SEQ ID NO: 281657 - DNA, 105 bp, Homo sapiens
gtcagacgcagccgtagacaccagctccgaaatcaccaccaaggactttccttatcccagttgattgtgcagaatacactgcctgtcgcttgtcttctattcacc

SEQ ID NO: 281658 - DNA, 100 bp, Homo sapiens
gggagtgcatcaaaggtgtgaacacagatatcagttttagagaatgtggcgtggagaaattctcaaggaaagagtaaaatgctggtgatgtgctgaggga

SEQ ID NO: 281659 - DNA, 83 bp, Homo sapiens
taccaaggcatcacatgagcatgaagataaaagtcctgaaacagttttgcagtcgtaccctgatgggaggatgaaaacagcag

SEQ ID NO: 281660 - DNA, 74 bp, Homo sapiens
gctgatggaggccatgaggagctgccctgacaaggcccagaacaagaatgtggtggtggctgacttcgggctgg

SEQ ID NO: 281661 - DNA, 75 bp, Homo sapiens
cgggagctgtatggccgccgtcgcaagaacacacgtcacatggagatgggcgtcaagaagttacctctcgtacca

SEQ ID NO: 281662 - DNA, 98 bp, Homo sapiens
ctgctttggagacttcataatttttctaggaaaggggctggtggcagcagcgtcgtcataggtaatattggtgccctgatgggctacgccacccacaa

SEQ ID NO: 281663 - DNA, 90 bp, Homo sapiens
ggaggttgctagacctgggatccagcccttctggtgtcacctcccagggtgactcaactccaggcaaggtgcccggcgacgactgcccgc

SEQ ID NO: 281664 - DNA, 100 bp, Homo sapiens
gctgccttcctcacagtgtccaggatggacaaccccataaggtatggcatttcaaatatagatacaaccattgaaggaacgtcagatgacctgactgttg

SEQ ID NO: 281665 - DNA, 82 bp, Homo sapiens
gtccgccttctctgtcagctctttccccgtcagcatcccagccgtgctcacggtttacccaaggtccagcctagcccctagg

SEQ ID NO: 281666 - DNA, 51 bp, Homo sapiens
gagtaaacttcccctcaccagaaggatgccaaagaagagtgaatggcccac

SEQ ID NO: 281667 - DNA, 100 bp, Homo sapiens
agtaaacaggtttttgggacttgccagtttctttgctgggatggctgtcctttctggaccacctatagcagacagagtttcactctcgttgcccaggctg

SEQ ID NO: 281668 - DNA, 95 bp, Homo sapiens
ccatgcagcaaaagaaggagggtcctctcagtgattaaggtacacagataagctgtttctctccaagttctttctcctggcgtcaggctgccttt

SEQ ID NO: 281669 - DNA, 90 bp, Homo sapiens
cccgcgcccgcccaggggtcgctgtcgcctgctgctggctcctcactgggcccccagatgccgacggccctctctacctcccctacaaga

SEQ ID NO: 281670 - DNA, 74 bp, Homo sapiens
agcagctcaccgaggacggggactcgcccgacaacaagctcaaatacgtcaccaaatggcagaggacagcaaag

SEQ ID NO: 281671 - DNA, 100 bp, Homo sapiens
ctatcattggctttctgattttagaagaaggggaaacagcagcagccatcaacattaccattcttgagagggtcctccgcggaagggcagctgaatggac

SEQ ID NO: 281672 - DNA, 75 bp, Homo sapiens
cagatacctgcccaaaggaggaagacactgagaaactgagtcaagaagagtatgaacggcaagaaagagagcaca

SEQ ID NO: 281673 - DNA, 100 bp, Homo sapiens
caaagcggcagctcgagattgcccaaggatctcctattgcacagcagacaagatgcacgacaaggtgtttgcatacatcgcccagagccagcacaaccag

SEQ ID NO: 281674 - DNA, 100 bp, Homo sapiens
aaagaattcagaaggaacttgcagaaatcacattggaccctcctcccaactgtagagccgagactgtctgaagctgggcccacctgctgagggagaagtc

SEQ ID NO: 281675 - DNA, 97 bp, Homo sapiens
tagcacatcacctacactaccacggccacactcaccactccatggccacacagcacacgacggttctgccctttatattaatcgagatgaggacatc

SEQ ID NO: 281676 - DNA, 100 bp, Homo sapiens
catacaaaggacacacagggattttgaaaatgctgcacatcccttaatagtcatctacatagcgacttgtttaagtatcactgcaatgctgacactggga

SEQ ID NO: 281677 - DNA, 100 bp, Homo sapiens
gggatggacaacctgcattggacccagctattgctgcagcatttgccaaggagacatccctcttagaccgagacatgggtgcccggcaccgcgcccgagc

SEQ ID NO: 281678 - DNA, 95 bp, Homo sapiens
atacatggttgaaaaaatttacccacaaatacctggaagtgagctcacaatgactcaagctgccacatagtgttgattgtgaaatgccagttgaa

SEQ ID NO: 281679 - DNA, 87 bp, Homo sapiens
ggagagccccggagtgagcggagtagcgagtcggcaacccggagggagactcatgcatctgtatgccgtgtgcgtggactgcctgga

SEQ ID NO: 281680 - DNA, 96 bp, Homo sapiens
gtgaggcctcctcagccacgtggaactgcaggtgacagcagggacatgtctcgggagatgcaggatgtagacctcgctgaggtgaagcctttggtg

SEQ ID NO: 281681 - DNA, 75 bp, Homo sapiens
gatgtcgggacaccccggaagctgggaaatgggggaaatttgcagtggtgagaaaatgtataaagaaagattctg

SEQ ID NO: 281682 - DNA, 108 bp, Homo sapiens
agaggaacctctatgccgacatcgacgccgcctggcaggccctgcgcaccagacagccctcagcgcctttttccaggagaccaacatcccctacagccaccatcacca

SEQ ID NO: 281683 - DNA, 96 bp, Homo sapiens
gccatccttccccacccaggaccacctcccggccacgccccgggtccggctctcattcaaagtattaaaggtggaagaaggtccatatctttttct

SEQ ID NO: 281684 - DNA, 100 bp, Homo sapiens
tagaacgtgaggctcggatatgtcgacttctgaaacatccaaacatcgatgactcttctacaaaagtggacattaaggagacctacgaggtggaagccag

SEQ ID NO: 281685 - DNA, 51 bp, Homo sapiens
aagttttgtgcagattgccagtctaaagaataatgcatatactgccatgtc

SEQ ID NO: 281686 - DNA, 82 bp, Homo sapiens
gagtcaagccgccgcctcgacccagggcccgcgggccaggagagcgctcggcgggctatggtgaactaaacggtaatgctgg

SEQ ID NO: 281687 - DNA, 74 bp, Homo sapiens
ccgcggtccccgctcttgctgatgtgtatatctcatgattgatatggagaaactagtcatgggccaaaggtcaa

SEQ ID NO: 281688 - DNA, 75 bp, Homo sapiens
ctcctcggtcctggacaccatctgcactctgtcagccagaagctggcagggcggagatgctggaccacgccgtcc

SEQ ID NO: 281689 - DNA, 98 bp, Homo sapiens
aagggatagacgtcgaggaggcagccgttctcgctctcgttcccgttccaaatctgcagaaagatggctcagcgacttcttctgaggaggttcctggc

SEQ ID NO: 281690 - DNA, 83 bp, Homo sapiens
ctatgtgtatccatggagacaagagtcaaccagaaagagattgggtacttaatggatcctggaggtgatgggatagactgggg

SEQ ID NO: 281691 - DNA, 83 bp, Homo sapiens
tacacagctgatattttcatatgagctgcatttttagactacaaagatgcttactcaggtgtctttacatttggcaatctccg

SEQ ID NO: 281692 - DNA, 76 bp, Homo sapiens
cccccattacaaaatataaactctgttcagggagaagatagcattcttcacaaggccaaggatcaacatacctcct

SEQ ID NO: 281693 - DNA, 90 bp, Homo sapiens
tggagactgcgctcctggccctggggtattctcacagctctgcggcccaggcccaagtgaagggaatttggctacaaagcagatcgtatt

SEQ ID NO: 281694 - DNA, 57 bp, Homo sapiens
gctgccaggaggaaatcagccttagcaggatgagcaatacccacagcactccgttca

SEQ ID NO: 281695 - DNA, 83 bp, Homo sapiens
gggggaagcagcacgggatcccagcctcaggcctgcacggacggtgttggttggggccgccatggcatcagatgaaggcaaac

SEQ ID NO: 281696 - DNA, 90 bp, Homo sapiens
ctcagttgtggagagctgattcccaaatctaaaggcgaggattaaatccaccacacagggtgaaatctatctccatgacaacattcacac

SEQ ID NO: 281697 - DNA, 133 bp, Homo sapiens
tgtcggggtccttccccctggtcctgaagaagctgatggagaaccccccgcgcgaggcgcgcctcgggtatcgggtgctgcttcggtatgaaggctttgaaaatgacgccagccatgacttctggtgcaacct

SEQ ID NO: 281698 - DNA, 100 bp, Homo sapiens
tgttttcttatttagccggagtgagaagcaagaaggccctggacacagcaatatctctgggctttcacaggtagctacagcaagctgggtagcaggcaga

SEQ ID NO: 281699 - DNA, 74 bp, Homo sapiens
tgccaaggagtttattaaaatcatagagaatgcagaaaatgagtatcagaaacgcttcgttaagggactcaggc

SEQ ID NO: 281700 - DNA, 100 bp, Homo sapiens
acgcgggcgcctgaaggagttgttgtctcggcagcgcccgcggagacgtgaagaggtctggccgtgggcctgggcttcggggcactggcagaggtcgcca

SEQ ID NO: 281701 - DNA, 75 bp, Homo sapiens
cggtgcctgagctgagtgaggccgaggccgggaggccgtgcccggagatgctgacctgacctttgaccagacggc

SEQ ID NO: 281702 - DNA, 82 bp, Homo sapiens
caagagcacagagtccatcttcctgacccaggtgtgatgaatgcagactctgctaccattttggctgtttggatcctccttt

SEQ ID NO: 281703 - DNA, 100 bp, Homo sapiens
ggcctggaggggcgaagaggacgagggggccaaggcttcctccgggtgcagggacttcacagcccacacgggctacgaggtgctgctgcagcggcttctg

SEQ ID NO: 281704 - DNA, 50 bp, Homo sapiens
cacccccatgacccttccaaaaggagatttaaatgaacagtcccaggcac

SEQ ID NO: 281705 - DNA, 100 bp, Homo sapiens
ggctgcgctctgcccggcgagtcgggctctggaggaaaagaaagtgcgaggacgacgggcagacgttcttcagcctagatgacgggaacaccaaattctc

SEQ ID NO: 281706 - DNA, 98 bp, Homo sapiens
cctgtccatcgtgtgcctgatgatcacgcagctggctggcttcagtggaccattccattgtgaacgtgcctggtgagtctactcttcgccgagatttc

SEQ ID NO: 281707 - DNA, 75 bp, Homo sapiens
agcggaaaatgatccagtcacagcttctccaaacaggctggtgtacagggagcaacaccggagctggtgcacgct

SEQ ID NO: 281708 - DNA, 87 bp, Homo sapiens
atcccagccatgtcatcttatctacgaaatgattcagacctgatggccaaaagaaaggaagaaaatttttcctctcctaaaaatgcc

SEQ ID NO: 281709 - DNA, 75 bp, Homo sapiens
tggaatatgctgaagggggctctttatataatgcttgctagagaagttttggatgttgctgccggcatgattaaa

SEQ ID NO: 281710 - DNA, 100 bp, Homo sapiens
tcaagaagataactatccaaatagtctatgtataaaagtaaatgggaagctatttcctttgccttgctacctgggcgatgccttccgctgtgccagctgc

SEQ ID NO: 281711 - DNA, 82 bp, Homo sapiens
cagctcaacttctaccagttcctcggggtgcagcagatttgataatgggctgcattaaaagtaaagaaaacaaaagtccagc

SEQ ID NO: 281712 - DNA, 51 bp, Homo sapiens
tggaacgtcttcttgtcacatggggtatgtccgtggttcagaccctgtatt

SEQ ID NO: 281713 - DNA, 75 bp, Homo sapiens
tcggtgctctgaggcgctggcgcggcgggcgcggcactggagaggggtctcctgaaaaccctgcagaaactggat

SEQ ID NO: 281714 - DNA, 50 bp, Homo sapiens
gtcgctgatccctgaagaccaaataggtttaaataacctccttgatgaaa

SEQ ID NO: 281715 - DNA, 75 bp, Homo sapiens
tgaatagttctactccttctacagctaatcttccagtaccaacaattgcagcaatagatggactcgctttaggtg

SEQ ID NO: 281716 - DNA, 96 bp, Homo sapiens
gagccaggccggagctgaggagaacgactgggttcgcctgcccagcaaatgcgaaggtctctgagcggcccctgatgttcctgttggacactcctg

SEQ ID NO: 281717 - DNA, 98 bp, Homo sapiens
ccgaccctgcccctcccgcccgcaactccgccgcccaccatggcttccgaggagctgtacgagggggctagagagctgaaggagagccagtttcccca

SEQ ID NO: 281718 - DNA, 75 bp, Homo sapiens
gatgattacagttcttcctaaaaaaggtgttggagcgggccggagagaagtagagtgggctgcgaggagaaggaa

SEQ ID NO: 281719 - DNA, 74 bp, Homo sapiens
ggctgctgagcccaaggccaaggaccccttcgctcacctgcccaagaggactgtagaagcggccaggaagaaaa

SEQ ID NO: 281720 - DNA, 51 bp, Homo sapiens
caagtagaactggctcttcaaattgaaagtattgggaaagggtcgttgtgg

SEQ ID NO: 281721 - DNA, 100 bp, Homo sapiens
ggttgcaggactctttctgttcaggccagaccctctgggagcttctcagccattttccacagatcagcctttgacgacccctatgccctggtggtgctgg

SEQ ID NO: 281722 - DNA, 75 bp, Homo sapiens
gtggtgatcgcctccaacatcgggcttccagtcagcaccacgcactgtaaggttgcagcgagccaaggtgtttca

SEQ ID NO: 281723 - DNA, 140 bp, Homo sapiens
ggccactgccagcactggggtggcagcctgccacatcgggggcaccaccctccatgcctttgcagctatcatggtgaacttacttcagattgtgcgggaccactgggttcatgttcttgtccctatgggatttgtcattg

SEQ ID NO: 281724 - DNA, 100 bp, Homo sapiens
agcgcccagcggacaccggcagcgcgcggtcgacgcgggcctgagctccctccaggttgcacagacagcagatggtgtggatgctgacctctggaaagac

SEQ ID NO: 281725 - DNA, 90 bp, Homo sapiens
gattcctctggttctggtgggaacccaggggagagataatgcatgtgagaaaacttcatatatgtttctacgaaaggaacttcctgtgcg

SEQ ID NO: 281726 - DNA, 80 bp, Homo sapiens
gccacgtgcttcaacgctctgctgcccgctgtgagggaaaagggagagcgcgcggcggacgcgcccgggacgcgcggcgg

SEQ ID NO: 281727 - DNA, 98 bp, Homo sapiens
atcaacagtaaggatgtcaaagttcaggtaatggcaccattgacttccccgaatttttgactatgatggctagaaaaatgaaagatacagatagtgaa

SEQ ID NO: 281728 - DNA, 82 bp, Homo sapiens
tgaactgtaagctggctaccagggccaaggtacttgaagctggtgtgtgtttcctttcagcgtcaagggttccacactgttg

SEQ ID NO: 281729 - DNA, 48 bp, Homo sapiens
gaactagatgagaccaaaatcattctgttgccctcaaattggctgtag

SEQ ID NO: 281730 - DNA, 78 bp, Homo sapiens
tcagcaagactggagtccctgatggaattatgcagtttattaagtataccaacaagctacggcaggagttgcagagcc

SEQ ID NO: 281731 - DNA, 100 bp, Homo sapiens
tccagcgaagaagtagacatggcgagcgactccccggctcgaagcctggatgaaatagatctctcggctctgagggtgtacaagggagaagaagccacat

SEQ ID NO: 281732 - DNA, 100 bp, Homo sapiens
ggagagtatgtccagctacaggaaaaacaagtggattgttgaaggccggctccggaggttcaggagtttgaacatgttaatgggcgctggagcatgcctg

SEQ ID NO: 281733 - DNA, 100 bp, Homo sapiens
ccccttccagctacatcgaaaccttcttggacacttaatgattgttggcaagaaatgtgctgctgatctgggcctgaataagggttatcgaatggtggtg

SEQ ID NO: 281734 - DNA, 75 bp, Homo sapiens
cgaccatgtttggatttcttacaagaagtcacaaaagcaaaacggacaagtcggtttttaagtggcattatcaac

SEQ ID NO: 281735 - DNA, 80 bp, Homo sapiens
agaagcagatggattcgtccttttagaatatttggagttttcctggtcttactggatgtcactctcctccttgccgacct

SEQ ID NO: 281736 - DNA, 82 bp, Homo sapiens
ttgggttttttgtggcttccttcgttattggagccaggcctacaccccaggtgctggagaatctggtaaaagcaccattgtg

SEQ ID NO: 281737 - DNA, 75 bp, Homo sapiens
gctccctggcaccgttggcccccggagggtcgggcccagttgcggcgagcggtacctggagtagaacagaaaaat

SEQ ID NO: 281738 - DNA, 83 bp, Homo sapiens
gtctgcactttacagaggtccaatcacgcggacccagtgttggagagcacaatggctgaacaagtccttcctcaggctttgta

SEQ ID NO: 281739 - DNA, 100 bp, Homo sapiens
gttgatgctggctttgttcccaatgacatgcaagttggacagacgggaaaaatagtagcaccagagctgctaagccgcacatctcttgagacccagaagc

SEQ ID NO: 281740 - DNA, 75 bp, Homo sapiens
gaaagatctaccttctggaagctactactacgtggtgcttggaaagtaaagatgacggcgccttgaggtaagcta

SEQ ID NO: 281741 - DNA, 106 bp, Homo sapiens
cgccatgaacaactcgggcgccgacgagatcgggccctgtttgtgctcttcgtcctggcctacatccacatcgtcttctcccgctcgcccatcaactgcctggagc

SEQ ID NO: 281742 - DNA, 75 bp, Homo sapiens
tgtgacatctgtgggtttaatccaacagaagaagtgtgccctggtatgtgaatgtacagccccggaaagtgtgag

SEQ ID NO: 281743 - DNA, 83 bp, Homo sapiens
ctgtcatccttcaacttcccctacctgcactgcatgtgcctcttagcaatgcataccacgagttagcacaagtgtattcaacc

SEQ ID NO: 281744 - DNA, 90 bp, Homo sapiens
ctcaagcagtcctaccatgtcagccttcccagtagctgggaccacagcactacctgacatgcttcagcggcacgatcgcagtgcccttcc

SEQ ID NO: 281745 - DNA, 85 bp, Homo sapiens
ccatagctaagatgccaggaccccctgaaagcctagacatggaagaaggtagataatgactataatgcccttcgagaaagactca

SEQ ID NO: 281746 - DNA, 105 bp, Homo sapiens
ggactggtgcgaggagaactactccgtgacctggtacatcgccgagttctgaaacttggatttaactggccagaagcaggtattcaaagcagagaacaatccctg

SEQ ID NO: 281747 - DNA, 83 bp, Homo sapiens
tgatgctgtgtatgagcttgatggaaaagaactctgtagtgaaaggtaaacgcaaagcactgaagttgaattttgcaaatcca

SEQ ID NO: 281748 - DNA, 130 bp, Homo sapiens
tccgggacagggatgtctacctggtaatagaggacttgaagcagaaagcaagtgaatacgagtcagaaggtgctggagaatctggtaaaagcaccattgtgaagcagatgaggatcctgcatgttaatgg

SEQ ID NO: 281749 - DNA, 82 bp, Homo sapiens
tttcggctttcctggacctcggagctggcggcagcagctgaaattgatgaagaaccagtcagtaaagcaaaacagagtcgga

SEQ ID NO: 281750 - DNA, 83 bp, Homo sapiens
caggcccacggaggaagagccgggcagtccctggagcgggccagggctgaaatctctttaatgatggagggaagcaggcagac

SEQ ID NO: 281751 - DNA, 90 bp, Homo sapiens
tttgagatgcacataggagtcaaccacttgggggagattagtaatttttaggtattaaagatacactcaaccaaagggacagaatgggaa

SEQ ID NO: 281752 - DNA, 90 bp, Homo sapiens
ctcgtcatgctctttgtagcgtggtgcttctgttgctcacagtgggtaattccagaattgattggccataccattgtcactgtattactg

SEQ ID NO: 281753 - DNA, 111 bp, Homo sapiens
caggacacggtctgggccgccgaatctccggccgaagagcggcggcggcagcggcggtctataacttgacccaggagttcttccggcacgataaaccagtcaatgctgaaa

SEQ ID NO: 281754 - DNA, 82 bp, Homo sapiens
tattggatgctgacaaaaatgaagaataatcatgggccagactgggaagaaatctgagaagggaccagtttgttggcggaag

SEQ ID NO: 281755 - DNA, 75 bp, Homo sapiens
gtggactccttcggcagtccacccaccgccgccgcctcccaggtcctgtatggtggaagagtcggggaccctcga

SEQ ID NO: 281756 - DNA, 74 bp, Homo sapiens
gactccttcggcagtccacccaccgccgccgcctcccagcacccaccaaggctccggatgtgttccccatcata

SEQ ID NO: 281757 - DNA, 100 bp, Homo sapiens
ggcatccctcgccctggctctttgagcccggaccagacaggtagattggggtcaactggactacttagttgtagacatgccaccaggaactggagatgtg

SEQ ID NO: 281758 - DNA, 75 bp, Homo sapiens
ctcatatcaaggaccagaaaggagacatgcgtcgggatgtccaggaaatttttcgcatgaccccccacgagaagc

SEQ ID NO: 281759 - DNA, 100 bp, Homo sapiens
tgccacctttccctttatttccggagctcgatcaagtcatccgccaaagaagcctgtccagtttggaactgttcctctcctgtgcacagaaacagttaag

SEQ ID NO: 281760 - DNA, 98 bp, Homo sapiens
gcggagccggaggaggaggggagaggcctggaggacaccaacatggagctcgaggccatgagcagatataccagcccagtgaacccagctgtcttccc

SEQ ID NO: 281761 - DNA, 98 bp, Homo sapiens
gaaggacaaggacagaatcaccagcactggctgaagtccaatatcagatggaaatgatgcggagccttcgccatgtaaacattgatcatcttcacgtg

SEQ ID NO: 281762 - DNA, 80 bp, Homo sapiens
agctgggcatccagggctcgtacttctgctcgcagggtggcccagttgaaatccttcccttcctctaccttggaagtgcc

SEQ ID NO: 281763 - DNA, 74 bp, Homo sapiens
aagaagaccagcatggctgaagcgagccctggggaggagtgttatgaaagaagttcccaaagagaatattacgt

SEQ ID NO: 281764 - DNA, 73 bp, Homo sapiens
ggtgatattcctggagtccgctttaaggcttgggaggcgatggagccggagttcttgtacgacctgctgcagc

SEQ ID NO: 281765 - DNA, 114 bp, Homo sapiens
gcctggagtctgcgaaggccgggacccggttccccggcccacagtgggggtgtgcaaacccgagagaactgggaccctgatgctcccataagacagaaaatgccccttgatgat

SEQ ID NO: 281766 - DNA, 101 bp, Homo sapiens
ccgactctggccctccgggagaccccgtaaatgcagccgtccgctcgccgccgttatcccaggtgttatgtctggctgtagctgttggtcacgtgaagatg

SEQ ID NO: 281767 - DNA, 100 bp, Homo sapiens
ctgctgcaggaagcgggcctggcgttgatccccgataagcctgccactcagtgtatttcagacggcaaggaatactgtatgtctgagtatttgagaatga

SEQ ID NO: 281768 - DNA, 100 bp, Homo sapiens
ctggatggtggactcagagaccaataaaaataaactgcttgaacatcctttgactggttagccagattcttgagtatcagaacaccaccttctttggtgg

SEQ ID NO: 281769 - DNA, 76 bp, Homo sapiens
ccgagaaccgcagggactggccgaggtgaatgtgtacgtgcttggaaagacgtttcttctcttggcaagagagctc

SEQ ID NO: 281770 - DNA, 82 bp, Homo sapiens
gccatgccggcccggcggctgctgctgctgctgacgctgctgctgcccggcctcggggtggcagtagagaagagcatcacag

SEQ ID NO: 281771 - DNA, 73 bp, Homo sapiens
ccagccttgcgcgtcgtcgctacctcctcggacagctttggcgctgaccacaatgctgagcaggaagcagcag

SEQ ID NO: 281772 - DNA, 75 bp, Homo sapiens
ggacatcttctatttctctgttgaagacaatgaggacatagatgaaaatctcttgttttgaacgaagattttaaa

SEQ ID NO: 281773 - DNA, 100 bp, Homo sapiens
tcatgttctgcacctcaggagggaattcagcctcagtgatgtccatgagtgtgcaacttgctttggtgtttgctgttttattgccacagatgacattact

SEQ ID NO: 281774 - DNA, 83 bp, Homo sapiens
agcctgcagcagtcgcttctccgcagcaaaagctggcaggctgacagaggcggcctcaggacggaccttctggctactgaccg

SEQ ID NO: 281775 - DNA, 82 bp, Homo sapiens
ctgtggtcaaacccacccggcccaactcactaatacgccagacaccttttgaaagctaatttttggtgaagaaatggattcg

SEQ ID NO: 281776 - DNA, 97 bp, Homo sapiens
ggtgaccagcattcagctggagttccgggagctctcccgtctcacaggggataagaagtttcagctgtgccgaagcgagtgccacttgtctgcaggg

SEQ ID NO: 281777 - DNA, 83 bp, Homo sapiens
ggactttgttctgaattactccaaagcacatcaccctacagtggcttattcaacactcgaagtcacggagaagctgagactcc

SEQ ID NO: 281778 - DNA, 83 bp, Homo sapiens
agaaggggaagaaaaaggaccccaatgctcctaaaaggccaccgacatggcggactcccgccgcatcaatgccaacatccggg

SEQ ID NO: 281779 - DNA, 99 bp, Homo sapiens
ggatcatcaactcgcgggtcctcgtggatcagactacaggttatgatgtgattgctcaagcccaatctgggactgggaaaacggccacatttgccatat

SEQ ID NO: 281780 - DNA, 75 bp, Homo sapiens
ctcttcaacttgtacatgagcaagctggagaagatgcagggtgatggtaatgcccgaaggagcagacacggtgtc

SEQ ID NO: 281781 - DNA, 83 bp, Homo sapiens
tgtctctgatccgcaagcatgctcagaccttcattgctctgtgtgccaccggagcatcagatccatgctgctgctgactcgga

SEQ ID NO: 281782 - DNA, 100 bp, Homo sapiens
agacggccgacggctggaagcgcttcctggatgagaagagcggcagtttcgtgagcgacctcagcagctctcgtggcattatccttcagtggggctattg

SEQ ID NO: 281783 - DNA, 103 bp, Homo sapiens
gaacccctctgggatccccgccgctctgtctacaacccgaggtattgttgcagcatctggcagtgagactgaggatgaggacagcatggacattcccttggac

SEQ ID NO: 281784 - DNA, 75 bp, Homo sapiens
tggagatcgacccgtacttgaagccctacgccgtggacttccagcgcaggagcaatttctacgggagaaggttaa

SEQ ID NO: 281785 - DNA, 82 bp, Homo sapiens
gccagggaaccctggtcaccgtctcctcaggtggagccttttgccagcttgaccgaggccgtgcggagctcagttccccgac

SEQ ID NO: 281786 - DNA, 76 bp, Homo sapiens
ccagaagtccagagctgaggactgcctgtttgcagggacagcaaggaaggggggaagctggtgtcctactccacag

SEQ ID NO: 281787 - DNA, 100 bp, Homo sapiens
tctccctgcgctctccgcaccgcggcttaaatgatgtattttgtgatcgcagcgatgaaagtgttctcaggcgctgtggtctcaccttccactggggcaa

SEQ ID NO: 281788 - DNA, 83 bp, Homo sapiens
agggaatggtgcaggcaggcgctgagaaggacgcgcagtccatctctctcaggtggggaacgccaagcacaacgtgcatgtca

SEQ ID NO: 281789 - DNA, 50 bp, Homo sapiens
gcgaggcctggcggctagtggagagcgatcgtcttctgatcaaaggaggt

SEQ ID NO: 281790 - DNA, 75 bp, Homo sapiens
ccagcctgatgctaccaaaggtggaaagtcctgaagaaatccagtgggattatcattggcaatggcgttcattcc

SEQ ID NO: 281791 - DNA, 100 bp, Homo sapiens
gaagtgcttggggatggagtgcctccaaaggttgctgagagaatccaaggatggagagccaagcccacgatcagctgcccacaccatgcccaggaggaag

SEQ ID NO: 281792 - DNA, 100 bp, Homo sapiens
aagtatttgatgtcttagagaaacttggagaagggtcggattgtttgtgctgaacgaactgtcctcttgcttcagaagccccttttgagtgtggtctctg

SEQ ID NO: 281793 - DNA, 75 bp, Homo sapiens
aaacgggtcgccatcgacaacacaaacccagacgccgcgagccgcgccagggccacaactgggtgatcgcgtaca

SEQ ID NO: 281794 - DNA, 100 bp, Homo sapiens
aggcaggacgacagcagcagcagcgcatctccttcagcatccctggctctgccgtctgcgccttctacctggatgagattgagcgtgggtttgagggcaa

SEQ ID NO: 281795 - DNA, 74 bp, Homo sapiens
ccggttccccggcccacagtgggggtgtgcaaacccgagagaactgggcaccaccaggaccagctgatcattcc

SEQ ID NO: 281796 - DNA, 82 bp, Homo sapiens
ctgtcttcagatcttcacagcacagttcctgggaaggtggagccaccagcctctccctggagctctttgttcaatgcctagc

SEQ ID NO: 281797 - DNA, 50 bp, Homo sapiens
ccgtgttgtttgtctacctgggactagtggagtaactaatacggcacaat

SEQ ID NO: 281798 - DNA, 75 bp, Homo sapiens
caggccacacagatgctaaaactgcagaatctggacacaacatttgcctgcaacaaggacagcggccagtggcac

SEQ ID NO: 281799 - DNA, 82 bp, Homo sapiens
cccaaactgtcacagaaagagctgttaacacttcctagataacgggaggatttgatgaagatgttaaagcgaaagtggagaa

SEQ ID NO: 281800 - DNA, 75 bp, Homo sapiens
ctcaatgaaaatcccttgaggcaggaaaaccgaaagcgccatggctctagtcgaagtgtagtagatatggattta

SEQ ID NO: 281801 - DNA, 95 bp, Homo sapiens
acttttctggataatcttcgtgcggctgggctgtgtgtagaccagctagtgtcagcagtgggatacctgcgcttgaaggacatcatccaccgtga

SEQ ID NO: 281802 - DNA, 99 bp, Homo sapiens
ctctcttagctccagatttgatggccttcacaatccaagttccacaatatattgactactgccacaattccgggcaggagcgatttggcaacatgaccc

SEQ ID NO: 281803 - DNA, 83 bp, Homo sapiens
aaaggcctcagcaatgagccagggcaaaacagctgcttcctcaacagtgccctgcaggcctccggtgtggctgtctctgatgg

SEQ ID NO: 281804 - DNA, 149 bp, Homo sapiens
tcagtgcccctggacgaccaggagaagctgcccttcaccgttgtgcatgaaagagagattcctctgaaatctgcttgcggcggagtgatccgcaatgccaccaccggccgcatcgtctctccaggcttcccgggcaactacagcaacaa

SEQ ID NO: 281805 - DNA, 99 bp, Homo sapiens
gctcaagcaatcctaccatgtcagccttcccagtagctggaactacagttcctaatgtggatctaccacccctgtgttcatcgagattccggtctggac

SEQ ID NO: 281806 - DNA, 100 bp, Homo sapiens
cagtgggggttgctgacccagaggagagttctccaaacatgatcgtttactgcaaagttgctgcttttgctcagaggacatccatgaccctaatggtctt

SEQ ID NO: 281807 - DNA, 100 bp, Homo sapiens
gacaaggaggttcagtggacccttggagccatcctctacaggacccgctttctaccattaagattgctgaacaacttttgtacgaacactggaaaaagaa

SEQ ID NO: 281808 - DNA, 75 bp, Homo sapiens
gaaacattggaaaagaaatcctgataagaactgcttttatggaccaatatttacagtctttgctatgggaaaccg

SEQ ID NO: 281809 - DNA, 98 bp, Homo sapiens
cccaggccccggcagcgcctgggacaagagacggtaaagaacaggtccaagaaaagctcaaagaaagcaaataccagcagcagcagtagcaacagcag

SEQ ID NO: 281810 - DNA, 49 bp, Homo sapiens
cgcaaagcttgcgaggtggcgttaggagaccaagacacattccacccca

SEQ ID NO: 281811 - DNA, 75 bp, Homo sapiens
ttctgcttttggtaacatcctttcatgtaaggcaggaagttatgttcgtgatgatgcagtccccaatttaatcca

SEQ ID NO: 281812 - DNA, 101 bp, Homo sapiens
acccagccgtctcctgtgaaggccatatttgataaacaggaacttgaggaatttgctgattcccttggaattccgtttttggaaaccagtgctaagaatgc

SEQ ID NO: 281813 - DNA, 100 bp, Homo sapiens
cgcagacatggacaccaaacatttcctgccgctcggttcaatgatgaggtgaagcacatcaaggtggtggagaaggacaactggatccacatcacagagg

SEQ ID NO: 281814 - DNA, 83 bp, Homo sapiens
gaggcgagcaggagcagggaacagatagcctgggctggaagctcttctacgtcacaggctgcctgtttgtggctgtgcagaac

SEQ ID NO: 281815 - DNA, 75 bp, Homo sapiens
ttctgtgcctgaactcaaagatgcccttaaaagtgctttgccaaagatcattaaggctgggtttgcagcactcca

SEQ ID NO: 281816 - DNA, 101 bp, Homo sapiens
tttgcgaacagagggtctttaggacacagattcttaaaagtgcagagttactggaggtgaactgtttgaagacatagtggcaagagaatactacagtgaag

SEQ ID NO: 281817 - DNA, 100 bp, Homo sapiens
gacctgcaggctctgtcccgggtggagcgagctggcgcctgtaacacggcccacccacccccatcagatccgtcctggccccacagccttctaccagcaa

SEQ ID NO: 281818 - DNA, 100 bp, Homo sapiens
caggagtttggaagcccttttcctccaaatcctgggaaagtttcagatacaccacctccaccgccacctgtggaagaaccagtctttgatgagtctcccc

SEQ ID NO: 281819 - DNA, 83 bp, Homo sapiens
ccgatggagaggctgagctgctccaggacttggggtcccccatcagcagcctccccgcactcttcgaccagacagcctctgca

SEQ ID NO: 281820 - DNA, 51 bp, Homo sapiens
cacgagcttttcctccaggcctttgagagtcttgctatcacagatgaaatt

SEQ ID NO: 281821 - DNA, 90 bp, Homo sapiens
ccgggacacagcggagcccaagtgggatgaggagcactacggcgggactgccaccttctacctctctcaagcagccgatggagccaaggt

SEQ ID NO: 281822 - DNA, 85 bp, Homo sapiens
tcggctggtgcttggcggcagggacgataagatggctgtgccacccacgtatgccgatcttggcaaatctgccagggatgtcttc

SEQ ID NO: 281823 - DNA, 82 bp, Homo sapiens
ccggaatcgtgtgctgggctggtcccccttgataagatgctcccaagtcccttgcagctctcttcagaagaaaaatcactag

SEQ ID NO: 281824 - DNA, 75 bp, Homo sapiens
aagccatcaaatgtggaacctatggaaaagctgcaagctttcttcctggtggcagatgacatcatggattcatcc

SEQ ID NO: 281825 - DNA, 82 bp, Homo sapiens
gcgcagcgcaccgagtggacattttggtctttgtccgcgggcttctcagaactttgcttctccagcagaataatcctgcgga

SEQ ID NO: 281826 - DNA, 51 bp, Homo sapiens
cttgcctgcgtccccagactcagagttttcggctttgtgagaaaccttacc

SEQ ID NO: 281827 - DNA, 50 bp, Homo sapiens
catcaatgttactcaggtagaggtgccttagctggaccaattattgtgga

SEQ ID NO: 281828 - DNA, 100 bp, Homo sapiens
agtcacaaaacagcagatttcccaagagcagcggaaaatgatccagtcacaggtgctgaggagaaaatacttggagaatttagagatacttacaatccag

SEQ ID NO: 281829 - DNA, 82 bp, Homo sapiens
gacagtttgaggatgcagatgttgatcactgaaaatgatttatgcaagtttaaggttccagcagcactgatgtgaaggaaaa

SEQ ID NO: 281830 - DNA, 100 bp, Homo sapiens
agcttttccagttttggtctggaggatctgggcccccctggaatgttccagaaattaaggtgaaaagcactgaagttgagatcctagagaagtctcaaat

SEQ ID NO: 281831 - DNA, 75 bp, Homo sapiens
aaggctggagccgcagcgggagcccccgtgtgctggagaagagaaacgagttggcacacgcacagtgtttgttgg

SEQ ID NO: 281832 - DNA, 100 bp, Homo sapiens
ctgccgtcttcctatccttacccgacctcagatgctcccttctgctcctgggacaagctgtggggggtctgtgtctccatcctggctctcttgcctcgag

SEQ ID NO: 281833 - DNA, 98 bp, Homo sapiens
aggcgcactgggcgccggtgctgttgccttcaggtgaccacggattcgccatcgtgagttccagaggaggaagatgactatctctttgatgatcctct

SEQ ID NO: 281834 - DNA, 90 bp, Homo sapiens
gctgtgatcaaccgcattccgtggaccctagttggatgacacttctgtggtgtgtagtgagtctctacttttatggaatcctgcaaagtg

SEQ ID NO: 281835 - DNA, 74 bp, Homo sapiens
gaatgaatgctgttctgaatttgatatcttaccatggatgaaacacgcaaattgttacttttgttggaatctga

SEQ ID NO: 281836 - DNA, 98 bp, Homo sapiens
tggactcctgcccggcgaagtgcctcacttccttctcccggatcccatgacagattctgttgtcacgtctccttacagagtttgagcggtgctgaact

SEQ ID NO: 281837 - DNA, 97 bp, Homo sapiens
caggcaagggccatggtggacatagtgaagaggtacaactggacctatgtatcagccgtgcacacagaagattcctcctgcatggaaaaactacttt

SEQ ID NO: 281838 - DNA, 82 bp, Homo sapiens
ctacttggagctggtgctttgcgtgctggtcagcatccggaacaacagctattcaggattatgaaactgctcaggaacacaa

SEQ ID NO: 281839 - DNA, 105 bp, Homo sapiens
ctgctccaagattcagggctggcagtattccttctgttctggtggctcgatcttcattgctttcctctggacttctatcattgttaattatgcaagtaaaatgtt

SEQ ID NO: 281840 - DNA, 100 bp, Homo sapiens
cgaatggagccgaggactcgcgcggaggcgagatgctaccagccggcgagatcggcgcctctcctgcagccccggagctgcatgctgtttcccttgaaca

SEQ ID NO: 281841 - DNA, 75 bp, Homo sapiens
cggggatggcccctcacagcatggctgtcgtgtctacggcaactccacagagtagttcctcgatgtcctaggtgc

SEQ ID NO: 281842 - DNA, 85 bp, Homo sapiens
ccggcgagtcgggctctggaggaaaagaaagctaaagtctccagtgaatattgaattgctgaggattttgggaaaagacaaatca

SEQ ID NO: 281843 - DNA, 75 bp, Homo sapiens
gaagctgatggtcatcttttccaagtgagaagccctaccactgcaactgggacggctgcggctggaagtttgcgc

SEQ ID NO: 281844 - DNA, 74 bp, Homo sapiens
gtgaccgagagcgtgaccgagagcgcgaatatcgtcatcgttagaaggatgagccccaagagcctcaagaaccc

SEQ ID NO: 281845 - DNA, 50 bp, Homo sapiens
ccgcccagaagacaacatcaggctgttttgtgcaccgagggcggcctgag

SEQ ID NO: 281846 - DNA, 98 bp, Homo sapiens
ccgccaagcggctacgttcttctcggcccgccgagatggcgctcgaccccgcaggctaagaaatggcatttcaaaaggcagtgaaagggacgattctt

SEQ ID NO: 281847 - DNA, 50 bp, Homo sapiens
gatacaatgatggggcagcaagtggccaaattcaattagcagagcctcac

SEQ ID NO: 281848 - DNA, 88 bp, Homo sapiens
aattaatgacaataatggatagtatgaatgatcaaggttattaacacggggatcaaagtctggtgtagaaataacagcggtgaagagt

SEQ ID NO: 281849 - DNA, 75 bp, Homo sapiens
ggcccgtctgggccagccacctggtgtccgtcaccgagacttggagccagaatctgagcctcagctggagtcaga

SEQ ID NO: 281850 - DNA, 101 bp, Homo sapiens
gcttccaaagagatacagggcagaggaaaatgcaagaagactgatggagcaggcttgcaatattaaagaacttaaaaggagtctagaaaatccagcagaaa

SEQ ID NO: 281851 - DNA, 102 bp, Homo sapiens
ttcttggcccttgttcccccaaatgtctgactctgactctcggactgagaaacgcaagccttatgccagcctggaccatcttggaggcagtgtaggatcatg

SEQ ID NO: 281852 - DNA, 88 bp, Homo sapiens
agaagtttgagaaagaactttccaaagcccggctggacattttgaagattcattctcggaagatgaacctgacccgggggatcaacct

SEQ ID NO: 281853 - DNA, 83 bp, Homo sapiens
agcactgagcctactcagtctaacctaaggagtctatggtgatgtacatcgagtgaagattatgtttaataagaaagaaaatg

SEQ ID NO: 281854 - DNA, 96 bp, Homo sapiens
gtccaccatcggtgacctcaccgcctcggttcgccctcagccgccccgaacgacaccgtaactatccgcactagaaagttcatgaccaaccgacta

SEQ ID NO: 281855 - DNA, 75 bp, Homo sapiens
acagcggcaaggtctccaagtcccagctcaagggagctgctgttgacggaggcaagttggatgtcgggaatgctg

SEQ ID NO: 281856 - DNA, 46 bp, Homo sapiens
ccaagcccgctgagcaggatgaggtcactcttgcaggactgatcct

SEQ ID NO: 281857 - DNA, 75 bp, Homo sapiens
cacacagaggatgatgctgactttgatgaaggtcacctcatcatctcaaggaggagcattcccctgggctaaggc

SEQ ID NO: 281858 - DNA, 75 bp, Homo sapiens
agagcctggtgagacggagctatcggcgccgcggcaagagccagatggtcatcatgggccagtgctactacaacg

SEQ ID NO: 281859 - DNA, 98 bp, Homo sapiens
atctggaaacaacaggcgagacctggagatggacctgtgatctgggatgtacagttacccagcacgtgtacctcctcctcctcctattgctcgggctg

SEQ ID NO: 281860 - DNA, 100 bp, Homo sapiens
aggagaagcaggctctgatggagcagcagagacggctggagtgcagtggcgagatctcgactcactgcaggctccgactccccagttcaagcgattctcc

SEQ ID NO: 281861 - DNA, 82 bp, Homo sapiens
ggaccggctgctgcaggccatcgacccccagagcaacgcgttggagaccagggccagccctggccacaccccaggctgtgtc

SEQ ID NO: 281862 - DNA, 100 bp, Homo sapiens
ccatcgtcaccgtgtgggagcgggagctgcggaaaggatgtacagttacccagcacgtgtacctcctcctcctcctattgctcgggctgtagtgccctcg

SEQ ID NO: 281863 - DNA, 98 bp, Homo sapiens
cagatgaagaacatgacctcaaggagcttcctgtcaatgagaagaccaagctgacgcctggcaaagggatcagtgtccttcagtgatgtggctgtggg

SEQ ID NO: 281864 - DNA, 82 bp, Homo sapiens
gagattcagccagcacactcctcgcgagcaagaaagaagcttccggttctgaggtcctggaggtgccatttccctctctgtt

SEQ ID NO: 281865 - DNA, 82 bp, Homo sapiens
cttcgttgccctctgtgccacagcaaattgtggctactaatttgccccctgaagatcaagatggctctggggatgactctga

SEQ ID NO: 281866 - DNA, 96 bp, Homo sapiens
cccacatcctcccctgagtccggagctaccaaaaccatcctcctggtaaaataccatgaagattttgaaaaaacaaaggggagaggctttactccc

SEQ ID NO: 281867 - DNA, 82 bp, Homo sapiens
cccgagactacggtgtgctgttagaaggttctggtcttgcactaaggtgttggagcgggccggagagaagtagagtgggctg

SEQ ID NO: 281868 - DNA, 100 bp, Homo sapiens
gtaatcgcctgctttgattcattgaaagtcttcaaagcttcacctttctccaaaggcagatgtgaagaacttgatgtcttatgtggtaaccaagacaaaa

SEQ ID NO: 281869 - DNA, 76 bp, Homo sapiens
agaaagctgcgttaatgtttgcaaatgcagaggaagaatttttctatgagaaaccacaacaaaggtgcttgcccat

SEQ ID NO: 281870 - DNA, 83 bp, Homo sapiens
cggcgagacgcgcgtgtgtgagcgcgccggaccaagcgggcccagaagcgggtgcgcgcggagccatggttatcatgtcggag

SEQ ID NO: 281871 - DNA, 96 bp, Homo sapiens
agaaactgttgaattagacccgtttcctatagatgagaaaccatacaagctgtggtataatacttctccacgtctgcttcaggaagaaagtgcctg

SEQ ID NO: 281872 - DNA, 117 bp, Homo sapiens
aagaagttaaaccttcacctttaaatggatgaccatgtcacaatcaggaagaaacatctccaaagacccatctttaggcatgtggagaccccaaggcaaaaccatcctatcttatcg

SEQ ID NO: 281873 - DNA, 76 bp, Homo sapiens
gccccgggaggggaagctcatctctgacatcaacaaggccacactggtgtgtctcataagtgacttctacccggga

SEQ ID NO: 281874 - DNA, 124 bp, Homo sapiens
gcttgaggccgagggcgaggccatggaagatgcagccgcgccaggggacgaccgaggcggcacacaggacaccattcgcttttcacccaagatgatttgatgtcttataaaactctgatgaacc

SEQ ID NO: 281875 - DNA, 100 bp, Homo sapiens
atttcctctacaacgtgctggagcggccgcgcggctgggcgttcatctaccacgcctacgtgtgagcacctgcggatctgtccccagggctacacctgct

SEQ ID NO: 281876 - DNA, 73 bp, Homo sapiens
acagaggggaacagatttcagtgtcctccttagctctgcagactgggctggcttagatgaagatgaagatgca

SEQ ID NO: 281877 - DNA, 75 bp, Homo sapiens
tggacaccctcctggactcgctgtggaatgcagtagccctctgggcctgggatattgtggttgataactgtgcca

SEQ ID NO: 281878 - DNA, 98 bp, Homo sapiens
cggcaacctctacaaggccaagttcatctcctccgtcaccagccacatctaccaggaacaggagtacagctgtgtagtaaagatgccttctggtgaat

SEQ ID NO: 281879 - DNA, 100 bp, Homo sapiens
ggcgttgctgcgctccgtggccggggagcaagcgccaggaatggtcctcgtccgaagtgagaatgggcagttgttaatgattcctcagcaggccttggcc

SEQ ID NO: 281880 - DNA, 100 bp, Homo sapiens
gtccgcaaggccggagaaggccgccgggcccgggcatggtggtctggggcaacgcggaagagtgcttgtgatttcacgtatttttgctgaactcgtaaaa

SEQ ID NO: 281881 - DNA, 51 bp, Homo sapiens
aagaagggccttactccttcacagatcgatctgtctcgagagaaccaccga

SEQ ID NO: 281882 - DNA, 100 bp, Homo sapiens
tcacgaggccacccagtcccacttcaaacattcgtctcggaaaccccgcctcttacagtcacgaggttacttcttgctgcagattctgcgcaggatcgga

SEQ ID NO: 281883 - DNA, 51 bp, Homo sapiens
ggaaggcgccgtggccctccccggaatgtatcagtctccctgaaggtgtgg

SEQ ID NO: 281884 - DNA, 80 bp, Homo sapiens
gcttgccggccccaacacggaccttgctcaagactgcagtgcagatgacgacaacttccttgtgcccatagcggtgggag

SEQ ID NO: 281885 - DNA, 89 bp, Homo sapiens
cacagccatggtgtcctggggaggcgtcagcatccccaacagccccttcaggcgtcgtatgtctcgtggggtgaatccctccttggtga

SEQ ID NO: 281886 - DNA, 88 bp, Homo sapiens
aagatcaccgtgacatccgaggtgcctttctccaaaaggttcgtttaccaagcaaaagttgggggtcgctggttcccagccgtctgcg

SEQ ID NO: 281887 - DNA, 50 bp, Homo sapiens
atagtttttccgtgacaaatgcttatacagaagtttacggtgagttttat

SEQ ID NO: 281888 - DNA, 50 bp, Homo sapiens
caccaagcagatgctgcctgcagagaaacgtatgtcaaacgaggatacag

SEQ ID NO: 281889 - DNA, 96 bp, Homo sapiens
aggaagagcgagccagcgcccggagcaagcggagctcccccaagagccggaaagaattcctagaggacctgtgcaacaacctcttgaggatcgaat

SEQ ID NO: 281890 - DNA, 100 bp, Homo sapiens
tcggcgccgccaaacagcccagctcgcgcttcagcgtcccggcgccgtcgcgccactcctccgactgggaatggtgaggaagaaattctgccccactgta

SEQ ID NO: 281891 - DNA, 51 bp, Homo sapiens
cttgggaacgaggggtgaagcggcccagattgaggcctagagagaggcagg

SEQ ID NO: 281892 - DNA, 120 bp, Homo sapiens
aagatccctgtcattgaaaatccccagtactttggcatcaccaacagtcagctcaagccagacacatacgttggaacttgccaggaatccagcaatgatgcaggagatgatgaggaacca

SEQ ID NO: 281893 - DNA, 83 bp, Homo sapiens
tctcaaacagacagaggagccagtgcgggaaagaggagatgcttctggacttgcaattgtgaccaaatatattacaaagggct

SEQ ID NO: 281894 - DNA, 101 bp, Homo sapiens
gaggactttcttccagcttctgctgtccttctttgtggagagcaagaaattcattgagtttgaagatgctctggaacaagagaagaaagagctgcaaatcc

SEQ ID NO: 281895 - DNA, 50 bp, Homo sapiens
aagtcgacaggggatgggaccctaggaatccagacgctctgcagtgtccc

SEQ ID NO: 281896 - DNA, 74 bp, Homo sapiens
gctcggccccaggagccaataacctgcaggtttatgatttgctgtgaccgctgtgaagaatggtttcatggcga

SEQ ID NO: 281897 - DNA, 51 bp, Homo sapiens
ggcctcggagcgcccggagccggagaaagcataacccctactgtagaacta

SEQ ID NO: 281898 - DNA, 110 bp, Homo sapiens
caggggacgaggacgaggagtcggaggagccgcgggcggcgcggcccagctcgttccaggagcttactccacgggaacagcctctagataatctgagttgttgaaaatac

SEQ ID NO: 281899 - DNA, 75 bp, Homo sapiens
cagaaacaaaatgtcaacaaattgatgggatatgggccctcacattttccaaacctgtccatctgctaactattt

SEQ ID NO: 281900 - DNA, 100 bp, Homo sapiens
cgcgtgtggaggaggctgaagtctcacatcagaggtgtcaaggtgaccaagaatatggcccaggtgaccaaagccctggacaaggccctgagcaccatgg

SEQ ID NO: 281901 - DNA, 83 bp, Homo sapiens
atttcctgcaaggactccaaagtggtgaggatttttagactctgaggagcagttggagctaatccacattatggaaatggaaa

SEQ ID NO: 281902 - DNA, 100 bp, Homo sapiens
acggagtcggaaaggattttttgctcagttctttattggtgaaaacatgaatccagatggcatggttgctctattggactaccgtgaggatggtgtgacc

SEQ ID NO: 281903 - DNA, 96 bp, Homo sapiens
gtgaagctgaacctgagagatatagtccgagttgtctctgcaggacctggctggaaatgagtacgacctgactggcctaagcacagtcaggaaacc

SEQ ID NO: 281904 - DNA, 75 bp, Homo sapiens
cggggtataggaagagaggtccgaaacccaagcggcttctgctgcaggtgcatggcggcctgctgcagatcttcc

SEQ ID NO: 281905 - DNA, 83 bp, Homo sapiens
tgtaaatcaggaccccaacaataacttacagaccttcggcatggctgaggagtaccatcgggagtcaatgttggttgagtggg

SEQ ID NO: 281906 - DNA, 75 bp, Homo sapiens
ctgccacctgcctttgacctttttgaagcctttgcaaaagttattgacccagtggctccacgatatgttgcatta

SEQ ID NO: 281907 - DNA, 100 bp, Homo sapiens
atgtagaatgcctgccttttgaagaccacttttaaggtgtctagtaagacagcagatcataatatcaatctagtgtcaatggaagtaacagtaaatgctg

SEQ ID NO: 281908 - DNA, 82 bp, Homo sapiens
cagcatctgcgatgtgaggaaaggcacctccaccaggtttaagaattgtttaagctgcatcaatggagcacatacagggagc

SEQ ID NO: 281909 - DNA, 85 bp, Homo sapiens
ggtgctggcatccgaacaccgggtggctggtgcagccgaggtcttcgggaattccagcgagggggctgattcaggagatcaatga

SEQ ID NO: 281910 - DNA, 100 bp, Homo sapiens
ctgctggtgggactcaatgttctcgatgccaatctctgcttgaaaggagaagacttggattctcaggtataagaaaagcactacctccagcaccagaaac

SEQ ID NO: 281911 - DNA, 82 bp, Homo sapiens
tcctcaacgacgcggacatggtcatgagctttgtgaacctggagctcccagctcctccagcagccgacaggaggcccgtcaa

SEQ ID NO: 281912 - DNA, 50 bp, Homo sapiens
tcagaaccctccgcagagtaaagttcacccatctcaggagcctggctggt

SEQ ID NO: 281913 - DNA, 90 bp, Homo sapiens
aaagtgggaaacattgaaatcaaggtgagaattatgaagatgatgacctagtaaattctgatgaggttatgaagaaaccatgtccagtac

SEQ ID NO: 281914 - DNA, 92 bp, Homo sapiens
gtcctaccccagcaacgtgtttgacgggctcctcaccgttgtcctgctgaattcagaaggagctggcggacatcactttagaccctccacct

SEQ ID NO: 281915 - DNA, 75 bp, Homo sapiens
cagcacttggtctctaccagtgggactttgccagttatgatattctcaggataaaattgtccatggaccacgtgt

SEQ ID NO: 281916 - DNA, 95 bp, Homo sapiens
cctcaggccagtcgcctccaggccaagagggatccttcacccgtgtctggctgaaggtgatgtggccgccctcaaccgacgcatccagctcgttg

SEQ ID NO: 281917 - DNA, 75 bp, Homo sapiens
ctggggtagcggcggcgggagtcctggcgctctgcaggtgtccctggccagtgtccttccacctgtccacaagca

SEQ ID NO: 281918 - DNA, 75 bp, Homo sapiens
cttggtaatggcgacgggtttgttactccacaggatccgctgaacataggatgttgccacaaaatctacctcgtg

SEQ ID NO: 281919 - DNA, 100 bp, Homo sapiens
atgtgaggacgtgcttcctgcttcatagataagaggtgacttaagagattaaaattaatttggttgctgttggttctgaacaaataatgagttcttttat

SEQ ID NO: 281920 - DNA, 100 bp, Homo sapiens
tggcaccttgtttggggaaggattccgtgcctttgtgacagaccgggacaaagtgacagccacgcgaggagagctacatggtccaggactacgcccagat

SEQ ID NO: 281921 - DNA, 103 bp, Homo sapiens
accaaataatagctgtttgtattttggctgctgcaggagccattttaggttgaattgctgcaggatatcatgaactacattgtacccattcttgtgctgccca

SEQ ID NO: 281922 - DNA, 90 bp, Homo sapiens
agctttctggacttccagctgggcctgacagagaaggctcactcaaggatcagttggctttagcaattgtttgttgcatattctaaggac

SEQ ID NO: 281923 - DNA, 98 bp, Homo sapiens
gggagccaacatacaatgtggctgtcggcagagctggtagagccgtgctatcaagactaatcaggaccttctcccagaaactccatggacgcacattt

SEQ ID NO: 281924 - DNA, 83 bp, Homo sapiens
ggccgaaaggcccggaagcagaagggtgccgagacagaactcgtcagattcttgcctgcagagcaatggtggaacaaagcggc

SEQ ID NO: 281925 - DNA, 75 bp, Homo sapiens
aggcggatctcagaaggccagttcaaaggtcaaaatgcagatcttcgtgaaaacccttaccggcaagaccatcac

SEQ ID NO: 281926 - DNA, 75 bp, Homo sapiens
tgattcctttcgtaaccgcaccacacccgagtgcctccggagccagcgtggtggccatagacaacaagatcgaac

SEQ ID NO: 281927 - DNA, 94 bp, Homo sapiens
cccagagactgctgagcccgtccgtccgccgccaccacccactccggacacagcaaccatgtccaagggacctgcagttggtattgatcttggc

SEQ ID NO: 281928 - DNA, 102 bp, Homo sapiens
gccgcaaacatgctccgccagatcatcggtcaggccaagaagcatccgagcattctgaagggagtggtaatggaagtgaagatgcttcaaaggacagtggag

SEQ ID NO: 281929 - DNA, 100 bp, Homo sapiens
tccgcgccgggcgtggacggtgtggggcggtcccggccccgcagacaccattcgcttttcacccaagatgatttgatgtcttataaaactctgatgaacc

SEQ ID NO: 281930 - DNA, 51 bp, Homo sapiens
cttccatgagctgaagcagccaagagttcagaaataccatactgtgaatgg

SEQ ID NO: 281931 - DNA, 75 bp, Homo sapiens
gcgggatcccagcctcaggcgtgcgcggacggtgtgcggtgatgaacggcagcagccactcaccaacagccatca

SEQ ID NO: 281932 - DNA, 100 bp, Homo sapiens
accatgtgtctacattttgttgcttagaaaagcctaggcatttctgtaacatttggtattggcatactccacacatctgtaccattcttgagtgatcgct

SEQ ID NO: 281933 - DNA, 143 bp, Homo sapiens
cttgagaacgtgtcggtggcgctcgagttcctggaccgcgagagcatcaaactggtgtccatcgttatctccagaagaagaagagaaaaggagaatccgaagggaaaggaataagatggctgcagccaaatgccgcaaccgga

SEQ ID NO: 281934 - DNA, 83 bp, Homo sapiens
ttcgactctcaaagcaataccaggatagctgttgtttcagagaaaggacttggaaaacagtgtgggtgaacttagtgaaggac

SEQ ID NO: 281935 - DNA, 50 bp, Homo sapiens
ctgtcgtctctgggactgtgaaacagatcaataagatggagtggtggagc

SEQ ID NO: 281936 - DNA, 100 bp, Homo sapiens
ttctctcaccgttcccctgcttggagccatgatgctgctggaatctcctatagatccacagcctctcaggtaccttgtggtctataatcctttagaacaa

SEQ ID NO: 281937 - DNA, 100 bp, Homo sapiens
ctggactcaagcaattctcccacctcagcctgtaaagtactggaattataggcatgagccactctgcctggccaataaagacgggtttcaccatgttggc

SEQ ID NO: 281938 - DNA, 111 bp, Homo sapiens
gccgtccttctccactttcgccagcccgtgccgcgagcgcggcctgcaggaggtgaaagaaaatggcccgaaccaagcagactgctcgtaagtccaccggtgggaaagccc

SEQ ID NO: 281939 - DNA, 96 bp, Homo sapiens
cagagaaacacggaaactaggaagaggaaattaactatctgtacttataaggagttgggatacagctacgtggaactgaatgcaagtgacacccgg

SEQ ID NO: 281940 - DNA, 102 bp, Homo sapiens
tttcattggcaagccacaattatgggacctgagcaatgttcctttagttgggactgggggccttcctttcctacccagggaatctggaaagatgttagaatt

SEQ ID NO: 281941 - DNA, 100 bp, Homo sapiens
gtcgccgccactgccgcaggaggcgtgaggtgttcaggcgcttcgtggaggttggccgggtggcctatgtctcctttggacctcatgccggaaaattggt

SEQ ID NO: 281942 - DNA, 82 bp, Homo sapiens
cgcggactacttcgtgctggtggcgttcgggccgcacccgcgcggtgctggagaatctggtaaaagcaccattgtgaagcag

SEQ ID NO: 281943 - DNA, 75 bp, Homo sapiens
cgggatggctaccacggccgagctcttcgagtttgcctgagaatacagatcaacccacagaacaaagcggatttc

SEQ ID NO: 281944 - DNA, 75 bp, Homo sapiens
atactacactgaatttcctacagttcttgatattacaggtgatgatgaacagtctacacagatggctgcaagttg

SEQ ID NO: 281945 - DNA, 100 bp, Homo sapiens
cccagatctacctgacgggcctgcgagggttgaagattgtgaagcaatagcctaagaatcaaccttgtcctatgttaggcagctggaggcaagagtaaga

SEQ ID NO: 281946 - DNA, 95 bp, Homo sapiens
cccggaggcgacatggggcacccggtgtaccgcggcgagaagccccagctgcactacgcgtcacatgacacaggcaatcccttttgacgaccctc

SEQ ID NO: 281947 - DNA, 75 bp, Homo sapiens
gcattcaaggttatgaatgaactgcggaggctacaaactctggcacctgcaaaaaacaaggaaagtaaatgattg

SEQ ID NO: 281948 - DNA, 95 bp, Homo sapiens
aaaactgaccccggtactgtcttcgtgatgaataaaaacatttcaactccctacagttgtgccatgcaatcagcatgattcttcagaggctcttc

SEQ ID NO: 281949 - DNA, 100 bp, Homo sapiens
gatggcgccgttacaagtaccgcttcgttccctggatcgcactgaacctaagccacaacccgagtctgcgctcctcagaccaccggcaggtgaacagcct

SEQ ID NO: 281950 - DNA, 100 bp, Homo sapiens
acagctgttactgatggtggctcgcaggacccagtcggaaaccccacggtacatgacttcaggctcctatgtgcagaagtcctcaacccccaggctgcag

SEQ ID NO: 281951 - DNA, 73 bp, Homo sapiens
taagagttttcccagaaaagggctattcatttgtcagaaatctgtcctttgactcagaagaagaagaacttgg

SEQ ID NO: 281952 - DNA, 82 bp, Homo sapiens
cccagatatagccgttggtacaaaggggaacgcccttttgcttgtgactggcagggctgcgacaagaagttcgcccgctccg

SEQ ID NO: 281953 - DNA, 97 bp, Homo sapiens
tgttttaaaaaaactagaaatgtgttcagaaattaaaggtccacagaaggaggcccctagcagtcttcttgatgctttggaacaacatttagcttcc

SEQ ID NO: 281954 - DNA, 111 bp, Homo sapiens
ctctgacaaaattctggggacgctgggaacactgaatcaacatgggcaatgagaacagcacctcggacaaccaggcatgtgggcacattccatgacagtacaggattatca

SEQ ID NO: 281955 - DNA, 82 bp, Homo sapiens
gtgtagagactcggaggccgaggtgagaagccctaccactgcaactgggacggctgcggctggaagtttgcgcgctcagacg

SEQ ID NO: 281956 - DNA, 83 bp, Homo sapiens
tcgaggccctgcggagctgcttcgccgctgcgctgtggaggaagatgcagagtcagaagatgaagaggaggaggatgtgaaac

SEQ ID NO: 281957 - DNA, 82 bp, Homo sapiens
gccgagtcgcgcggaggcggaggcttgggcggagctggagtttgttcagatcatcatcatcgtggtggtgatgatggtgatg

SEQ ID NO: 281958 - DNA, 101 bp, Homo sapiens
atcgagctgtccgacaaccctggcgtccatgagcctgctgtattttggggcgatattgccttagatgatgaagacttaaatatctttcaaatagataggac

SEQ ID NO: 281959 - DNA, 100 bp, Homo sapiens
agagacacagagaaggaagcagagactggagggatgcccacaccaaggacaccaggagcccccaaggagttggaagagattctacttcaaagaaatcctg

SEQ ID NO: 281960 - DNA, 50 bp, Homo sapiens
ccgtggacggaccccgggagcccagacgctgaccccgcactacatctacc

SEQ ID NO: 281961 - DNA, 100 bp, Homo sapiens
gccacttccgcaaacaggtgcagggtcagtatagaccttctgatttgctgtgccctgagacatatgtttgggtacccattgagcaatgcctgccttcact

SEQ ID NO: 281962 - DNA, 100 bp, Homo sapiens
gctcaggcatgtttgctgcagaagagacaggggaggcactgtctgaggagactacagcagcaaccatgtccaagggacctgcagttggtattgatcttgg

SEQ ID NO: 281963 - DNA, 50 bp, Homo sapiens
agtggaggaagcaatacatccagtatgagacaatacaatggtgggtgaag

SEQ ID NO: 281964 - DNA, 108 bp, Homo sapiens
tggaggcggaggtcgataagctggaactgatggtaggcgaaaaccaagagtacatcggcctcgttctcctatattggaagaaaaagacatcccgccccttgaatttcc

SEQ ID NO: 281965 - DNA, 98 bp, Homo sapiens
agattttttattcgttactatgtggatgttccacaggaagaagtgccattcagacctcttcctgtgccaaaactgccacctggggagcaatgtgaggg

SEQ ID NO: 281966 - DNA, 100 bp, Homo sapiens
aagagtgaagtgagcaaatacaacccagcagtaggttattgaagacagcagccccaggtgactgctgaggttggaaagctcttgggtgaagagaaggtgg

SEQ ID NO: 281967 - DNA, 100 bp, Homo sapiens
gcctgttgtaccagctggtttttctgctctccgagtggaaccaagctcacaaatcctcaggaaccaactttcaggggcttccatcaaaaatagatactct

SEQ ID NO: 281968 - DNA, 89 bp, Homo sapiens
agacaatgccggtggaggaatttgtggctggctggatctctgctgggaagcacacagccaactcgcaccacctctctgccttggtcacc

SEQ ID NO: 281969 - DNA, 90 bp, Homo sapiens
aagcgtggggcgcgcgtgcggaggaccaggcgcggcgcggctgcggctgagtttgaagaaaacaggtctgaaacaaggtcttacccccag

SEQ ID NO: 281970 - DNA, 75 bp, Homo sapiens
aagtcttggaacagcgacgacaaggcttggaaacatacttacagtgttttacctcaatcatatatccacacaagt

SEQ ID NO: 281971 - DNA, 75 bp, Homo sapiens
gcctggaggctcgagcggaggagtaaagctgctgctaaagctggatcttctaaataccagtggggcattatgaaa

SEQ ID NO: 281972 - DNA, 112 bp, Homo sapiens
cctccttgaagtatttggctgaggagttttcaatcccagtgaatgaaaactttgccattgatttgatagcagagcagcccgtgagcgaggtggagactcgggtgatagcgtg

SEQ ID NO: 281973 - DNA, 99 bp, Homo sapiens
cagccccccgggaaagagatctaccgcaagagcaacatctccgtgtacgaagttgatggcaaagaccataagcgagtgatagacagccaagcagagaaa

SEQ ID NO: 281974 - DNA, 101 bp, Homo sapiens
tgtgcaatgccccgggctgtggacagcaaagaagtttgtcatcctgatattggtggcaagatcataatgtgtcctcagtgtgataggctttgtccattctg

SEQ ID NO: 281975 - DNA, 82 bp, Homo sapiens
agtggtgtaactgtgcctttttagaatcttctgcaaagtcaaagatcaatgttaatgaggcagaagctcctcctggggtaga

SEQ ID NO: 281976 - DNA, 75 bp, Homo sapiens
agaaggtcgtaaaattttgacaccaataattttcaaggaagaaaatcttaggagacgagttgtactgctgtcaca

SEQ ID NO: 281977 - DNA, 75 bp, Homo sapiens
tgagaacgactgcatctttgacaagtttgagtgttgctggaacggttcggatagtaatctcaggggcgatataat

SEQ ID NO: 281978 - DNA, 50 bp, Homo sapiens
ccgccgcccccaacgtccatgcctgagatagagggaggaatcagcagctt

SEQ ID NO: 281979 - DNA, 97 bp, Homo sapiens
ctggatcccagctttgtggctgccgtcatcaccatcaccttcaatccgctctactggaatgtgcccccaaatacatcaagatgtttgtactggatga

SEQ ID NO: 281980 - DNA, 75 bp, Homo sapiens
tccttgtggtcctgctcgttggaggctgtgcagcagaagagcttgttcatcgagtgaaaagaagagctgacccag

SEQ ID NO: 281981 - DNA, 80 bp, Homo sapiens
agtattttgcttctggaggctctgatgaacaagaatactctgaagatagtaactccgagccaaatgtggatttggaaaat

SEQ ID NO: 281982 - DNA, 50 bp, Homo sapiens
acaaggaggcctgagtagaccgcaggttatcaatactctggctgaccatc

SEQ ID NO: 281983 - DNA, 75 bp, Homo sapiens
ggcgtccatgcccccgacgcccgaggcccaggttttcttccgccatctgtgacagcttcttgatctgtcccaagg

SEQ ID NO: 281984 - DNA, 50 bp, Homo sapiens
ctcaacgagaacaagctatcagattgaaactgcttctgccttggctagag

SEQ ID NO: 281985 - DNA, 100 bp, Homo sapiens
ggcggagctaggagctggcggcgacggccacaggggcggcgacggcgcagtgcgaagcgaaacagggtaaagttctttacaaagttcgctggaaaggcta

SEQ ID NO: 281986 - DNA, 50 bp, Homo sapiens
ttcagccagcacactcctcgcgagcaagtgtcaacagcatctccaccctg

SEQ ID NO: 281987 - DNA, 100 bp, Homo sapiens
tgtgggcgcgcggcacgcagccgggaggccgaggactcggagttcacctgcaggaaaatgtttataggaggccttagctgggacactacaaagaaagatc

SEQ ID NO: 281988 - DNA, 96 bp, Homo sapiens
agacaggaacaagacccggacattccaggccacagtcctgggaagtcagatgggattgaaaggagccctctggcacaaatggaagaagaaagaagg

SEQ ID NO: 281989 - DNA, 83 bp, Homo sapiens
aggcagaaggcctctctcctgatacagcaggcgctcaccatgttccctggagtccagaacacatattacataatggagccggg

SEQ ID NO: 281990 - DNA, 100 bp, Homo sapiens
gaatgatgcccttagcatccgggagagcaccttgggacctgaccatcctgctctgctggagccagttctgcttctcggcaaggagcgatttgctggtgta

SEQ ID NO: 281991 - DNA, 75 bp, Homo sapiens
ccgcgtgggcccgggcgcaggcgagagtccagggacacccccgtttcgaggtgacagagattggcaaagatgtga

SEQ ID NO: 281992 - DNA, 83 bp, Homo sapiens
tgtgcagccgcgaggaggcgcgggaggtgttcgagaacgaccccgagacggaagaggagcaggacttggatggtgagaagggg

SEQ ID NO: 281993 - DNA, 75 bp, Homo sapiens
ggattatccggagccaaggtccgctcggttacagaatgtctgaaggggacagtgtgggagaatccgtccatggga

SEQ ID NO: 281994 - DNA, 101 bp, Homo sapiens
aaattaaggaagatatccttaccgatgaagatgaaaaaacaaaaggactgtgggattccattaaaaggcttttatcttgagaacatggtgtctggagttaa

SEQ ID NO: 281995 - DNA, 75 bp, Homo sapiens
gccgggctgagctgtgctacagccatcgccaaggatgacagagattgtgagccgtgtgtcgaagcgaaagctggg

SEQ ID NO: 281996 - DNA, 50 bp, Homo sapiens
taaaagcattgtttctagaacatgagggaggagagagcgatggctttttt

SEQ ID NO: 281997 - DNA, 75 bp, Homo sapiens
tgatttccactctggaaaacttcaagcatttgaaatggtggagtcaatgaagaaagtagcagggatggatgtgga

SEQ ID NO: 281998 - DNA, 100 bp, Homo sapiens
ctctcataagccaggtcttagaggctcccggagtgtatgtctttggagaacttctggagctggccaacgtgcaggagatgattctttgggattgggactt

SEQ ID NO: 281999 - DNA, 100 bp, Homo sapiens
gcagggggtgctgcaacagggcacggcgtggaggaggaaccagaccgcggccagagcgttcagtgctcatcatcactgtaggggacctttgaaagagctg

SEQ ID NO: 282000 - DNA, 100 bp, Homo sapiens
cggcgacacatagtggctgcaggcttcctgatagtggacatctgtcctgcgatgcggccgctgccaccaccatcctgggaggggaccggcgggagccctg

SEQ ID NO: 282001 - DNA, 100 bp, Homo sapiens
atagcctcagcgtcaacgagttcaaagagctggttacccagcagttgccccatctgctcaaggaaattggccttgcctctctgggtgcacctgatgaata

SEQ ID NO: 282002 - DNA, 82 bp, Homo sapiens
agctgctgtttgcctggagggataaaacagctcgcagggaagatgaaagttacggccgattccacgactcttctttgcggga

SEQ ID NO: 282003 - DNA, 75 bp, Homo sapiens
actatctggatgttggcattgggcaggttgatgacaacaagaaactaggagaatgggtaggcctttgtaaaattg

SEQ ID NO: 282004 - DNA, 90 bp, Homo sapiens
tctttggcaagtggacattttactggctcaattcccactagtggctgacttgtttcatgatgacaaggaccctgttcctgccaccacccc

SEQ ID NO: 282005 - DNA, 100 bp, Homo sapiens
cagtgcatcttttgcacagctaaagctctgggtgtgcggcagtaccatgtggcctcagtcctgtgccaacgggccaaggtggcgatgagccactttgagc

SEQ ID NO: 282006 - DNA, 78 bp, Homo sapiens
acttaccttaacatgttcttgaagtaccatggcgtggattaaaagggtcttactgaagtaacacaaagcttaaaaatg

SEQ ID NO: 282007 - DNA, 75 bp, Homo sapiens
agaacctgaacaagtcccagctgaagctgggcatctggggcggttactgaagctaaaggagatgtttaactccaa

SEQ ID NO: 282008 - DNA, 105 bp, Homo sapiens
ctctgctgccagtcccctgccccgggcaaagcccatctggtccgccgagcaggtactccaaagattcaggtttactcacgtcatccagcagagaatggaaagtca

SEQ ID NO: 282009 - DNA, 83 bp, Homo sapiens
tcctctcacaccccagctgtgcatggtgcaagcaactggtggttggaggcaaagtaaagaagcccggtaaacgtggtcggaag

SEQ ID NO: 282010 - DNA, 98 bp, Homo sapiens
gttgctatccacacccttgccacctggtacaaatcaaacatgaatggagtgagaaaagatgtagtgatgatttatgctaaaggaatttgaagcacgca

SEQ ID NO: 282011 - DNA, 83 bp, Homo sapiens
ctcctccgggggacccgcggtccccaccgtgcagcggggcatcatcaagatggtgtgttgaggctcctggaacacggggagga

SEQ ID NO: 282012 - DNA, 75 bp, Homo sapiens
ctttgccagcctggctgggctcaggagagccctatgagtttgtctctctggaatggctgcaaaagtggttggatg

SEQ ID NO: 282013 - DNA, 100 bp, Homo sapiens
tagagatggaaacctcatagcagctgcctgccagaatggaagcatacagatctgggaccgaaatttgactaaacctctgtagaggagcaggatgcaaccg

SEQ ID NO: 282014 - DNA, 100 bp, Homo sapiens
ctatagtctggtatcaaaagaaggatctagtgaaaagccatttgatgtatgcggtcagagaagaagtggaggtcctcaaagagcaaatcaaagaactaat

SEQ ID NO: 282015 - DNA, 50 bp, Homo sapiens
gcgtccctgggactctgctccgtgaggtactccaggagcagattcgtgcc

SEQ ID NO: 282016 - DNA, 100 bp, Homo sapiens
gtttctttgatgcgacctcaggaaggagatgaggagttttttgagaaccctgcttttcgtcccgatgggctgaaactctatcctaccctggtgattcgtg

SEQ ID NO: 282017 - DNA, 100 bp, Homo sapiens
gcctggcggccaccccctcttccccacttccctgcactctcatcgctctcggcctcggcctcggcctccgacacgcttcatcgcagtaggaatggcagcc

SEQ ID NO: 282018 - DNA, 114 bp, Homo sapiens
ccagaccctggagcctcagttggaagcagccgatccagcctgcggagcctgtggggcagaataccctctaccatctgctttggtcagggtgccgctcgaggatttaaaagcaac

SEQ ID NO: 282019 - DNA, 82 bp, Homo sapiens
ctcccttgtcagcacaacctgtgtaggaaatgtgccagtgatattttccaggcaccaccaggaccagctgatcattccagcc

SEQ ID NO: 282020 - DNA, 100 bp, Homo sapiens
gaagttcttctttctcagagctacgttaaaatgtataacaaagctgtcaagctggcttatgtacataaaagcgtgatggaggaactgaagagaataattg

SEQ ID NO: 282021 - DNA, 98 bp, Homo sapiens
tccggctcttcgtgcccaaccacagtgtgtgacatgtggcaaagctttcaagaagctttggtccctccatgagcataacaagattgtgcacggctacg

SEQ ID NO: 282022 - DNA, 50 bp, Homo sapiens
gctgaagcgactgagtccgcgatggagatgcgagccacccctctggctgc

SEQ ID NO: 282023 - DNA, 90 bp, Homo sapiens
gccgaggagacgcgggccttcgagcagctcatgaccgacctcaccctgtcgcgggctttggacgtggaccggatggttctttacaaaatg

SEQ ID NO: 282024 - DNA, 83 bp, Homo sapiens
cgccgaggcaccgaggcactcagaggagcaaaagctggcaggctgacagaggcggcctcaggacggaccttctggctactgac

SEQ ID NO: 282025 - DNA, 100 bp, Homo sapiens
gcatataaatgactgggtggcagagaagactgaaggtgctatacttggtagatcagaaactcaggagtgtcttttctttaatgctaattgggaaaaagac

SEQ ID NO: 282026 - DNA, 98 bp, Homo sapiens
tggcgctgaggcggccaccgcgactccggctctgcgctcggctgcctgacttcttcctgctgctgcttttcaggggagccagcattcgaacgttcact

SEQ ID NO: 282027 - DNA, 96 bp, Homo sapiens
cgtcaacgccagctgcccaggcgcaagtctgtgtggtccagctgagctgactgctgcccactttggaggaggcggtgggctccttcacaagaagac

SEQ ID NO: 282028 - DNA, 76 bp, Homo sapiens
agaggagcgagctgaggaagaggaagctgttggctgaagtacaccaactctacaacattacctgtcatatactgaa

SEQ ID NO: 282029 - DNA, 50 bp, Homo sapiens
agaagcggaaacaacgttctcccgcaaaaacactgtgcatcttagccaac

SEQ ID NO: 282030 - DNA, 82 bp, Homo sapiens
gcccagtccccagctcgccagcagagtacacactagatgtgtacagactctcctccgtggtcacacagcacgattccaagaa

SEQ ID NO: 282031 - DNA, 100 bp, Homo sapiens
ggaagcagccgatccagcctgcggagcctgtggggcagaaatggtggagtcaatgaagaaagtagcagggatggatgtggagctgacagttgaagaaaga

SEQ ID NO: 282032 - DNA, 75 bp, Homo sapiens
taggcattttgctgtctcctcctaatacgaattgttaagactcgaatcagaaatggagttcattgttttgaaata

SEQ ID NO: 282033 - DNA, 75 bp, Homo sapiens
gctgagcccatattaagagatgtcaggtattgttgcagcatctggcagtgagactgaggatgaggacagcatgga

SEQ ID NO: 282034 - DNA, 74 bp, Homo sapiens
ttgaggacctactcacagataggaattgaagttgacaacacttactacaaagaggcagaaaaagaaaatcttgt

SEQ ID NO: 282035 - DNA, 97 bp, Homo sapiens
cggccaaggacctggccgacatcgcggccttcttccgatccggttatatacaggcatgtagaggacttatgatcgctgctgtcagcctgggcttctt

SEQ ID NO: 282036 - DNA, 97 bp, Homo sapiens
ggccaaaaggagcggcgcggtcttcgtggtgttcgtggcaggggaacaggaacctgataaagaatcaggagcctcagtggatgaagtagcaagacag

SEQ ID NO: 282037 - DNA, 87 bp, Homo sapiens
gggatgtatttggaacattatctggacagtaatgtttgaaacttaccagttttccggtgtatatgtagccatccaggcagttctgac

SEQ ID NO: 282038 - DNA, 100 bp, Homo sapiens
gacataccagtctctgtacccactcaccttgtttgtcccaggactcctctatctcctccaggtgtatgcaacagcgttattgcaacaggctaacgaaaac

SEQ ID NO: 282039 - DNA, 75 bp, Homo sapiens
tttgccaaaatattatggcatctggtcacctcccactgcaccaaacgggaccagttactctccacaagaaaattc

SEQ ID NO: 282040 - DNA, 80 bp, Homo sapiens
cgccgcaacgccgagcgcaccgacatctgcctgctcaaagcctggtggagttgacagaagagatcctgaagctgctgatg

SEQ ID NO: 282041 - DNA, 100 bp, Homo sapiens
cacaaccaggaaggggcgacgcctgtgagcttggccttggagcgaggctatcacaagctgcaccagcttctaaccgacccagcgacttctccgtgtccct

SEQ ID NO: 282042 - DNA, 101 bp, Homo sapiens
ccccggggtgtaataatgttaactgagcggacaaggcaaaatctcagcaagttcggacctctagtacaataaggcgaacctcctctttggatacaataaca

SEQ ID NO: 282043 - DNA, 51 bp, Homo sapiens
gagaacggtgcttctatggcaggatatggctttggaatcaggatgatgctg

SEQ ID NO: 282044 - DNA, 80 bp, Homo sapiens
cctgaaccgcgcggccgaaccctccggacactcatgaggaccatgatacttccactgagaatacagacgagtccaaccat

SEQ ID NO: 282045 - DNA, 74 bp, Homo sapiens
ctatgtcggcattttgattttgatctggaagattttaaaggcaacagcaagtacaacaagttcaaatgccggat

SEQ ID NO: 282046 - DNA, 83 bp, Homo sapiens
tctaccgcaactctcagttcgagagtaaagaccaagcggagcagccagctggcagtagcgccctgtaggacccccaggacccg

SEQ ID NO: 282047 - DNA, 98 bp, Homo sapiens
tgaatctacagggacgccatcgaatccgagatcctgaaggagctagacgagtgctacgagcgcttcagtcgcgagacagacggggcgcagaagcggcg

SEQ ID NO: 282048 - DNA, 50 bp, Homo sapiens
tgcactgacctgtgaggggtgtaaaggaatgaagccaagagtgatgaaag

SEQ ID NO: 282049 - DNA, 50 bp, Homo sapiens
cgtggagtgaaggtccctcagcggcgcgggtcgggccccggctcagtggt

SEQ ID NO: 282050 - DNA, 97 bp, Homo sapiens
gcacatccttcagcgatgctgaccggtggaaaccagagcagtacctcgtgtatactacgctatcgagtctcgctctcagtcaaaatctccaacggga

SEQ ID NO: 282051 - DNA, 104 bp, Homo sapiens
atcagcacaaccttgttgcatgccagataaatgatcagtatgtgcacagagtgcttgcacatgagctgttatgccctcaaggaggccccagctgtgaatattac

SEQ ID NO: 282052 - DNA, 90 bp, Homo sapiens
ctgcgctcccctaggagtgctgagcccgcggaaccgcagccatgggcctgggatacaacagtgatgagataaggcctcggactttactga

SEQ ID NO: 282053 - DNA, 75 bp, Homo sapiens
aaagcctctgggagcagaagggaggctccaagacctcatcaacaattaagcccatttggaagccctttcctaatc

SEQ ID NO: 282054 - DNA, 96 bp, Homo sapiens
atccagacggcagggagtgcatcaaaggtgtgaacacagacagtgtttaagaatgaaagcctcaacgcagaatcaaaatctggctgcaaacttcag

SEQ ID NO: 282055 - DNA, 100 bp, Homo sapiens
cttgtcgttctctatcactacgtggccgtcaacaatcccaagaagcaggaatgaaagtggcgctttctccgccccaggtgatgctgtggagtcttcaaaa

SEQ ID NO: 282056 - DNA, 74 bp, Homo sapiens
tggacgttcggccaagggaccaaggtggaaatcaaacattcagtcgggtccactaaaaatctctagtgtatcag

SEQ ID NO: 282057 - DNA, 90 bp, Homo sapiens
ctctcctcggcaccatctacagcatcttcatcctctaccgaaaccggagtgaaaacgccagtgaggaagctggtgagggtgaatatgtca

SEQ ID NO: 282058 - DNA, 83 bp, Homo sapiens
cccagaaaaaatgcccagcgcggcgcggggctgcggagtcgtccggagccgctgcgcgactgtgccctgtccacggtgcctcc

SEQ ID NO: 282059 - DNA, 113 bp, Homo sapiens
cgacagcagtggcagaaacgtcaggccgtagccgaagcctcggaaggagcggcccacggcaaagactattgcagatatcatccgaacatgtttgggacccaagtccatgatga

SEQ ID NO: 282060 - DNA, 94 bp, Homo sapiens
gcgaagctagggtcgccgccactgccgcaggaggcgtgaggtgacaaggctcttgatggctatagtaaaaaaaagtacgtctgcaagttgctct

SEQ ID NO: 282061 - DNA, 50 bp, Homo sapiens
ccgcggccctgggagctggaggaaccgcgttggccagtcagtgctgaaag

SEQ ID NO: 282062 - DNA, 98 bp, Homo sapiens
atttattaacacctcttgccactcagctgacatatgaaggactcattgatgaaatttatggcattcagaacaatcggggctgctagtcgcatacccgg

SEQ ID NO: 282063 - DNA, 88 bp, Homo sapiens
tcaacactgcagaggacttagtccgagaagggcttccgttacaagatgaggtctgtgtatgctcacttccccatcaacgttgttatcc

SEQ ID NO: 282064 - DNA, 100 bp, Homo sapiens
ctggaccagctcatgggcacggctcgggacggaaaatctcttttgtgagccacataaaaggggactaatgaaaacacctctgaaagaatccaccacagca

SEQ ID NO: 282065 - DNA, 83 bp, Homo sapiens
cgcaccatggaggaggacgacagctacgatgccttcaattaagttgcagagttctgatggagagatatttgaagttgatgtgg

SEQ ID NO: 282066 - DNA, 51 bp, Homo sapiens
ggaccccagacaccggagactgggaaatgggtatgcggaagcgagcacccc

SEQ ID NO: 282067 - DNA, 100 bp, Homo sapiens
tgcaccactcgggaggactcccccaagtgcaaggggtgcttcaaggccattgtggcaggacactgagtgagcctcgacaggcagagatacggaaggagtg

SEQ ID NO: 282068 - DNA, 90 bp, Homo sapiens
gtgtcctgaacctggaagttgtgctttttaaggtgaaaccagcccagagaagttacgggatttgcccccggggctcctgcccagcaagcc

SEQ ID NO: 282069 - DNA, 75 bp, Homo sapiens
ccttgtcccctggagagagcggcgcctgggacattcctggaggtctcagtgctgtgccccccccagagcctagag

SEQ ID NO: 282070 - DNA, 100 bp, Homo sapiens
cgacggcatttaacaaggcggtgtggtttactccatgcagttgtcaggagtgaacatgaaaagatcattttgtataaaaaaaatctaaaattggagtcct

SEQ ID NO: 282071 - DNA, 100 bp, Homo sapiens
cagcagcccccagtcgctccagccataaccactgaggccacagcacagtgcataccagagtgtattgaagaagagggaccaagttcaagcagagtatgaa

SEQ ID NO: 282072 - DNA, 100 bp, Homo sapiens
gtggaacttccgtgccccccaccctcaccaaggatctagaagctcaaatgctgatgaggatatggagcaaaagaaattctcattcattgatggaaggaat

SEQ ID NO: 282073 - DNA, 100 bp, Homo sapiens
tcctcaacaacgccatgtcctccctgtactcgagtggtggacatgacaacagagtcaactgcatacagtggcatcaagacagtggctgtttatatagttg

SEQ ID NO: 282074 - DNA, 75 bp, Homo sapiens
ggtggaacagctacgcatagaagccgggattgagcgcatcaagaccatggtgaatccgggcagcagctcgcagcc

SEQ ID NO: 282075 - DNA, 75 bp, Homo sapiens
tgtggaaagactcacaggcgtgagcatctcccagatttcaggtatgctgctgaaagtgggaatcctctacattgg

SEQ ID NO: 282076 - DNA, 98 bp, Homo sapiens
gctgaaggaatgctggcagacaaaataggaatatttccaatttcatatgttgaggaggggccccaatggaaaggctggcatcttatggctcatcaaag

SEQ ID NO: 282077 - DNA, 100 bp, Homo sapiens
gactgaccagcagcgtgaagacatcacatccagtgcacaggtgagacatggaatccattaaaattgcattatcagttaagaaatgtacgggaacgattag

SEQ ID NO: 282078 - DNA, 100 bp, Homo sapiens
tggacagtgagcccaagtgtgtggaaggtctcctctgagcctccggcctccataagacccaaaacagatgacacctcttcccagtcccccgcgccttccg

SEQ ID NO: 282079 - DNA, 75 bp, Homo sapiens
ggttcaaggtctctaagaaggtgcccaagatcccactccatgtcaggtaaaataccatgaagattttgaaaaaac

SEQ ID NO: 282080 - DNA, 100 bp, Homo sapiens
agtttgtggcctcctaccaggagctcatggttgagtgtacgaagaaatgatggctgagagctagcaaggaaaactcaggaccatgatggctcagtttccc

SEQ ID NO: 282081 - DNA, 100 bp, Homo sapiens
tacacctctcatttctccagatgccaacattgacctcacaaccgagcaaattgaagagacgttaaaatacttcccttttgcgagaattgaagcaccctaa

SEQ ID NO: 282082 - DNA, 75 bp, Homo sapiens
ggatgatgtgcttggtggagcagctgcctgggagaatgttgactctactgcagcaggggaaatgctgtctgtagc

SEQ ID NO: 282083 - DNA, 50 bp, Homo sapiens
ctgatcctgcagcctccctccgagaaaggcactatgctgggccttcctac

SEQ ID NO: 282084 - DNA, 98 bp, Homo sapiens
tcagccccagcagtgcagaaagtttctttcaagatggcttgaaaacagctgataagttgaaacagtacattgaaaaactggctgctgatttatataat

SEQ ID NO: 282085 - DNA, 75 bp, Homo sapiens
tcctctattgctgcaaaaaatgcagaactagaacaggagcttatggtgtgccttgaaggggagatttctcgccag

SEQ ID NO: 282086 - DNA, 73 bp, Homo sapiens
gttgagcggcggcgaacatgcgcttttgacacattggaggtgcatctgcagacgcagcaggaggtgaagctgc

SEQ ID NO: 282087 - DNA, 73 bp, Homo sapiens
cggattgccagagaattggcagaaggagttgaactgaatgaccgactcttgggcagccaacttttggcctgta

SEQ ID NO: 282088 - DNA, 76 bp, Homo sapiens
caagtcagcacttaaaacgattaaaaaagtctggtttaggacccactgatctcagcatgaagagacaattggcgac

SEQ ID NO: 282089 - DNA, 82 bp, Homo sapiens
accagacctccacttccaaggatatagagcagatcaacagtacaaattctgaagtttgtaaacttgctgatggtggtggtaa

SEQ ID NO: 282090 - DNA, 96 bp, Homo sapiens
ctcagaccttcattgctctgtgtgccaccgatgtccaacatcacagtcacatacagagatggccgagtggcacagctggagcaggtatacatccgt

SEQ ID NO: 282091 - DNA, 100 bp, Homo sapiens
tggcgctacccggacatctctcagggtgccggcaccatgaagatctggacttcggagcacgtctttgagccattggagagaaaagagctgctccagactc

SEQ ID NO: 282092 - DNA, 75 bp, Homo sapiens
cctgtttgagaaaaggcctaagaattttggcattgagaatagtgacagtggtacaggaaagaaagaaaaagaaaa

SEQ ID NO: 282093 - DNA, 82 bp, Homo sapiens
ctattcacctcctgcctcaccacccccatcaagatcgccctgcgctgcaaacggggattcagcgtccgatcctttggaacag

SEQ ID NO: 282094 - DNA, 115 bp, Homo sapiens
gaaatccccctgaaggtaccgcggacctcgccccgggacagcgaggagctgagggaccctaagtcggccagagcagcatgtggatctccactgatgccgccgcctcggtgctgga

SEQ ID NO: 282095 - DNA, 75 bp, Homo sapiens
ctcccttcagctttggtccctcggggcgtctgggcagcctacgctttccgaaggccaatgatgaggccaatcaga

SEQ ID NO: 282096 - DNA, 76 bp, Homo sapiens
cccagcctcaggcgtgcgcggacggtgtgcgggggacaagctgtggtgggctgatcaggtgtcggaaaagatgggc

SEQ ID NO: 282097 - DNA, 101 bp, Homo sapiens
cagtccccagtgagggtgtacaaatacccctttgaattaattatggctcctctgaagagccaatccattcaggatgggaaaccacgcaggcaaacgagaat

SEQ ID NO: 282098 - DNA, 82 bp, Homo sapiens
gattatcctgcatcagcttcaatgtcttaatggttcataagcgaagccatactgaaactaatctggattcactccctctggt

SEQ ID NO: 282099 - DNA, 99 bp, Homo sapiens
atcatcgacatggccctgagtgaatacccagaaaatttcatgacattttctacattgaaaaccaaaaggaatatgaaaataaaaaagctgctaggaaga

SEQ ID NO: 282100 - DNA, 100 bp, Homo sapiens
tacacaacaaaacattcatggagggggaaatgacaagagcacctcaaaggcagcagcctcaaggagcagccatggccccagacttgtcgcacggatgcag

SEQ ID NO: 282101 - DNA, 83 bp, Homo sapiens
tccagaagtccagagctgaggactgcctgtttgcagctgcagatctgggacacggccggccaggagcggttccgcaccatcac

SEQ ID NO: 282102 - DNA, 101 bp, Homo sapiens
cctaccttcgcatcccggtcgctgatacccctgaggtacccatgtcagaatggcggcagtggagcatcgtcattcttcaggattgccctactggccctacc

SEQ ID NO: 282103 - DNA, 95 bp, Homo sapiens
attttggtgccgcatatgtgttggagcagagtgttctgccagttctggataatccactgtccaagaaggttcgaggcctcattgatagcttacgg

SEQ ID NO: 282104 - DNA, 82 bp, Homo sapiens
ccgcgaggaggcgcgggaggtgttcgagaacgaccccgagacgcggggtcgcggccgtcaggggcactcagcgcgccgtcgg

SEQ ID NO: 282105 - DNA, 96 bp, Homo sapiens
actaataataataattccagcttctacacaggagtctactcttcatcttgtgttgagacttcgtggtggtgctaagaaaaggaagaagaagtctta

SEQ ID NO: 282106 - DNA, 90 bp, Homo sapiens
gcctgattgaggactgccagctggcgctgcagacgcatcttctctccagactgccgatcccagaaagccaggtgatcaccattaaccccg

SEQ ID NO: 282107 - DNA, 80 bp, Homo sapiens
aaagtttcggttctgcccggcggtggacccacgagcgcctacttgaaggaaattttgccaaagaagtgagccatgaaatg

SEQ ID NO: 282108 - DNA, 97 bp, Homo sapiens
gcggcggcagcagcaccaggctctgcagcggcaacccccagcggcttaagccatggcttctgcaggaattctccaaggaggagcgagacccagtgaa

SEQ ID NO: 282109 - DNA, 100 bp, Homo sapiens
gaaaaattcaagaagttgaaaaacgcttttcacgtcacctggagagatgcacagataatccgcaagatgggattatggtgaaactagttgtcaatttgtt

SEQ ID NO: 282110 - DNA, 85 bp, Homo sapiens
ggagcgccatggcctgcatcctgaagaactcccccactggaaaggattctgaaagaaatgaagtcagccctcagaaatgaagttg

SEQ ID NO: 282111 - DNA, 75 bp, Homo sapiens
gttagagaagaattttccaaatgaatttgcaaaacttactgtaggactgtggaaactgaagtcattgcagagttt

SEQ ID NO: 282112 - DNA, 82 bp, Homo sapiens
gccaagttcggggccaggacgtcgggaggacctggtggaaaggagactatggaaccaggatccagcagtacttcccatccaa

SEQ ID NO: 282113 - DNA, 82 bp, Homo sapiens
ggttcggctgcgcggcggggctgaggcggccgcggggcccgagcgcagtacctggagtagaacagaaaaattattatgtctg

SEQ ID NO: 282114 - DNA, 50 bp, Homo sapiens
ctggtgtcccggagcagtgcaaggaagccttggaatcctgccagactcgc

SEQ ID NO: 282115 - DNA, 90 bp, Homo sapiens
ggctgactgagagcgtctgcttgctgaaacagctttaagagaatttcaaaggcaatatgaaaaaatggagtttggagtattcccaatgga

SEQ ID NO: 282116 - DNA, 100 bp, Homo sapiens
atttggggaaatccttcggatggtgaactcattagaagtccagaggtgtccttctaaagctggtagaggtttcacgagtcatcagggacccagaaccctt

SEQ ID NO: 282117 - DNA, 96 bp, Homo sapiens
ggaagacttggccaggccgtgttccgtgtctctggattcaagtcccaggagtcctgaccagagagcagagttgagtccacgctccatgagaatgct

SEQ ID NO: 282118 - DNA, 100 bp, Homo sapiens
tgaagaccccgaaggaaaaggaggaattcgccgtgcccgagaatagctccgtccagcaggtccctatcactgttcagtccatcgtcattcagtctctaaa

SEQ ID NO: 282119 - DNA, 127 bp, Homo sapiens
ggagatttgtgtggctgcagccgagggagaccaggaagatctgcatggtgggaaggacctgatgatacagaggtgtcatggagaaactccagctgggcccagagattctgcagcgggaaaatccaag

SEQ ID NO: 282120 - DNA, 128 bp, Homo sapiens
cggaggccgttcctggctttgtagctcgctcaagatggcggcgcagccaccccgcgggatacgcctcagcgcgacaatgcagatcttcgtgaagactctgactggtaagaccatcaccctcgaggttg

SEQ ID NO: 282121 - DNA, 90 bp, Homo sapiens
cacggggcaggctgagttcctcttgctcacagagctctgtaaaggtgtgcctaccgcatgttgccgctgctgtttctgctgggacgtctg

SEQ ID NO: 282122 - DNA, 75 bp, Homo sapiens
gcctggcagtggctttcctcgcatccagcaactcttcaccagttatcaatactctggctgaccatcatcatcgtg

SEQ ID NO: 282123 - DNA, 96 bp, Homo sapiens
ataaaagaaatcccctctcactctccaattctgttgttgcctccatgcgccaatccaaaccgaaagccagaagattactttctatgaagacaaaaa

SEQ ID NO: 282124 - DNA, 82 bp, Homo sapiens
tcttctgcaaggtccggctgctggatggaggggattttgtcagcttgtcgtcaagtttggtgccctggttgtcagatgttgg

SEQ ID NO: 282125 - DNA, 100 bp, Homo sapiens
aaaatcacacctcttatgtcagcatttcgcaaggtaccccaagaagctagtgcagacttattcagtgtttccctaccaggacgagatgagcgacgtagtg

SEQ ID NO: 282126 - DNA, 100 bp, Homo sapiens
aagtatgagaacccagcccgctggagtgagcaggagcaagccattaagggggtttactcatcctgggagtgcatccgccccaacccttttccccctcgtc

SEQ ID NO: 282127 - DNA, 100 bp, Homo sapiens
gtctcagatcttttctacagcttctgataatcaaccaactgttacaatcaaggtctatgaagaggcttcgtgacggagttatcagagacattgagaggca

SEQ ID NO: 282128 - DNA, 51 bp, Homo sapiens
aacatgccaacaaattgattgagtaatctatgccagcaattatgacaatgt

SEQ ID NO: 282129 - DNA, 100 bp, Homo sapiens
gaagaagaagaaggatattcgcgattacaatgatgcagacatggcgcgtcttctggagcaatgggagattactttctatgaagacaaaaattttcaaggc

SEQ ID NO: 282130 - DNA, 101 bp, Homo sapiens
cgggacagagcggtcggtgacagcctcaagggcttcagcaccgcgcccatggcagagccagaccagttgcatgctgagaatttgaaaaatgaagatgatgt

SEQ ID NO: 282131 - DNA, 88 bp, Homo sapiens
aggaatgccagtgcatcttttgcacagctgccaaatttgagtttcatcatggtgactatgaaaaacagtttctgcatgtactgagccg

SEQ ID NO: 282132 - DNA, 75 bp, Homo sapiens
gggaggtgaatttccatgtcaacatagtccaggttgccaagaaggaagatctcatcagtgcgtttggaacagatg

SEQ ID NO: 282133 - DNA, 75 bp, Homo sapiens
ccaaggaagccacgtgcagacatctacaaccttcgatctcctgacgagagcaggagcagtgacttcacctgagaa

SEQ ID NO: 282134 - DNA, 79 bp, Homo sapiens
ccggccggcgtcacagcgaatgtggaggatagactacagtgccgctgaattctagatttggacctggtggttagagatg

SEQ ID NO: 282135 - DNA, 75 bp, Homo sapiens
taaaaagagatgtggggggattctcgacctgctaacagaactggaccttttcgttccagttcctagcagatttaa

SEQ ID NO: 282136 - DNA, 90 bp, Homo sapiens
gccgggcacggagccgcccgcgcacttccaggtgcacagcgcgggagccgtcacggtgctcaagtgctgttggggatttccaggtggacg

SEQ ID NO: 282137 - DNA, 75 bp, Homo sapiens
cggtggctactctgcctcggggacgaaagcaggggatcatggaagctgataaagatgacacacaacaaattctta

SEQ ID NO: 282138 - DNA, 100 bp, Homo sapiens
atttggaatctgccttctactccatcgtgggactcagcagccttggtgctcaggtgccagatgcaaaggatgccgaggaatgtgacagggctgggagtgt

SEQ ID NO: 282139 - DNA, 50 bp, Homo sapiens
gagactcctgctcagtgtagcattaaggtgtcaaagtcgtgttctcaggc

SEQ ID NO: 282140 - DNA, 100 bp, Homo sapiens
gtggcggaagccttcgtctcccagattgcagagatctggttggagttggagggtgagagaaaatgaattctaatttacctgcagagaacttaaccattgc

SEQ ID NO: 282141 - DNA, 82 bp, Homo sapiens
acaacttatcagtagtgacttacagtaaggtggtggacataatgcgagttaacgtggacaaggttctggaaagagaccagaa

SEQ ID NO: 282142 - DNA, 83 bp, Homo sapiens
ctcgcccagctcgcccagcgtccgccgcgcctcggccaagctgtgagccgtgagctttgaggcggtgggatgtgtcagcagaa

SEQ ID NO: 282143 - DNA, 82 bp, Homo sapiens
aggatccgcccctggacatggaggagaaggtccgcttcaagtgaaatgacaatggatgctctgttggctcgattgaaacttc

SEQ ID NO: 282144 - DNA, 95 bp, Homo sapiens
agatctgctaccagctcctgttgaaccatggggctgcccgaatataccctccacagttccataagggcacggtgcaccctgtgaccactgtcagc

SEQ ID NO: 282145 - DNA, 50 bp, Homo sapiens
caggactgtgcaggggactctgtcacaaatcatcggactcaggtacatct

SEQ ID NO: 282146 - DNA, 85 bp, Homo sapiens
tcaacttccagtgagagtgacacaggtcaggaagcagaatattccttatatgactttgagaatcactacaagaaaaactccttgt

SEQ ID NO: 282147 - DNA, 75 bp, Homo sapiens
gattggctggaattttcaacacatgatgatgttttcagttttacatgaggctgtgagcactggcgatcctgagat

SEQ ID NO: 282148 - DNA, 110 bp, Homo sapiens
gaaaaagaaactaaaaaatggcagctctcagaatgggaagaatgagagaagtcatatgcccggcacaatgcagacagacatgctgaactatctggaagtccactgaaaag

SEQ ID NO: 282149 - DNA, 74 bp, Homo sapiens
gtgagagatggaacccgaagaagaaaggattcgttacagccagagattggttatttaggaggattcgatggcaa

SEQ ID NO: 282150 - DNA, 100 bp, Homo sapiens
gtgaagcagaggtgggggtgtttgtccagcgactccggggcctgatgaatgacatcgagcccccctccatgcgcctgaaggcccgacccagcagccctgg

SEQ ID NO: 282151 - DNA, 75 bp, Homo sapiens
atcaagaggaatgcacatctgtgaagatgctgtaaaaagattgaaagctaacctatgagaaccccaaagacatta

SEQ ID NO: 282152 - DNA, 100 bp, Homo sapiens
aagttcgttggaagcaaaaaaagcccagtggaggaaagagctaggtcaaaatgcagatcttcgtgaaaacccttaccggcaagaccatcacccttgaggt

SEQ ID NO: 282153 - DNA, 83 bp, Homo sapiens
agggaactgaacgcggttctgggagcagcaagcccacgggtagcagccgaggccccagaatgaaaatgatgcatcctgttgcc

SEQ ID NO: 282154 - DNA, 101 bp, Homo sapiens
gtggaactgaaggattccatgggggacctctattccttctcagctctcatgaaagccctggaaatgccacaggctggcagtgatggtgaaagcataggaaa

SEQ ID NO: 282155 - DNA, 100 bp, Homo sapiens
aactgccatttcaaagaatatagatggttttgaaaagttcatgctgtcccttcattgaattttaggtgactctgacatcattagaagcatgccagaacag

SEQ ID NO: 282156 - DNA, 100 bp, Homo sapiens
acttcagcttccccgattgccacgtaggctccttcgccatcaagtcgctgcggaaactgacgctttatcctgtggataaacgcagagtgaacgagtttgg

SEQ ID NO: 282157 - DNA, 83 bp, Homo sapiens
accagcatccattgcaaaccttattaatctcagggaactggatgtcagcaagaatgctttaccgatttgttacaactcaagca

SEQ ID NO: 282158 - DNA, 82 bp, Homo sapiens
ttgacacacagcagttcttgtcaggtaagtggggcagtgtccggaccagtggacgcagcagtggccttggcaccgatgtggg

SEQ ID NO: 282159 - DNA, 80 bp, Homo sapiens
cagcggccgagcgggcggcttcctggcctgggcgctccggtggcggcggaggtatcgagaaccttccctgcgaacttcag

SEQ ID NO: 282160 - DNA, 91 bp, Homo sapiens
tactcctcccagtgacgggtctggagtgcgtgggggaccggctgttggcgggagagaagatgactgaggaggaggtggagaccgttctggc

SEQ ID NO: 282161 - DNA, 83 bp, Homo sapiens
aggaaccttcctggttcagccataggctcaggtgtattttgacctacgaattggagatgaagatgtaggccgggtgatctttg

SEQ ID NO: 282162 - DNA, 83 bp, Homo sapiens
tccttggtgtcatccagccttagcaaaccagagttgcctgacctggtaccccagctggggacactctaccagttaatggaaag

SEQ ID NO: 282163 - DNA, 75 bp, Homo sapiens
ttggagtccatccctgcgggacaggcaccacctgccctggtcagctccagccagtccctgctggagtggtgccag

SEQ ID NO: 282164 - DNA, 75 bp, Homo sapiens
gatcgtcaggctctaaacaaaattctgggcgaactttctgaccaagtatacaactacccagagggcctaggagaa

SEQ ID NO: 282165 - DNA, 93 bp, Homo sapiens
ggaacaggcccagaaggccaagaacccccaggagcagaagtccttcttcgccaaatacgaaggtgctcgggtcttcggggcactgggtcccat

SEQ ID NO: 282166 - DNA, 100 bp, Homo sapiens
tatgatcgaattggtggaaaggttgaagttcaagagctcagaccctaaaccaaggccacctttgatgccatttctaagacctacagctacctgacccccg

SEQ ID NO: 282167 - DNA, 90 bp, Homo sapiens
ctggtagcccccacccctctccgtccatggccccagatgacacttcagggatacaattggtgtcatgatcggaatgtggttaccattttc

SEQ ID NO: 282168 - DNA, 75 bp, Homo sapiens
ccggaggaagcagcgggatggaggtggatgcagcagttctaagctactgtcaagtatggaaaatcccagcaattc

SEQ ID NO: 282169 - DNA, 98 bp, Homo sapiens
cggcagatcctcaggggcaagtacagttactctggggagacctacattgccccaccagctgccattttttacccatcgggtgctcatgacacgtcgaa

SEQ ID NO: 282170 - DNA, 100 bp, Homo sapiens
gtgcagctgcctcagttcttagcgcagattataagcgccatggctatggctagtgttaaattgcttgccggtgttttaagaaagccagatgcctggattg

SEQ ID NO: 282171 - DNA, 75 bp, Homo sapiens
ggaacattgccttcttttcaaccaattgtgttgaagcccagtcagaacaatggtccaggataacaaggatgggac

SEQ ID NO: 282172 - DNA, 82 bp, Homo sapiens
ccccggccccggagctgcctggaggcggccgcactcggggcgaccattgacgaggtggagacggacgtggtggagattgagg

SEQ ID NO: 282173 - DNA, 100 bp, Homo sapiens
ggtcagctgctggtacaagtacctccttttcagctacaacatcatcttctggcagcgagtgacaagcacatccaatggctcctaggggcagatggcgagg

SEQ ID NO: 282174 - DNA, 50 bp, Homo sapiens
ttttttatccagtgttcaggatgtcgagagcctgggcctggtcctgagag

SEQ ID NO: 282175 - DNA, 82 bp, Homo sapiens
ggacgtgcttcctgcttcatagataagaggaagtactgtgagagtcttgcctgttgccgcccactcagcacagccaactttg

SEQ ID NO: 282176 - DNA, 80 bp, Homo sapiens
ggagtctccaccaggactgaccgctgccgcccagcacgtccagacatgtagactgccaaagtgtatgggatgctttcaag

SEQ ID NO: 282177 - DNA, 95 bp, Homo sapiens
gacccaacatcctcatttgaaaccgtccagatcaacgttatccccacctctgatgattcctcaggctgtgggtgagcgtggaggatgctcagatg

SEQ ID NO: 282178 - DNA, 90 bp, Homo sapiens
ctctacttagctcagcaattcttaccttggacattagtcatgagtgccgagtgtgcggggtcacagaagtgggtctttctgcatatgcaa

SEQ ID NO: 282179 - DNA, 50 bp, Homo sapiens
gttaaggaacagatccccggaggagcaattctgtggtgttcttggtcaca

SEQ ID NO: 282180 - DNA, 100 bp, Homo sapiens
tctgttgttttgggtatttcatctcgggaaggagaggagattctgtgtgagctgtgcccgtctggctgagatgaggcaaaaagaaatccccagggtcctg

SEQ ID NO: 282181 - DNA, 50 bp, Homo sapiens
ttcttctgatttctgccattgggtttccgttactatggcaatgacggcag

SEQ ID NO: 282182 - DNA, 52 bp, Homo sapiens
ggcccaactggaattccacttacgggttgcaagaaagctcaagtagcctatg

SEQ ID NO: 282183 - DNA, 83 bp, Homo sapiens
caaaatgaactgagtgcctggaagtttacgcctgataggagcgctatagttatgtctgcccagatttagtaaaagaatttaac

SEQ ID NO: 282184 - DNA, 74 bp, Homo sapiens
ccttccagcgctgcgcccggacagacaaggaacacctcatcaaaatgcagaagcagaaactgcagatgcccccg

SEQ ID NO: 282185 - DNA, 75 bp, Homo sapiens
catgccccgctacgagctggctttaatcctgaaagccatgcagcggtataaccccgttttcacacgaatggcccc

SEQ ID NO: 282186 - DNA, 75 bp, Homo sapiens
cacaggaatctggaattttattaaacatgaggaaaggccatgtgaggacacagtgagaaggtggccgtctgcaac

SEQ ID NO: 282187 - DNA, 74 bp, Homo sapiens
ctataaccagatggtggcgtctttcaggtcggttgtacgccgtgcagcaagtcttttaagtaaagtagtggaca

SEQ ID NO: 282188 - DNA, 105 bp, Homo sapiens
cagcaactggctgagggactcacagctgatgacctgctgctcgtgctgatctcagacaatgcagatcttcgtgaagactctgactggtaagaccatcaccctcga

SEQ ID NO: 282189 - DNA, 75 bp, Homo sapiens
caggctggcaaaaccagacagccaggcggactgtttttccaatgacattcacaagctagataccagcaccatgac

SEQ ID NO: 282190 - DNA, 90 bp, Homo sapiens
gtccatcaatgacatgatgagcagcatgtcagaccagaccgtccgggtgaagctggttttccaagaattgatataaagcgggaagaacag

SEQ ID NO: 282191 - DNA, 75 bp, Homo sapiens
cggagggagataattgagaggagacgcactgtgaaagcagcatggaaaatgttgctgcttttgctcagaggacat

SEQ ID NO: 282192 - DNA, 100 bp, Homo sapiens
aatctggatgccaaacgagattggggccatgccaaggactatgtggagggattgtcaatgaggcagatcagattccgatttgacgggcaaccaatcaatg

SEQ ID NO: 282193 - DNA, 75 bp, Homo sapiens
gtaactgtcctccacatattgagaatattgtggacaaagccctagaagagccaaagtatagctcactgtatgctc

SEQ ID NO: 282194 - DNA, 101 bp, Homo sapiens
cggagaccccgcgccgacggctgctcaaacatcagggaagtactagccggacatcatgagtggctgtcgggtattcatcgggagactaaatccagcggcca

SEQ ID NO: 282195 - DNA, 100 bp, Homo sapiens
gacggcaccgtcaccgaggcgccgcgcacagtcaagaaggtcctctcagggtgcgccatcattgtccgaggtcagcctcgtggtgggcctcctcctgagc

SEQ ID NO: 282196 - DNA, 100 bp, Homo sapiens
caggaaggcagtctttgctacgtacagcaaaagttctctctttccagacgtagtgaactgtatgcagactgacaatctggaactaaagaagcttgtgtat

SEQ ID NO: 282197 - DNA, 98 bp, Homo sapiens
tccagagtcatgctcatccagccccaccagttgcaccagtgcagggacagcagcaatttcagaggctgaagcgggcagttgcaggagatgcctctgag

SEQ ID NO: 282198 - DNA, 75 bp, Homo sapiens
tatattccctttccagaagatgattccaacgccaccaattccaacctggtcctcctagccagcagttttgtgccc

SEQ ID NO: 282199 - DNA, 100 bp, Homo sapiens
tctacttcacactgcagaactgggttctggactttgggcgtcccattgccatggacatggatttgattgacatactttggaggcaagatatagatcttgg

SEQ ID NO: 282200 - DNA, 48 bp, Homo sapiens
gagaacagcacctcggacaaccagtgtaatgttcaagctcagaaatgc

SEQ ID NO: 282201 - DNA, 51 bp, Homo sapiens
ctactttcacagggcagaacaagagtgatttcttctgacttgagcctgcag

SEQ ID NO: 282202 - DNA, 85 bp, Homo sapiens
cagtggagccttctcagacccacagacaatgcagatcttcgtgaagactctgactggtaagaccatcaccctcgaggttgagccc

SEQ ID NO: 282203 - DNA, 75 bp, Homo sapiens
gccttcccacctagctctcctctctttgcagagccatacaaagttatgccttcaattaagttgcagagttctgat

SEQ ID NO: 282204 - DNA, 80 bp, Homo sapiens
ctgggtgcgtggggctgcctcgccgcgtctcgccacgccatcgacgagtacaagccccaggatgctaccaccaacccgtc

SEQ ID NO: 282205 - DNA, 75 bp, Homo sapiens
tgcaggagcttgccgtggtctccctgaagggcgtgcacatcctgcaggtgtgggaggcgctgctgaccctggtct

SEQ ID NO: 282206 - DNA, 74 bp, Homo sapiens
atgcagagacatgagatggtagccaacccctcaggtatctacgagaccccagcaggcaccatcctttaccatgc

SEQ ID NO: 282207 - DNA, 100 bp, Homo sapiens
aggaacttggttccccctccctcagcttccgccccaaaagggaaggaagccatgctgaagcaccgggactacgagacggccacactatcggacatcaaag

SEQ ID NO: 282208 - DNA, 90 bp, Homo sapiens
gattctcgtgcctcagcctctccagcagctgggattacagtggatatcaaagtattgcagagtgccttagcagccatccgacatgcccgc

SEQ ID NO: 282209 - DNA, 85 bp, Homo sapiens
gagtgggctccggagcctcagcgccgcgcaggtagtaagcattaataatgtctttcatctttgagtggatctacaatggcttcag

SEQ ID NO: 282210 - DNA, 82 bp, Homo sapiens
cggatcatggccgcagccgctctggggcaggaatatttcactgctacatggagtactcccgactgcgtggtgaggccggctc

SEQ ID NO: 282211 - DNA, 100 bp, Homo sapiens
gcttttaatgattttcagaggccagccatttattacatgatgtcattcagtgattggtggatgaaaatactaggaaaagtttatttaagttacgttctac

SEQ ID NO: 282212 - DNA, 100 bp, Homo sapiens
tctcctcgtctcccgctccgccctcccttttccctggctgtaccagtgcaggtcctcactttaatcctctatccagaaaacacggtgggccaaaggatga

SEQ ID NO: 282213 - DNA, 100 bp, Homo sapiens
gaagaacagaaagaagaaaagaaagatgcagaggaagaggaaagcgaactgattgcaaaagttgagaagctcaaaccattagaggtagagctgcgacgcc

SEQ ID NO: 282214 - DNA, 82 bp, Homo sapiens
ccacctcacagattccagcttcggaacaagagaccctggattcctacaggaagcaagtagtaattgatggagaaacctgtct

SEQ ID NO: 282215 - DNA, 80 bp, Homo sapiens
aggttccagttgaccagcattcatagggtggctgtagctaccttctgcatatggatatccagttttcccagcaccactta

SEQ ID NO: 282216 - DNA, 100 bp, Homo sapiens
gcatttgccagtgcaacaaattataaaaaccatgtgaggatacacacaggttgttggaggaagagtcttccaagagggctgaactagaaaagtggcactt

SEQ ID NO: 282217 - DNA, 98 bp, Homo sapiens
acacggaattattgaaaaatctggatcttgctgtattggagctcatgcagtcttcagtggataataccaaaatgcttcttggacacttaatgattgtt

SEQ ID NO: 282218 - DNA, 100 bp, Homo sapiens
gagagtatcatggttgaactcgcagctggaccttttggaaataatgaaaaggagaaggatgtccggaagtggaaggaagaattgctagatcaacgacgca

SEQ ID NO: 282219 - DNA, 100 bp, Homo sapiens
cgacagcatccaccgttaccactcagacaatagcaccaaggcagcgtgggactccatccagtcatttgtttcctatcctgggagcaggagagtgtgccta

SEQ ID NO: 282220 - DNA, 75 bp, Homo sapiens
aatcaaccaccttgtctggacagcagtcagcatagtgtgacatgttggcgagccaagtttatggaggcctttttt

SEQ ID NO: 282221 - DNA, 83 bp, Homo sapiens
tcgtcaagtctcccagcgaccccaagcaataccggctggctgaaggcggtgcaggtcctcatggtgctctccctcattctctg

SEQ ID NO: 282222 - DNA, 95 bp, Homo sapiens
caccagtcctgtcactccagaggagctactgtatacagatgttgccttatggctgtttagcaacaggagatcgctctggcctcattgaagttgtg

SEQ ID NO: 282223 - DNA, 100 bp, Homo sapiens
gctttctaccctttactccctgcaaagaaacaagagtgcttatcccagctaagctccaggtttttggctttcacccccaaccagtgaccaaagacttgac

SEQ ID NO: 282224 - DNA, 100 bp, Homo sapiens
cggagctcccgtgccgtcatgggtgccatgaagccagctggtcagtgagaaggtcggaggggccgaggggaccaagctggatgatgacttcaaagagatg

SEQ ID NO: 282225 - DNA, 82 bp, Homo sapiens
gagtttggcgagtcagtgactgaagcgcccgtccattccaagggggatatgagactttctactcggaatatcctgagtgttg

SEQ ID NO: 282226 - DNA, 75 bp, Homo sapiens
ccgtctgacaatagcagtgctatgttactgcaatggcatgaaaagcccctgggaatcgtggcggatataatagga

SEQ ID NO: 282227 - DNA, 50 bp, Homo sapiens
tgtagaaactgtctttaacctgatgccttcaattaagttgcagagttctg

SEQ ID NO: 282228 - DNA, 84 bp, Homo sapiens
cctcaactttctgggcgttcatgatcctggccagcctgctcatcgcctactgcatgtactaatggtcacttgatgtgcgctggc

SEQ ID NO: 282229 - DNA, 100 bp, Homo sapiens
gcagcgcccccgccacctgtcccctccccctccgcctccgccggagccgcctcgtgcactggaccagaggaagaccgagaggcagaatccgagttaacag

SEQ ID NO: 282230 - DNA, 128 bp, Homo sapiens
ctactgcacggtgaacctggaccaggaggaggttttcaggaccaaaattgtggaaaagtcactctgggggggccctcagcctcttggccttgaacgggctgttcatcttgattcacaaacacaacctg

SEQ ID NO: 282231 - DNA, 51 bp, Homo sapiens
ggatggctaccacggccgagctcttcgagacctagaggatcaagacataat

SEQ ID NO: 282232 - DNA, 89 bp, Homo sapiens
gtgggacccaaaatctgcctggaagataatgtggtcttactacatattgcaacagaagataatattggaggtgaagagggtaacatgaa

SEQ ID NO: 282233 - DNA, 75 bp, Homo sapiens
ggcgcgggcaggagcctggcgaggatgcaccttcccctgccttggaaagattgtaaaccatggctgtgtggatac

SEQ ID NO: 282234 - DNA, 89 bp, Homo sapiens
ttttgcctgctggaacctgctgtatctactcaagagtggaagttttcacaggtttttggattcaaagcataaaaaccattacaagatat

SEQ ID NO: 282235 - DNA, 98 bp, Homo sapiens
gcatcaacaagatgttgtcctgtgctggggctgacagtacataccgagcatcaaatattaaggcacccggagaacagacagtaccagccttgaacctt

SEQ ID NO: 282236 - DNA, 100 bp, Homo sapiens
cctcccgcatcgcctcagtgtggtttgggcccaaagaggtgtccacagcttgtgccaccgccgtgctgggcaatcaggtcctggcaaaactggcctgtgg

SEQ ID NO: 282237 - DNA, 100 bp, Homo sapiens
ccatcttcggaccccccaacaccctctacgaaggcggctacttcaaggtcttcctatcactgggctctaatttcactttgcaactggtgactgtgatgct

SEQ ID NO: 282238 - DNA, 75 bp, Homo sapiens
ctagcacagaccttctgatgttgctctctgacacagctggctattctagtcccagaagaaagaggagagacttgc

SEQ ID NO: 282239 - DNA, 80 bp, Homo sapiens
aagaaaccatgtgctgaaatgtttgacgacactgatggtttgtttctgcagatggctctgtggtcctgcactaggaaact

SEQ ID NO: 282240 - DNA, 99 bp, Homo sapiens
tgcactgaacttctgaagataatcgagaaataccagctaagactcaatgaacctgcagatatctttcaacaaggaacatgaagaaaatgcatatttgag

SEQ ID NO: 282241 - DNA, 82 bp, Homo sapiens
cggtctggcttgttcgggctcagcggccgcgaggccgcagctcccggtttcccaaaccactccttatgatccagtgaatatt

SEQ ID NO: 282242 - DNA, 125 bp, Homo sapiens
gtcgacagtgactaccatgacgaaaacatgtactacagccagtcttctatgtttccacatcggtcagaaaaagataacattaaccaggtggtatttgttggaaatttcttgagaattaatacgat

SEQ ID NO: 282243 - DNA, 80 bp, Homo sapiens
ccatatcataagtggaattttggagatattcaaagtgttctaagaacggaagcatctgggctggatggaatttagcatca

SEQ ID NO: 282244 - DNA, 83 bp, Homo sapiens
gcgtcagggacctgcccgactcagtggccaccagcttgggctccccacggagggcagcaagtgggacttggggaacccggctg

SEQ ID NO: 282245 - DNA, 100 bp, Homo sapiens
gccaaatacaactggaaaacagctttttgatcaggcagttcttgctgacctttctactttaaaagttatgcctcttcttcagatttttctgtttgctact

SEQ ID NO: 282246 - DNA, 83 bp, Homo sapiens
tgaaaagtcaatacaaaactaccatccttttgcaggtctcagctcgcgtacatggacatagggtactctgggaggaggtagta

SEQ ID NO: 282247 - DNA, 83 bp, Homo sapiens
acctccagctccgccactgccaggctctggaccctggactctgcagaaggccccttcccagctgcctgcctgccctagccagc

SEQ ID NO: 282248 - DNA, 107 bp, Homo sapiens
cccatggttgccggctcccctctcaggacaacccagatgtgcaacaaagtgcgatggaacttgctactaccagcaccatgccctaccaatatccagcactgaccccg

SEQ ID NO: 282249 - DNA, 98 bp, Homo sapiens
caggaacggctccagcatcaagatccgtctgacaggtagagtacagagagatggatgaaagcttggccaacctctcagaagatgagtattattcagaa

SEQ ID NO: 282250 - DNA, 97 bp, Homo sapiens
acagacctcgtcccgggctgaattctctctccactcttcgagattggcacacccagatctgcgatttccttctggttggctgtcctgcgtgggtgcc

SEQ ID NO: 282251 - DNA, 74 bp, Homo sapiens
ggaggtggcagccatctccttctcggtatcacctgattttgatacagcagcaggaagcttgttcccagcctacc

SEQ ID NO: 282252 - DNA, 76 bp, Homo sapiens
gaagccaccccgtccgcagccagagaatgtgatcaatgggcaggactacgaagtgatgatgcagattgactgtcag

SEQ ID NO: 282253 - DNA, 82 bp, Homo sapiens
cgcctttgccgatccgccgcccgtccacacccgccgccaggccgccatggcatcagatgaaggcaaactttttgttggaggg

SEQ ID NO: 282254 - DNA, 98 bp, Homo sapiens
gttagagtctgaagttgttaccaatggtgaaactacatgttcagaaaatggcaccaaaagcgaaggaagctcctgctcatcctaaagccgaagccaaa

SEQ ID NO: 282255 - DNA, 100 bp, Homo sapiens
gagacatgactgcgttcaacaagctagtgagcacaatgaaggcaagtgggactttgccttctcagcccaaagtcagcaggagaggagacgccgtgagcgg

SEQ ID NO: 282256 - DNA, 129 bp, Homo sapiens
cgtatgtctattacacagactttgtcatggagctcactctcctgtccctggacctcatgcaccatattcacatgttgactggcattgctcgggtaccacttgctggagctgctggaggccctggggttg

SEQ ID NO: 282257 - DNA, 90 bp, Homo sapiens
ttcctgaaggggaagagcaagatgcagtcagtggaggtgccagcgagatttcagattcctgtaaacctctaaagaaaaggagtcgcgcct

SEQ ID NO: 282258 - DNA, 95 bp, Homo sapiens
ggtgccgttaatcccctcctctcccaagctgagagcagccacacagcttcaagaatccagaggctttaggaagaagataaaacgccttgaggagt

SEQ ID NO: 282259 - DNA, 82 bp, Homo sapiens
tatcgacgtcgtgatccagaagtccagagctgaggactgcctgtttgcagggggaaatttgcagtggtgagaaaatgtataa

SEQ ID NO: 282260 - DNA, 98 bp, Homo sapiens
ttggtgcgagtggacagttcttcaggcttgggtgactacctagaactgcatataggtcccgggattcttgagctgtgcccagctgacgagcttttgaa

SEQ ID NO: 282261 - DNA, 75 bp, Homo sapiens
cactgggaacatggccctcatccagaaataggaaggttgttgattactcacagtttcaggaatctgatgatgcag

SEQ ID NO: 282262 - DNA, 50 bp, Homo sapiens
aggtcagaggccctttcatcatcagagtatggtgtttgcgaaaacttgcg

SEQ ID NO: 282263 - DNA, 82 bp, Homo sapiens
ttcctgtacagcctgcagaactagcttccctgggtgcatctccagggtgtgcaggacggggacttggaggccgacacagagc

SEQ ID NO: 282264 - DNA, 100 bp, Homo sapiens
tgagtgatcactctcaatcccggggcatttgtttacctgagcaatctgctgtatcccgtgcccctgatccacagggtggccatcgtcagtgagaaaggtg

SEQ ID NO: 282265 - DNA, 74 bp, Homo sapiens
gataccatttggctttcggctgtgcagggatccagattagatgatcaaagatgtgctccaccacctgctaccac

SEQ ID NO: 282266 - DNA, 98 bp, Homo sapiens
aatccttcctgccttgacagccagtctgtgaaatgatggtgaggtgggcacttctttgtggtgagtgcagaggtggaggagacactgaagcgactgca

SEQ ID NO: 282267 - DNA, 96 bp, Homo sapiens
agagctttcacgaaggcaccgacgtcatcatgctgaccaccaatcagatccgtaaggaagctcttcgtgggcggtcttgactggagcacgacccaa

SEQ ID NO: 282268 - DNA, 75 bp, Homo sapiens
gtgcgaagaagctgcagccgcacctggccaaggcggacaaacataaattgcagagattcctgactgctgacatgg

SEQ ID NO: 282269 - DNA, 75 bp, Homo sapiens
gttgaatgtcttgtgattggagttggtaccatgtcaggtacctgcagtggtggtaccggaagacccatgtggaaa

SEQ ID NO: 282270 - DNA, 116 bp, Homo sapiens
atgacttggatatgctgacgactgtgcaggaagaaaacgagccagtgatttacaatagagcaagatgtgttcagagcaacattgttttgttgacacaagcatttagaagaaagttt

SEQ ID NO: 282271 - DNA, 100 bp, Homo sapiens
cttgacagcggctttcaacccccacctcagcccagcaattcgctggtggttaagcgtctgggatatgacacccgggttactgtcttggggcatgtgcaga

SEQ ID NO: 282272 - DNA, 97 bp, Homo sapiens
aggtgaacccgcagccggacttctgctgcactggggctccgaatgacccagaatctggggtgggcttaggccccggctgtgccctcctggctgaaga

SEQ ID NO: 282273 - DNA, 101 bp, Homo sapiens
ctacggaagaagaatgtgaatggaaaccagatgaagaagatgagatttcggctgacttatccttgtataatgaattccgattgtggaaggatgagcccaca

SEQ ID NO: 282274 - DNA, 100 bp, Homo sapiens
ttcaagcttaggaccacccaccatgcctatccagggaaaagactactttgtgtgtatccattctggagagattgctccaagctatggaaccggttcacgt

SEQ ID NO: 282275 - DNA, 80 bp, Homo sapiens
ggcctgcaggtctctgtcgagcagcggacgccggtctctgttccgcaggatgtgcccatgacgcttccggagacaaccct

SEQ ID NO: 282276 - DNA, 83 bp, Homo sapiens
aaaccattacaatagatcgagcctgcagacaagaaacattcgtttatgagatgagagaaagcggttggaagccaagcaacggg

SEQ ID NO: 282277 - DNA, 50 bp, Homo sapiens
gaatccaccttcttacgctatggcagatgtctttggtggacttgggaaag

SEQ ID NO: 282278 - DNA, 136 bp, Homo sapiens
ctcccccagcatgaagaaatctgcctgggcctgtttactctcatcctcactgaacctgcccaagcccagaaggcttttcctccaaatgcgatcattgtatttttctactgcagtgcagtgactatattcttcacaa

SEQ ID NO: 282279 - DNA, 75 bp, Homo sapiens
gcagagccaaaagtgaaccgaggaaaagcagggtgaagttgaacaaattgctatgatgaaaccaaaaggccagac

SEQ ID NO: 282280 - DNA, 75 bp, Homo sapiens
ccccacgcaaccccagatccatttacactttacagttattggagtgatgagtaaagaatacataccaaagggcac

SEQ ID NO: 282281 - DNA, 100 bp, Homo sapiens
caccccggaagctgggaaatgaattgccatgggaccaacccagtgacagctgtcaggagtattctgactggaaagaaaaaaaaacatacctcaacccttg

SEQ ID NO: 282282 - DNA, 100 bp, Homo sapiens
ctctcagaagagtgagagagagctattagagattgtgaagaagaatttcgatctccgccctggggtcattgtcagggcagcgggtggcatgagacgtggg

SEQ ID NO: 282283 - DNA, 82 bp, Homo sapiens
caaagactgaactaggaaagaaagctgcatgctgcgaaggaaggtagaagtggtaacacgggttttcgaggattatcgtcac

SEQ ID NO: 282284 - DNA, 100 bp, Homo sapiens
agttgtgtccaattttatggattttgatgaaactcctggctcccaccatgagtgctgagcttaacgtgcctatcgacccctctgctcctgcctgccctga

SEQ ID NO: 282285 - DNA, 98 bp, Homo sapiens
aggcctgacagctctgcggctcgggccctgaggttgatcttcactcgaaaaggggtactccgtgtggaggggtttttaagcccccagcaaagtgaccc

SEQ ID NO: 282286 - DNA, 50 bp, Homo sapiens
cgggggcggcggccacgccaaggacggggagcagattttaagagtaaaag

SEQ ID NO: 282287 - DNA, 50 bp, Homo sapiens
atcgactcaagagttacatgcatcaggagtcggatggtcagggctgccct

SEQ ID NO: 282288 - DNA, 50 bp, Homo sapiens
tttgcacttgtggctacactaggtgtcataaaactgagttctgcagttga

SEQ ID NO: 282289 - DNA, 75 bp, Homo sapiens
cccgcttcgaggccgctttggcgccaaatcctgagggccgttgctccagggagaactgcaaatatcttcatccac

SEQ ID NO: 282290 - DNA, 128 bp, Homo sapiens
ctggttagtgtgctctgagggagggtccgagccagccgctgttttgccggaggagcccctcaggccatgtccagaaggcttcttgggggaatattgtcaacatcgagacccctgtgagaagaaccgct

SEQ ID NO: 282291 - DNA, 88 bp, Homo sapiens
aagcaggcagaaaagtcactctaatagaggaaaaccagtagattcccagacatcgcgaagtgaatctgaaattgtgccaaaagttgct

SEQ ID NO: 282292 - DNA, 101 bp, Homo sapiens
gttatgtgctgctctcctgagcaacatctctgactgtgatgaaacattcaactactgggagccaattggagactttagaagcttggagaagatttcacggg

SEQ ID NO: 282293 - DNA, 100 bp, Homo sapiens
gtgggaggacggcagcagggacggagtcagcctaggggctgtgtccagcacagaagaggcctcacgctgccgcagacggagtttcactcttgttgcccag

SEQ ID NO: 282294 - DNA, 51 bp, Homo sapiens
tctaaagtaattcgagcaatagaggccttcacctaccaccatatccaggag

SEQ ID NO: 282295 - DNA, 101 bp, Homo sapiens
gggtgattacttccggtaccttgctgaagttgcgtgtggtgatgatcgaaaacagctgaaaccaccaatgggtgaggtcgtcacccctacggccccccagg

SEQ ID NO: 282296 - DNA, 100 bp, Homo sapiens
ggcgccctgtaggctggagggactgtgagggtgtttttcctgaatgtgccatttgattccatcatggagcggctgactctgagaagaattgatccagtca

SEQ ID NO: 282297 - DNA, 87 bp, Homo sapiens
aatctttcctctaaagtcaaactggttggtcctacagctacacaagctatgcaagaatttcttactcgattacaagtgcatctttct

SEQ ID NO: 282298 - DNA, 76 bp, Homo sapiens
gaggaggtcatgaaggacctgagcctgacgcgggccgcgcggaaaactttagaaactgttcctttggagaggaaaa

SEQ ID NO: 282299 - DNA, 100 bp, Homo sapiens
tagcactttacaagcccagctcagccagacacaggcagagcaagctgcacagatttgggtattcggattcccgttggacatgtggactacttcgtcaacg

SEQ ID NO: 282300 - DNA, 82 bp, Homo sapiens
ctttgaaggcatgttgagtgagcaagtgaagaccaatattcaacaggcaccagagactgctgctactttgaaacgtacgata

SEQ ID NO: 282301 - DNA, 82 bp, Homo sapiens
acaggatctgccgaaggcaatataaagtttggtgccctggttgtcagatgttggaaagcagtaggacggaacatactcttcg

SEQ ID NO: 282302 - DNA, 100 bp, Homo sapiens
gaggtggaggaggaggaggaagagggcatgaacccaagctacgatgaatatgctgactctgatgaggaccagcatgatgcctacttggagaggatgaagg

SEQ ID NO: 282303 - DNA, 89 bp, Homo sapiens
cggtggagccgccggagtctgagaaggatgaagatttgataaagtggaaggcactgtttgaggaagtccctgagttactcactgaggca

SEQ ID NO: 282304 - DNA, 50 bp, Homo sapiens
acagcgtttcttgcaagaatgggaggatcgaatcatcaatttagttgttg

SEQ ID NO: 282305 - DNA, 74 bp, Homo sapiens
catattgctgcaatcaggaccattgcaataaaatagaacttccaactactgcaaaaaatcgtggaattgccatt

SEQ ID NO: 282306 - DNA, 74 bp, Homo sapiens
tggaactcagcgctccgctcctcccagttcctaagagtgcatctgcagacgcagcaggaggtgaagctgcgcat

SEQ ID NO: 282307 - DNA, 80 bp, Homo sapiens
atggcgaacgtgcaggtcgccgtgcgggtccggccgctcagcaagaggaagagacctgggaaattaagtttcttgcggag

SEQ ID NO: 282308 - DNA, 50 bp, Homo sapiens
ggcgactctgtgcctcgctgaggccctgggcgctgcctatggcacagcca

SEQ ID NO: 282309 - DNA, 75 bp, Homo sapiens
aggctgctctgaagcgcacgacctccgactactttctccttcaaggagttgtatcccgcattttgtattcacaac

SEQ ID NO: 282310 - DNA, 101 bp, Homo sapiens
cgacaggaaaaaaatttgctggatattgatgcgccagtcactgtttcagaatggcttcggttattgcctttccttggtgtactcgcacttcttggctacct

SEQ ID NO: 282311 - DNA, 83 bp, Homo sapiens
ctgctgccgccggcgaaggaggaggcgttgccggatggcagaaacggtggacacaagcgaaatggtcaacggcgctacagaac

SEQ ID NO: 282312 - DNA, 90 bp, Homo sapiens
ccagccccgagcgggacagcgcggcggggagcgacgaaaacgatggaaagaactttctaaggaagacttatctcctgcctttgatcattc

SEQ ID NO: 282313 - DNA, 100 bp, Homo sapiens
gtcaaactgaaggagctaaagcaagtagcctcccctttcactctgcctggggaccagcggctggcacagagcgcggagatgtaccactaccagcaccaac

SEQ ID NO: 282314 - DNA, 100 bp, Homo sapiens
cttgacttctctggggactctgaacttccctggtcgaacagttttttctaatggctattcaagtgaggaggacatgtaccgtgctgcagatgaaatagaa

SEQ ID NO: 282315 - DNA, 110 bp, Homo sapiens
atctggccaacaccaccggcacagtgacggcttcagaggactccaagaactttcccctcagagcacaggtaacagaggcttcctcttctgcctcttcaacctcctcctcc

SEQ ID NO: 282316 - DNA, 51 bp, Homo sapiens
aggtacactataggctcggggagacacatcttcggcctctgaggatgaggg

SEQ ID NO: 282317 - DNA, 75 bp, Homo sapiens
cgacatccggtgcgccgaggctgctcacaaaagtttggtgcacctcgatttggaggaagtagggcagggccctta

SEQ ID NO: 282318 - DNA, 83 bp, Homo sapiens
cttcggcatgtccttcgcctgccagtcacaatgcagatcttcgtgaagactctgactggtaagaccatcaccctcgaggttga

SEQ ID NO: 282319 - DNA, 90 bp, Homo sapiens
tgcctttgagcggactcccttttaagcaaattcaacacccaacagcttccttaatagcaaaggtagcaacagcccaggatgatataactg

SEQ ID NO: 282320 - DNA, 100 bp, Homo sapiens
aggacatgaggaaaatgtccttccagcgctgcgcccggacagacaagctgaaccttagccggccgatcgaggagcagggccccctggacgtcatcatcca

SEQ ID NO: 282321 - DNA, 96 bp, Homo sapiens
ggctgccggctggatgggaagttaatgtttacggcgaagtctactcaacgtttccaagcaacgaaggttttgggaacagtaaaatggttcaatgta

SEQ ID NO: 282322 - DNA, 83 bp, Homo sapiens
tcagaagatactagattctggaaaggttttacagacatttcaccagaggaattgaggcttgaataccataacttcttaaccag

SEQ ID NO: 282323 - DNA, 75 bp, Homo sapiens
ggcctgttaggaaccaggctacagagcaggagtttgaatcagcttgggtactgacaaatattgcttcaggaaatt

SEQ ID NO: 282324 - DNA, 90 bp, Homo sapiens
caccaaggcactggctgtggtctacggcccgcacgaggaaagaaagaaatctcgttttgggaatgctttccacctgtgtcgggaagttct

SEQ ID NO: 282325 - DNA, 82 bp, Homo sapiens
gccagccgcaccatgccgctcctaagcctgcacagccgcggcggcagcagcagtgagaggatccctgctgccttggtgatcc

SEQ ID NO: 282326 - DNA, 82 bp, Homo sapiens
ggacccgggacaccgcacagccgggaaatgacggccgaagccctgcagcccacgctacagccggagatgcagctcgagcacg

SEQ ID NO: 282327 - DNA, 100 bp, Homo sapiens
cgtgatggatccttgatagtttcaagtagctatgatggtctctggaaccacgtgaatgttgagggggcgacacacaagcaggtggtggacctgattcgag

SEQ ID NO: 282328 - DNA, 102 bp, Homo sapiens
aagcgtcgagatcccgggcgggggcaccgagggctaccacgttctgcggacgaggacctattaaacttggaatggctaaaatcacgcaagtcgactttcctc

SEQ ID NO: 282329 - DNA, 98 bp, Homo sapiens
aatgccaccaagtatggcaacatgacagaggaccatgtgatgcacctgctccaggggagccttctcggtggtgcgaaggtgtgtgaaggtgctggctg

SEQ ID NO: 282330 - DNA, 97 bp, Homo sapiens
gcttatgaacctctactttgcccaggtcaatggccagcaaggaggggggtccgagccggcggcggcggcggcagtggtggcagcgggagacaaatgg

SEQ ID NO: 282331 - DNA, 80 bp, Homo sapiens
agccgcctccgagcccgccgccacatcctctgagtcccttaagctcctaggatttttagatgttgaaaatactccctgcg

SEQ ID NO: 282332 - DNA, 101 bp, Homo sapiens
ggaatctgtatgtctttgctctgatgttcttgtatgcaccatcccataaaaactatggagaagaccagtccaatgaattctgcttggtcagaatcgtgatg

SEQ ID NO: 282333 - DNA, 100 bp, Homo sapiens
tgcccaagcgacagctgtcagaggggcaggagcttctgggagccaccgtctgaaggcagtatttggcagtcgtattcagagataaacccctggagctatg

SEQ ID NO: 282334 - DNA, 50 bp, Homo sapiens
cttgaacaaaataattgggacttagtgaaaaaagcttggccagaccacaa

SEQ ID NO: 282335 - DNA, 82 bp, Homo sapiens
tgagagtgaaagtcgccatgtctgtgaccttactttcaggaatcattcaggcccgtggtcgagccagagctgatgagagcac

SEQ ID NO: 282336 - DNA, 100 bp, Homo sapiens
actggacagcgaggacaaggacaaagaaggcaaacccctgctgaaggcctctctgctcctgtcttttgtttggatgccggcgctgctgcctgtggcctcc

SEQ ID NO: 282337 - DNA, 80 bp, Homo sapiens
gccatggttctcactaaaatgaaagaaaccgctgaggcttatttgggaaagaaggacctgggctatcccttggagcttgg

SEQ ID NO: 282338 - DNA, 100 bp, Homo sapiens
aggaattgaatccagaaatgggaactgacaatgatagtgaaaattggaaggaagtgcataagatggtggttgaaagtttctcatcccagtttccccagcc

SEQ ID NO: 282339 - DNA, 98 bp, Homo sapiens
agacctcgtggaagcgctggaaaaatttgggacaatatgaactgctctacacttggcctgtgccagtggccatgtgcaagtggtcactctcctggtta

SEQ ID NO: 282340 - DNA, 74 bp, Homo sapiens
cggacgggttgtgcctggaggtggaggggaagatgcggttcatgctattattcagccggcagggaaaactgcgg

SEQ ID NO: 282341 - DNA, 100 bp, Homo sapiens
ttagtttcctacacttcatcacttccagctcaggttggaaccataatggactcctcctatagtgccaataggttttactgcaatcacagcaaccaacccc

SEQ ID NO: 282342 - DNA, 73 bp, Homo sapiens
gcagcttccaggatcctgagatccggagcagccggggtcggagcgggtatagctgtggaccaactgtatatga

SEQ ID NO: 282343 - DNA, 90 bp, Homo sapiens
agaagatctgggtgcccgtggaccacaggccctcgttgcccagatgcttcctgcttttccgaagccttccccgacataccttcggactag

SEQ ID NO: 282344 - DNA, 82 bp, Homo sapiens
gatggtcttcctgctggggctcatgtttgaggtgcaagaaagcctttgaggtgaaggtgtatgaaagtcatcataacagatg

SEQ ID NO: 282345 - DNA, 83 bp, Homo sapiens
gggactttacagctttgatcgatttctgggataaggcggtatatattgcacccctaaaagccctagtacgtgaaagaatggat

SEQ ID NO: 282346 - DNA, 75 bp, Homo sapiens
atggcaagaaaattaaaactaatatcacacttgtatgcaagccaggtaagaatgattgatgttggctgatattgg

SEQ ID NO: 282347 - DNA, 51 bp, Homo sapiens
aaagtagtgtggcacagataaaactttgctatcaacttcaaggtgggctcc

SEQ ID NO: 282348 - DNA, 88 bp, Homo sapiens
agaaacaggccatggagggacaggatccggaggcgccagctcaaccggtcttcctgagagctatcaacaagtttgcagaaaccatgaa

SEQ ID NO: 282349 - DNA, 100 bp, Homo sapiens
ccgaggagttcaaggcctgcctcatcagcctgggctacgacgtggagaacgaccggcagcagctctaccagatccagcaagtcaccatgcctgcgggcca

SEQ ID NO: 282350 - DNA, 100 bp, Homo sapiens
acggccacaggggcggcgacggcgcagtgcgaagcgaaacagctggaatgcttgctgattcctctgcacacttctaaggctgagaacctgaggaacccag

SEQ ID NO: 282351 - DNA, 74 bp, Homo sapiens
tataatgtctatggtgaagtcttttgtacagtggttagattgaccttgtacaaataaaacagatgttcgctcag

SEQ ID NO: 282352 - DNA, 83 bp, Homo sapiens
gatctcctgccttccttgccgtcatcttcacggacagagcaactgaagcagcagcgggacaagctgaggcagtaccagaagag

SEQ ID NO: 282353 - DNA, 83 bp, Homo sapiens
cgccgcctggacggccgcactctccctgcccgagacccggtgtcgtgaaaactacccctaaaagccaaaatgggaaaggaaaa

SEQ ID NO: 282354 - DNA, 75 bp, Homo sapiens
cggggagctgaacgtggacagcctcatcacccggctgctggaggaattcagcttagagaactatcaacacaggac

SEQ ID NO: 282355 - DNA, 74 bp, Homo sapiens
atcgggctgaagcgactgagtccgcgatggagcctgcagcccactactcgggagctgagaagcagatttggtgg

SEQ ID NO: 282356 - DNA, 75 bp, Homo sapiens
gggggattctcgacctgctaacagaactggaccttttcggtacccactgatggtaatgctggcctgctggctgaa

SEQ ID NO: 282357 - DNA, 50 bp, Homo sapiens
gaaggctcggggctgaagcggctgagatctgtatctgtggacctgaatgt

SEQ ID NO: 282358 - DNA, 75 bp, Homo sapiens
atacagcagagacgtcatacttggaaatggctgcaggttcagaggaaaagactactttgtgtgtatccattctgg

SEQ ID NO: 282359 - DNA, 98 bp, Homo sapiens
gatactctgcaattcctgataaaaggtgatttgaagatattaaagctagaaattggaactagaaaatcaaaagaattcaaggcatcttaacgtgacag

SEQ ID NO: 282360 - DNA, 100 bp, Homo sapiens
cctctttttcccccttgcctggctcctgtggtggcaggctgggcacgaggaccatgctgggccggagcctccgagaaaaaaactgttcttgaaaaccacc

SEQ ID NO: 282361 - DNA, 74 bp, Homo sapiens
ggggatagtgaaggtgctacggtgcaggatcagttcttaagagcagccccggtaactggaggaatgggagccgt

SEQ ID NO: 282362 - DNA, 75 bp, Homo sapiens
atcccgactgtaagcaatctacgaagaccgaggaaaagctgcggtctgatgccaatgcaagttacttaagagcag

SEQ ID NO: 282363 - DNA, 50 bp, Homo sapiens
cgcagtcctaccccattgtgacagtgttgttacagatcttataacagtcg

SEQ ID NO: 282364 - DNA, 100 bp, Homo sapiens
tattccccgatcaaaactggagaggcagatggctcagtggcagaaatctgaagctatcatggaacaattgaagtcttttcaaataattgctcatctaaag

SEQ ID NO: 282365 - DNA, 50 bp, Homo sapiens
tttatgttgtgtcatttcgaaggtagagacggggtttcacgatgttggcc

SEQ ID NO: 282366 - DNA, 74 bp, Homo sapiens
cgggcgactggacggccggacagaactgggcacctccgggctgtgaaaagttagggaagtgtctgacacctcca

SEQ ID NO: 282367 - DNA, 51 bp, Homo sapiens
ggcatggcagacaaatctgtagcatttcagatcccccagaccagatgacct

SEQ ID NO: 282368 - DNA, 96 bp, Homo sapiens
ctgcgagcgagccgcgaaccgagcgggcggcgggcgcgcgcaccatgggggagaaacccgggaccagcctcctgctcttcatggatgaagcagacg

SEQ ID NO: 282369 - DNA, 78 bp, Homo sapiens
ctggagcagccggaccagcccagaaggcagcggcggcccaggccagcattcccgcactccagaacctgggtatcaacc

SEQ ID NO: 282370 - DNA, 75 bp, Homo sapiens
gaaggacgaggctgaggcgagaaacgaggttggcgtgcagtggtgtgatctcagctcattgcaacctctgcctcc

SEQ ID NO: 282371 - DNA, 100 bp, Homo sapiens
atccccttcgaccccaagttcatcacctaccccttcgaccagaacagccaatgttttcagttgcaccaagcttagccaccaatgcatcagcagccgcctt

SEQ ID NO: 282372 - DNA, 104 bp, Homo sapiens
cattgatttcccggatctggtaacatggcaaaagatttttagaaagagcgttttcgctacgtaaagcacattcgataaaggatatggaaaatactttgcagctg

SEQ ID NO: 282373 - DNA, 75 bp, Homo sapiens
cgttttggcattgcagctaaatatcagttggatcccactgcttccatttcttttgctgatggccgccaaagttgg

SEQ ID NO: 282374 - DNA, 96 bp, Homo sapiens
cgggggtgctgcagaggacacgaggcggcgggctggagacatggaccgcggcgagcaaggtccatctgggaagcgggatttgggttgatgaggaga

SEQ ID NO: 282375 - DNA, 100 bp, Homo sapiens
cagaaccagggtgacatcaagctctgtgagggtttcaatgaggtgctgaaacagtgccgacttgcaaacgggccaaaagagaaacattggctactttgac

SEQ ID NO: 282376 - DNA, 100 bp, Homo sapiens
ctgcaggaccaacctctcctctggatgctctaggtgcgtagtttctctgaaaagcatcacccaggtcagaatgaaaggaaactctctgtgcagaccgctg

SEQ ID NO: 282377 - DNA, 80 bp, Homo sapiens
cttggggaatcacaaatggttctgcaacagcaatcaaggtggaagccccagcagataatacatatgtgtcaagttcagag

SEQ ID NO: 282378 - DNA, 83 bp, Homo sapiens
gcggccctcagggcacagcccaaggctgtcagcctcccggcccagacaatgcagatcttcgtgaagactctgactggtaagac

SEQ ID NO: 282379 - DNA, 90 bp, Homo sapiens
tactatacaggggtcccgggcctccccagcaccttccagtatgggcctgctgtgttccctggagaacctaaagaagtagttaaacctgtg

SEQ ID NO: 282380 - DNA, 90 bp, Homo sapiens
catcttggatccgcgggacaagaaaattcatgcgatcccctcagcagagtgtgtttaagaccaaaaaatgtaaccgattcattgagcacc

SEQ ID NO: 282381 - DNA, 96 bp, Homo sapiens
agatacaaagacagaccatcccagttgaatgctgtcttccaagaacagaagaaaatgatccaggcccagaaccccccaggtctgcctagcattgct

SEQ ID NO: 282382 - DNA, 74 bp, Homo sapiens
gttaatcctcaatttaagcctgatctaacccctagaaacaggtatgttgagtctaaaaaggacagagtcacagt

SEQ ID NO: 282383 - DNA, 100 bp, Homo sapiens
ctgggctgagcggccggcggcgcgggcccggcggcggcggcagcggggtccgggtccggagcgccacacggcttcatatacagatagctctgatgatgag

SEQ ID NO: 282384 - DNA, 100 bp, Homo sapiens
tgaagcccctggtgtgcgggaagcgagacagggcagggcattgttcatgcactgaccgacctcagcagccccggcatgacctcagggaacggaaactctg

SEQ ID NO: 282385 - DNA, 74 bp, Homo sapiens
gtaagattgtcttggaaatactaagttgggaaactaaatatattttgccaactttggaaaaagaattattcttg

SEQ ID NO: 282386 - DNA, 100 bp, Homo sapiens
cttcgcccggctttgcagcggggacttcggcggcggcgcctcaggcacctcggcccggtctggctcttgctgattgaattcctttggtgcagtttagcat

SEQ ID NO: 282387 - DNA, 73 bp, Homo sapiens
ggagacctcgctgcgctcatggcgtcgcccggttcaaaaggtgatgacctatcaacagccattctcaaacaga

SEQ ID NO: 282388 - DNA, 96 bp, Homo sapiens
tagggacaaacctatcacatttactcaggtgactgaatgtctgaccaccgtgaagtcagtcaacaaaacggacagtcagaccctcctgaccacatt

SEQ ID NO: 282389 - DNA, 75 bp, Homo sapiens
ccaaagcctgcccagacggctcacctgtgcgggatggaacaaaagtggagatggctatttcgaaaacagcccact

SEQ ID NO: 282390 - DNA, 100 bp, Homo sapiens
tgatcaaccgacgtgatgaagacattttccgctacttgaccaatctgcaggaatgtctgatcacagatacggggatggtggctctactttccagagcaca

SEQ ID NO: 282391 - DNA, 100 bp, Homo sapiens
gtccacgctgatggactgccgtagacatctgactgcagccatgagcagcaatgagtgcttcaagtgtggacgatctggccactgggcccgggaatgtcct

SEQ ID NO: 282392 - DNA, 100 bp, Homo sapiens
cccccatcgagtcgctgatccctgaagaccaaatagtgaaactggaacgccaagctgaagaagaacgaatacggaagcacaaagcagctgctgagaaagc

SEQ ID NO: 282393 - DNA, 96 bp, Homo sapiens
agcggcggcgagcgctcgcgagcggctgcgggacgcgaggtttccggccatcgacgagtacaagccccaggatgctaccaccaacccgtccctgat

SEQ ID NO: 282394 - DNA, 78 bp, Homo sapiens
ttatgcaacatgctcagcaggagcttcatcaacgatatatgtcagatctaaagtcctgtgcctcctgattgctgagtg

SEQ ID NO: 282395 - DNA, 75 bp, Homo sapiens
gctgcgtgggcatggaggactaggtcaccaaaaaggaggcgatctagatctggttctagatctcgaaggtctcgg

SEQ ID NO: 282396 - DNA, 96 bp, Homo sapiens
agagcagcggcggcggggagcgaccgggagcggcggcagcggcggcgcggaggcggctgaggtgcgagccggtttgaagaagaactgaccagcaag

SEQ ID NO: 282397 - DNA, 98 bp, Homo sapiens
ataccaacgccaaacgcacgagtattacccctatctcagcagtgatggggagagccatagcgcaatgttcatggctcccgctcagatggcatatccca

SEQ ID NO: 282398 - DNA, 90 bp, Homo sapiens
gtcggtacagtctctgcacctcgcgccccagcagaatctgatattgatgctgctgctgcaatgatgcttttaaatacttctatagaacaa

SEQ ID NO: 282399 - DNA, 99 bp, Homo sapiens
ttgaacttttcctgtgggctgtcaggacccatagaaggtctttgagcagactgtcagcatcaataaggccattaatacgcaggaagtggctgtaaagga

SEQ ID NO: 282400 - DNA, 98 bp, Homo sapiens
cctcctcctcttcggcggcggcagcgtccaccatcttcctcttgctgccagtggtagcgctcgtctggcggagctggctttccccacaaataaaccag

SEQ ID NO: 282401 - DNA, 96 bp, Homo sapiens
gcgggagctggacgcgggaggaggcggcggcggcggttaccttttcgacaaaatgattcatctagtcattgccagaagagtgggtctcctatttcc

SEQ ID NO: 282402 - DNA, 87 bp, Homo sapiens
tgctgctgctgctgcccgcgtccgaggctcgcgggcggcgggcccgggttaatttggagtggcccctggagtcagtttcctacacca

SEQ ID NO: 282403 - DNA, 100 bp, Homo sapiens
aaaatatctgatcttaccctgggacacgtaaatggtcttcagttaaagatgacacccccaaccatggttgtgaagatgctagcgacacatcgctgttggg

SEQ ID NO: 282404 - DNA, 75 bp, Homo sapiens
ttttagaagtccgaaatgaacatttttggaccctaggttttggctcattggttaatgttcgtgaagaaattgaag

SEQ ID NO: 282405 - DNA, 75 bp, Homo sapiens
ctttggttcacaacatcatcaaatggtcagcccaaggccaaccccactgtcactctgttcccgccctcctctgag

SEQ ID NO: 282406 - DNA, 100 bp, Homo sapiens
caaggcatctgtgagcccgcggagtatacaccatgagcaaagctcaccctcccgagttgaaaaaggtttcgaaaaaacgatgaaatgaaagctatggatg

SEQ ID NO: 282407 - DNA, 50 bp, Homo sapiens
ctcttctccctccccttcttgatgctgggctcttgcactgtttggtggaa

SEQ ID NO: 282408 - DNA, 75 bp, Homo sapiens
accctgagcaaggaaaatctgaggatcgtatacatgggagtgtcgctctggaaacattaaggcagcagcaggcac

SEQ ID NO: 282409 - DNA, 73 bp, Homo sapiens
cgcggccctgcgaggtccgaggggtgaaatgacaatggatgctctgttggctcgattgaaacttctgaatcca

SEQ ID NO: 282410 - DNA, 74 bp, Homo sapiens
aatgctaagaactgctgggaggatgacatcctcttactcccagttactggcagctacatgccttaccaagcttg

SEQ ID NO: 282411 - DNA, 75 bp, Homo sapiens
gtgtcagtgttaaaggaacctctacaacgaaggtgaagccacggaagataagggactggtgattgcagctggaag

SEQ ID NO: 282412 - DNA, 75 bp, Homo sapiens
ccgggaggtcaacgaggtcatccaggaatgctgtctctgcaatttgagaggaggtgctcttaagcaaacgaagaa

SEQ ID NO: 282413 - DNA, 75 bp, Homo sapiens
attcacatacgtcaaggaaattgagtctgcgctcctcagaccaccggcaggtgaacagcctgatgcagaccgagg

SEQ ID NO: 282414 - DNA, 100 bp, Homo sapiens
caggatgctgatagtctccagcgggcctggactgtgggctggtgtgtggaactgagtgtcaatccatatctacaaggacagagactggataatgttgttg

SEQ ID NO: 282415 - DNA, 120 bp, Homo sapiens
cggagtcaaccagctctagacataatagtgaaagtgaatctgtgccatcgagctccttcctcagagaagcttcctgttatgtaccttatggattctattgtgaaaaacgttggaagagag

SEQ ID NO: 282416 - DNA, 80 bp, Homo sapiens
cgccgcgggacctctccgggccatggcttccccgggcgctgcctggacaggcctgcctgcgtgctgggacatgtctggcc

SEQ ID NO: 282417 - DNA, 82 bp, Homo sapiens
cagacgtgagctgagggcgcagaggcaggcagaaaccaaggtgtatgttggtaacctgggaactggcgctggcaaaggagag

SEQ ID NO: 282418 - DNA, 73 bp, Homo sapiens
aggagagaatactactttgcaataacaatggaaaggtcatttcaagttttgatgatgatggttcagaatttca

SEQ ID NO: 282419 - DNA, 85 bp, Homo sapiens
gaactggctcagtttatcacttcctgaaagacctgaaggatgtcctggaacaggtggaggcctatcaagctgaggctcgtgaggc

SEQ ID NO: 282420 - DNA, 100 bp, Homo sapiens
aatttggccagttatccaattgatgaactagtagatagagccaaacaatcttttcaaggggcagaggcctggcctccaggggtttgtcttaaatatgtcg

SEQ ID NO: 282421 - DNA, 100 bp, Homo sapiens
tgccgggtcctcaaaattataaccgccactggatctgcgctgtgcgatcaggatcctcatgaccagccaaagagaagaagaattaggaagcataaatcaa

SEQ ID NO: 282422 - DNA, 75 bp, Homo sapiens
ctagtgaaaagaacaagaagtcttaccctcaggtcaaacatttcagagaaaagctgccttcgtatggaatgcaaa

SEQ ID NO: 282423 - DNA, 100 bp, Homo sapiens
ggtggcaaccgcctgtgtgccactgaaaatcgtgccgatgcctggcatactgcataaatggaagcagggtaccgcaaatgttcccactgccaggaggcag

SEQ ID NO: 282424 - DNA, 82 bp, Homo sapiens
caatttatcattgaataagtgttttaagaaagtggacaaagagaggagtcagggatcgcttacacctgagacgaactacaga

SEQ ID NO: 282425 - DNA, 98 bp, Homo sapiens
cgagaccgtgaccgagagcgtgaccgagagcgcgaatatcgtcatcgttagaaggacatggtctgctatacagctcagactctcgtccgaatcctctc

SEQ ID NO: 282426 - DNA, 96 bp, Homo sapiens
aaccccggagcccggccccggggaactagggagcgtctccggctgcacagcgctcagggctggttgatatgtgaagagccaacctgtcgcaatcga

SEQ ID NO: 282427 - DNA, 75 bp, Homo sapiens
gtgcaggagtaataggtgtagaattgtttgaatcagcttgggtactgacaaatattgcttcaggaaattctcttc

SEQ ID NO: 282428 - DNA, 101 bp, Homo sapiens
catccaccctggcagaggagtttacctacaaccccttcatgagagtgagggccccgagcacgacagccgcagtctccacccagaaccagagagtccccccc

SEQ ID NO: 282429 - DNA, 75 bp, Homo sapiens
tccagaaaatcttgtggacaaatccaggggaagcatttgatgaatacagaaatatcagccaaaaggacattgtgg

SEQ ID NO: 282430 - DNA, 120 bp, Homo sapiens
agatccacagctaagacgccaggacccactggaagcctagaaatgggacaggagagagtggcaagagtacgtttatcaagcagatgagaatcatccatgggtcaggatactctgatgaag

SEQ ID NO: 282431 - DNA, 128 bp, Homo sapiens
gtgacagccagtgagaagaatgagtataaaggatgggttttaactacagacccagtctctgccaagcaactcatgcagcaattccagaaccccgacttcccacccgaagtagaggaacaggatgccag

SEQ ID NO: 282432 - DNA, 82 bp, Homo sapiens
ctcagatctgtggagcagatccgatggagaggctgagctgctccaggacttggggaaaatatatgcagatgatgaacattct

SEQ ID NO: 282433 - DNA, 74 bp, Homo sapiens
cccagaccttcagcccgtggcccggatgcaggacagacccctcaggttccagcttcctggggcctggaactttc

SEQ ID NO: 282434 - DNA, 82 bp, Homo sapiens
gttgtgataaggcagctgcaaaaagcggcagcttaaagcttttcaagccaggccaagaagctgtgaagtaccagggtcctcg

SEQ ID NO: 282435 - DNA, 50 bp, Homo sapiens
ggaagaggaagacatggacagctaccagcctccaaaggaattcaaaatat

SEQ ID NO: 282436 - DNA, 98 bp, Homo sapiens
gaggatttggccagagcgttttgtgtgagctccacctgacacctttacatggcatcctgcagctgcggcccagcttctcctacctggataaggctgac

SEQ ID NO: 282437 - DNA, 50 bp, Homo sapiens
cttaaaaccgaagaggaggacgcccaggatccggttgtggccgtggctga

SEQ ID NO: 282438 - DNA, 100 bp, Homo sapiens
ctaacatggataagcatgccctgaaaaagtatcgtcgagaagcctatcatcgactttatattcagagcaccaatcaaattaagcaagcctggggaacttc

SEQ ID NO: 282439 - DNA, 74 bp, Homo sapiens
cctgtggctgtgcagactgctaaaacaaaggatgtgtatggggtgttgcttacagattgccagtaggaaaggaa

SEQ ID NO: 282440 - DNA, 90 bp, Homo sapiens
gcgttctgcactcacgtctttcctgagactgcgtttatagcagtgacttcctaccagaaccacaagtctgctgtaggctttgaataccag

SEQ ID NO: 282441 - DNA, 100 bp, Homo sapiens
gcaaaatataaggagtggttgccacatcttctggttgctggatttgacccactgattctactgtgcaattcttggtggagtgtgttactcttggggctgg

SEQ ID NO: 282442 - DNA, 90 bp, Homo sapiens
gtgaggggggccttagagggcctccccaggccgcctccgcccgtgaagggcatggatttcattggtcgcgacgccctcctgcagcagaag

SEQ ID NO: 282443 - DNA, 74 bp, Homo sapiens
aagaaacaaaaaaagctatcaaatatcagagcaaggcaagaagggtccaagcagctcagtctgaggctaaggtt

SEQ ID NO: 282444 - DNA, 90 bp, Homo sapiens
ttgtgaatctgatacccttgaggctcttctactgacagcctctgaaagcttgcttggctcaggaacaacagaagagaataaagaaaatga

SEQ ID NO: 282445 - DNA, 82 bp, Homo sapiens
cgaccttggacttctcagcctccagaatgccttgcaaaataccctactaaataaatcattttagacatggagtgcaggtgga

SEQ ID NO: 282446 - DNA, 97 bp, Homo sapiens
gctgaccagaccctgtctctgatggagcagctccggggggaggcccttaagttccacaagcctggtaagcggaagggtacagccaatgcccgaatgc

SEQ ID NO: 282447 - DNA, 96 bp, Homo sapiens
ctttagcagagttttttgaagaccttgcagacaagccatacacgtttgaggactatgatgtctcctttgggttgtggtcagaaatgagaagacatg

SEQ ID NO: 282448 - DNA, 101 bp, Homo sapiens
aatccagatgctggatgacacccaggaggcatttgaagttccacattttgaaagcgaagcagaagccgtagaatcagcggcgagcctgttgaaagaaccca

SEQ ID NO: 282449 - DNA, 98 bp, Homo sapiens
ctgggcaacagaatattggtcaagttgctgaccttgaagaacagcatatgccatatatgagctggctgtggcttcatttcccaagaagcaggagtgac

SEQ ID NO: 282450 - DNA, 76 bp, Homo sapiens
ggggacagagtgcagctcctaaacctgctggtgacacgactcagacagaaggaatttgctgacacaatatcttccg

SEQ ID NO: 282451 - DNA, 100 bp, Homo sapiens
ggctggtggacgaccggtggctgtggcgacatgtcgacctgacgctctacacgtgcacgatctgattttctggagagatgtgaagaagactgggtttgtc

SEQ ID NO: 282452 - DNA, 100 bp, Homo sapiens
aaaggcggcagtggtagtttccaaatcagtgaagaggaagaaaagttccaaatcagaggccaagggcactgtgtcgaaagtcactgggaaaaaaatcacc

SEQ ID NO: 282453 - DNA, 75 bp, Homo sapiens
tacctatgtacctgttaccactttcaaaagaatgcttctagtcacaacagacacccttggccatgactttcatgt

SEQ ID NO: 282454 - DNA, 74 bp, Homo sapiens
aagaaagctgcgttaatgtttgcaaatgcagaggaagaatttttctatgagtttgcagagcagtctctgatgaa

SEQ ID NO: 282455 - DNA, 99 bp, Homo sapiens
ccgcaccgcggcttaaatgatgtattttgtgatcgcagcgatgaaagtgatgaacggcagcagccactcaccaacagccatcaatggtgcaccgtgcac

SEQ ID NO: 282456 - DNA, 83 bp, Homo sapiens
atcgacgtcgtgatccagaagtccagagctgaggactgcctgtttgcagggccagtactgtgacatctgcacggctgccaaca

SEQ ID NO: 282457 - DNA, 83 bp, Homo sapiens
caaaggataataaactagttgagaagcagaacccagctgaaggactggaattgattcggaaggccatgcagctaactttgtag

SEQ ID NO: 282458 - DNA, 100 bp, Homo sapiens
ccgggtagcttcccgacttatcgacatgagcaggcaccaaggagcccaggtgcggcccggagcccactgaagtcttcactgtcggacccaagaccttttc

SEQ ID NO: 282459 - DNA, 100 bp, Homo sapiens
ggcctcttgcgctacgccctggatgagatgggacttgccatgaggtgttgaagccttgtttcactgagttggagagactggacctaaatggcgcagcatg

SEQ ID NO: 282460 - DNA, 120 bp, Homo sapiens
cttttgttgaatttgaagatccccgagatgcagctgatgcagtccgagagctagatggaagggaatgcaagtccccgatacatccgatgtacatcctataatatcccttgcacatctgac

SEQ ID NO: 282461 - DNA, 100 bp, Homo sapiens
ctcgtgcttccagtgtttggctctgtgcgaaacagaggtcttagtggtgcaatggctagtataagcgtgcgttcgagtaccccaggctctcctacacatg

SEQ ID NO: 282462 - DNA, 90 bp, Homo sapiens
gtccaaggatgaatcccagtccctgttacgggagggatttgttcgtgttgaccgagattatgtgctgaagtctgcagagctggcaaaagc

SEQ ID NO: 282463 - DNA, 101 bp, Homo sapiens
ccgccctgagtcactgcctgcgcagctccggccgcctggctccccatactagtcgccgtttgctaatccagactttacacaacctatctcagaagttgtag

SEQ ID NO: 282464 - DNA, 97 bp, Homo sapiens
actgccgccgccgcctctttcatctcttctggggcaggggccagggccaggaaacaattgaagatgttgaagaaatgctcaacaaccttcctggtgt

SEQ ID NO: 282465 - DNA, 100 bp, Homo sapiens
tcggtgaacgttcagctgctgcaggaccacggggaaattgccaagagaaaattgcctaagaattatgacccaaaagttaccccagatccagaaagatggc

SEQ ID NO: 282466 - DNA, 88 bp, Homo sapiens
actgtgaagagtgaggagaccatagctgcacagccagatggcccagaacattggcaggcattactgcatatctgcagtgtacgcggaa

SEQ ID NO: 282467 - DNA, 100 bp, Homo sapiens
tttggcattgacatttaattttagggtcctttatatagaagggagagtagtgtgtggattctcatgccatataacttgtgtaaacaaagctccaaccact

SEQ ID NO: 282468 - DNA, 99 bp, Homo sapiens
ggaacttgccctgtctcctcgcagatgagctccctcgtgaaagatgcttctgttcctctgattgatgttacaaacctccctactcctcgaaaattcctt

SEQ ID NO: 282469 - DNA, 88 bp, Homo sapiens
actatgtacgctacatggtagagaaccacggggaggactataaggcttattgtgtaacagaacctggagcaggctctgatgtagctgg

SEQ ID NO: 282470 - DNA, 50 bp, Homo sapiens
tcctatgtggacgttggcactgggaaggctgaccccgcactacatctacc

SEQ ID NO: 282471 - DNA, 82 bp, Homo sapiens
cgggccaggagagcgctcggcggagggagagacaagctcaacgagaagatgccctcgagctcacggagaagctagaccaaga

SEQ ID NO: 282472 - DNA, 50 bp, Homo sapiens
cctgaagcagctgctctagtgaagacctcagcagccatgtcgaagcccca

SEQ ID NO: 282473 - DNA, 50 bp, Homo sapiens
cttggattcagacgccgattcgcccagggtgtatgccatgtacaattccg

SEQ ID NO: 282474 - DNA, 50 bp, Homo sapiens
aacacagtcttcagccctacattagttgctcttcaaaaaatggactcaat

SEQ ID NO: 282475 - DNA, 75 bp, Homo sapiens
ctgtgacttcagagacactgccaagcagccttagccctagtgtagaggtcttgatgcagaactttattatgtgag

SEQ ID NO: 282476 - DNA, 80 bp, Homo sapiens
tcctcgggcagcggaagcggcgcggcggtcggagaagtggcctaaaacttcggcgttggctttgtgtccctggtgatgtt

SEQ ID NO: 282477 - DNA, 51 bp, Homo sapiens
ccacagctgacccataatggacattaaggacagtcattttgtttactcatt

SEQ ID NO: 282478 - DNA, 90 bp, Homo sapiens
gcgccgcgccctggcggctctagggaccccccccgcgcctgcacttagccccgcgcccgaggtgctggagaatctggtaaaagcaccatt

SEQ ID NO: 282479 - DNA, 82 bp, Homo sapiens
ctatggggagaaaaaagattcagattacgaggattatggatgaacgtaacagacagatgttgtaaattttgatgacatagct

SEQ ID NO: 282480 - DNA, 100 bp, Homo sapiens
ccgccaccaccgccaccggaacccgagaccgagtcagaacccgagtgctgcttggcggcgaggttggtcaaagaaaaagtgatgtatgaaaaagaggcaa

SEQ ID NO: 282481 - DNA, 100 bp, Homo sapiens
ggtgatatgatctgtcctgaatgtggcttggttgtagattgcttccaagtatgatcatcaggcagaagaagatcttcgcaattggatagaagaggtgaca

SEQ ID NO: 282482 - DNA, 100 bp, Homo sapiens
cgtgaagaagcaggaggctaagaaagtggtgaatcccctgtttgagaaaaggcctaagaattttggcattgttacatgggaataggactctcggctcaag

SEQ ID NO: 282483 - DNA, 82 bp, Homo sapiens
aggatacagctatgcaaatatagaacactaaagtgttacatgacagatgtatgaggtcaaatttgagctgattgtgtcagag

SEQ ID NO: 282484 - DNA, 75 bp, Homo sapiens
gcggaaggcattgctgggagcctgaaaactgtgaatgcagataatcaccagaatgggagtgaatgacttgtggca

SEQ ID NO: 282485 - DNA, 87 bp, Homo sapiens
gaattcggtttgtaggtcgtcagaaagagatcatggaagggaagtggttgctgtgtatgttactggtgcttggaactgctattgttg

SEQ ID NO: 282486 - DNA, 100 bp, Homo sapiens
ccctctcagcaagaacgggaacaaaactctggcatgttatttgaaagcaattgagacgcaaccgaactttgcagtagcttggagtaatcttggctgtgtt

SEQ ID NO: 282487 - DNA, 82 bp, Homo sapiens
gagatcctgatgaagttcgagcactaatatttaagaaagaagatgttaactttcagaaaggcctaaagaatgtatttgacga

SEQ ID NO: 282488 - DNA, 51 bp, Homo sapiens
tttgccggagccatggaatttgctgaagtgcccaaggttgaagcaatgaat

SEQ ID NO: 282489 - DNA, 125 bp, Homo sapiens
aaggtggatgaggttcctggcttatcagggcagtccgatgatgtccctgcagggaaggctgcagaagatgtcaatgttactttcgaagatcaacaaaagataaacaaatttgcacggaatacaag

SEQ ID NO: 282490 - DNA, 100 bp, Homo sapiens
cgattgggagtgacatactttgtggttgctgtgttggagctcctctttgctaaacctgtgcctgaacattgtgcctcggcttcctgtttgatgaagatag

SEQ ID NO: 282491 - DNA, 95 bp, Homo sapiens
tacgtgtcccccgaggatctggaggcacagctgcagtctgacgagagggcaccagagcctggtccgctgttctcagctgtttgccgtctgcgcag

SEQ ID NO: 282492 - DNA, 97 bp, Homo sapiens
gcgcggcggccccgggaccaaggagccatcctggtgatcgagttcatctacgccatcgtgggcatcgtctggctcactcagtactacacctcctgca

SEQ ID NO: 282493 - DNA, 82 bp, Homo sapiens
gggcatcgtgtctcgaccgcgtcttctgagtcaggctatggaaagggcaaatggaatggagctggatggtagaagaattcgg

SEQ ID NO: 282494 - DNA, 74 bp, Homo sapiens
gtttcggcacatggagattgatcgatcaccagaatataccaattgtcggtatctatgcaaactttgcttaattc

SEQ ID NO: 282495 - DNA, 97 bp, Homo sapiens
actattcagacagcggcttctctgttggcctctcagtttggaaattttagcattcaggtgccaggaatgcagatgggacagccagtgccagaaacag

SEQ ID NO: 282496 - DNA, 83 bp, Homo sapiens
ggaagaagcccgcaaggtcaagaggctacatggcatgctgcgggcctgagacctgggaggaagctggagaaaagatgccctct

SEQ ID NO: 282497 - DNA, 96 bp, Homo sapiens
gcagtgtaggagatggagaaactgtagagtttgatgtggttgaaggagagaaggtgaagacattcagtgaagcttgcctgatggtaaggaaaccag

SEQ ID NO: 282498 - DNA, 100 bp, Homo sapiens
ccgctgcccgcggctgcagtcggggcggcagctgaggcggaggctgacgaggaggcggatcccccggcgtcagtatctcctggctatggtcatagcgtat

SEQ ID NO: 282499 - DNA, 90 bp, Homo sapiens
ggccatgtgtgccacctgtgccatccaaactgcacctacgggttgtttgactggctggtatcagtgatcaacagcagcatctgtgcagac

SEQ ID NO: 282500 - DNA, 98 bp, Homo sapiens
tcaatgatcggcagtttgttcacgaccctcaacttggctactccctgccttgtgtggtgatgatccagtaaatgatttcatagtccaccaaacggtca

SEQ ID NO: 282501 - DNA, 100 bp, Homo sapiens
gcgaccagatcttccaggacgagacgggcaagaaccgaatttcagaaactgtggaggagtgtcactgtagattccatggacgaggagaaaattgaagaat

SEQ ID NO: 282502 - DNA, 75 bp, Homo sapiens
gaaaacttcgaggcactcaagtcctggctcagcaagactctcgagcccatattactgtgccatgctatgaaggac

SEQ ID NO: 282503 - DNA, 75 bp, Homo sapiens
catggcggatccagaattctgcggaccatgtgtcaacttatgccgcgtttgtacagacgcatagaccaacagggg

SEQ ID NO: 282504 - DNA, 75 bp, Homo sapiens
gaaacaggcacacaagtgtgaggagttgctaaatgctcaggcattgaatgccccagaggagcccgaaacctccca

SEQ ID NO: 282505 - DNA, 75 bp, Homo sapiens
taaacccgggacccacttcactccagtgcctccgacgcctcctgatggacgtctgctcactggagatgacacgtg

SEQ ID NO: 282506 - DNA, 100 bp, Homo sapiens
cgcgaatatcgtcatcgttagaagggaatgaaagctactggttgattttaaagtgcctgggcctcacaggtttggagatgtcccagaataaggcacaatg

SEQ ID NO: 282507 - DNA, 50 bp, Homo sapiens
tgaaaacgtattttaaagatggcaagaatccaaatgagactcagaacaat

SEQ ID NO: 282508 - DNA, 100 bp, Homo sapiens
gattattgagatggcctgtctgataactgactctgatctcaacattttggctgaactaaattctgtccaacgtttaataaatcaatggaggaacagggta

SEQ ID NO: 282509 - DNA, 101 bp, Homo sapiens
tgccactgcaagtacgacctgctggtctacttcgagatctgtgagctggaggccaacggcgagctccaggatgaaaccaacctgaggctggaagccgagaa

SEQ ID NO: 282510 - DNA, 75 bp, Homo sapiens
tgaagccgcctctgtattacttaccagatgagattgtggggaacctgggtgaaggcacctttggcaaggtggtgg

SEQ ID NO: 282511 - DNA, 82 bp, Homo sapiens
ccggctcctgctcaagatctcagagaaggaggaggtgaccacgcgcgaggctgaaggtgatgtggccgccctcaaccgacgc

SEQ ID NO: 282512 - DNA, 75 bp, Homo sapiens
acaagaacagttggccaatactggtgcccaagcctggattaaaaaggaattacatgaacgacagccttcgcaccg

SEQ ID NO: 282513 - DNA, 75 bp, Homo sapiens
gacagagtggagccatggctagagtttaagctatgaagaaggacatccctcacactctgaaacagatctccttca

SEQ ID NO: 282514 - DNA, 100 bp, Homo sapiens
accagaaggagggcagcctgcgggattggtatgacttcgtgtggaaccgcacgcgtggcatacggaaggttctaagctggtctatgtccatcaccttctt

SEQ ID NO: 282515 - DNA, 100 bp, Homo sapiens
acctgtttttccagctcacccactgccagcagagatagagccacgaaccccctgaacaaggagctcgactgggccagcatcaacggcttctgcgagcagc

SEQ ID NO: 282516 - DNA, 98 bp, Homo sapiens
ctgcactcactctacgtggagttgggccctgcaggaaggacggacttcaggggcagggctgtgggacagatgatgtctaccatgttctacccactggt

SEQ ID NO: 282517 - DNA, 100 bp, Homo sapiens
acgccaggcggatctcagaaggccagttcaaagtaacaaatgtggcaattattttggatctatcacctgtcatcataactggcttctgcttgtcatccac

SEQ ID NO: 282518 - DNA, 125 bp, Homo sapiens
taacagaggaaaaaaagaaagcaaggaaactaatgagaaaatgaatgctaagaacaaggaatccttacttgaggttcaaaccttgtactactcagctgatcacaagctgcttgatgggaacctac

SEQ ID NO: 282519 - DNA, 75 bp, Homo sapiens
ttggacagtcagcatttgcagactttggatttaagtgccctgtatgctcaaaatttgtatcctcagatgaaatgg

SEQ ID NO: 282520 - DNA, 141 bp, Homo sapiens
gaaaccccaggcagagacgggggaagcagcacgggatcccagcctcaggcctgcacggacggtgttggttgggggtgaggtggctttgaccccgggttgcccggccagcacgaccgaggaggtggctggacagctggagga

SEQ ID NO: 282521 - DNA, 99 bp, Homo sapiens
cgcaatggcgtccaaccccgaacggggggagattctgctcacggaactgcaggtcgaatttacaagcactctcagcaacctttgattacctatgaaaaa

SEQ ID NO: 282522 - DNA, 75 bp, Homo sapiens
aaaaagcccagtggaggaaagagctaggatggaggtttgcttctgaataacccttcggcattagctatgcatgag

SEQ ID NO: 282523 - DNA, 96 bp, Homo sapiens
cggcgacagtggcggcggcgccatggcagggcttgcaggagcgttcctgggtgcctgtgtggctgggtctgatgagcctggcccagagggcctcac

SEQ ID NO: 282524 - DNA, 50 bp, Homo sapiens
gcctcatactctgttatagataaacaagatttaggcctattaaaggaagg

SEQ ID NO: 282525 - DNA, 100 bp, Homo sapiens
gattctagttttgagaagaatgtggaaataacggagcaacttgctaatggcaggcattttacaagatgcaccttggtgtggagtcaaaagtacacatgct

SEQ ID NO: 282526 - DNA, 102 bp, Homo sapiens
ctgatgatagcagatcctatctgttcaattcttatagccattcttatagttgtaagtgatgcagcttggtttaacgaatcttggttaagccgaattaaagag

SEQ ID NO: 282527 - DNA, 100 bp, Homo sapiens
cttcgagaggaagggcttcaagttggtggcgctgaagctggtgcaggcgaggaggatggccgagaccagtccaggttggagacccaggtgtgggaggcgc

SEQ ID NO: 282528 - DNA, 87 bp, Homo sapiens
atgccattcagctccttgccaccaacagatcctgataacttaagtgactctctcttttccggtgatgaagaaaatgctgggactgag

SEQ ID NO: 282529 - DNA, 83 bp, Homo sapiens
gttggaatccttgctgtgctgaatcctggctgtgtgaccccaacctcgatgacttacgagccctcaaggggaagcattttctc

SEQ ID NO: 282530 - DNA, 96 bp, Homo sapiens
cctgtccgtcagtccctaggtatccgcactgctcagggtaacaaatgtggcaattattttggatctatcacctgtcatcataactggcttctgctt

SEQ ID NO: 282531 - DNA, 75 bp, Homo sapiens
gcagtggtcgcttcttctccttgatgatgaacaacatgggtggtgatgaggatgtagatttaccagaagtagatg

SEQ ID NO: 282532 - DNA, 100 bp, Homo sapiens
aactgtgaggagtttgaggggtctgaagactgaaagagtcgaatggtttgttggcagatgtagtatctaccccttggactgcagaacttggaggtgatca

SEQ ID NO: 282533 - DNA, 51 bp, Homo sapiens
ggaaagaattgaaccttcaccatataaggccggtctaattgaagccaacgg

SEQ ID NO: 282534 - DNA, 100 bp, Homo sapiens
ctcaagtcggacgaggagctgctgccgcctgacggggctcccgagcacgcatcaagatggtgctcatgtggaccagtggtgacgccttcaagacggccta

SEQ ID NO: 282535 - DNA, 50 bp, Homo sapiens
tgcccccaggcggtccttcctggggacactccggacgcaggcccggccag

SEQ ID NO: 282536 - DNA, 99 bp, Homo sapiens
gacggtgtcacagctgtaccctgggatcggcagaaaagggtccccccggggcctgtaaggggtgcctgcgaggagatgccctacctgaaatgccctctt

SEQ ID NO: 282537 - DNA, 100 bp, Homo sapiens
cagagtgagttgttgctcccgcctgagcccagcccccagaaaggattgtgacatatcgttggacccagaattgagggtttgtgtttagtgaatcagaggg

SEQ ID NO: 282538 - DNA, 90 bp, Homo sapiens
caaggtcctaccaagatgacaaaagaagagttaaatgccctcaagtcgacaggggatgggaccctaggccagacggttttgctgtctcag

SEQ ID NO: 282539 - DNA, 90 bp, Homo sapiens
gctgcaacatagagctgacattaactgtcagtcagatgatcctgatggctctcaaattgagaaaataaaagaagaaataactcagctgcg

SEQ ID NO: 282540 - DNA, 90 bp, Homo sapiens
tttatagtcctgattcaagtgttggcggatggaagggaggagactcctgaccctcagaatgtcagattgttcgatatggtgagattccag

SEQ ID NO: 282541 - DNA, 85 bp, Homo sapiens
gcaccattttctattgaagaggtagaagtggccccaccaaaggcaaaggaagttcgcataaagaccagagttggagccacccagg

SEQ ID NO: 282542 - DNA, 75 bp, Homo sapiens
aacaatgagatcgtggacaagatcatgggcaaaggacagatccagggtcactcatctaagaaagataacttggca

SEQ ID NO: 282543 - DNA, 71 bp, Homo sapiens
gagctccccgacgaggagcgcggcgagatctacgtgccagacttcccaagtaagaagcggaagaggagccg

SEQ ID NO: 282544 - DNA, 100 bp, Homo sapiens
ggcggaggccctgagcccggcgagcaggagaggaggtcttccgggccgcggcctccgagcgcgcgggatttgcagatatggtccggaaaaagaacccccc

SEQ ID NO: 282545 - DNA, 97 bp, Homo sapiens
attgaaaaactggcagaagggcttgacattcaactcaaatctccatgttgtacagtgttttgggcatgcacgtgatactcacacagtggcttctgct

SEQ ID NO: 282546 - DNA, 136 bp, Homo sapiens
aaagatatatcccacagccactggagaaaaagaagaaaatgttaaaaagaacagatacaaggacatactgccatggacaatgactcattcttcccaggacactggttcttgtggcattcaggaagatggaaagctt

SEQ ID NO: 282547 - DNA, 82 bp, Homo sapiens
agagatcacatttcaactagattcttaggaagtatggattcactaacttcagcgaaggcgtgacgcctgcttcacatctcta

SEQ ID NO: 282548 - DNA, 90 bp, Homo sapiens
caatggtctcatcaaggtgaacgggcggcccctggagatgattgagccgcgcacgctacagtacaaggggacagagcacaggaaagggac

SEQ ID NO: 282549 - DNA, 98 bp, Homo sapiens
ggacagtggcattgctcgatcaggagtgaacatggaaaggtttgcagaagaagcagatgttgtaatagttggtgcaggccctgcagggctctctgcag

SEQ ID NO: 282550 - DNA, 100 bp, Homo sapiens
cctgctgtgggatttacaggaaagctcgagccaggctgtgatcctggccaatttggagcaaggcttagcagaagacggcggcatgagcagcgtgactcag

SEQ ID NO: 282551 - DNA, 90 bp, Homo sapiens
gaaaaaagagatctagtatagtcaatgaattaaagacaagaaggtttccaatcagcttgggcaatggtagatggtggttcaaatgtgaaa

SEQ ID NO: 282552 - DNA, 75 bp, Homo sapiens
ctgggcacccgccaccagcatggacgctcgccgcgtgccggagtgtggccatctggggccgtgtggtatttgcca

SEQ ID NO: 282553 - DNA, 74 bp, Homo sapiens
ctctccatacctctggcttttgcctgtctcctacatttagccaatgaaaagtctcgctctgtcacccaggctgg

SEQ ID NO: 282554 - DNA, 75 bp, Homo sapiens
tgactatgagtatgagctattatagaaaccatgtataaatcaaagccattctgtgaaaaactgctttcctgggtg

SEQ ID NO: 282555 - DNA, 76 bp, Homo sapiens
cgtggaagcaggactgcgccgcgtcttcctcaaggtatagctgtggaccaactgtatatgatcatgcgcaccttgg

SEQ ID NO: 282556 - DNA, 75 bp, Homo sapiens
cacttatcttgcccaagagctggattgcccccgaggaattagcacttgttcacaacttgaggaaaatgatgaaaa

SEQ ID NO: 282557 - DNA, 75 bp, Homo sapiens
ggatgactatgagtatgagctattatagaaaccatggctacagcatgctggccatagggattggaaccctgatct

SEQ ID NO: 282558 - DNA, 90 bp, Homo sapiens
gccagaagatgtagggtttaacattgaaataaaatggatctgccagcaaaggaaaccatccacggagcagcccctgtacagcagcagcct

SEQ ID NO: 282559 - DNA, 50 bp, Homo sapiens
ctctttctccacccatcccgagaacagatatgggtccactctccgtcaag

SEQ ID NO: 282560 - DNA, 98 bp, Homo sapiens
cccgtggtgatccttgtggcctctgtaggcattggcgttgagttcacagtccacgtggctctggctaagaaacattcaggccggcagcagcagcagag

SEQ ID NO: 282561 - DNA, 100 bp, Homo sapiens
gtcaggggcgctgggggcgccacaccagatcagcttgaacgggtctttttacgacttggccatgctgaaacagatgaacaattacagaatattatatcta

SEQ ID NO: 282562 - DNA, 82 bp, Homo sapiens
gaagagttgtggcgaggcagatcctgccccgtggccgcggccgtctcgtgatgtgtccaatctagatcccaacttctcattt

SEQ ID NO: 282563 - DNA, 82 bp, Homo sapiens
aaacggcaagatgtccagtaatgtcccggcggatatggacccctcgtccagtcattgtggaacccatggagcagtttgatga

SEQ ID NO: 282564 - DNA, 100 bp, Homo sapiens
attacattcaatacaggctggaatatgaaatcaagactaatcatcctgattcagcaagtgagttgaaatggatgcagtcagaactgaatgttgaagaagt

SEQ ID NO: 282565 - DNA, 50 bp, Homo sapiens
tttcattgaagaaatagttaagcttggtgtaaaaattgccaaagcagttg

SEQ ID NO: 282566 - DNA, 133 bp, Homo sapiens
tggcggcgccagacccgaggcgctagggaagatcgcaccgcggacgcccgctgagcttggcgcacgggccgaccaggaggccccgtgtgggccgcggcccggccctcaccatggagtccatgttcgaggacga

SEQ ID NO: 282567 - DNA, 100 bp, Homo sapiens
ggcttggtgcgggagctggaggagctgcgctcggagaacgactatctcaagccacataaagaagatccctaatagtcatttctcaacaattatatagtca

SEQ ID NO: 282568 - DNA, 90 bp, Homo sapiens
ggggtgtcggcgcctcattcgggtggagctgagccggagacagggtttgtggatgcacttagatgtttgcaatgagcactgtggctggca

SEQ ID NO: 282569 - DNA, 100 bp, Homo sapiens
ctcgctgcttcccagagctttcacgaaggcaccgacgtcatcatgctgaccaccaatcagatccgtaaggtgctcttacagcctgttccaagtgtggctt

SEQ ID NO: 282570 - DNA, 98 bp, Homo sapiens
tcaagcagtggattaatctgaaaaaggaactagtttcagaaggaccagttccctgggtttccaaaaacagtgtaacatttgtggctgagcaggtttcc

SEQ ID NO: 282571 - DNA, 82 bp, Homo sapiens
gacgcaaaccaaggatctggggatcttcgcactatcccaaggatctggtgaagaatcatctgatgtatgctgtgagagagga

SEQ ID NO: 282572 - DNA, 100 bp, Homo sapiens
atgacgagggcctggagtgtgtgcccactgaggagtccaacatcaccatgcagaaggtggtcttctgccctgttaaagaagccctggaggtggactggag

SEQ ID NO: 282573 - DNA, 75 bp, Homo sapiens
acgccagcttcctgcaggcccagagccggcatgaactctcccaacgagtcggaaaaagcttgtggtgaagggggg

SEQ ID NO: 282574 - DNA, 80 bp, Homo sapiens
gtgcagagctagttcctctccagctcagccgcgtagtactgtaagattgatgttaaaggcatggtgttcaccccacttca

SEQ ID NO: 282575 - DNA, 75 bp, Homo sapiens
cccgaccctggccgccccgagcggagcctggagaaacgcttcgttaagggactcaggcagtacgggaagaacttc

SEQ ID NO: 282576 - DNA, 74 bp, Homo sapiens
tcgatgaagaggatgatgtttttggtgaaggacaaggagcatccaagatacctgatcccagaactttgcaaaca

SEQ ID NO: 282577 - DNA, 100 bp, Homo sapiens
agcgagccgccgacccgccgagcaaaatggcattgtgtccagatctggcaccctgacttatgaagcagttcaccaaacaacgcaagttggattggggcag

SEQ ID NO: 282578 - DNA, 100 bp, Homo sapiens
tctccctgcggggacttcgggcagccgcgggcattgcggcccctgtcgattccgcggcttcgagaaaacgcccactcctggatcttcacattgaactcaa

SEQ ID NO: 282579 - DNA, 80 bp, Homo sapiens
gccactgcgccgtggtggacggaaacttcctctacgtgtgggggggctacgtggccccggccagcgccgcctggaggagc

SEQ ID NO: 282580 - DNA, 99 bp, Homo sapiens
ggcgctgagccagccgggacggacatgcgcgggagggcgccgcggggcagccgccgctcctccggggtgtgaccatgaagctcatggatgaggtcgccg

SEQ ID NO: 282581 - DNA, 50 bp, Homo sapiens
cagcaatgagcttgtgttccaggtgaaggacagagcgggatgccaccagc

SEQ ID NO: 282582 - DNA, 75 bp, Homo sapiens
gaagaactacgaggcctccatgtcccacgtggacaagttcgtcaaggtgctgttggcccaaaggttgccctgaag

SEQ ID NO: 282583 - DNA, 50 bp, Homo sapiens
gtgctactcaaggcccgggaagggggggccctcagcctcttggccttgaa

SEQ ID NO: 282584 - DNA, 90 bp, Homo sapiens
cttcaggaacctgctgtcagtggttggtccaggcgcaatgttcagcgtatttgaggaaatcacaagaattgtagttaaggagatggatgc

SEQ ID NO: 282585 - DNA, 75 bp, Homo sapiens
caacacttggactcagttcatatcagcagaaaaggtgtttcaggcctcacctgaagatcatgaaaaatacggtgg

SEQ ID NO: 282586 - DNA, 74 bp, Homo sapiens
ttcaaggaggtgctgaagagcgaggagggctgccaggcgcccagctgtgcccagatggatgggacagagacccg

SEQ ID NO: 282587 - DNA, 75 bp, Homo sapiens
gccagctccaagatcaaggtcaacaatcaccttttccacaggttgcccccaagtttcctggcagtgtgtgatact

SEQ ID NO: 282588 - DNA, 50 bp, Homo sapiens
agaaaatggcaaaacttcccaagaagctcatttcagaagtgaaagttcag

SEQ ID NO: 282589 - DNA, 51 bp, Homo sapiens
tttttttcgggtagtggaaaaccagtgacagctatattgtgcgtgtcaagg

SEQ ID NO: 282590 - DNA, 50 bp, Homo sapiens
cagcaatatctctgggctttcacaggattgtcaccagacctgcaatctat

SEQ ID NO: 282591 - DNA, 100 bp, Homo sapiens
gtatttcagacaacttttaagaggtgcagaatcaccaacacgcaattcaaaattgaacagggcatcttctctgcattcagtttcatccaagtcattccgg

SEQ ID NO: 282592 - DNA, 90 bp, Homo sapiens
aggactctatgacacggccggacagattagcctgaggcctgctcagtcgttcctaatgaataaaaatcaagtgccaaagcttcagcccca

SEQ ID NO: 282593 - DNA, 100 bp, Homo sapiens
caaagcctctgtcaccacaccaaaatacaaatggggatctgtgactcatcagagtgtgggggttgtgaaagtatcctgataagaaaaggctggagggcct

SEQ ID NO: 282594 - DNA, 90 bp, Homo sapiens
ctgaggaactgaaacccgaggcaggctcccagccccattgccaataccttcctccactatcgaaccagcaaggtgagggtgctgagggca

SEQ ID NO: 282595 - DNA, 100 bp, Homo sapiens
accacttaccccttctcaccgaggaagagcgggagaaagggacatgtcctcatagagatttcaagtacccacaagaaactcaacgagagtcttgatgaaa

SEQ ID NO: 282596 - DNA, 75 bp, Homo sapiens
gactgcgcccccgggagcgggcgcccagagagctccaaacgagaatggaagccgctggaggaccgtagctgcaca

SEQ ID NO: 282597 - DNA, 90 bp, Homo sapiens
tgcagccaccgcggcccccgcggatgagcccattattgaagagccaagccgcctccaggagtcagtgatggaggccagcagaacaaacat

SEQ ID NO: 282598 - DNA, 82 bp, Homo sapiens
atggcggatgccctgcagtacctgcagaaggtctctggagacatcttcagcaggacactgggtccccttggagcctccccag

SEQ ID NO: 282599 - DNA, 75 bp, Homo sapiens
gaactgtctcctggtgaccgagcacccgcctccgggcatcttcaactataacgaaggaggcccaacttcattcaa

SEQ ID NO: 282600 - DNA, 75 bp, Homo sapiens
agagctttgctacattggaacagggccgcctctcaaggggatcatcgtcttgctcttcttttatctcagtttgtg

SEQ ID NO: 282601 - DNA, 82 bp, Homo sapiens
ccgcccagatgatgcggtggtgggggacctgccggcacgcgactccccccgggcccaaattactccacaggatccgctgaac

SEQ ID NO: 282602 - DNA, 75 bp, Homo sapiens
caccgagaagtccccgaccgactggttttaaaatcaaagatgggaaaatcggagaaaattgcccttccccatggc

SEQ ID NO: 282603 - DNA, 131 bp, Homo sapiens
atttgtgtcccttgggctggtgattctgctggaaatcctgatcagctgcttagcttttcagccgcaactttgttgtgaccaagaatatggcccaggtgaccaaagccctggacaaggccctgagcaccatg

SEQ ID NO: 282604 - DNA, 83 bp, Homo sapiens
tacctggctgaagctggataagaagcttgcagaccaggattctataaagcttttgctgggaacacaaaatgttctaaatgtcc

SEQ ID NO: 282605 - DNA, 75 bp, Homo sapiens
aacagtacctcattgctctttggcgactcttattgttcccagtgctgctcctcagaatctgtccttggaagtgag

SEQ ID NO: 282606 - DNA, 115 bp, Homo sapiens
cgaattcctgtgccacctcctcctttagaaaactgatcttaatacagacatggcccatgaacatggacatgagcatggacatcataaaatggaacttccagattatagacaatgg

SEQ ID NO: 282607 - DNA, 75 bp, Homo sapiens
gtagctttcatgagcacaggcatcagtcaggcagatgtttgtcgactggaatggaatccacattcatctcaatgg

SEQ ID NO: 282608 - DNA, 100 bp, Homo sapiens
ccgggatcgtgaccgagaccgtgaccgagagcgtgaccgagagcgcgaatatcgtcatcgttagaagggaccatgcctggccggatgctgccgcctggct

SEQ ID NO: 282609 - DNA, 75 bp, Homo sapiens
aagatgatgatatccttctcaaccttgtgggatgtgaaaactctgttactgaagtcaaataaagtgcccgtggtg

SEQ ID NO: 282610 - DNA, 82 bp, Homo sapiens
ttggcgcctgcccctgcaacgggagcacttctcagaacttctggatgagttttcccagaacgtcttgggtcagctcctgaat

SEQ ID NO: 282611 - DNA, 75 bp, Homo sapiens
tggatcccagcaactggagcagcttcatcttccagatgcgacctaaagtcatgtggcacctccttcgaaggtaca

SEQ ID NO: 282612 - DNA, 107 bp, Homo sapiens
agacgtccaatctgagcgtgctgcggacggcgctgcggtacatccagacctgcctagagctggaacgttacctccagagcgagccctgctatgtttcagcctcagaa

SEQ ID NO: 282613 - DNA, 98 bp, Homo sapiens
aggcctccccagccatgtggaacttgagaaagatcagtctaaagaaaaggagaagaaagtgaaaaaaacaattccttcctgggctaccctttctgcca

SEQ ID NO: 282614 - DNA, 100 bp, Homo sapiens
tgttctataactttgataaaaattacaaggactggcagtctgctgtagagtgtatcgcagtgttggatgatgaggagtctgatgaggaagctgtgaagaa

SEQ ID NO: 282615 - DNA, 100 bp, Homo sapiens
aaaaacaacattgctacacatgctaaaagatgacagacttggacaacatgtcccaacattacatcccaagacattttaaatccaaaggatgtgattagtg

SEQ ID NO: 282616 - DNA, 98 bp, Homo sapiens
aacaccgtcatcaactggttccacaactacagaaatggaggcaaacgaccattttaactttactggccttccccctgcacctgctgcctcaggactga

SEQ ID NO: 282617 - DNA, 90 bp, Homo sapiens
gtctcccagtgatcaaaaagagagtggttgtggacttcctcccagctgacatccaggctcagtttgccatcagccgggagctgatccgga

SEQ ID NO: 282618 - DNA, 82 bp, Homo sapiens
cagaactgtactctccgagaggtcgttttcccgtccccgagagcaaggtgacttaagagattaaaattaatttggttgctgt

SEQ ID NO: 282619 - DNA, 90 bp, Homo sapiens
ctccagcctgcgccaccacgtcacgcacacgctcggcgctgcgatccgcgcatataacggtacgcatagctgctaaattcatcactcatg

SEQ ID NO: 282620 - DNA, 99 bp, Homo sapiens
ctgttttttaagtggcagcagggacatcagctggcaattgtaaataggtttccaggatcaaaactaacctttcaggaaggtgaaattgttgaagtggat

SEQ ID NO: 282621 - DNA, 90 bp, Homo sapiens
ctccaggttaggccgagctttgcgggaaagcagcggtatgacctggacgcgtgtgacattcaagaaaaatacccggatttatttcaagtg

SEQ ID NO: 282622 - DNA, 100 bp, Homo sapiens
gtcctaaaacaggatcagtaaagaaggaaaaagcagtaaagccagaggaagtgatcagggccaaagcggtcagtgagaaggaagtggactctggaaacga

SEQ ID NO: 282623 - DNA, 100 bp, Homo sapiens
ggtaacgtggctgcaaccttagcgacatcaggaagaacagggtcgaggatcgaggaaaatcatcagcgtgttagcattttctttgactatgcaagatgta

SEQ ID NO: 282624 - DNA, 107 bp, Homo sapiens
ggtgtgcaccggctggctgaggaaatcgcctcccgagaagaagttgaggcgctatccgccaccggcacggccaggccagcatggtggaccacttacttccagtggac

SEQ ID NO: 282625 - DNA, 83 bp, Homo sapiens
ggaggacgaggctgaggacacaggtgtggacacaggaatgggtaccacagaccatgtcatcgtcctggcgtccacgaaccgag

SEQ ID NO: 282626 - DNA, 75 bp, Homo sapiens
cccagatgctcataaggattgtcctctttctacaaaagattaaaaggagcccaagccccatctcatcctagcaca

SEQ ID NO: 282627 - DNA, 82 bp, Homo sapiens
cggccaccgagatcctgctgacgccggctaggggtgtttctgtggcctgggactggttagcaccaacaagtcctgctcgatg

SEQ ID NO: 282628 - DNA, 95 bp, Homo sapiens
tctaaaccagtttactgaagataagccaactttgaatttcttctatcaacaggatctagtttgaagcactaagaagaataagacatcagtttgaa

SEQ ID NO: 282629 - DNA, 98 bp, Homo sapiens
gcaacatccgcgagttcctgcgcggctgcggggcttccctgcggctggaggaaggaaaggaggtgagctggcctcagctgtccacgcctacacaaaaa

SEQ ID NO: 282630 - DNA, 80 bp, Homo sapiens
agagccatcattcaagaagtttgcttcatgtggcctggacaatgctggaaagacaaccatcctgaagaagttcaatgggg

SEQ ID NO: 282631 - DNA, 82 bp, Homo sapiens
ggcacccacggagcctccggggctgattgctcatttagaaagtggatgtgtgggataacatgtccaatgtgtccgaggagag

SEQ ID NO: 282632 - DNA, 119 bp, Homo sapiens
tcagtacttgcaaaagcacttgaagtcattaaaccagctcatatactgtcaatcaccttctgctgcttggatgggtggatttggtgctcagcctccccaaggacaagctcctccccctg

SEQ ID NO: 282633 - DNA, 75 bp, Homo sapiens
ccgatggccccgaccgcgtgctggagctcttcgacccacccaagacccctgaatggttggacagtgattcctgcc

SEQ ID NO: 282634 - DNA, 75 bp, Homo sapiens
attcgcagtggtcgcttcttctccttgatcacaaacaacatcgacccagtgggaagaatccaaatgcgcacgagg

SEQ ID NO: 282635 - DNA, 95 bp, Homo sapiens
gcggcagctcttcctccagggcgtggcggccgtcttcatgtttgctttcgcttccctctacacgcaaatcccagctgaggagccaaaggagaagt

SEQ ID NO: 282636 - DNA, 82 bp, Homo sapiens
agtcaccttgtctttccctagtactctgcaaacagattgaaaatattgaacttcccatggatacaaaaacaaatgaaagaag

SEQ ID NO: 282637 - DNA, 100 bp, Homo sapiens
ccgccctgaacactatcaccgactctatccagaagttaaaggagagattgctcgtaaagatgaaaagctgctgtcgtttctaaaagatgtgtatgttgat

SEQ ID NO: 282638 - DNA, 90 bp, Homo sapiens
attttggatgaagaagtttttgaggtctaccctgaactgcagatcaccaatgtggtagaagccaaccaaccagtgaccatccagaactgg

SEQ ID NO: 282639 - DNA, 76 bp, Homo sapiens
gccaacatggcttgctatcaacaaagttttttgtaataaagcgtccattaggaaagtgaaattcgttattctacat

SEQ ID NO: 282640 - DNA, 83 bp, Homo sapiens
ctcgctcgccttcagaagacaggtttgggccccatggtatccctgtgacagtatttcccaaaagggaatataaggataaacca

SEQ ID NO: 282641 - DNA, 75 bp, Homo sapiens
tttggaaaaacactagagacagacggctggcaggccatgaccttgcctcctttcctggagttcggtgtcccgtcc

SEQ ID NO: 282642 - DNA, 97 bp, Homo sapiens
ggctcactgcagcctcaacttcttgtcctcaagtgatcctcccaccttagcctcctaagtagctgggaccacagtagggacggggtttcaccatgtt

SEQ ID NO: 282643 - DNA, 75 bp, Homo sapiens
aacaaccccatctccagacaaagacctgctgcagctacagtatgaaggagttgcagtcatgaaattatttgatag

SEQ ID NO: 282644 - DNA, 75 bp, Homo sapiens
cctgcggcgcctgggcgctctgaggtttggtgcacctcgatttggaggaagtagggcagggcccttatctggaaa

SEQ ID NO: 282645 - DNA, 89 bp, Homo sapiens
agaacaagtccaagactccagagatgggatccagttcttggtggagaatgaactgctgcagaacacacccgaggagatcgcccgcttcc

SEQ ID NO: 282646 - DNA, 50 bp, Homo sapiens
gtcgacttgtctgcagtagataattggcagagggggtcgatttgggagga

SEQ ID NO: 282647 - DNA, 100 bp, Homo sapiens
aggacgtgaaggggaagaggcccaccctggagtaaccctcactggagaatccagaggtggagattttcattttacctttatgtatttacctacggagtca

SEQ ID NO: 282648 - DNA, 98 bp, Homo sapiens
catcggcattggcatttttgtcacctccaacaacatccgcgagatcgaggagtcaactgagagttcaaatacaacaattgaggatgaagatgtgaaag

SEQ ID NO: 282649 - DNA, 75 bp, Homo sapiens
cgctttgtctcattaatatgggaacaccagtttctagctgtcctgtaacaacatgctgtaccccaaggaagacaa

SEQ ID NO: 282650 - DNA, 83 bp, Homo sapiens
agtactgaaggctcatcatgatattgtacgatttctggtacagttagatgactacagtgtgcaggatgacagaattcgagtcg

SEQ ID NO: 282651 - DNA, 90 bp, Homo sapiens
aacgacaagaaaaacaatcgcttcaatgatgggaaggtggatcccgccgggaggtactttgctgacatggatgggtgcaaaaaagagctg

SEQ ID NO: 282652 - DNA, 76 bp, Homo sapiens
gccagaaggaagatggcggatctggaggagcagttgtctgatgaagagaagggaatccgagcccgcattttagaga

SEQ ID NO: 282653 - DNA, 100 bp, Homo sapiens
gcactgcctgctcaacaagaagcatctcttgggcagtgaacagcagtcttctgtccagctctgggtctcctttggccggaagcccatgagagcagcccag

SEQ ID NO: 282654 - DNA, 90 bp, Homo sapiens
aaaattctgaactcaggacttggcaaatcatcttcatggtgggccgaggatatgcctccccagatcttagtaagctatataagaactgcc

SEQ ID NO: 282655 - DNA, 100 bp, Homo sapiens
atcaagagcctctttgcagaatttgctgttcaagctgaaaagaaaattgaagttgtaatggccgaacccttgggcttaccagcaacatcagatatcaaag

SEQ ID NO: 282656 - DNA, 100 bp, Homo sapiens
agattcttaatgcttttcggactcctgatggcatgcctgtaaagaacttgcagttgaaggagtataacacaggagcgagaacccgagcagcgccatgagc

SEQ ID NO: 282657 - DNA, 74 bp, Homo sapiens
aaagtattcaaaaaactccaggctggcagcattgctttctgtagaaaatgtttcctgactgcaatgagggaaag

SEQ ID NO: 282658 - DNA, 90 bp, Homo sapiens
agaacagccctccatcttgcagcccagaagaattaaatgtgagggagtctgacgtaagagtttgtgatgagtcatcatgtaaatatggag

SEQ ID NO: 282659 - DNA, 50 bp, Homo sapiens
aagtttatgtgtctcagtctgcagcaggacttgcaattgtgaccaaatat

SEQ ID NO: 282660 - DNA, 116 bp, Homo sapiens
gaggctcggagaaacaggcgccgcgggctccgcgcccggccggacccgggcccgaggtgagaagccctaccactgcaactgggacggctgcggctggaagtttgcgcgctcagacg

SEQ ID NO: 282661 - DNA, 87 bp, Homo sapiens
gcaagagtaacagcagcgccgtcccgtccgacagccaggcccgggagaagcggtgcgtctttctacgtgaataggattttgtggctg

SEQ ID NO: 282662 - DNA, 75 bp, Homo sapiens
cctgcagaggtgccgacatggggcttaagatgtcctgcctgaaaggtgcactttacaggtccccgatgaaccaag

SEQ ID NO: 282663 - DNA, 100 bp, Homo sapiens
acatgtaccgtgtgatgcaggggctgccatgatgaagagttacctaagtcagtgttataagatgttccatggtaaaagggatttgaagacaaattttgga

SEQ ID NO: 282664 - DNA, 101 bp, Homo sapiens
gcggaacacccctggtgtgcctgggacatctgtgaagggctttttggtggtgctggagttggcaagactgtactgatcatggagttaatcaacaatgtcgc

SEQ ID NO: 282665 - DNA, 75 bp, Homo sapiens
cagcaagcagcatcacaagctcagcctggacagcaacagacctgatggccaaaagaaaggaagaaaatttttcct

SEQ ID NO: 282666 - DNA, 80 bp, Homo sapiens
cgaggaggtcatgaaggacctgagcctgacgcgggccgcgcggggagtgcatccgccccaacccttttccccctcgtctc

SEQ ID NO: 282667 - DNA, 96 bp, Homo sapiens
ggcggacagtgcggaactaaagggggcagctggcattttatgctatgtgggagcctatgtcttcatcacttatgatgactatgaccacttctttga

SEQ ID NO: 282668 - DNA, 101 bp, Homo sapiens
accctggagcctcagttggaagcagccgatccagcctgcggagcctgtggggcagaatgttgtaccatctttgggtaggcagacttccctgacgacatcag

SEQ ID NO: 282669 - DNA, 100 bp, Homo sapiens
gacagcaacatttcccacaggacacgaagtttgtcggcccttgccttggcagagctgaggtgccagcgagatttcagattcctgtaaacctctaaagaaa

SEQ ID NO: 282670 - DNA, 75 bp, Homo sapiens
agcgtcgggattaggtgaaagccggatcacctcaacagtcacgtcagacaagtgcactcaacagaacggcccttc

SEQ ID NO: 282671 - DNA, 83 bp, Homo sapiens
gactatcagccactaatgaagttgggaactcagaccgtaccttgcaacaaggcagctgacacacaagagttcaggaccaaact

SEQ ID NO: 282672 - DNA, 90 bp, Homo sapiens
ccagaacccaagaagattccgataagaaacacgcttcgagagctgtgcccaggagtgaacaaccagccctacctctgtgagagtggtcac

SEQ ID NO: 282673 - DNA, 89 bp, Homo sapiens
gccgctgccatggccaaaaaggccctggtggaagacgaagttatacggaagcgtctcctcattgatggagatggtgctggagatgatcg

SEQ ID NO: 282674 - DNA, 100 bp, Homo sapiens
ctcgccttactcactctctcgggattattgccgattgccagggtgctgaccgtgggagccgaccgagattgactattttgaaagagccaaacgtttggaa

SEQ ID NO: 282675 - DNA, 100 bp, Homo sapiens
aaattgaggcgcaatgatgagaggatgtggtggtctactctgatgtcaatcttgagggctagccaggaaatgtgaagaattcacctggaactaagtagaa

SEQ ID NO: 282676 - DNA, 73 bp, Homo sapiens
ggaaagggacatctgctcctccaaggcagagcggctcccccctttcgacttatcagatgtagacttcctagat

SEQ ID NO: 282677 - DNA, 90 bp, Homo sapiens
agcgtgaccgagagcgcgaatatcgtcatcgttagaagatatagcaggttctggtgatggtacacaagaagtatctaaacctcttccttc

SEQ ID NO: 282678 - DNA, 96 bp, Homo sapiens
tcctacttccacttcgtgttcttcctagcttccctgtatgtgatgatgaccgtcaccaactggttcaacttgcttggctcaggaacaacagaagag

SEQ ID NO: 282679 - DNA, 90 bp, Homo sapiens
cagtccttgctgaagagactttccgttacatgactgtcctgagagcacgtctctacatctctacctgcattctggaaaccgggagaaagc

SEQ ID NO: 282680 - DNA, 74 bp, Homo sapiens
ttttctgttgtgacagacacttcacatactgctgaatttacaacgggaatgattttaccaacgaaagctatggc

SEQ ID NO: 282681 - DNA, 83 bp, Homo sapiens
caccgcctcatgcactgtgtaggagcatcagatccatgctgctgctgactcggagccccacagcttggcacaggctctctcag

SEQ ID NO: 282682 - DNA, 101 bp, Homo sapiens
caagaaaacatattgcataccacccagacagactgctataacaatctagctgattttattgtcaagatatccgagcttatgacattttatttggagataca

SEQ ID NO: 282683 - DNA, 75 bp, Homo sapiens
caggcatcattgcgctggccctggaagccaaggctgatcccttatccaacatggttctaaccttcagtactaaag

SEQ ID NO: 282684 - DNA, 74 bp, Homo sapiens
ggacatcctggaagctgggaaatgctcatgatggagcagtccaagaagtcctccctcatggtggcccgcagtat

SEQ ID NO: 282685 - DNA, 100 bp, Homo sapiens
aaacagaacgttgcaaactctggaaaaaaacttggggcaggaatgatatcgccaccgtctccatctgtaagaagtgcatttaccccaagccagcccgaac

SEQ ID NO: 282686 - DNA, 100 bp, Homo sapiens
gaaaaagatgagtatgcctgccgtgtgaaccatgtgactttgtcacagcccaagatagttaagtgggcagttgcgattcttgcagcatcaaatggctatg

SEQ ID NO: 282687 - DNA, 90 bp, Homo sapiens
tgaagacaaaccaattgctccttgtggagctattgccaacagcatgtttaatgatcggacagctggcttttaaaggaatgaagagactca

SEQ ID NO: 282688 - DNA, 50 bp, Homo sapiens
cagcttcctcctcactgtctgtgtccagggccatcactgtgcatgtcccc

SEQ ID NO: 282689 - DNA, 83 bp, Homo sapiens
gcggatctcaccgccgctcagggtgccagaaccctgtggagcatcatgaactgggaagagtagctgagccccagagcctctct

SEQ ID NO: 282690 - DNA, 95 bp, Homo sapiens
tcttacctttcaaagtggtgggatattatagatattcagaagaaggatgctgttaaaagcactggatgtgtgtgagaagtggggagaaatgccac

SEQ ID NO: 282691 - DNA, 90 bp, Homo sapiens
caaataagttatgctatgaggatgacaaactctggagtaattggagccaagaaatgagtatagactataatgtaactgcaaactccaagc

SEQ ID NO: 282692 - DNA, 75 bp, Homo sapiens
ttagagaaaaattatccgactcctcggaccagcaggacaggcccagatagctaataaccgaacacctggaagatg

SEQ ID NO: 282693 - DNA, 96 bp, Homo sapiens
gcgttaggaggctcgggtcgttgtggtgcgctgtcttcccgcttgcgtcagggacctgcccgactcagtggacttcctcgttctgcccatcttcct

SEQ ID NO: 282694 - DNA, 100 bp, Homo sapiens
tatagtagactgaatccacatagagaaagtgatggggtaagacacccctactctgtccagacccaactgtcaacagaagccaaagccatctggaggagca

SEQ ID NO: 282695 - DNA, 96 bp, Homo sapiens
cggcgaccggcggcgtccgaggagttacagaatgtctgaaggggacagtgtgggagaatccgtccatgggaaaccttcggtggtgtacagattttt

SEQ ID NO: 282696 - DNA, 75 bp, Homo sapiens
cactcacgcccgccggccgccggtccaggtcaagacctcgtctccgttctcatagtcgtagcagtgaaaggtcca

SEQ ID NO: 282697 - DNA, 75 bp, Homo sapiens
attatctgcataccagaggtactacagtttacagtctgactactggaagtttgaggtggtatcaacatcctacag

SEQ ID NO: 282698 - DNA, 87 bp, Homo sapiens
cgggcgctgcatgtgcaaagcaggcttcgaggccgttgagaatggcaccgtctgccgagctgtggtcgccaggacccccccagagcc

SEQ ID NO: 282699 - DNA, 98 bp, Homo sapiens
tcgcagatcctgagacccggacagtggcagtgaaacagcccctctgaaatcaaagagatcttgcatctggctggactcaatgagctggaggtgattcc

SEQ ID NO: 282700 - DNA, 147 bp, Homo sapiens
gctgggagctgtagaccggagctgttcctgttcggccatcttggctcctccctgccagatagctcttattttgagtgttccttgcctgtatctccccttggttcaatagctaccagatttttggaagaggaggaactgaggtctcat

SEQ ID NO: 282701 - DNA, 151 bp, Homo sapiens
tccagcgcgtggtgggggaactgctggggaaggcgattggcatcgatctctccatcccttccgaggcccgacttcggaaccaaatggcgagacaccatcatctttatacagagttgcagcagtacttctacaatttaatcttattgattta

SEQ ID NO: 282702 - DNA, 50 bp, Homo sapiens
gtgcagggccaggaggaacatgagggacctcaggatggaaaccagcagcc

SEQ ID NO: 282703 - DNA, 90 bp, Homo sapiens
aagcaaaatgcccagtcttcggacgagtcctttgagccttacccagaaaggaagcatccccatcagcagcttgcgggagatcacgctgct

SEQ ID NO: 282704 - DNA, 90 bp, Homo sapiens
gggtaatacagaaagaatctgaggtggctcacgttgaccaactctttgatgatgcatccagattttgaaccctccaccatccccagccac

SEQ ID NO: 282705 - DNA, 145 bp, Homo sapiens
cacgataaagagttttctgtcctccttgtttgcacggagcagcaaacgcagagacaaaagaaacgggccccgactgctcaccatcatcttcaagaacttccaggagtgtgtggaccagaaggtgtaccaggctgagatggacgag

SEQ ID NO: 282706 - DNA, 100 bp, Homo sapiens
cttccccgaggtgtacgacaagatctgcaaggccgccaggcactgagctggagcccgcctggagagacagacacgtgaactgtggctgcaccatctgtct

SEQ ID NO: 282707 - DNA, 82 bp, Homo sapiens
cagtattggacacaggaagattcatctaagcaggcagaaacatatttaaccaatacttggtgcttgaaaaactgaagaagga

SEQ ID NO: 282708 - DNA, 75 bp, Homo sapiens
gggctggcgttacggagcatgtgtagcctcaggctcaaagtgctgacaaataaagcttctgtgatgctctttatg

SEQ ID NO: 282709 - DNA, 50 bp, Homo sapiens
tggagagtcataacatatcactgactgattattgctcagttgtaactatt

SEQ ID NO: 282710 - DNA, 75 bp, Homo sapiens
ctggcccacacctatcaaagccccctgctctactgtgacctggagttgaacagacacggtagaagactcgcccat

SEQ ID NO: 282711 - DNA, 100 bp, Homo sapiens
agcacctggatgagacatttgctacagcatcccacattaagtcaacgggaaagcgctctagcgagtgctgatttagaagaagaaattcaccagaaacaag

SEQ ID NO: 282712 - DNA, 90 bp, Homo sapiens
caactttcgtttccctctgagggaattgggaggtcggcggccccaaaatgtttacaggcattggagtttttacatgctaatcaagtgatc

SEQ ID NO: 282713 - DNA, 90 bp, Homo sapiens
ttcgcgagcgtctgggcgggtggtaggtctcctctgagcctccggcctccataagacccaaaacagatgacacctcttcccagtcccccg

SEQ ID NO: 282714 - DNA, 75 bp, Homo sapiens
cccgatatatgttctctaggccttttagaaaacatgctcctggtaacgtttttatccatggatgacttgcttggg

SEQ ID NO: 282715 - DNA, 90 bp, Homo sapiens
ccgccacggctacatcttttcgtcgcttgccggctgtctgatgaagagcagcgagaatggcgcggaggtcctgcacataggaagcgccca

SEQ ID NO: 282716 - DNA, 100 bp, Homo sapiens
tgcagcagcaagtcccatcggaggacctccctgccctgtataccgagggaacaggtactaggttttgacaagcttgcatcatgcgtgagtataagctagt

SEQ ID NO: 282717 - DNA, 90 bp, Homo sapiens
acagcgacgaggacgactgccgtgtcgtgaaaactacccctaaaagccaaaatgggaaaggaaaagactcatatcaacattgtcgtcatt

SEQ ID NO: 282718 - DNA, 90 bp, Homo sapiens
ggaaatcgggctgaagcgactgagtccgcgatggaggtccaaccgtgactgccagatcgaccagcaccaccggaaccagtgccagtactg

SEQ ID NO: 282719 - DNA, 96 bp, Homo sapiens
gcgcgagtgaggaaaggaggtactgtaggaattgtcttagaagaaagaaggcaagccaccattttacccacgtaaatatatgaatatatttctgac

SEQ ID NO: 282720 - DNA, 113 bp, Homo sapiens
attttttggtttgactgtgtatactctacaatctaagaaggatttcagcaaatttggagcaggattacttctctaacaggatcaccagtttgctccacaaagcacaatgtctc

SEQ ID NO: 282721 - DNA, 75 bp, Homo sapiens
ctccggtactggagccggcggctgcggccggcagccggcagctttgcagcgggcccgatgagagaaagggaaagt

SEQ ID NO: 282722 - DNA, 100 bp, Homo sapiens
tggtgatcggctccttaccagctcacctctcaccgcgcatgtttggaggtttggaaggtttgcagttgctgctcttcagtccaaagtagaacagtatgag

SEQ ID NO: 282723 - DNA, 100 bp, Homo sapiens
tggcggcatgagtatctgggatgtgaaggtatataacagagtttgtaaacctaggcaatgtttcagctctacgcactttcagggtactgagggctttgaa

SEQ ID NO: 282724 - DNA, 99 bp, Homo sapiens
cagcgctgtcgtgctcctctactcgggaagaatggacagaagctatccaggctgtagcagacagactgcagaggcaagaagaggagagaatgaattgta

SEQ ID NO: 282725 - DNA, 88 bp, Homo sapiens
agatggacttcaaatgctgtttgtattccagagactagggcaaacttgaagataaatcttttgactccagctctttagaggatctaaa

SEQ ID NO: 282726 - DNA, 51 bp, Homo sapiens
aaaaggagctgtgctgtaggtttctcaggccgctccccacaggagaacctg

SEQ ID NO: 282727 - DNA, 100 bp, Homo sapiens
acggcacctgaagccccgagccctcccagcgcagtgatgaacggcagcagccactcaccaacagccatcaatggtgcaccgtgcacacccaacggcttca

SEQ ID NO: 282728 - DNA, 74 bp, Homo sapiens
agcacaccatccatgttggctttgatgctgttactggagaattcactgatcatgttctaattgagctcacccag

SEQ ID NO: 282729 - DNA, 75 bp, Homo sapiens
ccacctcaaagacactggttgaaccttggcaaagtgtatacagactgaggatggaaaatggttcacccccatgga

SEQ ID NO: 282730 - DNA, 75 bp, Homo sapiens
tggggctggacctgctggtgttcgcccacgaccatgttacatgggaataggactctcggctcaaggcgtcaacat

SEQ ID NO: 282731 - DNA, 74 bp, Homo sapiens
cactgattagcaatttaaagatcctctccaagggtatgttagagcccaccaaggaaccactgaaaccactttct

SEQ ID NO: 282732 - DNA, 79 bp, Homo sapiens
aggatctaatgggactgatggggcatctcaaaaaactcccagtagcactgtttatgccagttattcagacagaaagtga

SEQ ID NO: 282733 - DNA, 82 bp, Homo sapiens
ggtagaggcgaccggccagcaaccgcagcgtcggcgcccgcggccccggcaggagcgagaacccgagcagcgccatgagcaa

SEQ ID NO: 282734 - DNA, 100 bp, Homo sapiens
ctgggtgggggacgtgtaccctgtctaccagcctgtgaaaatggacccaagtggggtcaaagtgctggaaacagcagaggacatccaggagaggcggcag

SEQ ID NO: 282735 - DNA, 75 bp, Homo sapiens
gagatgaacccaacctagtgggtgtaatacatcatgaactgcagggtgctctggggccaggtgccaccggccatt

SEQ ID NO: 282736 - DNA, 76 bp, Homo sapiens
ggataatgaagagttgctcccaaaagggttagtagacagagaaccacctgaaggcaactcatgcagcaattccaga

SEQ ID NO: 282737 - DNA, 100 bp, Homo sapiens
agggaagatcgatgtgtgcattggagttaaagttcctcgtaattttcgcttgttggaagaacttgaagaaggacaaaaaggagtaggcgacggtacagtt

SEQ ID NO: 282738 - DNA, 78 bp, Homo sapiens
cgggagcaccggggctccgtcatctgtctggaggcaatcctttatcacaggatattctcaacttataccaggacccag

SEQ ID NO: 282739 - DNA, 98 bp, Homo sapiens
tccgtggcgctcgagttcctggaccgtgagagcatcaagctcgtgtccatcggttaaacccatccagagtaatggctgcggccttacccaggaccctg

SEQ ID NO: 282740 - DNA, 99 bp, Homo sapiens
ctgcagctgagtctgggccaggcagaggtggccaggatcctgcaccgggtggtggctgggcatgattccacctttccactgatagactcaagttcccag

SEQ ID NO: 282741 - DNA, 100 bp, Homo sapiens
tctgataactcaggatttacttgaaatgaaaggagattccaacctacttcagagtctctccgaggcaaagatggagctgagaagaaaagatcaatctctg

SEQ ID NO: 282742 - DNA, 100 bp, Homo sapiens
ctggcccaatgagaacctggtgtgcgtggccaatgcgacttaccactgcaaaaagtggagagactttgctaaagaagtggatgggttacttcgaattgga

SEQ ID NO: 282743 - DNA, 87 bp, Homo sapiens
gttatctccttaaacaagcactgaaaagagaattaaatagaggagtcatcaaacaggttgggaaaaatagcagcctagctttgtcac

SEQ ID NO: 282744 - DNA, 75 bp, Homo sapiens
ttcctctttatgaaagtgccaccaccaggtctataaccgagggaacctgtccaaagaccttcgtgggaaattaca

SEQ ID NO: 282745 - DNA, 96 bp, Homo sapiens
ggcggcggaggctttggcagctcgggactgagtgcaaggtacaaagtagatttcatagaagagaaggcatctcagaaccctgagagaatagtcaag

SEQ ID NO: 282746 - DNA, 75 bp, Homo sapiens
ccgccatcgtggtgtgttcttgactccgctgctcgccatggcatccttctttaaaagagaaatccacgttagctc

SEQ ID NO: 282747 - DNA, 82 bp, Homo sapiens
ctggggaaaaggcaaaaatcccatctaccgcaactctcagttcgagagtaaagtgatcagggccaaagcggtcagtgagaag

SEQ ID NO: 282748 - DNA, 100 bp, Homo sapiens
catcgatgatctggcagacctcagctgcctggtggtccagatggcccccctggtccagctggaacgaccgggcagagaggaattgttggcatgcctgggc

SEQ ID NO: 282749 - DNA, 90 bp, Homo sapiens
ctcccagggcccgcccaggacccccaagccgccgcggacgcagccctgggcgctgcctatggcacagccaagagcggtaccggcattgcg

SEQ ID NO: 282750 - DNA, 82 bp, Homo sapiens
gccgggaccctcgcgcgcgaccgccgaatcgctcctgcagcagaggtaactaggatttctacctcaaccgcgagacctatgc

SEQ ID NO: 282751 - DNA, 95 bp, Homo sapiens
ttcgacgactccattttcctcggtgggggcttagcgcactggaggagcggcgggcttcagacaggagaacatcgagctggcgtttgacgacttgg

SEQ ID NO: 282752 - DNA, 100 bp, Homo sapiens
gccgccacattccagttccgcacgcgctgggattcggagcttcagcgggaaggagaggacagaaaaatggttcgtattgttcttacaaagacaaagagag

SEQ ID NO: 282753 - DNA, 98 bp, Homo sapiens
ttggttgtaatgcagcctgagaaattccagtccaagtatgagccccggagccacatgatggacgtccagcccactttccttgtggaactgtccagagt

SEQ ID NO: 282754 - DNA, 75 bp, Homo sapiens
gggcagttcaccgagaagcgggtgtatctcaacaggtcatgcgcatcgtggataatgttcgtcctgatcgacaga

SEQ ID NO: 282755 - DNA, 83 bp, Homo sapiens
gtcgcttgaaaagactgggcttgtccttgctggtgcatgcgtcgtcggcctctgggcagcagcatcgatttcttccctgtgaa

SEQ ID NO: 282756 - DNA, 100 bp, Homo sapiens
gagatgcttccgaactgtgggcaaaaatggcggttcatctctaacaagtatttagtgaaacgacagagcagagactatgatgtggaatggggctatgctt

SEQ ID NO: 282757 - DNA, 142 bp, Homo sapiens
ggaaatcccaggcggagtccgggggaggcagcacggcatcccagcctcagggctgcccggacggtgttggttgggactggagttccatagactttctgaagaaaacactttgttgaaaaacgatctgggaagggttcggcaa

SEQ ID NO: 282758 - DNA, 75 bp, Homo sapiens
gagtgacatgtactgttgtggacatgcacaaaagtgagaaagacttccgagtgcaggaactcccactggctcgta

SEQ ID NO: 282759 - DNA, 76 bp, Homo sapiens
gagctgaccctgggagacatcgacggctaccggctctctgaccagttccacgacatcctcattcgaaagtttgaca

SEQ ID NO: 282760 - DNA, 82 bp, Homo sapiens
ccaggaccggccgaacgcagagggcgccctgcgtccggcagaggaggcgagcatcccgctcaggtgatgaggaacccctcgc

SEQ ID NO: 282761 - DNA, 100 bp, Homo sapiens
ccgggcccaggcccggccccagccgccgctgcggagcccgccgggaccccccggagcgcggccacggcgcagtttgacaagtatgcgcccaagctggaca

SEQ ID NO: 282762 - DNA, 132 bp, Homo sapiens
gccggctgcagccccaagacagagcgctactcctggcagtgcgtcaatcagagcgtcctgtgcgataccggggagaccacgacgctgcctcctgggcgccatgagttcctgttcagcttccagctgcccccg

SEQ ID NO: 282763 - DNA, 75 bp, Homo sapiens
actaaacgcccgtggttgccaagatggaacttgctaaggaagaaaagtgtgaatttctgccattcctgtccccac

SEQ ID NO: 282764 - DNA, 50 bp, Homo sapiens
aggcgctccgtcatggggatccagacgaggagaaggcagagcccccccag

SEQ ID NO: 282765 - DNA, 75 bp, Homo sapiens
caatgaaagaagaattaacaaaagctacagccctaaccatcatggttctgccaaggaaagagaaaatacctttta

SEQ ID NO: 282766 - DNA, 100 bp, Homo sapiens
agctggtgggattcatgacgtcatagcagatgagcacgaggtacaggtttgcagattccgccagcagcacagcaagctctacagatgagtggctctttgg

SEQ ID NO: 282767 - DNA, 74 bp, Homo sapiens
actggaggaaaacaaaggccgagagaccctgatgcccacagcccccacctgcaagtattcctgccacaagaaat

SEQ ID NO: 282768 - DNA, 75 bp, Homo sapiens
gaagaacaagaagaggaggatgaggcaccattccaggagaatgcgtctgttactagagtggagagtctaccttcg

SEQ ID NO: 282769 - DNA, 100 bp, Homo sapiens
tgatgcagccatcttccgcacacttggaaagcagacagccatgcgcacggatcagtacaactcccggtggctgaacgtatcagaagtgactctgaccttg

SEQ ID NO: 282770 - DNA, 82 bp, Homo sapiens
cccggacatggccgccaacatgtacagggtcggagacaatgcagatcttcgtgaagactctgactggtaagaccatcaccct

SEQ ID NO: 282771 - DNA, 89 bp, Homo sapiens
ccgcgattttctgcaggccccacgagtgggaggtgctgagccgctcaggcgaagctggagaagtcactggagcatctccggaagcagat

SEQ ID NO: 282772 - DNA, 90 bp, Homo sapiens
tcgctccggagccgctgcacatttcgcccgagcgggaagaagttccgcagcaagccgcagctggcgcgctacctgggcggctccatggac

SEQ ID NO: 282773 - DNA, 100 bp, Homo sapiens
gggtaaactaccaagttacaatgggtggaatgaatcatctacgagagaatggtatagtgcaccgtgatatcaagccaggaaatatcatgcgtgttatagg

SEQ ID NO: 282774 - DNA, 98 bp, Homo sapiens
cagcacccctacacgttcccgggtggcagtggcactgtctttgcccggggccctggcctccagtctgagtgctgacctcgaagagcccctgagtgagg

SEQ ID NO: 282775 - DNA, 100 bp, Homo sapiens
attggataagcgtggttcccacaaagagtataagcgagggaagtcgtgcacgaacaccaagaaggaacccagccagccggcggaatgcaagcagcagtag

SEQ ID NO: 282776 - DNA, 83 bp, Homo sapiens
cccgagcgccgggaccatgtcccagctgcagctgtggctgcagtttgaggctctgaacaaggcctggtccagatccctgtgag

SEQ ID NO: 282777 - DNA, 75 bp, Homo sapiens
tgagcccgtccgtccgccgccaccacccactccggacacagatgtgcactcccagcaacacccctgccacgccgc

SEQ ID NO: 282778 - DNA, 100 bp, Homo sapiens
ggattcaccacctccaggaaaaggaagagaggatggtgatgcaccggttacaaaagatgagaccacctgcatttcacaagacacaagagctttatcggag

SEQ ID NO: 282779 - DNA, 98 bp, Homo sapiens
gagctttgtgcaaaaggggagctggctacttctcgctctgcttcatcccactattattttggcacaacaggaagctgaactgctcattttcagtgtcc

SEQ ID NO: 282780 - DNA, 83 bp, Homo sapiens
ccaagggacaatggtcaccgtctcttcaggtgcaatggatgagcttcatagtctggatccaagaaggcaagagttattggaag

SEQ ID NO: 282781 - DNA, 75 bp, Homo sapiens
gactcagaatatcttattggacaatgaatttcatgttaaggtgaccaagaatatggcccaggtgaccaaagccct

SEQ ID NO: 282782 - DNA, 100 bp, Homo sapiens
tgggtacatggagttgactattccacctaagaacggagatcacaggagaaaacgacgctccacacctttaacttcttccacacttccttcacaagcaaca

SEQ ID NO: 282783 - DNA, 133 bp, Homo sapiens
caccaatatgcaaggcttcaccaagagtcttaatgccttcaacgtaggcgatgactgcaacacagtcactcctggcggcaaaccaaacaaaaccagagtcatctggggaaaagtaactcgggcccatggaaac

SEQ ID NO: 282784 - DNA, 100 bp, Homo sapiens
tgaattttccttgatggtcaaaagattaagtgagatggaagattttcgaggtatagcagaagaatcatttccaagctttctcaccaattcattatttggt

SEQ ID NO: 282785 - DNA, 50 bp, Homo sapiens
agacagtctggaagagctgatggaagagctggatgtggcagacctgcaga

SEQ ID NO: 282786 - DNA, 98 bp, Homo sapiens
tcttcagtgcaggaatatgttagcgttgtatcttgggagaaagacacagtctccatcatcccagatgccttcaattaagttgcagagttctgatggag

SEQ ID NO: 282787 - DNA, 100 bp, Homo sapiens
tttgccacaggcagcctcctgccagaactacttcctcatgattgtttcagctgtcaaagctcgaaaaacagcagcagaggaaagaaaagaccagagctaa

SEQ ID NO: 282788 - DNA, 102 bp, Homo sapiens
gatttcactgcttcaggtgaggatgaactgagctttcacactggagatgttttgaagtgtaaggcaaacattggtgggcaccgatcttcctgttcattctgc

SEQ ID NO: 282789 - DNA, 100 bp, Homo sapiens
tgacatcaagaggaagcggaaaccagtggccacagcatctttgtctagccccagtgcaggtggagccgccaccaaaatgcagattttcgtgaaaaccctt

SEQ ID NO: 282790 - DNA, 75 bp, Homo sapiens
cacaaacaaactacccattttcttttttggaactcatgagacatatgaagcaacagcatgtcatagaaaccttga

SEQ ID NO: 282791 - DNA, 96 bp, Homo sapiens
gggaccccttagaagcctagaaatgcggttgatcgacaagaccaaggtgacatatctgaagtggctgcctgagtcggagagcctgttcctggcatc

SEQ ID NO: 282792 - DNA, 74 bp, Homo sapiens
ttgggcagcttttccggcctgacaacttcatctttggtcatacagcagatggaacaaaaaaaattacaacaagg

SEQ ID NO: 282793 - DNA, 75 bp, Homo sapiens
ccttcaaaagcccacttggcgatgggttacagtaagagatctgggcggaccccggcaaatacgccctgatgggag

SEQ ID NO: 282794 - DNA, 100 bp, Homo sapiens
ggtacccctttttatccactcattggcagagaagctagttattgatttaggagtcatgactccatgtgataagatactgaaagctgctcttgaccacaaa

SEQ ID NO: 282795 - DNA, 75 bp, Homo sapiens
ctgcatttggccaccaagacctgggaacaagtcaataagagatgctaaaaaccttgtacctatggaccccaatgg

SEQ ID NO: 282796 - DNA, 100 bp, Homo sapiens
cagacaacagagaaaacttgttgaagagattggctggtcctatacaggcacccaggcatgtggaatatgctcatagtggcgatgtgcttggcccttctgg

SEQ ID NO: 282797 - DNA, 100 bp, Homo sapiens
attcccggaccctggaagagaagagggtggctaatgattaagtactatactggcaattgctggagaagattttgcaattgttgcttctgatactcgattg

SEQ ID NO: 282798 - DNA, 100 bp, Homo sapiens
gggattctcgacctgctaacagaactggaccttttcggtgaaatgacaatggatgctctgttggctcgattgaaacttctgaatccagatgaccttagag

SEQ ID NO: 282799 - DNA, 74 bp, Homo sapiens
cagacgcggcacagagagggcctgggagcttgctgcagcttcagggttctgagcaaggttcaaccagtcaagaa

SEQ ID NO: 282800 - DNA, 83 bp, Homo sapiens
cgccgagcagctggcccggctgggcccggggcgcgcagctgcccgccggggcggggggataaaaacattcagatggcagatca

SEQ ID NO: 282801 - DNA, 100 bp, Homo sapiens
aggtttttccagagcttctcagatgctctaatcgaccaggacccccaggcggcgttagaggtgtcatggagaaactccagctgggcccagagattctgca

SEQ ID NO: 282802 - DNA, 90 bp, Homo sapiens
caagcatacaccaccatacccaatgacacacaataatttttggttgaagaagatagaaatcagtgtttcagaagcagaaaaacgaactgg

SEQ ID NO: 282803 - DNA, 101 bp, Homo sapiens
gtggaactgaacttagctcgacggggctgaccgctctggcccagggtggcttggaagcgtttgtgtctgctgccaagaagctaccacgagaagatgtgtat

SEQ ID NO: 282804 - DNA, 101 bp, Homo sapiens
ggatcattaagaagcagatcctgaaacacctgtcccggaggcaagtgaggcctatctggttggcctttttgaagacaccaacctgtgtgctatccatgcca

SEQ ID NO: 282805 - DNA, 82 bp, Homo sapiens
tttcagcgaagtcgcacgtgaaggatagcagtggcctgagaaaggttgtgaccgagattcccgacgagagagactgagggga

SEQ ID NO: 282806 - DNA, 100 bp, Homo sapiens
aggagaaagttaactgaattggtgacacttcgggtctctcacagaggaagctatatgccgctatcctctgggcatgtcaggaggccagattccagatgag

SEQ ID NO: 282807 - DNA, 99 bp, Homo sapiens
ggcgcggccgcggcgccatattgcggccctcagcggccgcgaccgagtcatggctgagacctacgcacggggtcactctggtgcccattgaggagttca

SEQ ID NO: 282808 - DNA, 82 bp, Homo sapiens
cggcgaggctcggcacggagatggcggcgcgctcggcgcagaggttgacggatatattcagacgttacgacacggatcagga

SEQ ID NO: 282809 - DNA, 100 bp, Homo sapiens
catcatcgcgcccccggaccaggagatcgacgagtacatcacgcaggcccgagacaagagctatgagaccatgatgagggtgggcaagaggggcctgaac

SEQ ID NO: 282810 - DNA, 83 bp, Homo sapiens
cctccagattgtccagggccacattgaatggcagacgttggtcgcattatgtttcagctcttctcagacatatgtccaaaaac

SEQ ID NO: 282811 - DNA, 100 bp, Homo sapiens
aagagggatccttcacccgtgtctggatagctagcggccaggagaaatacagtggaaaatgcaaaacaacgaaattataaagcctgccaaatacttctca

SEQ ID NO: 282812 - DNA, 96 bp, Homo sapiens
tggatcctgatatggctctttgccgaaatgctagagaaatgcctgagaaatgccagtggcctgacagcagcagacattgcacaaacccagggtttc

SEQ ID NO: 282813 - DNA, 83 bp, Homo sapiens
acatgcccgctcacctgcgctgtgatgcctgcagagctgtggcttaccagatgatgatgaacatgattatgaagaaatacttg

SEQ ID NO: 282814 - DNA, 100 bp, Homo sapiens
tcctggaggcctgggaagccaacgaccacacgcaaataccctctaccatctgctttggtcagggtgccgctcgaggatttaaaagcaacaagaagaaaac

SEQ ID NO: 282815 - DNA, 50 bp, Homo sapiens
ccagctcctgaggaacatgcagtgtccacaggatgaaatgtccgagtcag

SEQ ID NO: 282816 - DNA, 90 bp, Homo sapiens
ttagaagtggtgatgcaagaagtttctaggaaaggccggacaccaggatcaactcactatcctgaaggtccattctcccaagaagagggg

SEQ ID NO: 282817 - DNA, 96 bp, Homo sapiens
cgcccctggtaactgacaaggaggccaggaagaaggttctcaaacaagtgaaatcaaatacattgcccatctcgctgcagtctataagaagtagcc

SEQ ID NO: 282818 - DNA, 82 bp, Homo sapiens
agaaaaaagatgttgtggggagagccaggggaatgtcatacccaggctatcccccaacaggctacccacctttccctggata

SEQ ID NO: 282819 - DNA, 50 bp, Homo sapiens
caggatccggaggcgccagctcaaccgcaaaagactggtttaaaagaatt

SEQ ID NO: 282820 - DNA, 100 bp, Homo sapiens
agaagcaggtgcttatgatggacctaggactgctgtgactgtcgggcctccagaaaacattgaggtgaccccaggagaaggctccctcatcatcaggttc

SEQ ID NO: 282821 - DNA, 100 bp, Homo sapiens
cagtagtcatagctctgcctcagaagccccatgtgccactcccctgatctgcagcttcggtaggccggtggacctggagaaggacgactaccagaaggtg

SEQ ID NO: 282822 - DNA, 98 bp, Homo sapiens
gaagcgtctttgctcaaggatcccagttttctctggatgacgtgagacacttgtcgcccgaggagttccaggaagtgtttgggatgagcatcgaggag

SEQ ID NO: 282823 - DNA, 100 bp, Homo sapiens
aggcttccaaagaacagcagcctggaaaatgtgaaggtacaaggactgttcgtctgacatacaaaaacaggcagtagaagaactgtttaacctgatgcag

SEQ ID NO: 282824 - DNA, 50 bp, Homo sapiens
caagcaaagatcttccctgagagaacagcatatgccatatatgagctggc

SEQ ID NO: 282825 - DNA, 82 bp, Homo sapiens
gctcacctctcaccgcgcatgtttggagcagatataatttctacagtagaatttaatcattctggagaattactagcaacag

SEQ ID NO: 282826 - DNA, 75 bp, Homo sapiens
attccaacgtgatattccttgaagtagatgtggatgactgtcaggcccagcagccaccacagcgcctgcttcctc

SEQ ID NO: 282827 - DNA, 100 bp, Homo sapiens
gcgccgcccgggaggcagcggctggaggagcggacgggccccgcggggcccgagggcaaggagcaggcaatcttgctgccaatgatctctccccgtcccg

SEQ ID NO: 282828 - DNA, 90 bp, Homo sapiens
ctgcaaagtgtccccggcaagaagcatcctgaggttagcattacacttctcccagtggagcccatgacttctgatcaggacgctaaggtt

SEQ ID NO: 282829 - DNA, 90 bp, Homo sapiens
ttctccagacgctcagtggagaacagaatgatatggaacctagcaaagctgttccactgaatgcatctaagcaagatggacctatgccaa

SEQ ID NO: 282830 - DNA, 88 bp, Homo sapiens
gaggcccggccacctctgagaagggagacgacgctgctgggtccgctgagcggggcgacccgagggtttcatcaccttaaatggtttt

SEQ ID NO: 282831 - DNA, 51 bp, Homo sapiens
tttagggatcagcctgtgttttttaggtgtttccccccgggccggcctgcc

SEQ ID NO: 282832 - DNA, 100 bp, Homo sapiens
agaaggagagagatgttatcatgagggaattccggtcagggtcaagtcgtgttctgatcactactgacttgttgttggcagggacctggcactccatggc

SEQ ID NO: 282833 - DNA, 100 bp, Homo sapiens
gctggggtcccttttgcctcagatactattttgaagccacagcaattgtctgctattttaaaagcactgtgatgcttaaatattccagctgctacatcgg

SEQ ID NO: 282834 - DNA, 100 bp, Homo sapiens
ggatgacttcctcgctgcagcggccctggcgggtgccctggctaccatggaccatcctgctggtcagcactgcggctggatggatagaatgacagaagat

SEQ ID NO: 282835 - DNA, 75 bp, Homo sapiens
agtccctgcaagaacctgcattggaagacaccagcggtgactacaagaacgccctgctgagcctggtgggcagcg

SEQ ID NO: 282836 - DNA, 90 bp, Homo sapiens
caaggggaagtctggaaaacaacgccttaccaagtggctgctgaaattagcccttgccagcatccagccatgggggatatgaaaacccca

SEQ ID NO: 282837 - DNA, 82 bp, Homo sapiens
cgccgcgggctccgcgcccggccggacccgggcccgaggtgcgcgcggagccatggttatcatgtcggagttcagcgcggac

SEQ ID NO: 282838 - DNA, 100 bp, Homo sapiens
gcatgtcggaacaggattggtcagctatccagaatttctgtgagcaggtgaacactgaccccaatggcttcgccgacacgaggtgaccatctgcaattac

SEQ ID NO: 282839 - DNA, 100 bp, Homo sapiens
ccggcgagcagggagcggagtaccagcacttcatccagcagtgcacagtgatgtcttggcattgcccattttcaagcaggaagattccagccttccattg

SEQ ID NO: 282840 - DNA, 80 bp, Homo sapiens
gttgagtcccctgtgtcctcttctgggagaaaatgcagaagtctccatggacgtttccctggcttaccgtgatgacgcgt

SEQ ID NO: 282841 - DNA, 100 bp, Homo sapiens
aacagcctggcgccccacgagcgcggagggcgactttgaactgggcatcagcagactgcttttcaggaagccttggacgctgcaggtgataaacttgtag

SEQ ID NO: 282842 - DNA, 88 bp, Homo sapiens
ggccgtgtctcagtccacccaaggtctcctcggatcgcctggagaggcactcggacctggaagagagaagggcacagttacctaagta

SEQ ID NO: 282843 - DNA, 75 bp, Homo sapiens
atcaagcaacaaaaagaaatcattgaacacggcatcgagctatcctatagcaatggaactcagcgatgcaaatct

SEQ ID NO: 282844 - DNA, 74 bp, Homo sapiens
gtggcccttccaaataagcggcataaagcaattgagaattcaggaccctgatgctcccataagacagaaaatgc

SEQ ID NO: 282845 - DNA, 82 bp, Homo sapiens
ctgtgctcgcgctactctctctttctggcctggaggctatccagctgatacccagcgccgcaaccctcatcattgtggtgtg

SEQ ID NO: 282846 - DNA, 50 bp, Homo sapiens
ccgccgggactcccgtcccagcagatctgttacctaaagcaataaaaaat

SEQ ID NO: 282847 - DNA, 75 bp, Homo sapiens
attattagaattctgccatgcaagtgtgagtcatcctgttctaaagcaagttgctgaacagtttctcaacatgag

SEQ ID NO: 282848 - DNA, 100 bp, Homo sapiens
gttcccgctggacctggatgtgagggtgaaggctgtgctgctgggagccacattcctcattgggtttaaagccaatttgtctctcttgaggaggcctgga

SEQ ID NO: 282849 - DNA, 75 bp, Homo sapiens
ggattccaagtaactcttatttgtgtgtctaaagtgagcacaacttggaagaagatcctagaagatgataagggg

SEQ ID NO: 282850 - DNA, 76 bp, Homo sapiens
tcaggtttgaggttggactccacgagtgtggcaacagcatgcaggtggaagttgatgggtcgaaactaaatgtgac

SEQ ID NO: 282851 - DNA, 96 bp, Homo sapiens
aacttttacaatttccactggaactgtgttcagattcacttccttctcatccttttccaccagctaaaggaagctgtagagaaatatgaagaagtg

SEQ ID NO: 282852 - DNA, 101 bp, Homo sapiens
gcagcattgaacagaaagaagaaaacaagggaggagaagacaagctaaaaatgattcgggaatatcggcaaatggagcgcctgccaacggtaccgctgtcc

SEQ ID NO: 282853 - DNA, 100 bp, Homo sapiens
gcatcctctctgcgagggcagctccgctactctcacctgtgtgcctttgggaaacctgattgttgtaaatgataagaaacctgatcgggaagaaattcag

SEQ ID NO: 282854 - DNA, 100 bp, Homo sapiens
ccacgctctcgtctggtttgatcacaagacgggcaaggtggcttgctttggtgaaggtattcatacagccttcctaaaggcaatgctttccacaggattt

SEQ ID NO: 282855 - DNA, 98 bp, Homo sapiens
cctccccagccacgtggaactaaacagaagcctatcagttgctgaagaaggccacccttcaggataatacaaatcaaactgaaaacaggtttcaaaag

SEQ ID NO: 282856 - DNA, 100 bp, Homo sapiens
cccaagggccgacccccgcaaggagccgaaggcggcgggagccagagtcgccgccggcgtcggcgccgggcgccctgcgtccggcagaggaggcgagcat

SEQ ID NO: 282857 - DNA, 83 bp, Homo sapiens
acagagcctatttacccagaagtagtccatatggtggataatattaatgcagctgtgatggatttgaaaaaaaagaagatccg

SEQ ID NO: 282858 - DNA, 75 bp, Homo sapiens
gggagttgaagagggctgcaaggtgggaagtgaagtcagtgcctcagttgctgctctattaccaggttttaaact

SEQ ID NO: 282859 - DNA, 101 bp, Homo sapiens
actccagtgttaagagaagaaatgaggacatatcagtatcgtactaaggctcgtacgtctgcatcgattatcttacgtggggcaaatgatttcatgtgtga

SEQ ID NO: 282860 - DNA, 90 bp, Homo sapiens
actttcaggagactagacctcgtaattacattctctcggccagcgcctccgcgggagagtcccgtattctcagagtaaaagttgtttctg

SEQ ID NO: 282861 - DNA, 100 bp, Homo sapiens
ggattttcgtctaaaaataacaagaatgggaggagaaggagtcaagggtccagagaaggaggagaagttgagacaggcggtcaagcaggtgctgaagtgt

SEQ ID NO: 282862 - DNA, 100 bp, Homo sapiens
cagggagacgctgctgcagctccgggacacctggggccgccgaggcaaagggcagagcggcttgggtaaatccaccttaatcaacaccctcttcaaatcc

SEQ ID NO: 282863 - DNA, 75 bp, Homo sapiens
tcacagaggggaacagatttcagtgtcctccttagctctgcagccaaacatcatgtcaatggcaacagaacagtc

SEQ ID NO: 282864 - DNA, 102 bp, Homo sapiens
tctaatttgaaccatgtttggattgaagccgcctctgtattacttaccagggagtgcatccgccccaacccttttccccctcgtctcctgtgagaattcccc

SEQ ID NO: 282865 - DNA, 95 bp, Homo sapiens
gtgcgggggctgtggcggttacacggccgggcgcgccggagcgttcaggcttcccgtttttaagcattgacttccaaagactcctggcacatgag

SEQ ID NO: 282866 - DNA, 138 bp, Homo sapiens
cagggcctcgtgaatcccagggaagccatgagctgccacatcacgcccggaaggaagcgggctgcgttggaggggctgcctgataggggctgtaaatctcaaatccagcaatcgaaccccagtggtacaggaatttga

SEQ ID NO: 282867 - DNA, 78 bp, Homo sapiens
tcggcaccttcggcaaagtgaaggacggttgatgatgaagcgccggccgtgtaaatgaagatcgggtgaggagcagga

SEQ ID NO: 282868 - DNA, 83 bp, Homo sapiens
atattctactttctgtctctatgaatgtgactaccctggttacctcatatgtgattgtagagaaggctccaaaagccagggtg

SEQ ID NO: 282869 - DNA, 78 bp, Homo sapiens
tgaagggaggaaatagtggcaggtgacagtctgcatgtgcagttttcaggaagctctacagaggatcatttcaactct

SEQ ID NO: 282870 - DNA, 100 bp, Homo sapiens
ctgggggtcggcaccttcggcaaagtgaaggggcttatttcaaaacctttgtccctcagttccaggaggcagcatttgccaatggaaagctctaggaaac

SEQ ID NO: 282871 - DNA, 99 bp, Homo sapiens
attgacaatccaaaggtgcagaaagcactctgacaatgttctcaggcgctgtggtctcaccttccactggggcaacaatgggccatttccagcagggac

SEQ ID NO: 282872 - DNA, 98 bp, Homo sapiens
gtagctgcggtcgcgccgagaaagtcttccgtgtgtgctaagatcgtgcagctcctggggcagaatgaggtggactatcgccagaagcaggtggtcat

SEQ ID NO: 282873 - DNA, 74 bp, Homo sapiens
gttcagatgacagtgattttaaagttggagatgcctcagacggtctggaaaatcccgaagcagaagcccgtatt

SEQ ID NO: 282874 - DNA, 100 bp, Homo sapiens
gcagagcaccctggagtctgcaaagtgttaatccaggcctaaagacaagtcgtttaggccaattgggtttgaaagaaggatttccatctgctgtgaaaaa

SEQ ID NO: 282875 - DNA, 86 bp, Homo sapiens
aaagtagtagccagaactgagagacagcatcgacaaatggccatccataaaagcattagtgccagcagtagttcccaagggctgtc

SEQ ID NO: 282876 - DNA, 100 bp, Homo sapiens
gtctctctgctgcggcgcggggaccgctgtgctctcgggacatttttgaagaagataattacagccccatccctgttgtcaatgaagaagaatataaaat

SEQ ID NO: 282877 - DNA, 75 bp, Homo sapiens
cgggatattctcttctgtgctgtcaaggctgatgttctaatcatgtcagataaagatgatattgagactccactg

SEQ ID NO: 282878 - DNA, 82 bp, Homo sapiens
ccagatttgtattcgatagaccactgcctgtgtctcgtcttgtatctctaattggaagcaactgaagaagttaagcttggat

SEQ ID NO: 282879 - DNA, 83 bp, Homo sapiens
atgggaggccgcgtctttctcgggactttgaacatgtcggggatcgccctcagcagactcgcccaggagaggaaagcatggag

SEQ ID NO: 282880 - DNA, 75 bp, Homo sapiens
ttcagacctacatccgtgagtggctaatcgtgaaccggaaccgaacaacaacgtatccttacacagagacacaga

SEQ ID NO: 282881 - DNA, 100 bp, Homo sapiens
tggagatgaaattggatactggcattgataggaggaattcaagaaattgctttatggcctgtgtttctttcatgctttggtacaagaaagacggaaattt

SEQ ID NO: 282882 - DNA, 100 bp, Homo sapiens
aaggttacaatagcatacattatgctgccgcctatgggcacaggcagtgtctggaattggtgcgtatagcagcaaaattcatcattcatgcccctcctgg

SEQ ID NO: 282883 - DNA, 88 bp, Homo sapiens
tttatcatggatgctaaccagacttacctggtgtcagaacgcctagaaagcgatcggctggcccttctccaggtcaggaggattctgc

SEQ ID NO: 282884 - DNA, 83 bp, Homo sapiens
atttggctgaggagttttcaatcccagatattcaccttgcgaaacgtttttatgacatggcagctgaagccagcccagatgca

SEQ ID NO: 282885 - DNA, 100 bp, Homo sapiens
tctttccggatcaatccagatggcagccagtcagtggtggaggttgataacactgatgctgaggggaggctcatactggctgatgcgctctgttacgcac

SEQ ID NO: 282886 - DNA, 80 bp, Homo sapiens
tttggctgctgcaggagccattttagatgcgtctgttactagagtggagagtctaccttcgtctcacatgtgccacaaag

SEQ ID NO: 282887 - DNA, 75 bp, Homo sapiens
tacctgaatggagtgaaaaagtggctcacaacattttgtcaggctgttcttgccttagctgcatcttggacctca

SEQ ID NO: 282888 - DNA, 98 bp, Homo sapiens
attagcttataagaaatggggtctacaagatattgacactattattgatcatgctagtgttgatccactgtgcgacgagctgtgccgcacggtgatcg

SEQ ID NO: 282889 - DNA, 98 bp, Homo sapiens
gagaaacgcacttcatcttcatccctccggagaaaaagaatgtgaaattgactaaatacatgacacgaatgcagagtttgagtccagatcccaaagcc

SEQ ID NO: 282890 - DNA, 82 bp, Homo sapiens
caaaaatagtgatagctttgataagaaatatattcttccctctctcctgcctttatgaggaaactgatcatcaaaagttccc

SEQ ID NO: 282891 - DNA, 83 bp, Homo sapiens
atcgaaggtgccaaattcatcatgggggactcttccgtgcaggtcaaaaggctgagtttcaaattctggataatgtagactca

SEQ ID NO: 282892 - DNA, 75 bp, Homo sapiens
ggatcctggactccgtcgggctccgtgcggcggtgagaagccctaccactgcaactgggacggctgcggctggaa

SEQ ID NO: 282893 - DNA, 100 bp, Homo sapiens
tgagctatgcagattttgtttggtttttgatctctgaagaagacaaaaggaatcctaccagaacggcccgggatgttggacttcacgggcaaggccaagt

SEQ ID NO: 282894 - DNA, 100 bp, Homo sapiens
actgacttttcttatgctgggatgtgccttagaggattatgggttttcctaggacattaggacaagccgaagccctggacaaaatctgtgaagtggatct

SEQ ID NO: 282895 - DNA, 100 bp, Homo sapiens
caccacttcatgagtgactcccagggaccgcccgccctgggccccgaggctgccaggcccgccatccacagccgagtttctcttcagcaacgggtagcag

SEQ ID NO: 282896 - DNA, 100 bp, Homo sapiens
aggagatgcaccggctcacggaaaatgtctataagttggcaaacatgaattgactgggcataaagtagctgtgaagatactcaatcgacagaagattcgg

SEQ ID NO: 282897 - DNA, 101 bp, Homo sapiens
cactggtctcaatagaggttatgcgtttgtcactttttgtacaaaagaagcagctcaggaggctgttaaactggtaactttcgaccgactttccccaagag

SEQ ID NO: 282898 - DNA, 89 bp, Homo sapiens
ccaggcactgagctggagcccgcctggagagacagacacgtttacaaggagaacatcatgcgcctctccagccttcacaaggaccgccc

SEQ ID NO: 282899 - DNA, 82 bp, Homo sapiens
cagccctgtctcctcttctgcagttgggatctgcacatttaagcctgaagaagttctactacatcaccctgctacgagaccc

SEQ ID NO: 282900 - DNA, 100 bp, Homo sapiens
tccaaaatcctcggattctctacttctgctgggcataaggaaatggtggcaggcacttcctcctaacaagaaggaagtagttaaagaaaatataaggaag

SEQ ID NO: 282901 - DNA, 75 bp, Homo sapiens
tgaaagacttggtaatggcgacgggtttggtacaatgactcttcttgcttttcacctaagttgaataagcaccct

SEQ ID NO: 282902 - DNA, 100 bp, Homo sapiens
gtcccgttgttgctgccgcccggcaagatgccgatgcctgagccctgtgagctggaggaaaggttcgccctggtgctgatggagcctcactctgttgccc

SEQ ID NO: 282903 - DNA, 149 bp, Homo sapiens
gctggccctcgggctgcgggagccgggctaggacgccgagcggtgactccccgccgctcccgggggccgtgacggtactccaaagattcaggtttactcacgtcatccagcagagaatggaaagtcaaatttcctgaattgctatgtgt

SEQ ID NO: 282904 - DNA, 100 bp, Homo sapiens
gctgacttggacggtgacggcaagctgggctttgctgacttcgaggacatgattgccaaggcccctgacttcctcagagagaagaagaaggaggttcctg

SEQ ID NO: 282905 - DNA, 97 bp, Homo sapiens
gacaagagtggccctgcaggctgagaaactggaccaccatcctgaatggtttaacgtgtacaacaagcaacacagtcactcctggcggcaaaccaaa

SEQ ID NO: 282906 - DNA, 100 bp, Homo sapiens
gacatccgaggtgcctttctccaaaaggtccccagtcccaagcggaagttggaagaaccagttctggagttcaggcctccccgaggagcaatcactcaac

SEQ ID NO: 282907 - DNA, 99 bp, Homo sapiens
ccagaatggttatctacacacccttctcatggcaatcgagttgagtacttggatagacttatacctcagcatgtcagtgaaaaaaccagtgaatcgcct

SEQ ID NO: 282908 - DNA, 90 bp, Homo sapiens
gctcacaaaccacacttggaagtcttgggagaggaaatgctagttctcaagactgctatgatattccacgagcatttccaagtgatagat

SEQ ID NO: 282909 - DNA, 75 bp, Homo sapiens
atggcgacgtctacactgagtcggaggcgaaggaatggtcctcgtccgaagtgagaatgggcagttgttaatgat

SEQ ID NO: 282910 - DNA, 82 bp, Homo sapiens
tctggcaaagatgagggggattcttaagttcgaagcattcagcaaacaatggcaaggcagagccaccagaaacgtacacctg

SEQ ID NO: 282911 - DNA, 74 bp, Homo sapiens
agcccttgccttgagtcagtgcgccgctctccagcccgcttgaacgcagccatcagaagacctggtgccctatg

SEQ ID NO: 282912 - DNA, 51 bp, Homo sapiens
caactcgggcctccccagcgacatttgcagaaaaaacttcagcatgtgcca

SEQ ID NO: 282913 - DNA, 75 bp, Homo sapiens
ggggaagaccagagcattgaagatcagtacaaaaattcttcaagaaatctaaggataaaatggaccagttgctac

SEQ ID NO: 282914 - DNA, 100 bp, Homo sapiens
cacatcttgaaagagaagctcttcctgtgaggtcaaacatgtgttgacatcaaggacaacgtggtggatgaagggttctacttcacccctaagggggacg

SEQ ID NO: 282915 - DNA, 135 bp, Homo sapiens
catggaaagcaaattatgcaagccgtcactcttattctagaaggggaacataacattgaggtcaaagagcagaggatattctaccttattgtagacctacttttccaacatcaaataatcccagagatcccagtt

SEQ ID NO: 282916 - DNA, 100 bp, Homo sapiens
cgcctacatcaacttccagcagcccgcggacggttacttttcacatagaaccatatagcaatcgagatgatcaaaacatgtacaaaaatgtcaagtatat

SEQ ID NO: 282917 - DNA, 74 bp, Homo sapiens
tgctgataaatatacccaaacaccctggagacgaattcctaaaatcccgttttgtcaacctaatgaagcattca

SEQ ID NO: 282918 - DNA, 82 bp, Homo sapiens
ccgcaccaggagcggaacaactgccgggccgcaagtacagccctgggtacaacaccgaggtgggagacaagtggatctggct

SEQ ID NO: 282919 - DNA, 98 bp, Homo sapiens
aagaagcagctccacgaaaggcagccgcggatcgccgcgctcagcgacaaacaatgtgccgtgcaggtgaagctggagctggggcaccgcgcccaggt

SEQ ID NO: 282920 - DNA, 76 bp, Homo sapiens
tacgttcatgtaaacagcatgacgtgaggccgtggatgcaggcattaagcgtcgagggcgaggcccccagcagtga

SEQ ID NO: 282921 - DNA, 82 bp, Homo sapiens
ccgacaaacaccacgagaattccgcagcccacacgatcatccgggaagcccacgggaccctcaggcgggcaggatgaacgac

SEQ ID NO: 282922 - DNA, 75 bp, Homo sapiens
cttggacaagatgaacaacaatatcggcattctgtgctacgaagagcggttctggtgaggttggaaggatgcagc

SEQ ID NO: 282923 - DNA, 96 bp, Homo sapiens
tgtacagaaggtatttctccactgtgccatctgcagagtgaaactgactaggagtactacatagactatatttatccccattttacaaggcctggc

SEQ ID NO: 282924 - DNA, 101 bp, Homo sapiens
gcatcctagccgccgactcacacaaggcaggtgggtgaggaaatccagatttaatccagagactgacttcactatagaacccacagttgtatcaatggttg

SEQ ID NO: 282925 - DNA, 100 bp, Homo sapiens
agcccatcaagatgctttgattttggccggaaacttgcttgcagactagagtacaagtactccaagctggtgatgaatgctactctcaaggactgtgacc

SEQ ID NO: 282926 - DNA, 90 bp, Homo sapiens
ttcaggcagccatgactcttctaagtgatgcttctcatctgcctaaggcgaataagacgagttggaagaagacctgatcaacaacttcag

SEQ ID NO: 282927 - DNA, 81 bp, Homo sapiens
gaagaaaatacttttcttcaatgataagagctgtcagttttctgtggatgaaggctgctccagttacagcaccacccggcc

SEQ ID NO: 282928 - DNA, 83 bp, Homo sapiens
gccgggaccgaaacctagccccggacgagaagcgcagcaacgtgcggtgggaccacgagagcttcgtgccctcgtgaggctgg

SEQ ID NO: 282929 - DNA, 82 bp, Homo sapiens
taccgacccgagttatgcccaccctccaactttgcgacggaaatgtgtcatcgaaagccagatgatgataattccgaagaag

SEQ ID NO: 282930 - DNA, 83 bp, Homo sapiens
ctccagcatgggctcgcctgtcaacgcgcagatggacttcagcagaaatctttatgatattggggaacaactggacagtgaag

SEQ ID NO: 282931 - DNA, 100 bp, Homo sapiens
ggcggggtctgggccgcgcgaggtcaataagcatgcgttttctggagggagagacaccatcgaggagcacaggcagtttgggggcaactgtgatgtggac

SEQ ID NO: 282932 - DNA, 142 bp, Homo sapiens
ccgcacctgatacaggaggggaggagtgcggctcgagcaggctggaggtcaccatccccatcagattactccaaaggtttcggcggcaaatacggtatcgacaaggacaaagtggataagagcgccgttggctttgagtatc

SEQ ID NO: 282933 - DNA, 98 bp, Homo sapiens
aggaggtgcgggcggctgctgaagaacagattaaggtgctggaggtgacggaggttgagaagctgatgtctcctcgacttccaactggaaccttgaac

SEQ ID NO: 282934 - DNA, 100 bp, Homo sapiens
accgccctcaccacccctatccagacggctgcccttcaagtaccactaaagatgtgattaaagagattgaagactttgacagcttggaggctctgcgtct

SEQ ID NO: 282935 - DNA, 100 bp, Homo sapiens
cccggctggcgcacctgggcgtgcaggcaacagctgaacagatgcgtctcgctcaagtgatctttgataagaatgattcagattttgaagctaaagttaa

SEQ ID NO: 282936 - DNA, 51 bp, Homo sapiens
ccgggaggaagcagggcaaggccgacttggagctgatgtctgtgctgtcct

SEQ ID NO: 282937 - DNA, 106 bp, Homo sapiens
tggagcagggcgaagtggttacaagtacagactctggagccagactgcctgggtttgaattgtgcggtttcagatatttggagttcttacaacatggcagacattg

SEQ ID NO: 282938 - DNA, 75 bp, Homo sapiens
acgtcgtgatccagaagtccagagctgaggactgcctgtttgcaggaatggatggtgccacaagggatgccagag

SEQ ID NO: 282939 - DNA, 82 bp, Homo sapiens
ggtatgacccccgctgtaaacagtggatcaaggaagatgatccctatgatcttgaagatgtttctgcacagaaatgagggaa

SEQ ID NO: 282940 - DNA, 84 bp, Homo sapiens
cttggattctcctatggtatcaccacctccagactatcctggagaattttttaaagctgtctgtgagatgtgtggtatcgtggg

SEQ ID NO: 282941 - DNA, 75 bp, Homo sapiens
aactggcacccagtgcttatggttgctggcatggtggtattctatggaggtgggctgaaggcctctgaaagaacg

SEQ ID NO: 282942 - DNA, 100 bp, Homo sapiens
agaggctggaaaggtcatctcggagactagaggctggataccaaatagcagtggaaaccgactgggctggcttagatgaagatgaagatgcacatgtctg

SEQ ID NO: 282943 - DNA, 98 bp, Homo sapiens
gcctcaaaagctggaacagtgcatggccagcaagcactatctcagtgccactgacatgttgggtgctgataagactgtgaaaggcccagatggactga

SEQ ID NO: 282944 - DNA, 98 bp, Homo sapiens
ttgatatctttgaatttctaaatcatgttgaagatggtttgaaggaccattatgatattaagtgagatggaagattttcgaggtatagcagaagaatc

SEQ ID NO: 282945 - DNA, 100 bp, Homo sapiens
taggttccaggactagagagccagcaatgcctccatgaacaatctcacccaattactctgctcagatacgtttgaaatggtttctgaagatgaagatggg

SEQ ID NO: 282946 - DNA, 75 bp, Homo sapiens
cctggagaaagctttaaacaagtggaaccgtcccaaaatgtcccttgctcagaagaaggatcgggtagctcaaaa

SEQ ID NO: 282947 - DNA, 83 bp, Homo sapiens
gtttccgcagcgagagcgaggaggaggaactgtggctgcaccatctgtcttcatcttcccgccatctgatgagcagttgaaat

SEQ ID NO: 282948 - DNA, 98 bp, Homo sapiens
caggccggtgctcttgcaactgacgcagtcactgcagcactggtggaacttgagtgccggtggtggtgtgcacattgagccccggtatagacagttcc

SEQ ID NO: 282949 - DNA, 75 bp, Homo sapiens
cgggaaggtgcggggagcggagccatggcctccgagaatagtgacagtggtacaggaaagaaagaaaaagaaaag

SEQ ID NO: 282950 - DNA, 87 bp, Homo sapiens
catccagagctgtgcctcccagcaccacagtccttctgcagtccctcgtccagccacccccaggccgtatctgaggaacagcagcct

SEQ ID NO: 282951 - DNA, 82 bp, Homo sapiens
gttcaactgagaacttggagcttcggaagaaggtagaggttctagagaacactaatagaagaagctcattcacacagaagac

SEQ ID NO: 282952 - DNA, 100 bp, Homo sapiens
agcttctcaggagatgcagcagggagctacagtcactatggcgcttaacagccctggttgttgctatgaaacagctatgacaagacatttttatcatggc

SEQ ID NO: 282953 - DNA, 90 bp, Homo sapiens
gacagcttctccctccctgaggagtacttcacaccagctccttcccctggcgatcagagctcagatctgcctcttctccaagaaactcaa

SEQ ID NO: 282954 - DNA, 74 bp, Homo sapiens
tattgtggcattgcgccgtacattcgagagtttgagaccgtagctttatgggatctgcgtaacttaaaattaaa

SEQ ID NO: 282955 - DNA, 83 bp, Homo sapiens
ctccggggtcctcatggatctgtccaaaaggccagtcagttggaggagctttttccagtgcaaagacagctatgtcttcatgg

SEQ ID NO: 282956 - DNA, 80 bp, Homo sapiens
caacagccagggacctgtatgtattctccaagcatgacgatgagtgtgtgatccccccttctccgagacgctgagagagc

SEQ ID NO: 282957 - DNA, 100 bp, Homo sapiens
tgtaaatgtcagtggaaaggagagctaccatcactaagcctataaagacctgcagtctcgggaggagactcgaaacgctgcctggaggaagagaggctgg

SEQ ID NO: 282958 - DNA, 74 bp, Homo sapiens
gtcatcacaaaagagttgattgaaattatctctggtgctgcagctctggcttccgagtggacctgccaatcaag

SEQ ID NO: 282959 - DNA, 88 bp, Homo sapiens
tccggatcaatccagatggcagccagtcagtggtggaggtggatgaagactacatccaggacaaatttaatcttactggactcaatga

SEQ ID NO: 282960 - DNA, 51 bp, Homo sapiens
tttaaacctgagccactatctgaagctctgggttcccttcattatcctgtg

SEQ ID NO: 282961 - DNA, 80 bp, Homo sapiens
gaatttgttactttttcttgtccgggtgcggataagggacccgacactgattgcctccggagccagcgtggtggccatag

SEQ ID NO: 282962 - DNA, 83 bp, Homo sapiens
gcttaagcccttctcccgcctcacttccgaggcaataggagtgaaacatccacatctgataacacagaaacttaccaagagaa

SEQ ID NO: 282963 - DNA, 75 bp, Homo sapiens
aagccccctgcaggaactctacaacccaatccagacaactgggcggagttaatggaagtcaaccatgatgacaaa

SEQ ID NO: 282964 - DNA, 86 bp, Homo sapiens
gttggcctatcaggaccatcggtgtagggatgtccaattaccaaaacaaaagtgatcctcaaggtagagcaaggacaagagccatg

SEQ ID NO: 282965 - DNA, 82 bp, Homo sapiens
tcctggagagcctgcaggacggcgcggcagagtccccgtacgcctacagtaacgggaaattcaactactgaggaggttacgg

SEQ ID NO: 282966 - DNA, 100 bp, Homo sapiens
gaattgattgcaatcaagtggacaaaccttcagatcgtggcaagcgagcccggggtagagctaatgatggaaactggccaacattaaaacagaattctag

SEQ ID NO: 282967 - DNA, 98 bp, Homo sapiens
cctggttctccttggatctgtggtctctggagctgtggttgctgctgtgatatggaggaagaagagctcaggtggagcgagaacggaggaagctgaag

SEQ ID NO: 282968 - DNA, 101 bp, Homo sapiens
ggtcaagcctcgttccaggcccagccaactcctgcagattagtgacaagagctggggttaggatccggttggactctgacatcggatgccctcaaacatac

SEQ ID NO: 282969 - DNA, 98 bp, Homo sapiens
ttggctatacctgtaaatggtggtctagcagccaggactcttctgaggaagataaggaaaaagaagaggttgctgctgtcaaaatccaagctgccttc

SEQ ID NO: 282970 - DNA, 100 bp, Homo sapiens
aatactattatggataagatgatgggagctggtaagtcgcctacaggagcgaaatgttcaggttttcctaatatctggtggctttaggagtattgtagag

SEQ ID NO: 282971 - DNA, 100 bp, Homo sapiens
gctgaccctggccttcaaccccgagccgctggtgctacagtttgtcgctgatggcatcttcaaagctgaactgaatgagtttcttactcgggagctggct

SEQ ID NO: 282972 - DNA, 88 bp, Homo sapiens
aagaccgagcgggactatgtgggcacgctggagttcctggtgtcggtgtcttctctttagggatggtgaggttggaaaaaggctcctg

SEQ ID NO: 282973 - DNA, 48 bp, Homo sapiens
gttattgcagccaaatccaagtgtctgcttttggggcagagttttcat

SEQ ID NO: 282974 - DNA, 100 bp, Homo sapiens
tggcacatatatgctgcaaaggacacggagaagataagggaatttcttaaaaagtatccctctgaagaagatatgatcgaatgggccaagagggaaagtg

SEQ ID NO: 282975 - DNA, 100 bp, Homo sapiens
gcttgggccgccgagctggacccggaccggttttggaaaaatggctacaaacttcctagcacatgagaagatctggttcgacaagttcaaatatgacgac

SEQ ID NO: 282976 - DNA, 96 bp, Homo sapiens
tttgattaataagcttaaacctggcgtcattaagaagatcaatagactgtctacaccaatagcaggattggaagatgatccctatgatcttgaaga

SEQ ID NO: 282977 - DNA, 82 bp, Homo sapiens
gtgctgttgtgtcgtcagcgggatctctgaagtcctcccaactaggcagagaaatcgattactctcgtggctttggtggccg

SEQ ID NO: 282978 - DNA, 117 bp, Homo sapiens
gactatcattactcctccaacaccaatcatcccagacgagtttcaagaagtttttaaccgaagtgtcatgattattgcagcaacaaatagacctgatgtgttagatactgctttgtt

SEQ ID NO: 282979 - DNA, 101 bp, Homo sapiens
cctgtgtccctgaccatggctccctgcagtaccctttaacgccaccattggttcaggcaatcttcagcggtgatccagaggagatccggatgctcatccat

SEQ ID NO: 282980 - DNA, 82 bp, Homo sapiens
accaagaagctgttccgcaggaggagaaatgatcgaagaactgccattggatgtccagaatcccctgtagttgataatgttg

SEQ ID NO: 282981 - DNA, 90 bp, Homo sapiens
ttgtgcagtgggcaggaagaacccatcgggcagctacacatcttgaaagagaagctcttcctgtgagaacatggtccaagacaattcctg

SEQ ID NO: 282982 - DNA, 49 bp, Homo sapiens
ccctttccacctcgcggcagttcggtgggtcatgataactgggtacgtg

SEQ ID NO: 282983 - DNA, 121 bp, Homo sapiens
gccgcccattcccggcgcgcacctggcagtcccgggctcgagccccgccctgccgccagccagaatcagggagtcccagtaaagggaagtcctacacaggcctggggaagaagtcccggct

SEQ ID NO: 282984 - DNA, 76 bp, Homo sapiens
ggatgaaacactaatgtgttcttttcagatctctcgtggaagaggaagaccaacacatgaaattgtcccttggagg

SEQ ID NO: 282985 - DNA, 98 bp, Homo sapiens
gtgagagtccgtaaggagcagcttccaggatcctgagatccggagcagccggggtcggagcgggatgcagaaggctatcaacaggctgagcaggcttc

SEQ ID NO: 282986 - DNA, 88 bp, Homo sapiens
agggatgacagttgaaggactgaaacagtttattgctgctcagtggtctggaactgaaagtgatgcgtatttctgagttatgcctgta

SEQ ID NO: 282987 - DNA, 74 bp, Homo sapiens
aggatccagagtcagaggtaccaggagaaggccatcagcatttgggagtcaaagaatttcttttttgaacttga

SEQ ID NO: 282988 - DNA, 100 bp, Homo sapiens
agcctcccaaagtgctggtattacagctactacttatacatgtgtgataaagtggttgccccaaatgtgtcacttacttctgctgtatcccagtctaaag

SEQ ID NO: 282989 - DNA, 100 bp, Homo sapiens
tttttctgagatcatcaccaccccgacggagacttgtgacggtgagaagccctaccactgcaactgggacggctgcggctggaagtttgcgcgctcagac

SEQ ID NO: 282990 - DNA, 83 bp, Homo sapiens
gtgtgcctcgggtcggtgcaccgtccgggattttatccaccggcactgccaagatcagataacgaaggaggcccaacttcatt

SEQ ID NO: 282991 - DNA, 82 bp, Homo sapiens
gccatcaccacgcagaacgtcaacaccaagtgcatcaccatccccagcaaaatgatgcttcaacacccaggccaggtctctg

SEQ ID NO: 282992 - DNA, 75 bp, Homo sapiens
gagtagccacagcggcagctccagcccggcccggcagcgacatggaagagcgatcgtcttctgatcaaaggaggt

SEQ ID NO: 282993 - DNA, 75 bp, Homo sapiens
ctcgcacttgctcaacaagggcctgccgcttgtgaggacccttggagggctgctaaaatgatcaagggttacatg

SEQ ID NO: 282994 - DNA, 98 bp, Homo sapiens
gagatgctggcgagacgacagcgagatcctctccaggccctgcggcgccgcaatcaggagctgaagcaacaggaaaatgtttcaacgtgcgcaagagt

SEQ ID NO: 282995 - DNA, 100 bp, Homo sapiens
gagggctgagcagtcaactcaaatgcaagtccaagaggaggaggaggcggaggtccaagcggaaagggaaacttcgtggcttgcatgacagctattttac

SEQ ID NO: 282996 - DNA, 74 bp, Homo sapiens
ttttaaacaaagccgtctgtagaggatcctttccccattagacattttaaatcctaaggatgtgatcacaactc

SEQ ID NO: 282997 - DNA, 88 bp, Homo sapiens
tggcctctgacagcccctcctcgccaagagagctcctcggatttcaccgcgcggcggctctcaggttcatcaatgccagaagacgaat

SEQ ID NO: 282998 - DNA, 82 bp, Homo sapiens
cctgcgtccagcgagaggagcgcggcagggggccgggggcccaggtgagaagccctaccactgcaactgggacggctgcggc

SEQ ID NO: 282999 - DNA, 82 bp, Homo sapiens
cccccccggagaaaaagttgaagcgttatgttctcctgcgctgcccaacagcatggtgtattttggaagctctcaggatgag

SEQ ID NO: 283000 - DNA, 100 bp, Homo sapiens
gacgggaccgagcgagcgaccgacgcgccacccgccgacgcctcagccgcttggggcccgcacggaccctctacttcactactctgacctacgacactct

SEQ ID NO: 283001 - DNA, 51 bp, Homo sapiens
caggaacacaacctcaccttgatcagaactggcatcaaatactcacaacat

SEQ ID NO: 283002 - DNA, 100 bp, Homo sapiens
cgccacagctttaggaaacacctctacctcctgcgaggcctcccgggctccgggaaaactacactggccagttgctctaggtcgtaaccagcctttgaaa

SEQ ID NO: 283003 - DNA, 98 bp, Homo sapiens
atgatcgttgtgttgtacagccagaaaccggggaccttaacaatccacctaagaaattcagagtgatatcagtatcaagataaaagtttggaatggga

SEQ ID NO: 283004 - DNA, 50 bp, Homo sapiens
ttctttataaattacccagtctcaggtatgtccttatagcagtgtgagaa

SEQ ID NO: 283005 - DNA, 100 bp, Homo sapiens
gcgcgggctacgcccacttcctgaacgtgcagggccggacgctctatgacgtcatcttgtacggggatcatgtaccgcaagtcctgtgcatcatcagcgg

SEQ ID NO: 283006 - DNA, 98 bp, Homo sapiens
atggagaccctcacggagctgggcgacgagctgaccctgggagacatcgacgggaacccgagcgtcatgttagggtgaagcagaggacctcagtgctg

SEQ ID NO: 283007 - DNA, 100 bp, Homo sapiens
gaatgtggaaataacggagcaacttgctaatggcaggcattttacaagatcatcatggcaaaaccagctggtgggcccaagcctccaagtgggaagaaag

SEQ ID NO: 283008 - DNA, 131 bp, Homo sapiens
ggggaccgccctggacatcaagattaaaagagcgaataaagtttatcacgccggggaggagagacttcagcatgcaaaccttcatctgttcggcttgcaccgtcattttcattccatgctgctggccttca

SEQ ID NO: 283009 - DNA, 80 bp, Homo sapiens
tgactggaacatgctgaaattcatccctttgggcgtcccacaagcttcgcctctttggctgccctctccaacggggcctt

SEQ ID NO: 283010 - DNA, 99 bp, Homo sapiens
tgctcttccccagtttgaaattttcagacaaagatacagaagcccctcagggaaaaatgaggaagctgtgagtaccagtggaaggaacgagccaggaag

SEQ ID NO: 283011 - DNA, 86 bp, Homo sapiens
cggcttgtcctggctcttgccctcatcctggttctggaatcctcagttcaagtttggtgccctggttgtcagatgttggaaagcag

SEQ ID NO: 283012 - DNA, 100 bp, Homo sapiens
cttcggagcccctccacaagttccatctaggcctacgagggccccgcccagtgtcccaaggtgccagatgtgacatccagatgacccagtctccatcctc

SEQ ID NO: 283013 - DNA, 83 bp, Homo sapiens
tgcggctgcacgtctcgcggatcatgctcagcctcccgcgacgatgcccctcaacgttagcttcaccaacaggaactatgacc

SEQ ID NO: 283014 - DNA, 75 bp, Homo sapiens
gacgatctccatatttcattgcaaggcacgtgtggttctcaaatataggcattctgatgggaacttgtgtgttaa

SEQ ID NO: 283015 - DNA, 75 bp, Homo sapiens
cattgcacatcctgaccaccttgcaagagccacatgacaagagttccccaccaccaagttagagatgactgctgt

SEQ ID NO: 283016 - DNA, 90 bp, Homo sapiens
ctttttggcctggcttgtttgcaaagctgaagaaatcaggggagaaacccctgcttggtggaagcctgatggaatatgcaatcttgtctg

SEQ ID NO: 283017 - DNA, 75 bp, Homo sapiens
cttccctgtactctcatcgctctcggcctccgacacggatgtacagttacccagcacgtgtacctcctcctcctc

SEQ ID NO: 283018 - DNA, 97 bp, Homo sapiens
gaaagcctgaggaaaaagcggccgcgtggtttttccccatcatcggccacatgggcatctgcacatccacaggagtcattcgggacttcgcgggccc

SEQ ID NO: 283019 - DNA, 99 bp, Homo sapiens
ctcggaggggagggggcgttagccccgcgcagccgccggcgtcgccgccatggacctagcccatgaaacccctgaaggccaccgccaccacctcccagc

SEQ ID NO: 283020 - DNA, 100 bp, Homo sapiens
atcttcaggaattttactgggataattatccaaataaattgcaagcattctatccaaatggatgataatgaagataattcaaatgatgggacccagccat

SEQ ID NO: 283021 - DNA, 100 bp, Homo sapiens
agtcaaatggagagtatgctcatcagtggctatgcactcaactgtgtggtgggatcccaggagcaacaagatatggatttggatatagaatttgatgtac

SEQ ID NO: 283022 - DNA, 80 bp, Homo sapiens
acccgttctacgacgtggccagacatggcattctgcaggtggcagggtgcttcaaggatgaccgcatcgtcttctggact

SEQ ID NO: 283023 - DNA, 90 bp, Homo sapiens
agaaaatgaagagtttgttgaagtgggaagattggggccttctgattattttgaacccaacgtcttcctcatcttcagccatggactgca

SEQ ID NO: 283024 - DNA, 99 bp, Homo sapiens
cccccagtgcttctggaaaagctgactgtgctgtcctgattgttgctgctggtgttggtgaatttgaagctggtatctccaagaatgggcagacccgag

SEQ ID NO: 283025 - DNA, 98 bp, Homo sapiens
tcacgccagcctggatggagaacccctacatcaagtgtggaaggggagtatgtcccagtggaaggcgacgaggtcacctataaaatgtgctccatccc

SEQ ID NO: 283026 - DNA, 100 bp, Homo sapiens
gatcgggtggagtgtaggtcatatcgccgcgaattccgttgatgcagcaaagccgctgctgcggaaggcgatccagatctcacagcagaccccatattgg

SEQ ID NO: 283027 - DNA, 100 bp, Homo sapiens
cagacgtgcgacggcgacggggacggatacatcagcaggaatgtcgttgtctgctgggtcttcccctcttcattcccccaagattactccacatacttct

SEQ ID NO: 283028 - DNA, 100 bp, Homo sapiens
actgaatattacccttgtgcttgccgatcctgatgaatttgagcgaatatatgagcctctggatgtcaaaagtaaaaagattcatgtagtggacagtggg

SEQ ID NO: 283029 - DNA, 75 bp, Homo sapiens
cgggagaggagtctccaccaggactgaccgctgccgcccagcacgtccaggagtaaagaaaattgtgttgtggat

SEQ ID NO: 283030 - DNA, 98 bp, Homo sapiens
gtgtcctgttggtggttctcttcgtcatgatcaacaaatatggtcgacggtccaaatttggaatgaagggagcccagcagccggggccgccctattac

SEQ ID NO: 283031 - DNA, 75 bp, Homo sapiens
ctgaccgctgccgcccagcacgtccaggcaggtaacttgcagactcacttacgacggcattctggtgaaaaacca

SEQ ID NO: 283032 - DNA, 83 bp, Homo sapiens
cctgcgtcctttttcgtttttcggatgatgccttcaatactacctttatttccaccataggaaaatgttggggcttttcagga

SEQ ID NO: 283033 - DNA, 98 bp, Homo sapiens
gtggagtggctggaggaggatgaacactatgattaccaccaggagattgcaagagctgtgttgccgctttccttgatgttgtgattgggggccgtgca

SEQ ID NO: 283034 - DNA, 83 bp, Homo sapiens
agatttacctgtgagatgtttcatcccaacagaggaagttaagtcttcagagcctactgaggatgtggagcccaaagaggctg

SEQ ID NO: 283035 - DNA, 50 bp, Homo sapiens
cacggaggttccggccccgaagaacccagcgggtgccgcttctccacccg

SEQ ID NO: 283036 - DNA, 100 bp, Homo sapiens
ttcctgatgaacctaaatggatgggtggagctgagggtaagaagtaccaatgggatgcagaaactcaaggatggattctcggttcctttttttatggcta

SEQ ID NO: 283037 - DNA, 100 bp, Homo sapiens
agggaacaaactccagaaggccaaatgaatcatttgctgtttcaaatagagaactgtgcgatgatgagaaagagttcatacattttccagtatgtgaggg

SEQ ID NO: 283038 - DNA, 82 bp, Homo sapiens
tggccgcgggctccatcagcatggctgaggccctgggaggagcggggacactgaggacctctctccaaattggcctctcaac

SEQ ID NO: 283039 - DNA, 75 bp, Homo sapiens
aagaagaggaagtagccaaagagcaactaactgatgctgacaccaaagtaagagatgctaaaaaccttgtaccta

SEQ ID NO: 283040 - DNA, 83 bp, Homo sapiens
ccaagaagccaaagaactggctaggcaaataagctttaagatggagtttgacgagaaggacttacgacgggagatcagctatg

SEQ ID NO: 283041 - DNA, 100 bp, Homo sapiens
gaatatatcagccttcggctcatcatatcagagctgaggaatcaatatgagacgaagtcgcagacgtcggtgacactcagcatcgtccactgccctcccg

SEQ ID NO: 283042 - DNA, 83 bp, Homo sapiens
ctttgacacacagcagttcttgtcagtgatcagggccaaagcggtcagtgagaaggaagtggactctggaaacgacatttatg

SEQ ID NO: 283043 - DNA, 100 bp, Homo sapiens
gtaaataccggcactgccagtaaactcacctttgggactggaacaagacttcaggtcacgctcggtgaatctggattgggaaagtcgacattaatcaact

SEQ ID NO: 283044 - DNA, 82 bp, Homo sapiens
cctctctcctctcccagttccgcagtccttcctggcaaacagacctcctgccccccgaggtctgcagtctcctgaacccagc

SEQ ID NO: 283045 - DNA, 100 bp, Homo sapiens
cccggagcaagcggagctcccccaagagccggaaagggcatgaccattcggcccctggtagacctgttggctgtgaagaaaaagcaagagacgaagcgct

SEQ ID NO: 283046 - DNA, 100 bp, Homo sapiens
tgaaagaagctgccaagatagccaaagacaagacgcaggagaaaatcgagacctcaagtaatcattcccaagcctctctggcagtgtcccaagagttcac

SEQ ID NO: 283047 - DNA, 98 bp, Homo sapiens
ggagcctcagttggaagcagccgatccagcctgcggagcctgtggggcagtctttcccagggaactccgatgaagtgttccaacaaaatgagcgagtg

SEQ ID NO: 283048 - DNA, 96 bp, Homo sapiens
ccgtggggacctctgtgctgacagtcctgaaaccagcctggacaccaagtctgtgtcagaaggccacctcaagaggaacatcgtggtgaagaccgt

SEQ ID NO: 283049 - DNA, 90 bp, Homo sapiens
atgagacttttgcactgtaaaactttacacattgtgctattcactctgctttacaaggtcacaaacatgtcagacaaaagtgaattaaag

SEQ ID NO: 283050 - DNA, 100 bp, Homo sapiens
ccagggtcttctaagtcagagacatcaaaacctggaccttctggattacaggccaaattagcaactgcagaaccttggcctgaaaatgctacattatatc

SEQ ID NO: 283051 - DNA, 46 bp, Homo sapiens
aaagtgctgggattacagacgtggcacatttagaacgaacagggca

SEQ ID NO: 283052 - DNA, 100 bp, Homo sapiens
cacaaatcctccccaagtagctacctatcacagagcaattaaagttacagtagatggacctcgggaacccagaaaaaactgaatatcctgatgttgcttg

SEQ ID NO: 283053 - DNA, 83 bp, Homo sapiens
gccgccagggctctatcaaggggctggtgtactccagcaacttccagacaatgcagatcttcgtgaagactctgactggtaag

SEQ ID NO: 283054 - DNA, 100 bp, Homo sapiens
ggattacttgcgctgtgctgcaggctctgccagcgatctgtacatgagacccaggaattatttccaaagcaagattcatatgctgaaggggtaacagaca

SEQ ID NO: 283055 - DNA, 100 bp, Homo sapiens
aatcagacccgtgaatttgatggtactgaagttttaaagggagatgaggtgggccatgcacagacacagctcatgtctcattaatcacaccaacaaaaag

SEQ ID NO: 283056 - DNA, 90 bp, Homo sapiens
gccaaacagaggaaaaaatctcagattcaaggccggaaaaaactcaaatctgaatttaatgagcctggctgcctgctgtttcccggggag

SEQ ID NO: 283057 - DNA, 83 bp, Homo sapiens
ggcagacacgcccgagctccagagaatcaagaagacccaggaccagatcagtaacgagcatattaatgaaaagtgccataaac

SEQ ID NO: 283058 - DNA, 100 bp, Homo sapiens
tgtgctgggggaccctataaagccccagtctctcagtattgcctcaaatgctgctcatggaagatccaaatccggtgccatggatgtagctttgggatca

SEQ ID NO: 283059 - DNA, 75 bp, Homo sapiens
cgcaagaacatatgccagttcctcgtagagaagctgaacatggttatgcctccatgttaccatacaataacaagg

SEQ ID NO: 283060 - DNA, 75 bp, Homo sapiens
cccaaccactgtctacgtggacatgagagccctgagacacgacagtgagaaagatcagtctaaagaaaaggagaa

SEQ ID NO: 283061 - DNA, 83 bp, Homo sapiens
tcgacatcctggagatgctgagcagagccaaggatgagtatgagagggttgttgatcattatgaaaatcctagaaacgtgggg

SEQ ID NO: 283062 - DNA, 75 bp, Homo sapiens
ccacgtgttcatctggatctcgttcatagacagctactttgaaatcctcttggccacatctgccagagcctggag

SEQ ID NO: 283063 - DNA, 90 bp, Homo sapiens
agaaccagatccgggagcacgtcatctccatcgaggactgtgccctgtccacggtgcctcctgcatgtcctgctgccctgagctgtcccg

SEQ ID NO: 283064 - DNA, 97 bp, Homo sapiens
tctttctggcctggaggctatccagcgattggtagcttatgtcgatcttgatgaaagagcaattgatgctctcagggaatttaatgaagaaggagct

SEQ ID NO: 283065 - DNA, 76 bp, Homo sapiens
tgtcccgaggtgaacaggatttaattgaggatctcaaacttgcaagaaagatctcataggaaatgttcaacaattc

SEQ ID NO: 283066 - DNA, 83 bp, Homo sapiens
atcaacatcaacacctccacctccaagttctggggagtcggtgaagtacttcctggacaacttggaccggatcggccagctgg

SEQ ID NO: 283067 - DNA, 100 bp, Homo sapiens
tggattggtggatctgaagtacaaaatattttccaggagctctgtctaaacatcattccaacctttgcaaatcttatagactacccatccatgaaaaacg

SEQ ID NO: 283068 - DNA, 100 bp, Homo sapiens
tgctgctcctcacggacgaccaggacgaagtgctcggcggcatgtggactttggagtgcttgcagtaagacactcacaagacctcagcagtaaaagatta

SEQ ID NO: 283069 - DNA, 100 bp, Homo sapiens
ctcagaaaatacgtggttggagagctcatctggaattttgccgatttcatgactaaccagtctccaccgggaactccacgcccacgcgcctcacttccag

SEQ ID NO: 283070 - DNA, 51 bp, Homo sapiens
cttcagcgcagtatattactgcagcaaaatctggtggaaagaagtctctag

SEQ ID NO: 283071 - DNA, 75 bp, Homo sapiens
agtacgatgatgaaaaaattatcagtggcctacgagataattctattaaggctctggaagaggatctgaaccaga

SEQ ID NO: 283072 - DNA, 100 bp, Homo sapiens
cgggagtgttggttaccatggtgaagctggcagccaaatgcatcctggcagataagtactcctctcagtttggtggtggaagtcaatatgcttatttcca

SEQ ID NO: 283073 - DNA, 85 bp, Homo sapiens
atcttctattatctcctgtctggggctggagagcacctgaagagacacagcattgttggttttgccatgtactattttacctatg

SEQ ID NO: 283074 - DNA, 84 bp, Homo sapiens
gagaatttaacaaccttttggtcatggggactgatagaaggtttgatgaagcaaggaacattgcagtctgtgtggaattccggg

SEQ ID NO: 283075 - DNA, 83 bp, Homo sapiens
ctgcagcgttctgtcaatggtctgtgctgaccctgtctacaaagtgtacgttgctgctttaatattcaggagcagcatgtgga

SEQ ID NO: 283076 - DNA, 75 bp, Homo sapiens
acaggacctggaaaaattacatcttattcagctgattctgaatcatcttacactaccagacctgtgtagattagc

SEQ ID NO: 283077 - DNA, 50 bp, Homo sapiens
gaattttcacctggaacatgagaggttccagttacagctatatcagagaa

SEQ ID NO: 283078 - DNA, 95 bp, Homo sapiens
gaatgcgtcggaagtaggctccccaccctcctactccgaggccttgctggaccagagtctagagtgcagccagtcaagaagatttctagaaattg

SEQ ID NO: 283079 - DNA, 105 bp, Homo sapiens
aagaaatcaaaataaaggaaacacatttcatatactgcagggcaagtgtccagagaatggctgggatgaaagtacacttgaactctttttacatgaacttgcaat

SEQ ID NO: 283080 - DNA, 82 bp, Homo sapiens
ctgtgagcctcagcagctccagccagcggacccgacggctgagagtgttaatgtaccgcggtgaggctcttgaagatttcac

SEQ ID NO: 283081 - DNA, 93 bp, Homo sapiens
gccactgctgccgccgcccccggagctgctggtttcattcgaggtttcgggccggcagaagctcctcctggggtagagacagatcttattgat

SEQ ID NO: 283082 - DNA, 101 bp, Homo sapiens
tctgtattcagatcttcatgtgtctcttctaagctgaataaagctgttttggaactgtcaggtacctcaaagcacatgcagtgagaagagtaccaacttgc

SEQ ID NO: 283083 - DNA, 82 bp, Homo sapiens
gtgaacaagctgtggtacaagcccgtggaacaattcatcttaccagagattgcccaaggactccagatactccaaataatga

SEQ ID NO: 283084 - DNA, 108 bp, Homo sapiens
ctactgatggtgctgtaaccacctcacagattccagcttcggaacaagagaccctgacctgcctagagctggaacgttacctccagagcgagccctgctatgtttcag

SEQ ID NO: 283085 - DNA, 74 bp, Homo sapiens
gaaaataagatggaacccatccacataagctttctaaaaccaatttttccaacaacaacgatttccgtgctctt

SEQ ID NO: 283086 - DNA, 106 bp, Homo sapiens
gcccctgccggagatccctcagccctggctggtgaaaggtgtagcagtcactcggcctacacccacagcatcgaccttgtgaacccagcgacctgactgccttggg

SEQ ID NO: 283087 - DNA, 98 bp, Homo sapiens
ttgctctttcactgctttcaactggtagttgtggtcctcacacaggtattcaggaataccaggatggcgtgcccaagattccaacagcctgtattacg

SEQ ID NO: 283088 - DNA, 50 bp, Homo sapiens
gtgcatgctgatgacgaaaaacatccagacatttaatgtggatgcaccat

SEQ ID NO: 283089 - DNA, 97 bp, Homo sapiens
cgacgacgacgaggaagaggaggtttctgagaggaagccagatcgctgagggtccggtctccagtttgcctcctgctatatccattggaagagaaaa

SEQ ID NO: 283090 - DNA, 74 bp, Homo sapiens
cgacgagctgaccctgggagacatcgacgctcaagaggtttggatatggaccttcttcaattcctggccttcct

SEQ ID NO: 283091 - DNA, 100 bp, Homo sapiens
atttgaagtctgtgtcaaacatccatatcataagtggaattttggagatattcaaagtctcccatcaaaggacgtgcacagccttatgatcccaattttt

SEQ ID NO: 283092 - DNA, 98 bp, Homo sapiens
ctgactcagctgtctcctggccctgacttttctaagatgagaggagctggtaggaacaatttggaggaaatatcattctgcaaaagaagcttatgaac

SEQ ID NO: 283093 - DNA, 74 bp, Homo sapiens
aggagtataaccgaattcagaaggagctggagagagagaaagccagatatgtgttgagacggattctccgccga

SEQ ID NO: 283094 - DNA, 80 bp, Homo sapiens
cacggggtgaaactgaccacagtgctcaccacccaccaccactgtccagaatgacagggtccagaaactggcgagccacg

SEQ ID NO: 283095 - DNA, 100 bp, Homo sapiens
tgaatgtggccaagttgcgttacatgagccgagatgacttcagggtcttgaccgcgttatgcagacattttgattgagagggaagtattaatgcagaagt

SEQ ID NO: 283096 - DNA, 100 bp, Homo sapiens
ccaatctctccccgcgagggcggaggcgccgaaatcaaagcgagagcgcctcggcctctccagctgtccgcggaacaagcacatcatgattgacttgggg

SEQ ID NO: 283097 - DNA, 99 bp, Homo sapiens
ctggaggtggggccgggcctgcgtagtgaaactgcgtaggaacctgggaagaagttttctggatatgccgcagaaggatccgtgccagaagcaagcctg

SEQ ID NO: 283098 - DNA, 75 bp, Homo sapiens
cggaagctgagtttttatccgttatcaatactctggctgaccatcatcatcgtgggactgactttggtggaagtc

SEQ ID NO: 283099 - DNA, 75 bp, Homo sapiens
aaagcttggagataaagttgctttttactgatgatgattattccccaccttctaagagacaaagaccaacgagcc

SEQ ID NO: 283100 - DNA, 99 bp, Homo sapiens
gaaggtctacatgccccgggaggggaagctcatctctgacatcaacaagctggtggagctgtctaaggctcaagatatagaagcaggagatggcaccac

SEQ ID NO: 283101 - DNA, 100 bp, Homo sapiens
gtcgtgctctcgccccaacccgcgcgccaggggttctgaaggaacattaaatgactgcaagataatatctgtagatgaaatcttcaagattgagagacct

SEQ ID NO: 283102 - DNA, 75 bp, Homo sapiens
agaggggcagcagctttcagtctggtcgagacgacagccctgaagaggaaagtgaggatgactctcatctcgaag

SEQ ID NO: 283103 - DNA, 100 bp, Homo sapiens
tccactgggaacctttgccagagcatgtgaggaaggccctccagtcccccataagccccatcaggaagctgcacaagccttaatttatgctgagatggca

SEQ ID NO: 283104 - DNA, 89 bp, Homo sapiens
ggggcttgccctggtcttgctcggccgatgaagtgcagaggtttttttctgaaacatgttccaaatcaagtatagatattgagaatggg

SEQ ID NO: 283105 - DNA, 82 bp, Homo sapiens
cgctggagcgggcggagctgtgcgagagcctcctcacttggtaacctttggaaacatcagaagctactctccattgacctgg

SEQ ID NO: 283106 - DNA, 100 bp, Homo sapiens
ttaaaaccagggctccacagttaggagatgccgatggtcctgctccccttgaactacccaaccagtggctctgggatattatcgatgagttcatctacca

SEQ ID NO: 283107 - DNA, 101 bp, Homo sapiens
tgatgaagaaaaaactgccaaatttattgaagagcaagtgagaagaggcctggaagggaaggaacaggcttgaaaaagataatgccaagttaaaagttaca

SEQ ID NO: 283108 - DNA, 98 bp, Homo sapiens
aaagaccggcatgccctattctgtgggcttccgcgaagcctgacctctcgggacacacccagccctgtggacccagacaccgtggaggtgttgatgac

SEQ ID NO: 283109 - DNA, 82 bp, Homo sapiens
ggggacttcggcggcggcgcctcaggcacctcggcccggatccttcctgggcatcagtaaataggggaacgtttttatgtga

SEQ ID NO: 283110 - DNA, 50 bp, Homo sapiens
cggatgggaccaccagagtgctatctcacattcttgaaggtggcattgaa

SEQ ID NO: 283111 - DNA, 73 bp, Homo sapiens
tgcaagcttagagcgtctggccaagaatcagaggaagtggctaaaccatttacttctaaagtgaaacaaatgc

SEQ ID NO: 283112 - DNA, 83 bp, Homo sapiens
cttcatttctctgaacatactgccttatgggacagatcaagaagcagaatctggtaatataagtcaaaagtctgatgaagaag

SEQ ID NO: 283113 - DNA, 75 bp, Homo sapiens
ggggatcttcgcactatcccaagaggagaaatgtctgaagtaagacccctctccagagacatcttgatggagacc

SEQ ID NO: 283114 - DNA, 98 bp, Homo sapiens
ggggctcccgggagcggcccttagcgaccccgcccgggccccctcaggagtctccccaggacagtgctatcacccgggatattaaccgaacattccca

SEQ ID NO: 283115 - DNA, 82 bp, Homo sapiens
tcgcgtctcggaaaccggtagcgcttgcagcatgaattcaattcgtcataatctgtccctacacagcaagttcattcgtgtg

SEQ ID NO: 283116 - DNA, 100 bp, Homo sapiens
gcgaagctggccgagcaggctgagcgatacgacggcacttccgttccggcgcccctccggtcatcaacccgctgggcaccagcttcccggacgacaccgc

SEQ ID NO: 283117 - DNA, 84 bp, Homo sapiens
gttgtggtgggatccgtcgccgtttctgaaaaaggccaacgaggtgacggacagcgcgtacatgggctccgagagcacctacag

SEQ ID NO: 283118 - DNA, 100 bp, Homo sapiens
caccatcctcaacgaccggggcgtcggcatgctcacccgcctctacaacatcaagaagacatgcacatgatggtgtccaagccagaacagtgggtaaagc

SEQ ID NO: 283119 - DNA, 100 bp, Homo sapiens
ctggggactacgacgtccctcaaaccttgcttctaggagataaaaaggtgacttaagagattaaaattaatttggttgctgttggttctgaacaaataat

SEQ ID NO: 283120 - DNA, 98 bp, Homo sapiens
aagaattctctatttctgctccgtcatccatgccactaaacatgccaagggacaagtgttatttgacaaagtgtgtgaacacctcaatctcttggaga

SEQ ID NO: 283121 - DNA, 75 bp, Homo sapiens
gagcgcctgcgaccccagtcggtgctccggggaggtcacctgacgaggagctgccactgcagagccccgccatgg

SEQ ID NO: 283122 - DNA, 105 bp, Homo sapiens
ccgctgaagctgccgccgttgcctccgccgccaagagtgagcgagcggacccgcgatggaatttggaggttttggttcagttagtggaaaaattgaaatagaaat

SEQ ID NO: 283123 - DNA, 75 bp, Homo sapiens
caggttgaaaaaccaaagctccctgctgcataagaccttgtcagaggtcatctttctgtccaagggcaaggatgc

SEQ ID NO: 283124 - DNA, 142 bp, Homo sapiens
cagctgtggtctctgagagactgaagattcgaggctccctggccagggcagcccttcaggagctccttagtaaagacagtgatgtgtgttctgaaattgtgaaccatgagtctagtacttaatgatctgcttatctgctgcc

SEQ ID NO: 283125 - DNA, 100 bp, Homo sapiens
tattttataccttaaatgggtcttctgttgactcacaaccacaatccaaatcaaaaaatacatggtacattgatgaagtccgctctatcaagctgaagga

SEQ ID NO: 283126 - DNA, 98 bp, Homo sapiens
gaagatggtggagaagtgctggaagctcatggacaagatcttcaaagctgctgcgggcattctatgtccccttcctgtcagatcagtatacagtgtac

SEQ ID NO: 283127 - DNA, 90 bp, Homo sapiens
gtggctgttctgaagagagatgggcgatatatatattacttggatacttttgtggaactctatgggaacaatgcagcagccgagagccga

SEQ ID NO: 283128 - DNA, 75 bp, Homo sapiens
aggagatccgttggctcctggaaggttttgaacgaagaatgtgatcagaactggtacaaggcagagcttaatgga

SEQ ID NO: 283129 - DNA, 100 bp, Homo sapiens
gcagccacctggcaaacttgctgctatggcatctataagacttcagggattacataaacctgtgtaccatgcactgagttcatcaatgccagaagacgaa

SEQ ID NO: 283130 - DNA, 75 bp, Homo sapiens
ggccggaggagtcagctgtgtgtccagaacgtgccatggagacgcttaacggttgcctgttcactctgatcgtag

SEQ ID NO: 283131 - DNA, 100 bp, Homo sapiens
ggcatctagtcctgagcttcccaccgaagatgaacagggttcctggggcatcgacgatctccatatttcattgcaaggcaaagatgccttttgatgccaa

SEQ ID NO: 283132 - DNA, 83 bp, Homo sapiens
gtggactccttcggcagtccacccaccgccgccgcctcccagaattgaagatgttcctgctccttctacatctgcagataaag

SEQ ID NO: 283133 - DNA, 82 bp, Homo sapiens
agctacgcatagaagccgggattgagcgcatcaaggtgaacttcacggtagaccagatccgcgccatcatggacaagaaggc

SEQ ID NO: 283134 - DNA, 100 bp, Homo sapiens
ctctccgtccatggccccagatgacacttcagatgagctttgagaaaggccagggcgtgctcattgggaattggactggggactacgaaggtggcacagc

SEQ ID NO: 283135 - DNA, 82 bp, Homo sapiens
tgccgaattgatgccccagttttctacaattgagtacgtgatacagcccccaaatacatcaagatgtttgtactggatgaag

SEQ ID NO: 283136 - DNA, 83 bp, Homo sapiens
cgacgcggacagcgggctggagcctgacgagctggcggggctcattgtcatccccaagccaggccagttctccaggtggaact

SEQ ID NO: 283137 - DNA, 101 bp, Homo sapiens
gataaatcccgaaaaggagaacttcttaagaagagtgataacacagccagcattctgacaaggcggaggagatttagtcgaactgttcaggatgtgtatta

SEQ ID NO: 283138 - DNA, 100 bp, Homo sapiens
ctcttctcctccaacccagaactggacaatctggtggctgccacactcaacaatttggctgtgctctatggcaaaaggggcaagtacaaggaggcagagc

SEQ ID NO: 283139 - DNA, 75 bp, Homo sapiens
tgagaattttccacctcctgacacaacaccactcagtgaatctggattgggaaagtcgacattaatcaactcatt

SEQ ID NO: 283140 - DNA, 100 bp, Homo sapiens
aagtagagccaaaggatggtgagattgttggcctttcaggaagagtgcttaagctgaagaaaaggtgactggtctcatgagccctgaagaatgaactcag

SEQ ID NO: 283141 - DNA, 96 bp, Homo sapiens
tgcacccacccagccccgccgtcgccccgccgcgccgcgctccaaccgcctcctcctcctcagtaacgcggatcctaagtgtgaacgtgaagtccc

SEQ ID NO: 283142 - DNA, 50 bp, Homo sapiens
ccagcgccccatcctgagccgataacgaaggaggcccaacttcattcaat

SEQ ID NO: 283143 - DNA, 75 bp, Homo sapiens
ttgacatccaggtacagtcctccagggtatacttcgtggcctgcaccatcggcccgtgaaggtggagcggacccg

SEQ ID NO: 283144 - DNA, 83 bp, Homo sapiens
ccggaagggcaggcacatgggcataggtcacgcatgaagggagcaccgtggagaagacagtggcccctacagaatgttcatag

SEQ ID NO: 283145 - DNA, 75 bp, Homo sapiens
gacgcggctaaagcagattggagctctgcagtaaccacagatctctgtggtaagaagtgctactttagagacaaa

SEQ ID NO: 283146 - DNA, 82 bp, Homo sapiens
agagactgctgagcccgtccgtccgccgccaccacccactccggacacaggtccgcgggagagctgtggggcttggtgagtg

SEQ ID NO: 283147 - DNA, 82 bp, Homo sapiens
cggcggcagcgacggcagcggcggcggctggactaaacaggtcacctgcagggggatatgagactttctactcggaatatcc

SEQ ID NO: 283148 - DNA, 50 bp, Homo sapiens
gcgcctttcaaaccggagggattggcaagctgaataccactagaaacata

SEQ ID NO: 283149 - DNA, 89 bp, Homo sapiens
gagatctcttctgttctccactgctagtgaaagccctgtgtaaggaatgtgtagtagaacgttgtcgcatattgcgtctgaagaaccaa

SEQ ID NO: 283150 - DNA, 75 bp, Homo sapiens
aaaccttattaatctcagggaactggatgtcagcaagaatgtgcagaatacagaaactgcagccatgaccacgca

SEQ ID NO: 283151 - DNA, 75 bp, Homo sapiens
aggagatcgccacctacagccgcttgctagaggttgaggacgctcatcggcctggagattctacgccaccaacct

SEQ ID NO: 283152 - DNA, 83 bp, Homo sapiens
aaagcagcgtgcgttcagccctgggatcgccatggatcggatgaagaagatcaaacggcagctgtcaatgacactccgaggtg

SEQ ID NO: 283153 - DNA, 100 bp, Homo sapiens
caaatgggaggcctttctttattgaccacaacactaaaaccaccacctggcccaattttgacatgctttataaccatgtgaagcaactcctctccaatga

SEQ ID NO: 283154 - DNA, 100 bp, Homo sapiens
tggccagcagaaagcagctccataggggaggagagccacgcaggatctcacagctgcagtctaatagtaacacagaggcaggccagaaagcagacccagg

SEQ ID NO: 283155 - DNA, 98 bp, Homo sapiens
ccatgccagagcccatcaggaagtgcccacagtgcaacaaggacatggtccttaagaccaagaagaatggcgggtgttcaaggccaagttcaagaatt

SEQ ID NO: 283156 - DNA, 100 bp, Homo sapiens
aattgaagccaacggagaactcaaggtcttcatagaccagaaccttagtcccgggaaaggctaatgtaatgcttgaatatgatattgatgaagctcaggc

SEQ ID NO: 283157 - DNA, 75 bp, Homo sapiens
cagcaggggactcctgacacttccccttccccaccgaaccgcggctatgaccagggccagagcactcagatctca

SEQ ID NO: 283158 - DNA, 74 bp, Homo sapiens
accagaaactttaaatcttgagaaaagaagattgtctatcatgaaggaggatgttgtcttggagcttgaatttg

SEQ ID NO: 283159 - DNA, 100 bp, Homo sapiens
accaacgaaatcccctcgcttatcctgtgggggccgccgggctgcggcaaggagttcttggtttcgactcagaaaacatatggtgctgacctggccagtg

SEQ ID NO: 283160 - DNA, 100 bp, Homo sapiens
ggaaaacttcgtggctgaagatgtgaatgaagaacaagattactatcctctgccagcaggctctggaatgtttttgtcaggcagcatctgaagtaggcaa

SEQ ID NO: 283161 - DNA, 100 bp, Homo sapiens
agccggctgcaggccagagagggcctcgggaagagatgcgaggatgacaagggcttttttccagacttcaagctcccattccaacagtaagagcttcttc

SEQ ID NO: 283162 - DNA, 92 bp, Homo sapiens
tgtactgggggattcgcagggaggatgtcgggacaccccggaagctgggaaatgagcctgaagccgctgctggagaagcgccggcgcgcgcg

SEQ ID NO: 283163 - DNA, 75 bp, Homo sapiens
acctgaggccgcagatgtcccagcctcaaggaataggttctcctagtgtctatcatgcagttatcgtcatctttt

SEQ ID NO: 283164 - DNA, 105 bp, Homo sapiens
gtcatattgaacattccagatacctatcattactcgatgctgttgataacagcaagatggctttgaactcactcaggtaccagacagtgatgagcagtttgttcc

SEQ ID NO: 283165 - DNA, 82 bp, Homo sapiens
cggcctcgcggcgacggcggcggtggcggcttggacgactcggagagccggagtggagtcaacatatcaatggagcaagtca

SEQ ID NO: 283166 - DNA, 100 bp, Homo sapiens
aggtaccgcggacctcgccccgggacagcgaggagctgagggacccttgtgtgttttaatagaaaagttgtcactttccaaaatgccctttagaggtgac

SEQ ID NO: 283167 - DNA, 80 bp, Homo sapiens
ggaaagagtgcatctgtagatgctgaaaaatcaatgctgtccaaacttaaacatgaggaagaatacaagcgattgagtga

SEQ ID NO: 283168 - DNA, 101 bp, Homo sapiens
ccacttctcggtgacagccgagggcggcctgagcccggcgcaggtgaccggcgcgcgggagcgctacggccccaacggtgtctcaaaggctgttgagcaca

SEQ ID NO: 283169 - DNA, 87 bp, Homo sapiens
gatttctcttggatttggctacacacttatagatcttctgcactgtttacaggcacagaaactggcagacctttcacttcgtatcca

SEQ ID NO: 283170 - DNA, 82 bp, Homo sapiens
ggaaaagatcacatctcttccaacagtgacagtaactcaggaacaagttgatgccatggacaatattaccaggcagaaccaa

SEQ ID NO: 283171 - DNA, 100 bp, Homo sapiens
gcaggactgagtgaagaagaacagctcgagagagcattacaagccagcctctgggaccgagggtcgacaagtgcccccaatgatttatggtacaacttca

SEQ ID NO: 283172 - DNA, 95 bp, Homo sapiens
gcagattctagccaacataaagcttgtcaaggtggctttggagaaaagtctggcaactgtggagacccagaacccatctttttcccctccttctc

SEQ ID NO: 283173 - DNA, 50 bp, Homo sapiens
atcgtgctgggcaccggcctgacggactaccgaccagactcccggaaatc

SEQ ID NO: 283174 - DNA, 51 bp, Homo sapiens
ggtctgaagcctgggagtggcggtggaggaatactcccccagttgcaagag

SEQ ID NO: 283175 - DNA, 75 bp, Homo sapiens
cagcaccctcccctcctcttctgcttctatctccaccactcaggttccctttgagagtgaggacaaccagggcat

SEQ ID NO: 283176 - DNA, 100 bp, Homo sapiens
gatgatgatgaagaggatgatgatgaagagatttaagcgagagcctcactggttcccaggacatcaacctgaactggatcctccccgatacaaatgcaca

SEQ ID NO: 283177 - DNA, 100 bp, Homo sapiens
cgtgcctcccgtccaccccgagatgccccctggtgtgcggctcagccgtgggctggtctgggctgccacgacagagcacaccatggccacgcccctggag

SEQ ID NO: 283178 - DNA, 104 bp, Homo sapiens
ccctttcaactctacttcaacccgcaccttgtgttccggaagttccagcgtgagtgcatctccatccacgttggccaggctggtgtccagattggcaatgcctg

SEQ ID NO: 283179 - DNA, 83 bp, Homo sapiens
gcagccatgaagccaaccgtcccgaggtgaccctggcaaagatgagagtgcacatttcgtcctgcctgaaggtccaggagcag

SEQ ID NO: 283180 - DNA, 75 bp, Homo sapiens
aaactcacatgagacaaatgcgctcagcttcaattgagggcagtggaagcatgagaggaggaggtgggggcaatg

SEQ ID NO: 283181 - DNA, 82 bp, Homo sapiens
cagctgctgagttctcggtgaagtccctgaagaggaaggagaaggaatatgagcatgaaatggagcggctggcacgtgagaa

SEQ ID NO: 283182 - DNA, 74 bp, Homo sapiens
tcttcctgcacacagccaaagtctgcaaagggcctgctttcttccccgggcgatgtgcagagatctttgccagg

SEQ ID NO: 283183 - DNA, 74 bp, Homo sapiens
gttgaggcatctggacaccacacacatcatcagtctgttcgatcctttggtacagaagacagaccgacagatcg

SEQ ID NO: 283184 - DNA, 96 bp, Homo sapiens
ggaggcccaggtctccgtgcagcccaacttccagcaggacaaggcctgcgagaagacccagctggagttcatgtcgcaacagtgcgccaggaccga

SEQ ID NO: 283185 - DNA, 75 bp, Homo sapiens
ccgactgtggagaagtgtccggggtagccccgttacagatcctgtttgaccaaactcagagatcaattaaggcac

SEQ ID NO: 283186 - DNA, 60 bp, Homo sapiens
gctggatgtttgcgacatcccagagagcttccagagcataaaggcatcacaagtggtcgg

SEQ ID NO: 283187 - DNA, 83 bp, Homo sapiens
cttggctgctgtacatgacgtgcttaatgaaagtgagaaagatcagtctaaagaaaaggagaagaaagtgaaaaaaacaattc

SEQ ID NO: 283188 - DNA, 76 bp, Homo sapiens
agacttggaagctcatggacaaagtgtccgtggtggatgactggattgaatcatataaacaagacagggacatcgc

SEQ ID NO: 283189 - DNA, 75 bp, Homo sapiens
ggcgcgcccagagccccgcgtttcagccctagggaagctggccagctcagcgtccctggaagggaagggacaact

SEQ ID NO: 283190 - DNA, 51 bp, Homo sapiens
ggataaaattgaccgaattaacagaccagagtgatggctgttttagtactt

SEQ ID NO: 283191 - DNA, 101 bp, Homo sapiens
gattcgtggtgaaggtccggggcttgccctggtcttgctcggccgatgaagtgcagaggtttttttctggtctatcagccacagtctctgcaagtttccaa

SEQ ID NO: 283192 - DNA, 75 bp, Homo sapiens
agctgggccctcaaggccatcgaggcgctttcagactctatcaagaagaatatctaatccgtaccttgaacatac

SEQ ID NO: 283193 - DNA, 100 bp, Homo sapiens
cctcagcagccggctgcaggccagagagggcctcgggaagagatgcgaggatgacaaggcccgggtggaacgcatggagcagttccagaaggagaaggag

SEQ ID NO: 283194 - DNA, 100 bp, Homo sapiens
gacatctgcgggccggggacctgcatgtgtgtgcgcgcgaaggagcggaagaatggcagtgctcaaactcaccgaccaggctgtctgtccccagacccca

SEQ ID NO: 283195 - DNA, 128 bp, Homo sapiens
aagaatataacagggctcgagtctacctggatgaaaactacaaatcccaggagcacttcacggtcaccgacgatgagggcgcacctgctgtcctggagcttccgatctctgttcggggaccctgtgag

SEQ ID NO: 283196 - DNA, 83 bp, Homo sapiens
atgaaagaattccgagagaacgagcacctcctcgaagtcatcccagtgattttttatcaagcagaaatgcatcgaacaacgag

SEQ ID NO: 283197 - DNA, 100 bp, Homo sapiens
tcaactcctacgaggacaaaagcaacgacttcgtatgttccattgtgaacgtgcctggtgagtctactcttcgccgagatttcctgagactgcagcagga

SEQ ID NO: 283198 - DNA, 100 bp, Homo sapiens
cctctgtttctctgctgcaccgacctcgacgtcttgcctgtgtcccacttgttcgcggcctataggtcacggagctgctggacgtctccatggagctggg

SEQ ID NO: 283199 - DNA, 98 bp, Homo sapiens
tgcaagactgtcgacctaaagcctgactggggcaaggtggaacggcacatgtgtgatggggacattgttatcttcaaccggcagccaactctgcacaa

SEQ ID NO: 283200 - DNA, 72 bp, Homo sapiens
cggcgggagctgtcaggttggctccgccctggcagtgagctggacaacttggaggagattttggatgatttg

SEQ ID NO: 283201 - DNA, 50 bp, Homo sapiens
ggccgagccatcccaattaaacagaggaggctgcggaggaggaggaggaa

SEQ ID NO: 283202 - DNA, 82 bp, Homo sapiens
ttcgttattggagccaggcctacaccccagaaaccaaggtgtatgttggtaacctgggaactggcgctggcaaaggagagtt

SEQ ID NO: 283203 - DNA, 102 bp, Homo sapiens
cgcgggcaggcgggaggcaacggagctaccagccggtcagcccaaggccaaccccactgtcactctgttcccgccctcctctgaggagctccaagccaacaa

SEQ ID NO: 283204 - DNA, 100 bp, Homo sapiens
actccaggccgccaacgaaagcaagcagcaggagctggaggccgtgcggaaggagtggagtcaacatatcaatggagcaagtcacagtcgtcgatgccag

SEQ ID NO: 283205 - DNA, 80 bp, Homo sapiens
cggggatcttccaagtctggaaagtaagagacgctcaaaccgccaagttaagcgaaaaaaatatacagaggacctggata

SEQ ID NO: 283206 - DNA, 100 bp, Homo sapiens
agatatgctcccgaccctgtattagtgcggggtgccggccacatcactgtgagagaagacgatctgcacttcgcattttggcattgacatttaattttag

SEQ ID NO: 283207 - DNA, 75 bp, Homo sapiens
tgggttctcactggccattggcttctcatggatgcaatcccacagagtattgatgaggaaactgaagtttggagc

SEQ ID NO: 283208 - DNA, 100 bp, Homo sapiens
ctactgacaatgcatttgagaaccctttctttaaagattcttttggttcatcacaagcctctggagcctgcacacatgatcctgaccgtcggaaacaagg

SEQ ID NO: 283209 - DNA, 75 bp, Homo sapiens
gcggcgcagaaaggtggaggccgggaggacgaagctcaccatggatgatgatatcgccgcgctcgtcgtcgacaa

SEQ ID NO: 283210 - DNA, 76 bp, Homo sapiens
ctgaccgctcaagagattctacatcagtttggtttcactcagaccgagcaacttatgactctcatctctgctgcac

SEQ ID NO: 283211 - DNA, 80 bp, Homo sapiens
cccgaacaccattcacagtttgtaacagacgtggatgaagaatagctctgcagaatccagactccaaaatgatgcaaatc

SEQ ID NO: 283212 - DNA, 100 bp, Homo sapiens
gactggacattcccaacatgctcactcccttaatctgtccgtctagaggtttggcttctacaaaccaagattcagaatggacagtttagaagaacctcag

SEQ ID NO: 283213 - DNA, 96 bp, Homo sapiens
gcagtggccgaggagattcaggatgaagttgcggcatctggaggtagcagaagtagcagcagcccactggtggtagtgtctgtgaagtctcccaat

SEQ ID NO: 283214 - DNA, 75 bp, Homo sapiens
acgctgcccgcgggcccggccacggcggagccaagcttgctgagcgagagcgagaagcggcccttcgtggaggag

SEQ ID NO: 283215 - DNA, 50 bp, Homo sapiens
gctgcctttcagtttcgcctggccgcccaccttgggacaccttgactcca

SEQ ID NO: 283216 - DNA, 100 bp, Homo sapiens
gtttggtcccgggagcctcgccggtctcagagaaagatgtcacatctgctaaagcactgtatgaacatttgactgcaaagaatacaaaattggatgatct

SEQ ID NO: 283217 - DNA, 100 bp, Homo sapiens
ctttatggacactacatccatggaggagggtgcattctgggtgatgacatgggacttggaaaaacagtacaggcacctgaatggacagaagaggacctca

SEQ ID NO: 283218 - DNA, 100 bp, Homo sapiens
agaggaagcttctagtgtactcttactttgaaaagtgatcctgccatgaagcagtttctgctgtacttggatgagtccaatgccctggggaagaagttca

SEQ ID NO: 283219 - DNA, 83 bp, Homo sapiens
cactaatccatcttcagcttcaattacaaacggaatcagtccccaatgcctggaaattcctcattggattactgtgttttaaa

SEQ ID NO: 283220 - DNA, 102 bp, Homo sapiens
ccagttagtggtgctcaacgtgtacgacatggtgcttttgaagatgatgatatcacgcacgttgaaggaagtgtagatcctattcgagatatagaaataata

SEQ ID NO: 283221 - DNA, 82 bp, Homo sapiens
gtgtacttcggcaccgtccgcgactgctatgagggagtccaaaactacttacctggaagaccttccaccaccccctgagtat

SEQ ID NO: 283222 - DNA, 100 bp, Homo sapiens
caggaattcacacagaaaagtggaggccaaggcgtgagaattcctcaatgactgccctctaaaggaagaggagcaatttacagcaatgagggatttatac

SEQ ID NO: 283223 - DNA, 74 bp, Homo sapiens
aaaggcccagatgataggaatcccatctcatttaggcagtagcaggtttgttggcagatgctcgttctttagca

SEQ ID NO: 283224 - DNA, 83 bp, Homo sapiens
aaaggctccttcagtgagcaaggcatcaacgagtttctcagactgtagaatgtgaagagggaagtgaagacgatgaatccctc

SEQ ID NO: 283225 - DNA, 73 bp, Homo sapiens
tgacatccgaggtgcctttctccaaaagggacagtggccttagagctattgagaatttgatgcaaaagaaggg

SEQ ID NO: 283226 - DNA, 90 bp, Homo sapiens
ggaagaggtcctatgacaggatcaagcaccaaggatgacattgatcttgatgccttggctgcagaaatagaaggagctggtgctgccaaa

SEQ ID NO: 283227 - DNA, 100 bp, Homo sapiens
ggacaaaatactgcatgttctacttaaaattgggagctaagcagtggagacaaagcatggaggacacaagaatgggaggaaaggcggactctcaggaact

SEQ ID NO: 283228 - DNA, 100 bp, Homo sapiens
gaagatggcgcttgacggaccagagcagagcttcttcttcacctgaagaccagagtaggttggaggtgactagtgtgtgtaagcccaggagaagcaaggg

SEQ ID NO: 283229 - DNA, 100 bp, Homo sapiens
gtgggaggcgcggctggcgccgctgcgcgcatgggcctgttcctggcccgcagccgccacctacccagtgaccatgatagcaccgactgagacagggcct

SEQ ID NO: 283230 - DNA, 51 bp, Homo sapiens
gggggcagcctgcagaggctgcgtcgttgcagttcgataaggagcagatgg

SEQ ID NO: 283231 - DNA, 75 bp, Homo sapiens
ggcggcggctcctgccctctcgctttccctctcgcgtctctggctgcagatggcaagtttggggcctacatgcag

SEQ ID NO: 283232 - DNA, 82 bp, Homo sapiens
ccagaagtccagagctgaggactgcctgtttgcagaacttcagcgagagggaagcatcgagactctgagtaacagctcaggc

SEQ ID NO: 283233 - DNA, 100 bp, Homo sapiens
gtggaagcgaagccgaaaaaggcagcagcgaagggtccaaaaggtgaagcggttggatccattactcaacccttacctagcagttatttgatcatccgag

SEQ ID NO: 283234 - DNA, 90 bp, Homo sapiens
ctttctccaagaccgatgggcattgggggtggcagaggaaataccagcatggaacaacatcccaggctgatcccaaagttgtcagatgga

SEQ ID NO: 283235 - DNA, 82 bp, Homo sapiens
ttaaaaatcaccagttactttaatgatgggttgccagcgttgatgtggtggagaatgaagaggccagcgctagcatcattgt

SEQ ID NO: 283236 - DNA, 82 bp, Homo sapiens
ccgggtcctcaaactctacggctgcagcccaagtggccccaggccccgtgggagagaacaagaggaaagtatggggaaggag

SEQ ID NO: 283237 - DNA, 83 bp, Homo sapiens
atttgcttggaaaaacgtgtgggtacgaccttgtcgtgagatggagaataaagaaactctcaaagggttgcacaagatggatg

SEQ ID NO: 283238 - DNA, 50 bp, Homo sapiens
cagcacaagccaaaggtgctcctatcagttgtgctgaaagacattatgac

SEQ ID NO: 283239 - DNA, 100 bp, Homo sapiens
caaattctctcctgtttgttgtgacatggaggctcaagctgggtctactcaagagtacccaagtggccttggaccatctggagtctgtgcctgagaaact

SEQ ID NO: 283240 - DNA, 85 bp, Homo sapiens
cagccggagtcgtcttcgggacgcgcctgctcttcgcctttcgctgcagtccgtcggatcccaggatgctggtatcctgcataga

SEQ ID NO: 283241 - DNA, 100 bp, Homo sapiens
gactcgtcggcgaatgcaattaggaactgttctgccggaatttgaaaagtgcctcatgaatacaactttgtctgagagccccttcaagtgtgatcctgat

SEQ ID NO: 283242 - DNA, 82 bp, Homo sapiens
gcctggcagccccgctctctgcagatccagtggggatattgtgatgactcagtctccactctccctgcccgtcacccctgga

SEQ ID NO: 283243 - DNA, 98 bp, Homo sapiens
ttatgttctatgctccctaatgaagatgctattaaggagggagaggatcctccacagtggtatcctgctgcgtgcccctccaggacagcacccagagg

SEQ ID NO: 283244 - DNA, 83 bp, Homo sapiens
gtcagggacacgcggaggtcaggccggtgaaggcggcaggaagctggagcacgatcccaggcagagaccacgcagaggctgcc

SEQ ID NO: 283245 - DNA, 82 bp, Homo sapiens
cttcctggcctgggcgctccggtggcggcggagcttgccttgcgccatggactggcagccagacgagcagggcctgcagcag

SEQ ID NO: 283246 - DNA, 91 bp, Homo sapiens
gcggatggaattctcctgcctgcgggtctttaaagactgaggtgagaagccctaccactgcaactgggacggctgcggctggaagtttgcg

SEQ ID NO: 283247 - DNA, 99 bp, Homo sapiens
cccaccccaagttccagaagcccaagcagctgaaggacaaagctgatttctgcattatccactatgccggcaagatttcgctccctccattgtctgctc

SEQ ID NO: 283248 - DNA, 82 bp, Homo sapiens
aaggattccaagtaactcttatttggttggatttggtctagggagtcccagaaagaagtagaaaaagagagagaagcctacc

SEQ ID NO: 283249 - DNA, 101 bp, Homo sapiens
gttccatccctaaacttatacgtagtgggcagcagtcagtgacaggtgtaacctctgtggatgacagcaacagttactggaggatacgggggaagagtgcc

SEQ ID NO: 283250 - DNA, 75 bp, Homo sapiens
ctctgctgcggcgcggggaccgctgtgctctcggtcctcagaatggttggaatgaccctccagctttgaacagag

SEQ ID NO: 283251 - DNA, 100 bp, Homo sapiens
ttaaaaggaagaacaacttaagagcttcttcaaagagtcatgtgctgttcctggggcttggatgatgtaggggaagcaaggtgaaagtggtatcccgtgg

SEQ ID NO: 283252 - DNA, 99 bp, Homo sapiens
tttatcctgagcaggcagagagcagaagatattcacagacatgcggaatttgagtggaagcatcagttcacagcagtaatgcacactgtacagataaga

SEQ ID NO: 283253 - DNA, 90 bp, Homo sapiens
cctcatgacaaatcatttctatgcagcgatcttgggatatgatgaggtcagtgggacagcatggaagaatacacctgtatgatccctcgg

SEQ ID NO: 283254 - DNA, 75 bp, Homo sapiens
ggcgttcggtcctgctgttgcggccgctgccccagggctgcggggacggtcgcctgcgaggccgctggccaggcc

SEQ ID NO: 283255 - DNA, 100 bp, Homo sapiens
taaatacccagcactaactaagccagagaaccaggatattgactggactctattagaaggaggctttcgtgaaggaatccaaggaggagaccccaggcac

SEQ ID NO: 283256 - DNA, 101 bp, Homo sapiens
tcatcctgcagcaggccgtgcaggtcatcctggggctggagcagcaggtgcgatttgaaggtttaacaggaaacgtgcagtttaatgagaaaggacgccgg

SEQ ID NO: 283257 - DNA, 80 bp, Homo sapiens
tgggatgtttcggaatgggcattgtcgccaattttcaggttatgggatttttagcagacaaaaaaccagaacaaggccag

SEQ ID NO: 283258 - DNA, 97 bp, Homo sapiens
gaaggcatattccactgattacaaattgcagcagcaagctgtaccgatgggagatgtaccaatggatggtatctctgttgctgatattggagcagcc

SEQ ID NO: 283259 - DNA, 100 bp, Homo sapiens
ctacgtcctccaggaggcatctcacaacgtccccaaccagagttccgagtcacttgctggcagaggaccctgcggccttccgcagtgtttgtgtccctgg

SEQ ID NO: 283260 - DNA, 89 bp, Homo sapiens
tactggagttcgtggtgctggaagaccgccgcccgactctgggccccgggtaggaaacgtgatccatgctctagggcaatcatggcatc

SEQ ID NO: 283261 - DNA, 100 bp, Homo sapiens
cagggcccgggatcgccgagcccgacctcgggcgccccgccggtcacctccgcgcggacaccagttccagggtctccctccactgctgtagtaacccggg

SEQ ID NO: 283262 - DNA, 83 bp, Homo sapiens
cagcgccgtcccgtccgacagccaggcccgggagaatccagattcctaagatgaggacacagcatcctgggccactgtcacta

SEQ ID NO: 283263 - DNA, 51 bp, Homo sapiens
cgtggccgacggaacaatgaagctactgcttcttgggatacctttctcatg

SEQ ID NO: 283264 - DNA, 75 bp, Homo sapiens
ctactctacggcatctggagcaactggttcgagaacttgtcttggacaattgcaaatcaaatgatggaaaaattg

SEQ ID NO: 283265 - DNA, 111 bp, Homo sapiens
cgtctccgcagcagatcagggaccggctgctgcaggccatcgacccccagagcaacgtgagaagccctaccactgcaactgggacggctgcggctggaagtttgcgcgctc

SEQ ID NO: 283266 - DNA, 74 bp, Homo sapiens
attggtctatgaaacatcagttcttgatcctgatgagatggcctgtgagtatctgtctgtggaagtaatggagc

SEQ ID NO: 283267 - DNA, 100 bp, Homo sapiens
ccgcaggtcttcacccaggccctggagtgcatgcgcaggaaaatttgagaatggtgttgcagaaggaatggtggatccaagtctcaatcccatttcagcc

SEQ ID NO: 283268 - DNA, 100 bp, Homo sapiens
gtctgcgcctgcgcgggccccggctcgctagccgtcctgcgggacgccggcgctgatggggtcctggcggcagagaccacgtcccagcaggagcggctgc

SEQ ID NO: 283269 - DNA, 100 bp, Homo sapiens
ccccccaaggttgccaaatgcacagccaagcctagcagctcgggcaaggatggtggaggcgagaacactgaggagggatgccattattacttgcaatcct

SEQ ID NO: 283270 - DNA, 98 bp, Homo sapiens
agccacccatcaaatcagagagaaggaatccaccttcttacgctatggcaggactgaccgatgatcagattgaagaattgaaattgaaggatgaatgg

SEQ ID NO: 283271 - DNA, 90 bp, Homo sapiens
ggttggggccactgcgaggccgttttaggatgccaaagaagaccatgaaagaacacatcaaatggtcttactgagaaagctttgtctgcc

SEQ ID NO: 283272 - DNA, 73 bp, Homo sapiens
aaatggggtgaatcatttgacaaactgctttcccatagagacctcaaaggaagaccttctgcaggctgatttt

SEQ ID NO: 283273 - DNA, 83 bp, Homo sapiens
caaggagctaaagcagcgtgcgttcagccctgggatgacgacaacccccccgtgtcttttgtgaagttctccccgaacggcaa

SEQ ID NO: 283274 - DNA, 101 bp, Homo sapiens
gctggaaatacagaaccacagtttatcatcccttcctgacttcctgatccatttgctaaggtggtggttgatggatctgggcaatgccattctatagatac

SEQ ID NO: 283275 - DNA, 49 bp, Homo sapiens
gtggtggtcgcgttgactagaaaggtgcatcatttctggcatggcttca

SEQ ID NO: 283276 - DNA, 100 bp, Homo sapiens
tacagatctgtgggactggtttgaatccttccttgatgatgaagaggtaatgagtatggtgtcaggatttacaccactaatttctgcaggtatattttca

SEQ ID NO: 283277 - DNA, 74 bp, Homo sapiens
ctggcagctgtggatgctacagtcaatcaggttctggcctcccgatacggggcagaatttctcagattatcttt

SEQ ID NO: 283278 - DNA, 76 bp, Homo sapiens
cggcgccgcgtagcttccatccgccagctgccatgagcgagcgcctccgtcccagtggtttccagtgacagtgaca

SEQ ID NO: 283279 - DNA, 100 bp, Homo sapiens
tttgcagctgccctttgttaaaggaaaaccagtagattcccagacatcgcgaagtgaatctgaaattgtgccaaaagttgctaaaatgactgtatctgga

SEQ ID NO: 283280 - DNA, 100 bp, Homo sapiens
cacgcacacagaaccctggccaggatcatgaagggcgattgaaaagggtggttctcttcccaaagtggaagccaaattcatcaattatgtgaagaattgc

SEQ ID NO: 283281 - DNA, 100 bp, Homo sapiens
ggctgcactcactctacgtggagttgggccctgcaggaaggacggacttcaggggcagatgagcacaatgcctggactccccacccggccctgtttttat

SEQ ID NO: 283282 - DNA, 129 bp, Homo sapiens
aatcggcggacttaccagaatcttgtcattgagaaggatggttcaaatgaaggtcacctgtggagaaagaaacatcatctctcaacagaggattgttcctccgtttgatgatacgtgcatcctgccatc

SEQ ID NO: 283283 - DNA, 88 bp, Homo sapiens
aggttttaaatcaagatttaacattccaacacataaaaattatttatccaacagctcctcccaggttgtgggctgcacactgcagaaa

SEQ ID NO: 283284 - DNA, 97 bp, Homo sapiens
agctgcagagccagatgatccacaggatgctgtagtagcaaatcagggaactctaatgatccaggacaaagaagttaccctggagtatgtatcaagc

SEQ ID NO: 283285 - DNA, 98 bp, Homo sapiens
ttcacttttgagtgcaactgccttccaggtcttctccacccctcacgggctcgaagtgcatgtgcgacgctcccatagtgggacccggcccttcgcct

SEQ ID NO: 283286 - DNA, 100 bp, Homo sapiens
cgaaaggatcatgaactagtgacctggaaaggacatgcggaagcacgtggccatgaccctgctggacacagagcagtcgtatgtggagtcgctgcgcacc

SEQ ID NO: 283287 - DNA, 83 bp, Homo sapiens
cctcctgagtggctgggactacaggaccgagtctcctgccattccgagcaggcctggtatgggtaatggtgtgaaggaaggcc

SEQ ID NO: 283288 - DNA, 51 bp, Homo sapiens
gtgtgggaaataatcaagcgaactggttgctccttgagggcaggacagttc

SEQ ID NO: 283289 - DNA, 100 bp, Homo sapiens
aagaatccaaagaaaacaaaatggtggtatcatggttctcctgaaaagaaagctgaacattcatctataaatcaagaaaatggcactgcaaaccctatca

SEQ ID NO: 283290 - DNA, 98 bp, Homo sapiens
ggatttcaatctttgggttttttttgggtcaaacagcaaccttggtatgaagtgtggcatccaaaatcagattggaatgttaaagaaattcatcaggc

SEQ ID NO: 283291 - DNA, 100 bp, Homo sapiens
ggcagacacaatggttctacctatcatacaattccgagaaaaggatctcacagttccaggggcagtgtttgatttacaacttgcagaggtagaatccacg

SEQ ID NO: 283292 - DNA, 82 bp, Homo sapiens
gacacggtctacaccgacttcgacggagctctttgttcaatgcctagccacctattcctacagacacggcagtggaaaggaa

SEQ ID NO: 283293 - DNA, 75 bp, Homo sapiens
gcctccggcaggcgccccccgggggcgggaagctggaagctctttgtgttcctggccgtgctcatctgcctggtg

SEQ ID NO: 283294 - DNA, 74 bp, Homo sapiens
agaaaaacatagttcagaagctactgaggtgaaccctgagagcctgggtcccagcctcctcttcatcacgtatg

SEQ ID NO: 283295 - DNA, 75 bp, Homo sapiens
gctgtgtgtccagaacgtgccatggagacgcttaacgattcctcctgagattggctgtcttgaaaatctgacatc

SEQ ID NO: 283296 - DNA, 75 bp, Homo sapiens
ctgtacacaatcttcatgaaagctgttggagccagcagacctgactggagagaactggatgatgagctcatgaaa

SEQ ID NO: 283297 - DNA, 75 bp, Homo sapiens
gcccacaggtgctaaagagagcagtaccctgatggagtcccttgcagtttggaaattttagcattcaggtgccag

SEQ ID NO: 283298 - DNA, 100 bp, Homo sapiens
gacttcagactggtggactgttcatcattctgttgaagaaacgcttaacccagtgtggaaacaggaagagaactagaactggaagtaaagcattgaagat

SEQ ID NO: 283299 - DNA, 89 bp, Homo sapiens
gctgcttatggcggcgctggagagggggcgctgagctgttgggctgagctgactgctgcccactttggaggaggcggtgggctccttca

SEQ ID NO: 283300 - DNA, 75 bp, Homo sapiens
gtgcccgtccacgcacagcgaggaggctaggcagctggaagagaaagaccgagtgctaaagaagcaggatgcatt

SEQ ID NO: 283301 - DNA, 50 bp, Homo sapiens
cagcaggatcatgtgacttcaaatgcagggtctcgctctcacccaggctg

SEQ ID NO: 283302 - DNA, 101 bp, Homo sapiens
gcggcgcgaggttagtggtagctgggtgcagacgccgtggcgctgggtgcttttgagaggaagatgtcttacgattggtcccagttcaatactctgtatct

SEQ ID NO: 283303 - DNA, 100 bp, Homo sapiens
ggagctggtgcagcaggaattgggatcgtgtcgctgcgaaataccaggagtctgttcgtcaaagatataataaaatcgcatatgctgatcctcgactttg

SEQ ID NO: 283304 - DNA, 82 bp, Homo sapiens
aggtcgtggcagagaaaaccagctgagacagggcgccacttactagcaaattgtggctactaatttgccccctgaagatcaa

SEQ ID NO: 283305 - DNA, 100 bp, Homo sapiens
cccgggctgcggcgtgtgcgcgcccgccagctgctccggagatacgaatgctgagatgtataaactgtcttcagagcaattccatgaggcagcctcaaag

SEQ ID NO: 283306 - DNA, 100 bp, Homo sapiens
cgcaactacgctccgctccgcgggccaagaaactggagaaactcggagtgtactccgcctgcaaggccctgtctctgcccctggtggtcatcgtccatgg

SEQ ID NO: 283307 - DNA, 75 bp, Homo sapiens
ccttctggagatgcttccgaactgtgggcaaaaatggcggtgaccaagaatatggcccaggtgaccaaagccctg

SEQ ID NO: 283308 - DNA, 90 bp, Homo sapiens
attataattgcagaatgccactctgtagacattaaattgagtaaagagcaggtgtgtggatacataagtaaatgctacagtgtggctgct

SEQ ID NO: 283309 - DNA, 75 bp, Homo sapiens
ccagagccggactgattctctcaatttgcggcaagttaaagtcttcagagccctgtatacgtttgaacccagaac

SEQ ID NO: 283310 - DNA, 98 bp, Homo sapiens
ctgcatggattgggagatactgggatgagcagcagcaagagatggccgcttctgccgccttcatagaccggcattacgggcacctggtagacgccgtg

SEQ ID NO: 283311 - DNA, 90 bp, Homo sapiens
cagcggcgtcgagaggaccatcctgggtgctggccctgtgctggagcggttcagcgaggaagaatgcctccaacccagcccaatccaggc

SEQ ID NO: 283312 - DNA, 96 bp, Homo sapiens
cagcattctcctctattagactagaactgtggataaacctcaggtgttacacataatattgcattacttcgagaggtgataatcaactcacgcttt

SEQ ID NO: 283313 - DNA, 100 bp, Homo sapiens
gagactgcccagaagaagtgccaggaggcgattaatgctacttgcaaaggcgtgtcctactgcacagcactgccagtgaaagatgtagaagataaacctg

SEQ ID NO: 283314 - DNA, 74 bp, Homo sapiens
acagctccgactcggaggacagcatccccccggagaccttgacctcccgccgggctcccctgggcgctgcaccc

SEQ ID NO: 283315 - DNA, 88 bp, Homo sapiens
cagtggtcgcttcttctccttggggtggcactgaatcaacaagacaagcaactcaattgattaatgctttgatcaaggatccagacaa

SEQ ID NO: 283316 - DNA, 100 bp, Homo sapiens
attaactcgtctgctgcaggtcatgaagaaggagccagcagagtcgtctttcaggcaacctggcggttcattgaatgccaacacctccaacaccatagca

SEQ ID NO: 283317 - DNA, 75 bp, Homo sapiens
tctatctcatcatctgcttcattgagtgctgccaatactccaacagtagatgatgattattctccaccgtctaag

SEQ ID NO: 283318 - DNA, 82 bp, Homo sapiens
ccacatgcccgctcacctgcgctgtgatgcctgcagagctgtggcttaccagacggagttagaagccaaaagtgaaaccagg

SEQ ID NO: 283319 - DNA, 73 bp, Homo sapiens
gaagactcttgtcacactaattgccaacaacaatggaagcgttgttgacgaccatggacatcatccacgatgg

SEQ ID NO: 283320 - DNA, 75 bp, Homo sapiens
cagccaagctcgtagcctgccactccgtgcatccggtgtttaaagccgtcccagtgcccaacatgacaccttcag

SEQ ID NO: 283321 - DNA, 101 bp, Homo sapiens
gcggccggcgcggcagacggccacggctcgagtcaagggtccagagaaggaggagaagttgagacaggcggtcaagcaggtgctgaagtgtgatgtgactc

SEQ ID NO: 283322 - DNA, 97 bp, Homo sapiens
ttcacattcctcatggttggttcaaagctgacatattgagcagaggaccaaaatcgatgatctccttggctggtggcttaccaaatccaaacatgtt

SEQ ID NO: 283323 - DNA, 75 bp, Homo sapiens
tattaaaaccagggctccacagttaggagctgtatgcaggagctattcttgaagtttgtggatgaaaattgggaa

SEQ ID NO: 283324 - DNA, 100 bp, Homo sapiens
cctcaacaacctggtggaaatcattaaccgacccaacacacccaagacactgctggaaaacacagttcaatctcatccctcccagcagctccccttccac

SEQ ID NO: 283325 - DNA, 80 bp, Homo sapiens
cgctgattagagcgaagagagagaaagcccagataacggctctcaaaatcaagtacaatccttttgccaaagccttcttg

SEQ ID NO: 283326 - DNA, 100 bp, Homo sapiens
agacgaggaaagaggaggaaaacaaaagctgctacttatggaagatacaaaggacatccacgacagcgatggcagttccagcagcagccaccagagcctc

SEQ ID NO: 283327 - DNA, 74 bp, Homo sapiens
tcatctcatcctcacagcagcccagagagatgccttcaattaagttgcagagttctgatggagagatatttgaa

SEQ ID NO: 283328 - DNA, 90 bp, Homo sapiens
gacatgctgtaatatggatcaccgccatgatgatactgaaacaagaatggcccaaacattggccaacttttatcagtgatattgttggag

SEQ ID NO: 283329 - DNA, 90 bp, Homo sapiens
tgtggttctcaaatataggcattctgatgggaacttgtgtgttaaagtaacagatgatttagttcccaacagcatggtggtggaacaccc

SEQ ID NO: 283330 - DNA, 100 bp, Homo sapiens
ccgcattcaagctggagaatgagaggctgaaggtggcttctggcacagcagcttaattgaccggaacctcattgattattttgttcccttcctccccctg

SEQ ID NO: 283331 - DNA, 100 bp, Homo sapiens
gccacgcagccggccaccgccgagacccagcacatcgccgaccagagaaagctgatggtttgtgttttaacttaactgtgattgcatcgagttgtacccc

SEQ ID NO: 283332 - DNA, 75 bp, Homo sapiens
aagcatttacagttgacagtcctgttcagcagggagaaacaaaggcagcgctgccctcgggggagcattggccct

SEQ ID NO: 283333 - DNA, 75 bp, Homo sapiens
ctcgctgtcgaagccctaccaggaacgccaatctgaattgccaacgcaaagcaaagcgagcttccccagtattct

SEQ ID NO: 283334 - DNA, 75 bp, Homo sapiens
ttagaggctgaaggtgcccagctgcagggcggcagtaatgagaatgacatctctgaaaaggagcaacgatgggga

SEQ ID NO: 283335 - DNA, 82 bp, Homo sapiens
tgctgacctgataatgaagaattattttgcaccactggatgttgtttactgaaaacatcggttgtgaagagaaagccaaaaa

SEQ ID NO: 283336 - DNA, 124 bp, Homo sapiens
ggcaacgtgttggaccttccggagcttctcagaagacagagggttttcttttgagattatgtttgagaccttcaacaccccggccatgtacgtggccatccaggccgtgctgtccctctacgcc

SEQ ID NO: 283337 - DNA, 82 bp, Homo sapiens
ggtgagtcgcggtgggtcctcgcttgcagttcagcgaccacggcgccatgtcagaaccggctggggatgtccgtcagaaccc

SEQ ID NO: 283338 - DNA, 100 bp, Homo sapiens
tatgtgccttcagtttctcagctgcagcaggagattaccaggcatgagccatgagcccaagtccccttcgctagggatgctttccaccgcgaccaggacc

SEQ ID NO: 283339 - DNA, 75 bp, Homo sapiens
ggaaatttcttcagagactcctggatagatgaagaggaagccggcttattggagctcttaaaatcccagatttgt

SEQ ID NO: 283340 - DNA, 100 bp, Homo sapiens
cgcgagtacagctgcaccgtgcggctgctggacgacagcgagtacacctgcaccatccagtagtttatgccaacgtgacttcattcatacagatgaacca

SEQ ID NO: 283341 - DNA, 75 bp, Homo sapiens
cccagtgggacatgtttgccacccctcagtatcggggagtaagagcaggatttccaatttccaagcctgatggga

SEQ ID NO: 283342 - DNA, 75 bp, Homo sapiens
gccatgtgagcactgggggtggtgccagtttggagctcctggaaggtccccgcggaagccgcggtgtcggcgcca

SEQ ID NO: 283343 - DNA, 75 bp, Homo sapiens
ttcgcctccttcaccgccgcagaccccttcaagttctagtcatgggacatatttggagaagactgtgtaagtgta

SEQ ID NO: 283344 - DNA, 96 bp, Homo sapiens
gattaaaaagtgaacttttctctggacttccccagaagaagattgtggttgaattcaggttggtggtgtggacccaaagcagttggctgtttacga

SEQ ID NO: 283345 - DNA, 100 bp, Homo sapiens
cctgagcaacattgaacggctgaaattggaagtgcagaagtatgagcctgctataactgcggtagaggtggccacattgccaaggactgcaaggagccca

SEQ ID NO: 283346 - DNA, 97 bp, Homo sapiens
aaattggaattttcagatgaaacattcggatcaaatattccaaagcagtttgtgcctgctgtagaaaaggttttcctttggaatatggataaataca

SEQ ID NO: 283347 - DNA, 51 bp, Homo sapiens
cctgtacagcctgcagaacttgcacgatctgattttctggagagatgtgaa

SEQ ID NO: 283348 - DNA, 96 bp, Homo sapiens
ctgccatattgtgtcttccccggccggtccctcgcctcccggccgagctgacggacagagcgggatgccaccagcttgtccaaagggaagttccag

SEQ ID NO: 283349 - DNA, 96 bp, Homo sapiens
acaagatcatgggcaaaggacagatccaggtgaccctggcaaagatgagagtgcacatttcgtcctgcctgaaggtccaggagcagatggccaact

SEQ ID NO: 283350 - DNA, 75 bp, Homo sapiens
tcaagaacctgcctgcccaggctgcggacacatgtccagggctgggggcagcagccatgcctacctggggggccc

SEQ ID NO: 283351 - DNA, 98 bp, Homo sapiens
ggcgcgcggcggcggcgctcggcgatggtaggcgtccctggagcggccgccttccagcatttggagcaagaggtggtggtggccttcccccgaagaaa

SEQ ID NO: 283352 - DNA, 73 bp, Homo sapiens
tggacttcgcctttcccgagccctggaggtggggagaaaagatatacacctgaagaaattgagaagctcaagg

SEQ ID NO: 283353 - DNA, 100 bp, Homo sapiens
cgcccagatgatgcggtggtgggggacctgccggcacgcgactccccccgggcccaaaggggatatgagactttctactcggaatatcctgagtgttgcg

SEQ ID NO: 283354 - DNA, 100 bp, Homo sapiens
tcctttccggaagcacacagtgcgcggggagcgttcctacagcatgcttgagagttcaaaccggcttgatgaagaacacaggctaattgccaggtatgcg

SEQ ID NO: 283355 - DNA, 75 bp, Homo sapiens
ctcagcacactggcatttagcaaacagaatgaagccagcagccacatccaggttgctccttgagggcaggacagt

SEQ ID NO: 283356 - DNA, 100 bp, Homo sapiens
cctcccagtctgcggccatgaacgcgagcagcgagggcgagagcttcgcgggctcggtgcaaatctgcgggccaggcatcgacatccgcaacgactatca

SEQ ID NO: 283357 - DNA, 101 bp, Homo sapiens
cgacagtgactaccatgacgaaaacatgtactacagccagtcttctatgtttccacatcggtcagaaaaagatgacattcaccatggcaatggcacccagc

SEQ ID NO: 283358 - DNA, 98 bp, Homo sapiens
attcgccgtgcccgagaatagctccgtccagcaggttcgagaacttgtcttggacaattgcaaatcaaatgatggaaaaattgagggcttaacagctg

SEQ ID NO: 283359 - DNA, 74 bp, Homo sapiens
cactggattgggaaagaccatggcagtggaaagaggcaaaacctgatgaattaatggattccaaattgagatgc

SEQ ID NO: 283360 - DNA, 100 bp, Homo sapiens
tcagtgcattcatgaagcatctgaaaaagctgtggaaggctctggataaggaccagtacctgcccaggaaactgggaagctgcccgggagtgtcgcagga

SEQ ID NO: 283361 - DNA, 102 bp, Homo sapiens
tgaagcgtgccgggaagcgcttcgaaatcgcctgctacaaaaacaaggtcgtcggctggcggagcggcgtggaaaaagaccttgatgaagttctgcagaccc

SEQ ID NO: 283362 - DNA, 75 bp, Homo sapiens
agcacctacgtcccgctgccgtcgccgccgccaccatgcccaagagaaagtgtactaatggtcacttgatgtgcg

SEQ ID NO: 283363 - DNA, 88 bp, Homo sapiens
gccaggggagggtggcactggctctcctggtccagctctcaggacaagaacaaagtgtgctgggcctgttcacaatgagcttgcattc

SEQ ID NO: 283364 - DNA, 75 bp, Homo sapiens
gtgagcaaacaacccatgacggaccaggaagaaacaggctcctgccagcaccgacagcaacgaaaatgttcccac

SEQ ID NO: 283365 - DNA, 100 bp, Homo sapiens
aaccgggagccattcagaaaagctgctctgttaaaagcgaaaatgaaacaattgcctgcggcaacagttcgactcctttcaagttctcagatcatcactt

SEQ ID NO: 283366 - DNA, 100 bp, Homo sapiens
ccagcacctgaagaattgatggcagacgatgagcactacatcccccgggccgtgctgctggacttggaaccccgggtgatccactccatcctcaactccc

SEQ ID NO: 283367 - DNA, 100 bp, Homo sapiens
aatctgatggaacccctgaaaacaaccctctggcagcttcgagagctgtgcccaggagtgaacaaccagccctacctctgtgagagtggtcactgctgcg

SEQ ID NO: 283368 - DNA, 83 bp, Homo sapiens
gctgtagctttcatgagcacaggcatcagtcaggcagatgtttgtcgactggaatggaatccagactccaaaatgatgcaaat

SEQ ID NO: 283369 - DNA, 101 bp, Homo sapiens
aagcgtcacaaaaagcgtggcatctttcccaaagtagccacaaatatcatgagggcgtggctgttccagcatctaacactgtctgtggaagcccgtaaaga

SEQ ID NO: 283370 - DNA, 89 bp, Homo sapiens
aatatcatgcaagtgtggcaaatggtacccaggatggaggagaaggaggccctggtacccatccagaaggccacggacagcttccacac

SEQ ID NO: 283371 - DNA, 80 bp, Homo sapiens
actatggaaacagaggctattgatggctatataacgtgggccaactcaccctatgcagcacagcccaccagctacgacta

SEQ ID NO: 283372 - DNA, 82 bp, Homo sapiens
gatgcgcgcgatgctggaccagttgatgggcacctcccgggacgaacattctagtatgccagtagaaaaaaatatcacttta

SEQ ID NO: 283373 - DNA, 87 bp, Homo sapiens
atgcagttgccagaactgcccaaggacatcaggtggcccacaaactctttaacaacttgaaataaatgtgtggacttaattcacccc

SEQ ID NO: 283374 - DNA, 74 bp, Homo sapiens
ccgagatgcggttttcctcgcagaacgcctttatgcagaagaaaccgaaccctcaccaaacagatctgcttgca

SEQ ID NO: 283375 - DNA, 76 bp, Homo sapiens
ctgaaatgaggatccgttttacctctccccaccccaaggattttcctgatgagggggaaaaaaatagtggctttga

SEQ ID NO: 283376 - DNA, 75 bp, Homo sapiens
gctgattcagcgcatcggcagcggcacctacggcgacgtctacaaggaagactatgaccgtctgaggcctttatc

SEQ ID NO: 283377 - DNA, 100 bp, Homo sapiens
gcagccggccttcgggtcgggcgtctccgccggctactgccgcttcagttctcccggtgtggccacgagtcggttatgcagccctgatagccgactggcc

SEQ ID NO: 283378 - DNA, 112 bp, Homo sapiens
attgacgccatgtcgggttattcgagtgaccgagaccgcggccgggaccgaggtatacgctcaacggcaagaaagtggaagttgccgtcaaacagatcatcgctggaaaagc

SEQ ID NO: 283379 - DNA, 73 bp, Homo sapiens
ctggttccgtccgctaggagtctgcgtgcgagtaaacattgctatcttcagaaattaaggaatgagaggcaag

SEQ ID NO: 283380 - DNA, 85 bp, Homo sapiens
aggacggacaagcacagtcttcggaagctatccgtggtcctgaaccagttatgtgtgttgcatgagaaaacgccagtaagtgaca

SEQ ID NO: 283381 - DNA, 105 bp, Homo sapiens
agatggcggcggcgtctgtctctgcggcttctggttctcacttgtcggtgctggagaatctggtaaaagcaccattgtgaagcagatgaggatcctgcatgttaa

SEQ ID NO: 283382 - DNA, 90 bp, Homo sapiens
gaatgacttaagttttgtaggtcaggatgttgatggagacaggatggaaatcattgaactggcaagtgcagaaaatgcttttaaagtgag

SEQ ID NO: 283383 - DNA, 75 bp, Homo sapiens
cctcctcaaactgactttgcagccacggagagggccttgctctgtcacccaggctggagtacagttgcacaatca

SEQ ID NO: 283384 - DNA, 83 bp, Homo sapiens
caccaactatgaagactctcagggcgcgatttaagaagacagagtaagactttgaccccgacgcaggcttcagtgattgccgc

SEQ ID NO: 283385 - DNA, 100 bp, Homo sapiens
caagatggaggagtacgcgcgagagccttgattgttctctggggccggactgagaaatgcctgaaggagacgacggaggagatccggcagatgggcactg

SEQ ID NO: 283386 - DNA, 98 bp, Homo sapiens
cccggagcacggggtggtgtgtgggggaagccgcccccggcagcagtccacctggaaggccgctgtggtggaaggatgtttgactgcagagatgtggc

SEQ ID NO: 283387 - DNA, 97 bp, Homo sapiens
cttatatgttcagtgtgcaataaaaagtgttcttcagcatcaagcctacaggaacatagaaagaccattcctcaagaattttgtatccaaggcccaa

SEQ ID NO: 283388 - DNA, 97 bp, Homo sapiens
ccgagccgagggtcccgagccaagccggtcgtgagtgacgatgacagtgaggaggaacaagaggaggtccacctgggcttgcgaaggcacagattcc

SEQ ID NO: 283389 - DNA, 75 bp, Homo sapiens
ctgaatgatgcccttagcatccgggagagcaccttgggacctgaccatcctgctccatgcctttcttggacatcc

SEQ ID NO: 283390 - DNA, 100 bp, Homo sapiens
ctgtgtggctgcactcactctacgtggagttgggccctgcaggaaggacggacttcaggggcagaaaacccgcctagtgccaagcaaccctccaagatgc

SEQ ID NO: 283391 - DNA, 100 bp, Homo sapiens
gcctgcccaaccgcgtgaccttgattgagttaatgaacttcacgcctcagcgtccagggctgcgctggcctcggcacaccagtgccacccgctgccccgg

SEQ ID NO: 283392 - DNA, 75 bp, Homo sapiens
cactacaacaggaaaatcatattatagatggagtaaaggcggtggatgaattttattccaagatagaaggccaga

SEQ ID NO: 283393 - DNA, 127 bp, Homo sapiens
cagatcgagaccgggcccttcctcgaggcggtgtcccacctgccgcccttcttcggtgctggagaatctggtaaaagcaccattgtgaagcagatgaggatcctgcatgttaatgggtttaatggag

SEQ ID NO: 283394 - DNA, 82 bp, Homo sapiens
gccatatcacagcctgcttcagggaacacattttctcatcacagtatgggtccgccttagtaagcgccgggccaaggctggg

SEQ ID NO: 283395 - DNA, 97 bp, Homo sapiens
tttccatcggtccttacagccgctcgtcagactccagcagccaagatggtgaagcagatcgagagcaagatcttcttcagcagtatcgttctgctgt

SEQ ID NO: 283396 - DNA, 100 bp, Homo sapiens
tgcacaggccggagagagccgtaggcaggaccccgggacaccctggaagccaggaaatgggtattgtgtcactctgtctgctgtttgaaactcttcttca

SEQ ID NO: 283397 - DNA, 100 bp, Homo sapiens
gccggtgctgttgccttcaggtgaccacggattcgccatcgctactgaaagcattaaaatgctggtgacattgtgtcaatctgatactgaagaaatcaga

SEQ ID NO: 283398 - DNA, 75 bp, Homo sapiens
actaccccaggaacccgcgccgcgagggctccttccctcaggcattatattgtacttctagcaagtgcaccaaca

SEQ ID NO: 283399 - DNA, 75 bp, Homo sapiens
caacgagatcttccgccactacgaagttgcatgctgagaatttgaaaaatgaagatgatgtagacactggactat

SEQ ID NO: 283400 - DNA, 90 bp, Homo sapiens
aaaccgagctcccgtctgccttgcaggtctctgtcccacctggtgctctggactgctgggtgtttctgagctgtctggaggtgttgcaga

SEQ ID NO: 283401 - DNA, 100 bp, Homo sapiens
caagactggtccacggagtgtatgaccacaaacagccatcaaggtccatgaaaaagcagatgacttgggcaaaggtggaaatgaagaaagtacaaagaca

SEQ ID NO: 283402 - DNA, 100 bp, Homo sapiens
accgcaaggaccccaaagagtgctgcaagttcatgtgtctggacccagaaatcccttccctgcgacatatgcaaagacgttgtcaccgcagctggtgata

SEQ ID NO: 283403 - DNA, 100 bp, Homo sapiens
gcgactccggagacagcccaaatatcctcggaagagcgctcccaggagaaacaacctgagagacactctcgtaagttacatgcaaactaaagaaagtgaa

SEQ ID NO: 283404 - DNA, 75 bp, Homo sapiens
cgtgggcatgggcatgtacaacaccgacgaggtcacgggaatccccatgaactgctctgtgaaactgcagctgag

SEQ ID NO: 283405 - DNA, 90 bp, Homo sapiens
gttttcttatttagccggagtgagaagcaagaaggccctggacacagcaatatctctgggctttcacagattttctaccctagcaaggat

SEQ ID NO: 283406 - DNA, 100 bp, Homo sapiens
aagggaaaagctgatgctggcaaggaggggaataaccctgcagaaaatggagatgccaaaacagaccaggccacgtgctgtacgccgacatcaagatgga

SEQ ID NO: 283407 - DNA, 100 bp, Homo sapiens
gcgcggcggcggcggccatggcccggctggctgactacttcatcgtggtaggctatgaccacgagaagccagattgagaaaatcatgagttctattggag

SEQ ID NO: 283408 - DNA, 90 bp, Homo sapiens
tggattatgaaatttttgggaaggtgcaaggggtgtttttccgtaagcatactcagtaccttggccatgtagaagttgatgaatcaagag

SEQ ID NO: 283409 - DNA, 102 bp, Homo sapiens
cagcctcccaaagtgctggtattacagatatttcacagttcttgccgagtgcttcactttttcactagaagtaaacgactttttacagccagtttgttcact

SEQ ID NO: 283410 - DNA, 100 bp, Homo sapiens
acgtctgcggaagtgcagctgcctcagttcttagcgcagacattacaagaagcggtgccaaggccgcatgcggaagcacgtgggggacctgtgcctgcag

SEQ ID NO: 283411 - DNA, 98 bp, Homo sapiens
accgacctcatcagtgagctgtccctgctggaggagcgcttccggaatcctcactatggatgggctcattgaggacattaagcatcggcggtattatg

SEQ ID NO: 283412 - DNA, 100 bp, Homo sapiens
acctctagattccttgcttccattttcccagaagtattctttaggtgatgctagaaggcctcttcatgaaacagcagttttggtagaagatgtggtacac

SEQ ID NO: 283413 - DNA, 95 bp, Homo sapiens
cttatatgtgatgccattccagcactggactcatggaggctgagcatttattcaggactttgtatctttgctaaagtcagtgatgtgaaaagact

SEQ ID NO: 283414 - DNA, 139 bp, Homo sapiens
ggagaatctgctgtcgcctgcagctgctcgcctgtctccgtcggaagggagcccaagctttgcagaggagctggagctggtggaggatgtgtggcgaggggaggcgcaggacctcctctcccagatcgcccagctgcag

SEQ ID NO: 283415 - DNA, 75 bp, Homo sapiens
ttctactcttctctacaaatatagactccgttccctaccacagccttatcctccaggtcctattgacaatactaa

SEQ ID NO: 283416 - DNA, 96 bp, Homo sapiens
cccgccaccacgcccggctaatttgcaatacggaaattttaataggagaacatttcaggataggaataggccaagtgctgagaagatgagtcttag

SEQ ID NO: 283417 - DNA, 75 bp, Homo sapiens
aaagacgatcaatcaaattcgtcaagatgcagtaaaactgtcggaaaaggtaacagaagatggaactcgaaatcc

SEQ ID NO: 283418 - DNA, 75 bp, Homo sapiens
ccgagaagtccccgaccgactgccaccaaaaccctcaacaggggcatctctgagttcatcgtgatggctgcagac

SEQ ID NO: 283419 - DNA, 73 bp, Homo sapiens
aaaaactcgccaaactgcaggcacaagtgcgcattggtgggaaaaagatgggtgtgaacctgacacgcagcaa

SEQ ID NO: 283420 - DNA, 75 bp, Homo sapiens
gtttctttcttaaaggactgatttttagaactccacatttgagaggcggggtttcaccatgttgcccagactggt

SEQ ID NO: 283421 - DNA, 75 bp, Homo sapiens
gcccggatgagtacgataccgaagcgggctgtgtgccccttctccacccagagtgatacgggaacaacacctcca

SEQ ID NO: 283422 - DNA, 75 bp, Homo sapiens
acaagactggggctgctcccatcattgatgtggtgcgatcgcctgaaaggatttcaggggagcagtatggaattc

SEQ ID NO: 283423 - DNA, 83 bp, Homo sapiens
aggtgcttggcaaaatcgagcgggccattgggactggtgattgcagctggaagtgcccatgaccgagctggcgtcctccgggg

SEQ ID NO: 283424 - DNA, 98 bp, Homo sapiens
ttcgctgctcagccagctcctgcgaccgccctgcgcttcgtgcaccggggcggtccgttgccaaagccagaaatttctgaataaattggcagaagaac

SEQ ID NO: 283425 - DNA, 100 bp, Homo sapiens
tacacggagtttgatgaggatttcgaggaggaacccacatcccccataggtcactgtgtggccatctaccactttgaagagacagggttttgccatgttg

SEQ ID NO: 283426 - DNA, 90 bp, Homo sapiens
cgcagttcttgtttgtggatcgctgtgatcgtcacttggtgtggacactgccagcggctgcagccgacttggaatgacctgggagacaaa

SEQ ID NO: 283427 - DNA, 75 bp, Homo sapiens
cacctcccaggacgactgtgtcagcaaagagcgcagctcctccagaatccagactccaaaatgatgcaaatcaac

SEQ ID NO: 283428 - DNA, 75 bp, Homo sapiens
cgcctccttgatcaccaggataatattctctcattgattaatgtcaatgaaactcagccacctgtgacaaatttg

SEQ ID NO: 283429 - DNA, 75 bp, Homo sapiens
ccaacttcggcaagatccagatcgggatttacgtggagatcaagcgcagcgatgtactatactggcaattgctgg

SEQ ID NO: 283430 - DNA, 50 bp, Homo sapiens
gtggcctgtggcgctaaccacacgtatgcattgcctcaggaacaaaggtg

SEQ ID NO: 283431 - DNA, 89 bp, Homo sapiens
caccacgctgagcctcctgaagcgggccaaggtgcacatcaaggtgctccaggaactgattttcttcctgcaccgcctgacctcagtga

SEQ ID NO: 283432 - DNA, 100 bp, Homo sapiens
ccggccgcggtggcggcgctgccgcctgaagtgcgggcgcagctggcggagctggagctggagctctcggaggactgacatcattgaccacagctttgca

SEQ ID NO: 283433 - DNA, 98 bp, Homo sapiens
acccaagagaaggttttttctaggaggaggaagtgatccattgtgtaagaattcagtgacgcgcagcgcccccatcaacagtgacagccagggtcggt

SEQ ID NO: 283434 - DNA, 100 bp, Homo sapiens
ctcagtgctctggccttctcccctgatgggaagtacatagtgacaggggagctgttcctgttccagctgctccgtggcctggcctactgccaccggcaga

SEQ ID NO: 283435 - DNA, 74 bp, Homo sapiens
tgatggcagtgttttagctgctggttacatggacacagaacagtatgaagaagcagtacgagactatgaaaaag

SEQ ID NO: 283436 - DNA, 75 bp, Homo sapiens
gtcactccaacctcttttcgctgggaaatcctcattgacgattcaatttgttgaaggccaatttgtggactccta

SEQ ID NO: 283437 - DNA, 83 bp, Homo sapiens
cgtgcgtcctgacgcacaggagagagctgaagaccaaatacacgctgatcgatgagcaggacatcccgctggtggagagctac

SEQ ID NO: 283438 - DNA, 74 bp, Homo sapiens
cgcacccgggtctgcagtccctccgccatctcgcagctggtaagcgggcccctcagtgctaccccagttccgtc

SEQ ID NO: 283439 - DNA, 90 bp, Homo sapiens
gtcattaggaacaatggtgcaagcaaagtgtgggatgctgtctcaggagatgaattgatgaccctggctcataaacacattgtcaagact

SEQ ID NO: 283440 - DNA, 98 bp, Homo sapiens
cgcgggcgcgactcggcggcggcgtcttttgttcctgtgaaggcattcgacagacctgggaggaatcttcttcccctctcaacccaaccacgtccctc

SEQ ID NO: 283441 - DNA, 83 bp, Homo sapiens
cgagacttaccagagccacaaggtcccaggagctccacctgcggccagagtcccactcatacctgcccgagctggggaagtca

SEQ ID NO: 283442 - DNA, 90 bp, Homo sapiens
caggactccagaaaattcagcaaagaagaagcttttaaggtgctggagaatctggtaaaagcaccattgtgaagcagatgaggatcctgc

SEQ ID NO: 283443 - DNA, 83 bp, Homo sapiens
ggatattaaatatacgacacatccaggagtttattggagcgcagactgatggcgcaaaggagatgtggtatggtgtattcctg

SEQ ID NO: 283444 - DNA, 100 bp, Homo sapiens
cgatcccccacagaagccccctcggtccatcaccctcaggatttctggacttcaagaaacattgaagaaactgcaaagaggacatagttaccatggtcct

SEQ ID NO: 283445 - DNA, 75 bp, Homo sapiens
caatgtgtgattctgagaccagaccaaccaactgaaggaggcagcacccagggtcattcctggagcataaacgat

SEQ ID NO: 283446 - DNA, 90 bp, Homo sapiens
aggccgggaggccgtgcccggagggtactagatggaaacttgagaaaggactgcttattgataacagctaaggtattcctggaagcagag

SEQ ID NO: 283447 - DNA, 100 bp, Homo sapiens
ctgggattcgcgctgctgggcacccacggagcctccggggctggaagtgggaaaactcttgcctttgccatcccaatgattcatgcggtgttgcagtggc

SEQ ID NO: 283448 - DNA, 100 bp, Homo sapiens
gcggcttcgatgccatcctgcagacagctgtgtgcacgagacagggtctcactgcattgcctagtctggtcacggactcctggcctcaagtgatcctcct

SEQ ID NO: 283449 - DNA, 100 bp, Homo sapiens
attttactttatgtgagaaaatctacaatttcttcgagacactcatataaagcgatgaagaacgatacagatacagggaatatgcagaaagaggttatga

SEQ ID NO: 283450 - DNA, 108 bp, Homo sapiens
cggcgatgatgaacaggttccgaaagtggctctacaaacccaagacaatgcagatcttcgtgaagactctgactggtaagaccatcaccctcgaggttgagcccagtg

SEQ ID NO: 283451 - DNA, 75 bp, Homo sapiens
atggaaccccagggctgcctggtggctgagacatggtctcgctatgttgcccagaatggttttgcactgggtcca

SEQ ID NO: 283452 - DNA, 99 bp, Homo sapiens
ccaactgctttcctttccctcagcacacagaggatgatgctgactttgatgaagagacagggcagggcattgttcatgcactgaccgacctcagcagcc

SEQ ID NO: 283453 - DNA, 83 bp, Homo sapiens
aaaggagtcagggatggctcttcctcagggcaaatccagacagaacctttgacttggtgttgaaagtgaaatgtcatgcctct

SEQ ID NO: 283454 - DNA, 98 bp, Homo sapiens
ttcaagtagtggaaggagtacagggaagtctataagctttgcaacagaattacagagtatgatgaaggcgcaatggcgaggaagttatctgtaatctt

SEQ ID NO: 283455 - DNA, 75 bp, Homo sapiens
gcgctgtgatgcctgcagagctgtggcttaccagaaacccaccttgtcccatccacatcaggacatcccagctgg

SEQ ID NO: 283456 - DNA, 143 bp, Homo sapiens
caaggggctcctgcaactccccagcagcacgtgttggaatggacttcggaccctggcctcttgggatgcaaagatatggccgcgtggaaagtgtcaaaattcttcccaagaggggatctgaaggaggagtggctgcctttgtg

SEQ ID NO: 283457 - DNA, 75 bp, Homo sapiens
ccccccagacaagatggacaccgcggaggaaggagaaccaggtgcatcagcgcattgcggagctgaggaaagcag

SEQ ID NO: 283458 - DNA, 75 bp, Homo sapiens
ggaaccctggtcaccgtctcctcaggtgtgcaactgaggaacatggctcaagaaactaatcacagccaagtgcct

SEQ ID NO: 283459 - DNA, 75 bp, Homo sapiens
gaagaacgagggcttctattccagcacgtgcccagagtcaagggtccagagaaggaggagaagttgagacaggcg

SEQ ID NO: 283460 - DNA, 90 bp, Homo sapiens
cggcacgccttcacctacaaggtctatgctgacaagaggctggacgcacaagttcaatctcatccctcccagcagctccccttccacccc

SEQ ID NO: 283461 - DNA, 100 bp, Homo sapiens
gactccagcaccttggcccggcccgcgaacgctgagcacgcgcggaaaccctttaaagattctgtttctggcgtctgcatacgcaagtccccaactcgct

SEQ ID NO: 283462 - DNA, 83 bp, Homo sapiens
cgccgctctagcggccgggactctgaactatggcgtccagttacaacacagggatcacaacaaacacaaccgccacagaagca

SEQ ID NO: 283463 - DNA, 50 bp, Homo sapiens
ctgcgatctctgtggtaggcccagcatttaaatcaaacggtattgagatg

SEQ ID NO: 283464 - DNA, 82 bp, Homo sapiens
cgagcgcgagcggcgcgagaaagccagctgcgggccgtccagcggctgtgccacttctacagcgccgtcatgcccagcgagg

SEQ ID NO: 283465 - DNA, 98 bp, Homo sapiens
gtgcacccccagtgggtgctcacagctgcccattgcctaaagaagatgaagcggatcccaaacggcagaagacagaaaatggggcatcggcgtgagcc

SEQ ID NO: 283466 - DNA, 100 bp, Homo sapiens
gtggctctcgcgctgctggagtcgccgcggccggagggcggggaggagccgccgcgtcccagtcccgagattgaagataaaactttccaagtccttggta

SEQ ID NO: 283467 - DNA, 75 bp, Homo sapiens
gccattatgtccttcaagaacacacaagttaccttatcccatatcacacaactggtcctcagccataacaagcta

SEQ ID NO: 283468 - DNA, 97 bp, Homo sapiens
ccgggagttcaagaagaacactccagaggagaggcgggagatttttgagcagcacctgaagagcctgaagctgacccagtccagcaccttttactcc

SEQ ID NO: 283469 - DNA, 87 bp, Homo sapiens
caatcaaaatgaagttgaagcatcagcacagacgcagtcttcagcaaggaagtgctgggaacgccctggagtgaacccaggaagatg

SEQ ID NO: 283470 - DNA, 102 bp, Homo sapiens
ctctgctgcaccgacctcgacgtcttgcctgtgtcccacttgttcgcggcctatagatccacatgaagaccatgcccgccgccatgttcaggctcctcacgg

SEQ ID NO: 283471 - DNA, 96 bp, Homo sapiens
gccgggggtcgctggctctgctgctgccgccggcgaaggaggaggcgttgccggttcaactttgtggggaaacttttgggtccacgtggcaattct

SEQ ID NO: 283472 - DNA, 83 bp, Homo sapiens
cagaagcaaccttgggcttagtcccaccctttttaggcactcttgagaaatcagcctaagaaagctgtcaagataaaacctca

SEQ ID NO: 283473 - DNA, 89 bp, Homo sapiens
gccgcggaacaaccacgcctgggcccgtgtgcagagccttgcccagaacccacgcctcagtttcctctcccctgaggctgcctccccag

SEQ ID NO: 283474 - DNA, 82 bp, Homo sapiens
aaaaatcgtgacaccagaagaatattataatgtcacagttcaagctggaagtcgagtgtgctactcaactcaggagatttgg

SEQ ID NO: 283475 - DNA, 98 bp, Homo sapiens
tgcaaccttagcgacatcaggaagaacagggtcgaggatcgagatggagaacttaatgttctggatgatattttaactgaagtaccagaacaagatga

SEQ ID NO: 283476 - DNA, 97 bp, Homo sapiens
gtcacaagaccaatatttggtatactgggcacaatccatctggtggcagatcacgagctgctcaggcaagagctgaacacgcggtttctggtgcaga

SEQ ID NO: 283477 - DNA, 50 bp, Homo sapiens
cttgccggccccaacacggaccttgcaacatctgaatgaattgatgacga

SEQ ID NO: 283478 - DNA, 83 bp, Homo sapiens
cgcgactccccccgggcccaaactgtgcggtcagagaagaaacgccttaggaagccaagcaagtggcttttggaatatacaga

SEQ ID NO: 283479 - DNA, 128 bp, Homo sapiens
ctcagatcttaagtagtgatatttctcttttgtctgcccctattgtaagtgcagatggaacacaacagcatccagagctgctgttggcggattgtacccacggggagatgattcctcatgaagagcct

SEQ ID NO: 283480 - DNA, 83 bp, Homo sapiens
gcgctgtatcgtgtcgccggcagggaggcatagcgcctctctgatcttcctgcatggctcagacaatgcagatcttcgtgaag

SEQ ID NO: 283481 - DNA, 100 bp, Homo sapiens
cacttattggtgacctaggtgcatgtgcttttgcagactctctcagtgaggatttatggctgagagaattacggatccagatcaggagatttgaggagct

SEQ ID NO: 283482 - DNA, 89 bp, Homo sapiens
atcgaggacataaggaactagtcacagtgttgctgcaacatagagctgacattaactgtcaggaacatgcttaccctgctgatgaactc

SEQ ID NO: 283483 - DNA, 98 bp, Homo sapiens
gaattctctcaattgatggtggaggaacaagggggaacacacctgaaactagaggaacagcttatgtggtctatgaggacatctttgatgccaagaat

SEQ ID NO: 283484 - DNA, 80 bp, Homo sapiens
tttcagcttctggtcaggactctattcagagactgaaggcactacacgaatgcagagtttgagtccagatcccaaagccc

SEQ ID NO: 283485 - DNA, 100 bp, Homo sapiens
agtaaaagaagcaaggaagctgaagcagctttcttgaatgtctacaaaagattgattgacgtcccagtgtttacaggcattggagtttttacatgctaat

SEQ ID NO: 283486 - DNA, 74 bp, Homo sapiens
gctgacgtggatggctgactgtattgctgttgtcagaaggtgcagatgtcaatgcaaagcacagacttggctgg

SEQ ID NO: 283487 - DNA, 100 bp, Homo sapiens
cgggccgagatgtctcgctccgtggccttagctgtgctcgcgctactctctctttctggcctggaggctatccagcgtccttggatgtggctgtgttgcc

SEQ ID NO: 283488 - DNA, 75 bp, Homo sapiens
gagagaaccgaggaacgaagaaacagacattcaacatgattgcatttgaaatttggagcaagaggtggtggtggc

SEQ ID NO: 283489 - DNA, 75 bp, Homo sapiens
ctgccacaatgggacatgtgcaagagagctcaaaggatggctactgacatgcagaggaagagaagcagcgaatgc

SEQ ID NO: 283490 - DNA, 80 bp, Homo sapiens
tttaattccttttcgaccttcaatccagttccaaggactccacgggggcccactcttcctaagacccatgtgaaaacagc

SEQ ID NO: 283491 - DNA, 83 bp, Homo sapiens
ctttcaactgatttgggaagcctacaccattcaccttagatgctcccataatactctcagatagtgaagaagaagaaatgatc

SEQ ID NO: 283492 - DNA, 90 bp, Homo sapiens
aaggtgccggtggtgcgagtcttcggagcgaccccggcaggcacatctccctaacacttcctgccaccttccgaggcaggaacagcaccc

SEQ ID NO: 283493 - DNA, 112 bp, Homo sapiens
gattccactcaacggagctgtggccgtgaagatgcgcgccttccaggtctaactcatcttattactatggatttacaccagaaggaaattcagggcttcttcaatattcctg

SEQ ID NO: 283494 - DNA, 100 bp, Homo sapiens
caacgacctcctgggaagcgccctcaccaagtccttctcagggaaaaagctgagatatggggagcctacactccggagggctgtacctttagcactggcc

SEQ ID NO: 283495 - DNA, 116 bp, Homo sapiens
tggctaataacacaacaagtttagggagtccatggccagaaaacttttgggctctcgtggcattatccttcagtggggctattggactgacttttcttatgctgggatgtgcctta

SEQ ID NO: 283496 - DNA, 101 bp, Homo sapiens
ccaagaaccagcctccacatccttccacccacccaggattcagctaacaggcctcacctcttccattccggagatgatccttggacatcttttcagccagg

SEQ ID NO: 283497 - DNA, 74 bp, Homo sapiens
aagaaggcggccatcaccgtacagattgtctacaacctgttgtctctgcgcttcaactcacggatccgtgtgaa

SEQ ID NO: 283498 - DNA, 75 bp, Homo sapiens
agaacatggtttcacaagttaaggtgactctgacatcattagaagcatgccagaacagactggtgaaaagtaaac

SEQ ID NO: 283499 - DNA, 100 bp, Homo sapiens
ctccatcacccaccaacaacaccacaataatccacagccaaggagatcatgaatcagacagataaaaatcaacaagaaatcccatcataccttaatgatg

SEQ ID NO: 283500 - DNA, 85 bp, Homo sapiens
gtcgcgtgtctaggtgagtcgcggtgggtcctcgcttgcagttcagcgaccacggattacttccttaggatagattgccagaagt

SEQ ID NO: 283501 - DNA, 100 bp, Homo sapiens
cttcagccaaagaaacaagccgtggaataggtgtatcaagtaatggtgcaaagcctgaaaaacaaatcattgtggaccccttgagcttcagcgaggagcg

SEQ ID NO: 283502 - DNA, 100 bp, Homo sapiens
gagaccaaagccgctgtgaaaggtacaggtttgcagattccgccagcagcacagcaagctctacagatgagtggctctttggcatttggtgctgtggcag

SEQ ID NO: 283503 - DNA, 75 bp, Homo sapiens
atatcattaagtccagatctggaagctgaaaccccacgtagtgttcttgaagaaattggactgacataactctcc

SEQ ID NO: 283504 - DNA, 75 bp, Homo sapiens
gcctcaggttatgtctgtatctgtcagcctggattcacagatattaataaggcagcggaaagaagaaatatgaat

SEQ ID NO: 283505 - DNA, 100 bp, Homo sapiens
gtggccagtaggcaatcacctgaaggatctgacttccagaagggtttgaaagtattcttgaagggctgtttggacctgcattattaaaagatctcagttt

SEQ ID NO: 283506 - DNA, 90 bp, Homo sapiens
cgtcaggggttgcaggtgtgtgggagagccctaatttgtttagaactgtaatatgcacagttaaaacaacttgtcctctcaggacctttt

SEQ ID NO: 283507 - DNA, 90 bp, Homo sapiens
cgcaggccctgaccttcgccaagaagcacctgcagatctcccaggagagttgtgaaatctgtcaagaacaatttgaacaatactgggatg

SEQ ID NO: 283508 - DNA, 100 bp, Homo sapiens
aacaagaattggataaaaaaaaagaggaattccagaagggccaccccgacctccaagggcagcctgggaaaggaaaacctcttcagcgcaaggtgaaacc

SEQ ID NO: 283509 - DNA, 96 bp, Homo sapiens
agactggacttctcaactgccattctggattccagaagatttaactacgtggtccggaacaccttccaccatgaccacctcagcaagttcccactt

SEQ ID NO: 283510 - DNA, 95 bp, Homo sapiens
tggtcttgacacatctgctctctctgttcaagggaattttgatctaaatagaggcaaatttctggagatgtgcaatgatctcttagctagagtgg

SEQ ID NO: 283511 - DNA, 104 bp, Homo sapiens
agaagaacagctcgagagagcattacaagccagcctctgggaccgaggtctcctctgagcctccggcctccataagacccaaaacagatgacacctcttcccag

SEQ ID NO: 283512 - DNA, 90 bp, Homo sapiens
ctcgtgcagctaagcagccaactgcagaaacgtcagggttcatagtggcgtcatgcacgcagactcctgcaagttcccctaagttcttag

SEQ ID NO: 283513 - DNA, 100 bp, Homo sapiens
ctcagacagatcgccggggaggcagcgcgggatcccagcctcaggcgtgcgcggacggtgtgcggatgaagactggcccatttgcagagcactccaacca

SEQ ID NO: 283514 - DNA, 75 bp, Homo sapiens
cacagctaagactccaggaccctctggaagcctagaaatgtacttcctcctgtgctggttccaagacacagcgaa

SEQ ID NO: 283515 - DNA, 50 bp, Homo sapiens
gtttctgtacatggattatctgtgtatcctactcagtacatgtatctgaa

SEQ ID NO: 283516 - DNA, 100 bp, Homo sapiens
aaagcgagcctcttctgataactcaggatttacttgaaacgaaaggagaacccaggcaacttcagtaatcagttcaagaagttccctcagatgacctcat

SEQ ID NO: 283517 - DNA, 98 bp, Homo sapiens
cccactccagaagtagcatggaaatggagggcatcttcaaccacaaagtcgtgagatggagaataaagaaactctcaaagggttgcacaagatggatg

SEQ ID NO: 283518 - DNA, 115 bp, Homo sapiens
agatgatcagacaaggcaaagcgaaattggtcattctcgctaacaactgcccagctttgaggcgaacagctgcttggagaactacaagtgaagaaaagaaagcattagatcaggc

SEQ ID NO: 283519 - DNA, 74 bp, Homo sapiens
agaccaagtcctcgctggactgctcagggtgccagacctcatcttttatgagcaatatgatgatgatgaaattg

SEQ ID NO: 283520 - DNA, 90 bp, Homo sapiens
tcactgagtaatctttttaccacaaaccagtccagctacgggggcccagccagccagcagctgagtgggggttacggaggcggctacggt

SEQ ID NO: 283521 - DNA, 105 bp, Homo sapiens
gaggaggtggatgaggagggcaagtttgtccggctgcgcaacaagtccaatgagttggaccctgggcgttttttacacatggggacccaggctcgccaaagcatt

SEQ ID NO: 283522 - DNA, 96 bp, Homo sapiens
ctgctatgtccattcctccatcatccccaccttccaccggaggtgctactggctccttcaggtgggatgtgtgtgggctgaaattccgagctgcgg

SEQ ID NO: 283523 - DNA, 101 bp, Homo sapiens
gtcatgggcaacattatccacgtggagctggacaccaaaggtctgctaccgctgccacggccccccctgctgccccggctggggagggtggtccccctgca

SEQ ID NO: 283524 - DNA, 83 bp, Homo sapiens
tcttcagccgaggccgccgccgcctctccttgctgcagccatggacagcctcccgcgacgatgcccctcaacgttagcttcac

SEQ ID NO: 283525 - DNA, 75 bp, Homo sapiens
gtcccttcatggaactgttatgaaaattaaccaggagcgagcagaggcaatggaacccactatgaagtttagcct

SEQ ID NO: 283526 - DNA, 75 bp, Homo sapiens
ttgccggcagaacttacgctgcgggaccccgggcactgttgctgctgcgggagatataaagatgaagcgcagctg

SEQ ID NO: 283527 - DNA, 95 bp, Homo sapiens
ccagccgcttctgaccttccaggcctacgagcagattctcgggatcaccttgcctggagaagttccctgtgatccagcacttcaagttcgggagc

SEQ ID NO: 283528 - DNA, 95 bp, Homo sapiens
caaactagaacctgttccaggattgccaggaggtgagcatacttgattcagaggaggtgtgtgtggagcttgtaaaggagtatgcatctcaagaa

SEQ ID NO: 283529 - DNA, 75 bp, Homo sapiens
tcatctctctataaagttatccaggagccacaaagtgaggctgcctttaatattggttgggaacaaatctgatct

SEQ ID NO: 283530 - DNA, 98 bp, Homo sapiens
gtggatccagatgcccctagcagagcagaacccagacagagattctggagacattggctggtaacagatatcaaggagtacgagagggcctccaaagt

SEQ ID NO: 283531 - DNA, 100 bp, Homo sapiens
ctttcgggggtcctcaccagaagaggttcttgggggtcgcccttctgaggaggctgcggctaacagggcccagagagtgataatgaactctcaagtggaa

SEQ ID NO: 283532 - DNA, 100 bp, Homo sapiens
ctctcgctgttgctggtctctggctccctcctcccagggccaggcgccgctcagaacgcttattctaccagattccatgaaagtattgccagtgtacatg

SEQ ID NO: 283533 - DNA, 100 bp, Homo sapiens
gactacagcgagaagttgcccaaagaacaagtgagggggccatggccaaacctgaggacactttaaacctgtgccagcttttaaacaacgaccttgccag

SEQ ID NO: 283534 - DNA, 83 bp, Homo sapiens
cagagggctctgatctgtgcgacagaattccctataaggagcccctgctggtgcaccagaactaccgggggccatctgcccaa

SEQ ID NO: 283535 - DNA, 100 bp, Homo sapiens
cctgcttcacgctctcgggcctcctctgggagctcatcaggactatgggggattgggcagaggtgcttcctggactgggtccccaagaagatgcagcggg

SEQ ID NO: 283536 - DNA, 100 bp, Homo sapiens
attgtgctgcttgaagggattacaccaaatatacagtagtttctctccctggctcatcttgcatgcttgctctgatggaaaaggtcacctggaaaggaac

SEQ ID NO: 283537 - DNA, 75 bp, Homo sapiens
atttgggtggagacacagccaaacgatatcaggaaagaatatggcaaagctgatgcaagatgggtttattttgat

SEQ ID NO: 283538 - DNA, 82 bp, Homo sapiens
aagaactggcttcgggaattttaccagctttgcccgaagtttttacatacaaattctactagtcacacctggccattcagtg

SEQ ID NO: 283539 - DNA, 90 bp, Homo sapiens
gatatctttaaaattgagtcttctgtccaactgcaagacagccgctcaggaagcaatcttgcatgcgtctggaaatggcacaaccaagga

SEQ ID NO: 283540 - DNA, 100 bp, Homo sapiens
aagaacaatccggacatttcttttggattgcacctctgcctccacctcccctactaccacctttggctactaactatcgaactccttatgatgatgcata

SEQ ID NO: 283541 - DNA, 88 bp, Homo sapiens
agaagaaacagtgtctcccaccagagcacggaacatgaaggactttgaaaatatcagcttgaacgggtctttttacgacttggccatg

SEQ ID NO: 283542 - DNA, 74 bp, Homo sapiens
ccagggtacgcgacaattggcggaggacacaactcagatgggaagttcatcgcccgggcacagcggatagagta

SEQ ID NO: 283543 - DNA, 75 bp, Homo sapiens
gatctaccttctggaagctactactacgtggtgcttggaaaggaggtgaacacagaaaagctgacagcctttgta

SEQ ID NO: 283544 - DNA, 100 bp, Homo sapiens
aagatggtggagaagtgctggaagctcatggacaagaaaaatcctgggtagaagctggatcagcaagaatgtcactccttatattggtgtccattttctt

SEQ ID NO: 283545 - DNA, 100 bp, Homo sapiens
tggatccaagatggcgacggcgatgaaggtgacctgctgagaaaagtggtacaaatactgggaaaaacctgctcttctgcgttaagtgggagacaatgtc

SEQ ID NO: 283546 - DNA, 75 bp, Homo sapiens
gattccggcgggaactcgactcttggcgccaccgcctcatgcactgtgtagtgttatagttttgccgctggactc

SEQ ID NO: 283547 - DNA, 100 bp, Homo sapiens
gacgctggaggatgcggacgcggaggccgcctggggtagcggcggcgggagtcctggcgctctgcaggtgccagaaccctgtggagcatcatgaactggg

SEQ ID NO: 283548 - DNA, 75 bp, Homo sapiens
gaacattctgccgaagagaacaagacgtgtgaagactcaggtacaaatgatgcaaaatgtgcacctggctccaga

SEQ ID NO: 283549 - DNA, 75 bp, Homo sapiens
cgcggctccgtgtttctggaaagtgacagcagagctgaagaagcaggtggagagtgccgagctgaagaaccagcg

SEQ ID NO: 283550 - DNA, 87 bp, Homo sapiens
ttgctgctttcaattactggcatccagaaattgtgtattcagacttcctcttcaaattcctggtgattggcagtgcaggaactggca

SEQ ID NO: 283551 - DNA, 96 bp, Homo sapiens
ctgtgaaagacgagggagaaatgttttgtttgactccagtgttaagagaagaaatgaggacatatcagtatcggatgaagatgagctggattccca

SEQ ID NO: 283552 - DNA, 71 bp, Homo sapiens
gcgcgatggagcagcgaaaacgtggttgtagagttccgtgactcccagtgttctaagaacggaagcatctg

SEQ ID NO: 283553 - DNA, 75 bp, Homo sapiens
ctgcggaagtgcagctgcctcagttcttagcgcagaaaatgtcactgaaattcacaaatgcaaaacggattgaag

SEQ ID NO: 283554 - DNA, 100 bp, Homo sapiens
ctgcagaaatccgaagacatgctccgaaggaacacagatatgtagaactcttcttgaattctacagcaggagcaagcggtggtgcttatggtagccaaat

SEQ ID NO: 283555 - DNA, 95 bp, Homo sapiens
cctgccttcagaacagggcgctcctgagaccctccagcgctgcctggaggagaatcaagagctccgaggtagaatggaagaatctcacttcaatt

SEQ ID NO: 283556 - DNA, 83 bp, Homo sapiens
gtctgtgggactctgcacactcttcggcctgacgcccaccctcaatggcgggctgtctgtccccagaccccagagcacgtccg

SEQ ID NO: 283557 - DNA, 80 bp, Homo sapiens
tcaaggcccttaatgctacaggacaagcaaacctcagcctggaggcacttttccagagtttcaagaagtttttaaccgaa

SEQ ID NO: 283558 - DNA, 100 bp, Homo sapiens
cagagtttctacaaatgctagaagctatcaaagcccttgaagtcagaatggcttcctttgggtggaagaggaaaattggtgagaaggtctcaaaggtcac

SEQ ID NO: 283559 - DNA, 100 bp, Homo sapiens
cagatgtgcaacaaagtgcgatgccctcaggattctctctcggaccaggagggctacctgagcagctccagcagcagccacagtggctcagactccccga

SEQ ID NO: 283560 - DNA, 98 bp, Homo sapiens
ctggcctccacaagggtcaggagccctggagccgcctagggggcaatcccctgttccggatggagggaacacagccgcacccgggtctgtgccagctg

SEQ ID NO: 283561 - DNA, 50 bp, Homo sapiens
ttaagagctgccatcccggctgggtgtacgaagccatcgacagcagagat

SEQ ID NO: 283562 - DNA, 75 bp, Homo sapiens
aaaagcaaggccttctgagactggatctgatgatgtgtcagctgtgatgcatgtttaaaaggaaattttcgaggt

SEQ ID NO: 283563 - DNA, 100 bp, Homo sapiens
cagtggaagcttttgaaaaacactacttaggaatgatcacattaatcttggccactgacatggcaagacatgcagaaattatggattctttcaaagagaa

SEQ ID NO: 283564 - DNA, 105 bp, Homo sapiens
tttgatggtggaagtggtgaaacccaaacaacatctcctgctattccttgggctgcctttcctgcaggaacctctttcaggagctataaaagaaagggaggaatc

SEQ ID NO: 283565 - DNA, 99 bp, Homo sapiens
gtacacttcttggcagtcatggacaagagctattgatagaagtccaagtggtaagaagttcagaagcaagcctcagttggcaaggtacctgggaaatac

SEQ ID NO: 283566 - DNA, 75 bp, Homo sapiens
ccaggagtttcctgtgtccagcgctgccggagccgcctgaggctgctctttggcgtaaattgcaatcgattaggg

SEQ ID NO: 283567 - DNA, 82 bp, Homo sapiens
cgtggcctgcgcaccgacatcgatgcgacctgcacgccccgccgcgcaatgacacccccaaccatggttgtgaagatgctag

SEQ ID NO: 283568 - DNA, 90 bp, Homo sapiens
tggaggtatcaactgtaagaagaggaaagacttgtctcagaggatgccagcccccatcagattgcgggagctgatccggaccatccggac

SEQ ID NO: 283569 - DNA, 83 bp, Homo sapiens
ctccgtcgcagactacggacctgtctgggtctcagccgccaaagaccccgtccggtagaagcagtcagttccctgcacccagc

SEQ ID NO: 283570 - DNA, 100 bp, Homo sapiens
gagctgtcctttgttttggattacataaaccagtcacccaagtgcattgcctttggaaacgagattcaattagcagagcctcacagacaatggccaaatg

SEQ ID NO: 283571 - DNA, 75 bp, Homo sapiens
ctgtccctggacctcatgcaccatattcacatgttggttgttgaggcatcttcattaagctggagtaccaggata

SEQ ID NO: 283572 - DNA, 100 bp, Homo sapiens
gcggatggcccccggtgcaagaggcgcaaacaagccaatcccaggaggaaaaacgaaccgcatgcacgagtctctcatgctcttcgactccatctgtaac

SEQ ID NO: 283573 - DNA, 82 bp, Homo sapiens
tccatgcggaagatcgtcgccacctggatgctggagcagcagctacctggcaactgaacccatcatcaccacagccactcct

SEQ ID NO: 283574 - DNA, 75 bp, Homo sapiens
ccaaaagcaagttcatgggcatgtccgtgggggtctctatgataggggaagatcctgaggaggatgaaggggctg

SEQ ID NO: 283575 - DNA, 50 bp, Homo sapiens
cggggacgccagcaagtgcactgtcacagacttaggagaagtcaatcaac

SEQ ID NO: 283576 - DNA, 83 bp, Homo sapiens
gtccccgggggcgccatggcgaccggagcgaacgccacgccgttggtgcccatgacgcttccggagacaaccctggaaacact

SEQ ID NO: 283577 - DNA, 76 bp, Homo sapiens
agagaggttttgaattcacgcttatggtagtgggaagatgagaatgtgcctactgctcctgatcctccaagtcaac

SEQ ID NO: 283578 - DNA, 80 bp, Homo sapiens
cccgggagcaggaggagctgctggcgcccgcagatgtgcccatgacgcttccggagacaaccctggaaacactgaagcat

SEQ ID NO: 283579 - DNA, 90 bp, Homo sapiens
gcagcgcaggcggtggtccctgaggcccgtggaaggagtcaaacttgcgggaattttgcagtcggcgtggcacaagcctaatggaagatg

SEQ ID NO: 283580 - DNA, 115 bp, Homo sapiens
caccctctgggccgcgactgcgcagggcggggccggccgaaccatgggccgcggtgtgggcaggaactgaggaggtggacaaagccctgctagccactggctgtgggaacgtggc

SEQ ID NO: 283581 - DNA, 100 bp, Homo sapiens
caggagcgatggccgggatcctggagcactcggtcatgtacccggtggactcggtgaagatcgcccaggaccacaccgcagcgtaactgcaggcctctca

SEQ ID NO: 283582 - DNA, 83 bp, Homo sapiens
ggagaaggagcgcattggccagttcgtctttgcccgggacgctaaggcagccatgggggatatgagactttctactcggaata

SEQ ID NO: 283583 - DNA, 100 bp, Homo sapiens
gggacgattctcctgcaagatcactggccggccccaaccgcaggtcacctggctcaagttccggaactttaagatcatttaccgccgctatgctggcctc

SEQ ID NO: 283584 - DNA, 74 bp, Homo sapiens
ccctggatgagggggaagggcctcaaagccagaagaacctcaagaaggcatgaagccagcccctgcagtgccgt

SEQ ID NO: 283585 - DNA, 98 bp, Homo sapiens
tcagttcggagaagtgtttaagatgatgcaggctgaagaggattggaggttttaaagcaggaaacagcagttgttgaaaacgtccccattttgggact

SEQ ID NO: 283586 - DNA, 82 bp, Homo sapiens
aagaatatgacgctggtagcagaagtcagagcacagctgagggacatctgcttaaaggtttcgagacaaggagtggatcagg

SEQ ID NO: 283587 - DNA, 75 bp, Homo sapiens
gcaggcttggaaacgaagagtggttgtaccagaggtaccactaggcatatttagtatgcgttccattttgaggaa

SEQ ID NO: 283588 - DNA, 87 bp, Homo sapiens
attgactgtatttgggctgcagcacagggcctctgaaaaatggaaccaaattctctgaggactaaagtcccagctttcttatctgat

SEQ ID NO: 283589 - DNA, 96 bp, Homo sapiens
ggcgtggtagttaaaggcccagatgataggaatcccatctcatttagacacgttggtcgtcattgcctccgagcccactttagccctcagctctgt

SEQ ID NO: 283590 - DNA, 75 bp, Homo sapiens
gttgcccccaggcggtccttcctggcatttgacattgtgcagcaaagaaatggttatggagaagcccagtccgct

SEQ ID NO: 283591 - DNA, 100 bp, Homo sapiens
atggtgaccagcctgcggccaccagtacaggccaaccccgacctgctgagcctgctcacggcatccctccctgctcttctgtcggagcccgcggcggggg

SEQ ID NO: 283592 - DNA, 98 bp, Homo sapiens
cttgttcccccaaatgtctgactctgactctcggactgagaaacgcaaggaagccagttgagggaagttctccatgaatgtacgtcacaatgatgatg

SEQ ID NO: 283593 - DNA, 100 bp, Homo sapiens
ctcaacgaatacggcgacgacatgtatgggccagaaaaggatgctgaaaacgccattcaacagatgggtggccagtggcttggtggaagacaaatcagaa

SEQ ID NO: 283594 - DNA, 74 bp, Homo sapiens
ggctacggagaccactacatccacatcaagatacgagttccaaaagcacgaacttccaggagccggtgcagccg

SEQ ID NO: 283595 - DNA, 97 bp, Homo sapiens
tgaaattctgtgtgctccctccggcgagagactttgtcagctcccgcacagtaacgcaagatgtatccaatgactttgaaataaatattgaagttta

SEQ ID NO: 283596 - DNA, 75 bp, Homo sapiens
gcccccaagccctccttcgtgtcgtacgtacgccctgagattccactgtgtaaagtaattagattcaacatagac

SEQ ID NO: 283597 - DNA, 74 bp, Homo sapiens
gaaaacaggcactggaccacttcaatgcagatgggtctgagggtttctcctcttcaaaaatctgaagttgttga

SEQ ID NO: 283598 - DNA, 74 bp, Homo sapiens
acggctgcccttcaagtaccagaagcagaacatcagagagccatgcagagacgtgctatccgtgatgccaaaac

SEQ ID NO: 283599 - DNA, 83 bp, Homo sapiens
cggcgcgcggcggcggcgctcggcgatggtaggcgtccctggagcggccgccttccagcgcgagaaccactgtctctgatcaa

SEQ ID NO: 283600 - DNA, 83 bp, Homo sapiens
ggaacccggactccggcgtagcgcatttgcaagtgaggaagcagcacaaccctgggttttagataatttctaacagagaggcc

SEQ ID NO: 283601 - DNA, 100 bp, Homo sapiens
aagaaagacttgatggtctggtagaaacaccaacaggatacattgaaaggtttctgaaggattgtcattcttgcatagcagtgtgaaaatggtgcatgga

SEQ ID NO: 283602 - DNA, 75 bp, Homo sapiens
tctggaagaagaggaagaggaaagaaaaggagtcagggatggcccttactcaggcaggatgacgcaaaacacggt

SEQ ID NO: 283603 - DNA, 90 bp, Homo sapiens
aaacctttgatcagtactcctcctgtttcatcacagccaaagttgtggtcagaaatgagaagacatgaaatgttgagggaggagctgcga

SEQ ID NO: 283604 - DNA, 90 bp, Homo sapiens
cttctcgctggccgacgccatcaacaccgagttcaagaacacccgcaccaacgagaaggtgggcaagttcctgagcgctgaggagtatca

SEQ ID NO: 283605 - DNA, 100 bp, Homo sapiens
tcacagcacagttcctgggaaggtggagccaccagcctctccctgtgatcctgccatgaagcagtttctgctgtacttggatgagtccaatgccctgggg

SEQ ID NO: 283606 - DNA, 97 bp, Homo sapiens
agacgtgtgctacatacgggctgaatgtggagagggtcttccaggacgatgcaacaaggagacgcgcctttgccctggtctctcaagcgtatacttc

SEQ ID NO: 283607 - DNA, 100 bp, Homo sapiens
atgaaccaagatgacagcctgttaaggcaactgtgcatgatgagagctgacttgcgcattgctgcctgccttcctcagtccaaggagttcctctagaatc

SEQ ID NO: 283608 - DNA, 80 bp, Homo sapiens
agtctgccctcaaggaagccatgtttgatgatgatgctgaccagtttcctgacgactgccactctccgcccctacctgag

SEQ ID NO: 283609 - DNA, 100 bp, Homo sapiens
ggggtgtcccgtctcttcctcaaagcccaggccctgctcttcggggggtaccgcgacgcactcgtctgcagcccgatggggtttcaccgtgttagccagg

SEQ ID NO: 283610 - DNA, 74 bp, Homo sapiens
gcaaagcagctacacaaagagggtcatctcttctattgtacctgcagatgtatgtctaagaaagagagctttgc

SEQ ID NO: 283611 - DNA, 100 bp, Homo sapiens
ggggctccgggtcttccagagcgtgaagatcaagatcggcgatcagtgggtgaccgcggctgcgagggactttgtcatccgtcctccaggatctggggag

SEQ ID NO: 283612 - DNA, 90 bp, Homo sapiens
ctgtgataacttggagcagtactttatacaacaaggaggaggcaaacacagagcagcccaagctgagtagagatgagcagcggggtcgag

SEQ ID NO: 283613 - DNA, 82 bp, Homo sapiens
actgaagactctctgcttttgccacagcagttcctgcagcttccttgagggtttgccttcccggattgggcctacaagccag

SEQ ID NO: 283614 - DNA, 100 bp, Homo sapiens
caagcgattctgctgcctctgcctcccgagcagctgggattccagctaaacaaccctgagatggtggagggccttgtccttatcaacgtgaacccttgtg

SEQ ID NO: 283615 - DNA, 100 bp, Homo sapiens
ctcttctgaaggcaggagcagatgtgaataaaactgaccatagccagagaacagccctccatcttgcagcccagaaggtatctcagcgtttgagtcagcc

SEQ ID NO: 283616 - DNA, 74 bp, Homo sapiens
atcagctggacagagcagaactatcctcaaggttcaaaccttgtactactcagctgatcacaagctgcttgatg

SEQ ID NO: 283617 - DNA, 98 bp, Homo sapiens
gaacgatgtgcgagaactgcgcagacctggtggaggtgttaaatgaaagtatcatgatattagctggtttgacatcaagtcatttgtgagtcatcaga

SEQ ID NO: 283618 - DNA, 90 bp, Homo sapiens
gccggccgcgggcgcgaccggaggcaggcttctaaccctcctttatgtgactcagagaaaggagacctcattccaagttccaggattaat

SEQ ID NO: 283619 - DNA, 75 bp, Homo sapiens
catcaaatcagagagaaggaatccaccttcttacgctatggcagatggagttttaacattgaatgcggagaacac

SEQ ID NO: 283620 - DNA, 101 bp, Homo sapiens
cttccttcccctcccttgcatgatggaaacaccatggctgcggcggcccagctctctctgacacaggtactaggttttgacaagcttgcatcatgcgtgag

SEQ ID NO: 283621 - DNA, 101 bp, Homo sapiens
ttctttagttatgatgtggactctgatcatgtagacataatatcagatggcaccaagaaagactctgggatggattcagtttaaggagaaagtgctgtgga

SEQ ID NO: 283622 - DNA, 103 bp, Homo sapiens
atcttcttcgaataactgaaacctggaaagcttacaacagtgactttgaggaatcaggttgccgaggagcccaagtagaagaaatatggagtttagagcctga

SEQ ID NO: 283623 - DNA, 75 bp, Homo sapiens
agacccatctgcttacttcagatagccaaggaggagaaagttactgttatgagcaccattaatccaactaaggac

SEQ ID NO: 283624 - DNA, 98 bp, Homo sapiens
gaccctgtaacccaaaggaggaaacagctggctaagctcatcattgttactggtggatctccttacgtagcagccaaaataaatgaagcaaaagactt

SEQ ID NO: 283625 - DNA, 108 bp, Homo sapiens
ccgcgcgcccggccggcccggagcaccgagctcgcggcacggtaggaggaggtgttcacagaactgcaggagaagtatggggagattgaagagatgaatgtgtgcgac

SEQ ID NO: 283626 - DNA, 83 bp, Homo sapiens
cgcacttcctgcagtgggcattagccacgtccaggcacggaatgttaacactggtgaattagcagcaattaaagtaataaaat

SEQ ID NO: 283627 - DNA, 82 bp, Homo sapiens
acagaatagacctgaagacaaaaatccagaagtacaagcagtctggctttatcctgtggataaacgcagagtgaacgagttt

SEQ ID NO: 283628 - DNA, 100 bp, Homo sapiens
acagaggatatgattctgctggccctgctggagacggcgctgacgcgagtggtcctgcccatgcccatcctggtgctacccccgatcgtcatgtccatgc

SEQ ID NO: 283629 - DNA, 100 bp, Homo sapiens
aacatcggatggcttgtgctccctttacgaggcagcattatgtctctttgaagaggtattttcctacgttggaatagatcctctaagtatttggatgaag

SEQ ID NO: 283630 - DNA, 51 bp, Homo sapiens
ataactacaatcacctaatgcccacaaggctgtgggtgagcgtggaggatg

SEQ ID NO: 283631 - DNA, 100 bp, Homo sapiens
tcttttctgctaagacatcgacctgtaccagagattccagggtcaacaaaaggagtttctgggagggagtcctcttggtatatgatattacaaattatca

SEQ ID NO: 283632 - DNA, 75 bp, Homo sapiens
cctggacaccatccagctggctttcaaggtttatgatgataaagactacaggagaattcggtttgtaggtcgtca

SEQ ID NO: 283633 - DNA, 98 bp, Homo sapiens
cctgcttgctgatcctgtggtccggatccagagaaaaacatccatgatagcagtcttctgtaaatcgaacttttcaagaattctctgaaggaaccaag

SEQ ID NO: 283634 - DNA, 50 bp, Homo sapiens
tgaagatctctcaccatccaaaaaacattcttgttatttaacacgggaag

SEQ ID NO: 283635 - DNA, 75 bp, Homo sapiens
gtgtctgtgcagccagctaacacccctctgtggtttgacatagttgcttttgttaggagtgataaacccaaactg

SEQ ID NO: 283636 - DNA, 80 bp, Homo sapiens
gtgtcttgttgcgggcaccgcagtcgccgtgaagatggcgtctaccagccggaaatctggcattttttaaagtttgcgcc

SEQ ID NO: 283637 - DNA, 50 bp, Homo sapiens
tttcagatgtgttcctcaatgaatcacattctctttgtggccagatgggt

SEQ ID NO: 283638 - DNA, 49 bp, Homo sapiens
accatggaaaaagtgacttgagcagtataactttgaaaatgcatctcag

SEQ ID NO: 283639 - DNA, 95 bp, Homo sapiens
agaggccgagggcgtgaagctggagctggccttgaggcgccagagcactacggaagcctggccgcctgcccgacacggcactgcccacgctgcag

SEQ ID NO: 283640 - DNA, 82 bp, Homo sapiens
cgaaggtgaagagttgtcccagctcggcccgcgggggagccccgggagccgcacgggattcatggcgaagggtccaccttca

SEQ ID NO: 283641 - DNA, 82 bp, Homo sapiens
gttaaactacagaacaacatatcgtatcagatggcagacatacatcatttaaaggcattgtcttcagtgttaagaaatgtgg

SEQ ID NO: 283642 - DNA, 89 bp, Homo sapiens
gaatgggatttacttaatgaaaatattatgcttttgtccaaaaggcggagtcagttaaaacaagaagcaatgaggctccccaagaacac

SEQ ID NO: 283643 - DNA, 75 bp, Homo sapiens
ggctacttagaaaaggacggctccttatttcactccacattagatgctaaaaactgcaagcgcatcaatcttgga

SEQ ID NO: 283644 - DNA, 98 bp, Homo sapiens
agcagctccgaggacgaggacactgagagctcgtcggtctccgaggatggagatagctcagatattgatgatgctcaaatacttccccgctcaactag

SEQ ID NO: 283645 - DNA, 98 bp, Homo sapiens
ccctacaaatgcgaaacctgcggagccagatttgtacaggtggacccaagtggagagattgtggaactggcgaaaggtgcatgtccctggaaggagca

SEQ ID NO: 283646 - DNA, 90 bp, Homo sapiens
gtcagtttaaagatatcagcctgtctgactacaaagggtctcttgcaacgtgtgagctgcctcttgccaagagtgagtggcaaaagaaac

SEQ ID NO: 283647 - DNA, 100 bp, Homo sapiens
gggtggtcaccgagaagtccccgaccgactgggtttgccttcccggattgggcctacaagccagagtcgtcccctggctcaaggcagatccagctgtggc

SEQ ID NO: 283648 - DNA, 100 bp, Homo sapiens
ggacataagttgtcatttctcttgagtaaatacctaaaagtgggcttgctggggttattggggctgtgccatcggcaaagccaggcaagctgcaaagacg

SEQ ID NO: 283649 - DNA, 82 bp, Homo sapiens
tagtttaaatgatacctatcactcaagagactcttcatttagattggattctgaatatcagtactgccaaatctgtcgaaag

SEQ ID NO: 283650 - DNA, 90 bp, Homo sapiens
agaagacaaaactggttgtccccaacaaaatgggaatatacagatgttgccacaggaatctaatctgaaatcgtacaaatggaaatgacg

SEQ ID NO: 283651 - DNA, 82 bp, Homo sapiens
ggagcccccgcgcgcccggccggcccggagcaccgagctcgcggcacggtaggagaaactagatgatggccatttaaacaac

SEQ ID NO: 283652 - DNA, 100 bp, Homo sapiens
tatttatcactgccttcttgggaattgcttcgtttgccattttcttatggagaactgtccttgttgtcaccagtgaaaagttgtgcagagcccaacatga

SEQ ID NO: 283653 - DNA, 74 bp, Homo sapiens
cagtgcagcgcggagtgggcgatgccagcgtgccagaggtgctcagcacagtggactttgtcgcccctgatgat

SEQ ID NO: 283654 - DNA, 98 bp, Homo sapiens
aggtggcctaccaggaggccaggggtgtcgccatgattgggagagtcatattaataccaaatggtcagcacctcagcagaattttttgcaggggaaaa

SEQ ID NO: 283655 - DNA, 83 bp, Homo sapiens
gagccgagtgcagaagatctgggtgcccgtggaccacaggccctcgttgcccagatgctgctctttggcgtaaattgcaatcg

SEQ ID NO: 283656 - DNA, 82 bp, Homo sapiens
cgcgtggaacggctgcttttggaaggaagtcctgagttgaggcttgcgggatcctttccggagaaagcgcaggctaaagccg

SEQ ID NO: 283657 - DNA, 75 bp, Homo sapiens
cgctgggaaggcgaggacgaggacgaggacgtcaaggttggtgggacaagtgatgttgaagtgaatgaaaagaaa

SEQ ID NO: 283658 - DNA, 94 bp, Homo sapiens
ttctgcgcgcgggagttcgaggccctgcggagctgcttcgccgctgcgacgagccaaactcaggctgtaccttgagcagctcaagcaactggtg

SEQ ID NO: 283659 - DNA, 87 bp, Homo sapiens
gaaccaaatctgtttgctgatgaagattcacctgtgcatgtaaccccaagaaaggcatcagggttctggagtggttgtttgagtgac

SEQ ID NO: 283660 - DNA, 106 bp, Homo sapiens
aaagtagtgcatccacttgcacaacccaaggcagaagatgacacttgggagcctggtgaatctggattgggaaagtcgacattaatcaactcattattcctcacag

SEQ ID NO: 283661 - DNA, 107 bp, Homo sapiens
tctgtggcaaagagccccgaagctaagagcccccttcagtcgcagcctcactctagaaaccagcctggacaccaagtctgtgtcagaaggccacctcaagaggaaca

SEQ ID NO: 283662 - DNA, 97 bp, Homo sapiens
tttactccttttagacaagggagtatatgcagcagccgctcttctaaaacattcaaaccaaagaagaatatccctgaaggatctcatcagtatgaac

SEQ ID NO: 283663 - DNA, 100 bp, Homo sapiens
tcccgccgtgcaacgcggagtggagctcagccaggggcagccggctctggtgctcccagaagaggattttttatcaagcagaaatgcatcgaacaacgag

SEQ ID NO: 283664 - DNA, 100 bp, Homo sapiens
atcaagcaaaagtagataatcagccagaagaattagtgcgtagtgctgaagatgtttgtgcctgcagatgggaacgcagcctgcgtgaaggtgctccggg

SEQ ID NO: 283665 - DNA, 100 bp, Homo sapiens
cagaagaactgggcagcccggcagcccgagccgaccaaatttgactacctgaaggaggaggatgtgtctagtccgaatgaagcaggaaggccggagtggg

SEQ ID NO: 283666 - DNA, 94 bp, Homo sapiens
ccccgagctgctggagaactgaaggcggacagtctcctgcgaaaccaggcaatggcatcaagatggtgctcatgtggaccagtggtgacgcctt

SEQ ID NO: 283667 - DNA, 100 bp, Homo sapiens
ctgtgggcctccatcccgtgccctcgctctgagctgcgcctggacctggttctgccttctggacaatctttccgccaatggagatcttcgtggatgatga

SEQ ID NO: 283668 - DNA, 100 bp, Homo sapiens
actgcagccaccaagtccagcagtggatctaggatccggcttccaacatgtggcagctctgggcctccctctgctgcctgctggtgttggccaatgcccg

SEQ ID NO: 283669 - DNA, 100 bp, Homo sapiens
ggagcatcccaggacctaccagaatctggtgtgaaatctaagaatcccctgccaactcttgagggctcaatccagaatgttgaattgaagtactgcagca

SEQ ID NO: 283670 - DNA, 90 bp, Homo sapiens
gatcctgattatattaatcagtatgtcatatggatggtttcccaggcagctgcagacttgaaacagttctgtctgcagaatgctcaacat

SEQ ID NO: 283671 - DNA, 107 bp, Homo sapiens
cctggggcagagaggaagcttctagtgtactcttactttgaaaagcaatctgcagagcgctgtgtaagcacattgcttgatctaatccagaccaaagtgaattatgt

SEQ ID NO: 283672 - DNA, 100 bp, Homo sapiens
gcggaggcagaggtggaggcgctttgaaagagaagcggtcagcaattttctcactgccctcagtttgcaaagaaagagcaggaatcagcagcaagttcct

SEQ ID NO: 283673 - DNA, 104 bp, Homo sapiens
gccacaaatgcaaatacttgtgcactgggagaggtgtcatggagaaactccagctgggcccagagattctgcagcgggaaaatccaaggcttatttatgccagg

SEQ ID NO: 283674 - DNA, 100 bp, Homo sapiens
gaattgtgctgccttggccaaaagagggactggtttggctgaaagacaaagaagcaacacattgtaaactttgtgaaaaggaattctcactctctaagag

SEQ ID NO: 283675 - DNA, 114 bp, Homo sapiens
ggattaccaggagctccgggttcacctgggcagaaagggcataaaggagagccgatcagtgtactgttacccggacatacctattccttcacaagttctggttcttcagtgctg

SEQ ID NO: 283676 - DNA, 100 bp, Homo sapiens
cggaacaacagatgatgtatgcagggagtaaaaacaggctggtgcagacagcagagctcacaaaggtctatgttaacaatgaatgggcaaccagtgttgg

SEQ ID NO: 283677 - DNA, 75 bp, Homo sapiens
gccgcgcgtacagcccgggcatccagggggttacacatcattttggaatgactgtatatcatctggattacgtgg

SEQ ID NO: 283678 - DNA, 83 bp, Homo sapiens
gctgccagaggttccctccgagccccttcctgagaagatcccagacacgatgaggcgagtggtacgacagagcaagtttcggc

SEQ ID NO: 283679 - DNA, 100 bp, Homo sapiens
caacattgtcgtcattggacacgtagattcgggctccaaacaggcatgcgaggtgcctttggaaagccccagggcactgtggccagggttcacattggcc

SEQ ID NO: 283680 - DNA, 98 bp, Homo sapiens
acccggccctcaccgccctcaccacccctatccagacggctgcccttcaagtaccaatgtggaattagaagaagctattagaagaagtcttgaggaaa

SEQ ID NO: 283681 - DNA, 78 bp, Homo sapiens
cgcttgagttggtcgggggcagcggcagcctgtgcacgtcgggcgtagttcggcttcacatcaacagctggctggagg

SEQ ID NO: 283682 - DNA, 83 bp, Homo sapiens
ccctccttcacgccacacacacgtgcccgtggttgacacgagctgtgtccccagctgttcccgtctacaatggcatcatcttc

SEQ ID NO: 283683 - DNA, 100 bp, Homo sapiens
acccactcaccttgtttgtcccaggactcctctatctcctccaggtattagaaaactactcggatgctccaatgacaccaaaacagattctgcaggtcat

SEQ ID NO: 283684 - DNA, 75 bp, Homo sapiens
ccagacggctcacctgtgcgggatggaacaaaagggcctcggcttcacaggatggggctgccagtgtcctgggcc

SEQ ID NO: 283685 - DNA, 100 bp, Homo sapiens
aactatactgattggatgctgctcaaaatcagcctacatgccatctttgccagatgacgtgtactactgtggaataaagtacatcaaagatgatgtcatc

SEQ ID NO: 283686 - DNA, 83 bp, Homo sapiens
caggaaccacatcaaatcaagctgcagcttgatcgccttcaactccgaccgtcctgacaatgcagatcttcgtgaagactctg

SEQ ID NO: 283687 - DNA, 100 bp, Homo sapiens
gagaacctgcggcggccggagcgaccccaagactgcttctgagacagaaacagatatctgtgctgaatgggagataaagaccatcactagtgctctgaag

SEQ ID NO: 283688 - DNA, 100 bp, Homo sapiens
gcgtcccccagtaggagaatgactccgattcgtgaccctcagcgccggtgcatgtcgataaagcagaagccactggagaaaaacggccaagaggcagacc

SEQ ID NO: 283689 - DNA, 99 bp, Homo sapiens
aatcacgcggacatcgtctcctgtgtggcgatggtcttcctgctggggctcatgtttgaggattttttatcaagcagaaatgcatcgaacaacgagaat

SEQ ID NO: 283690 - DNA, 100 bp, Homo sapiens
tgggaggagccgatactgagcttcttcctatttgccatgggatatttggccttgacattaaaggcagagactgtggcaatgaggcagctaagtggttcac

SEQ ID NO: 283691 - DNA, 74 bp, Homo sapiens
ccgcttatcttcaggagcgaagagctgcttctgtatcttaaggtatattgaagcaagtcaaagattacattaaa

SEQ ID NO: 283692 - DNA, 100 bp, Homo sapiens
tgatctggacaaaggaacaggtatctcaggtatcagtttttggaagaagcttttcaaaatcagaagggtgcaattgagaatctactggcgaaacttcttg

SEQ ID NO: 283693 - DNA, 100 bp, Homo sapiens
gtcgcctccaggccaagagggatccttcacccgtgtctggtttggtgcacctcgatttggaggaagtagggcagggcccttatctggaaagaagtttgga

SEQ ID NO: 283694 - DNA, 83 bp, Homo sapiens
tcctctcctgggcggcggggatgggagagccctatgagtttgtctctctggaatggctgcaaaagtggttggatgaatcaaca

SEQ ID NO: 283695 - DNA, 100 bp, Homo sapiens
agacggagctggagcgaccgagagaggtactggtacaagaggaacgcccgcattctctgtccagttccatgcgccaggaggtctttgtcaccatcgctga

SEQ ID NO: 283696 - DNA, 75 bp, Homo sapiens
cgaaggccctatcaggacatggagtatgaaagacggcatctaataggattcaggaatcaaagaatcagtgtactc

SEQ ID NO: 283697 - DNA, 141 bp, Homo sapiens
gctccgaggccgagtggcggtccgacagagtcctccgtgtcctcccccgcatgacccccttggtactaggttttgacaagcttgcatcatgcgtgagtataagctagtcgttcttggctcaggaggcgttggaaagtctgc

SEQ ID NO: 283698 - DNA, 93 bp, Homo sapiens
cagggctttaccagcaactaccccagtgccggggagggttctgctgcttcgaaagctgtagtggccacagaagaagtagttactgcagaatct

SEQ ID NO: 283699 - DNA, 74 bp, Homo sapiens
aggattccaagtaactcttatttgatagaaccatgtagctgctgaaggaatgagcccatgatttctcagctgaa

SEQ ID NO: 283700 - DNA, 80 bp, Homo sapiens
cagagccctgcgatactattatgacaagaatatccaaggtatctccaagcacccaattcagattactacacctaagaatt

SEQ ID NO: 283701 - DNA, 90 bp, Homo sapiens
gaagcactgagagatgcggccccctcgcagggcaagccaggaagcagacaatgttctgatcctgcaggacaggaagctggtaaccgggcc

SEQ ID NO: 283702 - DNA, 100 bp, Homo sapiens
cccagctctgaaaagtgcatcatgaattccggagttgccatgaaatatggaaacgactcctcggccgagctgagtgagatggaggaaaggaagtgctgtc

SEQ ID NO: 283703 - DNA, 75 bp, Homo sapiens
aagtggagcgtgtcctgaaggagttccaccaggccgggaagcccatcgggaccaaagacacacccaagctcggtc

SEQ ID NO: 283704 - DNA, 83 bp, Homo sapiens
gccaattcaggcccctccacttcctctagggagactgcaaacccctagttgttagcggttctcgagatgccactcttagggtt

SEQ ID NO: 283705 - DNA, 101 bp, Homo sapiens
gatccacagctaagacgccaggacccactggaagcctagaaatggcgtgatgggaaggctctggagaggttcctgcaggattactttgatggcaatctgaa

SEQ ID NO: 283706 - DNA, 82 bp, Homo sapiens
agccgatccagcctgcggagcctgtggggcaggctaaccttgccgcgggccgagccctgcctcgccatggaccaggactatg

SEQ ID NO: 283707 - DNA, 85 bp, Homo sapiens
accaattacaaacctgttgctaatcatcaatacaatactcagattgatggacaacttttcttaattaagcaccttttgatacttc

SEQ ID NO: 283708 - DNA, 50 bp, Homo sapiens
tgtcgacgaccgacagggtggtgaaaggagtcattgcagttttcagtaga

SEQ ID NO: 283709 - DNA, 75 bp, Homo sapiens
cagcagtccaggaatgcagtcagtctgttgatgaaactatttacatccttaatgttcagtcaagcagtgatgaca

SEQ ID NO: 283710 - DNA, 100 bp, Homo sapiens
tcagctgcgtgattcccgtgattgcgttacaagctttgtctccttcgacttggagtctttgtccaggacgacttttggaacagcgatcgtaatcaatcct

SEQ ID NO: 283711 - DNA, 100 bp, Homo sapiens
cattgtgtgtattgatcaatggaagaacaaaatctggcctgaaataaaagcatctgggctgatgggccgtaccctgcaccgtgagccacccgcaggagac

SEQ ID NO: 283712 - DNA, 98 bp, Homo sapiens
ccgagcggccgtgggcccgggcggcgggcggagacgtgggcgccctccccgccaaggcccgtgcgaggttctgggaagttctggattgtttaataacc

SEQ ID NO: 283713 - DNA, 74 bp, Homo sapiens
cagctgaacagggatctccacgggttggggataggattgtcaccatctgtggcacatccactgagggcatgact

SEQ ID NO: 283714 - DNA, 90 bp, Homo sapiens
cacttcctggaggtgaaactgggcaagaggccccagcccgtgaaaagtgagaacaagattgtggaccagtgtgagaggctgcagttacag

SEQ ID NO: 283715 - DNA, 75 bp, Homo sapiens
tggagctgtggttgctgctgcgatgtggaggaagaaaagctcagttaaattatggcagagacaagtctgttagag

SEQ ID NO: 283716 - DNA, 50 bp, Homo sapiens
gctggttcctgctggattttaagagaggtgttggggatgtcctttgcact

SEQ ID NO: 283717 - DNA, 101 bp, Homo sapiens
tactaaatgtgttaccataccaagaccgaccaagaccatcactatgaccgatggagactatgattatctgatcaaactcctggccctcggggattcagggg

SEQ ID NO: 283718 - DNA, 83 bp, Homo sapiens
ccactggctgcaggcctcctgctgctcctgtttgtggatgaggagcgggaaggcctcctgcaccctggagaccgtgtgggaag

SEQ ID NO: 283719 - DNA, 90 bp, Homo sapiens
agaaattttcaaacttagactaggacatctcaaaaagggcggcgactggcggcgcgatggacctgaccgggctcctgctggacgaagaag

SEQ ID NO: 283720 - DNA, 83 bp, Homo sapiens
gcagtggtcgcttcttctccttggtatctgtgcctaggtttgctgtggggattgtaataggaagaaacggggaaatgatcaaa

SEQ ID NO: 283721 - DNA, 100 bp, Homo sapiens
gacggcttctccacctacgtgtgcctggtgctgctggtggccaacattttgcggatactcttctgtctgcagatctccaggggagcccaccagcctagtc

SEQ ID NO: 283722 - DNA, 51 bp, Homo sapiens
ggtggatggcatggggcgctttggcagtcatccgtccttggctcaggattt

SEQ ID NO: 283723 - DNA, 100 bp, Homo sapiens
caaatattacacttctctccttgtggatcatccatgccatggagtatgaacttcagatccgtggcggagacaagccagccttggacttgtatcagctgtc

SEQ ID NO: 283724 - DNA, 100 bp, Homo sapiens
aggaactccctgacatccttgagagcaacctcgatcctgagagagtccctggaagccaaagtggaagcatttggcgatttcagtcccgaggtggcagaga

SEQ ID NO: 283725 - DNA, 90 bp, Homo sapiens
ggcctacgggcacatagggcggaagcgcagttgtgtagcagttgagtaatgctggttagctgttaaggtggcgtgttgcagtgcagagtg

SEQ ID NO: 283726 - DNA, 89 bp, Homo sapiens
ggaaagaccgctttccatggagagtaaaggccggctggaaagtccccaagcgttttagaaagagcgttttcgctacgtaaagcacattc

SEQ ID NO: 283727 - DNA, 50 bp, Homo sapiens
agcggagggacggcagtctcgcgcgggacaggagagagtggcaagagtac

SEQ ID NO: 283728 - DNA, 80 bp, Homo sapiens
ctagcagtgagcaccttttggcccaatgaatatcaggcttccgtccaagtctcttcctcatttgcctggcacacccagac

SEQ ID NO: 283729 - DNA, 100 bp, Homo sapiens
acagccacatatttacctgaggttgctaaggaacaagacgaatctagaacatgatgtctatgaaagacttactaacctgcaggaagggattatcccaaag

SEQ ID NO: 283730 - DNA, 87 bp, Homo sapiens
tcagggcacagcccaaggctgtcagcctcccggcccaggtttgatctgtggatgaaatgaatcatgattttcaagctcttgcattag

SEQ ID NO: 283731 - DNA, 96 bp, Homo sapiens
cagctattctcaggatatgacaggggtaacacccttccagatgatttttgaggaccttgtgctcatcaagaatacagacgtgcaggcagcccgcct

SEQ ID NO: 283732 - DNA, 90 bp, Homo sapiens
tgataaactgcgaggacagagccactggttgcaggaagaggcagaggaagaggaagaggaagaggacgtggccgtggcagaggaagaggg

SEQ ID NO: 283733 - DNA, 116 bp, Homo sapiens
tgcgaaacacgatgctgctgccaaagcgttgaggatcctgcagaatgagcccctgccagagaggctggagaaactggcgatggaatatgagaggagccctctggaaagaaaaggac

SEQ ID NO: 283734 - DNA, 50 bp, Homo sapiens
gggggcctggctccgggcagtgcgggtggaatatgtgatcaagtgtgaca

SEQ ID NO: 283735 - DNA, 98 bp, Homo sapiens
aaggggaggcctggctgagctgtcatcccccagttacgttatgatgatgaagtgaagcgggtggtggcagagccggtggagttggcccaagagttccg

SEQ ID NO: 283736 - DNA, 98 bp, Homo sapiens
ggtgctggtgggccctgtgccagcagggagacacatgtttgtctttcaggtggtgaaactgaaacagatcgaacacaccctgaatgaaaagcgcatcc

SEQ ID NO: 283737 - DNA, 74 bp, Homo sapiens
gatggattgctctattaggacttgggaccttccttctgggtgggaggttttacataaatggagtcctaaacaaa

SEQ ID NO: 283738 - DNA, 82 bp, Homo sapiens
ggatatagcacaccatccccagccaggtgctttcttctgcgacctggtactcatctacctcatcaaaaagagagagttttac

SEQ ID NO: 283739 - DNA, 82 bp, Homo sapiens
caagcttgcctccgcaaggacttgtgtactcagcaatgccgactgcctacaacactgggaatggcatttactttacaagaac

SEQ ID NO: 283740 - DNA, 100 bp, Homo sapiens
ctctgaggagcggcgggcggcggcgcgcggacccaggcgcggatggcgaggccagcaggtcctctggatgtcagcatggcagccacaaacctggagaacc

SEQ ID NO: 283741 - DNA, 101 bp, Homo sapiens
tgcaattggcactaagctaccagagaatcaagctatccaaatgcgattagttgatgtggcctgcaaggtcacggtctagatcacattctcgatccagagga

SEQ ID NO: 283742 - DNA, 100 bp, Homo sapiens
ccaatgttggtgctggcaaaaagaccatgctcgacagctgaccaaggccatgatgcgaaaggccacggccagccgcctggtcacgcagcgcgatgcggac

SEQ ID NO: 283743 - DNA, 100 bp, Homo sapiens
ctaacaacagcagtggcagcatggagaaacgcaagtccatgtacacgcgagattataagaagcttgggttcattgtagttcctgaaatgactgagatatt

SEQ ID NO: 283744 - DNA, 51 bp, Homo sapiens
attattcacttggaaaggaacaagccgaagataaccagattggattttaag

SEQ ID NO: 283745 - DNA, 75 bp, Homo sapiens
ttgtatgtggggagaatatgtggacaacacaaacctggtccccaggctctggacacagggaaccggaaggctgcg

SEQ ID NO: 283746 - DNA, 75 bp, Homo sapiens
gaccaccgaggctggagggggagaacacccagcttaacaaacaacagttgcagttactgaaagaacggttccagg

SEQ ID NO: 283747 - DNA, 100 bp, Homo sapiens
gaaatgtgctggggtcgcgtgtcaccaacgtgaaggctttccatctgatggtcccctggtgtgtgccctggaacaggagcgaaggctccgcctccctccg

SEQ ID NO: 283748 - DNA, 100 bp, Homo sapiens
tgacaaagagctgtgtatgtcccttatgggttatggaggttttgatgactatggtggctataataattacggctatgggaatgatggctttgatgacaga

SEQ ID NO: 283749 - DNA, 96 bp, Homo sapiens
cgacaagccgctggcagccgcggatctcaccgccgctcaggagtgcctggtgaagaatgtgatgggatcactagcatgtctgcggagagcggccct

SEQ ID NO: 283750 - DNA, 100 bp, Homo sapiens
tatgcggtggaatctgttcttcttttgcatcctacgtaaccagaccaagctgtgggtagatctctggcttcctgctctgtttgttctggttgccctggaa

SEQ ID NO: 283751 - DNA, 83 bp, Homo sapiens
gttgaaatccgaaatttcttgggtgaaaaatatatccgcagggttcggatgagaccagtgacatttgccttgcctgaaggacc

SEQ ID NO: 283752 - DNA, 98 bp, Homo sapiens
ttggttacagtcaaaaccccagcgtttgcagaatctgtcacagagggagatgtcaggtgggagaaagcttgacaaaagtaagctgaagccaggaacaa

SEQ ID NO: 283753 - DNA, 75 bp, Homo sapiens
tcgagaggcaggcaggggatcccggacgccacgaaactggctactgctttcggatgtccttaagaaattgaaaat

SEQ ID NO: 283754 - DNA, 98 bp, Homo sapiens
gagaattaaagtccctcgccgcttggaaagtgcagccttctacagaatacagattctgttcatcttgctctgaaattaaataattctgaactcatggg

SEQ ID NO: 283755 - DNA, 87 bp, Homo sapiens
agaaagcgaaaaatggaacatgatggttcactttttcaagcagtaggaattgtttgtggtaaatatgccagctctagaacacatgaa

SEQ ID NO: 283756 - DNA, 100 bp, Homo sapiens
cgggatcccagcctcaggcgtgcgcggacggtgtgcgggtcaccctcgagtcctggctgattcttttcctggcagttccccttatgagggttacaactat

SEQ ID NO: 283757 - DNA, 100 bp, Homo sapiens
gaacgtctggactctagggaccctgctgaatagctggggctacaggcgtgtgtcactgcgcccagacttaattcagtgcacaaatgagatgaatgtgaac

SEQ ID NO: 283758 - DNA, 50 bp, Homo sapiens
tgcggactcttgccacccagagggaactgctcgcagaaagaagaaggtgg

SEQ ID NO: 283759 - DNA, 74 bp, Homo sapiens
tcataatagatttaaaaatatagaggaatcttggatccaaaaatatgacaggactcagaattcatgattgaaga

SEQ ID NO: 283760 - DNA, 101 bp, Homo sapiens
ctggttggagattctccggggacccttccgtatctgcctaggcattttgctgtctcctcctaatacgaatctgaattatccagaacagaaagttgtgactg

SEQ ID NO: 283761 - DNA, 83 bp, Homo sapiens
gcagcacggcatcccagcctcagggctgcccggacggtgttggttgggcctcccgcgacgatgcccctcaacgttagcttcac

SEQ ID NO: 283762 - DNA, 80 bp, Homo sapiens
cgctcatcttcctctcggtctacttcaatgtttactcagtgcctggctcccagtatctttataaccaacccagttgttac

SEQ ID NO: 283763 - DNA, 87 bp, Homo sapiens
cctctggtcgaggtccaaagaaaagatacttctgcaatcctggacatgaaatgaggccagtcaccactgcacattttgggacaatat

SEQ ID NO: 283764 - DNA, 80 bp, Homo sapiens
ttttgcatgagacgcttctggacaggattttttatcaagcagaaatgcatcgaacaacgagaatcaagatcactgagcta

SEQ ID NO: 283765 - DNA, 76 bp, Homo sapiens
cggacccaaagtgccatgtctttaattgggtaattccagaattgattggccataccattgtcactgtattactgct

SEQ ID NO: 283766 - DNA, 100 bp, Homo sapiens
ggcgacttgcgaggatgagagcgacgaagccaactgtccaggttttacacatccataagtagacctttttggagcctcaccagccaattcaatggcgtcc

SEQ ID NO: 283767 - DNA, 100 bp, Homo sapiens
ctacatcccgcagtacaagaactggagagcttttacccagcacctgtccagtgaaacaacttgataatcgtttcgaggggcgtccgccgggttaggaagc

SEQ ID NO: 283768 - DNA, 90 bp, Homo sapiens
ggagctgtggtcgctgctgtgatgtggaggaagaagagctcaggaagacaagcagcatgctggaggtggatgacgagggcggccgcatgt

SEQ ID NO: 283769 - DNA, 100 bp, Homo sapiens
atgaagatggttgcgggggatcaggaagtggagaagtcaagaggacactgaagatcacagactggccgttgttcgagagagaactgcaagtatcttcacc

SEQ ID NO: 283770 - DNA, 96 bp, Homo sapiens
ggcagagctgcagaagatctgcgaggagcaggaacaagccctccaggaaatgggcctgcacctcagccagtggctctgagggtcctgttccccgac

SEQ ID NO: 283771 - DNA, 60 bp, Homo sapiens
tgatcaagttctcgtggagtcagacaatgaggagaaaatgcacaagctcttggaggtgta

SEQ ID NO: 283772 - DNA, 100 bp, Homo sapiens
ctccacttgcccgcttccacccggaaagccccccaggctgagtgcggcatgatctccatcaccgaatggcagacacattgagtcacgtactcttgcaatt

SEQ ID NO: 283773 - DNA, 96 bp, Homo sapiens
agttcgacatcagcgaggatgacattgatgatggattcaggagactgtttgcccagttggcaggagaggagaccttaatggacagaatcaagaaac

SEQ ID NO: 283774 - DNA, 75 bp, Homo sapiens
agggacagccgcccctggtgcacacaccctcgtattctcctgcccttccccagacagcatcgcacagaattattt

SEQ ID NO: 283775 - DNA, 60 bp, Homo sapiens
gatgaagggctacccacactggccggcccgggtcaaaatgcagatcttcgtgaaaaccct

SEQ ID NO: 283776 - DNA, 100 bp, Homo sapiens
ctgagtttcccacttgattacccgttaagtcccccaaagatgagatttacctgtgagatgtttcatcccaacagtgctggagaatctggtaaaagcacca

SEQ ID NO: 283777 - DNA, 75 bp, Homo sapiens
tcggactcagttccagatctttcctacttccatggagtcactgattcatcactttaagttgtatactgagggcta

SEQ ID NO: 283778 - DNA, 100 bp, Homo sapiens
acctgatccagacgcagagaaacctgaggattgacagctttattaaaccgcctggagcgaattttcgaagcatgttttccttccatacttgtccctgatg

SEQ ID NO: 283779 - DNA, 78 bp, Homo sapiens
attacatccagcagccagaatgggtgtcggttggtggaaatatgaattctgctatggcaaacatgtacatcaatacca

SEQ ID NO: 283780 - DNA, 80 bp, Homo sapiens
gaagagggcattctgcacagattgttttcatacagtctcggggttttaaaactttgaaatcaaggacacgacgtctccag

SEQ ID NO: 283781 - DNA, 78 bp, Homo sapiens
ctggcatcaggagaagacgcccttgactttactcaagaaagcgagagagacaagagagacacctccaacttcgacaaa

SEQ ID NO: 283782 - DNA, 75 bp, Homo sapiens
tcgcagtggtcgcttcttctccttgcatggacaccacgttgctgaaaacatgctttgggactgccactgaattta

SEQ ID NO: 283783 - DNA, 88 bp, Homo sapiens
ctgattcacaattatggagactgtttacccggctgtatgtgaattcttacagcacaataacttgttatctatactccgagcccacgaa

SEQ ID NO: 283784 - DNA, 100 bp, Homo sapiens
gttcctctgctcagccaccaggaagttaaagttcagctatcatcgagcatgtgcgggacggcagtgtggtcagggccctgctcctcccagattactacct

SEQ ID NO: 283785 - DNA, 84 bp, Homo sapiens
tgaagaaggagaaacgaaagaaacgtcggcaggaacttgctcgactgagagactcaggtgactcgaagaagccttccaaaaagc

SEQ ID NO: 283786 - DNA, 88 bp, Homo sapiens
gactcccccggctcttagactaatagccttagagactattttagcaaatttggagaaattagagaatgtatggtcatgagagatccca

SEQ ID NO: 283787 - DNA, 91 bp, Homo sapiens
atgctgccagggtccctgaagagggaagacacgcggaaacaggtacaggtttgcagattccgccagcagcacagcaagctctacagatgag

SEQ ID NO: 283788 - DNA, 50 bp, Homo sapiens
attggatttccctctgtgggtaagattcttctgatgtagagcgactggaa

SEQ ID NO: 283789 - DNA, 100 bp, Homo sapiens
gacgacagcaacccgaagacagggaaatttaggcatgttctctatgggatggccagcttttttgagcattacaccaaacattaaggaagaaggagcgatg

SEQ ID NO: 283790 - DNA, 75 bp, Homo sapiens
ctcaaggtcccaaaggtggtggcaatgcagtaaaggctctacagagtgaaggtttaaatccaaggtcatggcaaa

SEQ ID NO: 283791 - DNA, 100 bp, Homo sapiens
aacatctgctacaatgtactggatcgaaatgtccatgagaaaaagcttggagataaagttgctttttactgagaaggatatgagaatttctttgataagc

SEQ ID NO: 283792 - DNA, 80 bp, Homo sapiens
atgaaggtgctgaagaaggcaacgctgaaagcccaagaagatgaaaggattgttcttgttgacaacaaatgtaagtgtgc

SEQ ID NO: 283793 - DNA, 111 bp, Homo sapiens
cctgaaccactccactgcctttaaccctcagcctcagagtcagatgcaggttgacggactggacaaagcttctatagcaaactcagatggccccacagcaggttcccaaac

SEQ ID NO: 283794 - DNA, 75 bp, Homo sapiens
gcccaccttcatgtgaagtttgccgccttgatgcagcatcagagtcgaggtggaaaaaagtttcttcctgtattg

SEQ ID NO: 283795 - DNA, 75 bp, Homo sapiens
gtgattcctggatctcccctgttggaacatttacagttcagttttatgatggagtaattcgttgtttaaaaagaa

SEQ ID NO: 283796 - DNA, 96 bp, Homo sapiens
cccgggccgcggatccccaagcccgccacgccgcccagcccggccccgcccgcgccggaagagccacgccgctagagttgggaagacatcactgat

SEQ ID NO: 283797 - DNA, 75 bp, Homo sapiens
cggccatgtcagaaggtgcattttaccttttgagtagcccatcgaagccagagcagtgaaggagtcagttctctc

SEQ ID NO: 283798 - DNA, 100 bp, Homo sapiens
aagctggttctctgggatataaataaggacatttgtgtactcactgctcaatcgagggaggccttatccagctatactcattctcagaggcactgccttc

SEQ ID NO: 283799 - DNA, 82 bp, Homo sapiens
gcagttccatcagctcagccaggtcttctcccctgggacctgtggccgccgcccacagaccatgctcctggggcgcctgact

SEQ ID NO: 283800 - DNA, 100 bp, Homo sapiens
ctagaactcagttgtgcgttgcggccagtcgccactgctctgcctgccttgtgcttggctgtatgattttccctgatggctgggactcagatgaagtaaa

SEQ ID NO: 283801 - DNA, 90 bp, Homo sapiens
tgttgaaccatacaataagatagttgcccggactgcacaactagcaagacttcagggttttggccaaattgggcgagggcacaaaataac

SEQ ID NO: 283802 - DNA, 98 bp, Homo sapiens
ggcgcgcagagcgaggctgcgggaccccaggatgggggacaggaggctgcggggcctcaggaattacatgaacgacagccttcgcaccgacgtcttcg

SEQ ID NO: 283803 - DNA, 75 bp, Homo sapiens
gcccttggcgggggactctgagggaggagctggggacggcgaccctaggagagatattctctaagccgctttcat

SEQ ID NO: 283804 - DNA, 98 bp, Homo sapiens
gcgttaccggtgaagaagtcgaaaatggagcacgtccaggctgaccacgagcttttcctccaggcctttgagagccctcgggaccaaggatcacgtca

SEQ ID NO: 283805 - DNA, 98 bp, Homo sapiens
gaacgtattgcctggagtagggaacatcatcaaaaatgaagctctctttgacagtggtctccacccagctgttaaaggttgaaaaataccggccacag

SEQ ID NO: 283806 - DNA, 75 bp, Homo sapiens
aagccagggcagctgaaagacagagaccttcaggattatcgagattgcagcctgtcactccacacacacgtctgc

SEQ ID NO: 283807 - DNA, 74 bp, Homo sapiens
ccgagggcagtctgtgtcaaacgcaggtgtgtgcagtggcctcagggatccggaaagtctaggactgaacttct

SEQ ID NO: 283808 - DNA, 90 bp, Homo sapiens
ggcggtcgggatccgctgcgcgagctgtctcggtcccacgtgtgcgggaatagtgcctaccgatcagctgcatctaaaacaatgaatatt

SEQ ID NO: 283809 - DNA, 90 bp, Homo sapiens
gtcacggggagcgcgtccagaggtccagcccgcggcccgaaggctgatggtgagaccattctaaaaggcctccagtccattttccaggag

SEQ ID NO: 283810 - DNA, 101 bp, Homo sapiens
tcctcctagaaattccccccgaagaagactcccccacatctggcaataagagctaactgccatcaagagccatcagtatgtcttcaagctgcatgcccaga

SEQ ID NO: 283811 - DNA, 100 bp, Homo sapiens
accgagagcgtgaccgagagcgcgaatatcgtcatcgttagaaggaatgtctgatcacagatacggggatggtggctctactttccagagcacaacagga

SEQ ID NO: 283812 - DNA, 100 bp, Homo sapiens
ggagatcgtgcacatccaggcgggccagtgcgggaaccagatcggcaccaaggtgtgatgaatgcagactctgctaccattttggctgtttggatcctcc

SEQ ID NO: 283813 - DNA, 98 bp, Homo sapiens
gtacaccctcgagagcggcctgattgggaagaaactcttagcgcaatgaaatctcctgcaaagaagctgagccatgcaattagtaaatctttggggtg

SEQ ID NO: 283814 - DNA, 100 bp, Homo sapiens
aggctccgcggagccgaggcgtggagtgataatatgcagcatgcatactgggaactgaagagagaaatgtctaatttacatctggtgactcaagtacaag

SEQ ID NO: 283815 - DNA, 83 bp, Homo sapiens
caaaaactcaggcttcgccacctgcgtgcaaacgccgtgccgtccctgcagtgacaccgaggtgctcctagccgtctgcacca

SEQ ID NO: 283816 - DNA, 75 bp, Homo sapiens
caccatcttcaaatttgtggaagcttatttgttagagttggaagcttggcagttggcctcccttcttcccatgga

SEQ ID NO: 283817 - DNA, 100 bp, Homo sapiens
ataatgcaatagaagctgtggatgaatttgcttttctggaaggtgtgatgaatgcagactctgctaccattttggctgtttggatcctcctttgaaaaag

SEQ ID NO: 283818 - DNA, 99 bp, Homo sapiens
tacagtgacatcttctgggatttagtctgctgggctcaaaatgcagagaactcaaagatattcatttcggccagtgttacaagatctcagatgaaggca

SEQ ID NO: 283819 - DNA, 50 bp, Homo sapiens
cctgttctcatcaccatggcaacagcttccttcaaaatgtctactgttca

SEQ ID NO: 283820 - DNA, 74 bp, Homo sapiens
aagggagaataaagtgaaaaaaatctcagaaggaatccactcaacagacgaggattcactttcaaagagacata

SEQ ID NO: 283821 - DNA, 75 bp, Homo sapiens
aggccagtatgagatgctgtcagagaccagattatcaaaaattctcatgattaaaaaggaacatatcaagaaatt

SEQ ID NO: 283822 - DNA, 90 bp, Homo sapiens
ctggacggcgagcgcgagcggcgcgagaaagcgagaaccactgtctctgatcaacgtgcggaagaggaacgtggaatctggggaagaaga

SEQ ID NO: 283823 - DNA, 50 bp, Homo sapiens
aaaaggcctaagaattttggcattggaggagcggaggccgcgcgcggccc

SEQ ID NO: 283824 - DNA, 75 bp, Homo sapiens
agaactgttctcaggactcattattttaacatttgggagaaacacagccagaagacgttatgaagaggacatgta

SEQ ID NO: 283825 - DNA, 100 bp, Homo sapiens
aggttcagtggacccttggagccatcctctacaggacccgctttctaccattaaggtggagccgccaccaaaatgcagattttcgtgaaaacccttacgg

SEQ ID NO: 283826 - DNA, 83 bp, Homo sapiens
ggcgggcggtgagcgcccatatgggggttctggagagcggggtgtgggagacctgtcggccatggagcctaatgatagtacca

SEQ ID NO: 283827 - DNA, 90 bp, Homo sapiens
ggaagccgccgcccagccatggacggggaggagcagcagccaccgcacgaggccagcaggagatggaaccttccagaagtgggcagctgt

SEQ ID NO: 283828 - DNA, 89 bp, Homo sapiens
cgcttggtggccactggcggccgaggtagaggcagtggcgcttgagttggtcgggggcagcggcagttgcttctgcaggaagccttttt

SEQ ID NO: 283829 - DNA, 87 bp, Homo sapiens
gcatgaagaccccggcggacacaggcagtgaaaaagcagtctggctcccgaggtccaccccttataccccaaggtccagatggcggc

SEQ ID NO: 283830 - DNA, 74 bp, Homo sapiens
ggcactcagctaaaagtggaactcacatcacgtcatcttgacagctatgaattccttaaagccattttaaactg

SEQ ID NO: 283831 - DNA, 101 bp, Homo sapiens
aaaggaacctctacaacgaaggtgaagccacggaagataagaggacaaggatcctcaccggtggccatgcagaaagctcagcaggtatctcagggtctgga

SEQ ID NO: 283832 - DNA, 74 bp, Homo sapiens
ggaggccgaggcgagaggatcacttgagatctgggctgcaggagctggggccacccacagcccccctaccgacc

SEQ ID NO: 283833 - DNA, 75 bp, Homo sapiens
cttgagctgaacgtcttgcaacagtggccgcacgcatagggccgagaactactggtggcgtggccagaacacacg

SEQ ID NO: 283834 - DNA, 100 bp, Homo sapiens
cagtggaagaccatctacatctcccacaggaagtgtcacacagcagtcaagtatgtcccaaacgtctgttcaaaccttgtactactcagctgatcacaag

SEQ ID NO: 283835 - DNA, 133 bp, Homo sapiens
agcagcctggaggtgaggcgatgatcgagtacatcgtgcagcagtgcgcgctgccccccgagcaggagagcgggaacagcttccacgtgttcgaccagggccagtttgccaaggaggtgctgcccaagtactt

SEQ ID NO: 283836 - DNA, 100 bp, Homo sapiens
ctgagtaagccgggcacggcggccgagctgcggcagagcgtgtctgaggtggtgcgcggctccgtgctcctggaagaggagcaggacttggatggtgaga

SEQ ID NO: 283837 - DNA, 76 bp, Homo sapiens
gggacaggatttgactgtgctagcaagactgagcgtgcctaccaaaagcagccgaccatctttcaaaacaagaaga

SEQ ID NO: 283838 - DNA, 100 bp, Homo sapiens
ggacctggagatatgccgcctcagttttttccccagcatcatcttccccacacaatatatggtgagcaagatgtgtcagaagaattggatacaaaactcc

SEQ ID NO: 283839 - DNA, 100 bp, Homo sapiens
ccaaaatgggagacaggcgcctgagtaacccggggcaagacgttgagaaagaagggccttaatggctgtgacagcccagaccccgatgcggacgattccg

SEQ ID NO: 283840 - DNA, 83 bp, Homo sapiens
agaagtcctagaagaaatttggagtgtgcgtgcgcgccgagcggctttatcctgtggataaacgcagagtgaacgagtttggg

SEQ ID NO: 283841 - DNA, 100 bp, Homo sapiens
ccgggagatgatggctgatgaagaggaagaagtcaagccgatcttgcagaaattgcaggtcatctctgaatttgagcaatggtgaaacggaatctgtgaa

SEQ ID NO: 283842 - DNA, 90 bp, Homo sapiens
cgcgggtcggcagcgggagggcgcgcggccgagcggaggcggagtcggcgccgagaacatggcttgcacagaaatctggaggcagtatca

SEQ ID NO: 283843 - DNA, 90 bp, Homo sapiens
ctttgaaaatcaacgacaacttgagcacagggtcaacatatttcactggcacctattcacaagcttgaagaagctctgtatgaataccag

SEQ ID NO: 283844 - DNA, 82 bp, Homo sapiens
cgttgacaaggcactgctttttcatgacgacggcgggcgctaacaccaccgacaaggagctagaggttctctccttgcacaa

SEQ ID NO: 283845 - DNA, 100 bp, Homo sapiens
gggagagcgcgccgctgctcccggaccgggccgcgcacgccgcctcagtactatactggcaattgctggagaagattttgcaattgttgcttctgatact

SEQ ID NO: 283846 - DNA, 83 bp, Homo sapiens
cacaccagaaactagcaccagccccaaatttcgtacatgtgaagattttttggcagcttagcgtggaaaccattgatcaccct

SEQ ID NO: 283847 - DNA, 90 bp, Homo sapiens
gcgggagttcaaggaggtgctgaagagcgaggagtttgctaatccagactttacacaacctatctcagaagttgtagatgaagtaattca

SEQ ID NO: 283848 - DNA, 100 bp, Homo sapiens
actggaggctgagtacgacagcctcaaacaggagctggagcagctcaaagagcactctatgatgttggagacattgttcattctgtaagagcgaaatggg

SEQ ID NO: 283849 - DNA, 75 bp, Homo sapiens
atccccaccatcaacatggagaacaagaccacgtggggcagaagataagattattggactgactactagtcctct

SEQ ID NO: 283850 - DNA, 101 bp, Homo sapiens
gaggggctccgggtcttccagagcgtgaagatcaagatcgcaattctgtggtgttcttggtcacacatttatggagtttctgaagggcagtggagattact

SEQ ID NO: 283851 - DNA, 100 bp, Homo sapiens
tcgtgaccgagaccgtgaccgagagcgtgaccgagagcgcgaatatcgtcatcgttagaagagtccgcttagtggaaagaggatcccctcatagtctgcc

SEQ ID NO: 283852 - DNA, 90 bp, Homo sapiens
tgcgacgaagagttccctcagcctccggccttgtgtgtccgactcggcagcagtgatgttctcagtgcagctgagtcttggtgagcagac

SEQ ID NO: 283853 - DNA, 75 bp, Homo sapiens
aactgagcccaggccacagtaccctattcacgctctgtgcttgtgccaaggtggagagttctacttcaggtttca

SEQ ID NO: 283854 - DNA, 75 bp, Homo sapiens
gagtcatggcggcagcagccgctctgagggcgcctgctcaggtttctgggtgtctctggggagcccctgggccag

SEQ ID NO: 283855 - DNA, 101 bp, Homo sapiens
tgcgcgcgggaagatggcggaacaggctaccaagtccgtgctgtttgtgtgtctgggtaaacactacacgtgaagagtggtgaaagggaacattgattact

SEQ ID NO: 283856 - DNA, 74 bp, Homo sapiens
cgaggaagaagaggacgacgacgacgaggaagaggaggtttctgaggttattcagcttctcaaggctggaaaag

SEQ ID NO: 283857 - DNA, 75 bp, Homo sapiens
cagtatcttggtgttgctgaagagatggtggatgcttccaaaagcatcgaagctgtccatgaggacatccgcgtg

SEQ ID NO: 283858 - DNA, 75 bp, Homo sapiens
tctgtcccctcatgtccttccgccagggggcctgcgtgggtgaaggcattctcatctcctcagaggcttcagagc

SEQ ID NO: 283859 - DNA, 101 bp, Homo sapiens
ctgccacctacctggaggcccagaatggtactcgggatgactccgacatcaacacctctaagactggagaagattacactctctggcctttctgggtcgac

SEQ ID NO: 283860 - DNA, 100 bp, Homo sapiens
tttgtgatctctttgcctgtatgcagcttaaagttgataaagagaagtggttatatcgaactcctctacaggtctggctctgggagaggagtggacagca

SEQ ID NO: 283861 - DNA, 75 bp, Homo sapiens
cagcgtcaatgacttacgccaagaagataggataagttctgaacgtcgaaaagaaaagtctcgagatgcagccag

SEQ ID NO: 283862 - DNA, 90 bp, Homo sapiens
agaagctggaggccggcaaagccaagtatggactttctgtcagattttgagatgatgttgcagcgaaaaaagagcatgagtggcaagcgc

SEQ ID NO: 283863 - DNA, 100 bp, Homo sapiens
aaaatggcagacgatattgatattgaagcaatgcttgaggctccttacaagaaggtcgtttgagttcactcagtctctcccctgccaatcatgaaaacca

SEQ ID NO: 283864 - DNA, 75 bp, Homo sapiens
gaagttgcttgggttatatttgatgaaattcattatatgagagattcagcatatcctgctcctctaacaagcatc

SEQ ID NO: 283865 - DNA, 75 bp, Homo sapiens
gaaaacctttgggcttcatggagtcgtcttagatgttgattcaaattatatccagatcgagagacagaagattct

SEQ ID NO: 283866 - DNA, 82 bp, Homo sapiens
gtctgcctgtgtccctgaccatggctccctgcagtaccctttaacggataaggagccccgtggaatcatccctttagagaat

SEQ ID NO: 283867 - DNA, 83 bp, Homo sapiens
atcctctggtcccacggtttcatgccgacttcattcataagcacgtgaaaggctcacgatgatatcatcaagttgaatcgaaa

SEQ ID NO: 283868 - DNA, 100 bp, Homo sapiens
atcagttataaactctagagtgacatggagcagagtaaccctgcctacaccatcagtgctgcgctgtgctatgcaactcagctggtcaacattctgtctc

SEQ ID NO: 283869 - DNA, 83 bp, Homo sapiens
tggtgccttggttcatccctaagggtcctaaccggggaaagatcatcttcaagctctgagattcttttcttggcctattctgc

SEQ ID NO: 283870 - DNA, 100 bp, Homo sapiens
gaataagactgattttatgggaaaattaagcagatgctccagtttgagaaacctggatctgcgatctgtttgtggtggggtaaaaccttgtgcattaaac

SEQ ID NO: 283871 - DNA, 90 bp, Homo sapiens
acattgccttaaggaactggaagtacctcattttcaccatgagcttgtatatgaagcatggaaaagaccttgccagagcctgtgggcacc

SEQ ID NO: 283872 - DNA, 91 bp, Homo sapiens
caagaaaacatcaaagaggtctagcaaaggtatctacgagaccccagcaggcaccatcctttaccatgctcatttagacatcgaggccttc

SEQ ID NO: 283873 - DNA, 101 bp, Homo sapiens
gcgaccaagccctggctccagctctagcgggtatctgcccaccatggccctggtgctgatcctccagctgctgaccctctatccttggtgtttggctagca

SEQ ID NO: 283874 - DNA, 101 bp, Homo sapiens
ccagcagccaggccatggagctctctgatgtcaccctcattgagggtgtgggtaatgaggtgatggtacacgaggtcccagggcaggagattgaagtggag

SEQ ID NO: 283875 - DNA, 74 bp, Homo sapiens
caggactgcgccgcgtcttcctcaagtggcattgggcctctacttctcgagggatgcttactgggagaagctgt

SEQ ID NO: 283876 - DNA, 82 bp, Homo sapiens
ctgggccgccgaatctccggccgaagagcggcggcggcagcggcgttcctgatccgcctcatacacaaggagctgagctgcc

SEQ ID NO: 283877 - DNA, 51 bp, Homo sapiens
ggaataaacatgcaatgaacccaaaaggaagccttgtactacacagatgac

SEQ ID NO: 283878 - DNA, 83 bp, Homo sapiens
tgctggcccccggcggctcttcggggcgcgatgcccaggccgcgccgccacgagactcagattgatggacaacttttcttaat

SEQ ID NO: 283879 - DNA, 100 bp, Homo sapiens
ctcccgaagtgctgggattacagagatgatttacacaatgaagaaagtacatgcactttgggcttctgtatgcctgctgcttaatcttgcccctgcccct

SEQ ID NO: 283880 - DNA, 90 bp, Homo sapiens
ttgcatcctacgtaaccagaccaagctgtggggtggttgtctggggtgagtgcgactccactgatgactgtattgagcacaacattggcc

SEQ ID NO: 283881 - DNA, 83 bp, Homo sapiens
gtcgcgtctcggaaaccggtagcgcttgcagcatggaaccctaaggactctgcaatatgaataattccctagagaacaccatc

SEQ ID NO: 283882 - DNA, 100 bp, Homo sapiens
ggagatttccaaaatccaggggatcaagagtccaagccttatgcatttgatcgggtgttccagtcaagcacatctcaagagcaagtgtataatgactgtg

SEQ ID NO: 283883 - DNA, 119 bp, Homo sapiens
cattgcacttcagtatctcaggcggcaccctgtccccgaggaggggaccatgacacagatgaatttttagatgtgatctactggttccgacagatcattgctgtggtcctgggtgtcat

SEQ ID NO: 283884 - DNA, 82 bp, Homo sapiens
tgcaagctctttgacacacagcagttcttgtcagaattcctacctggtcttagcgggcctcgccgatgggcttgtggctgtg

SEQ ID NO: 283885 - DNA, 100 bp, Homo sapiens
gcacccacggagcctccggggctggtgtcatggagaaactccagctgggcccagagattctgcagcgggaaaatccaaggcttatttatgccaggctgag

SEQ ID NO: 283886 - DNA, 74 bp, Homo sapiens
tgatattaagccatcaaatgtggaacctatggaaaagggtgccagccgggccgccgatgacgccgagcgggagc

SEQ ID NO: 283887 - DNA, 100 bp, Homo sapiens
acccttgatcctcctcctaattgcaggcgaggattaaatccaccacacagggtgaaatctatctccatgacaacattcacacaacaggaaattgaattct

SEQ ID NO: 283888 - DNA, 83 bp, Homo sapiens
agcttcgagaagattggctacacagcacctgaactcctggggggaccgtcagtcttcctcttccccccaaaacccaaggacac

SEQ ID NO: 283889 - DNA, 98 bp, Homo sapiens
gccagtcctgggggcgagatcggggccgtttgagcaaggaagacattgaacgtatggtccaggaagctgagaagtacaaagctgaagatgagaagcag

SEQ ID NO: 283890 - DNA, 73 bp, Homo sapiens
ctggaagaaccacaggccctggcctgccttgggccggggatttaacacaggttggatggcaagcatgtggtgt

SEQ ID NO: 283891 - DNA, 95 bp, Homo sapiens
tggaaaccaaaaattctggctctgattcaccttataaagcaaagtagttcctgaaatgactgagatattgaagaaaaaatgaatcaggatcatgc

SEQ ID NO: 283892 - DNA, 90 bp, Homo sapiens
cggggagtgtgtgttgccatcgcgtctccgcctgcagacaatgcagatcttcgtgaagactctgactggtaagaccatcaccctcgaggt

SEQ ID NO: 283893 - DNA, 83 bp, Homo sapiens
aggatccccaaggacgtggttgaggaattcagcgatttatacaacgagagccctgaggatgatgacaggaaggtccgaaggag

SEQ ID NO: 283894 - DNA, 80 bp, Homo sapiens
acatgaagctggcagatgatgtggacctggaacagccttacggacatccaaaaattgcttggaactgacttcatgggtac

SEQ ID NO: 283895 - DNA, 75 bp, Homo sapiens
atgatcaagggtgttacactgggagggacattgcttgggcctccagactctgtggttgatgtggggagtacagaa

SEQ ID NO: 283896 - DNA, 99 bp, Homo sapiens
gccatagactctattcaccaacttggattcatccacagagacatcaaaccagacaaccttcttttggacagcaaggcattttcagatgaatttgccaga

SEQ ID NO: 283897 - DNA, 50 bp, Homo sapiens
gtttgatatgttaaacagaagatacctttaaatgagccgtcagactgcta

SEQ ID NO: 283898 - DNA, 75 bp, Homo sapiens
ctacgtcccgctgccgtcgccgccgccaccatgcccaagagaaagatctaccttctgagatatcatccttcttca

SEQ ID NO: 283899 - DNA, 100 bp, Homo sapiens
tgaccatgtatttgtggcttaaactcttggcatttggctttgcctttctggacacagaagtatttgtgacaggtggctttctagaagatgaccatagagg

SEQ ID NO: 283900 - DNA, 75 bp, Homo sapiens
tcctgatgaagttcgagcactaatatttaagaaagaagatgttaactttcaggagtcctggcaaaataagcatgc

SEQ ID NO: 283901 - DNA, 50 bp, Homo sapiens
ccggtacatctgaaagccgggaaatgggtccagtgtccatcaaagtccag

SEQ ID NO: 283902 - DNA, 75 bp, Homo sapiens
cgaggacggtcggactcccgcggcgggaggagcctgttcccctgagctcttgaggatcttgcttgtccaaaccca

SEQ ID NO: 283903 - DNA, 95 bp, Homo sapiens
aatggcaagctcaaagatgcagagaaacctgtattattttttgaacgatctgtgtatagtgacaggtatttttgcagtgttgaaggaaaagtgcg

SEQ ID NO: 283904 - DNA, 100 bp, Homo sapiens
agaaccaagtctcttcactagtgaaggaaatactcatgaccagccagatgtcttaaggaatgcttttgaaaagaacagaggcgtacaacattattacgac

SEQ ID NO: 283905 - DNA, 51 bp, Homo sapiens
agctcctgccttacagcccggattgagaggatccagaatccagatctctgg

SEQ ID NO: 283906 - DNA, 99 bp, Homo sapiens
agagtgccgagaaagcatccgtggaaacgctgacagagatgctgcagagctggcaaccttcgcccagaagaggcacttcaggctctcaccatatatgag

SEQ ID NO: 283907 - DNA, 74 bp, Homo sapiens
aaggagcgggaggacgaggagctgaacaaccccatgaaggatgatgatgacgacatgggagaggatgaagatga

SEQ ID NO: 283908 - DNA, 83 bp, Homo sapiens
ctcagaacagattggcacccattgggagacctgcaaatgcaactggttgatcctgaagacataccagctatggaacgcctgac

SEQ ID NO: 283909 - DNA, 100 bp, Homo sapiens
ggttcttctccagcgccctggcctccctcaccttggacacctcgcttgggtctcaccaacggctttgggggtgcgaggagcgagcaggagccgggcggcg

SEQ ID NO: 283910 - DNA, 100 bp, Homo sapiens
caaaaactgggtctgtgactacaacatattgctgcaatcaggaccattgcaataaaatagaacttccaactactggtgtggatgtggaagcagccaagcg

SEQ ID NO: 283911 - DNA, 82 bp, Homo sapiens
aaggaaagcagcatagagaatgagatagccgtcctgagaaagaacaagatcactcaaggtgaaggataatctactaatacca

SEQ ID NO: 283912 - DNA, 100 bp, Homo sapiens
gcgggaggttcggttgtcgcccgttggccgcgcggcgccgcgctcggcggccgccattgcaggtgctgagcgccgtcctcaaggatctctaccacctgct

SEQ ID NO: 283913 - DNA, 88 bp, Homo sapiens
aactctttgggaaagccactcgaaaaggtgtatggtggctgatgaagtaagtgtttcaatggtttttatgtcttttataagattacac

SEQ ID NO: 283914 - DNA, 100 bp, Homo sapiens
gacaagaccaagaggcctgtggcgcttcgcaccaagaccttggcggaccttttggaatgtgactggtatagtggtcccgcaactgaacttgatactgaac

SEQ ID NO: 283915 - DNA, 80 bp, Homo sapiens
gtggagctgggtgctggcacggggctggtgggcatagtggctgccctgctggcaactccgatccaatatccgagaaattg

SEQ ID NO: 283916 - DNA, 100 bp, Homo sapiens
gccgttggctccagacaaataaacatggagtccatcttccacgagaaaattgaagactatgatgtgatagctagcatgataggagccaagtgtaaaaaac

SEQ ID NO: 283917 - DNA, 101 bp, Homo sapiens
cactgctcctgctggccgcctggacggctcgggcgctggaggatccaaactactggatacaggtgcatcgcttggaacatggagatggaggaatactagac

SEQ ID NO: 283918 - DNA, 50 bp, Homo sapiens
caaattcatcccagaaatctaagagaaaagagtctcatcgtggaaggcaa

SEQ ID NO: 283919 - DNA, 116 bp, Homo sapiens
ggcaacaatgcagtggtgtccagcctacaggagcagctcaaccgcgggcctggtgacatcaacctgcaggatgagatgatgctgtgtatctggacaatgagaaagaaagagaagag

SEQ ID NO: 283920 - DNA, 50 bp, Homo sapiens
gtgttccagaaattcattgagagccttggcccctccgttgtgggtttggc

SEQ ID NO: 283921 - DNA, 96 bp, Homo sapiens
acacattttatgttgtgtcatttcgaagggtgtgtatgtaatatagattgcagtggatacagttttaatcctgtgtgtgcttctgatgggagttcc

SEQ ID NO: 283922 - DNA, 98 bp, Homo sapiens
tcagccagctctgaggggacccgcatcaagaaaatctccatcgaagggaacatcgggtcatgtgaaggtggtgcgctacttagtcaaagaagtcaatc

SEQ ID NO: 283923 - DNA, 73 bp, Homo sapiens
acccacgaatctgcccacccctcctgtaacccagcctgtttcacttcttggtgaccctggcagcaaccccaac

SEQ ID NO: 283924 - DNA, 98 bp, Homo sapiens
ctgcatgtgtcattacagcaagcagaagacttcatcctcccagacactacagagattggttcgagtgagtaaaaactaccgatcagtcatcagagcat

SEQ ID NO: 283925 - DNA, 99 bp, Homo sapiens
aagcagtcctcctgcctcagtctcccaaagtgctggaattacagggaagagtcaagtaccattggccaggatcaaacgcttatggaacgtgatacagag

SEQ ID NO: 283926 - DNA, 82 bp, Homo sapiens
cgagtgggagcaccaggatctcgggctcggaacgagactgcacggaatagctattcagtcagacagaaccacttatcacgtt

SEQ ID NO: 283927 - DNA, 75 bp, Homo sapiens
actgctcatgtgaggtgaagcaggtgcagcggaactgctgcctgacgctctgcaacttcagcatccccgaggagc

SEQ ID NO: 283928 - DNA, 100 bp, Homo sapiens
tgcctcagcctcctgaggagctgggattacaggctaaccttgccgcgggccgagccctgcctcgccatggaccaggactatgagcggcgcctgcttcgcc

SEQ ID NO: 283929 - DNA, 50 bp, Homo sapiens
tcgacagggacgtcctcattgtcctcgagaaccatggagtctggcagtac

SEQ ID NO: 283930 - DNA, 101 bp, Homo sapiens
gggactgcaagccaaaggttcatagagctgggagcagagattaaaagagttcggcgaggaactccagaatacaaggcattttccctgaagatgagatccca

SEQ ID NO: 283931 - DNA, 90 bp, Homo sapiens
agaacacctacttttgtccaatgtgcactgggaactacacctttgttccttacatgataactccacataacaaagtctactgctgtgaca

SEQ ID NO: 283932 - DNA, 100 bp, Homo sapiens
ggacatcagtggagccttctcagacccacagattcctcacctattcctacctcttggccttcaatgtgtggcttctgcttgcacccgtgaccctgtgcta

SEQ ID NO: 283933 - DNA, 95 bp, Homo sapiens
cgcgctgctgggcacccacggagcctccggggctgtcttgctctgttgcccaggctggagtgcagtggtgccatcatgccaacctcgacctcctg

SEQ ID NO: 283934 - DNA, 82 bp, Homo sapiens
cggagctgacggtggaggttcgcggctctaacggggctttctacaagagtaatcaagtcagaggattatatgacttttatct

SEQ ID NO: 283935 - DNA, 100 bp, Homo sapiens
tggccatgccagctagttggacctcaccccagaaatcctcagccctggctccagaggatcatggcagctcctatgagtggtctcacgtgtgaaacatggc

SEQ ID NO: 283936 - DNA, 75 bp, Homo sapiens
cctgggccgccgctgctacctgcagcgccgtgtggcacgacacaaaaatcagatataaagatgaagcgcagctgt

SEQ ID NO: 283937 - DNA, 82 bp, Homo sapiens
ggagcctccgtgcggagaccactgttcaaggccacagggtggcccagttgaaatccttcccttcctctaccttggaagtgcc

SEQ ID NO: 283938 - DNA, 90 bp, Homo sapiens
gctcagcccagcagcggggcaagctggaggctactcacagtcgaactacaactccccggggtccggccagaactacagtggccctcccag

SEQ ID NO: 283939 - DNA, 75 bp, Homo sapiens
ccctacccacgctgaacgagagggacacggagcaggacccagagttcaacaatacagatcagattgacctgtatg

SEQ ID NO: 283940 - DNA, 100 bp, Homo sapiens
cggcttgttgtcttcaattaaaaaatttattaaaggaagcacacctaagccttcggacgctgactgggacgacctgtgggaccagtttgatgagcggcgg

SEQ ID NO: 283941 - DNA, 100 bp, Homo sapiens
gggagccccgagaacgcctccagcggggatgacacagaaggtgctggagaatctggtaaaagcaccattgtgaagcagatgaggatcctgcatgttaatg

SEQ ID NO: 283942 - DNA, 100 bp, Homo sapiens
ggccctggccgccggcctcccagccgcgttctcctccgccgctcctccgggcttgccctggagccctcaggtgctggagaatctggtaaaagcaccattg

SEQ ID NO: 283943 - DNA, 80 bp, Homo sapiens
attgacagtcacaattttgtaataagtggctgacaagattttgaaaaagaaagaataccctctttatataaatcaaacct

SEQ ID NO: 283944 - DNA, 100 bp, Homo sapiens
gtagacggcaaggatgtgatgccagaggtcaacaaggttctggacaagatgaagtctttctgccagcccttgccctgttggatgaataggcacctctgga

SEQ ID NO: 283945 - DNA, 75 bp, Homo sapiens
caggctcgccccgccccacacgacacgcctgccactcctgcccccagcccgaaaatggcacagaaatggtatcaa

SEQ ID NO: 283946 - DNA, 82 bp, Homo sapiens
gccgaagaagcatcgttaaagtctctcttcaccctgccgtcatgtctaagtcagagagatgccctgtatccaagcccaatat

SEQ ID NO: 283947 - DNA, 97 bp, Homo sapiens
gctgggaaggagccaggggggagcagggctcactccaggtggccttggataagggctgctcccaattccgcctggccgtcctggactggaaccagag

SEQ ID NO: 283948 - DNA, 98 bp, Homo sapiens
ccccatttcttcgatcgcagctacgacaagggcctcgcttggtaccggccaagtcctgtatctgccatgtctgtggcgtccacctcaacaggctgcat

SEQ ID NO: 283949 - DNA, 120 bp, Homo sapiens
ataaatcaactcagtgatcctgattatattaatcagtatgtcatatggatgtgggtttgttgaagcagttgctggtgcaacagctaggtttgactgagaagagcgttcaggaagactggc

SEQ ID NO: 283950 - DNA, 50 bp, Homo sapiens
ctcggatgccgccgctgtcaatacacaatcatcatcttactagttctctg

SEQ ID NO: 283951 - DNA, 75 bp, Homo sapiens
tcctcggaagagcgctcccaggagaaacaacaactagaagccatttgtgtcaaggtaacgtctggagaaacaaaa

SEQ ID NO: 283952 - DNA, 100 bp, Homo sapiens
cgacagctgcggttggcgggcaccataggccgaagcacccgggtcaaaatgcagatcttcgtgaaaacccttaccggcaagaccatcacccttgaggtgg

SEQ ID NO: 283953 - DNA, 75 bp, Homo sapiens
agttggggcttgatgaaggcgtggatagcctgaaggcagccattcaggaggagatgttaaagtaacccatcttgc

SEQ ID NO: 283954 - DNA, 75 bp, Homo sapiens
ccttattgttgaagacctagtagaagaggtggtgctggagaatgccgaaggtgccagaaccaccccttcagttgt

SEQ ID NO: 283955 - DNA, 90 bp, Homo sapiens
tggcggtccctgtgacctgtggagacacggccagatctgccctccagtggtcttcaagctgacagagaagctgacggaacagaaggagtg

SEQ ID NO: 283956 - DNA, 82 bp, Homo sapiens
gcaaacacgcgcagaccttcgttgccctctgtgccacaggtaactaggatttctacctcaaccgcgagacctatgcaaggac

SEQ ID NO: 283957 - DNA, 95 bp, Homo sapiens
ccaccaccagaaccatcacctcggagacccagacaatcacagattgtcctgggtcacataatgccagctgagcgtaaaaagccagcaagtatgga

SEQ ID NO: 283958 - DNA, 100 bp, Homo sapiens
ttgtcgagtgggccaggagtagtatcttcttcagagaacttaagattctggggagcaggtcctggtggatgtggagaccaagagcaataaggagatcatg

SEQ ID NO: 283959 - DNA, 75 bp, Homo sapiens
cagcccggcccggcagcgacatggaagttttcggctttgtgagaaaccttaccatcaaacacgatggccagcaac

SEQ ID NO: 283960 - DNA, 75 bp, Homo sapiens
cgacgaggactgctatggcaatgccccggccagcgccgcctggaggagcgtcctcagggtctccccgcgcccagg

SEQ ID NO: 283961 - DNA, 100 bp, Homo sapiens
gaaggatagcagtggcctgagaaaggtactctctgaagatggcagaagctcaccaagctgtggcctttcagttcacggtcactccggacgggattgacct

SEQ ID NO: 283962 - DNA, 90 bp, Homo sapiens
ggcgcctcctacgaggcagaaatcagggagctggaggccctgcggcagcgacctggccctgcgcaactgcctgctgacctctgacctgac

SEQ ID NO: 283963 - DNA, 90 bp, Homo sapiens
tggtgaatcccctgtttgagaaaaggcctaagaattttggcattgcgttacatccttactattcaaagtgccatccacagacctgctgat

SEQ ID NO: 283964 - DNA, 100 bp, Homo sapiens
tacgaaagtgctcccccatccccacagtataaaaagtgggatgaagctctcttgactatgagtaaaggagaaaaggctcgactggagattgaaccagaat

SEQ ID NO: 283965 - DNA, 75 bp, Homo sapiens
ttcaaggagttaaagttacttacactgtgcagtatttcatggtgctgtgattacaccaaccatggaccatcccat

SEQ ID NO: 283966 - DNA, 95 bp, Homo sapiens
taccatcttattaattcactctggttcttccaggggacccagccccctaaccatgggagctcaggacactctccctgttgcagcagcatttacag

SEQ ID NO: 283967 - DNA, 82 bp, Homo sapiens
tgggcctcgcgccggctatggccgtgccctggggctgagccctcagggagcatcgagtacagctgtccggcctccaacgagt

SEQ ID NO: 283968 - DNA, 90 bp, Homo sapiens
agactggctttgctgactcagtctcatgggattgttctctgaggctcaagaggtcaggaggcccaggtgatgtgtccaatctagatccca

SEQ ID NO: 283969 - DNA, 101 bp, Homo sapiens
gctgcaggagcagatccggagcctggaggaagagaaggcagctgtgactgaggcagtgcgggccctgctggcctgtagtggtggagacacgcccagtggat

SEQ ID NO: 283970 - DNA, 100 bp, Homo sapiens
tccgagcctttgatttgagtggtcttaaaatccttgcacgtttgatgactgccaaattcttgcatacagaaattcgagaaaaaggcggtgcttatggtgg

SEQ ID NO: 283971 - DNA, 100 bp, Homo sapiens
cttcgacgtactctactgtcacctctatggcttcccacagccacgacttcctagattcaccaatgacccctacttggagggacggtttgaagatgaggag

SEQ ID NO: 283972 - DNA, 90 bp, Homo sapiens
cgagtgaatgggcggatctcatatcttcacttggcaaactcaacaaggctaatagctcgtcagcttgctaaaatccatgctattcatgca

SEQ ID NO: 283973 - DNA, 82 bp, Homo sapiens
cgacaagccgctggcagccgcggatctcaccgccgctcagggctggcagcctcgttggtttgttttagataatggaatctta

SEQ ID NO: 283974 - DNA, 96 bp, Homo sapiens
atcctcaagtcggcgtggcttttcctcatatcaagcataactatgagcttcttggacacttaatgattgttggcaagaaatgtgctgctgatctgg

SEQ ID NO: 283975 - DNA, 87 bp, Homo sapiens
ccgagcgctgtggggagcggcaacgccggtggctcggggccccgcggaaaagcgctgataaagcagtttgtgtccgacgtggcctgg

SEQ ID NO: 283976 - DNA, 75 bp, Homo sapiens
attttagggtcctttatatagaagggagagtaggtgaaggcagaaattggagatgttagtattttagtaaataat

SEQ ID NO: 283977 - DNA, 109 bp, Homo sapiens
ctgcctcaggtttatttgtacaaatagcacaggaggaccccagaagaacgggccgccgccgccaagaagtataatatgcgtgtggaagactacgaaccttacccggatg

SEQ ID NO: 283978 - DNA, 50 bp, Homo sapiens
agtgcatcaaaggtgtgaacacagtttttccactactcccaagggcaagt

SEQ ID NO: 283979 - DNA, 74 bp, Homo sapiens
ttgcgccatcatcctcatcatcatcataggtggatcagtacaagggaaagcgggatttggagtcactgagggag

SEQ ID NO: 283980 - DNA, 75 bp, Homo sapiens
ctttgaaagagctctctacttttatgaacagagtaagccatatcaaagacttcattgaaaaataccaaggatctc

SEQ ID NO: 283981 - DNA, 73 bp, Homo sapiens
gaagatggcggatctggaggagcagttgtctgatgaagagaaggtgccattgttatagaacgaccaaatgtga

SEQ ID NO: 283982 - DNA, 82 bp, Homo sapiens
ggaaccctggtcaccgtctcctcaggttccactctggtgcaccctttcagagcgcttgggaagaactcggaactgctcgtgg

SEQ ID NO: 283983 - DNA, 75 bp, Homo sapiens
catacctcaatgaaaaccctctgagagtgtaagctgttcagatgaagatgaaaaacccagaaaacgaaggcgaac

SEQ ID NO: 283984 - DNA, 101 bp, Homo sapiens
tacccaaactactgttccttcaaaagccagcagtgtctgatgagaaaccgcaatcggaaggagccggtgaaacctgaagaaggcagagatatggcaaacag

SEQ ID NO: 283985 - DNA, 75 bp, Homo sapiens
ccgcggcgaccacagccaaagcgggcgtcttgccccagaagctgcgggcacatccacgcctgaaatgcggcgctc

SEQ ID NO: 283986 - DNA, 50 bp, Homo sapiens
cgtggaacggctgcttttggaaggcacgtggactccctttaatccagtga

SEQ ID NO: 283987 - DNA, 50 bp, Homo sapiens
tttggaactgtcaggtacctcaaagcgaggatttgttggtattgaggaaa

SEQ ID NO: 283988 - DNA, 73 bp, Homo sapiens
aggactgggaggacaacccattcccccagggcatcgagctgatggattaccgggccttggtgcatgagcgaga

SEQ ID NO: 283989 - DNA, 83 bp, Homo sapiens
cccaggcctgcgtccgagtctccgccgctgcgggcccgctccgacgcggaaggcagcctggcatcctcgctacaacctcattg

SEQ ID NO: 283990 - DNA, 75 bp, Homo sapiens
cccggagtccgcggcagcgccgagggcccctcccccaggcctctgggctctgagcgtggtaccatgcgacgacgc

SEQ ID NO: 283991 - DNA, 136 bp, Homo sapiens
ggctgatgctgatgcccgtcattggttacaactgagtcccaccgatgcttcaaatttaacaggttatgggaagctggctggaagcagcggtactacaagaacaaatttgatgtggatgcagctgatgagaaattcc

SEQ ID NO: 283992 - DNA, 83 bp, Homo sapiens
gactgaccctggagctgaaggccaggttttgcagtggtctgagtggctcggagtctttattataccatttgagtgaattgaaa

SEQ ID NO: 283993 - DNA, 90 bp, Homo sapiens
ggaggccgtgaagaccttcaatagcgaggtgccactgattaatgaacttgaatcagcaatacatcagctgtacaaacagcgagcttcccg

SEQ ID NO: 283994 - DNA, 100 bp, Homo sapiens
ctactcctggcagtgcgtcaatcagagcgtcctgtgcggtttacccaaggtccagcctagcccctaggcaccatgtcggacagtgatctaggtgaggacg

SEQ ID NO: 283995 - DNA, 75 bp, Homo sapiens
gccgagctgggggcgcagagcgcgggaggcggcggcggcgcggagcccagaaacttctattaagacaagctttcc

SEQ ID NO: 283996 - DNA, 100 bp, Homo sapiens
atatggatggctatccagacgctctggtcatactaaagaacacatctggaaggaatttgctgacacaatatcttccgcctggtgctgggcatatcctaag

SEQ ID NO: 283997 - DNA, 100 bp, Homo sapiens
gaaaggctgcggcgcgcagagcgaggctgcgggaccccaggatgggggacaggaggctgcggggcctcagctgggacgatgccggagtgtgaaggagttt

SEQ ID NO: 283998 - DNA, 90 bp, Homo sapiens
aggaattagaaggtgacgaggagggagaagacgaggatgatgcggaaattaaccccaagctggagaatgctggaggagaccttaaggatg

SEQ ID NO: 283999 - DNA, 100 bp, Homo sapiens
aagacggttgaaactagagatggacaggttatgggggcttggggctgagtattgaaggcccaagcaaggtggacatcaactgtgaggacatggaggacgg

SEQ ID NO: 284000 - DNA, 100 bp, Homo sapiens
gctgggtcacccgcactgagtcaacagactgagcgcgtccaggcctgacagctctgcggctcgggccctgaggtcgttgaggacttccacatggagattg

SEQ ID NO: 284001 - DNA, 82 bp, Homo sapiens
ggaaccctggtcaccgtctcctcaggctaccaagcagtttctcgaagagattaacaagtggacagttcagtacaatgtttcc

SEQ ID NO: 284002 - DNA, 100 bp, Homo sapiens
cggcttctctacgcagaacccgggagtaggagactcagaatcgaatctcttctccctccccttcttgatgcgcctgcttcctctgcgccagaagaaggcc

SEQ ID NO: 284003 - DNA, 75 bp, Homo sapiens
aacgaggcaaggagctaaagcagcgtgcgttcagccctggggaagcgccgcggagccatcaacagcaagcagctc

SEQ ID NO: 284004 - DNA, 100 bp, Homo sapiens
ggaggcagagaagggaacgcccggcccagccccccggaaaactcaaatatatgtgaggtgtgcaacaaatggggacggctgttctgctgcgacacttgtc

SEQ ID NO: 284005 - DNA, 100 bp, Homo sapiens
ctcataatttatgggatggtgcaaggaaaacagtggcaactctgtgggatggacatgcagccgtttggcatgattaatactgaggaacacgtggatgcag

SEQ ID NO: 284006 - DNA, 76 bp, Homo sapiens
cggtccctgtgacctgtggagacacggccagatctgccctccaatatgaattgagaattcgttatttgccaaaagg

SEQ ID NO: 284007 - DNA, 83 bp, Homo sapiens
tagagttggaaaaaaaattggatgtggcaattttggagaattacgattagcctttctgagaaaagtctacagcattctttctc

SEQ ID NO: 284008 - DNA, 51 bp, Homo sapiens
gatgaatctaacactacaaaatacgctgatccaaaaggaaagtcctcggcc

SEQ ID NO: 284009 - DNA, 75 bp, Homo sapiens
tccagggggaagcttggcttcagggaggacctagcagaatcttcataaacaatgaatggcatgattcagtgagtg

SEQ ID NO: 284010 - DNA, 100 bp, Homo sapiens
ctgagaaatacctcgacatccccaagatgctggatgcagaggacatgagcaccagcctccaggaaggccaggaggacgggccggcaggatggagagcgaa

SEQ ID NO: 284011 - DNA, 100 bp, Homo sapiens
cctggactttggcaccacctcagccaagcagcccacccagcctgcctcggaggaattcatcatacattcccctgatttcgaagctgccaagttttgggtt

SEQ ID NO: 284012 - DNA, 76 bp, Homo sapiens
aaggaactcgtcctacgtaacacagccagttaggaaagaccacagcaagattctttcattcgtctcctcctagcct

SEQ ID NO: 284013 - DNA, 75 bp, Homo sapiens
gggccttttgggcagcttttccggcctgacaacttcatctttggccctggccaacgtcaacattgggagcctcat

SEQ ID NO: 284014 - DNA, 75 bp, Homo sapiens
caagcttcttggtacattcacaaatacgtacagacatctcgtggggaatttgactccagtgaatttgaagttagg

SEQ ID NO: 284015 - DNA, 100 bp, Homo sapiens
tggcgacggcaagcgcggcccgcggcgccgcctgacagaggtggggctggtgtccgagcacttctcgcaggccccgcagaggctgtccttctacagctgg

SEQ ID NO: 284016 - DNA, 96 bp, Homo sapiens
tgtggctcagcccgttcgctggactgcaaaccgagctcccgtctgccttgcagctgatggttcctgggaaggaaggtggggtaccccttgctccca

SEQ ID NO: 284017 - DNA, 88 bp, Homo sapiens
ctcgtcgacatgagtgatgtggaggaaaacaacttcgagggcagatgagaaagatcagtctaaagaaaaggagaagaaagtgaaaaaa

SEQ ID NO: 284018 - DNA, 78 bp, Homo sapiens
cactgatatctcaaaaggtgatctggacaaaggaacaggtatctcagggtcctgaggacaccgtgagccagccaggcc

SEQ ID NO: 284019 - DNA, 98 bp, Homo sapiens
gacgatgatggaaataagtcaccctgacacatctcagttcatcttcctcaaaactatgcgagatcctgataacttaagtgactctctcttttccggtg

SEQ ID NO: 284020 - DNA, 73 bp, Homo sapiens
cgggcccgaggccggaggaacccggactccggcgtagcgttgttgacctcctgtactggagagacattaagaa

SEQ ID NO: 284021 - DNA, 117 bp, Homo sapiens
gaggcggcaaaacgggcggtcgagcagaacgtgtagccgcgtcccctccagtccgctccgggcaggttattcagcttctcaaggctggaaaagcgaaggaagtttcctacaatgcac

SEQ ID NO: 284022 - DNA, 100 bp, Homo sapiens
cccatcaggtcgtctgcatcaacaacataaatttccagagaaaatctgttgtggttgcctatccctcgtccaggtgaagttttgggattagttggaacta

SEQ ID NO: 284023 - DNA, 83 bp, Homo sapiens
cagaagagaaagccagttatccacggactggaagatcaaaagagggtctcagccttagatccaaggacagtccaaggaagtcc

SEQ ID NO: 284024 - DNA, 75 bp, Homo sapiens
gcgttgctggtgcgagtccttgtatccagctcacatagaagacattgactacgaggaaggaaaagtactcatcca

SEQ ID NO: 284025 - DNA, 50 bp, Homo sapiens
ggagtccggacatctgaaacttggtatcttcaaagaacagtaaaacatcc

SEQ ID NO: 284026 - DNA, 82 bp, Homo sapiens
gatgcttctgtggaagatgatgcttttatcaaggtatgctggtatcctcctgggcatcacaaatacatttgccactattcca

SEQ ID NO: 284027 - DNA, 83 bp, Homo sapiens
gccgagtgcagaagatctgggtgcccgtggaccacaggccctcgttgcccagatgctccagggagttccacgctgtccagttc

SEQ ID NO: 284028 - DNA, 101 bp, Homo sapiens
acttaagagaatctcaagctgctaagggtgtccgcaatgttgccagtgtctgtctgcagattggctacccaactgttgcatcagtaccccattctatcatc

SEQ ID NO: 284029 - DNA, 83 bp, Homo sapiens
attgtactatggacttcatcgctttataattgtagaaggcatgaaacaaaaaatgtggagtattgaaaatattgccttcggtt

SEQ ID NO: 284030 - DNA, 83 bp, Homo sapiens
cagcagtgtcctgtgctgatggtgttggcagacaacagcagttctgtagagagtttaaatatgaaggaatggcaggacgggct

SEQ ID NO: 284031 - DNA, 75 bp, Homo sapiens
ctcagatctggagcatcggctgcaggggtcagtgatggagctgcttcaggttgaaaggattgtagacaagaggaa

SEQ ID NO: 284032 - DNA, 100 bp, Homo sapiens
agccgatccccatttttattgaaagatgtattgagtacattgaagccacaggtgggcaaacgcagaggcgggaacaaactagccctcaagacgggaatag

SEQ ID NO: 284033 - DNA, 50 bp, Homo sapiens
ttgcaaacaaatgtcagatcccaggtttccctatttggatccacctaatg

SEQ ID NO: 284034 - DNA, 100 bp, Homo sapiens
aaaagagatgtggggggattctcgacctgctaacagaactggaccttttcgtgagcggtttctggtaagactgaacaagaatggtgggccgaggaaccca

SEQ ID NO: 284035 - DNA, 100 bp, Homo sapiens
ctttgtcaattatggaggaggaaaatattggtacttcaaacatgcaagttggaatggagcttgtgcagtggaggggtcaaagaaaactgatgttgaggag

SEQ ID NO: 284036 - DNA, 98 bp, Homo sapiens
aaagatccctggaatatgaagagacacagtatggtagccacacccccagagatctcggctcaccaaattccacaacctgaaggcagtcgtctgcaagg

SEQ ID NO: 284037 - DNA, 83 bp, Homo sapiens
ataggatttaaccgctctctgcctcccagattcagaccaggatgtagcactcaaacttgcccaggagcgagctgaaatagttg

SEQ ID NO: 284038 - DNA, 82 bp, Homo sapiens
atagaatgattttaaagttatgggactacaacagcagccacaggaaccttgaatgaatgaagaaatgctgtgccaagaattt

SEQ ID NO: 284039 - DNA, 74 bp, Homo sapiens
cgggccatctccgggggctccattcagttctgctgatggaacagccagccatgaacaaggtgaggaagaagaaa

SEQ ID NO: 284040 - DNA, 74 bp, Homo sapiens
acgggaggtgaatttccatgtcaacatagtcctgcccctcgctcctgcatcatcgacaaggatgagctgaagga

SEQ ID NO: 284041 - DNA, 82 bp, Homo sapiens
gcttccactgattctacattatggagtgtgaggaagaggctgtctgtgtcattatgtgtgcgtcggtcaagtataatatccg

SEQ ID NO: 284042 - DNA, 90 bp, Homo sapiens
gcctttgctgagcaggagcaactatgtctctggttcttaaggattgaaaagagtattgggaaagggtcgttgtggtgcatagacccagag

SEQ ID NO: 284043 - DNA, 101 bp, Homo sapiens
ctccattctgttggttttatgcatctttatccaatcaagtgcccttggacaaagcctgaaaccagcatttaaatcaaacggtattgagatggattgggtta

SEQ ID NO: 284044 - DNA, 50 bp, Homo sapiens
cctcccgagtagctggaactacaggtgggaacctgctcgtgctggtggat

SEQ ID NO: 284045 - DNA, 83 bp, Homo sapiens
gcgtgccagctctctgaatgtccttaacgtgggtggcaaggctgctgaagatcgctttcaagccaagtacctggcccagatca

SEQ ID NO: 284046 - DNA, 100 bp, Homo sapiens
gcaaggacagttgcatcatcaaagaaggagacgtggggtcactggtgtatgtcatggaagggtttgtgtttagtgaatcagagggatctgcattagaaca

SEQ ID NO: 284047 - DNA, 100 bp, Homo sapiens
tggggaccttcgaactctggagctgctgcttatctgtgcaggccatcctcaatatgagtctattatcctcccagtccacaacgctgaaccgtggctggac

SEQ ID NO: 284048 - DNA, 97 bp, Homo sapiens
ctttactggattcagataattttattggactgtttgtctttgttctctgcctcttgtattctaggggccctcctcgccaaagacagcctagagagga

SEQ ID NO: 284049 - DNA, 98 bp, Homo sapiens
gtacacgcgagattataagaagcttgggttcatttcagagcaccataacatggtgtgggaagtgaagacaaatcagatgcctaatgcagtacagaaac

SEQ ID NO: 284050 - DNA, 90 bp, Homo sapiens
ctagcaatgagctcccaaagccatccaggcagaactggggctcccttgcatcttccagttacaaattcagtgccttctgcagtttcccca

SEQ ID NO: 284051 - DNA, 100 bp, Homo sapiens
ataagctttgcaacagaattacagagtatgatatcgatctctttgggctgcctgacctccttgggtgcttgctattaattaacagactttgtggggaaaa

SEQ ID NO: 284052 - DNA, 80 bp, Homo sapiens
tggcagtgcagaagtccagggaatggctggcccagcagctgagatcacaggctcccagccccattgccaataccttcctc

SEQ ID NO: 284053 - DNA, 83 bp, Homo sapiens
cgagcgcccctccgagctggggttggacgctgccagtttgcacagcagcaggagaatgtactactcatcacctcccacctgtg

SEQ ID NO: 284054 - DNA, 50 bp, Homo sapiens
tcggccggaggacaccccatcgtgcaggtctgtgcagacttttgcagaca

SEQ ID NO: 284055 - DNA, 82 bp, Homo sapiens
cagagcgcctgcgaccccagtcggtgctccggggaggtcacctgacgaggagttgattatggaagattcccacaagagtacc

SEQ ID NO: 284056 - DNA, 83 bp, Homo sapiens
cattcggcagcggcagcaatgggtgcctaggccatggcagcctcactgacatcagccagacctgattcctcagacctctgccc

SEQ ID NO: 284057 - DNA, 100 bp, Homo sapiens
acggaagagcagtacttccagttcctggccaagtttgagatcgccctgcccgtcgccaatgacaggagaccaagacacattccaccccagtggggggtcc

SEQ ID NO: 284058 - DNA, 100 bp, Homo sapiens
cgctgctgtcttcgtgggaggcgccgtgagttcgccgctggtggctccgggatgaatttcacccattcatcgaggcacttcttccacatgtccgtgcaat

SEQ ID NO: 284059 - DNA, 78 bp, Homo sapiens
gtcctgtggacgcgtatcgccagcacgatcccaccgcacgttcagaagtcgggaaatttgcgagaatccccgatttat

SEQ ID NO: 284060 - DNA, 100 bp, Homo sapiens
accatcagggacgtgctggccgtgatcaaacactgcaaggaccccctccggctcaagtgtgtcaagcaaggttgacctgacagttcaagaaaaggagaaa

SEQ ID NO: 284061 - DNA, 75 bp, Homo sapiens
ctttcccgctggcgcgcagcctcagctagaggctgaggggatctggcggtggagcgctaggatcagacgcccccg

SEQ ID NO: 284062 - DNA, 74 bp, Homo sapiens
taatgaccacaacaagcaagcatgcagcttactgcttgaaagactctgtttgctggctacacggacaacctggt

SEQ ID NO: 284063 - DNA, 100 bp, Homo sapiens
ttgtgatcgttggcggacattttggtaatacattgcatgcaactggatcctgcaagaatcatttatcaggaaattctcttgctgatactttatttcggtg

SEQ ID NO: 284064 - DNA, 75 bp, Homo sapiens
ttctaccagaaggggaggagacgttggaatcagggaagtcgagataacatgagtattgtactagtttgcttttca

SEQ ID NO: 284065 - DNA, 80 bp, Homo sapiens
tgtgatacaagaggagagggcaatgcctgcccagtaagcaagctgtgtgggaagtgcagccccactgacgtggacatcct

SEQ ID NO: 284066 - DNA, 100 bp, Homo sapiens
cccatgcttgtcaaaaatcagaggcaactaacactgcggcttcctgaggatcatagaactcaatggtggacaaccgcctctaacttataaaagattccag

SEQ ID NO: 284067 - DNA, 100 bp, Homo sapiens
gccgcgttcgcaccccagggtctcaccggcaagggaaggataatggaaagaatatggcaaagctgatgcaagatgggtttattttgatccaaccattgtg

SEQ ID NO: 284068 - DNA, 97 bp, Homo sapiens
agcggctgtttggtcgctactatcgtgtggcattttatgggcagggctgtcacatggtgactgaagaacttcattccataacgtttgaaacacagat

SEQ ID NO: 284069 - DNA, 75 bp, Homo sapiens
ggggaaatggaaggggcctccagggtctgcagacaaggcagggttacaggaatacttaaagatgctggagtaaac

SEQ ID NO: 284070 - DNA, 75 bp, Homo sapiens
aaagagcttcacttctaaagtcccaggaaccaattcctgatgatcaaaagcctcctaattttccctacagagatg

SEQ ID NO: 284071 - DNA, 100 bp, Homo sapiens
tgaaggattccatgggggacctctattccttctcagctctcatgaaagccctggaaatgccacagctgaagaaatcaggggagaaacccctgcttggtgg

SEQ ID NO: 284072 - DNA, 77 bp, Homo sapiens
gctgaggtgctgggacagccatggtttcagacgatctgacaggatggcatctgatgactttgacatagtgattgagg

SEQ ID NO: 284073 - DNA, 83 bp, Homo sapiens
gtttgcctgggtggaattttaccttttggttcaatctttattgaaatgattctcagcaagttacagaagtatctttgacaact

SEQ ID NO: 284074 - DNA, 98 bp, Homo sapiens
gctgctgctgcccgcgtccgaggctcgcgggcggcgggcccggggccaattcctgtccccccagcagcatggcatcgtgtgctgaaccctctgagccc

SEQ ID NO: 284075 - DNA, 100 bp, Homo sapiens
actctccgtggactgcacacggatctcctttgagtatgaccctgaaaagcaaaggcctcatctccatggcacaggtgatgaaacaggaagactgaagccc

SEQ ID NO: 284076 - DNA, 100 bp, Homo sapiens
ccgggtggatgaggtcagagcgccccatggtgtggtgctgcctctttgtccgttcgcagggccgttgctccagggagaactgcaaatatcttcatccacc

SEQ ID NO: 284077 - DNA, 100 bp, Homo sapiens
tacacccagaagattacctttgactcttgtcccaggttgtctgcattcaaaagagcattctattaaagctaccttaatttggcgcttatttttcttaatc

SEQ ID NO: 284078 - DNA, 100 bp, Homo sapiens
ttctgatctcaccaccctggtggcctttccctccagctctgtctatcctaccaaggtcaagtacttgctgctgtcgatattggggcttgcctttctgagt

SEQ ID NO: 284079 - DNA, 82 bp, Homo sapiens
taactgagctctggactttggggacagctgtcagtggcctaggccgcagagtaatcaagtcagaggattatatgacttttat

SEQ ID NO: 284080 - DNA, 75 bp, Homo sapiens
ctaatggaatcaggcagttttgtgtccatgtgaacaactgtcttttagataaccctgaacttcgtgtggtccttg

SEQ ID NO: 284081 - DNA, 51 bp, Homo sapiens
gtgggacttcatcttgtgatcgttttccaggaatatggatctactggaaca

SEQ ID NO: 284082 - DNA, 95 bp, Homo sapiens
acatagttcctggtgatattgtagaaattgctggtctgtttctgtcgactgtggaccacttatgtgcgatccgtggaccacttgcgtgcgatctg

SEQ ID NO: 284083 - DNA, 90 bp, Homo sapiens
atgcctgctaacatggataagcatgccctgaaaaagtatcgtcgagaagcctatcatcggatgtacagttacccagcacgtgtacctcct

SEQ ID NO: 284084 - DNA, 73 bp, Homo sapiens
caagatggataaaaagtcctttgaaatggtgctggatgaaattagaaaggaatccttaaacacattacttaaa

SEQ ID NO: 284085 - DNA, 75 bp, Homo sapiens
tcacaagtacagtctacaaaaagacctgctagagccattattgccccgcaaaactagatggtggaagacagcaat

SEQ ID NO: 284086 - DNA, 98 bp, Homo sapiens
agggggctgtcgcccgaatgcaggaagaccgtgatgggagctgcagcacagtcgggggtgtaggttatggggtcaaataaagtgcccgtggtgcagcc

SEQ ID NO: 284087 - DNA, 101 bp, Homo sapiens
gaagaccccggcgctggtgaacggaatgaatctgaagtctgctgcagtaaaacacagaaggctttaaaatgttttcttgcataaaattcaaaacttttaag

SEQ ID NO: 284088 - DNA, 82 bp, Homo sapiens
gccgcaggctgtgcggtgaggcgcgaggcccgaggggcggcccaggactcgaggctgaccccgcactacatctacccaccag

SEQ ID NO: 284089 - DNA, 42 bp, Homo sapiens
gaagtgaccctcctgcgcctgccaatgttttcagttgcacca

SEQ ID NO: 284090 - DNA, 100 bp, Homo sapiens
gtcaagttgccggtggaattggcccaggatgacagctggagaatggagtcaggcctgtgattggaattgaaacagtacaactgcctccaccagaggaaaa

SEQ ID NO: 284091 - DNA, 75 bp, Homo sapiens
gactgctcagggtgccagacctcatcgctttcatgagaaggacaagaagccatattgccgaaaggatttcttagc

SEQ ID NO: 284092 - DNA, 98 bp, Homo sapiens
atttataagaaccgtgaacctgtcagacaaatgaaagctctttatttcatcactccgacatcaaagagcatctgctgcacccaagcctgagccggttc

SEQ ID NO: 284093 - DNA, 75 bp, Homo sapiens
gaataggagctggggagcccttctgcgccacagggtgtcgaagtgcagacagactacgtgcccctgctgaactcg

SEQ ID NO: 284094 - DNA, 90 bp, Homo sapiens
ggcaccggaggctccgaggctcctgcgctcccgcgccgcgctcccctcgcccgcccgggccgccagcctcccgcgacgatgcccctcaac

SEQ ID NO: 284095 - DNA, 100 bp, Homo sapiens
atccagtaaaggactcctgtctaatgttattgatagtttgctccagatgacggtggaatctaaatggtagctgagtggaggttgtctcgaggtgttgaag

SEQ ID NO: 284096 - DNA, 72 bp, Homo sapiens
acactccaagtttggcatgaaaggtcctggctataagtcaccatggcacagcaagctgccgataagtatctc

SEQ ID NO: 284097 - DNA, 97 bp, Homo sapiens
aacatccccttccaggcccacagccgggagatccgagagctcttcaggttgcccccaagtttcctggcagtgtgtgatactgaggaggtgagcttgt

SEQ ID NO: 284098 - DNA, 101 bp, Homo sapiens
tcctggaaagatgtaaatctcccaagtccaaagggcagaactggggctcccttgcatcttccagttacaaattcagtgccttctgcagtttccccagagct

SEQ ID NO: 284099 - DNA, 74 bp, Homo sapiens
gagttcatgagcacatatgtcatgatgggtaaaatccagtacaaggaatatatcattgaaggatttgaaaacat

SEQ ID NO: 284100 - DNA, 85 bp, Homo sapiens
tttgcagttgttgaaattgtccccgcagttttcaatcatgtttgtgaatagcacaatggaagaagctggactttgtgggttaaga

SEQ ID NO: 284101 - DNA, 83 bp, Homo sapiens
cagagcgccgtctggagccgagatggagccctggtgggcacggcgtgcaagttcgtgtttagtaggagcacagtagctgtttg

SEQ ID NO: 284102 - DNA, 132 bp, Homo sapiens
gttgtgttgaagaggttgtttatgagtcgcaccaaccggccgcctctgtccctttcccggatgagtgatgtgcagctgatcaagactggagacaaagtgggagccagcgaagccacgctgctgaacatgctc

SEQ ID NO: 284103 - DNA, 90 bp, Homo sapiens
ggattctgttcagaaggaagccgaattttaagtcatcgttctaggatagggaggtggggaagacagggctccagctaccacaggacgggc

SEQ ID NO: 284104 - DNA, 75 bp, Homo sapiens
cactgcagaggtgctggagctggcagggttgtggtctctccatgctgcccaggtcggactcctaggctcaagcga

SEQ ID NO: 284105 - DNA, 100 bp, Homo sapiens
accatcttgactcactgcaacctccctgcctgattctcctgcctcagtctgccgagttcctgggattgcagggaactgctcgcagaaagaagaaggtggt

SEQ ID NO: 284106 - DNA, 98 bp, Homo sapiens
actaaatccgccagccagacaaagccgcctgatggagcgttggctgtgaggagacagagcatcccagaccaagatcactccatggatgaaatgacagc

SEQ ID NO: 284107 - DNA, 83 bp, Homo sapiens
ctgcggcagaagccgagttcaacatcctcctggccaccgactcctacaaggtgaaaacttttggcccgtttggaagcggcagc

SEQ ID NO: 284108 - DNA, 74 bp, Homo sapiens
gtgaggaggagcggagcggcagccagacagagtcagaagaggagagctccgaatttatccagttggcgaaggac

SEQ ID NO: 284109 - DNA, 75 bp, Homo sapiens
cggcgagtggaatcgggctgcatggctggcaaaaatttccaaagagtcagaggacttcattgtggagcaatataa

SEQ ID NO: 284110 - DNA, 75 bp, Homo sapiens
gctatggtgggcaaactaagccgattttccggaaaaagtctcgaagatatgactccaggaccactatattttctc

SEQ ID NO: 284111 - DNA, 100 bp, Homo sapiens
gcggaggggaaatggctgccgaaaacaagccggaagacgttggacctctcgaacaaccagctgagcgagatccctgcagagcttgcggactgccccaagc

SEQ ID NO: 284112 - DNA, 82 bp, Homo sapiens
ccttcgccttcgttgagttcgaggacccgcgggacagcaaaacctggcgtttccacggtaccaaacacaactcaagcatcga

SEQ ID NO: 284113 - DNA, 100 bp, Homo sapiens
aaatacctgcagactcgggccgtggccgcctacagcttttctgggagaagaggctacaaggacttagtgcatcagatgtaacagaacaaattataaaaac

SEQ ID NO: 284114 - DNA, 75 bp, Homo sapiens
tcaatcaaaccagtattcttttcacacagatgtgctcatcttttgctacgggacccagacaatacgatggaatat

SEQ ID NO: 284115 - DNA, 110 bp, Homo sapiens
aaaggctagggcgggtgcttcgagctaaaaaaggctgaccggttccctgatgtgttacctgcttctgctactgatccaaactgcagaacttctcattcatccccaaggcc

SEQ ID NO: 284116 - DNA, 96 bp, Homo sapiens
acctctctttgcagaaatacctgggcttcccttactacctgaagatcaactactcctgcgaggaaaagatccgctttatcctcatccagaaccggg

SEQ ID NO: 284117 - DNA, 100 bp, Homo sapiens
cccctaccccagtgaagaagccaaagaggagctggccaagaaatgcagcatcacagtgtcacaggttcaagggcagacggggtttttgaggaggattcgc

SEQ ID NO: 284118 - DNA, 100 bp, Homo sapiens
gcacagggaagaagaacctccatggagacggcatcgccttgtggtacacccgggaccgcctcgtgccaggtcacgcatgaagggagcaccgtggagaaga

SEQ ID NO: 284119 - DNA, 100 bp, Homo sapiens
attcgcgaagctgccaaagccttagacaaatgcccgtgctgaagcagctgggccccgcgcagcccaagaagcggcctgatcgcggcgccctgtccatctc

SEQ ID NO: 284120 - DNA, 82 bp, Homo sapiens
cacattagaatcaccatttagtgacttgaacaacctaccaagtgatgtgattgttgtgtccactgtatcctggcttgcttgt

SEQ ID NO: 284121 - DNA, 98 bp, Homo sapiens
gaaaccatggtaaactttggacggcaaggtttaaaccttgcagctactgctgctgttactgcagcagtaaaggctgacttatccttgtataatgaatt

SEQ ID NO: 284122 - DNA, 75 bp, Homo sapiens
atctgcagccatgagcagaggcgacaactgcacggatctactcgcactgggtttgaggaactactggccaaccta

SEQ ID NO: 284123 - DNA, 74 bp, Homo sapiens
tggaaactgcaatggatgttgtgatggctcatgaagcaatggaatatgatgttcaggtgcagttaaatcatgcc

SEQ ID NO: 284124 - DNA, 97 bp, Homo sapiens
gggacatgctgtttctaatgtatgggatggtgatagagagtgctcaggaatgaacagcccacctgaggatattgaccataaggactcatatctcatt

SEQ ID NO: 284125 - DNA, 100 bp, Homo sapiens
tcccatccgtgactcctggaatgcagatgtacaggtggatcatctgaatctcctgaaacagtttgaacacctggaccctcagaaccagcatacattcgag

SEQ ID NO: 284126 - DNA, 100 bp, Homo sapiens
agagagtccccagcaggaaggtctcacctgaggtgaaccttcgaccttggacttctcagcctccagaatgatggttgtccttgccatctcagtcagagca

SEQ ID NO: 284127 - DNA, 101 bp, Homo sapiens
aaggaggacttgcagaagtaccacaacagggacacctggttccagctgcagcacgtggacgctgactcggaagtgcaggcaatggtggcttgctatccggg

SEQ ID NO: 284128 - DNA, 87 bp, Homo sapiens
ctgggagcctagaatgcatcagtgcccttgtggcgaatggggctcacgtcgattttccaagagataacttcaccaagatgtccagtg

SEQ ID NO: 284129 - DNA, 100 bp, Homo sapiens
atgaggccctctgtgagctgggagaaagcggggcccgaggaggccaaggcgccagtgagaggcgatgtcctcaatggaaccataacgtttttgcctttgg

SEQ ID NO: 284130 - DNA, 100 bp, Homo sapiens
atttgttaaggattccaagtaactcttatttgcccaatggaactgaaaaatctggagtataggccagtgaaggtcagggggtgctttgaccattccaagg

SEQ ID NO: 284131 - DNA, 83 bp, Homo sapiens
ggcggagtgtaggaagaggcactgctgagggggcgcgaggggaacggaggccagagctgcgaatggaggcaacctgctgtgtg

SEQ ID NO: 284132 - DNA, 73 bp, Homo sapiens
aggaatcttctggagtactcttattttgaaaagacatgccaatatttggtttctgtccagcccatgatgattt

SEQ ID NO: 284133 - DNA, 50 bp, Homo sapiens
gcccctcaccccccgagagccggttgccagtcctgctccatccctcatgt

SEQ ID NO: 284134 - DNA, 100 bp, Homo sapiens
ctgagtggttgtgtggtcgcgtctcggaaaccggtagcgcttgcagcatggtcctgctcaatctggaattttgtcagatcgtgaagtggtaaacctcttt

SEQ ID NO: 284135 - DNA, 101 bp, Homo sapiens
gtggaggcttccaggtgaaactctatgacattgagcaacagcagataaggaacgccctggaaaacatcagcattttgaaagcgaagcagaagccgtagaat

SEQ ID NO: 284136 - DNA, 74 bp, Homo sapiens
ctgaagagggaagacacgcggaaacaggtcaactgcaacttggcctcttgatccaccaaaggatgagaaacaag

SEQ ID NO: 284137 - DNA, 83 bp, Homo sapiens
gcacgtcgtgccaatggcccgctatgaggagactatgaaccctgaagccaggcaccaagaggtaccaagataaagtctctaca

SEQ ID NO: 284138 - DNA, 112 bp, Homo sapiens
gaggagtggaatattgagaaggctgaggaactcagcaaccagctagctactcgagagtatgggattgtgctggatgcgggttcttctcacacaagtttatacatctataagt

SEQ ID NO: 284139 - DNA, 100 bp, Homo sapiens
aattcttcgtagttttttgaatggatataattgcacaggagagagttatgtatgtggctccatagagcccttcaagaaactggagtacaccaagaatgtg

SEQ ID NO: 284140 - DNA, 60 bp, Homo sapiens
ctgttcaccagcactgtctccaccctagagatggaaatcctgtatgaatgtggaagccat

SEQ ID NO: 284141 - DNA, 100 bp, Homo sapiens
agggattgctactgcacggtgaacctggaccaggaggaggttttcaggaccaaaattgtggaaaagtcactctggtttggtgcacctcgatttggaggaa

SEQ ID NO: 284142 - DNA, 75 bp, Homo sapiens
gaaatacatgaaggagacctagtggaagtggttctttcagaatcatggtgtcatggaaagggatttactttatac

SEQ ID NO: 284143 - DNA, 74 bp, Homo sapiens
aaggactgcttgattggaagtggccagaggattgaagccaaaggtttacccaaggtccagcctagcccctaggc

SEQ ID NO: 284144 - DNA, 82 bp, Homo sapiens
cgttctgcaccagcgccttgatcgagtacttgaggtcatcatcagatttgaaatatttaaagtggatacaaaactatttcag

SEQ ID NO: 284145 - DNA, 100 bp, Homo sapiens
aggaagactccctgcctcctgagtcccatgccggtggtggtgtgcacattgagccccggtatagacagttcccccagctgaccagatcccaggtgttcca

SEQ ID NO: 284146 - DNA, 100 bp, Homo sapiens
ggaaatgggctttacagatgtgggcccagaaaacaagccagtcaggacgtccagcaggagcagatccaggagcagctcatatgatccccacagtcgatcc

SEQ ID NO: 284147 - DNA, 83 bp, Homo sapiens
gagtggacattgctagcaatgagctcccaaagccatccaggaacagcgccttttgatagtcctaagtaattgctgctatctag

SEQ ID NO: 284148 - DNA, 50 bp, Homo sapiens
aagtgaattacatcaaaatcttggttaatcatgttatcagccctctgttg

SEQ ID NO: 284149 - DNA, 83 bp, Homo sapiens
gaagaaggccttgactacggaggggttgccagatagctcgtcagcatgtgcaagttccagggggtacagatagtgaatgtatt

SEQ ID NO: 284150 - DNA, 59 bp, Homo sapiens
accttgaagatgatgcccttgatgctgatgagaaagaggaaatatcattctgcaaaaga

SEQ ID NO: 284151 - DNA, 101 bp, Homo sapiens
gggggtgcctcaacttccgcgggcgtttaaatagcagcctctctcccctcccaccgtttccctgaaacctgggctcttgaagacgcatcactggagcagat

SEQ ID NO: 284152 - DNA, 100 bp, Homo sapiens
tacaagtatccccgttcgccaccaattatgggagggctggccaacttctgctacagacgactcaggttggatgtgtccagagcctgcatcagaaagggag

SEQ ID NO: 284153 - DNA, 71 bp, Homo sapiens
gacagaccgacttaagttcggattcggcttccaccgcttcttagtggaggatcccttttcccccagaaatt

SEQ ID NO: 284154 - DNA, 95 bp, Homo sapiens
acagaccgtttgtgtgcaatgccccgggctgtggacaggtatgatctcgtgaaaccttgagagaaactgaatgacgaatgaaactattgttcctg

SEQ ID NO: 284155 - DNA, 100 bp, Homo sapiens
tgaaaacatccagctcccaccggggtgtgagctgtcagtggagaagtccacagtgctgcagtctgagctggaatcctgtaaggagctgcaggagctggag

SEQ ID NO: 284156 - DNA, 75 bp, Homo sapiens
ctccgagcggccgcgagcagagccgcccagccctgccagctgcgccgggacgcccgagcgggaagaagttccgca

SEQ ID NO: 284157 - DNA, 101 bp, Homo sapiens
ggagtccctctccgcccagttacaagatattctatagagtagttgcagacattgcgccgggagaggagcttctgctgttcatgaagagcgaagactatccc

SEQ ID NO: 284158 - DNA, 100 bp, Homo sapiens
ggagcctggcggccaccccctcttcctcacttccctgtactctcatcgctctcggcctccgacacgatgatgaggagtctgatgaggaagctgtgaagaa

SEQ ID NO: 284159 - DNA, 109 bp, Homo sapiens
agagactgctgagcccgtccgtccgccgccaccacccactccggacacaggtgtggacactgccagcggctgcagccgacttggaatgacctgggagacaaatacaaca

SEQ ID NO: 284160 - DNA, 101 bp, Homo sapiens
cacttgcagcagaaattcttgctggaggctgccttgcagttccccacaatgatgaatggacccgatttgccaggacccttgtggaaattcgtgctaacaga

SEQ ID NO: 284161 - DNA, 82 bp, Homo sapiens
tgggcacagccttggaaagtcaggaccgcgacggcagcagagcagttttaaaatcaaagatgggaaaatcggagaaaattgc

SEQ ID NO: 284162 - DNA, 50 bp, Homo sapiens
ctgacctgtaaatcatcctttagaggcgtggagctatttcctatgacagt

SEQ ID NO: 284163 - DNA, 100 bp, Homo sapiens
ctcctgaggtacggcgtcgggagcactgcagcctgtggtgttgaggctcacagcgatgccatccagccctgccacatcagagaggccattcgacgctaca

SEQ ID NO: 284164 - DNA, 96 bp, Homo sapiens
cgacgccgactgaggcacgagcgggtgacgctgggcctgcagcgcggagcagaaagcagaacccgcagttgtcacaggtagtactgatggaattgg

SEQ ID NO: 284165 - DNA, 100 bp, Homo sapiens
ttcccatgtaggattctcctgtgtgagaactaccgctcccatgaagctatcatcaaggcgaccattgacgaggtggagacggacgtggtggagattgagg

SEQ ID NO: 284166 - DNA, 82 bp, Homo sapiens
gcgcggagggaagacgccctggtgctcaccaagcaagcgagtgatagacagccaagcagagaaactgaaggagcttgacaag

SEQ ID NO: 284167 - DNA, 97 bp, Homo sapiens
agtacgggaagaacttcttcagaattagaaaggagctgcttcccaataaggaaacactaagtttggtgcgaacgccattctgggggtgtcccttgcc

SEQ ID NO: 284168 - DNA, 106 bp, Homo sapiens
gatttctcaaggggaagataaaatgactaagaggaagaagctgcggacctcagatcaagagtggggagaacgcggccaacatcgccagcgagctggcccgacacac

SEQ ID NO: 284169 - DNA, 75 bp, Homo sapiens
cagaagaactggatcttaccttgcccaccaacttcagagatttgtccaaggttttttgcatgtctgacacccatg

SEQ ID NO: 284170 - DNA, 98 bp, Homo sapiens
gagcaccctggcttttctatttcgttttaactgttggcgaaaattatttgggtgacgcatccaaagaagacattgacactgctatgaaattaggagcc

SEQ ID NO: 284171 - DNA, 101 bp, Homo sapiens
agactgacttgttcacatgtggcaaatgtaaaaagaagaattgcacttacacacagattacaggtccaccaggttgtggaaaaactcagttttgtataatg

SEQ ID NO: 284172 - DNA, 81 bp, Homo sapiens
caggggctgaagagatggaggtgtccctggccaagcccaagcaccgcgtgacaatgcagatcttcgtgaagactctgactg

SEQ ID NO: 284173 - DNA, 100 bp, Homo sapiens
ttttcatccaatttgcacctacattgaaattggacatcatcctgaggattagaactaagaggacacaccagcatcggagtgtattaagcccctgaaacac

SEQ ID NO: 284174 - DNA, 102 bp, Homo sapiens
aaaatcccattttggaactttccaggagagaagatgactgaggaggaggtggagaccgttctggcaggacacgaggacagcaacggctgcatcaactacgag

SEQ ID NO: 284175 - DNA, 75 bp, Homo sapiens
ttcggaatgcactacaacaggaaaatcatattatagatggagtaaaggtggatagtgacaagggcatctcccttc

SEQ ID NO: 284176 - DNA, 50 bp, Homo sapiens
gatctggataatgtggtcaaaaagcgtgagtgcatctccatccacgttgg

SEQ ID NO: 284177 - DNA, 82 bp, Homo sapiens
gaagaaactgtccgagaagcccaaagttaaagatcgaggtccggaagccactaggagattttttaattggttttattggagc

SEQ ID NO: 284178 - DNA, 80 bp, Homo sapiens
cgttggcccaaccagtcccagcgctgtcgtgctcctctactcgcactctggcccccagaagcttctccacattgcccagg

SEQ ID NO: 284179 - DNA, 75 bp, Homo sapiens
cggagtcccaatgaaacgggcagccatggccctccacagcccgcaggatgccaagtttgtggaggaacggagaaa

SEQ ID NO: 284180 - DNA, 83 bp, Homo sapiens
gtggcagcaagtcttagcagtggacgcgaggtgagaagccctaccactgcaactgggacggctgcggctggaagtttgcgcgc

SEQ ID NO: 284181 - DNA, 75 bp, Homo sapiens
ctggtgctgtctgggcttcatagcattcgcctactccgtgaagagtcctccctgctgctgtgtggacgacacgtg

SEQ ID NO: 284182 - DNA, 102 bp, Homo sapiens
cgacccgcgaacccctctgggatccccgccgctctgtctacaacccgaggtggtacagaagttggtcctgccctttgggcgactgaactacctgcccctgga

SEQ ID NO: 284183 - DNA, 73 bp, Homo sapiens
tctcttcgcctcgcctcgggacccgcggtccccgctcttgctgttcctctgtgacgagggtgcaggtatctct

SEQ ID NO: 284184 - DNA, 75 bp, Homo sapiens
gagagctattattccctgtattaaagaagttgattcaagtcagttgagacgccagttgtgtggaggaagtcaggc

SEQ ID NO: 284185 - DNA, 104 bp, Homo sapiens
gcagcgaggggctcggagaggtgctcggattctcgtagctgtgccgggtatgtgaggagcagcgctgtgaggaggaagtcttccccctggccatgaactacctg

SEQ ID NO: 284186 - DNA, 121 bp, Homo sapiens
cggcgctagcagggctgaagagaagatggaggagctggtggtggaagtgcggggctccaatggcgctttctacaagtcactatgaacaagaccgtagtgcacttaaaaaaagggaatggga

SEQ ID NO: 284187 - DNA, 50 bp, Homo sapiens
ggaatttatggtcgcctttttgaatgagatgatccagatcctgatgatgg

SEQ ID NO: 284188 - DNA, 90 bp, Homo sapiens
cgagtgcagccactcggccctgcgccgcgacaagtacgtggccgagttcctcgagtgggtggagcgagaccgtgccctgggccaccagga

SEQ ID NO: 284189 - DNA, 75 bp, Homo sapiens
ttccgacgtgggcggtgggccccagccccacagaccagcccagcattcagtggtgctcatcggggactcaggcgt

SEQ ID NO: 284190 - DNA, 75 bp, Homo sapiens
aaacctcttacatcatgggcgacttcaggaacagccatagctctcatgcataagaattgctccatttgaggaaca

SEQ ID NO: 284191 - DNA, 49 bp, Homo sapiens
attttcttcagcctccttgtcctaggcaacagatcccctaatttgtggc

SEQ ID NO: 284192 - DNA, 82 bp, Homo sapiens
acagccgcggcggcagcagcagtgagagggagcatcgagtacagctgtccggcctccaacgagtgtgagatcaccaagcgga

SEQ ID NO: 284193 - DNA, 74 bp, Homo sapiens
cttggcaaggagtggaagacaacaaaaacaactgcattgtgtacagcaaagagatggggtctcactatgttgcc

SEQ ID NO: 284194 - DNA, 100 bp, Homo sapiens
tacgagttctaccttttgagctgggaaaactgtttcagttgcagactttaggcctgaaagatggcttgttcaatcagtatatcagtcaacaggaatataa

SEQ ID NO: 284195 - DNA, 80 bp, Homo sapiens
cgatgccacgttacatcaacacggagcatggaggcagtcagctgtcaaagctcgaaaaacagcagcagaggaaagaaaag

SEQ ID NO: 284196 - DNA, 83 bp, Homo sapiens
gcgccacagaactcatgaacattctcaataaggttgtgacacgacgcggctatgagaggttttcctccgagtacccagaattc

SEQ ID NO: 284197 - DNA, 90 bp, Homo sapiens
gctgtatctcagggacagagtctgcagcaaaaaagaggactactgagcccagccaggctgtatgccattgctgccaaagaaaaagatatt

SEQ ID NO: 284198 - DNA, 100 bp, Homo sapiens
gttggacgatatctaatattacagctggaaatagggcacagatccaggccaagcatggggatcagcacgagggtcagcactacaacatctccccccagga

SEQ ID NO: 284199 - DNA, 75 bp, Homo sapiens
gcctgctgcccgatttctatttgactggcaatagtctgggggatagtttcatagtaagttctgaattccctgtaa

SEQ ID NO: 284200 - DNA, 83 bp, Homo sapiens
cctggcgggcccggcggctctcactatccagaaatgacgaagctgggccacgagctgatgctgtgtgcgccagatgaccagga

SEQ ID NO: 284201 - DNA, 51 bp, Homo sapiens
tgatggcagcaacgtggcgatgaggttctgaagatgaaacaagaatagata

SEQ ID NO: 284202 - DNA, 98 bp, Homo sapiens
gcatctggagctaattgtgaaaaatagtgcaacctacaatgcggaaagtgaccagaagaggtgtgcagtttccaggcctggcccatacagacctccaa

SEQ ID NO: 284203 - DNA, 100 bp, Homo sapiens
agtatgttgttctcagctacttgggactcctctctcaagagaagctgcaagagcaacatctttcctcaccccaaggaaggtgggagtcaatcattttgac

SEQ ID NO: 284204 - DNA, 100 bp, Homo sapiens
aaggagaggcggcggcggcctcggctgaagaaagaaggtgggagcggagagcgcaggcgtggtgtcctgtggccaggcggaaagcagtgagaagcccaac

SEQ ID NO: 284205 - DNA, 100 bp, Homo sapiens
ccgagatgtctcgctccgtggccttagctgtgctcgcgctactctctctttctggcctggaggctatccagcaacaaattggagctctggcagatcagca

SEQ ID NO: 284206 - DNA, 75 bp, Homo sapiens
tcaagactaaaaactaaaggcctgggcctgagaactgaatcagcagggcacctgttaactggtaccaagaaaagg

SEQ ID NO: 284207 - DNA, 96 bp, Homo sapiens
ccgcgctgacaggggggcctggccgcgcagccggtctcctctgagcctccggcctccataagacccaaaacagatgacacctcttcccagtccccc

SEQ ID NO: 284208 - DNA, 98 bp, Homo sapiens
gacgcagttgcagaacagggccatctaccaccgtactcccctagcatgacaatgagcgtgtgatccattaccaagtctcctcatgaaaaccacagtga

SEQ ID NO: 284209 - DNA, 76 bp, Homo sapiens
ggggagacgctgtggtgtgactggggcaggaccatcagctcactccatcactcgatgagataatatgagatttcta

SEQ ID NO: 284210 - DNA, 98 bp, Homo sapiens
agcaatgagaggacccgcgtgggcaccctgcaggtggtcagacatgtcatcaactcagctggtttacccaaggtccagcctagcccctaggcaccatg

SEQ ID NO: 284211 - DNA, 83 bp, Homo sapiens
agcggagcctggcgggcgtgggaacccaggccccgccgaggcggccagatgcgagccacccctctggctgctcctgcgggttc

SEQ ID NO: 284212 - DNA, 101 bp, Homo sapiens
ggaggatgctggtttatatgaatgtgtagctgaaaattccagagggaaaaatgtagcaaggggacagctaactttctatgatgtcagtgaagagcttccag

SEQ ID NO: 284213 - DNA, 75 bp, Homo sapiens
cgccgccttcaagggggaccgccggccgcgagccagatttggtgcttccagatgtgagttatcaggtggaatcca

SEQ ID NO: 284214 - DNA, 82 bp, Homo sapiens
ggacgaagagctctcctccttcttcctcaactatctcgctgacacgcagtgccctctggtggtcagaagatgctgtgctgtc

SEQ ID NO: 284215 - DNA, 100 bp, Homo sapiens
gaggttcagagaggttaagagactccactgaggtcacacagccggttttgacctgtagcagagaaccaattctggagaacagcctcacttctttgattga

SEQ ID NO: 284216 - DNA, 89 bp, Homo sapiens
gatgcctttgttcaccgccaaccccttcgagcaagacgtgggttcgagaaatggctgctactaccttaagcggtctgctacagtgtaac

SEQ ID NO: 284217 - DNA, 75 bp, Homo sapiens
ctgaagagggtctggaggagccttctcaagaacagagattaaaaggagcccaagccccatctcatcctagcacac

SEQ ID NO: 284218 - DNA, 145 bp, Homo sapiens
gcctcagcggccggaggacatgcgggagagagaatgagccagagggacacgctggtgcatctgtttgccggagggacctccaggatatagtggctaccctgggccccaggtcagctacccacccccaccagccggccattcaggt

SEQ ID NO: 284219 - DNA, 75 bp, Homo sapiens
attggtgtgatcaatgcacctcaacagacgctgaccggaaaggagattgagattgacattgaacctacagacaag

SEQ ID NO: 284220 - DNA, 78 bp, Homo sapiens
acattgaggaaacctagccctgtctattcatttggtagtgagttgaaactcttggaggaagcaaccatttcagtctgc

SEQ ID NO: 284221 - DNA, 100 bp, Homo sapiens
ccaacaagctaggcacaaccaatgcgagcctgcctcttaaccgtgctgggactctggtgcccccaaccctgggcatcctcaggctttgaggagaatacac

SEQ ID NO: 284222 - DNA, 83 bp, Homo sapiens
tgtgcgcgctggcgctgagcctgcagccggccctgccgcagcccctgtcaaagggaacaggaagcagtccacggagggtgacg

SEQ ID NO: 284223 - DNA, 100 bp, Homo sapiens
catggtatatttgcagccagtactctatatgaacaatccgtctggatcacggatgtaggaagtgaggctggctatgtggctacccccatagctatggttc

SEQ ID NO: 284224 - DNA, 114 bp, Homo sapiens
accggccgtggaagcggccaccgactactgtcagcagctgtgccagctttccagagtgttgaatcttccaccagaaaacttgatcacatcaatatctgcagttccaatttccca

SEQ ID NO: 284225 - DNA, 75 bp, Homo sapiens
ggagctcaagttcttaattattcagaatgctgcggttttccaagacttcacagagaatgcagttgtcttgacttc

SEQ ID NO: 284226 - DNA, 75 bp, Homo sapiens
aaatactgaaagaaattcgagaagctgcaaatgccagcactaaccaggctgtatctggacaaggccaccttaata

SEQ ID NO: 284227 - DNA, 100 bp, Homo sapiens
gcagtggtcgcttcttctccttggacaaggagactggctttcacagaggtttgggttgggttcagttttcttcagaagaaggacttcggaatgcactaca

SEQ ID NO: 284228 - DNA, 100 bp, Homo sapiens
agggaagataaactctcttctggatgtctgaggactctgtctactagtgacgatgtcgaagacagggaaaatgaaaagggtcgccttgaagaagcctacg

SEQ ID NO: 284229 - DNA, 82 bp, Homo sapiens
ccgggtcgcgcgcggccgagtcgcggaggcgcctccgctgcagtcgctgcgtctccaagacatgcaagaaagcacttcagcc

SEQ ID NO: 284230 - DNA, 100 bp, Homo sapiens
ggaagagctgatgaagttgctgaaggccttctttcaaggcaaattgaaaatcactggcaacatgggtctcgctatgaagttacaaaatcttcagcttcag

SEQ ID NO: 284231 - DNA, 98 bp, Homo sapiens
tgggatcggcccaaggccagttctccgcagggtgtggatgaatggaacatagctcgcctcaatacagtcttggatgtggttgaagaagagtgtggcat

SEQ ID NO: 284232 - DNA, 75 bp, Homo sapiens
cactccaggaatgccagtgcatcttttgcacagctgtgtaattgaaaagtgatcctctcttcagagatgtcaaaa

SEQ ID NO: 284233 - DNA, 88 bp, Homo sapiens
gcggccgcgggcggcaggaaggagaaccaccaggtctcttttattcaaaaccttgtattttgtgtggaaagagtttaccgtgtgcctg

SEQ ID NO: 284234 - DNA, 75 bp, Homo sapiens
tggattgtctgcttcaagccctggctcaaaatataccttccactggaagaatctcaaacagcgctacttactcag

SEQ ID NO: 284235 - DNA, 75 bp, Homo sapiens
cagcaatcacaacagaatgggccgccacaaaccccatttggccctcaaacagttttctcataagattcaccttga

SEQ ID NO: 284236 - DNA, 98 bp, Homo sapiens
gaacagggcagacgttagcgtgagtgatcactctcaatcccggaactgtcagcacaacaccgcgggagagcactgtgaacgctgccaggagggctact

SEQ ID NO: 284237 - DNA, 98 bp, Homo sapiens
tgaaattttaagcgactgtgactctgctgcaagttccccagatcttgagacatatctgaagagatggattaagaatgctttggattaaggattgtgga

SEQ ID NO: 284238 - DNA, 75 bp, Homo sapiens
caatgcagcaattggagtcactacgtcaccggtgctgccttctctgatccaggttgtcctggtgacagacggctg

SEQ ID NO: 284239 - DNA, 74 bp, Homo sapiens
agtctctcaaatctcaggaatttgttgaaacggggctttgctatgatactcggatggatggaatacccatgtca

SEQ ID NO: 284240 - DNA, 75 bp, Homo sapiens
ggaatctcccaacagagaaattattattttacacaatccaaaggcaccatacaggaagattacttgagagagctg

SEQ ID NO: 284241 - DNA, 90 bp, Homo sapiens
agcccgggccctgcagaagaggcatgatgactttgaagaggtggctcaggttagaatggctgaggagcactctgaatttgttgttggttt

SEQ ID NO: 284242 - DNA, 90 bp, Homo sapiens
ctcatatcttcacttggcaaactcaacaaggccatcgaagacggcaatttggaggaaatggaagaggaagtacggcttaagaagcgaaaa

SEQ ID NO: 284243 - DNA, 100 bp, Homo sapiens
caagaacatccgagggtgcctgggaatcggtcgcctggaggaccagtatttcccatggagggaccaagaatcgccttcagccctgtctggtgcatccttg

SEQ ID NO: 284244 - DNA, 106 bp, Homo sapiens
agctcatcgggcagattagcgacatccgagtgcagaacctgcaagggtcaacatatttcactggcacctattcacaagcttgaagaagctctgtatgaataccagc

SEQ ID NO: 284245 - DNA, 98 bp, Homo sapiens
ctcgtcgccaagatggtgaagcccaagtacaaaggacggagcaccatcaacccgtccaaggccagcacaaacccagatgttttcacctcctgtgagca

SEQ ID NO: 284246 - DNA, 97 bp, Homo sapiens
tgtatcttctcagattggcttcaactgcagttggtgtagtaaacttcaaagctcttgggttgatagcttatggcagtgatagtcaagtgtatcacgc

SEQ ID NO: 284247 - DNA, 100 bp, Homo sapiens
aatgccagcactgcgggggccgcttcagccctgtatgatgagattcgtcagtttcgcaaggcctgtggggaggctcatcttaaaactatattagcgacag

SEQ ID NO: 284248 - DNA, 100 bp, Homo sapiens
cggatggcgagtcccgagcgcacctgggcgccctgctggcaagatacatccagcaggcccggaaaggtgaccaagaatatggcccaggtgaccaaagccc

SEQ ID NO: 284249 - DNA, 74 bp, Homo sapiens
ttctgacctccgcgcgacgtacccgccgccgccgttggctggagattatcccgaaggcaataattcaagtgatt

SEQ ID NO: 284250 - DNA, 75 bp, Homo sapiens
cggaaggttaagaaactgcgcctggacaaggagaacaccggaagttggagaaggccaagactaaggggctgcaga

SEQ ID NO: 284251 - DNA, 100 bp, Homo sapiens
agaaattgaacgaatgcagattgctgggaagctgacatcacagataacggaggagatgatggatcaggcaaatgataaaaaagtggctgctattgaagcc

SEQ ID NO: 284252 - DNA, 82 bp, Homo sapiens
taccccctggactccctggagaagcagatggaaaaggccactcttcacctccaccatgagcctggacatccagagcctggac

SEQ ID NO: 284253 - DNA, 100 bp, Homo sapiens
gttgtggaaaaacagtgatcgctaagaactttgccgataccttaggatacaacatagaacctattatgctctatcagcttgaagaagtcatggaaaaaga

SEQ ID NO: 284254 - DNA, 98 bp, Homo sapiens
cagagacgacccgctcctgcatgtgcacagccggctatagcctccggagtggccagcaggcctgcgagggcagtacgtccgagacacagtcgtgggca

SEQ ID NO: 284255 - DNA, 49 bp, Homo sapiens
gcctatatgaagtctttgagaaaggaagatgagaatgtgcctactgctc

SEQ ID NO: 284256 - DNA, 100 bp, Homo sapiens
aaagctcctgggcaaggggacgtctgcagctgagtctgtgtatgatgaccaaccaaatgcgcacaagaagtttatggaaaagttagatgcttgtatccgt

SEQ ID NO: 284257 - DNA, 96 bp, Homo sapiens
ctcaactctctacgctttgcctccaaggactttgagggccagagtcccaaatgcacccagggtgtgcgggaagcgttccgacagatcaaggacttg

SEQ ID NO: 284258 - DNA, 100 bp, Homo sapiens
ctcttgtcacactaattgccaacaacaatgatgcaacaaggagacgcgcctttgccctggtctctcaagcgtatacttcaatcatcgccgatgattttgc

SEQ ID NO: 284259 - DNA, 82 bp, Homo sapiens
ggaagccaggatgtaccacctttctggcaatgagagggagaaccgaagattacaggaggccagcatgaggttggaacaagag

SEQ ID NO: 284260 - DNA, 90 bp, Homo sapiens
gtttcgccggcgcgggcgccatcccggaagcgcgagcaaggccgccagatgtgcaggacctttattgggcttgaggtcacttcagggcat

SEQ ID NO: 284261 - DNA, 100 bp, Homo sapiens
cacagtgtcctctggaaaatgaaataaactatcaatcttgcccagactggagaaaggactgcagcaacaaccctgtttcagtattctggaaaacggtttc

SEQ ID NO: 284262 - DNA, 128 bp, Homo sapiens
agacatgttctctcggtttgggcggatcatcaactcgcgggtcctcgtggatcagactacagatgatgaggacagtgattaccaccaggaggcctacaaggagtcctacaaagaccggcggcggcgcg

SEQ ID NO: 284263 - DNA, 50 bp, Homo sapiens
aaagattgatgagcctctgttgcagggaactgtccaggtttattgctgcc

SEQ ID NO: 284264 - DNA, 89 bp, Homo sapiens
accagtggaagatgatcacatcccaggattttttatcaagcagaaatgcatcgaacaacgagaatcaagatcactgagctaaatcccca

SEQ ID NO: 284265 - DNA, 80 bp, Homo sapiens
ccgtcaggagaggtgaggcaggctcgagtgcacggagcgtcccttccatcaggagagtgtggacgaatgtggaacctcgc

SEQ ID NO: 284266 - DNA, 74 bp, Homo sapiens
tatggctcaaagaaagatgattatgtacgagtgcttccatatccatttacccaccattggcaatttgaaaggac

SEQ ID NO: 284267 - DNA, 75 bp, Homo sapiens
gacgtaggaagaagggcaggacctgggcggaggccgccaagacggctttcctcggagacgggtggcatggggagc

SEQ ID NO: 284268 - DNA, 100 bp, Homo sapiens
gcatcgccacagctgaaggctgcgagggactaagagcagactctctgaacaacggggcccagagctgatggcagacaatgtcagccactaacaacatagc

SEQ ID NO: 284269 - DNA, 90 bp, Homo sapiens
gagatcagagagctgttgaaactactgtcaaaacccaatgtgaagggcggaagcttcgacgtggcagacagaatgttccacagtgtgaag

SEQ ID NO: 284270 - DNA, 75 bp, Homo sapiens
acactgacctttttgtcccttactttgaagccattcagaagtctaccctgatgggagagtctgcatttccatcct

SEQ ID NO: 284271 - DNA, 100 bp, Homo sapiens
gcggccggagcgggcggctgagacaaaggcgacgtaacagtgtatcatgtatgccactgattccaggggacactcccctgctttcctccaacctcagaat

SEQ ID NO: 284272 - DNA, 108 bp, Homo sapiens
cacttagagaacccagaataccacaccagatggtatttcaaatattttttaggacaagagattatgcatgatgtgataaagaaggtcaagaagaagggggaatggaag

SEQ ID NO: 284273 - DNA, 73 bp, Homo sapiens
tagccgggaagttgattcactctaagaaggcccagagcaagagaggcatcctcaccctgaagtaccccatcga

SEQ ID NO: 284274 - DNA, 96 bp, Homo sapiens
ctgacatttcttttgtgcaagatgagcctcaagtgcttctgcattacagaaacaatgtgatgagaaccattcatggggtgggagagatgatgaccc

SEQ ID NO: 284275 - DNA, 75 bp, Homo sapiens
ggcagctctatgagggatgtgtggacactgcactgaagacagcattcgttcagtcagagagcataatagaagtac

SEQ ID NO: 284276 - DNA, 80 bp, Homo sapiens
tactttgactactggggccagggaaccctggtcaccgtctcctcagttccagaggctgggaagtccaaggtcaaggcacc

SEQ ID NO: 284277 - DNA, 98 bp, Homo sapiens
ttccctctcccaacatggcggcctcagttgattatggaagattcccacaagagtaccacgtcagagacagcacctcaacctggttcagcagttcaggg

SEQ ID NO: 284278 - DNA, 82 bp, Homo sapiens
agaagtgctgcctggtgcagaggatcctggaggcctgggaagccaacgaccacacgcagattttttatcaagcagaaatgca

SEQ ID NO: 284279 - DNA, 75 bp, Homo sapiens
tgcggatacgacccatgaaccggcgagatctcaaagacggaattagattggttccttcaagatttggaaagagaa

SEQ ID NO: 284280 - DNA, 98 bp, Homo sapiens
gcactcacagggaggaggaggcggcagcggcggaggaaggcggcgcaccccgagaggttcgatacaagaggctgttttcctagcgtggcttgctgcct

SEQ ID NO: 284281 - DNA, 131 bp, Homo sapiens
ggaaatgacaattacctgacgatcacagggccttcgcaccccttcctgtcaggggccgagctcattcttggaatcccagaacaggccttaagtcttctccacatggccatcgagcccatcttggctgacgg

SEQ ID NO: 284282 - DNA, 101 bp, Homo sapiens
actacaggaacctggtctccctgggtttgatgtgtgaataattacattgactgagaaagaaacccagaagaggaagaagaggaaggaaaaggagtcagtga

SEQ ID NO: 284283 - DNA, 88 bp, Homo sapiens
gaagatgcaaagcctgagagatggaaactactatgcatgtaaacaaatgaagcagcgctttgaaagtgcatttgcccagtataacatg

SEQ ID NO: 284284 - DNA, 100 bp, Homo sapiens
ccaaacccctttggccctgtatcaggagcacagattccacaggatgcgagcatatgcagtggaaacattgtgttattccatcctcagaagaaaagagaca

SEQ ID NO: 284285 - DNA, 82 bp, Homo sapiens
tgggcctgcccttcaccctctacatgaattaaatgtgagggagtctgacgtaagagtttgtgatgagtcatcatgtaaatat

SEQ ID NO: 284286 - DNA, 101 bp, Homo sapiens
cagcggatgattctggaactgggagaagatggctttaaagaatacacttcaacttcctctgtcatctctgtcccaggatagcaaacttgtgtatattcagc

SEQ ID NO: 284287 - DNA, 51 bp, Homo sapiens
tgagattacaggcatgtgccaccaggtatgatctcgtgaaaccttgagaga

SEQ ID NO: 284288 - DNA, 100 bp, Homo sapiens
ggcagcacccagcccagtgccaggcatacattgggcgctcggtgaccgtgctctttgctggccagaacattgaacgcagtccctttgaggtgaacgtggg

SEQ ID NO: 284289 - DNA, 75 bp, Homo sapiens
atgaacggatggatgtgatgcctgctagccaaaagggtaactataactacccaatattgcagccatggagtccat

SEQ ID NO: 284290 - DNA, 100 bp, Homo sapiens
cagaacctataattgttcgactacactgttcacttacacagtatttaaatggcccaggcctttgcccagtttgatgctgagggtgatgggacagttgatg

SEQ ID NO: 284291 - DNA, 97 bp, Homo sapiens
tccggccgcccaccaacctgcgcagcgtgtcgccctgggcctacaggtatgttaagctactgcgacagatacagcgaaggcataaaacatgtcctac

SEQ ID NO: 284292 - DNA, 118 bp, Homo sapiens
ctctggcggggtgcagaactgagcccaggccacagtaccctattcacgctctgtgcttgtgccaagtctggatgtggatagtgaagctaagaaactattgggtttaggacagaaacat

SEQ ID NO: 284293 - DNA, 50 bp, Homo sapiens
ccagccggcgcaagcgggcgaaggccctctttggattccagtacgatgca

SEQ ID NO: 284294 - DNA, 83 bp, Homo sapiens
ttggaaactctttgggaaagccactcgaaaagctgtgattgggttattatacccctgcattgacagacatctaggagaaccac

SEQ ID NO: 284295 - DNA, 99 bp, Homo sapiens
ctcctgagtagctgggatcacagatgtgtacgcctagccctggttcatgatatggcagaatgcatcgttggggacatagcaccagcagataacatcccc

SEQ ID NO: 284296 - DNA, 82 bp, Homo sapiens
cttcagggtgtccaagttccggcacaccgaggctcggccgccccgccgcgaggcatcaagcatgatggaaccatgtgtgata

SEQ ID NO: 284297 - DNA, 75 bp, Homo sapiens
cacccgctgccgggcaccgaggaccagctcaatgacagtatggactttctgtcagattttgagatgatgttgcag

SEQ ID NO: 284298 - DNA, 51 bp, Homo sapiens
tggctgggataagagaggccctgggtgaagcaagaagcatttcatttgcac

SEQ ID NO: 284299 - DNA, 98 bp, Homo sapiens
gcggcccgggcgccatcgagccttggcggcggacgtgcagctgcaagctttcttcctggtggcagatgacatcatggattcatcccttacccgccggg

SEQ ID NO: 284300 - DNA, 82 bp, Homo sapiens
aagacatctcacatatattcaaaagatcttcaggatggaggtactgaacgacacctgggtctccttcccttcctggtctgag

SEQ ID NO: 284301 - DNA, 80 bp, Homo sapiens
ctgaaggagttccaccaggccgggaagcccatcggagcccaaatcttgtgacaaaactcacacatgcccaccgtgcccag

SEQ ID NO: 284302 - DNA, 100 bp, Homo sapiens
gatcccgccgggaggtactttgctgaatggagatttacagacagtcatctgggtggaggacacccttttgggatcagcactgaaagtgacgccatatccc

SEQ ID NO: 284303 - DNA, 100 bp, Homo sapiens
tgtcaacagtggttgatgcagatgaaatcattgtcttggatcagatggcgtctcactcttgttgcccaggctggagtgcaatggtgcgatttggctcact

SEQ ID NO: 284304 - DNA, 78 bp, Homo sapiens
actatggccgggagtgtgccaatggctacctggaactgctggaccatgtactgctggctgaggcagatgtggcctccc

SEQ ID NO: 284305 - DNA, 98 bp, Homo sapiens
cgaggcggatccggtgttgcatccttggagcgagctgagagctcgagctaattgcagagacgacatgacctgtgtgaaggaagagatctttgggcctg

SEQ ID NO: 284306 - DNA, 127 bp, Homo sapiens
gctagacctacaggtggagttggagcagtagctctgctaattgggccaaatgctcctttaatttttgaacgagaaaccatactcaggaggtctttgtctccaagaaacagcccgggaaggcagcagc

SEQ ID NO: 284307 - DNA, 98 bp, Homo sapiens
ccaactccatcaagaccctggtggacaacattcagagatatgtggaaggtctgtttctgtcgactgtggaccacttatgtgcgatccgtggaccactt

SEQ ID NO: 284308 - DNA, 73 bp, Homo sapiens
aaactgggcgtctgttccggcgccggacccctatttgcaaagattctgatgctcacagtaccacctcaagtgc

SEQ ID NO: 284309 - DNA, 51 bp, Homo sapiens
gctgacgtttttagatttcatccaggtacgtcagcctgtcatatgcatcaa

SEQ ID NO: 284310 - DNA, 50 bp, Homo sapiens
aagcaggagggtgtcctgaacagcaaggcagcggaggaggaaatggcagg

SEQ ID NO: 284311 - DNA, 80 bp, Homo sapiens
catgagggccctgtgggtgctgggcctctgctgcgtcctgctgaccttcgtcttatgatgtaatcagcgcgatttcactt

SEQ ID NO: 284312 - DNA, 51 bp, Homo sapiens
cgcggcgatggggagcggcggcgccatttcgtagagtgacgttttctgttg

SEQ ID NO: 284313 - DNA, 73 bp, Homo sapiens
gcgctgaccttcatcacagacaacagcctggtggcagcgctctggattaatcgaattacagctgctagccagg

SEQ ID NO: 284314 - DNA, 87 bp, Homo sapiens
agccaccccggtcaaaggatgctgagtccggagcgcctagccctaccggactacgagtatctggaacatgacctttgacctgccatc

SEQ ID NO: 284315 - DNA, 100 bp, Homo sapiens
tcaagtgaagcaaaagccttccatgattacaccctggaagctgtcctgaatttcaaatactctggaggcccgggccacactgaaggatattacaggaatc

SEQ ID NO: 284316 - DNA, 75 bp, Homo sapiens
aacgatccagacggcagggagtgcatcaaaggtgtgaacacagccaatgaatttccctgtttgccaaagcaagtg

SEQ ID NO: 284317 - DNA, 100 bp, Homo sapiens
ccgtgacctgtacaggtcgcgggagtcgtagggaggacgccgggacacctggaagccgagaaatggtgcccctgagccgaggaacgcaggcggtggtcgt

SEQ ID NO: 284318 - DNA, 98 bp, Homo sapiens
acgagcttaagtccctcaccagcaagttcatgaccacattcagtcagctccgagggaccggcagcaatgcctgctacatggaggagatgaagaacgtg

SEQ ID NO: 284319 - DNA, 83 bp, Homo sapiens
gcaaagtgcgtgaggagtttaaggagctgaaagcgcggtttttagaacttcagccataaaaatgggcagaattttccttgatc

SEQ ID NO: 284320 - DNA, 80 bp, Homo sapiens
ccgccgcctctgcgtgggccggccgggagggcctcgggggactgactgatggacttcagcagaaatctttatgatattgg

SEQ ID NO: 284321 - DNA, 100 bp, Homo sapiens
tgaaggctgatggatttcagaaactgttggagtttatatacacaggaactttaaatcttgacagtatgtccgtggttcagaccctgtattaaagcttttg

SEQ ID NO: 284322 - DNA, 100 bp, Homo sapiens
ggagagtctacagactgctttcaaaaaattaagagtggatgcatcagggaaggagatggataaagcagatgtttattggggcattccttatcccagctat

SEQ ID NO: 284323 - DNA, 123 bp, Homo sapiens
ctgcgcatacacaatcccgggcatgggcggcaactctttgatgtactactataatgggaaagcgatatgaagagaaggctactaaagacttggaacgatacaatagtcaaatgaagagagcca

SEQ ID NO: 284324 - DNA, 95 bp, Homo sapiens
gaagtatccagcgctcattgggaatttagttaaggtggaattgagactggatctatcacagaaatgtttggagaattccgaactgggaagaccca

SEQ ID NO: 284325 - DNA, 100 bp, Homo sapiens
cgacagcggccggggcgcaggcgcccgtgcggaatggcaggcaggacaagcgtttagaaagtttcttccactctttgaccgagtattggttgaaaggagt

SEQ ID NO: 284326 - DNA, 100 bp, Homo sapiens
ctgaacagttgcactgtaaaaaacccagctgaagaccactttagaaactcaattaagcaagataacccctgtgacagaaggctactgttgctgtaacaaa

SEQ ID NO: 284327 - DNA, 100 bp, Homo sapiens
ccggcagtgaccgaggcgaactccggggccgctccggggcccgcagtttcagaacaagcttcctggaacccatgacccatgaagtcttgtcgacatttat

SEQ ID NO: 284328 - DNA, 100 bp, Homo sapiens
agtactggtttaggtactggtttgggaactggactgggatttggaggatttaatacacagcagcagcagcaaactatgaaaaggatttggtgaaacaggc

SEQ ID NO: 284329 - DNA, 83 bp, Homo sapiens
gcaggatctgcagaagacgcagggctcaaggtaaaagtacacctgtaagccagcttggttccgcagactttcccgaggccccc

SEQ ID NO: 284330 - DNA, 100 bp, Homo sapiens
aaacatcctctgggaagacacacacaatggaggatgttgacaatgcgtctctggcacgtcttgaccttgaacgcaaagtggaatctttgcaagaagagat

SEQ ID NO: 284331 - DNA, 104 bp, Homo sapiens
ctggcggcgacggccacaggggcggcgacggcgcagtgcgaagcgaaacagttccatcaccgggacagcttcaacacagggtccacagcgtggggcatttccca

SEQ ID NO: 284332 - DNA, 100 bp, Homo sapiens
aaagatcagcattttgatcaaaatctcaacttcatgtacatagaagttgataaagtaacagagagggctaagcttctatcaccatcagagaaagaaatac

SEQ ID NO: 284333 - DNA, 75 bp, Homo sapiens
gtggtgcagctcaatcctttcccttcagtctgcgctcctcagaccaccggcaggtgaacagcctgatgcagaccg

SEQ ID NO: 284334 - DNA, 75 bp, Homo sapiens
cagtgttctgctttcatggagttcacagaagagtcgaggaggtaagatctcagagactacagcccggacctactc

SEQ ID NO: 284335 - DNA, 74 bp, Homo sapiens
ctctgcagccacatactatccgtttgttcaggaaccaccagtgacagaggccgggaagaagatccacatgaagg

SEQ ID NO: 284336 - DNA, 50 bp, Homo sapiens
ggggccaaggcttcctccggggtaaatgaaattgcctttataaataccct

SEQ ID NO: 284337 - DNA, 90 bp, Homo sapiens
actcacttcttactggatcctatgcccagaaatatggaaagaccggaaactaatttcttctgattattacatctggaattctaaagcccc

SEQ ID NO: 284338 - DNA, 83 bp, Homo sapiens
gtcttataaagacagcactctgatcatgcagttacttagggacaatctcactggtttggaaatcccttgtctccaggttgctg

SEQ ID NO: 284339 - DNA, 75 bp, Homo sapiens
ggccatcatcagcacctggcataaggccattgctcagggcatccaggagctggccctggccaacgtcaacattgg

SEQ ID NO: 284340 - DNA, 113 bp, Homo sapiens
aatatctgtcttcggtggactccttcggcagtccacccaccgccgccgcctcccaggaccaagaatcgccttcagccctgtctggtgcatccttggcagaaagtgaggaggaa

SEQ ID NO: 284341 - DNA, 82 bp, Homo sapiens
aaaggagaccctggccacccaggaacccacagataaccaagtcagacttcgtaagagaaagaagctccaccatgaggcgagg

SEQ ID NO: 284342 - DNA, 100 bp, Homo sapiens
tcagatccgtgaggtggagcagagccgacaggaggtggttcggtctgtcttagagccgttgccgagagatggatgagcagattagactgatggaccagaa

SEQ ID NO: 284343 - DNA, 90 bp, Homo sapiens
ggacaatgaaggccaaacagctctacattatggaatgtcgttgtctgctgggtcttcccctcttcattcccccaagattactccacatac

SEQ ID NO: 284344 - DNA, 101 bp, Homo sapiens
tgacttggttacagtcaaaaccccagcgtttgcagaatctgtcacagagggagatgtcaggtgggagaaagcaaagtggaagatgctttctacaaaggtga

SEQ ID NO: 284345 - DNA, 75 bp, Homo sapiens
cagggaactggatgtcagcaagaatgtagtttatgccaacgtgacttcattcatacagatgaaccaaggatcggg

SEQ ID NO: 284346 - DNA, 49 bp, Homo sapiens
agacattggtcgctggctcccggtggtgatctttgtgaagtctgtgcag

SEQ ID NO: 284347 - DNA, 96 bp, Homo sapiens
agaaactggaccaccatcctgaatggtttaacgtgtacaacaaggtgcccctgggcgctgggattgctctagcctgtaagtataatggaaaagatg

SEQ ID NO: 284348 - DNA, 51 bp, Homo sapiens
cccgagtgcagtttcgatggaaaatgaaggcctttgaagacctcagcaaac

SEQ ID NO: 284349 - DNA, 100 bp, Homo sapiens
cgagcatccaaacgtgggacggggtgctgcaaggggagcggctgctcaccatgtcctgcagtgacaagattgcacggtggcctgtgagaagaccgtgtct

SEQ ID NO: 284350 - DNA, 91 bp, Homo sapiens
tcggtgattgaggacaagaccatcgagctcatggctgttcacggaagaccaggatgtagatgagggacttgtctatgacactgtattcaag

SEQ ID NO: 284351 - DNA, 75 bp, Homo sapiens
ttggagtccggacatctgaaacttggtctctgcaatgaaatgtggcctcttgccaatctccccggaggcgctttc

SEQ ID NO: 284352 - DNA, 75 bp, Homo sapiens
aagtgaaatttgatccacccttaagaaaggagacagaaccacatcatgaacttaaatcttttgatgcacatccca

SEQ ID NO: 284353 - DNA, 100 bp, Homo sapiens
caagtacgcacagtaccaggcctcatccttccaggagtctctgcaggaacagcccccaagcctgtgtcggtggcctgcacccagctggcattttctggcc

SEQ ID NO: 284354 - DNA, 110 bp, Homo sapiens
ttgcacactgaggtgtccagttgcagcccatggagatccagttcaattatgaatctcaggaacaccaccttctgtcaggctcatgtttcagtcgtttggcagctagagga

SEQ ID NO: 284355 - DNA, 114 bp, Homo sapiens
ctggctagaagcagagacaccaggacagaaaagacagtgttctgctttcatggagttcacagaagagtcgaggaggtgcaaggatggcttgaaaggatttacattttctgcact

SEQ ID NO: 284356 - DNA, 90 bp, Homo sapiens
gccagcgttacagtaatgttccaggcctcctcgaaagatgttgtcagacagctgtgtcaagaaagcttttccagttcagcccttggcttg

SEQ ID NO: 284357 - DNA, 74 bp, Homo sapiens
ccaccagtgccctggatgcaaacagccagttacagcacgagggccgggaggaggatcagcggttgatcaacttg

SEQ ID NO: 284358 - DNA, 122 bp, Homo sapiens
cacggagaaccagtaccggctgacctcgctgtacgccgagcacccaggcgactgcctcatcttcaaggttcaaaccttgtactactcagctgatcacaagctgcttgatgggaacctactag

SEQ ID NO: 284359 - DNA, 100 bp, Homo sapiens
aagaagcacctggatgagacatttgctacagcatcccacattaagtcaacgatccagctccaggtcccacaggggctcttcttccccacgaaaaagatct

SEQ ID NO: 284360 - DNA, 83 bp, Homo sapiens
ggagaaccaccgcatcaagagcttcaagaacaagggccgcgatgtggaagtgatggcatcagctgagaagggaaggaagccca

SEQ ID NO: 284361 - DNA, 76 bp, Homo sapiens
gggggcctgaggcctggctgctgctgctgctactgctggcatcatttacaggaggctgtaggagtgcaattggaac

SEQ ID NO: 284362 - DNA, 128 bp, Homo sapiens
aaagatgatgagaaataaggacaaaagccaagaggaggacagttcgctacacagcaatgcatcgagggtggttctcttcccaaagtggaagccaaattcatcaattatgtgaagaattgcttccggat

SEQ ID NO: 284363 - DNA, 83 bp, Homo sapiens
gatccagcctgcggagcctgtggggcaggtccagctgggagctccccgacctccaggagggcaagatccaagccatcagcgac

SEQ ID NO: 284364 - DNA, 98 bp, Homo sapiens
atgacattgttcgatacagggtgtatgagagttaaacatgaagtttctggagagacagtggtatttcaagggggagctcttggcaaaacaccagatgg

SEQ ID NO: 284365 - DNA, 83 bp, Homo sapiens
cctccccgccgtgcagatcatcaagctgctgctcgtcttctatgtcaagaaggcaccgtccacattttccaaattgaagatgg

SEQ ID NO: 284366 - DNA, 95 bp, Homo sapiens
tcccagggcggacagcagcctcgggtgcaatcctggagccccccagtgaggacatatgaagatccatgagaaggaccctaacagtgccacagcca

SEQ ID NO: 284367 - DNA, 50 bp, Homo sapiens
cagcagtctaacatctgggtgaatatggataaaatctacgtggttgactt

SEQ ID NO: 284368 - DNA, 74 bp, Homo sapiens
tcctggtcatacaccagtactaccaaggacagcttttttcctgcaagatctgcttgacatttacctggaaggat

SEQ ID NO: 284369 - DNA, 83 bp, Homo sapiens
gaggtagaagtggtggagatggtaaactttcctgagaatggctttctctctcctgataaactgtctttgctggaaaaactcct

SEQ ID NO: 284370 - DNA, 80 bp, Homo sapiens
tctccggccgaagagcggcggcggcagcggcggtttgatctgtggatgaaatgaatcatgattttcaagctcttgcatta

SEQ ID NO: 284371 - DNA, 97 bp, Homo sapiens
ggcggaggctgctcctggtcttgtcaggtgctggagaatctggtaaaagcaccattgtgaagcagatgaggatcctgcatgttaatgggtttaatgg

SEQ ID NO: 284372 - DNA, 90 bp, Homo sapiens
ctggggagcgcctcgtcgacatgagtgatgtggaggaaaacaacttcgagggcagatctagagcatgtttggaaaggattcaagaattag

SEQ ID NO: 284373 - DNA, 50 bp, Homo sapiens
caggaaattgctgactctgtaaaggagaaattgacacaagattctctttt

SEQ ID NO: 284374 - DNA, 50 bp, Homo sapiens
gtactccaaagttgttcaggaacggttaggaattttagacccagttctgc

SEQ ID NO: 284375 - DNA, 98 bp, Homo sapiens
aggactttgggtctgggtgagccttctcgtggcggcggggaccgtccagcccagcgattctcagtcaggtttcccaacagtgatgtcacaagattgac

SEQ ID NO: 284376 - DNA, 74 bp, Homo sapiens
ctcacgttcatcatggtgcctggctgccaggcagtcttaggaaaagtcctcagtgctgtgggcagtgcccagct

SEQ ID NO: 284377 - DNA, 100 bp, Homo sapiens
gccgcctccttgacagtcttcggcaggaagacaggaactttgatagagccttttcttacatatgccgtgatggcaccactcgtcgctggatctgtcactg

SEQ ID NO: 284378 - DNA, 100 bp, Homo sapiens
agtgaataaaagaatcttcaccaccacacacaccccagggtgtgtttttcttgaagtagatgaaaaacatggagattaagtagcttgcccaagatcaccc

SEQ ID NO: 284379 - DNA, 98 bp, Homo sapiens
gactccggcgggggatgcgcgcccggcccctcagcgcccccagcacgccgccgagtcccgctcgccatgggtcagaatgaaggaacgatttccgtagt

SEQ ID NO: 284380 - DNA, 98 bp, Homo sapiens
aagaggaggagtgcgcgtgttgggggcccccggagagccatatcagcgggaacaagattggctgggagaagacgggaagccactcagagcctcaggca

SEQ ID NO: 284381 - DNA, 75 bp, Homo sapiens
gaaagaagacaagagagaacgcaaacagtttgaagctgaggattttccagagactgctgctactttgaaacgtac

SEQ ID NO: 284382 - DNA, 90 bp, Homo sapiens
cggagctgcagtcggcactgctactgcgaagacagctggcaggtggaatgaatcttacttgttgaatatcttctggttactagttggatt

SEQ ID NO: 284383 - DNA, 98 bp, Homo sapiens
acctgtgcgggatggaacaaaagatcgacgtaattaacacattccagacgggagcctcttttaagggagtcctaaggcgacagaacatgggtcaacac

SEQ ID NO: 284384 - DNA, 100 bp, Homo sapiens
aattctgcccagctggttgtagagacgtagcaggagacatttctgggaatatggtagatggatatagagatgcagatccagttcctaatggtttgcgagc

SEQ ID NO: 284385 - DNA, 100 bp, Homo sapiens
attcttccactgatatctcaaaaggtgatctggacaaaggaacaggtatctcaggaagatgatccctatgatcttgaagatgtttctgcacagaaatgag

SEQ ID NO: 284386 - DNA, 100 bp, Homo sapiens
ctatgatgacctccactgcattgatataagtgcccaccagctgacctctcctccttctcagtcagagtctctgctggccatgtttgatccactgtcttca

SEQ ID NO: 284387 - DNA, 82 bp, Homo sapiens
ttttgcattggatattcgcatgcctggggttacacctaaacaggtcgttccaggggtagaggaggcatgaaggatgaccgtc

SEQ ID NO: 284388 - DNA, 101 bp, Homo sapiens
gctcgcggtgttcatctccgacatccggaactgatcacccagtatactccataccagcctgaggtgtctcaggggaggctggagagtttactcaactacca

SEQ ID NO: 284389 - DNA, 90 bp, Homo sapiens
agacaatgccggtggaggaatttgtggctggctggatctctgccagagtcctggtggaggacgatgagatcatgcagggattcatcaggg

SEQ ID NO: 284390 - DNA, 100 bp, Homo sapiens
tccgcgcgcgctcttccttctgctcctgatcctcgcctgccccgagccgcgggcttcccaggcctccggtgtggctgtctctgatggtgtcatcaaggtg

SEQ ID NO: 284391 - DNA, 75 bp, Homo sapiens
ctgaccgctgccgcccagcacgtccaggttcttgggtgtctctggggagtccctgggccagaccttcctccagac

SEQ ID NO: 284392 - DNA, 113 bp, Homo sapiens
ggcggcggcggagactgcgggcccgtagctgggctctgcgagagtcttgctttgtcgcccaggttggagtgcagtggcacgatctcggctcagtgcaacctccgcctcctgag

SEQ ID NO: 284393 - DNA, 51 bp, Homo sapiens
ctgctgagcttggcctcggcgtcctcggtgcacgcctattacctgagaagc

SEQ ID NO: 284394 - DNA, 75 bp, Homo sapiens
aaaaatgcttgtctacaaacatcttcccttgcggcctggttgcagtatgcctgaaatttgggatgtagaagatcc

SEQ ID NO: 284395 - DNA, 100 bp, Homo sapiens
cgcgactcgagggtgacgctcgctccgctcgtcccgctcgtcatggcctacccgggatacggaggaggggtgggcagtgtcaaaccgggaaatgcttata

SEQ ID NO: 284396 - DNA, 50 bp, Homo sapiens
cggcggcgcccgcagccagcaagggtccaccaggaccaccagggccacag

SEQ ID NO: 284397 - DNA, 101 bp, Homo sapiens
tgagtagtcactgccccacccctgcctggagcctcacacatgactcgcctcctctcagtgaccacaggcaagcgcctccaaggtttgtcttgaagcatagc

SEQ ID NO: 284398 - DNA, 75 bp, Homo sapiens
tgtgggtctggactgatctccatgtcctgttgtggggcttttacagcctttggacaaatttacatgtattggaga

SEQ ID NO: 284399 - DNA, 90 bp, Homo sapiens
gttgaaggctcggcctgctcaggaatacaggagtttccagaaaatataaaaaattgtaaagttttgacaattgtggaggccagtgtaaac

SEQ ID NO: 284400 - DNA, 100 bp, Homo sapiens
aagcaacaacctctcctcttcgtctccgccatcagctcggcagtcgcgaagcagcaaccatggctactgcagcactggggtgtcagttgttggtccgacc

SEQ ID NO: 284401 - DNA, 74 bp, Homo sapiens
acatgccattcttgaggtggcaggtggtcagctgcgaatcaaaccggactcatctgatgatgtgagaagagttc

SEQ ID NO: 284402 - DNA, 75 bp, Homo sapiens
gcgtacctatgccagcacagagcaggagcaggatgcagaggagaacgggatcatggcccaagttgcaatgtccac

SEQ ID NO: 284403 - DNA, 100 bp, Homo sapiens
tcggtgcaccgtccgggattttatccaccggcactgccaagatcagagcttacaagaccctatgaaaaaattagttgagaaagaagagaagaagaaaatc

SEQ ID NO: 284404 - DNA, 50 bp, Homo sapiens
tgaacaagacaacttatttgatgtcggccctcctccacgctgacttccgg

SEQ ID NO: 284405 - DNA, 100 bp, Homo sapiens
tgaagatggagagggaccacctcaggaaggaggtggaggggctgcggagacagagccctccggccagcggggagatcctaagtgtgaacgtgaagtcccc

SEQ ID NO: 284406 - DNA, 100 bp, Homo sapiens
caggagatcatgtgcatcaaaggatgtagatgatcccctcttggatatgaagactccagtcctctttgtcattggtcagaattcccttcaatgtcaccct

SEQ ID NO: 284407 - DNA, 98 bp, Homo sapiens
ggggtggctctgccacctttgtgctcaacgggaccttggccagttacccgtcagatcactgccaattccactgatcctgtgaaggctgcccaatttga

SEQ ID NO: 284408 - DNA, 98 bp, Homo sapiens
agtgccgcgcgccaagatccattcgttgccgccggaggggaagcttgggatcatgctggaaggcgacaccatcaccctgaaaccccggccttcagctg

SEQ ID NO: 284409 - DNA, 74 bp, Homo sapiens
tgtaatttggctttattgcttcctactgttaccaaagagtcatccgtccttggctcaggatttggagagcttgc

SEQ ID NO: 284410 - DNA, 80 bp, Homo sapiens
cggccgcaccttcccgccttctcaggcaagtgaaccggagcaaacgacttccgatccagtctgcgctgttgcggctcccg

SEQ ID NO: 284411 - DNA, 80 bp, Homo sapiens
acttaaatgaagccactgattagcaatttaaagatcctctccaagcaaattgtggctactaatttgccccctgaagatca

SEQ ID NO: 284412 - DNA, 101 bp, Homo sapiens
cccggtggtgcagctgggcctgaccaacccgaaaacattgctagtgtcacgggcatccagacgggatccagtgcatcctcttttagaagaaaggcctgtct

SEQ ID NO: 284413 - DNA, 83 bp, Homo sapiens
agagcggagggagccccagacacgtgccctgtgggacatcgagaccggccagcagacgaccacgtttaccggacacactggag

SEQ ID NO: 284414 - DNA, 100 bp, Homo sapiens
cacctggagtgccttggattgactgagatgccaagaggaaaatttatctgcaatgaatgtcgcacagacgtgcagttcctggcctcggtgctgcccccag

SEQ ID NO: 284415 - DNA, 98 bp, Homo sapiens
ctgactggtaagaccatcaccctcgaggtggagctgaagaagggagccactctcaaaatcacgctggataacgcctacatggaaaagtgtgacgagaa

SEQ ID NO: 284416 - DNA, 75 bp, Homo sapiens
gtcctgcagggtacccacctgagccccagcaaaccagtccagctacgggggcccagccagccagcagctgagtgg

SEQ ID NO: 284417 - DNA, 98 bp, Homo sapiens
cccaaatcgtggccccttcgacctgcgctccgcgctctggcgctacggtctggccgtcggctgcggcgccatcgataatagttggagaaactgctgtc

SEQ ID NO: 284418 - DNA, 98 bp, Homo sapiens
tcgcacttggagggtctcgccgccagtggaaggagccaccgcccccgcccgaccatggccgagggtgcagtagacattgttgcaatcatgatcggcaa

SEQ ID NO: 284419 - DNA, 100 bp, Homo sapiens
cacagctaagacgccgggactccctggaaacctagaaatgtatttaggtcagttaacgtccataccaggatacctgaatccctccagtaggactgaaatc

SEQ ID NO: 284420 - DNA, 96 bp, Homo sapiens
aaacagggaaacagtgctgcaggcatacagtgacaacaggacatcaggaaatgcccaagaagttatgaggagtcaaatcctaaggatccagcggca

SEQ ID NO: 284421 - DNA, 97 bp, Homo sapiens
ccactccctgccgaagcccagcccctgatgtcccagcaggactccctggaggaaaagcggaagcggcagcggtctgaacgcctggaacggattttcc

SEQ ID NO: 284422 - DNA, 100 bp, Homo sapiens
cccagcaccatctgaggcagtactgtctgctagaaataactgtgagcacacagacactaatatctggagctgtggtagaacaacttgatttcctacgaat

SEQ ID NO: 284423 - DNA, 50 bp, Homo sapiens
accttggagcccagagccacgtcaaatccctggctatcttcttcagtgac

SEQ ID NO: 284424 - DNA, 98 bp, Homo sapiens
ggaactgccaccattgctgaacggagaggtagccatgatgccccacttggtgaatggagatgcagctcagcaggtaatgaatttgggcatcctgaatg

SEQ ID NO: 284425 - DNA, 88 bp, Homo sapiens
ctgtcccatcgcaaacccaaagatccccgttcctggagattctgattgaggcagaactcaaccttggtgtgttatctgaccaacttcc

SEQ ID NO: 284426 - DNA, 102 bp, Homo sapiens
tacgatgagaactggttctacacgcgagctgggacacttgacattcagggacgtggccatagaattctctcaggaggagtggaaatgcctggaccctgtgca

SEQ ID NO: 284427 - DNA, 100 bp, Homo sapiens
gccgactgctgcctggtctgcaaagaagtcctttcaagtctctaggactggactcttcctaagcaagtccggacttcctccgtcaggcagctggcaggac

SEQ ID NO: 284428 - DNA, 101 bp, Homo sapiens
gatggaagtgatgtaccatcatgggtagcctttgataaacagggcacagtcagtggtgtgctgctagttacaccaaataatataatgtttgatccacataa

SEQ ID NO: 284429 - DNA, 75 bp, Homo sapiens
ttcctgcttatgtggtgcagttctactaatagtatagccggagaattttcatccttgggccttctcatcatgtgc

SEQ ID NO: 284430 - DNA, 100 bp, Homo sapiens
aaaccggcttgttgtcttcaattaaaaaatttattaaaggaagcacacctaaggtactggctcctgtatcacccagctctggagttgaaagagctcttca

SEQ ID NO: 284431 - DNA, 75 bp, Homo sapiens
ctgcctggacccctactattgcaacaaggcacggatgggcagaagcctttgcaggtatcagaagttcacatatca

SEQ ID NO: 284432 - DNA, 51 bp, Homo sapiens
gacggtcactcagcctatggagctgaagtgagtagtgaatatagtatggac

SEQ ID NO: 284433 - DNA, 90 bp, Homo sapiens
ctccagcccagcctcgctagctccgcctgcggtacgtgctcccgcctccgactcaaatcgaccttcagaagatgcccttggggaagctga

SEQ ID NO: 284434 - DNA, 50 bp, Homo sapiens
ggcgccgctgcccctccacggagccatcatcgtctacagactgccgtgga

SEQ ID NO: 284435 - DNA, 75 bp, Homo sapiens
ggaggccaggtttactggagtaggtgttagtaaggaacgtcaaggtcgtgggaaataaaaggcagttctacacag

SEQ ID NO: 284436 - DNA, 82 bp, Homo sapiens
cgcagctgcagccgcctgaccacggcgactggacttacgaggagcagtttaagcagtgcgccttcctgttgttctgcatggc

SEQ ID NO: 284437 - DNA, 100 bp, Homo sapiens
cgaagcacgctactacctggtgcagggcctgattgaggactgccagctggcgctgcaggcaagataacccctgtgacagaaggctactgttgctgtaaca

SEQ ID NO: 284438 - DNA, 97 bp, Homo sapiens
cgaataccaagctcggatccctgaatttgatccagacgctagtgtgagcccccatggcagatacgaccccgaacggcccccaaggggcgggcgctgt

SEQ ID NO: 284439 - DNA, 82 bp, Homo sapiens
caagtttgcagatcgggagcgcaaggtcgccctcaaggccatgatcaaaacccaaaacagagtggagtacgagaaaagggtc

SEQ ID NO: 284440 - DNA, 76 bp, Homo sapiens
gccaagtccagatatatggagctctacacgtatcctcctgcctagcgcagatgccagaccagtttgaccaggcggt

SEQ ID NO: 284441 - DNA, 75 bp, Homo sapiens
aggctgacctggcctatcagcttcaggtctcctcatttaccacatcccccaggttgaaccacgggaccttgactt

SEQ ID NO: 284442 - DNA, 83 bp, Homo sapiens
caggaacctggcactgtttgagacttcccagactcccggccagccatcgaggacctcaagtactgcctggagaggacggacca

SEQ ID NO: 284443 - DNA, 75 bp, Homo sapiens
ggtcaaagaaactcctggttgagctcaaagttattttacattgacttcgggatatgggaacgtggagacaagacc

SEQ ID NO: 284444 - DNA, 75 bp, Homo sapiens
ttaaaacctccgtgtctctggctgtctctaggctaagcagaacaattgtggcaattaataaagacccagaagctc

SEQ ID NO: 284445 - DNA, 75 bp, Homo sapiens
ttatctcgtagaactcctaaaaggcatggattacatttatctcagaggggtacaactcacgaatcccttctacag

SEQ ID NO: 284446 - DNA, 98 bp, Homo sapiens
gggcagcagccagcagccactgcacctacaagattcttctaacagagaaaatgccattgaggatgaagaggaggaggaggaggaagatgatgatgagg

SEQ ID NO: 284447 - DNA, 75 bp, Homo sapiens
ggagtgagaagcaagaaggccctggacacagcaatatctctgggctttcacagatctcggcccctttccaaacac

SEQ ID NO: 284448 - DNA, 100 bp, Homo sapiens
aatcattctgtcattccagaaatatttgtcaggcgcccctggtgtgtcagatactagagtaaaaggatggtttcttctggacaattatatacccacattt

SEQ ID NO: 284449 - DNA, 90 bp, Homo sapiens
atgcgcgcaaccgcgggagcagccaagtggactggactcttttcttgacttagctaccaggtgatcccattaagatactaatgccatcac

SEQ ID NO: 284450 - DNA, 100 bp, Homo sapiens
ggggctgacatcagcggctctttgtatgatgacgtgtccctggccagtgtccttccacctgtccacaagcatggggaacatcttcgccaacctcttcaag

SEQ ID NO: 284451 - DNA, 82 bp, Homo sapiens
cttgcatgtatttggaacaaaaaaaggagatgcctggcagccccgctctctgcagaacttggctgtgttgtcctgcctcaga

SEQ ID NO: 284452 - DNA, 98 bp, Homo sapiens
ccgggctgccccgcaggatcatcaaggtcgcaatggaagaagagatcgccgcgctggtcattgacaatggctccggcatgtgcaaagctggttttgct

SEQ ID NO: 284453 - DNA, 50 bp, Homo sapiens
cttagagatgtacctttctcagatgttcgaagaagaacaatttatgaata

SEQ ID NO: 284454 - DNA, 83 bp, Homo sapiens
ccggttcttggtgggatctgagcagtgcggcatcgtcctgggggcgctgctcttggtcttctgctcatggatgacgcaccagt

SEQ ID NO: 284455 - DNA, 100 bp, Homo sapiens
cccaagccgcggccatggacctggcggatccggcctgccctggcccagctcaacacctgatttcgtgtggccgcaggacgagtacatcgtggagtactca

SEQ ID NO: 284456 - DNA, 87 bp, Homo sapiens
attggagaaagggaaagagccctggaagattttgagggatgagacaagaggaccttgcccaggcccctggatcctcctggaatcccc

SEQ ID NO: 284457 - DNA, 100 bp, Homo sapiens
tgcatccccctcccctggcagtgtgacggctgggcgacttgcgaggatgagagcgacgaagccaactgtccagataaacctctacttgaaaatggagaaa

SEQ ID NO: 284458 - DNA, 102 bp, Homo sapiens
gaattgtgaaatacttccacctcttttagactggaaacaacgtggaggtagatgagtctttgttccaagaaatggatgacttggagctggaggatgatgaag

SEQ ID NO: 284459 - DNA, 75 bp, Homo sapiens
aagcagatgctgcattattttcagaactccacagaaaacttcattcacagagatcctgaaggagctagacgagtg

SEQ ID NO: 284460 - DNA, 99 bp, Homo sapiens
tggtgaccctcaccagaggacagcttcatgctcttggacttcccagcctcaagaactattgtgaagtttgcccgagggccacgtgccaaggtctctcca

SEQ ID NO: 284461 - DNA, 98 bp, Homo sapiens
ttattctggccaacagtgttaagtataatggctcattggtgggcagtattacttatgggaattgctctgatcatgctaatggctggatttattaagat

SEQ ID NO: 284462 - DNA, 100 bp, Homo sapiens
taatgaacctacctcaaagtgcagctacaccagcactctccaatcctcacctcactgctgtgctccagaacaagagtgcacaagggaagaagatgccaag

SEQ ID NO: 284463 - DNA, 96 bp, Homo sapiens
gatgattcgtatctaagactctgggacactcctgaagtcgggaaatggtcctcagaatggttggaatgaccctccagctttgaacagagtacccaa

SEQ ID NO: 284464 - DNA, 100 bp, Homo sapiens
gtgaccgagaccgcggccgggaccgagggtagacgttacatccaagaggaaataatccaggcaaggaagcacaagctgatcaagatgtgtagttctgtgg

SEQ ID NO: 284465 - DNA, 100 bp, Homo sapiens
ctcgaccaggggcgacggcgtactttgggcttcatcatggaggactacctgcagggttgtcgagctgctctgcagaacacgacttaaaagtggcttcaga

SEQ ID NO: 284466 - DNA, 100 bp, Homo sapiens
gccattgtgtaccacggcagccagatcagcaggcagatgatccagcagtatgaaatggtgtacagagacgcccaggaatacaaacagaagcttgcacgag

SEQ ID NO: 284467 - DNA, 75 bp, Homo sapiens
ctctaggcaagagaaaaccttcgaacttttatttggctaattttttaggaaagctacttgggaggctgaggcagg

SEQ ID NO: 284468 - DNA, 97 bp, Homo sapiens
ggatgaacaacctgctgatgagggaggtgcccctgcgttgtaccatccgcctgtgggacacctaccaggtcttctttgatgtgaggattggagacaa

SEQ ID NO: 284469 - DNA, 98 bp, Homo sapiens
atggccagctttcccccgagggtcaacgagaaagagatcggagatggaacccttaggttggatccacactcagcccaatgagtccccgcagttatcac

SEQ ID NO: 284470 - DNA, 100 bp, Homo sapiens
atctccagagcctttgccaccatgggggagaccgtaatgagcgtcaaaattatccgaaaccgcctcactggccttcaccagcacaggctttgaccgtcac

SEQ ID NO: 284471 - DNA, 82 bp, Homo sapiens
tgcacacctggatccaggataacggaggctgggttcaagaagacgtggaagctgcgggctctgaaggaaggcaagacaagca

SEQ ID NO: 284472 - DNA, 100 bp, Homo sapiens
gtgaaattctggttcttgaagaattacttgtcccccacatttaagagatgcccgagtggtaaaagacatggcaacaggaaagtctaagggatatggcttt

SEQ ID NO: 284473 - DNA, 101 bp, Homo sapiens
agaagaggcagcatgcggaaggcattgctgggagcctgaaaactgtgaatgatattgatgaatgtgtaaacaacactgtttgtgacagtcacgggttttgt

SEQ ID NO: 284474 - DNA, 117 bp, Homo sapiens
cggtttgtcgccagaaggaagatggcggatctggaggagcagttgtctgatgaagagaagttcctcagcactttgtttgcccccttaaactttgtcatggagaaagtggagagcatc

SEQ ID NO: 284475 - DNA, 50 bp, Homo sapiens
cacctatggacaagtctataagagccagaggccaagaagagtaagacggc

SEQ ID NO: 284476 - DNA, 75 bp, Homo sapiens
acccactcgagaattggctcagcagcatggtgagcagtggagcgaaaatgcctgcaccacgtgtatatgtgaccg

SEQ ID NO: 284477 - DNA, 50 bp, Homo sapiens
aaccaccaaaaagtgtcccttctcagctcttccaccaaagccacctaagc

SEQ ID NO: 284478 - DNA, 83 bp, Homo sapiens
ggatgaacactatgattaccaccaggagattgcaaggctttcatgagaaggacaagaagccatattgccgaaaggatttctta

SEQ ID NO: 284479 - DNA, 100 bp, Homo sapiens
agcagttgctgttcgaaagcatcttgagaggaacagaaagggaagacaaaggcgctttggctaagctggtggaagctatcaggaccaattacaatgacag

SEQ ID NO: 284480 - DNA, 74 bp, Homo sapiens
gctctttgccgtgacaacaccgttcccccagccgggctgctagcagctgtggatactccgaacagaccagtgag

SEQ ID NO: 284481 - DNA, 100 bp, Homo sapiens
gccaaatatgaatttttatttggcagatctgaagggaaagctccagatactactgttcgggggtcttgtctggattttggttgcctcctccaatgttcct

SEQ ID NO: 284482 - DNA, 100 bp, Homo sapiens
caaacaggtcattgtgagagaattctcacaggcttatcactgaagctgcgccaggacatcctgctcatgaagccgtacttcatcacctgcagggaggcca

SEQ ID NO: 284483 - DNA, 121 bp, Homo sapiens
cagaactactggaaactgaatgcatttagcatattttgaaactgaagtcattcattagattgttcctcatgtggttaatttggttcattctttcaaaaatgatggtctgccttcaagtaca

SEQ ID NO: 284484 - DNA, 100 bp, Homo sapiens
cagcagcgcctgggccgcgcgctatggcaccttcgcctggcccaccactcccagaggtcatcatcagatttgaaatatttaaagtggatacaaaactatt

SEQ ID NO: 284485 - DNA, 83 bp, Homo sapiens
aggtcggcagagcaaggggcttacgcagaaggacctggccacgggacccagacatggagctgcgggaagaagcctggtctccg

SEQ ID NO: 284486 - DNA, 100 bp, Homo sapiens
accagttcttcatctggagacagttcaacgttctgcaaaccagagtattgggaaagggtcgttgtggtgcatagacccagagtatagacaaaatctaatt

SEQ ID NO: 284487 - DNA, 75 bp, Homo sapiens
gaggaggcgagctagccgggagttacaccgccaccgccaggtctcagcggcggtggcagccgaggtgcaggatgc

SEQ ID NO: 284488 - DNA, 100 bp, Homo sapiens
gaagcctggatgaaatagatctctcggctctgaggatcgcccaggaccacaccgcagcgtaactgcaggcctctcagcgaaaaagggggaaagcaaagac

SEQ ID NO: 284489 - DNA, 78 bp, Homo sapiens
ccctcgttcccccgattggggccgcaggagcatcagatccatgctgctgctgactcggagccccacagcttggcacag

SEQ ID NO: 284490 - DNA, 83 bp, Homo sapiens
agaaggaaggcatggaaagttccagccggttcgagagctaggatccattccaaggagcacttcaaggagaagtatgccgtgga

SEQ ID NO: 284491 - DNA, 50 bp, Homo sapiens
tcaacctaacagtacaaaagtccagaggacatgcttacatagaatatatt

SEQ ID NO: 284492 - DNA, 51 bp, Homo sapiens
cgaagatggtggcggctactcctcctggagccttcacgtaaatgggtccag

SEQ ID NO: 284493 - DNA, 82 bp, Homo sapiens
gcctgcaccatgagcgtcccggccttcatcgacatcagtgaagaagatcagtgggagccaagaagaaaggtttgctcccggg

SEQ ID NO: 284494 - DNA, 90 bp, Homo sapiens
gataacaccctgtaacagctgagttctatattggctgtgatctttgtactaactggtatcatggagaatgtgttggcatcacagaaaagg

SEQ ID NO: 284495 - DNA, 100 bp, Homo sapiens
gatctcgccgggatagaaaactacacgtcccaatttgggcctgactgggaagaagagcaggtcagcagtccaaatattctacgacttatttatcaaggac

SEQ ID NO: 284496 - DNA, 98 bp, Homo sapiens
agaatatggaaactgaacagccagaagaaaccttccctaacactgaaaccaatggtgaatttgatttaaagattgattgtctccaggagagtcaagaa

SEQ ID NO: 284497 - DNA, 75 bp, Homo sapiens
caaggacacggtctacaccgacttcgacgcatcaagatggtgctcatgtggaccagtggtgacgccttcaagacg

SEQ ID NO: 284498 - DNA, 100 bp, Homo sapiens
cgtctggacatctgtagctgtcgtttggtttgatcttgttgactatgaggaagttctaggaacgatggcactgaatttggaggttctatctaccagaagg

SEQ ID NO: 284499 - DNA, 83 bp, Homo sapiens
ggctcaagttaaaagtggagcagcacgtggagctgtaccagatgatgatgtgcctgcagatatggttgcagaagaatcaggtc

SEQ ID NO: 284500 - DNA, 98 bp, Homo sapiens
ccacgtgagccacggccacggccgcatagaaacaccacaaccccagacccagacccagcaactggaaggaacggatgggcctctagtgacagatccag

SEQ ID NO: 284501 - DNA, 100 bp, Homo sapiens
agcctattcccagtgagggtcttcagctgcatttaccgcaggttgatgataattagaagcatgctttccactgaacttcccgacaacatttgttatgcag

SEQ ID NO: 284502 - DNA, 100 bp, Homo sapiens
ggcatctcaggtgctttacgtgcattcgtgaagaagcccatcagtatttcttgaataccaggccccagaggtgatccgaatgcaggataacaacccattc

SEQ ID NO: 284503 - DNA, 98 bp, Homo sapiens
acggcggcgcgcagcacgcgcagtatgttgggccctaccggctggagaagacgctgggcaaggggcagacagggggggccctcagcctcttggccttg

SEQ ID NO: 284504 - DNA, 80 bp, Homo sapiens
ccgagctatagagaaaggagatgagaggacgggaggggcaagctgcggccaaccaaggccaagagcgagcggaagaagaa

SEQ ID NO: 284505 - DNA, 100 bp, Homo sapiens
cacgttggatgctgccttgtccggtaccctgtcagaggtcctcaaagagggcagcgggctgttcccagatctcctggtgagggagacggaggccgtcatc

SEQ ID NO: 284506 - DNA, 82 bp, Homo sapiens
cagctttgaagtgggagcccagttggaagcccgggaccgtttaaaaaactggtcagcccaaggccaaccccactgtcactct

SEQ ID NO: 284507 - DNA, 74 bp, Homo sapiens
gggcgcggcagtatccttggggcactgtgcaggtatttagcgtggactacaatgatgaactggatatcttggtg

SEQ ID NO: 284508 - DNA, 100 bp, Homo sapiens
cacaagggatccagaatatgacaaccccaccagaacctcaggcagcaaccctgggaagtgcccttgatgagctggagatacctttatcaatgaatgtgtc

SEQ ID NO: 284509 - DNA, 98 bp, Homo sapiens
tatcaggcaccagacttgggatcagttataaactctagagtggtctatgttaacaatgaatgggcaaccagtgttggggaaggagggagctttggaga

SEQ ID NO: 284510 - DNA, 95 bp, Homo sapiens
ggacgttgccaagattaaccaggacccccagaagttggtgagatggcaaagcagtatatagagaaaagtcttttggttccagaccatgtgatcac

SEQ ID NO: 284511 - DNA, 108 bp, Homo sapiens
cctagctgtgatatttgatgttgcaagtatcatcctgggctccaaggagagggttggatggcaagcatgtggtgtttggcaaagtgaaagaaggcatgaatattgtgg

SEQ ID NO: 284512 - DNA, 101 bp, Homo sapiens
tacagacagctttcgaagacgggatactgctcagcaaggtgttgtgaatttcccatatgatgatcttgacaaaagtaagctgaagccaggaacaagagttg

SEQ ID NO: 284513 - DNA, 100 bp, Homo sapiens
tttttgccaccacactccagcttggattgaaaatggctcaggaatcagtcagcaagttgacttcagagaagaaagtggagacaaagaaaatcaatcccac

SEQ ID NO: 284514 - DNA, 98 bp, Homo sapiens
cacaggccatcaaatgcagaattcacaagatccaatcccttgtccttaaaaggtagttcgaggacactacaaaggtcagcaaattggcaaggtagtcc

SEQ ID NO: 284515 - DNA, 73 bp, Homo sapiens
aagacagtctaaactacgaaatacaccttatcaggtatacatggactggtacgagaagttccaggacaggctc

SEQ ID NO: 284516 - DNA, 74 bp, Homo sapiens
gcacaatctcttgacagagaagaactatctgccactgcagagccccgccatggaagacacgccgttggtgatat

SEQ ID NO: 284517 - DNA, 73 bp, Homo sapiens
ccagttatattgtgtctaattctgctaacctgaaagtaatgcccaaggtcatactactagatattacactgga

SEQ ID NO: 284518 - DNA, 82 bp, Homo sapiens
gacgctaaacgtgccctactctgccccgggggagagggaatgacgttggccggagctcctatggcgccatgcaggtgaagca

SEQ ID NO: 284519 - DNA, 100 bp, Homo sapiens
agagaatgtgtcagccgatgcaccgagtccagcccaggaaaatggagaggtagatgatgagctggagatcaaggcctactatgcaggccacgtgctgggg

SEQ ID NO: 284520 - DNA, 100 bp, Homo sapiens
acgcccggcgcgagctcaagctgctgctgctcgggtggaggcttccccggccggtgcctctgctgctgttgaagtagaaactgccagccaggcctcagac

SEQ ID NO: 284521 - DNA, 100 bp, Homo sapiens
aaatttgatgaagtccagaaatctggaaacatgatacaatctgcaaatgaaatcaatgtggactgaacataaatcacctgatggaaggacttactactac

SEQ ID NO: 284522 - DNA, 97 bp, Homo sapiens
cctgcccagcttaaggtcctaaccatgccggagacctgtagataccagcctttcaaaccagtatctgctgtgcgtttcagtcaacaatacagcttgt

SEQ ID NO: 284523 - DNA, 100 bp, Homo sapiens
cagagtgaagaaagctggtaatagatgtctgacaaactaaagaaagacttgtgttacgacttccaatagtagtcagacattatcatcctgtcatactatg

SEQ ID NO: 284524 - DNA, 75 bp, Homo sapiens
aagatgatgaagtactgggccaactttgcgagaaatggttttttcaagggggaacatggcaaaggtgttcagttt

SEQ ID NO: 284525 - DNA, 83 bp, Homo sapiens
ttgtttattttcctcaccactgaatctacagggcttttttccagacttcaagctcccattccaacagtaagagcttcttccac

SEQ ID NO: 284526 - DNA, 74 bp, Homo sapiens
agccttggggaagacagttggaagctcagacatgagctgccaaacggaggcccgaagaaaaagaacctgaaaaa

SEQ ID NO: 284527 - DNA, 74 bp, Homo sapiens
aaccattgggaaaaaaggttattagagctctggtagctgaagaacatctcacagtggacgccagggtctattcc

SEQ ID NO: 284528 - DNA, 97 bp, Homo sapiens
tcggcgtgctccggcacttggcagctggacaggcagagtgctgatgtgaaaaataccacgacaaaaccaccctagtgtcagctgtgatgcatgttta

SEQ ID NO: 284529 - DNA, 74 bp, Homo sapiens
gccgccaccatgcccaagagaaaggtcctgaacgaggctgtgggggccctgatgtaccacaccatcactctcac

SEQ ID NO: 284530 - DNA, 82 bp, Homo sapiens
attattgcgcgtggaacggctgcttttggaagtacctggagtagaacagaaaaattattatgtctgtgttcccttgggactc

SEQ ID NO: 284531 - DNA, 100 bp, Homo sapiens
gatgaaacaagataggatcaccagataccaggtaagcggaagggtacagccaatgcccgaatgccagagaaggtcacatggatgaggagaatgaggattt

SEQ ID NO: 284532 - DNA, 97 bp, Homo sapiens
taactccattttgaaagctgctaaagaggagttggaaactctggagagcaacctcttagcacagcagaattcactgaaagctcaaaaacagcagcaa

SEQ ID NO: 284533 - DNA, 75 bp, Homo sapiens
cgggcggcggcgcgcggacccaggcgcggatggcgaggccagcagcaggttcaggagaagtggcacctggtggag

SEQ ID NO: 284534 - DNA, 100 bp, Homo sapiens
accccgcggcgcccctcggcctcggagcaacgagcgcagcgccggaacaagcacatcatgattgacttggggactggcaacaacaacaagattaactggg

SEQ ID NO: 284535 - DNA, 88 bp, Homo sapiens
tctgaagataatcgagaaataccagctaagactcaatgtatgcaaaggggccaaggcagatattgtgttcttgactgatgcctcctgg

SEQ ID NO: 284536 - DNA, 90 bp, Homo sapiens
tgcaagagtccacaaagggacctgatgaagcgaagatcaaggtggatagatacttctcaagacatcacacagcgtgagtcaatcaaggag

SEQ ID NO: 284537 - DNA, 100 bp, Homo sapiens
cctcccaagtggctgggattacaggaaccgagctgtggcctggggttccatggagcaggtggggcgcggaggaactgagctgtggcctggggttccgtgg

SEQ ID NO: 284538 - DNA, 50 bp, Homo sapiens
ctccatccaacacttcgtttactccggcagctgagcctccacccagaccg

SEQ ID NO: 284539 - DNA, 50 bp, Homo sapiens
gacagaatcaccagcactggctgaagcatgttggcagataaattgaacat

SEQ ID NO: 284540 - DNA, 98 bp, Homo sapiens
agtatgtacctgtggagcagcttctttatcccttcatctgtggataagcagctctgcttatgataatgtcaacaaagttcgagtagctatcaagaaaa

SEQ ID NO: 284541 - DNA, 98 bp, Homo sapiens
actggcaggacgcggtgcagagagcggacttccgcgacgcgggcgaggccttcttgggcagctttgtggccagcgggatggggccctcggcctcgtcc

SEQ ID NO: 284542 - DNA, 75 bp, Homo sapiens
ggaagatcggcattccagtacctgcctaaactccacacactatggacctccccttcttggaagccagtactctga

SEQ ID NO: 284543 - DNA, 100 bp, Homo sapiens
tgcagcgggagctggacggcgagcgcgagcggcgcgagaaagttaaaaatctgtaagagcctgattttagaattcaccagctcctcagaagtttggcgaa

SEQ ID NO: 284544 - DNA, 75 bp, Homo sapiens
acttggcctccatggtgtcagagcaaggagaagctgttgcacggggtcactctggtgcccattgaggagttcagc

SEQ ID NO: 284545 - DNA, 100 bp, Homo sapiens
aggaaaaaagtatggatggaggaccagcagcatctgtatcacctgcatttaaggaaatctgtttctcttttggatcactagctgcaaattaagctaacag

SEQ ID NO: 284546 - DNA, 83 bp, Homo sapiens
agcccacaggtgctaaagagagcagtaccctgatggagtcccttgcaggactggccgtttgacgatggggcgcccccgcccgg

SEQ ID NO: 284547 - DNA, 96 bp, Homo sapiens
actcctcctggggaggctgccgtggaggccatggagatccctgccccggagcccgagaagacaggcgtctactagaaaaatctcagagggtagaag

SEQ ID NO: 284548 - DNA, 90 bp, Homo sapiens
ggcaagatcaagcactggaaccgcttccgagacttccagggtctccctccactgctgtagtaacccgggtccggggcctcggtggtgctc

SEQ ID NO: 284549 - DNA, 100 bp, Homo sapiens
ctcacgggtttgtgtcctagacagggtcctcatagaagatcttcagaaaacactggagaagggaagcagcttgcacacccagagaaaccgaagatccctc

SEQ ID NO: 284550 - DNA, 100 bp, Homo sapiens
ctatccacttattatttatgatgtgttccctgatgcctgcaaagagtttcaagatgcaggtgaacagtattgcctaagtgtaatcttgaacatgggcggt

SEQ ID NO: 284551 - DNA, 82 bp, Homo sapiens
ccgcgcacagctgctcccttcgccttcgccctttccacctcgcggcagttcgctgagctgactgctgcccactttggaggag

SEQ ID NO: 284552 - DNA, 75 bp, Homo sapiens
tgctgcgcgggcagaggcggcggtcgagagcgcggtggccgggccccaggtgccaaatgtgacatccagatgacc

SEQ ID NO: 284553 - DNA, 83 bp, Homo sapiens
actactgcaccagaatgaaggagaaccagaaacatatctattatatcacagtgaagtacctggggctgctggcaatgtccaag

SEQ ID NO: 284554 - DNA, 98 bp, Homo sapiens
gggcaggacaataacactcagatcgagctttaccaacagggacgcttatgtcaactgggcagtgaattttgtgaattggaagtttttgctaaagtact

SEQ ID NO: 284555 - DNA, 74 bp, Homo sapiens
cagcagagaataagctggacaccaaatacccgtacggaatctggtggacagtaacaaactttggtgaaatttca

SEQ ID NO: 284556 - DNA, 100 bp, Homo sapiens
caggccgtgcggcgccctgacccggcctcaccatgttggtgctgtttgaaacgtctgtgggttacgccatctttaaggaagtcagggacccggaacagag

SEQ ID NO: 284557 - DNA, 100 bp, Homo sapiens
aagtgcaagagcagaggccttctctagaccttgccaagatggcacaggtgagcatgggtttatgcgtcttaggcattattgtgatggcgagcaccaattc

SEQ ID NO: 284558 - DNA, 83 bp, Homo sapiens
tgaagatccattggtaaattgatcaggatttttggcctaccctccaaagaaaagtactgctgcgcacggccactgccaacggc

SEQ ID NO: 284559 - DNA, 98 bp, Homo sapiens
ataacattcatgcagaacatcagactgacgacaacagtggagacttggacccaggagtcttgctgacagctcaaactatcacatctgagaccccaagc

SEQ ID NO: 284560 - DNA, 100 bp, Homo sapiens
taaatgccgactcagtggaacaatcttttgttggattgaaacagctaatcggccgttgctccagggagaactgcaaatatcttcatccacccccacattt

SEQ ID NO: 284561 - DNA, 75 bp, Homo sapiens
gtcatttcagccttggccgaggtgagacgagttgtactgctgtcacaggaaatggacgctggattacaagcatgg

SEQ ID NO: 284562 - DNA, 100 bp, Homo sapiens
caagattatcagcaaaatcgagaatcatgagggggttcggaggagccagggagtaacgaagagatcaaagagttcgccgcgggctacaacgtcaaattcg

SEQ ID NO: 284563 - DNA, 90 bp, Homo sapiens
gttcaaatgatcttctaggagatttgtttggcgtgccaagcttctctgtgaaagagcacaggtagaaacctgtgggttcttgttgtgggg

SEQ ID NO: 284564 - DNA, 98 bp, Homo sapiens
tccccagagcgtcttgatccttttgcagatgggaagactgcagtcattgagaaacgtaggaagaaaaggtcttctgcaggagtagttgaagatatggg

SEQ ID NO: 284565 - DNA, 87 bp, Homo sapiens
tagaacaagaagaagaggagaggaaaaaggaagagagcactgcagccagtgaaaccactgaggcacttccgttccggcgcccctccg

SEQ ID NO: 284566 - DNA, 115 bp, Homo sapiens
gaagccttttccgttgccggtgccggcctagcgtcctggaattacttcaatcaattccaggaatggatggaggtgctttaactgatacaagtctcacagattcctattttagcac

SEQ ID NO: 284567 - DNA, 74 bp, Homo sapiens
attccctaagacttcaccatgagcacagaaaactgaatctgtagataacgagggagaatgaattgtcatgaaaa

SEQ ID NO: 284568 - DNA, 74 bp, Homo sapiens
ggggtttgggaaacaaggcttccagtgccaagatcttatgccttcattcatccggcatggtccaacaattccaa

SEQ ID NO: 284569 - DNA, 76 bp, Homo sapiens
atgctgaaccgcattgtggagaaagaatcgggaggaatgatcaattggaatcgtctttttcctcctttacgtcagc

SEQ ID NO: 284570 - DNA, 100 bp, Homo sapiens
tgctcagtctctgtcagaggaagatcccttggccttcgtcaagatggttggacaccacgtcgccttcctggaagcagacgtgcttcaggctgagcgggac

SEQ ID NO: 284571 - DNA, 100 bp, Homo sapiens
agagaaaggaagcaggcccgttggaagtggttgtattcatgatgttgctatcaaaagttgagaaattgtcagaagaaatcatggagataatgcaaaattt

SEQ ID NO: 284572 - DNA, 76 bp, Homo sapiens
ccctgggctggaacgaccctgattccgaagaggctcaatctgtaaatccttctagtgttgatgaaaatattgactc

SEQ ID NO: 284573 - DNA, 97 bp, Homo sapiens
gaggatggggaaatccaacagcaagttgaagcccgaagttgtggaggagctgaccaggaagacctactgctcttgtcaggatggtgaagctgttcat

SEQ ID NO: 284574 - DNA, 75 bp, Homo sapiens
tttcctgctaagccaaacagagaagggcttccgagtggacctgccaatcaagtcggcccgctaccgtggccagta

SEQ ID NO: 284575 - DNA, 75 bp, Homo sapiens
ctgagatcacccacccggcgcggcaacagtgcagtgtcgtgtgggagccaatgggagatgggaagaaaatcattt

SEQ ID NO: 284576 - DNA, 86 bp, Homo sapiens
aggaggagggggaagcggcggcggcaaagggaagaagaaatgccagaggtagaaattgacattgatgatcttcttgatgcagacag

SEQ ID NO: 284577 - DNA, 99 bp, Homo sapiens
ttggagaactacaggaacatggtcttgctggcttcagacagcaaagtcctgacatgtgcagccgtgtggaggatgccgaaggaattggaatcaggcagc

SEQ ID NO: 284578 - DNA, 100 bp, Homo sapiens
ctctcattgattaatgtcaatgatcattcatcgagatataaaacctgagaatattttagtatcccagtcaggaattactaagctctgtgattttggtttt

SEQ ID NO: 284579 - DNA, 80 bp, Homo sapiens
gtccctcctccggcttcccgcaatgaggagggcccttcacagaaccggggatgttcacggaagaccagggtgtagatgac

SEQ ID NO: 284580 - DNA, 120 bp, Homo sapiens
gaacacctcacctctggcccccagcacaggaaagcagcgtggtcaggaggggttaaacttcggctgaagcacagattatctcctgctgcatactacgcccagaggatgatccagtatctc

SEQ ID NO: 284581 - DNA, 51 bp, Homo sapiens
aagaagaactggaacgttgtaaagtgcagtcagccataatggcaggtgaag

SEQ ID NO: 284582 - DNA, 83 bp, Homo sapiens
tcacttacaacattaatcagatactgcatttaagcatgtgcagtctttgccaacaaaaaaaattaccaagaaacctattccag

SEQ ID NO: 284583 - DNA, 123 bp, Homo sapiens
ttttgagctggtggaagtggttggaaatggcacctatggacaagtctataaggttgctgaaaagccaggagtcaaaatgactgagcgctttgactgccaccattgcaacgaatctctctttgg

SEQ ID NO: 284584 - DNA, 100 bp, Homo sapiens
gagggagctcacacgacacagattttggggcaaagcctttccaactggacagcaccatgtccaccaaagcggagcagtccaacaagtcccaaatttggaa

SEQ ID NO: 284585 - DNA, 74 bp, Homo sapiens
ccagaaggagaactcctacccctggccctacggccgacagacgattgctcatttagaaagtggatgtgtgggat

SEQ ID NO: 284586 - DNA, 75 bp, Homo sapiens
atcttatctatggaagataaagcatggagttggctaatggatgctgtgtaaacaggaacatcgataagtagtgta

SEQ ID NO: 284587 - DNA, 73 bp, Homo sapiens
acgaccaggatgagacatcgagtgtgaagagtgatggggctgctggatctcatttgccacatcgtagaaacca

SEQ ID NO: 284588 - DNA, 87 bp, Homo sapiens
ggggggtgatgtctgtggaaatgcaggccccgaaacttctgtggctgaaagagaaggatgaaacccacccaggagcacagtcatcgc

SEQ ID NO: 284589 - DNA, 75 bp, Homo sapiens
caactattcgcggagctggaatgactggcaacccagatgtgttttcgcattataacaaggacctgttgacagagc

SEQ ID NO: 284590 - DNA, 99 bp, Homo sapiens
cggggtcggggccggctgaccaggaacctgggcgagcagcggcgggggcccgaggggaatactcccccagttgcaagaggcgcaggaccgtggaagact

SEQ ID NO: 284591 - DNA, 83 bp, Homo sapiens
tgattacagcaggagattatgaccttaacatcagtggcatttattaatacagcaaaagaaatttatgaaaaaattcaagaagg

SEQ ID NO: 284592 - DNA, 100 bp, Homo sapiens
aaacttctctgtcagtactatattggaaaaacctcaaaatatgatggtggttggacagtcagcatttgcagactttgtttgcagccatcggccccactac

SEQ ID NO: 284593 - DNA, 82 bp, Homo sapiens
ccataaaaacaagtgtgtgcatctggctgttagaagaattcatgctcatccggactgaaactgttgaggagcccatggagga

SEQ ID NO: 284594 - DNA, 80 bp, Homo sapiens
cgaaggacacggaggattatatcactgaaggcataagattcagaggtgtcgtgaaaactacccctaaaagccaaaatggg

SEQ ID NO: 284595 - DNA, 50 bp, Homo sapiens
attcggtcttccagcaggggatgaaggcagaaatttagcatctggagagg

SEQ ID NO: 284596 - DNA, 83 bp, Homo sapiens
caagagaaatggagcccttctccaaggtttgcctgcaatgagatttcattctctacatttaaaggacatcctttctgagctgc

SEQ ID NO: 284597 - DNA, 85 bp, Homo sapiens
ttccaccaggacttgatgaatataatccattctcggattctagaacagcgcatattaaatttcctattgactacccctattcacc

SEQ ID NO: 284598 - DNA, 75 bp, Homo sapiens
ttggagtagcattattatttggaggagttgatgagaaaggaccccagctgcaatctgaaagcaaatcctgtttag

SEQ ID NO: 284599 - DNA, 75 bp, Homo sapiens
cctggctggccaagttactggagccgatgttggtcaaagaaaaagtgatgtatgaaaaagaggcaaaacaacaag

SEQ ID NO: 284600 - DNA, 85 bp, Homo sapiens
caaatctttcaccaatgtaagtctgccttatgttcctccagccaattgcaaaggggacagagcagaatgggctgatatagatccg

SEQ ID NO: 284601 - DNA, 100 bp, Homo sapiens
aaacgggaaagagagtggcagaaaaactttgaggtctcctactccctccctccagtactgcgagaactgtgacacccacttccaagattccaaccaccgc

SEQ ID NO: 284602 - DNA, 100 bp, Homo sapiens
cgagaatcagagaggttcagatacttgctggaggtcacacagctagaatgaatctgaagtctgctgcagtaaaacacagaaggctttaaaatgttttctt

SEQ ID NO: 284603 - DNA, 76 bp, Homo sapiens
ctcgcttcagtcagtcgggccgcgccgcgcctcagctctgctccagaacctgggtatcaacccagcaaacattggc

SEQ ID NO: 284604 - DNA, 83 bp, Homo sapiens
gtgagttgaaacgctgcctggaaaggaagtaccaggacttgcacaggggctttgttatgcacctaaagccatattggaagctc

SEQ ID NO: 284605 - DNA, 75 bp, Homo sapiens
ttcatgctaaaactggtcaaagtgctgactctggtaccattaaggcaaaattgcctctcctcctcccagttctcc

SEQ ID NO: 284606 - DNA, 100 bp, Homo sapiens
agaaagccgttgcctccagcaccacttctaatgattcacaatgacatcctttcaagaagtcccattgcagacttccaactttgcccatgtcatctttcaa

SEQ ID NO: 284607 - DNA, 78 bp, Homo sapiens
cttgagaggtcacttctgcctttccagtgacaaaatggtgtggcaaccaagttgttaaaagccttgaaaggctacatt

SEQ ID NO: 284608 - DNA, 100 bp, Homo sapiens
tggggaccctgagatcgtcaagtctcccagcgaccccaagcaataccgcagctcttgccaggtaaaaagttttgggaaacagatgaatccagcaaagatg

SEQ ID NO: 284609 - DNA, 75 bp, Homo sapiens
ttggagagtcataacatatcactgactggatgaactggacctcacagacaaacacagagaagccatgtttgcact

SEQ ID NO: 284610 - DNA, 100 bp, Homo sapiens
cggataccagcactgtaccccaggatgctgccaccatccccagctcagccatgcaggccccaacaggttgggaatccacgtgttgaacttaccctctcag

SEQ ID NO: 284611 - DNA, 83 bp, Homo sapiens
ccgggaccctcaggctcagatcagtggccgaggccccagagctcagcaaccggctttttgaggaactcgccatggacgtgtat

SEQ ID NO: 284612 - DNA, 100 bp, Homo sapiens
ctcctacaacttcttccgccccgacaatgaggaagccatgaaagtccggaaaacgagcgacgtgacacaagaggtcccaagggagcaaacctgaaagcca

SEQ ID NO: 284613 - DNA, 51 bp, Homo sapiens
tggaacacttcagtgcattcaaggttttacttgtaatggacacaaggacag

SEQ ID NO: 284614 - DNA, 90 bp, Homo sapiens
cctgactctctgaggctcattttgcagttgttgaaattgtccccgcagttttcaatcatggactatcagcgcatgctggatctgatgcgg

SEQ ID NO: 284615 - DNA, 87 bp, Homo sapiens
catctgccgcgtgcccaaaagcaagctggaagtggtggtgaaaacaggaatgagaacgaggagtcaacctcaaaggctgaaacctcg

SEQ ID NO: 284616 - DNA, 100 bp, Homo sapiens
ccggcgctctcctggctcccttctgccccagctccgtctcggcggcggcgggtgtcatggagaaactccagctgggcccagagattctgcagcgggaaaa

SEQ ID NO: 284617 - DNA, 100 bp, Homo sapiens
ctggacccggaccggttttggactgacatcaatttgccctatcttacaatggattcttctggacccaagcatttgaatatgaagttgacccgtgctcaat

SEQ ID NO: 284618 - DNA, 73 bp, Homo sapiens
actttgcagaaatgtgtgcagactacatggcatctaccataggggtatcagaagcatgtgcacacgtatcgca

SEQ ID NO: 284619 - DNA, 98 bp, Homo sapiens
cccccccttccccacgcaaccccagatccatttacactttacacttttgcgagaattgaagcaccctaatgtgattgcattgcagaaggtgttccttt

SEQ ID NO: 284620 - DNA, 75 bp, Homo sapiens
cgctgggttggacctttacctgtggaggcaacactggccaagaagaggaaaggaactgtggtgtatggcgagccc

SEQ ID NO: 284621 - DNA, 100 bp, Homo sapiens
cggccatctcgctgcccgacgatgtccgcaggcgtatgagatgtacaccatcgagcggaatgcagagcggaccgccaccgccgggaggctgctgtacgac

SEQ ID NO: 284622 - DNA, 100 bp, Homo sapiens
gtctctgtcaagcctggagacgcggttacaactgatggaaaaccaaaaatcgttgatatcattgatacaacaggaagtggcgatgtgaatactgctacag

SEQ ID NO: 284623 - DNA, 100 bp, Homo sapiens
aaggagcacaacgggcaggtgacagggcaagaagtacaagcccctggacctgcggcctaagaagacacgtgccatgcgccgccggctcaacaagcacgag

SEQ ID NO: 284624 - DNA, 83 bp, Homo sapiens
ggagactccggcgctcgccatggccgacgaaaagcccaagccgagccacatcgctcagacaccatggggaaggtgaaggtcgg

SEQ ID NO: 284625 - DNA, 100 bp, Homo sapiens
ctccaggagttcgtctcttacgtctgcggaagtgcagctgcctcagttcttagcgcagatatgagtatcattgggcagatggaacgaacataaagaaacc

SEQ ID NO: 284626 - DNA, 90 bp, Homo sapiens
gacattttggaccagggagccctacagcgtctcttcaaaaaggaaacagagcaaatgcagcgttacaatcaaagacttattgaggaattg

SEQ ID NO: 284627 - DNA, 82 bp, Homo sapiens
ggaaaaattaatcaacagagtgggacctaatggtgagaggtgaaagacccctgacaaaagacaatcatcttctgggtacatt

SEQ ID NO: 284628 - DNA, 75 bp, Homo sapiens
ctccaactttgcgacggaaatgtgtcatcgaaagccagtcaaaaggaccatacctcctgaactgcaggagcagct

SEQ ID NO: 284629 - DNA, 75 bp, Homo sapiens
ccgagtatgaacttccagaggacccaaaatgggagtttccaagagataaaggaggagacccacccggtggacttg

SEQ ID NO: 284630 - DNA, 100 bp, Homo sapiens
ttgcgcctcggtggcgccgcgctgctcctgctgctcatcccggtggccgccgcgcaggagcctcccggagctgctgtgattgggttattatacccctgca

SEQ ID NO: 284631 - DNA, 73 bp, Homo sapiens
accgtttgaggagagcctggccccactccaggagagggacccgagctgatccagaaagccaacggtctccacg

SEQ ID NO: 284632 - DNA, 90 bp, Homo sapiens
ctgagatcaaatggcacttcattggccacctacagaaacaaaatgtcaacaaattgatggctccagtgatccacaagctcagaaatacat

SEQ ID NO: 284633 - DNA, 96 bp, Homo sapiens
atcaaaggaaaataccagaaagatttttagtggccccaaacgggtgtgttcatcctcgaggtggtgtgattcagagtgtttcttcatggaagcatg

SEQ ID NO: 284634 - DNA, 100 bp, Homo sapiens
ctcttctgcaggtactggaaacccacaggcacacccaaattttaggtgatgggcaagtcagaaagtcagatggatataactgatatcaacactccaaagc

SEQ ID NO: 284635 - DNA, 75 bp, Homo sapiens
cgacctggccagctgccgcgactgggaggagcgccggaacgccgaggcccaggttgaaaggattgttgacaaaag

SEQ ID NO: 284636 - DNA, 75 bp, Homo sapiens
caaacttcctcctcaacgccagcgggagcacatcgaacgacctgcagcaataccattgacctgccgatgtccccc

SEQ ID NO: 284637 - DNA, 74 bp, Homo sapiens
tgtggtggagtccaccccgctgtgggtgcagcagttggaggaagaaaatacagagcttagaacaacagtgactc

SEQ ID NO: 284638 - DNA, 90 bp, Homo sapiens
gatctgacctgcaatgattatatttcggtttttgaatttgacatctttacccgactctttcaggaattacatgaatgacagtcttcgaac

SEQ ID NO: 284639 - DNA, 83 bp, Homo sapiens
attggtcaagttgctgaccttgaagttatcaatactctggctgaccatcatcatcgtgggactgactttggtggaagtccttg

SEQ ID NO: 284640 - DNA, 100 bp, Homo sapiens
caaacatgatgcacctaactactgtctccgtagattatgaggatgagaggtggaggttctctctcttttagtaagagatgctaaaaaccttgtacctatg

SEQ ID NO: 284641 - DNA, 50 bp, Homo sapiens
gtaatttgaatcagctcaatcaatcgctgacagattcaactagcctatca

SEQ ID NO: 284642 - DNA, 82 bp, Homo sapiens
atgtggagataacttctccatcaccaagagtccagatattgtctatggttgatgaaataagaaacagaggtttgactgtatt

SEQ ID NO: 284643 - DNA, 98 bp, Homo sapiens
cctcgcagagcaccaggcccaccgtgaaaggtacctgcctggatgacagctggattcaccctcgaaacctgaccccctcctccccaaaggacctgcag

SEQ ID NO: 284644 - DNA, 75 bp, Homo sapiens
gcccagcctctcgaatgggcacacctgtgtagtttgacaagtatgcgcccaagctggacagcccctacttccgac

SEQ ID NO: 284645 - DNA, 75 bp, Homo sapiens
aaaattcatctgggcggtatctggaacttgtctgcgctcctcagaccaccggcaggtgaacagcctgatgcagac

SEQ ID NO: 284646 - DNA, 50 bp, Homo sapiens
gggacgcgccccagcctgcctccagcatgcctggttcaagagaagttcag

SEQ ID NO: 284647 - DNA, 98 bp, Homo sapiens
tttggttctcccggcagcagcccgacgcaaaccaaggatctggggatcttcgcactatcccaaggttcaaaccttgtactactcagctgatcacaagc

SEQ ID NO: 284648 - DNA, 100 bp, Homo sapiens
ggagaaggttacctctacccatcaatttctacctggacaaggactggtactatacccacagataggagacaaattggatattatttgccccaaagtggac

SEQ ID NO: 284649 - DNA, 100 bp, Homo sapiens
ccgggatcgtgaccgagaccgtgaccgagagcgtgaccgagagcgcgaatatcgtcatcgttagaagcaccagacatgttggcatcatctcttagttggg

SEQ ID NO: 284650 - DNA, 83 bp, Homo sapiens
gactcggtgattgaggacaagaccatcgagctcatggctgaagctcagggccctgtctgctctgtggactcaacagtttgtgg

SEQ ID NO: 284651 - DNA, 90 bp, Homo sapiens
gcccggtgctgggcgcgcaccgtggccaccctgtgggcctggcgctggaggcagcggtgcacgtgcaggaattgaatgatctggcacggg

SEQ ID NO: 284652 - DNA, 128 bp, Homo sapiens
cttaacctggatgccagcgtgcagcacttggaggatggagatggcaagagaaagaggagcagctccagccctcggttccgggtgacacacattgagaagcgctatggactgcacgaacaccgtgatgg

SEQ ID NO: 284653 - DNA, 50 bp, Homo sapiens
ctggacatctggaacatccatgtgatcttccattgtttgaagcactggac

SEQ ID NO: 284654 - DNA, 75 bp, Homo sapiens
ggtgaagaagatgaagatgatgatgaaggggaggaaggagagaggccccacagtatcaaatatccgcctggctgg

SEQ ID NO: 284655 - DNA, 101 bp, Homo sapiens
ccgccctggcccgtcatggagatggaaaaggagttcgagcagatcgacaagtccgggagctgggcggccatttaccagtgtctaccatcagagggagatct

SEQ ID NO: 284656 - DNA, 83 bp, Homo sapiens
atcaggcacatgaacggtggagtcttcaaaggcccgccaagctgccccctgtgtgctattctttgatgagctggattcgattg

SEQ ID NO: 284657 - DNA, 75 bp, Homo sapiens
gaacaacggaggcagaggagctgaagactccagtatgcaactgactacaaggagcaagagtgagccatggagcta

SEQ ID NO: 284658 - DNA, 100 bp, Homo sapiens
cggggttcgggtgtctcgtgtgtgaacatcacaggtctcgctctgccacccaggctaggagtgcagtagagtgactacagttcacagcagactcaacctt

SEQ ID NO: 284659 - DNA, 75 bp, Homo sapiens
gccaaacaactggctggaatattgcaggtgcctttagagattcgccatgaagtcagcgtaaataatgtaacacat

SEQ ID NO: 284660 - DNA, 82 bp, Homo sapiens
gaagcctcccgggtggcttacagacgctgccagcatcgccgccgccagaggctgggaggcggcagaatgcagccagaggagg

SEQ ID NO: 284661 - DNA, 74 bp, Homo sapiens
gttcttggtgaagtcggccagcctgagcaagcggaggacctacgccggcctggacaatgcagatcttcgtgaag

SEQ ID NO: 284662 - DNA, 82 bp, Homo sapiens
ggcgcggcggcggtggcatctgcggccatggcggcgactactgccaaccccggtcttgagtcaccacgtccgaatataattc

SEQ ID NO: 284663 - DNA, 51 bp, Homo sapiens
cttggagaggtcggagatgggtttaaggcagtacctcccccggaacccctg

SEQ ID NO: 284664 - DNA, 75 bp, Homo sapiens
ctttgaggacacagcctcgctggaggcagtttctgcttcggaaccaaaaagaagcttcccagagccggggccagg

SEQ ID NO: 284665 - DNA, 75 bp, Homo sapiens
agcgagccccactgctcggggaggaggagccacggccggggacaggtacagcagggaagaactggaaactcagag

SEQ ID NO: 284666 - DNA, 114 bp, Homo sapiens
gctgagggctgatgctgaggacctccttgactccttccttagcaacattctacagggaatcgtgcgggagctgaaaagtcgaggagtggcctacaaatccagagacacagctat

SEQ ID NO: 284667 - DNA, 83 bp, Homo sapiens
cctctggccccgagatcagaatgccgttttgatgaagcaagaacacagagaagagattgatttgtcttcagttccatctttgc

SEQ ID NO: 284668 - DNA, 100 bp, Homo sapiens
ggccccgggatgacttctcagcgttcccctctggcgcctttgctgctcctctctctgcacggtgccacttgaagaatggatgatgatgattttggtggtt

SEQ ID NO: 284669 - DNA, 75 bp, Homo sapiens
gtttgggagcctcatcattggttatgccagtgacttcggtttcaagatgagtgaagatttgtcattagaggtttg

SEQ ID NO: 284670 - DNA, 98 bp, Homo sapiens
atggccgaggtgttgcggacgctggccgtattaaaggtggaagaaggtccatatctttttctgtgggtgcttcaagtgttgttggaagtggaggcagc

SEQ ID NO: 284671 - DNA, 101 bp, Homo sapiens
caatcacttgtttgtctaaagcttgtgcttccagtgacaaacagtatattgtgagtgcatctgaaagtggaaagaacatactggtcgtcttgttataggag

SEQ ID NO: 284672 - DNA, 82 bp, Homo sapiens
attgaagccaacggagaactcaaggtcttcatagaccagaaccttagtcccgggaaagggggatatgagactttctactcgg

SEQ ID NO: 284673 - DNA, 50 bp, Homo sapiens
gggtggcctttaccttgctggagaagggagaccctgcagcgtcatggtgc

SEQ ID NO: 284674 - DNA, 80 bp, Homo sapiens
gtcctgccgtccatgcggaagatcgtcgccacctggatgctggagatgttccaggtcatccagccagagcgtgcgctgta

SEQ ID NO: 284675 - DNA, 90 bp, Homo sapiens
cgcgtccgccccgcgagcacagagcctcgcctttgccgatccgccgcccgtccacacccgccgccaggtctggctctgggagaggagtgg

SEQ ID NO: 284676 - DNA, 136 bp, Homo sapiens
atggagcgggcagaggatgcagtggaggccatcaggggccttgataacacagagtttcaaggctcagacgtgcagcttctggaatacgaggcgtcagctgctggcctcatccgatccttctctgagcgtttcccag

SEQ ID NO: 284677 - DNA, 100 bp, Homo sapiens
gggatgtgaagtagatgataaagatgatgatatccttctcaaccttgtgggatgtgaaaactctgttactgaaggttacggcctccgctgccacagggcc

SEQ ID NO: 284678 - DNA, 100 bp, Homo sapiens
tgaaagtggacaagtgctctcgacaggacaccgtcttcatgaagaaggtcctgaggcacgtgaatggccaggatcagattgtgcccggcctgtacgcctg

SEQ ID NO: 284679 - DNA, 82 bp, Homo sapiens
taaagcttttcttcagtaaacttcaaggagataaaggacgatgggcatggaagaggagatggttcgtgttacgcagtggccg

SEQ ID NO: 284680 - DNA, 100 bp, Homo sapiens
caggtcccccggaaacctagaaatggagtgatttggagaacaatgcatgtaagtctgacatcatgatgtccatccggcaaagaagagaaataagagccac

SEQ ID NO: 284681 - DNA, 98 bp, Homo sapiens
aaacatctcaccaatttcaaatctgtgtggaaccatcagagaatctacaatccctgatggagaagaatcagtccctggtagaggagaatgaaaaatta

SEQ ID NO: 284682 - DNA, 117 bp, Homo sapiens
gtcgtctgtgttgtgactgctttggacgtgggagtcacctgaaagccaggaaatgacaatgcagatcttcgtgaagactctgactggtaagaccatcaccctcgaggttgagcccag

SEQ ID NO: 284683 - DNA, 100 bp, Homo sapiens
gtgaataagattaaaacccgcttcctagaccacccagaaatctacaggtcattcctggagatcctgcacacgtaccagtgtcttcgagagaactctgacg

SEQ ID NO: 284684 - DNA, 87 bp, Homo sapiens
tagagaatgagatagccgtcctgagaaaaattccctgaccaggagcgcacccctccccaacgactcccaggcccgcagtggagctcg

SEQ ID NO: 284685 - DNA, 98 bp, Homo sapiens
gctgctgcggaccccgccgagtcctagcgcctggcctgcgcgccgctgcccgcgccacagcctatttgatggctttgcagatggactaggagttgctg

SEQ ID NO: 284686 - DNA, 82 bp, Homo sapiens
ccatggctccctgcagtaccctttaacgaaactgggagtgatttttccatgtttgaagctttgcgagatactatttattctg

SEQ ID NO: 284687 - DNA, 75 bp, Homo sapiens
cagtgatgaggaaagctgtgaaagttctcaagatatgcacccaatgtccagggagcgtgcaaaatttgtcaaaag

SEQ ID NO: 284688 - DNA, 85 bp, Homo sapiens
gacattgaaaataagatggaacccatccacataagaaatcatgaggtccaatggattttgtttagcaaataccgaaacaatagtt

SEQ ID NO: 284689 - DNA, 108 bp, Homo sapiens
ccagctcaccattctcattatttttagatatcgaggatacccagagcttaaaggaaacccagaagttctgtgaacaagtccatgctgccatcaaggcatttattgcag

SEQ ID NO: 284690 - DNA, 75 bp, Homo sapiens
gctctgatccccccctgccggggagggcccagcgcatccgacagcctggtccgacccccagtggcactaacgtgg

SEQ ID NO: 284691 - DNA, 139 bp, Homo sapiens
gctggtggagccaaggaaacaggatgctgatagtctccagcgggcctggactgtgggctggtgtgtggaactgattcgacacctcttagaggctgcaatcccagagagagttgaagagatccctcctgaagttcctaca

SEQ ID NO: 284692 - DNA, 98 bp, Homo sapiens
tgacaggacagcggccaggcccgcccctcccctcgaggtgatgtttcaccatgttgcccgtggctaatcttgaactcctgggctcaagcgatccatcc

SEQ ID NO: 284693 - DNA, 75 bp, Homo sapiens
atttcacagctgattcctgggagcacatccatttcattggcaaggataaaattgtccatggaccacgtgtgcctt

SEQ ID NO: 284694 - DNA, 82 bp, Homo sapiens
ttggactgagtcctgcaggacacaggtccaggtgcaggtacagcagtctccgcaacaggtctcggctcagctctccccacaa

SEQ ID NO: 284695 - DNA, 82 bp, Homo sapiens
acacctctacctcctgcgaggcctcccgggctccgggaaaactacactggccagcagcccctgtcaaagggaacaggaagca

SEQ ID NO: 284696 - DNA, 90 bp, Homo sapiens
aagctgtggacgcttgtggaggaaacccacactaacgagttcatcacctggagccaggtgactgcttagaaaactgcacagcatctgatg

SEQ ID NO: 284697 - DNA, 98 bp, Homo sapiens
gatggacagaataactgtcaagacaacagtgatgaggaaagctgtgaaagttctcaagcctcaatcctggtcctctggatgctccaaggctcccaggc

SEQ ID NO: 284698 - DNA, 107 bp, Homo sapiens
ccgcgctcttcttcgccagcaccgtgctctccaccacaggtgctggagaatctggtaaaagcaccattgtgaagcagatgaggatcctgcatgttaatgggtttaat

SEQ ID NO: 284699 - DNA, 100 bp, Homo sapiens
cttgcaggccagcgcaggagaaaacgaaaccttcgtgatgagattgactgtagccgagggccccttcacagatgtagtcactacaaatcttaaattgcga

SEQ ID NO: 284700 - DNA, 50 bp, Homo sapiens
caacgattgagacagcactgaaaatggagcctggatctaaaaaatcagca

SEQ ID NO: 284701 - DNA, 82 bp, Homo sapiens
tgagccccagccaggacgagaggatgcggagcccgcagaacctccacagtcaagaggacgttgattatggaagattcccaca

SEQ ID NO: 284702 - DNA, 90 bp, Homo sapiens
ccactgccagccgcttctacaggatcgaccgagcccaggctgagctctgcccccaactttgttttctctcatgttctcaatacactctgc

SEQ ID NO: 284703 - DNA, 90 bp, Homo sapiens
cattactccctttgaccagtgctttctatagggagcagagcagaggacaacttgtagaagacatgaccattaagagacatcaacttcgca

SEQ ID NO: 284704 - DNA, 82 bp, Homo sapiens
agacagaatggtccgagcatgcattgccattatctgtgaactagacatatgtagagtgtgtcggtcagaaggaacacctgag

SEQ ID NO: 284705 - DNA, 74 bp, Homo sapiens
gcggaggcggcggaggccagggaggaagatgtcgtaatgagcgaatcatgtcaaccctgccatggacttcacgc

SEQ ID NO: 284706 - DNA, 82 bp, Homo sapiens
ggaagccgcccgccccccaccgccgccccctccggcgtgttcatgcccccggggtgaaagaaaatggcccgaaccaagcaga

SEQ ID NO: 284707 - DNA, 90 bp, Homo sapiens
gggagccggaagagctgatgcccgtgtctcctttcctcttgggccgggcactttgggctgccagtcggttcactgttgctatgtcccctg

SEQ ID NO: 284708 - DNA, 101 bp, Homo sapiens
gcgggcgagctgcggctcggacgccagcggacacgcgggcgaggttaacacagaaatctgcctcctgggccatgccgcttctaaggcctgtttcttctcat

SEQ ID NO: 284709 - DNA, 100 bp, Homo sapiens
agcctgcccagacggctcacctgtgcgggatggaacaaaaggtaccccttgttacgtggattcagaaggaattgttcgaatgcttaacagaggacttggt

SEQ ID NO: 284710 - DNA, 82 bp, Homo sapiens
gaggacgaggtgcgccggctgatcgatgtgggaagaatatcctgatgtttatggggtcaggcggtcaaaccgaagcagacaa

SEQ ID NO: 284711 - DNA, 125 bp, Homo sapiens
ggccccacatcagctccaaggtcagggtgattaagctgtcaggtgggggaatccgagcccgcattttagagactttggtcatgcttcttcttcttgcgttactcattcttgggatagtgtgggta

SEQ ID NO: 284712 - DNA, 83 bp, Homo sapiens
gcggaagtggaggtggctgacgagctgctggggcgaagctgtgctcaggcccgggctggacgcagagccagagctgtccccag

SEQ ID NO: 284713 - DNA, 80 bp, Homo sapiens
ccgcgtttcagccctagggaaggaatactcccccagttgcaagaggcgcaggaccgtggaagacttcaacaaattctgca

SEQ ID NO: 284714 - DNA, 80 bp, Homo sapiens
gtggtggaaaagcagaaccttagcaaagaggagctgatagcggagctgcaggaagcgccgcggagccatcaacagcaagc

SEQ ID NO: 284715 - DNA, 100 bp, Homo sapiens
tcagcccatggcttacgctgcacttccatcccacggtcaggttgaggaaacgtcccatgcagtcaactgttgctacttaaatgcagctgtttctgcattt

SEQ ID NO: 284716 - DNA, 117 bp, Homo sapiens
cttcgtcaaagtctacccctcctgtcggggaggcaaggtggttttggaccagacaggcgtgtctaatgagaaagatcagtctaaagaaaaggagaagaaagtgaaaaaaacaattcc

SEQ ID NO: 284717 - DNA, 100 bp, Homo sapiens
catgtgctgaaatgtttgacgacactgatggtttggttgtctgcattcaaaagagcattctattaaagctaccttaatttggcgcttatttttcttaatc

SEQ ID NO: 284718 - DNA, 89 bp, Homo sapiens
ccccacacaggagatccaggtcaccagcatccactggagctacaagagtgcaccccagacatggatgtcatcctcaacattcctgtgga

SEQ ID NO: 284719 - DNA, 100 bp, Homo sapiens
tgcaggcgatcataaagaaaatcgacttggactcagatggctttctcactgaaagttccttcaatggtgccttagctgctgttcctgtccaggacctggg

SEQ ID NO: 284720 - DNA, 89 bp, Homo sapiens
gtttgaggtgtacggacctatcaaaagagtgaaaggtgtagcagtcactcggcctacacccacagcatcgaccttgtgaacccagcgac

SEQ ID NO: 284721 - DNA, 100 bp, Homo sapiens
cggggacgacagggaccccgagatcgagctctttgtgaaggaaccctgattgctgtccttcaacgtgttcattatgaagttattagtaatacttttgttt

SEQ ID NO: 284722 - DNA, 90 bp, Homo sapiens
cctgaagaaaagaagattgaatatagattgttaaaggaagagattgccaagttgtaagttctacaaatggagagttaaacacagatgacc

SEQ ID NO: 284723 - DNA, 100 bp, Homo sapiens
gcgggaggccgaggagaagctggaggagcggctgaagcgcgtgcgcatgaagacacgggcatatcataggctgaaggatgatgtcccggaagaggtaaaa

SEQ ID NO: 284724 - DNA, 75 bp, Homo sapiens
gtgcgccggcagaggatccagtgttcaccatcctggccccggaaggccaaacgtaccaagaaagtcgggatcgtc

SEQ ID NO: 284725 - DNA, 98 bp, Homo sapiens
gtggttctacgtgtagtaactgttctggaatcagtaacatgatagccaagcttgccaaaacctgcaccctccgcatcagccctgataagcttaacttc

SEQ ID NO: 284726 - DNA, 86 bp, Homo sapiens
aaaacatcatgaatttgaatacttcaagtaatactggtgatacccaaagaggaaatgcatgctgaaatctgttatgccgagtgtct

SEQ ID NO: 284727 - DNA, 75 bp, Homo sapiens
ccgccgccaccacccactccggacacagggagtgcatccgccccaacccttttccccctcgtctcctgtgagaat

SEQ ID NO: 284728 - DNA, 98 bp, Homo sapiens
aagatattgaagattttgagttcacccccaagccagaatatgaaggccccttttgtgtcttcaatgaacccgatgagaggagtttgaaattcttgctt

SEQ ID NO: 284729 - DNA, 75 bp, Homo sapiens
ccgaactccaggacagcatccaggcctcattggacagcattcgaggaatgtaagaagcacttggcaggcttgggg

SEQ ID NO: 284730 - DNA, 90 bp, Homo sapiens
aggtggaaagtcctgaagaaatccagtgggttcttgatagtccacaatgggtgaaccacagcaagtgagtgcacttccaccacctccaat

SEQ ID NO: 284731 - DNA, 105 bp, Homo sapiens
atgatctcgtcactcctttctttgtggtcttcatttgtgaatacataggcattgtgcctagtaggctgacctctacagactacacagacctagctccactgtctt

SEQ ID NO: 284732 - DNA, 100 bp, Homo sapiens
tgagcgactatattgagaaggaggtaaagggctacaataaggcagtggattggtgggcattaggagtgctaatctatgaaatggcagctggctatccccc

SEQ ID NO: 284733 - DNA, 75 bp, Homo sapiens
cccgaacgggttgcttcccccgctgcgagaacatgaaaggctcccggagcagcgctgactcctccaggaaacact

SEQ ID NO: 284734 - DNA, 50 bp, Homo sapiens
cacagacagaatccctgctaccaatgcctataagaaaatcttagaaacca

SEQ ID NO: 284735 - DNA, 50 bp, Homo sapiens
tcatgaagtcggcggatgtggagaacatgattccacctttccactgatag

SEQ ID NO: 284736 - DNA, 100 bp, Homo sapiens
ccgtgaccgagagcgtgaccgagagcgcgaatatcgtcatcgttagaagctgtacccaagaattaaaccaagacaaaggagcttggcctgaaacttccac

SEQ ID NO: 284737 - DNA, 100 bp, Homo sapiens
cgctgaacggcggagcgggagcggccggaggagccatggactgcagcctcgtgcggacgctcgtgcacagatactgacctagagtcccgcagggatgtga

SEQ ID NO: 284738 - DNA, 107 bp, Homo sapiens
tctcacctgggttttcttagccctctacttttcaagacaccaagtgagaggccaaccaggacatggatttgattgacatactttggaggcaagatatagatcttgga

SEQ ID NO: 284739 - DNA, 100 bp, Homo sapiens
aatggaaagagaagactgatagagacttcgttaagttcaacaacatgttgctgtactgtgtgcccaaattcagcttggtaggctctaaattcacagttcg

SEQ ID NO: 284740 - DNA, 80 bp, Homo sapiens
agtgatgtgaagaggttcagctgtcctaatcctcactgccgaaagagctgtaggtaaaacttgcctactgatcagttaca

SEQ ID NO: 284741 - DNA, 75 bp, Homo sapiens
ccaggagaaattcgccctcaaagatgacgtagctttgccaaagacttagaagctaagcagaaaatgagcttaaca

SEQ ID NO: 284742 - DNA, 75 bp, Homo sapiens
gagagccgtaggcaggaccccgggacaccctggaagccaggaaatgcttcccttgtcactgctgaagacggctca

SEQ ID NO: 284743 - DNA, 74 bp, Homo sapiens
ttcattccagaaggaacttttacaactggtatgggaggacatggctatggtggagctggtgatgcaagttcagg

SEQ ID NO: 284744 - DNA, 100 bp, Homo sapiens
gacaccagctccgaaatcaccaccaaggcgagaaggttttgggattcgaattcagtgggacaagcaaagtcgtccttccttcataaacagatggaatccc

SEQ ID NO: 284745 - DNA, 99 bp, Homo sapiens
aaacagcttcgcagtcactaatgcttgatacttcggatctgcttgtgaagaaaaggtggacccctgcgcctcgtctccgtgccagaacaacggcacctg

SEQ ID NO: 284746 - DNA, 75 bp, Homo sapiens
cctcctcagtagctgggattacaggagctttgcccaggtgctggaactctccgcagaggcaagcaaagaggcagc

SEQ ID NO: 284747 - DNA, 100 bp, Homo sapiens
tgggctctgtttgtagagagaaaattgaagctgtggcaactgaattaaatgttgactgtgaaatagttcgggataccatacttgcagagctccttcagat

SEQ ID NO: 284748 - DNA, 50 bp, Homo sapiens
gcagcaatttcacaactcaggttggattgatccagaggtttcttgtactt

SEQ ID NO: 284749 - DNA, 100 bp, Homo sapiens
gcggaccggcgtccccggcgcgaagaggctggactcggattcgttgcctgagcacgtggtgaggtgtgtatggcttcccgtggactcagcctcttccccg

SEQ ID NO: 284750 - DNA, 90 bp, Homo sapiens
ctcagggccgggctcagcggctctgactctggaggaggagctgcaggaagcgatccggagggcgcaggaattccagaggcaacaaccacc

SEQ ID NO: 284751 - DNA, 101 bp, Homo sapiens
caatctttttgaaataaagaaacttcgagaactggaaggctatgataagctttgttttccggaaagttcgaagcttgctagggggaaatattcgtctcctg

SEQ ID NO: 284752 - DNA, 98 bp, Homo sapiens
ggggctgtcgcccgaatgcaggaagaccgtgatgggagctgcagcacagtcgggggtgtaggttatgggggtgtctggaaatgaagtatggaaatgaa

SEQ ID NO: 284753 - DNA, 90 bp, Homo sapiens
atgcggtctggatcggattttggaggcattgaagctgctgctgagcccgggagtctcagatgcaaacatcagtgggaattgtacccacac

SEQ ID NO: 284754 - DNA, 100 bp, Homo sapiens
aggggacatcatctgtgtgttctcacacttcctgcctgacacagctcacttcaagaagtgcacaatgtcagaacgtggaattaagtgggcttgtgaatat

SEQ ID NO: 284755 - DNA, 83 bp, Homo sapiens
caagaattcaaggccagaggctaatgaaggcctccggtgtggctgtctctgatggtgtcatcaaggtgttcaacgacatgaag

SEQ ID NO: 284756 - DNA, 100 bp, Homo sapiens
ggaagagaaagaaaatgccgaaggcactcagacagattcatgatgttgctatcaaaagttgagaaattgtcagaagaaatcatggagataatgcaaaatt

SEQ ID NO: 284757 - DNA, 83 bp, Homo sapiens
tcggctggagagcagaagaccgaaagatgtgcactcccagcaacacccctgccacgccgcccaacttccccgatgcgctggcc

SEQ ID NO: 284758 - DNA, 83 bp, Homo sapiens
caagagcatactttggaccctgttttcagaaagcagtgtttatgaacctcagttgcagcaccatgtggctcaaaagaagattc

SEQ ID NO: 284759 - DNA, 128 bp, Homo sapiens
caaagttcttaaggaccaacctcctaatagtgtggaaggtcttctaaatgctctcagtgctgaaggaagtcacgtttcaggacaaagcaatgggcgagatccacaagctcttgccaaggctgtacaga

SEQ ID NO: 284760 - DNA, 83 bp, Homo sapiens
cctgggctgggaacccgcggtggagcgggacacgaacgtggcgcctgtgtctggcagagctggtgtgagacgagacaatcctg

SEQ ID NO: 284761 - DNA, 117 bp, Homo sapiens
accgggggtgacagctccgggaccggccgaaaggcgaggaaccgcccgtggaccgggagcccgtggaccgggagccggtggtgtgccaccccgacctggaggagcggctgcaggcct

SEQ ID NO: 284762 - DNA, 83 bp, Homo sapiens
gcgcgggatcccagcctcaggcgtgcgcggacggtgtgcggtcgtattggctgctatgtgaccatcttccaaaacatttccaa

SEQ ID NO: 284763 - DNA, 100 bp, Homo sapiens
atgtgcccgtctgagatggggacgctgtggcaccactggtcgccggtactcatcagcctggccgccctgttttccaaagaccttcacggcatggtgcaac

SEQ ID NO: 284764 - DNA, 100 bp, Homo sapiens
ttgggactgccccggcaactccagggtgtctggtccacgacctatcctaggcgccatggccaaagatgaagaggaagcctttctggattggagtgatgat

SEQ ID NO: 284765 - DNA, 51 bp, Homo sapiens
atcaccttgatttttaatcccacgaatttcgctaaggagtttgtgatcagt

SEQ ID NO: 284766 - DNA, 76 bp, Homo sapiens
cacttgaaaccattagtgagctggtagtagattccatggatgcattagataaagttgtccaggaaagagaagatgc

SEQ ID NO: 284767 - DNA, 80 bp, Homo sapiens
atacagggtcaaaggagagcacaaccatcgcagttggaagcccatggggcagtcatccgtccttggctcaggatttggag

SEQ ID NO: 284768 - DNA, 90 bp, Homo sapiens
gcttatctgagactagtggcctcggttcttcctgtgtcctgtgtttggagagagatcacaggaggactgggactcttcaattaatctgac

SEQ ID NO: 284769 - DNA, 80 bp, Homo sapiens
taaatacgaatctttccaaaggagatgcccggaaggaacacacaagtagttatctttcaggctgtctttgaatacttcca

SEQ ID NO: 284770 - DNA, 82 bp, Homo sapiens
tcgtctggtttagaaggaatcgccgggggaatacaggccaaactacaattcccgagaggagaaaagccttacagatgctcat

SEQ ID NO: 284771 - DNA, 75 bp, Homo sapiens
ggtgaccctgcagacatcatccatgacttccagcggggagagaagtcttttttcctccagccaggagagcagctg

SEQ ID NO: 284772 - DNA, 83 bp, Homo sapiens
cgctttggatgccgagagcgagtatctggctttccttaaagtttcccatgtctcaatggactcctgaatataacgagctctac

SEQ ID NO: 284773 - DNA, 75 bp, Homo sapiens
cagagaaggctcactcaaggatcagttggctttagcaattggcaagaactcccctggagcaggaaattttcaacc

SEQ ID NO: 284774 - DNA, 75 bp, Homo sapiens
cgctgcagtccgagaacgccgcgctgcgcatctccaacagcgacctgagcggacagaatgacttggaagataacg

SEQ ID NO: 284775 - DNA, 100 bp, Homo sapiens
gggaaagatctaccttctggaagctactactacgtggtgcttggaaagtattgttgtccagacatgataaataactttttgggactggctaaaacagaat

SEQ ID NO: 284776 - DNA, 100 bp, Homo sapiens
atcgagaaagggctgcagttcattcaacttggtcaggtactttcagggcctgggccccccaccgaagttccaggtaacactgaatttctgggaagagagc

SEQ ID NO: 284777 - DNA, 74 bp, Homo sapiens
gatcgcttcagctcgcatcgaggagagaaaagtctctaagtttgtgccagagactgctgctactttgaaacgta

SEQ ID NO: 284778 - DNA, 50 bp, Homo sapiens
caggtttcggcacatggagattgatgtagtagtcatcttataagtacatc

SEQ ID NO: 284779 - DNA, 100 bp, Homo sapiens
gcgggtagtgccagctacggtccgcggctggggttccctcctccgtttctgtatccccacgagatctgcgagtgaagagggacgagggaaaagaaacaaa

SEQ ID NO: 284780 - DNA, 75 bp, Homo sapiens
agagccttcaaaagcagtgcaactggctcagtattcacagggaaagctgtgaggtatcaccttttgccatgatag

SEQ ID NO: 284781 - DNA, 75 bp, Homo sapiens
cattttctattttttttcctaggttctctgctgtttaaaaagtatccctgtgcggggcattacgtcgctggaaag

SEQ ID NO: 284782 - DNA, 94 bp, Homo sapiens
agcagtatgccggaagctggttttcaggccacaaatgctttcacagacctgcctagagctggaacgttacctccagagcgagccctgctatgtt

SEQ ID NO: 284783 - DNA, 76 bp, Homo sapiens
cttgacgcggaaaaatctgctatattaggaccacatgcaaagggccaatgtgccagcagatctgagctgagaatca

SEQ ID NO: 284784 - DNA, 83 bp, Homo sapiens
gcgacgctaagttgctgatcgtggcgatgaaggatttgggggcagagcacttggcaggtcatgaaggggtccaacttctcggg

SEQ ID NO: 284785 - DNA, 75 bp, Homo sapiens
cccactgtggtgtacctgaccaagtccagccccagcatggcagctattgagggcacctacattgacaagaaatgc

SEQ ID NO: 284786 - DNA, 83 bp, Homo sapiens
gtgcatgatgtgcgatgtgcggaagggcacctccacccggagatctcttagtaaatccagatcaaccaaggctcaccattcca

SEQ ID NO: 284787 - DNA, 98 bp, Homo sapiens
aacatccaagtcagctgtgtggagtgttctaaccaacaaggaagagacattggctccctggattatcaagagtttgtagttgacattgaatccaggct

SEQ ID NO: 284788 - DNA, 90 bp, Homo sapiens
taaaaataaactgcttgaacatcctttgactggttagccagcccgagggcaacatccttcgagaccggttcaagagcttccagaggagga

SEQ ID NO: 284789 - DNA, 96 bp, Homo sapiens
ccagcggcagcatgcatctgatgctctctctccagtccttgctgaagagactttccgttacatgacttttggaaagaacaaacagtggatttgaag

SEQ ID NO: 284790 - DNA, 100 bp, Homo sapiens
ctggctgaccactttgaaggaggatgctccagcaggcaaggatcaaaagacccagctgagggcgatggggcccagcctgaggaaacacccagggatggcg

SEQ ID NO: 284791 - DNA, 74 bp, Homo sapiens
catgtgctttacctaactacaggtgctggagaatctggtaaaagcaccattgtgaagcagatgaggatcctgca

SEQ ID NO: 284792 - DNA, 90 bp, Homo sapiens
atgttgctgaagaagaaatcatagacgatgatgatgatgacatcacccttacaggtgaagaatatgtaaagagcctaactgctaaccccg

SEQ ID NO: 284793 - DNA, 100 bp, Homo sapiens
caggagctgagcctaagccctggcggggctttgggctgtaggtgccttgcagatagagagcagtgaggaatccgaccaaggcaagtacgagtgtgtggcg

SEQ ID NO: 284794 - DNA, 75 bp, Homo sapiens
ttcgttgtgccagcgactaaaaagagcaatggctgccatccggaagaaactggtgattgttggtgatggagcctg

SEQ ID NO: 284795 - DNA, 88 bp, Homo sapiens
ggctggggaggcgaggccggacgcacctctgtttgggggtcctcagattccaaaagatgagcatattcttcggttcctccgtgcacgg

SEQ ID NO: 284796 - DNA, 87 bp, Homo sapiens
cgcgctgagggcgcccagctgtgtactaatggtcacttgatgtgcgctggctgttttatccacctactagcagatgcccggctgaag

SEQ ID NO: 284797 - DNA, 100 bp, Homo sapiens
agtcgcagttaccaccaaacccaggaggagactctccctggaaaacttcccttccctttcggtatataatgaacagattcgtgatctcttagtaaattca

SEQ ID NO: 284798 - DNA, 75 bp, Homo sapiens
ccgcccgtccacacccgccgccaggacatatccaatgatgatgatgacatgcaccctgcagcagccgggatggca

SEQ ID NO: 284799 - DNA, 100 bp, Homo sapiens
caaaatggcagatcaaactctcttctccattgtcgagtgggccaggagtagtatcttcttcagagaacttaagacatccaacacgctgacatgggccctg

SEQ ID NO: 284800 - DNA, 100 bp, Homo sapiens
ggacgggctcccgctggccgcctcgatgcaggaggacgaacagagatgggatttcaccatgctactcaggcttgtcttgaactcctgggctcaagcgatc

SEQ ID NO: 284801 - DNA, 82 bp, Homo sapiens
ctgcgaaggcggcggctcctgccctctcgctttccctctcgcgtctctggctgcagacgagccaaactcaggctgtaccttg

SEQ ID NO: 284802 - DNA, 87 bp, Homo sapiens
gagaaagattttcacctttgcagagaagaatctgaattatccagaacagaaagttgtgactgttggacagttcaaaattggtctgat

SEQ ID NO: 284803 - DNA, 83 bp, Homo sapiens
cggactcccgcggcgggaggagcctgttcccctgaggtctgaagacttgcggcgtgaatttggtcgttatggtcctatagttg

SEQ ID NO: 284804 - DNA, 83 bp, Homo sapiens
gtggactccttcggcagtccacccaccgccgccgcctcccagccctgccaggagcccggaagtgggtccgcacgagacagaat

SEQ ID NO: 284805 - DNA, 98 bp, Homo sapiens
gtagtgttggtgcttcttttcagtgccagtccatccatcacgaccacatttgtcatgatgacagtgacaagctcgttttgacaggagccattcaagta

SEQ ID NO: 284806 - DNA, 101 bp, Homo sapiens
gcggaaggccctcaacatcccggagcagctgccacaatgggacatgtgcaatttgtcccgctggctggaagcctggcagtgacacgattaagcccaacgtg

SEQ ID NO: 284807 - DNA, 100 bp, Homo sapiens
ccggctctcggtccgggacgtgcgcttccccacgtcgcttgggggccacggcgcggacgccatggtcaaaatgcagatcttcgtgaaaacccttaccggc

SEQ ID NO: 284808 - DNA, 87 bp, Homo sapiens
caagcaaaccgggaaaggagaggatcccggagccggccctgggaggagcggggacactgaggacctctctccaaattggcctctcaa

SEQ ID NO: 284809 - DNA, 96 bp, Homo sapiens
ggaggatgtcgggacaccccggaagctgggaaatggagctctccttgtgtacatcatcatggttccccaggagtggatttaccagttaccatacca

SEQ ID NO: 284810 - DNA, 90 bp, Homo sapiens
gtggtttcttgtgaggacgcggcagcccgtggagtcggctgagggaaaagcgaggcaaggcaggcgggaatatacagatgttgccacagg

SEQ ID NO: 284811 - DNA, 75 bp, Homo sapiens
gtggtgcacacgccctgcatcgagcagctggagaagggcagcaggatgggtgtggaagcagtgatggcacttttg

SEQ ID NO: 284812 - DNA, 75 bp, Homo sapiens
taaggaacagatccccggaggaggtgtgaacccacatccctgcccccagggccacctgcaggacgccgacaccta

SEQ ID NO: 284813 - DNA, 74 bp, Homo sapiens
gcatcctccttgaagtatttggctgaggagttttcaatcccacaaagccttctagacaagctcagtggaatctg

SEQ ID NO: 284814 - DNA, 75 bp, Homo sapiens
cacagctggatgtttgcgacatcccagagagcttccagagagctttcaagttgtggatggaataaaaaagaaaaa

SEQ ID NO: 284815 - DNA, 100 bp, Homo sapiens
gctgaagagagaagatggcgcttgacggaccagagcaggcgcagttgtgtagcagttgagtaatgctggttagctgttaaggtggcgtgttgcagtgcag

SEQ ID NO: 284816 - DNA, 100 bp, Homo sapiens
aaccactgaggccacagcacagtgcataccagccatacacactgctgctatggatatgctgggaggacctggtatcgaaagccagtgtagaaaagttgat

SEQ ID NO: 284817 - DNA, 75 bp, Homo sapiens
gaaattacctccgagggaaacaagaaaacatcaaagaggtctagcaaaggcacctacaaaggcagcacctaagca

SEQ ID NO: 284818 - DNA, 83 bp, Homo sapiens
gggccggagcaggcgaggtggccggagccgtgtggaccaggaggagcgctgaatagccaggccagaagaaggaaggcctgtgg

SEQ ID NO: 284819 - DNA, 100 bp, Homo sapiens
gcaaggacaagaagctgtccgggacagactcggagcaggaggctattgagggcacctacattgacaagaaatgccccttcactggtaatgtgtccattcg

SEQ ID NO: 284820 - DNA, 100 bp, Homo sapiens
gcccggagcagccgccgccgcagcgcgaacatggacgccgtcaacgccttcaaccaggagaagtcaatgaaaggattctattttgcaaagctgtattatg

SEQ ID NO: 284821 - DNA, 100 bp, Homo sapiens
cgggcagcaggatggtggtggatgcggccaactccaatgggcctttccagcccgtggtccttctccatattcgagatgcattgttctgggttggcatggc

SEQ ID NO: 284822 - DNA, 98 bp, Homo sapiens
ctggcgcgatgcgtcaagtacactgaaattcatcctgagatgagtgtggacgaatgtggaacctcgctctgtggctgtgttcccttggcactccttag

SEQ ID NO: 284823 - DNA, 100 bp, Homo sapiens
ggaatcctcaacagatgccactgtaagtggggagagaagctgctcagcatcgccctgagcaactggtggtttgtggcccacctgacagacctgctggacc

SEQ ID NO: 284824 - DNA, 75 bp, Homo sapiens
gccggcgacctgaggggagagggaacgcagctgaaagcgtgaactgtacacgaagatcgattgagaagttattag

SEQ ID NO: 284825 - DNA, 75 bp, Homo sapiens
ggatgagaaagaaagtaaaagatgtcattgtgtgtgctgtatttatggagtttaaagattaatcatcccaaaaca

SEQ ID NO: 284826 - DNA, 75 bp, Homo sapiens
agttcaagaagaacactccagaggcaaagtactagctctgtgattagattgaattctccaacaacaacatctcag

SEQ ID NO: 284827 - DNA, 100 bp, Homo sapiens
gcatggcctggtctcctctcctcctcactctcctcgctcactgcacaggctctggaatgggcactctccttatcagcaagatccgagaagaataccctga

SEQ ID NO: 284828 - DNA, 100 bp, Homo sapiens
ctgcagccacatactatccgtttgttcaggaaccaccagtgacagatgagccccaagccatgtgctacattgaaacatccaacttagatggtgaaacaaa

SEQ ID NO: 284829 - DNA, 102 bp, Homo sapiens
cggcggcgcggcgcaggcaccggcccggggagaggcaccatgagcgttaccgtgcagacggtctacgtgcagcaccccatcacctttttggaccgccctatc

SEQ ID NO: 284830 - DNA, 100 bp, Homo sapiens
acagcattctaaagtgaatgactccaacgaattaggtggtctgactaccagtggctctgcagagatatcagttttagagaatgtggcgtggagaaattct

SEQ ID NO: 284831 - DNA, 100 bp, Homo sapiens
caatcttcctgctaaggccattggacacagaatccgagtggttgcagagcctgaggcctgtgatcagatgtacgagagcttagcgcgactccattcaaac

SEQ ID NO: 284832 - DNA, 100 bp, Homo sapiens
gttccagtttgtggcctcctaccaggagctcatggttgagtgtacgaagaaatggttttcctaggacattaggacaagccgaagccctggacaaaatctg

SEQ ID NO: 284833 - DNA, 98 bp, Homo sapiens
agataaaagcggaagtttgccacacggaggcactggctacaattaggcttctcgacgtcctgtgcgaaatgactgtgaatactgagctgctcggctat

SEQ ID NO: 284834 - DNA, 83 bp, Homo sapiens
attgagacagaccggggggtgcgagagcagattgtgattgctagcattatgtgcagttacaataaaaatgactggacggaact

SEQ ID NO: 284835 - DNA, 75 bp, Homo sapiens
catctcatcttacaggagcagactagcccaactatggaaaccagcaatatggaccaaacagccagttccccaccc

SEQ ID NO: 284836 - DNA, 74 bp, Homo sapiens
gcaggaggacggagccctaaccgcaacccgcgccgcgccgcgccgcgccgctaaaccatttacttctaaagtga

SEQ ID NO: 284837 - DNA, 75 bp, Homo sapiens
taaagagcaagcctaactcaagccattggcacacaggtatatgaatgacctaaaggtacaaataaagacggagag

SEQ ID NO: 284838 - DNA, 90 bp, Homo sapiens
gattgatctgctcctgcaggttctgaaaggtaccggggagaccaggatgccactatgtctatattggacatatccatgatgactggcttt

SEQ ID NO: 284839 - DNA, 100 bp, Homo sapiens
caaaaggtcccggaccccccggatctgacggggcgggacctggcgccaccttgcaggaatagccaggccagaagaaggaaggcctgtggtgagtgggaca

SEQ ID NO: 284840 - DNA, 101 bp, Homo sapiens
aatgatgccagtcgtggtactttaagcagctatagtcttgtattgatggttttgcactatttacaaaatgatggatgcaataaaaggaacaatgacagaaa

SEQ ID NO: 284841 - DNA, 100 bp, Homo sapiens
gttttgaggacactgaagccacccaggtgtaccccaagctgtacttgtcacctcgaattgagcagtttgttgataagccggggcccttcgtgggaccctg

SEQ ID NO: 284842 - DNA, 82 bp, Homo sapiens
gcttcgccagcgggccagcaacaaagtgcaaggcgcagtcatgtcgggattcgacgatcctggcattttctacagcgacagc

SEQ ID NO: 284843 - DNA, 100 bp, Homo sapiens
tgaacaaatccgggggcaaggccaaaaagaagattgcagccttcttcgctgagtctctgcccagtgtgggagggcagatcattccccctgctggctactt

SEQ ID NO: 284844 - DNA, 83 bp, Homo sapiens
ggccaagagaagaggcggtggaggacacgacgcgcttaaaggactgaaatcgccaagagattgaatacgatttgtgcacaagt

SEQ ID NO: 284845 - DNA, 100 bp, Homo sapiens
atcgccgcggggcagttcgggccggctgtcctggcgcgcaattaccagctctggctgggtcgccacaacttgtttgacgacgaaaacacagcccagtttg

SEQ ID NO: 284846 - DNA, 75 bp, Homo sapiens
tacctgcgctatgaagacacgcttcttctggaagaccagccaacaggtgaggaagaggatggagatgaagatgag

SEQ ID NO: 284847 - DNA, 141 bp, Homo sapiens
ccctgcatgtctggctacctcgtggacaagtttgcagatcgggagcgcaaggtcgccctcaaggccatgatcaaaacgctccaggaggccagagctctactgaagcggcggcggccccgggggccagggggccggggacta

SEQ ID NO: 284848 - DNA, 82 bp, Homo sapiens
attggaagtggcggcggcggcaggcggcagaggggagaattaaatgtgagggagtctgacgtaagagtttgtgatgagtcat

SEQ ID NO: 284849 - DNA, 101 bp, Homo sapiens
aatgctgcctaggtcctagaaacagttcggactaaggatcaccgctttgaaagtgtcagtcaccttatcagctaccacatggacaatcacttgcccatcat

SEQ ID NO: 284850 - DNA, 82 bp, Homo sapiens
cccgctgtggtacttctcgcagtccccgcgcgtggtcatccagcaaacggggattcagcgtccgatcctttggaacagggac

SEQ ID NO: 284851 - DNA, 98 bp, Homo sapiens
tttccagtgcagcgcggagtgggcgatgccagcgtgccagagtttatgtggccgaggcagacaagtggaattaggccttgctgcaggggacttcattt

SEQ ID NO: 284852 - DNA, 75 bp, Homo sapiens
cggagctgggcgcggattcgccgaggcaccgaggcactcagaggaggaatagctattcagtcagacagaaccact

SEQ ID NO: 284853 - DNA, 100 bp, Homo sapiens
ttgactcctcagagctgcttctcgatgtgaacgaaaacgggaagaggcgaactccagacagggtacagctctgccggggggggaaaaagtggtaccattt

SEQ ID NO: 284854 - DNA, 100 bp, Homo sapiens
acacagctgttggcacgtgtggaccatctaatgaaaaggagaaggcagagcccccccaggctatgaatgccctgatgcggttgaaccagctgaagccagg

SEQ ID NO: 284855 - DNA, 98 bp, Homo sapiens
aaggaagaaattgatattttgatgaacaatattgaacgctatcttaagatctcttccgttccctgctggcagttcatcagctggatcagccacatggt

SEQ ID NO: 284856 - DNA, 100 bp, Homo sapiens
gaaagccgtgcggatgaggaccggagcggaaaaccttctgaagaatgaatctgaagtctgctgcagtaaaacacagaaggctttaaaatgttttcttgca

SEQ ID NO: 284857 - DNA, 101 bp, Homo sapiens
ccagcggcagcagcagcggcgggaggagcctccggggatcttagaaatgaagttgaaaaattacgcaatgaagtgaatgaaagagagaaagcaatggaaaa

SEQ ID NO: 284858 - DNA, 90 bp, Homo sapiens
cttgaagaaatccatgccatgaagacatatgtagagtgtgtcggtcagaaggaacacctgagaaaccgctttatcatccttgtgtatgta

SEQ ID NO: 284859 - DNA, 83 bp, Homo sapiens
cccggctgggcaaggagatcaacaacccagagtccgtgtattactgggcccagaagacacccttggtgcaggaggtgcaccag

SEQ ID NO: 284860 - DNA, 100 bp, Homo sapiens
cagccttggtctgagtggactgtcctgcagtaacagtgtatcatgtatgccactgattccaggggacactcccctgctttcctccaacctcagaatggaa

SEQ ID NO: 284861 - DNA, 90 bp, Homo sapiens
agtgccgactccttcacagccgtgaggaactcttcaggctccagaacaggaggccactgtctgcagctcccgtgaagatgtccactccag

SEQ ID NO: 284862 - DNA, 82 bp, Homo sapiens
gcagctataacagtggggagaggagaagatttgacttctgaacatcctttgttaggtatattgagatcttcagaagtagcag

SEQ ID NO: 284863 - DNA, 100 bp, Homo sapiens
cgctcttcctttccaacttggacgctgcagaacggaaactggacgcattggattagaaggctgcctttgtcaagatttttataggataagagacctttta

SEQ ID NO: 284864 - DNA, 100 bp, Homo sapiens
tggtccattgagcccaacacggtggccataccattgtgaagtcatcgatgaaaaagtccagcatattgtggtcgtggagtcggactttgtgaaatacgag

SEQ ID NO: 284865 - DNA, 75 bp, Homo sapiens
ctcctgcctcccagagaggggagccggcgaggatcaaaatcttcgaaggaggtgattctacagtaaccaaattgg

SEQ ID NO: 284866 - DNA, 75 bp, Homo sapiens
agcatttgatcttctgatgaagttatcaaaaacagctgtacattttcagggtgctggagatctagaagacccatg

SEQ ID NO: 284867 - DNA, 74 bp, Homo sapiens
tccagtgcctccgacgcctcctgatggagatggtaacctgcacctcaatgtgacggcggaggccttcagcccct

SEQ ID NO: 284868 - DNA, 96 bp, Homo sapiens
ccaagagactcttccaaggcactaccaatatgttatctccagatgccgcgcaactgtctgatctcagttcatgtaatctatgccagcaattatgac

SEQ ID NO: 284869 - DNA, 82 bp, Homo sapiens
tcgcggtgggtcctcgcttgcagttcagcgaccacgagtccgaaattgaagttcagaggaagaattgccttccaccgcatct

SEQ ID NO: 284870 - DNA, 95 bp, Homo sapiens
agggcggacacctccacatcgccttttgccacctttccctttatttccggagaccccctgccaagtgatggccgtgctcctacactacttcttcc

SEQ ID NO: 284871 - DNA, 98 bp, Homo sapiens
tccaggtccgacccgcgaacccctctgggatccccgccgctctgtctacaacccgaggttcacctttccttgccagtgaagatggcgtgcttggcgga

SEQ ID NO: 284872 - DNA, 101 bp, Homo sapiens
ctgaggctttctaccaatgcaggccagtggaaggaagcagctagcaaggtgacccatgcattggttaatatcaggtttcattgtttgcggaacttttcaac

SEQ ID NO: 284873 - DNA, 100 bp, Homo sapiens
cctctgggcggagcagcaagaacagagatggcggggagagacggccaagcagcaccagcgtgcctttgggtgataagggatggcgggtgaaaaagttgag

SEQ ID NO: 284874 - DNA, 101 bp, Homo sapiens
acattcaggggaaccgcctcaccgttctgcccccagaactagcggtcttgcgagtggctggttccctgcagaagagcacagaagtgatgaaggccatgcaa

SEQ ID NO: 284875 - DNA, 50 bp, Homo sapiens
tcagccttcccagtagctggaactacaggagctaaattgaagaaggagcg

SEQ ID NO: 284876 - DNA, 48 bp, Homo sapiens
atatcttgaaaagctgccagaaagacagccgctccgaccgctggtccc

SEQ ID NO: 284877 - DNA, 100 bp, Homo sapiens
gccgagcggcaacggggctccgggccctaagggaattcagtttgcctgttctgtatgcaagttccgtagctttgatgacgaagagatccagaagcatctg

SEQ ID NO: 284878 - DNA, 98 bp, Homo sapiens
gctgtgttcatggccgagaccaagggggtcgccctcaaccagctgtcactgcaggagctgcagaccatcagtgcacagccagagaacaacacatcaca

SEQ ID NO: 284879 - DNA, 50 bp, Homo sapiens
gctttgcagacgctgaaggggaaggatgctttcattggatttggaggaaa

SEQ ID NO: 284880 - DNA, 75 bp, Homo sapiens
gacacctgagcacgtcttgcctgagtcccaggagtcttttagtcctgctatacagctgcaccttgtacatcaagc

SEQ ID NO: 284881 - DNA, 90 bp, Homo sapiens
cgccgctgtccggcccccgagcacgccggccccgcgcgcgcctcgaggccgagtcaagcaatcagccatgactgcctttgcactgtccat

SEQ ID NO: 284882 - DNA, 100 bp, Homo sapiens
ccccaagaagaccattcagatgggatctttccggatcaatccagatggcagccagtcagtggtggaggctatcttagcggcacagagacgaggagaagat

SEQ ID NO: 284883 - DNA, 80 bp, Homo sapiens
tcggcagtccacccaccgccgccgcctcccagaatcctggaacctgctccttctgctctcgtgactgactgtgttctcta

SEQ ID NO: 284884 - DNA, 74 bp, Homo sapiens
agcgggtgctgctcatctgcctcgacctcttctgcctcttcatggatcatgagcgtcttgttgttcatcgagca

SEQ ID NO: 284885 - DNA, 83 bp, Homo sapiens
ccatgccgtcggagaagaccttcaagcagcgccgcaccttcgggacccagacatggagctgcgggaagaagcctggtctccgg

SEQ ID NO: 284886 - DNA, 75 bp, Homo sapiens
gcagccgcccagaccgcgcagcgcgggaggcaggttccgcacgataaggagggttcctgcccccaggtgaacatt

SEQ ID NO: 284887 - DNA, 83 bp, Homo sapiens
ccgctttctcggtcggcaccgccatgacaatgcagatcttcgtgaagactctgactggtaagaccatcaccctcgaggttgag

SEQ ID NO: 284888 - DNA, 50 bp, Homo sapiens
ccagcagaggtgttggctttgcaagggtgtccgcaatgttgccagtgtct

SEQ ID NO: 284889 - DNA, 100 bp, Homo sapiens
acggcacctcgggggccacactgcaggcctccgcgctcagtggacatttgtgtactcactgctcaatcgagggaggccttatccagctatactcattctc

SEQ ID NO: 284890 - DNA, 100 bp, Homo sapiens
ctcgtcgtggcaggtcaccgagccgtcaagcaagaatctgtgggagcagatctgcaaggggtacagctcgcagaaagaagaaggtggtacatagaacagc

SEQ ID NO: 284891 - DNA, 75 bp, Homo sapiens
gcggtcttcccaggcgtcgcggagagcagagatttacaaacgaggaccacctggcagttcataaacacaagcatg

SEQ ID NO: 284892 - DNA, 74 bp, Homo sapiens
gatcagcagacccccaccatccctaaccggctggctgcagacccggttcttggcatggagtagagggtgagggg

SEQ ID NO: 284893 - DNA, 100 bp, Homo sapiens
aaccacaagacgactcaataggaggaaggcattttgttcccaacatcacctttggtcaccctgtggtagaaagccttcgaaagcagctaggccaggaccc

SEQ ID NO: 284894 - DNA, 100 bp, Homo sapiens
gggatgtctacctggtaatagaggacttgaagcagaaagcaagtgaatacgagtcagaagagcattgaatgaaatgtggaaatgtcaaaatctgctccga

SEQ ID NO: 284895 - DNA, 100 bp, Homo sapiens
ggccaaccagatgaggagctcaagcccaagaagaaagtcttcgagaagttgcagggcaagttaaagtcttcagagccctgtatacgtttgaacccagaac

SEQ ID NO: 284896 - DNA, 98 bp, Homo sapiens
agcacaatgaaggcaagtgggactttgccttctcagcccaaagtcagcgttgcagtgagagcagatgctggcaagaagcacttaccagacaagcagga

SEQ ID NO: 284897 - DNA, 100 bp, Homo sapiens
ttcatcgccgtgttatccttgagtaaaggatctgtgccagttcagaagcaggcgagcctcttccctgatgaaaaagaagataacttgctgggtaccacat

SEQ ID NO: 284898 - DNA, 120 bp, Homo sapiens
ggctaaaatggctcggaggaacaagcgaccctccgccaaggagggccaggagaggttatcattgggagcatcttcgaggtcatctgggctgtcataaaacctggcacatcctttggaatc

SEQ ID NO: 284899 - DNA, 75 bp, Homo sapiens
aagatggacaccgcggaggaagatctctcaaaggccttggttctgacagaaattggccccaaacgtgaccctgcg

SEQ ID NO: 284900 - DNA, 74 bp, Homo sapiens
ataatgggtatggaggaggacctggaggcggctgccgagtgatagagcagaaggaggttcccaatgggctcagg

SEQ ID NO: 284901 - DNA, 98 bp, Homo sapiens
cacacaccccccgacaggcacgcacacccaccccacagtgcccggctcggctgcgtgtgcaaggagcccccctacaaagtagaggagtcggggtacgc

SEQ ID NO: 284902 - DNA, 100 bp, Homo sapiens
gcagacgccattatcctctgtttctctgctgcaccgacctcgacgtcttgcctgtgtcccacttgttcgcggcctatagagcaaggtccgtggtcctgtc

SEQ ID NO: 284903 - DNA, 100 bp, Homo sapiens
agcagctggagaggctgacgcagatctgtcaggagcaagggatggatgccaattcaaaagacaagccccctgaaaccaaggagtctgcaatgaataatgc

SEQ ID NO: 284904 - DNA, 50 bp, Homo sapiens
ggagaaccgggagccattcagaaaaggtgtgggccatgtttgaggattgc

SEQ ID NO: 284905 - DNA, 96 bp, Homo sapiens
ccgagctggacccggaccggttttggcagcagtggacgtcagctcagcgaggtcttcatccagctgccctcgcgaaaggagctgcccgagtactac

SEQ ID NO: 284906 - DNA, 75 bp, Homo sapiens
aaatgaggccctgcagcagttctttgaaggaccagatctttatggaaaatgtaggtgcagtgaagcaactgtgca

SEQ ID NO: 284907 - DNA, 100 bp, Homo sapiens
ctgctctctctatgagaacgactgcatctttgacaagtttgagtgttgctggaacggttcggatagtcaaaccggcacgatgtccaggcaccagaaccag

SEQ ID NO: 284908 - DNA, 75 bp, Homo sapiens
caggagattgcgagggagcgatgcggtgcagcgcgcatccagcacgtgtatggtgcccagcaccccccctttgat

SEQ ID NO: 284909 - DNA, 74 bp, Homo sapiens
acagattgaaaccctctgagatatcaaccccctagcaggcgcggggcgaaggagctgctagaacaatgctgagg

SEQ ID NO: 284910 - DNA, 100 bp, Homo sapiens
aagacctaaatgagcctcttgccaaagtgtcccttttaaaagcgggctacattgagagacctcagctgattcgagcaaaagtgccaattgtgaagttcag

SEQ ID NO: 284911 - DNA, 82 bp, Homo sapiens
gcgcccatatgggggttctggagagcggggtgtggggcctccggtgtggctgtctctgatggtgtcatcaaggtgttcaacg

SEQ ID NO: 284912 - DNA, 75 bp, Homo sapiens
aggatgccacacgaagagctgccgtcgctgcagagaccccgctatggcttatgtcgggcagtctaggctctggga

SEQ ID NO: 284913 - DNA, 75 bp, Homo sapiens
agggtgcgggacccctcctcaccgtgcggtcacgccaatggagatcttcgtggatgatgagacgaagttgacgct

SEQ ID NO: 284914 - DNA, 99 bp, Homo sapiens
gaaattctgggccgaaatgatccgcctgcctcagcctccaaagtagctgagactacaggcggttttggtgaataacatcaccacaggtgagaggctcat

SEQ ID NO: 284915 - DNA, 75 bp, Homo sapiens
aggaggatcgaggagctggaggcagagctccgagaaaaggagacagttttgatggtacagtccaggtctatgatg

SEQ ID NO: 284916 - DNA, 74 bp, Homo sapiens
tgcctctgtcactcctggtgaccagcattcaaggtgaaaggtgtagcagtcactcggcctacacccacagcatc

SEQ ID NO: 284917 - DNA, 82 bp, Homo sapiens
aaacatactccagaattcctaatagaacagttgaagatgacagcgatgcagagacctatggagaagagaatgatgaacaggg

SEQ ID NO: 284918 - DNA, 50 bp, Homo sapiens
actactggttccatcgtatggctcatgcgtcaagggttccacactgttgg

SEQ ID NO: 284919 - DNA, 90 bp, Homo sapiens
gctcatctggaattttgccgatttcatgactaaccagtatacatccagaaagtgcccagaagaaacttcctgctggaaaaaatgaaaaag

SEQ ID NO: 284920 - DNA, 100 bp, Homo sapiens
ctgagcctcttctacatcggtttctacctcaaggacatggagcgcttgaaagagaccacccatacctggagcccagacactttgtggatgagaaggccgt

SEQ ID NO: 284921 - DNA, 101 bp, Homo sapiens
ccctgggctgcacctcagtcatctgctccgacaagacgggcacgctcaccaccaatcagatgtctgtctgccgggaaggagatttccaagattctgagaag

SEQ ID NO: 284922 - DNA, 75 bp, Homo sapiens
caccaggagaaattgcagctgcatgaatcccaaaaaggtttgtttctgcgtcacatgatcttggcctacagtaag

SEQ ID NO: 284923 - DNA, 50 bp, Homo sapiens
atgtcgggaaggtcactgaacctatacttgccagaactaatacagctgat

SEQ ID NO: 284924 - DNA, 75 bp, Homo sapiens
tatctttctgtggatccttacatggttccagcaacagatagaaatgctttaagttcactctggggaaagctggcc

SEQ ID NO: 284925 - DNA, 105 bp, Homo sapiens
gtttgcgctacgctgagtacttgcagccctcggccaaacggccagacgccgacgtcgaccagcagagactgctcctctggtgcaagtgtggtagctattgacaac

SEQ ID NO: 284926 - DNA, 51 bp, Homo sapiens
accgtgcaaatttctgatctagagcggttccgggagaaatttccacccgtg

SEQ ID NO: 284927 - DNA, 74 bp, Homo sapiens
ttcaagcaatcctcccatctcagcctcctgagtagctaaggactacagccctggtacctgacagtgtaaagaag

SEQ ID NO: 284928 - DNA, 99 bp, Homo sapiens
gactcaagcacgagctcatcagatgatgatgaagaggtttcagggagcagcaagacaatcactgcagagataccagactgcataaaccaagaacccaaa

SEQ ID NO: 284929 - DNA, 83 bp, Homo sapiens
ccccgtggctatgccttcatcgagtacgaacacgagcgagacatgcacttgtggacgaatgtggaacctcgctctgtggctgt

SEQ ID NO: 284930 - DNA, 100 bp, Homo sapiens
ctgagtagctgggactacaagtgactgcaaggagcctgacaagtgctgctggagacacaagcagtgcactgggcacatcatctaccctttcgcctctgac

SEQ ID NO: 284931 - DNA, 50 bp, Homo sapiens
actgactgggcaacatgttattcaggggccagtgtcattcaaagatgtgg

SEQ ID NO: 284932 - DNA, 87 bp, Homo sapiens
ccgggcgagcgggtgcgtctgccgcagagtcggcacctgaaggacatggaggaccgtataatagacgctggccccaaaggaaactac

SEQ ID NO: 284933 - DNA, 88 bp, Homo sapiens
tcttcagtttgttgcagaaaaaaataaagaagcttgaaagtgtcattactgcagtggatatgggccctcacattttccaaacctgtcc

SEQ ID NO: 284934 - DNA, 75 bp, Homo sapiens
gaccaccctccactgagtgcggagcagccaaggaaagatgaatgggagggctgattttcgagagccgaatgcaga

SEQ ID NO: 284935 - DNA, 98 bp, Homo sapiens
ggagaccctgaccaggaagcgggtctctgccagttccccaagaaaaactatttccaatgatgatgatgttcaaaaagccgatgtatcttctacagggc

SEQ ID NO: 284936 - DNA, 73 bp, Homo sapiens
cgatgagctcaatcggcactgggacaatgcagatcttcgtgaagactctgactggtaagaccatcaccctcga

SEQ ID NO: 284937 - DNA, 88 bp, Homo sapiens
ggctgcggcgtgtgcgcgcccgccagctgctccggagatacgaacccctgaacagtgcccaagtgttgtctctttgttgtcagagagt

SEQ ID NO: 284938 - DNA, 83 bp, Homo sapiens
ccttgtttgcctggggcaatggagaaaaaacgctttggataaacaagaagaattgacacctcttggagtccacttggcacgat

SEQ ID NO: 284939 - DNA, 101 bp, Homo sapiens
ctgcagctgcacaggctgcagccaccgcagctgccatgaataccctctaccatctgctttggtcagggtgccgctcgaggatttaaaagcaacaagaagaa

SEQ ID NO: 284940 - DNA, 80 bp, Homo sapiens
gagaggagctgtggataacgggaggtgaatttccatgtcaacatagtcctgtgttctaagaacggaagcatctgggctgg

SEQ ID NO: 284941 - DNA, 51 bp, Homo sapiens
gagaaaagcgagaccgcgtgcgaggaccggattatatctgtccaagatgcg

SEQ ID NO: 284942 - DNA, 100 bp, Homo sapiens
aaacattaaaaattagagcagaagttttgagccactatattaaaactgctaaggtcaatgatgccttccttcatgtgatacaggggaaatccgtgggcaa

SEQ ID NO: 284943 - DNA, 98 bp, Homo sapiens
tcattaccactcacactgtacttccagggagacaccgattataagaagagaaactcagcgctggggaagaagaaaggggagtgtgtttgcctacagtg

SEQ ID NO: 284944 - DNA, 50 bp, Homo sapiens
gctcccccttgactaaagctggttccgagtctgaggaagacataaccttg

SEQ ID NO: 284945 - DNA, 100 bp, Homo sapiens
cttttgtgtggacataagttgtcgactcatttggataaagaccaagaagtgggattactggattatatggttcgaaaacatggccaaaagaaatgccgag

SEQ ID NO: 284946 - DNA, 100 bp, Homo sapiens
cgtgcacatccaggctggtcagtgtggcaaccagatcggtgccaagcgcatcagagcagagtgacgatgatcctgtttgtcctggagctggagtgggtgc

SEQ ID NO: 284947 - DNA, 100 bp, Homo sapiens
tggctcctaaagattttgcagaacagagatgacatgccagcccagactttcatatcaagaagttggtatatgtttacctggttcgatatgctgaagaaca

SEQ ID NO: 284948 - DNA, 51 bp, Homo sapiens
agtcccgtgtggccttggagtgcaaggaagcttttgcagagctgcagacgg

SEQ ID NO: 284949 - DNA, 83 bp, Homo sapiens
gacaagttcaaggccaagttcctgacagcctggaacaacgtcaagtacggatattagaaatggctactccccagtcaattttc

SEQ ID NO: 284950 - DNA, 75 bp, Homo sapiens
ctgttttgccggaggagcccctcaggccgaaaaccaattctgtgtcctcggaggaccacagcccagttgggcccc

SEQ ID NO: 284951 - DNA, 98 bp, Homo sapiens
cgccgacgccgttccgtgcagctcacggagaagcgaatggacaaaggtgggctgggggccctgactggacctggcctggccagcttactggggagcag

SEQ ID NO: 284952 - DNA, 82 bp, Homo sapiens
ggggaaatggctgcgagaccctagaggcctgcggcctgcggctttatcctgtggataaacgcagagtgaacgagtttgggga

SEQ ID NO: 284953 - DNA, 90 bp, Homo sapiens
agaaaaaaaagtgtgggaagagcatcactattcctgatcagagaactccagttgcttcaacacacagtatcagtagtgcagccaccccag

SEQ ID NO: 284954 - DNA, 98 bp, Homo sapiens
gggcaagcacgggaagaagcagctggacccgctcaccatctacggcatccggtgtttacccaaggtccagcctagcccctaggcaccatgtcggacag

SEQ ID NO: 284955 - DNA, 75 bp, Homo sapiens
tccgagagaagggctccgagttcctgaaggaggagctgcacagagcgcagaagtttgcagtgttgatgtgggtat

SEQ ID NO: 284956 - DNA, 100 bp, Homo sapiens
aaaaaccaaacatgagggtagcaggaatgtatcctgtcaggtataatgtcagtgaatggcaagaaagttcttcatatggatcgaaacccttactacggag

SEQ ID NO: 284957 - DNA, 75 bp, Homo sapiens
tgatgacctcaaggaagagatgacccttatggtggcagacctgttatcctaaactaggtgagtcagcttttggta

SEQ ID NO: 284958 - DNA, 76 bp, Homo sapiens
tgggagcagctggctctgggccttgaacattccgaaactgtcaagattggcaagacagccctcagcgcctttttcc

SEQ ID NO: 284959 - DNA, 75 bp, Homo sapiens
gctggacagcgcccagattgagatctgtgtggctgactgctgctacggaagaggcacataggaaatgacatcgtg

SEQ ID NO: 284960 - DNA, 50 bp, Homo sapiens
gaaaaatgataactcatctcgttttgtcagtcagatgaattcccttgaac

SEQ ID NO: 284961 - DNA, 75 bp, Homo sapiens
gaccccgcggctgggcgttcatctaccacgctttcgtacttatgaaaatatgcatcagtttaatactgtcttgga

SEQ ID NO: 284962 - DNA, 75 bp, Homo sapiens
aaagccattcgggttggagtaattggtgtacctgaaggaaatcttaaaagaaattggtgttcagaatgtaaaagg

SEQ ID NO: 284963 - DNA, 75 bp, Homo sapiens
cgaacacgagcgagacatgcactgcttgggcactgtttaaaggaaagttccgagaaggcatcgacaagccggacc

SEQ ID NO: 284964 - DNA, 90 bp, Homo sapiens
cttttgaaaggtgtactgcaaggaacaaaatgtttgtaaattctccttttaccaagtgtggcaaaggagcagagaactttgacaagttct

SEQ ID NO: 284965 - DNA, 90 bp, Homo sapiens
aaggcaattcaggcccagaaactgcggaactcggccaagggaaaggtgcccaagtcggcactggatgttcccacaagcctgcatttccag

SEQ ID NO: 284966 - DNA, 73 bp, Homo sapiens
ttttgagaaacagaaagaggtgatcgagggctaccgcaaggaacaggagtacagctgtgtagtaaagatgcct

SEQ ID NO: 284967 - DNA, 100 bp, Homo sapiens
aaccgcaacatcgaccagaccatgctctccatcctgctcttcttccacaggatgggatcagtcagataagtttgtgaaaatctacattaccttaactgga

SEQ ID NO: 284968 - DNA, 100 bp, Homo sapiens
ccaaggtgttcggtccttccgaggaagctaaggccgcgttggggtgagaccctcacttcatccgagaccgcgtggcgcgcattgggctgggcgtgatcct

SEQ ID NO: 284969 - DNA, 82 bp, Homo sapiens
ctacctgcactttggggagcctaagtcctgaggagaaaactgcagtccgggatggctcagtcggcccctccaaagtcgcgca

SEQ ID NO: 284970 - DNA, 96 bp, Homo sapiens
cactccaacctcttttcgctgaacaaaatccagtctcatagcagaggagaatataatgtttacagcaccttccagagccatgaaccagagtttgac

SEQ ID NO: 284971 - DNA, 100 bp, Homo sapiens
catctacaggccattagatccaaagccattcccaaattatagagctaattacaactttcggggcatgtacaatcagagcacgcgatgcccttctggagga

SEQ ID NO: 284972 - DNA, 75 bp, Homo sapiens
caatgatctgtttgttgtggccaaaatcaagtcagaatggcggcagcggagcatcgtcattcttcaggattgccc

SEQ ID NO: 284973 - DNA, 71 bp, Homo sapiens
cgcggccgagggccgggcggccaagaggtgcgagaaggtgctggctgctgtctacaaggctctgagtgacc

SEQ ID NO: 284974 - DNA, 80 bp, Homo sapiens
acttcaaggataagggcgacagcaacagctctgccggctggaagaaaactttagaaactgttcctttggagaggaaaaag

SEQ ID NO: 284975 - DNA, 100 bp, Homo sapiens
ttctgtgtggagctcagcggctacgacctgaaactctacgaggataaccagacactcctgcccctcctaaagctgaagccaaagcgaaggctttaaaggc

SEQ ID NO: 284976 - DNA, 100 bp, Homo sapiens
caccctctctccatgctgctcagtggcatcgtggacccggccgtcatggggggcttctccaactatgaaaaggttttaaaaagttgcagaaagaagaaag

SEQ ID NO: 284977 - DNA, 119 bp, Homo sapiens
caacgagcagctcatcacccagtacgagcgggagaaggcgctgcgcaagcacgctgaggaggttacaatgcccttttaagatatgaaggatttgaaaatgactctggtctggacttctg

SEQ ID NO: 284978 - DNA, 80 bp, Homo sapiens
cgggcatgccaagaagatgagaccgggggaggcgacgctaagttgctgatcgtggcgcaaaatgatgcttcaacacccag

SEQ ID NO: 284979 - DNA, 90 bp, Homo sapiens
ggagtatggaaagttagagtggacctacctgataaataccctttcaaatctccatctataggacacaactcagatgggaagttcatcgcc

SEQ ID NO: 284980 - DNA, 100 bp, Homo sapiens
tcgagccgttccttcatgggatttgctgctcccttcaccaacaagcgaaaggcttactcggagcgtagaatcatgggactgcatcactgtgaccagtgct

SEQ ID NO: 284981 - DNA, 96 bp, Homo sapiens
ttgaacttcccagcactcgaaagggaccgaaatggagagcaaagcttcctggaaaaaaggatttattcattgaggcagatctcatgagccctttgg

SEQ ID NO: 284982 - DNA, 82 bp, Homo sapiens
aatggcgccgaagcaggacccgaagcctaaattccaggagggtatcatgatattagctggtttgacatcaagtcatttgtga

SEQ ID NO: 284983 - DNA, 83 bp, Homo sapiens
cccaacttcaccttcaacttgggcttctcgggcaagttctatcatactggaagcggaaaagagccaccccgacctcctgcagc

SEQ ID NO: 284984 - DNA, 75 bp, Homo sapiens
gaagatcatggataatggcatccagggagagctgaggagaacaaaggtcaccaggcagcagggattggaaaccag

SEQ ID NO: 284985 - DNA, 100 bp, Homo sapiens
tttgtaatggaagggcatggcaagactccacctcctggtgaagaaagcaaacaggtgtttgtgaaccgaagtttagcaatggaaaagataaagtgttttg

SEQ ID NO: 284986 - DNA, 75 bp, Homo sapiens
gatgggaaaagccctttggacaaggggctcacaacgaagtaagacagtagatgacaattctgcaaagcagactgc

SEQ ID NO: 284987 - DNA, 51 bp, Homo sapiens
gtagatagagccaaacaatcttttcaaggtgtctgaaggatggtgctgggg

SEQ ID NO: 284988 - DNA, 98 bp, Homo sapiens
atccagtgttcaccatcctggccccggaagtgcctaagtgtctagagagctgagtgggttgcctcggatcggccaggcctggatatcagcgaacagat

SEQ ID NO: 284989 - DNA, 87 bp, Homo sapiens
acaggaggcagtagccaaacacccagataatgttaattcaagactctcgaagagaagcttcagtgcagatggatttgagatgctaca

SEQ ID NO: 284990 - DNA, 124 bp, Homo sapiens
caccagacagtgtgtactctggcgtgcaacctggaattggaacggaggatgatgactttgagttcactggcagccacctgacagtaaggaatggctactcgtgtgtgcctgtggctttagcaga

SEQ ID NO: 284991 - DNA, 100 bp, Homo sapiens
tgggactacacaaaccccaatctcagtggacaagacgccctccttcttcatgagaatgatgccatccataagatctgtgcaaaactgatgaatatcaagc

SEQ ID NO: 284992 - DNA, 90 bp, Homo sapiens
aaggggcagatcgccggcaccacgagagcccggcccgcctgtgtggacgacaggccgacggtcgcaaggtcctacggtcaagcatccggg

SEQ ID NO: 284993 - DNA, 82 bp, Homo sapiens
ctgcgccggcctcggccaccgagatcctgctgacgccggctaggatgcctgaggaaacccagacccaagaccaaccgatgga

SEQ ID NO: 284994 - DNA, 100 bp, Homo sapiens
agctggtcgaacatctgcactctcagcctctacactggcctggcaggcggagatgaaaggttgtatcaaagttcttaaggaccaacctcctaatagtgtg

SEQ ID NO: 284995 - DNA, 87 bp, Homo sapiens
ggccttcgcgtctgcccggccaagaggcaaaggggaggttacgcagcaaaccatccagaagatgcctgaggaaacccagacccaaga

SEQ ID NO: 284996 - DNA, 83 bp, Homo sapiens
gcggacatcgtctcctgtgtggcgatggtcttcctgctggggctcatgtttgagtgtctttgagctgcagcagctggttgagg

SEQ ID NO: 284997 - DNA, 75 bp, Homo sapiens
catagatgtagctgatgtggagagcttgctggtgcagtgcatattggataactctccagggcacaccgtattcag

SEQ ID NO: 284998 - DNA, 74 bp, Homo sapiens
ggaggaggaggaggggctccggctggtctgtggtgaggacctcttctcagctctcatcaagggccccactcgaa

SEQ ID NO: 284999 - DNA, 98 bp, Homo sapiens
ctttgcctccgtccctctctatcaaggattcctcatcattgggtaactccatttccaaatactggatttataaatgggtttacgtctccagcgttcaa

SEQ ID NO: 285000 - DNA, 51 bp, Homo sapiens
ccttcagagtccttggggtgattgacaagcggatctgaaaagaacaattgc

SEQ ID NO: 285001 - DNA, 75 bp, Homo sapiens
cttctctgaggcggcgagagatggtcaggtctggagctcgaccgggccagctgatcttgcatctttaatggataa

SEQ ID NO: 285002 - DNA, 98 bp, Homo sapiens
ctgaccccattctgagatgtgagatggcttccactggagagctgctctgttaaaagcgaaaatgaaacaattgcctgcggcaacagttcgactccttt

SEQ ID NO: 285003 - DNA, 50 bp, Homo sapiens
cctcaacctctgccatcacaaggatcttcagtttagatcttggaggcata

SEQ ID NO: 285004 - DNA, 87 bp, Homo sapiens
ccggagctacagggcggagatttcatctcgaaacctggcggcggctgccgagtgatagagcagaaggaggttcccaatgggctcagg

SEQ ID NO: 285005 - DNA, 83 bp, Homo sapiens
tttcaatgaggtgctgaaacagtgccgacttgcaaacgttggatcacaaggacgagtcataagttttgaggtacgaaaagacc

SEQ ID NO: 285006 - DNA, 100 bp, Homo sapiens
agggctatggcaggtttctcatcgatttcatatgattcatccagccttccagctctgttatttaaagcaagaacacttctgggagccgaaagccatctgc

SEQ ID NO: 285007 - DNA, 100 bp, Homo sapiens
cacaaatttggaatctgccttctactccatcgtgggactcagcagccttggtgctcaggtgccagatgcaaaggatatggtggtaccaggagacgataaa

SEQ ID NO: 285008 - DNA, 99 bp, Homo sapiens
agctgcaggagcatcgctaggtgttgccgccaccgggaagcggggctgcagctggtgaccttgttgcagatgtgggttgtccccttatatttcacgata

SEQ ID NO: 285009 - DNA, 97 bp, Homo sapiens
ccgagatggagttcaattgcgagtttctattccaaggacaatgaaggcagctggttccgctccctctttgttcacaaagtggatccccggaaggatg

SEQ ID NO: 285010 - DNA, 51 bp, Homo sapiens
cggacccaaagtgccatgtctttaatgtcatttcttcagatagctccccag

SEQ ID NO: 285011 - DNA, 85 bp, Homo sapiens
tcccacaatgtgactactttgactactggggccagggaaccctggtcaccgtctcctcagagccactgacaagactttaagcaag

SEQ ID NO: 285012 - DNA, 101 bp, Homo sapiens
ttccagcgctgcttcatcttccagtgctgataattatggcattagccatcctgactggtcgaattgacaaatcttaccctacagtatgtggccacacagga

SEQ ID NO: 285013 - DNA, 83 bp, Homo sapiens
agaaggtgtccgaggcccgcaaaaaacatggtccaagacaattcctgggaaagttcagttcttctcaagtgagggttctgaca

SEQ ID NO: 285014 - DNA, 100 bp, Homo sapiens
ttctaaggcaacacttccttgaagaaacaagcttacagacaaggcgcctctgtcgaagagccttctgctggtccccagtgccctctccctcctgctcgcc

SEQ ID NO: 285015 - DNA, 128 bp, Homo sapiens
gccatggagaagctgcggcgagtcctgagcggccaggacgacgaggagcagggcctgactgcgcaggttgcagattttaaagatgcccttgccagagtatatggagtgatacccaaaatccagtgcct

SEQ ID NO: 285016 - DNA, 95 bp, Homo sapiens
gaacccatagaactcgtggaaactggaagagaacaggccagtgggtgggttttctcttcgtggttcactcgtgtctgctctggaagataatggcg

SEQ ID NO: 285017 - DNA, 74 bp, Homo sapiens
agtattgcaggacaagagatttaaggaaacccagcgtttgctggcagaaccagttcctggcatcaaagccgaac

SEQ ID NO: 285018 - DNA, 75 bp, Homo sapiens
ttcagatctgctatggaatgtatggttttatggatctagtgtgcataggcctccctacagcgttggctcagctct

SEQ ID NO: 285019 - DNA, 76 bp, Homo sapiens
agacccaatcaaaaaagaaactagcaaactttttaatgaggaagttatgaagacagtatggagtttccagaccata

SEQ ID NO: 285020 - DNA, 50 bp, Homo sapiens
cgccgtgttatccttgagtaaaggtctgtgtcaacctggtgaatattctg

SEQ ID NO: 285021 - DNA, 96 bp, Homo sapiens
tgagagagcaactgtgcacctcagaaaactcaatgacagtacgaattggagcaatgttggcttatacacctctggatgagaagagccttgctttat

SEQ ID NO: 285022 - DNA, 100 bp, Homo sapiens
ccggcaaggggacccagtgcgcccgcatcgtcgaggtatgcagtggaactgatgaagaccctgatgataaaaacgcaccctttcggcaacggccattttg

SEQ ID NO: 285023 - DNA, 99 bp, Homo sapiens
agcccctcaagggacacaaagacactgtgtactgtgtggcatatgcgaaggatgtcggacgaggaaggcagccaggagaaaggaggggacgacagccag

SEQ ID NO: 285024 - DNA, 75 bp, Homo sapiens
gatgctgccagggtccctgaagagggaagacacgcggaaacagtgagaaagatcagtctaaagaaaaggagaaga

SEQ ID NO: 285025 - DNA, 82 bp, Homo sapiens
ataagcgtggcaagaaaaatgggaagttctcggattttttatcaagcagaaatgcatcgaacaacgagaatcaagatcactg

SEQ ID NO: 285026 - DNA, 100 bp, Homo sapiens
gagactgggtgattccagcaaatgctggtttagagaagagtttagtgactgaggccgaaaattcacagcaccaacagaaggaagagggtgaggaagccat

SEQ ID NO: 285027 - DNA, 75 bp, Homo sapiens
cgggaacacaccgaagcgctgcagctgctcaagcgacaactggcggagaccaagatgcctgaggaaacccagacc

SEQ ID NO: 285028 - DNA, 96 bp, Homo sapiens
gcctttaccattgaaaaatcaaggtgcatttcctgatgcccagcttccttctaagaggatcattggccccaaaaattatgaattcttaaagtcaaa

SEQ ID NO: 285029 - DNA, 50 bp, Homo sapiens
cagcccgccagcatgccccagtccaaagactagacgcttgaagcaaagct

SEQ ID NO: 285030 - DNA, 75 bp, Homo sapiens
gacggcaaaggtgtcgtggtggtcattaagcggagatccggggaacgcccttttgcttgtgactggcagggctgc

SEQ ID NO: 285031 - DNA, 75 bp, Homo sapiens
ttcgaaggatggaagaagagacgaagagacagctggatgaaggatttttgccaagcctgaccatgttaagatgac

SEQ ID NO: 285032 - DNA, 100 bp, Homo sapiens
aaactggacgagatactccagaaaatggagaaactgtcttgctggtggatgccctccttactccccaatatatacgtcttggatagactgttggtgcatg

SEQ ID NO: 285033 - DNA, 74 bp, Homo sapiens
tctgctgtcctcatggaaagcctaaagctttggaggaattttttacatcacttgtgaagcaagaaatggtgaat

SEQ ID NO: 285034 - DNA, 99 bp, Homo sapiens
ggcgtgagccaccgtgcctggctgaaggcttccgaagatcttctcaaggaacactacgttgacctgaaggaccgtccattctttgccggcctggtgaaa

SEQ ID NO: 285035 - DNA, 74 bp, Homo sapiens
gccagacgccgacgtcgaccagcagagactgttctcttgcaactagcaagtgaagccttgccaaatgacatgac

SEQ ID NO: 285036 - DNA, 100 bp, Homo sapiens
gccctccttactccccaatatatacgtcttggatagactgttggtgcatgctacaaaaagagtgtctgaagttctgtgcttgaaacctaagtcatttgga

SEQ ID NO: 285037 - DNA, 75 bp, Homo sapiens
agagatgcagatgcttcaaaagctgttgaaattgttacttcaacttctgctgacatgccttgaattggaacgcta

SEQ ID NO: 285038 - DNA, 100 bp, Homo sapiens
agaatgtacagtgatcggaaagggtatatgactgatgggatgttacttcgtgaagctatgaatgatcccctcctggagcgttatggtgtaataattcttg

SEQ ID NO: 285039 - DNA, 100 bp, Homo sapiens
catccgctcccacttccagcacgtcttcatcattgtccgagtccacaacccctgcactgataacgtctgttacagttggagaaggaggagcagatacaca

SEQ ID NO: 285040 - DNA, 75 bp, Homo sapiens
cctgcctcccagagaggggagccggcgaggatcaaaatcttcgaaggagggtggcagtgctccttttggactttt

SEQ ID NO: 285041 - DNA, 71 bp, Homo sapiens
aatctttcgagaatattcagaactggatgaaaagcatcaaggaggcatattttggtggtgaagctcgctgc

SEQ ID NO: 285042 - DNA, 75 bp, Homo sapiens
tcgtaagagaagatctattaagtgcaaaagtttgtgacttgaagtggatacataattttaacctttgagaccaag

SEQ ID NO: 285043 - DNA, 100 bp, Homo sapiens
attcggagcctcccctgcagcgactcggaagattcgaggcggcgggggacaagtcggcgccccagagcggacgagcaatggtacagcagttccatgaaag

SEQ ID NO: 285044 - DNA, 74 bp, Homo sapiens
cacacgccggcgggcagaagccgcccgctctccggctttggagtttaacccttctgccaatccagaggcaagca

SEQ ID NO: 285045 - DNA, 120 bp, Homo sapiens
atccggttcttggtgcccctgggcatcaccaacatagccatcgacttcggggagcagatgccagaccagtttgaccaggcggttgtgctgaaccagctgcggtactcagggatgctggag

SEQ ID NO: 285046 - DNA, 85 bp, Homo sapiens
agtgaagcggatcacagcaacaaagagagaaacagcagcaacatttttgaaaaaggacgccaagagtgccgaggatgaggctcct

SEQ ID NO: 285047 - DNA, 87 bp, Homo sapiens
atgtggagcaccgggtccgcgcgggcgacacgctgcagggcatcgcgctcaagtacggtgtcacgatcaaacttggacatagatcag

SEQ ID NO: 285048 - DNA, 100 bp, Homo sapiens
ggaggaagatggcgggacggctgccggcctgtgtggtggactgtggcacgggatggactctcactctgtcgcccaggctggagtgcattggaacgatctc

SEQ ID NO: 285049 - DNA, 132 bp, Homo sapiens
atgaaaactaaggatctcccagttacagaggcagtattcagtgcccttgtgacagggcatgccagagctgggttgtcctttgtggagggtcttctcgaatcccaaagctacagcaactgattaaagatcttt

SEQ ID NO: 285050 - DNA, 74 bp, Homo sapiens
cccgagcggaactggagaaagctgaggaatcttttagctgaaaaagtagagcagctgatggaatggagttccag

SEQ ID NO: 285051 - DNA, 138 bp, Homo sapiens
atacctgccaatcccccctcacccaggcccctgtcaagaaggtgccggtggtgcgagtcttcggagcgaccccggcaggaggagacatcacagctttcccagatcgggaggaaaaatatggaatgtgttttaccgctg

SEQ ID NO: 285052 - DNA, 84 bp, Homo sapiens
gatcatgtctgcgagccaggattcccggatgatcggctgaatgtaacagaggaactaacgtccaacgacaagacgaggattctc

SEQ ID NO: 285053 - DNA, 50 bp, Homo sapiens
gcattcctgtgtatgtgggccgcaaggttttagctaaagaagatactgag

SEQ ID NO: 285054 - DNA, 75 bp, Homo sapiens
ccaattttgctaactttgcacatttcaacagtcatgcaggccccttcacagatgtagtcactacaaatcttaaat

SEQ ID NO: 285055 - DNA, 100 bp, Homo sapiens
gaaatggaacatacgggcaagtttataagggacaagcagatcttttgaaatatgctaagaatgagacattggagaacctgaaacaaatccattttgctgc

SEQ ID NO: 285056 - DNA, 100 bp, Homo sapiens
cgcgccctccagcttcacccgtacaggtagccccgccgccgcgcacctgccttcgctcccgcaccggtggcctttttgaagatgtaactattagagctgg

SEQ ID NO: 285057 - DNA, 51 bp, Homo sapiens
cgaatcccgaatcaaagcggcgcattgagctcctcagagaaattttgaaat

SEQ ID NO: 285058 - DNA, 80 bp, Homo sapiens
tacacaggcaaactgtcagaaaagagtagcctgggctgtctggaaatctgaggttttaaaatcaaagatgggaaaatcgg

SEQ ID NO: 285059 - DNA, 98 bp, Homo sapiens
gggtcggcaccttcggcaaagtgaaggaaattgcaggtgctgcagtgtctgaaatttccgggcctttctcaacagaggatgtagccagcaactgtgtc

SEQ ID NO: 285060 - DNA, 100 bp, Homo sapiens
gctgcagcagatgaaagagctcctgaccgagaaccaccagctgaaagggtgaacttctcacctgagggctgtaaagactcgtttgaaaatggagagccaa

SEQ ID NO: 285061 - DNA, 100 bp, Homo sapiens
aaactcctaggagggcttgctgtgcggaggcatgcccaagagaatcgtaaatgcaaaaattgcttgccttgacttcagcctgcaaaaaacaaaaatgaag

SEQ ID NO: 285062 - DNA, 82 bp, Homo sapiens
gccgacggagcgcggcaggacttggctggacggcgcggccacggagaagggcgcgatgaggaaactgagacccagaaaggtg

SEQ ID NO: 285063 - DNA, 79 bp, Homo sapiens
aagccactccagtgaccataagataaatgtcagaatcgcataacccccaggatcagagatggagtctcgctctgtcacc

SEQ ID NO: 285064 - DNA, 100 bp, Homo sapiens
acgagaaggtggaggatgcctgccaggggtgtcttttatgaataatcaaaagcagcaaaagccaacgctatcaggccagcgttttaaaactagaaaaaga

SEQ ID NO: 285065 - DNA, 75 bp, Homo sapiens
gaaatttgcctcgaaaaccaaagacattaaacctgacaatgtccttttggacgtgaatggtcatatccgcctggc

SEQ ID NO: 285066 - DNA, 100 bp, Homo sapiens
ctacagatcacaaatgtgatggaggcaaaccagcgggttgactgcattcagccagtgccaaaagaggagcccagtcccgctaccaaattccagtccatcg

SEQ ID NO: 285067 - DNA, 75 bp, Homo sapiens
tcccagaccttcagcccgtggcccggatgcaggacagacccctcaggcaaactaggcgtggcaactgctggctgc

SEQ ID NO: 285068 - DNA, 100 bp, Homo sapiens
cgatgttgaacatgtggaaggtgcgcgagctggtggacaaagcgcatcaagcatgatggaaccatgtgtgatacctgccgccagcaaccaatcattggca

SEQ ID NO: 285069 - DNA, 73 bp, Homo sapiens
catagactacattagtgtgtttgatgtcaaatcaggcaacgtgttggaccttccggagcttctcagaagacag

SEQ ID NO: 285070 - DNA, 75 bp, Homo sapiens
catcatcaggcgacgccctggcggttgggtggagaaggaaacctactactgacctcagccccaccacatcgccca

SEQ ID NO: 285071 - DNA, 121 bp, Homo sapiens
tcatcttgtccagaactctgtcaaatgaagaacactttcaagaaccaggaaaccacccctactcctaatcccccgactacagaagaggagaaaacggaatctaatcaggaggttgctaacc

SEQ ID NO: 285072 - DNA, 74 bp, Homo sapiens
ctcaacatcacggctgccagaggctgctcctacctgagtgtacctcacagccttctaggatctccagagtggac

SEQ ID NO: 285073 - DNA, 90 bp, Homo sapiens
tccgtattctctgaagcctggaaacgaggcactcagttggaagagtccagcaagctgcccaaactccaaaatgatggtagagaattgacc

SEQ ID NO: 285074 - DNA, 83 bp, Homo sapiens
tacttagatgacaatgtcaagaaagaaaactcctccttgtacctagcaacggcagcctttaacagttgagcacatgtatgaag

SEQ ID NO: 285075 - DNA, 88 bp, Homo sapiens
aatggccatgtggtgctgacagattttggtctgagtaaggagtttgtggctgatgaagagataagtggctctgagctgtgctttccaa

SEQ ID NO: 285076 - DNA, 96 bp, Homo sapiens
ggccccagcttgaaggcctggagagccgcccagcagcacaacacagggaagcttggggaggagatacttgagagggaccatgcccggctgaagccc

SEQ ID NO: 285077 - DNA, 50 bp, Homo sapiens
ataaaagggcagaaccatagcagggtgcgctggagaatgctggaggagac

SEQ ID NO: 285078 - DNA, 76 bp, Homo sapiens
tgttgtacctggaaaacaatgcccagactcaatttagtgagataggaatgatgtcacaggtggaagaagagaccca

SEQ ID NO: 285079 - DNA, 97 bp, Homo sapiens
gactaccaaggagaagctatagactacttctactccaccaggaagggaagaaggagaaagggccaacccctgaagaagcaatacagaaactgaagga

SEQ ID NO: 285080 - DNA, 100 bp, Homo sapiens
ccccggcgccgtccagcccggagggacctgatcctgggaagactctgcctgaagcccttgattattgcactgtttggctacagacagtgcctggagaaat

SEQ ID NO: 285081 - DNA, 50 bp, Homo sapiens
agtaaccctcactggagaatccagagaactttgcccgtgtgaagatgcag

SEQ ID NO: 285082 - DNA, 100 bp, Homo sapiens
ccgcagtaccagacctgggaggagttcagccgcgctgccgagaagctttacctcgctgaccctatgaaggtcctgcaaccctggttccagtctggcaagc

SEQ ID NO: 285083 - DNA, 82 bp, Homo sapiens
gaaaaccagacctccacttccaaggatatagagcaggatgaagacactgtttgaagagatcaaagcatcaattaaaaataac

SEQ ID NO: 285084 - DNA, 75 bp, Homo sapiens
catgagtggctatcatactggctattatatgtggtggacttgctttgtgaagagacagttcatgaacaagagtct

SEQ ID NO: 285085 - DNA, 100 bp, Homo sapiens
gcaagctgaaatcacctttaagaagcccatgcctaccaaggagtccaagattgatctccttgatcggaaggaggatgtgaagaaaaaactgaagaaggcc

SEQ ID NO: 285086 - DNA, 74 bp, Homo sapiens
tgagatgtacgctaagactgaacaggatattcagagaagttctagagcatcagtgatgtcacgtttggagcagg

SEQ ID NO: 285087 - DNA, 100 bp, Homo sapiens
tggaaaagagggtggaaaaagcagggaggttatgaggcttaataaagaagcagagagagatcatcattgcctgaatttagctttgtgactgcaagagcaa

SEQ ID NO: 285088 - DNA, 100 bp, Homo sapiens
cctggatgaagccaccagcgctttggatgccgagagcgagtatctgcctctaaggaaatggcttctggtgtttggcaacttaatcacagccgggtgctac

SEQ ID NO: 285089 - DNA, 108 bp, Homo sapiens
ccgcggaggaggaggaggtggagttgctgcccttccggagtccgccccgtgaggagaatgatgatggaccatttggattgtgcaacaaatgaagaaaaccctgtgata

SEQ ID NO: 285090 - DNA, 80 bp, Homo sapiens
gctgccctgagacggtgtcccgccgaaagtgagaactcaacagaggcaaaagcagtagattctaacaatcagtcgaagtc

SEQ ID NO: 285091 - DNA, 74 bp, Homo sapiens
tgtggcccgatggggtcatcccctttgtcattgggggaaacttcactgctctccagggcagaagtcgcggtggg

SEQ ID NO: 285092 - DNA, 113 bp, Homo sapiens
aaagagattccttgcagagacagctcaacacggcacttccacagaatggtgctggaaggaaaccctgaagtggggtccccccgaacctcagacctccagcaccgggggaacaa

SEQ ID NO: 285093 - DNA, 83 bp, Homo sapiens
ggaattttgaagtacaccgtggtgacattgtatcattggtgctttatcctgtggataaacgcagagtgaacgagtttggggag

SEQ ID NO: 285094 - DNA, 80 bp, Homo sapiens
aactcccaggctcaagcaatcctaccatgtcagccttcccagtagctggaactacaggaacagtaagaggaccttgtgca

SEQ ID NO: 285095 - DNA, 75 bp, Homo sapiens
aggaactgcatgaggctgagcaggagctgctctctgacatgggagaccccaagcagtgcctgatttgagatgggg

SEQ ID NO: 285096 - DNA, 89 bp, Homo sapiens
cacagcaagagcacctggctgatcctgcaccacaaggtgtacgatttgaccaaatttctggaagagcaccgacagtaaatggttcacgg

SEQ ID NO: 285097 - DNA, 106 bp, Homo sapiens
ctcgcctcgggtctcgggggccgctctgggatcccggccaccagcaattgtccgataacgaaggaggcccaacttcattcaataaggagcctgacggatttatccc

SEQ ID NO: 285098 - DNA, 50 bp, Homo sapiens
aaaatctccccggtgactttcagaccttgccaccatggaagaaagagtac

SEQ ID NO: 285099 - DNA, 75 bp, Homo sapiens
tggtctcagcattgtgggaggaaaagacacacccttggtggtccgtactgagaagaacagtttgaacaaccgatt

SEQ ID NO: 285100 - DNA, 75 bp, Homo sapiens
accgccagatcaacctggagctctacgcctcctacgtttacctgtccatggttactcactataaacaatatccac

SEQ ID NO: 285101 - DNA, 75 bp, Homo sapiens
cgctgcctacggaggtggcagccatctccttctcgcaattaccagctctggctgggtcgccacaacttgtttgac

SEQ ID NO: 285102 - DNA, 80 bp, Homo sapiens
ggagaggagggcatattgcgagggctgctacgtgacgctgagtccccgcgagctctggcacctggtgcatcagtgctacg

SEQ ID NO: 285103 - DNA, 73 bp, Homo sapiens
aacaagagaatataatcaatcctcaagacctaacagatgagtttggtgctttggaaagtgtgaaagctgctag

SEQ ID NO: 285104 - DNA, 90 bp, Homo sapiens
cggcagctgccggcggcgcggcgagagagcggctgacagaggggatgcgaggagctgacatggacccaaatcctcgggccgccctggagc

SEQ ID NO: 285105 - DNA, 98 bp, Homo sapiens
acaggatatgaagaaattgagggttcttgccatgatctcagtggttcaatagcatccccagatgtcaaattaaatcttggtggagattttatcaaaga

SEQ ID NO: 285106 - DNA, 82 bp, Homo sapiens
tcatccagctgctgaagcgagccaagcatgtgcagtctttgccaacaaaaaaaattaccaagaaacctattccagatgagca

SEQ ID NO: 285107 - DNA, 51 bp, Homo sapiens
ctattgtaagtgcagatggaacacaacagttgctgattgttggaggttctt

SEQ ID NO: 285108 - DNA, 101 bp, Homo sapiens
ggcgcattggggtccagccgtccccagaacgcagatcagaggtagtcggacctttcccgctggcgcgcagcctcagctagtgctcatcttcaaactctatc

SEQ ID NO: 285109 - DNA, 51 bp, Homo sapiens
gcacacccttcctgggtgatgattcactgcgtgctgtcctcacttgttcta

SEQ ID NO: 285110 - DNA, 97 bp, Homo sapiens
gttcaacgagaatgaagccatccaatggatgcaggaaaactggcccacccttcctccattctgagcacataaaaaccccacactcagccagactcaa

SEQ ID NO: 285111 - DNA, 75 bp, Homo sapiens
tgagccgttttgccccaaaacgagagagatcactacagatctgaggcagcgttgcacggacaaccacactgggac

SEQ ID NO: 285112 - DNA, 73 bp, Homo sapiens
tttctgaaatgagacagaagatctggaataatatgccgaaggatcatcctgtccacagttttatgtgtgagca

SEQ ID NO: 285113 - DNA, 80 bp, Homo sapiens
agatcccagtcacaattatcaccgggtatttagcctattccaagcctaaacggggccaccgtaaaactgcttcatttggc

SEQ ID NO: 285114 - DNA, 101 bp, Homo sapiens
tcaggacaatgaaatccgagccactgacctgcctgagaggttccaggtgaggaaaatagcagctgaatactatgacaacctccctcactacaattcctgga

SEQ ID NO: 285115 - DNA, 101 bp, Homo sapiens
aggggatgactgcggctgatgacttcttccaagggaccagggcggcactggtgggcgggaccacgatgatcagtgatttgatgaaggctgctgcaggagag

SEQ ID NO: 285116 - DNA, 75 bp, Homo sapiens
gccgtccttctccactttcgccagcccgtgccgcgagcgcggcctgcaggagaagctggcagggcggagatgctg

SEQ ID NO: 285117 - DNA, 100 bp, Homo sapiens
ggacagactggccgttgctgtggagacgcctggtgctggagaatctggtaaaagcaccattgtgaagcagatgaggatcctgcatgttaatgggtttaat

SEQ ID NO: 285118 - DNA, 75 bp, Homo sapiens
gggttcccttggatcagactcctcttttttatccatggcaggacagtcattttgtttactcattcagccctgttg

SEQ ID NO: 285119 - DNA, 100 bp, Homo sapiens
ccaaggggtccccgcagccggagccgcacgccccagagcccggcccggggagcgccaagcgagggcgagagggccaattcctgtccccccagcagcatgg

SEQ ID NO: 285120 - DNA, 108 bp, Homo sapiens
ggcgcgggaagtttggatcctggttccgtccgctaggagtctgcgtgcgaggaaatccaggatgagtcagctgtgttatggttggatgaaattcaaggtggaatctgg

SEQ ID NO: 285121 - DNA, 51 bp, Homo sapiens
atcccaaagctattctgggggcaacagagggctacttctacaagtccgaac

SEQ ID NO: 285122 - DNA, 76 bp, Homo sapiens
agcatagagaatgagatagccgtcctgagaaacgtgagtgcatctccatccacgttggccaggctggtgtccagat

SEQ ID NO: 285123 - DNA, 96 bp, Homo sapiens
agactggtccacggagtgtatgaccacaaacagccatcaaggaaagcttagatatgccaacaacagcaattacaaaaatgatgtcatgatcagaaa

SEQ ID NO: 285124 - DNA, 96 bp, Homo sapiens
acagacttcgctgtgagtgcccaaggtttcaaagcattatatgaagccaaacatcatgtcaatggcaacagaacagtcgaacctttcccagaggga

SEQ ID NO: 285125 - DNA, 82 bp, Homo sapiens
gcagccttttcagttaaccaatgttctaagaacggaagcatctgggctggatggaatttagcatcaagcagagtcccctttc

SEQ ID NO: 285126 - DNA, 80 bp, Homo sapiens
cgacagccaggcccgggagaattccagtgtctcgccccatcctcaccctcagggttcccagggcccaggctgtggtgggg

SEQ ID NO: 285127 - DNA, 75 bp, Homo sapiens
tttgaaacacctgggtctgggcttcccgggcgagcggtggatgaccttccatcagtgcccgtgtttgacagaact

SEQ ID NO: 285128 - DNA, 87 bp, Homo sapiens
ggagaaagcaatggatgaaatcaaatcccaagattgatcattcttagaagagctgctgtaacacataggggaagtgaaaactaacag

SEQ ID NO: 285129 - DNA, 95 bp, Homo sapiens
cgcgggcggcggcgccggcaggaagacctgcgaccgcatcaagcagtccgccagcggaaccaagcggcgcgtgttcatcatcgagaccatgggcg

SEQ ID NO: 285130 - DNA, 98 bp, Homo sapiens
cccggccacctctgagaagggagacgacgctgctgggtccgctgagcggggcgacccgagccagagactgctgctactttgaaacgtacgatagaggc

SEQ ID NO: 285131 - DNA, 100 bp, Homo sapiens
agaaagaaaaaagaagaagtccccgagttcaccaaaattcagacattgcctcccagctgacaccctgcaaggccaccgggaccgcttcatggagcagttt

SEQ ID NO: 285132 - DNA, 101 bp, Homo sapiens
agaggttcggaagacttatcgaccatggccaagatgttcataaatataaagagcatcttatggatgtgttcaaccttaatagtaacccatgcgctacataa

SEQ ID NO: 285133 - DNA, 101 bp, Homo sapiens
atttacagaaagagtcaacagcagtggcaacaggatggcaccaagcattatgaaaagcctaatggaccacaccattcctgaggtttaaaattcacggcacc

SEQ ID NO: 285134 - DNA, 80 bp, Homo sapiens
cggcggccttgagcgctgagcaagcaaaggcttcctgcctgacacagctcacttcaagaagtgcacaatgtcagaacgtg

SEQ ID NO: 285135 - DNA, 97 bp, Homo sapiens
ggatggctgctcagctgctgactgatgaggcactgacagttaaatctcacacagaaacagatgagaaacaaacagagagccgcaccatcaccccacc

SEQ ID NO: 285136 - DNA, 75 bp, Homo sapiens
cttcctcatccttccttttctcggggctcccgtgggaatgggtaccacagaccatgtcatcgtcctggcgtccac

SEQ ID NO: 285137 - DNA, 50 bp, Homo sapiens
gacaccatcttcgacaacatcctcaaggaaacagtactgctggagcaccc

SEQ ID NO: 285138 - DNA, 88 bp, Homo sapiens
agcaggggcagatggcaagtggagacagcaatctcaacttcaggttatgatgtgattgctcaagcccaatctgggactgggaaaacgg

SEQ ID NO: 285139 - DNA, 100 bp, Homo sapiens
acccaccgctgccgaaatgaagtataagctcactaccctgggaaatcttacaccttcaagcactgtgtttttctgctgtgatatgcaggaaaggttcaga

SEQ ID NO: 285140 - DNA, 100 bp, Homo sapiens
gaagaccttggtgtctatgccacccctgcctggacttgacctaaagggttctgagagtcttggaagctcgaagtctggctgtggccatgggagatacagt

SEQ ID NO: 285141 - DNA, 90 bp, Homo sapiens
aaatacttgacatctaaaatttttggtattgcagatgacagcaatggtggaacaaagcggcaaaagatatcccatcaaaattatatagcc

SEQ ID NO: 285142 - DNA, 75 bp, Homo sapiens
tgacttggaccctggaaaacctggccctcttcaatttctgacaaaagtgtaaacaggaacatcgataagtagtgt

SEQ ID NO: 285143 - DNA, 88 bp, Homo sapiens
tttgctcaaggatcccagttttctctggatgacgtggagacgtggttgtaccagttgcaaactgtggggtccaggaatacaactcgaa

SEQ ID NO: 285144 - DNA, 90 bp, Homo sapiens
cggctctgggctacggactatgggcgaatagctctgaccacccggcgaagggcttgctctcaattttgcgcaagttgaaaagtgcaccag

SEQ ID NO: 285145 - DNA, 90 bp, Homo sapiens
tgctgccggaaggggtcccgaagccccctgcaggaactctacaacccaatccaggaggagatgttaaagtaacccatcttgcaggacgac

SEQ ID NO: 285146 - DNA, 98 bp, Homo sapiens
tctacgtggccctaacaggcacttcctcactaatatcagggcttattttgaggtcctgctgtactagccaccaaagcagctgctggtactaagaaata

SEQ ID NO: 285147 - DNA, 83 bp, Homo sapiens
gcagatgttgtcaaggtggcctaccaggaggccaggggtgtcgccatggtgtttcccattaaacactaccaggacaaaatcag

SEQ ID NO: 285148 - DNA, 75 bp, Homo sapiens
cgatatggaagaggagggcaagaagggcaagaaggccctgggaggagcggggacactgaggacctctctccaaat

SEQ ID NO: 285149 - DNA, 82 bp, Homo sapiens
gttgctcaccccgcaggagaacgagtccctcttcactttcctcggcaagaaatgtgtggcactgtttagtacagctgttgaa

SEQ ID NO: 285150 - DNA, 83 bp, Homo sapiens
cacggagcaggacaaggccatcctgggtttccaggcctgaggtgcccgccctggccccaggagaatgaaccagccgcagagga

SEQ ID NO: 285151 - DNA, 98 bp, Homo sapiens
tggctcaaagaaagatgattatagggctgtgctgaagtttgctgctgccactggagccactccaattgctggccgcttcactcctggaaccttcacta

SEQ ID NO: 285152 - DNA, 74 bp, Homo sapiens
ttgtcagtatgttacagagaaggttgctctttgggattgctcagccccagctgcctccaaaatgcctgctttca

SEQ ID NO: 285153 - DNA, 76 bp, Homo sapiens
tcgagactttggctgccgtcttctctgctctgacgcccgctctgcggcttcggtgtttgaacaggccacagtccag

SEQ ID NO: 285154 - DNA, 100 bp, Homo sapiens
ctcccgtagggagccgtgggcgctcggtgcccgggccgggcaggtgtcagttgtacccgaggcgttctcagcagcagcaagtacctgtggtggatttcca

SEQ ID NO: 285155 - DNA, 100 bp, Homo sapiens
actcagcagagctttgaagccttgtcggagagagctgtggcagtggttgtggatcccattcagagtgtaaaaggaaaggaagttggcagtatcatcggaa

SEQ ID NO: 285156 - DNA, 100 bp, Homo sapiens
aagatttctggccagtggagagaggaattcctcaagacaccattccagggacacttggcattcagggacgtggccatagaattccctcaggaggagtgga

SEQ ID NO: 285157 - DNA, 100 bp, Homo sapiens
gccacccgcgagtccagcgtcgccgcagccccccaatgcggccgcgagaagcagcgggggggcaggcgatcgaaggaaataatgaagatgtttcattttc

SEQ ID NO: 285158 - DNA, 75 bp, Homo sapiens
tgggaccgtgcgcgtgcgcctgggggcaccgctgccgttccgaggtatcgagaaccttccctgcgaacttcagag

SEQ ID NO: 285159 - DNA, 101 bp, Homo sapiens
tgggatgccttcgcgtcttctcttccctcgggtgacttgagtgtacctcggtatgatcaaccacctcctgtcacataccagccacagcaaactgaaagaaa

SEQ ID NO: 285160 - DNA, 98 bp, Homo sapiens
ttcttcgttccctcagcaatatgattctagagatgatcgctatggaaaatcctgcagacttgaagaagcagttgtatgtggaatttgaaggagaacaa

SEQ ID NO: 285161 - DNA, 83 bp, Homo sapiens
gcaaacagtgctgcccagcaatatcagagaagaactgtggctgcaccatctgtcttcatcttcccgccatctgatgagcagtt

SEQ ID NO: 285162 - DNA, 51 bp, Homo sapiens
agctgtggaaagaagttgcaaaacactggggtgaatcatttgatgtaaaag

SEQ ID NO: 285163 - DNA, 83 bp, Homo sapiens
ctccagcccagcctcgctagctccgcctgcggtacgtgctcccgcctccgactcaaacacgatgaggcgagtggtacgacaga

SEQ ID NO: 285164 - DNA, 101 bp, Homo sapiens
ggcagaacctggtctggccagagacctgctggaaggagaaattgtcgtaaatgaagtcaattttgtgagaaaatgcattgcaacagacacaagccagtacg

SEQ ID NO: 285165 - DNA, 89 bp, Homo sapiens
gagtacgatactcaggtcaaaggaagctattgaatccttcaaagaagctttgaagcagaaagttgactttattgatgcatataaaagtc

SEQ ID NO: 285166 - DNA, 74 bp, Homo sapiens
aaattatgctgcagcatattgtactggcctgctgctggcccgcagggaaccaggctggagaatgcttacagagc

SEQ ID NO: 285167 - DNA, 75 bp, Homo sapiens
ccacttgttggggagccaggccccaaggaagagaacgttgacatagaaggtgactgtgaagtgctgaccacactc

SEQ ID NO: 285168 - DNA, 73 bp, Homo sapiens
ttccagtggccagccagatggaagcatcctgcctcgtcatccagttgggctgtaatccccttgcacaaaccgg

SEQ ID NO: 285169 - DNA, 75 bp, Homo sapiens
ttcctgctacgacactgaattcaaccaggagatatgaggccccaggattcctggcgaggtcctcctccccttttc

SEQ ID NO: 285170 - DNA, 115 bp, Homo sapiens
gcgcgcgccggagcggggtccgatggttctcgaaggcccgcggcgccccgtgctgcaggtttacccaaggtccagcctagcccctaggcaccatgtcggacagtgatctaggtga

SEQ ID NO: 285171 - DNA, 75 bp, Homo sapiens
cgtccctttgggtttagcacgatgagctcaatcggcactgggtccaaggccattggtttgctagatgtggatgtg

SEQ ID NO: 285172 - DNA, 82 bp, Homo sapiens
gacgagctgaccctgggagacatcgacgcaattctgtggtgttcttggtcacacatttatggagtttctgaagggcagtgga

SEQ ID NO: 285173 - DNA, 75 bp, Homo sapiens
tgccctgcagtacctgcagaaggtctctggagacatcttcagcaggttatacattggctcttcaaagacgttcac

SEQ ID NO: 285174 - DNA, 99 bp, Homo sapiens
gcgtccaagaggggaggcctggtgtggggacgctcagattgcaacacctgctcggtataccgtgactttgggaggaacatctgtcactgtgaagtatct

SEQ ID NO: 285175 - DNA, 82 bp, Homo sapiens
cctgcgccgccggggccgctgcaaggggaggagagaggccgcctcagccctgaccctctattctgcaccctgtgagccaccg

SEQ ID NO: 285176 - DNA, 99 bp, Homo sapiens
gaggaggatagcagcagaagagaagaagaagcaggatgaactgaaacggattgccagagaattggcagaagataacaactattccacaccaaatgagag

SEQ ID NO: 285177 - DNA, 82 bp, Homo sapiens
caaaccgtgaaaactggattgtggaagcaggtcctggggaccaaggtggacgcggagcgtgacggcgtgaaggtgcccacca

SEQ ID NO: 285178 - DNA, 87 bp, Homo sapiens
aggagcgggaagagttgctgggattcctctctttggtgctgacactattggccagagaagtcctgatggaccggtactgagcaaagc

SEQ ID NO: 285179 - DNA, 100 bp, Homo sapiens
cgatggtcggcggcgcccggatgggcagctgaggagcctagtaataaacgggtcaaacccctttcccgagtcacgtcgctagcaaacctcatcccgcccg

SEQ ID NO: 285180 - DNA, 82 bp, Homo sapiens
gttaatgtttacggcgaagtctactcaacgtttccaaggacttcactatgaccctgtacctgcggcattactggaaggatga

SEQ ID NO: 285181 - DNA, 85 bp, Homo sapiens
tacacccatctccagcgatgatgacaagggcttcgtggacctggtcatcaagaggttggaaagaaccatgactgtattcaggaag

SEQ ID NO: 285182 - DNA, 113 bp, Homo sapiens
gtaaccaggctgtgcgcctgcccctcatggaatgtgtccaggtggactactgttcgaagatttttggaagaatactgagaacggcataaagtgaagatcgacatttaaaaaat

SEQ ID NO: 285183 - DNA, 100 bp, Homo sapiens
ggaggacagacaattgttcagttgcaaaaagaaactggagccaccatcaagctgtctaagtccaaagatttttacccagacagccttttgattgattatc

SEQ ID NO: 285184 - DNA, 49 bp, Homo sapiens
tgagaccctggtggagtttgctattgccactgaggcggctcccagctgc

SEQ ID NO: 285185 - DNA, 82 bp, Homo sapiens
tttctttggaagtacagcagaggccttaggtgctgttgtaggagcaagggatacaatgatgatcaaggcagatgcagccgtt

SEQ ID NO: 285186 - DNA, 100 bp, Homo sapiens
aatatagaattagaagtgtcctttgatatacttctgttccttgccagattacattcaaccattaatttaagccagagactgctgctactttgaaacgtac

SEQ ID NO: 285187 - DNA, 153 bp, Homo sapiens
ccggcatctttacagagcagagcatgatcacattcctgccgctgctgctggggctcagcctgggctgcacaggagcagcaccccctgccaaccagcttccctggcctgtgctgtgctccccagtggccggggtgattctcctggccctagggg

SEQ ID NO: 285188 - DNA, 100 bp, Homo sapiens
agctggttcacatgatcaactgggcgaagagggtgccaggtgaatctggattgggaaagtcgacattaatcaactcattattcctcacagatttgtattc

SEQ ID NO: 285189 - DNA, 102 bp, Homo sapiens
gtgtgacgagcagaaggagctacaggcgctctacgccctccaggcccttgtagtgaccttagaacagcctcccagagggcatcctggctgtttcacccgtgg

SEQ ID NO: 285190 - DNA, 100 bp, Homo sapiens
aaaagatgccctctgaatctttgtgtttggctgcccaggctcgcctcgactccaaatggttgaaaacagatatacaggggtagaaatatttctgtcatgg

SEQ ID NO: 285191 - DNA, 99 bp, Homo sapiens
gatttacaacccctgctagcctggcttaaggtcatggagaaagcccacatcaacctggtgagccctggtacctgacagtgtaaagaaggagctcctaca

SEQ ID NO: 285192 - DNA, 83 bp, Homo sapiens
cgcagaagtcgcgtgtctaggtgagtcgcggtgggtcctcgcttgcagttcagcgaccacggcgcctgtgtctggcagagctg

SEQ ID NO: 285193 - DNA, 100 bp, Homo sapiens
ccgaagtcggggacgcgggctcgttatgtgtctcggtaccacgtgaaagactcctcacgccacgtcatcctaggcacccagcagttcaagcctaatgagt

SEQ ID NO: 285194 - DNA, 100 bp, Homo sapiens
acaccttggcaccccagcggctgctcttcgaagtgaccagcgctaacgttgtcaaggacccgccctccaagtacgtgctgacatctgaaatgtttgaagc

SEQ ID NO: 285195 - DNA, 82 bp, Homo sapiens
tcatcactccagcagccctccacccaggagtacgtgctgcatgtctacgaccaaactagagtcagaacgaatactagcatca

SEQ ID NO: 285196 - DNA, 100 bp, Homo sapiens
ctcctgctgctcatcattgccctcatgctctggcggctgcactggcgcaggctcctcagcaaggactcacaccacccggcaagaactgctcactacggct

SEQ ID NO: 285197 - DNA, 100 bp, Homo sapiens
aattgctgtggaccgctacctccgggtcaagatccctctccggcgttcccacagctgtgcagaacttagcgccacgcgctgctgttgctgctgctgctcc

SEQ ID NO: 285198 - DNA, 87 bp, Homo sapiens
atttgggaaaaagctccaggattctgacagggatgttgcgaagggggatatgagactttctactcggaatatcctgagtgttgcgtg

SEQ ID NO: 285199 - DNA, 100 bp, Homo sapiens
gtgtgctggaggggtgcccagccattttaggccagttcatgcaggaaccaaagatacacatcttcaatgagagaccaggaaaggaccctgagaagccaga

SEQ ID NO: 285200 - DNA, 89 bp, Homo sapiens
gtcgccctcaaggccatgatcaaaaccacaggaagtcctggagaacctgaaggaccgctggtaccaggcggacagcccccctgcagacc

SEQ ID NO: 285201 - DNA, 90 bp, Homo sapiens
aagatgctgattaccttgtttacaaagtcacagatagatttggctttttacaaaatggagaaggtagaggagatgccacataaaccacag

SEQ ID NO: 285202 - DNA, 100 bp, Homo sapiens
ccccagggcacagccatggctgtcagtaccttccgaaagctattcatgctggtcctggccagcaatctgcctgagcagttcgactgtgccatcaacagcc

SEQ ID NO: 285203 - DNA, 100 bp, Homo sapiens
gagtgggaagtacatgtgtcgtatcatagttcattttatgtgggaggatgttcagcagcgcggcagagtcatggggagatctcggctcaccaaattccac

SEQ ID NO: 285204 - DNA, 80 bp, Homo sapiens
cagggtttttgggaaagccaaatggagctcagaaagctgtatggacctctgtgtggggatgggcgtgttttgggcgtgct

SEQ ID NO: 285205 - DNA, 82 bp, Homo sapiens
cttcactccagtgcctccgacgcctcctgatgcagcgtccgtctccaagagagtatgaagagagtgcgtctgtagggcaggg

SEQ ID NO: 285206 - DNA, 100 bp, Homo sapiens
tagacttgtttcttatatgtgatgccattccagcactggactcatggaggctgagcatttattcaggagccggtgaaacctgaagaaggcagagatatgg

SEQ ID NO: 285207 - DNA, 74 bp, Homo sapiens
tctttgtagcagacactgcaaatgaagctctcgaggctgctaagagactaagtggagccgccaccaaaatgcag

SEQ ID NO: 285208 - DNA, 76 bp, Homo sapiens
gcttcagcgggaccttcctggaaaacaggcccagctctcaaggttgcagtctgtggcaagcgctacaagaaccgac

SEQ ID NO: 285209 - DNA, 100 bp, Homo sapiens
tcaaatcgcgcaaaggggatgtcctgcacatgcactacacggatgtgggctctcttgatgagaagatgaagagcttggatgtgaatcaggactcggagct

SEQ ID NO: 285210 - DNA, 100 bp, Homo sapiens
tagatcctgacactaaggaaatgctgaagcttttggaagatcccagtgtctgagtgaactaacagtcctgctttcagccaccatttgcacaagacaccca

SEQ ID NO: 285211 - DNA, 100 bp, Homo sapiens
ccggttatggcgtcattatgcagccagggatggtccagcagtttggggtggattttgagaagaggatcgagggctcaggagatcaggtggacactctgga

SEQ ID NO: 285212 - DNA, 74 bp, Homo sapiens
actctaattgatccagagaacatgctggctacaactaatgttcgagaaatggctgctactaccttaagcggtct

SEQ ID NO: 285213 - DNA, 82 bp, Homo sapiens
ttcgggctggttgttccgttgcgagctgcagctgcgatctctgtggtaggcccaggtttcagtgttgactggtgggctcttg

SEQ ID NO: 285214 - DNA, 83 bp, Homo sapiens
cgagaccgtcctggcgcgatgcgtcaagtacactgaaattcatcctgagatgaggaccctaaagtaaattggttgaagaaatt

SEQ ID NO: 285215 - DNA, 82 bp, Homo sapiens
accagggcgcgcagccgggccggcccgaccccaccggccatacgggcgaactttctgaccaagtatacaactacccagaggg

SEQ ID NO: 285216 - DNA, 75 bp, Homo sapiens
actgcccgggcggggagggcatgttccgtggcctcgcccaggccgacgggctctgtggatagcaactggatcgtg

SEQ ID NO: 285217 - DNA, 75 bp, Homo sapiens
tgcctttgggactctgaaggctgaagttgtatatgaacacagatcaagattagagaaatccttgcaaaaagaaag

SEQ ID NO: 285218 - DNA, 51 bp, Homo sapiens
tttccctaatacgtacctcattgtgggagccctgccataggacaggctgag

SEQ ID NO: 285219 - DNA, 100 bp, Homo sapiens
cctgagttggagttctcctatgctgtggccagatccactagaaattaacccagaatcttagcctctcagtggcctatcgatcggtttgggcttggccagc

SEQ ID NO: 285220 - DNA, 75 bp, Homo sapiens
caggaacattctggctttggcgctcacttctctcccagcttcttccagaccagctggtcttgcttctggagcatc

SEQ ID NO: 285221 - DNA, 100 bp, Homo sapiens
ggacttgcctgcggtgacacctgctcccctctgagagcttcaggttctccggcctgccttcactggtgctggagaatctggtaaaagcaccattgtgaag

SEQ ID NO: 285222 - DNA, 76 bp, Homo sapiens
aaaacacaggagccggagcagaagcaaagagatgtatgtccatccctgtgacgatgagggctattcggaggaaagc

SEQ ID NO: 285223 - DNA, 116 bp, Homo sapiens
aagaaaaggagtggagcatggtcccgctgccataagagaagctggcttgatgaaaaggctctccagtttggggacaatgactcattcttcccaggacactggttcttgtggcattc

SEQ ID NO: 285224 - DNA, 73 bp, Homo sapiens
gaacacctgggcaacagaatattggtcaagttgctgaccttgaaattcacctggtaactgaagaggagggatc

SEQ ID NO: 285225 - DNA, 100 bp, Homo sapiens
gagatgtctcgctccgtggccttagctgtgctcgcgctactctctctttctggcctggaggctatccagcgaggagcttgccatccaacagggtcaactg

SEQ ID NO: 285226 - DNA, 118 bp, Homo sapiens
tggcgctcggcgtgggtctgtgcaacaatggcttcatgcaccacgaaactggcgatggaatatgagaggagccctctggaaagaaaaggacagaccctgtgctttcatgaaagtgaag

SEQ ID NO: 285227 - DNA, 90 bp, Homo sapiens
aatgatccttactaaccacgaccatcaaatccgtgtcggagtccttacaggattctaacattttcagagaaccttttggaaagaacaagc

SEQ ID NO: 285228 - DNA, 75 bp, Homo sapiens
agaaactggaggagtcccgctcgaagctagatgccagagtatatatgcatatttgaacagtcacctggatctgat

SEQ ID NO: 285229 - DNA, 83 bp, Homo sapiens
cgatcgcctcgcgccggctgctctttccggatcgaagacctgcaggtgaagctgcagcacgcggaggcggaccgggagcagct

SEQ ID NO: 285230 - DNA, 103 bp, Homo sapiens
gttctctgtagtgtttgccaatgttggagccgtctgcaaagtgtccccggcaagaagctgagctgactgctgcccactttggaggaggcggtgggctccttca

SEQ ID NO: 285231 - DNA, 75 bp, Homo sapiens
ggagcgagctgggagggagccgcgcgcctttgtgcgcgcgccgaggatctgccactgtgaaggagatgatgagag

SEQ ID NO: 285232 - DNA, 90 bp, Homo sapiens
gctgcagccaccaccgccaccatgtcctaccaaggcaagaagaacatcccgcggatcacggggtcaacgtctcagccaatcaggatgatg

SEQ ID NO: 285233 - DNA, 89 bp, Homo sapiens
gtgtttcacatttgctgccatgagcaaagaggaggtcgacagagtttatgtggccgaggcagacaagtggaattaggccttgctgcagg

SEQ ID NO: 285234 - DNA, 101 bp, Homo sapiens
caggggagattgtctactgtgggcaggtgacactgtcatcccactttacatcccacagtgtggagaatgcaaattttgtctaaatcctaaaactaaccttt

SEQ ID NO: 285235 - DNA, 75 bp, Homo sapiens
tgctgaagggggctctttatataatgatgggccatcaactgagaaagaccttgacgaaaagaagaaagaacctgc

SEQ ID NO: 285236 - DNA, 83 bp, Homo sapiens
cctggaggaatccgagaagagcagagcggagggagccccagacacgaggttggaaagaaccatgactgtattcaggaaggcac

SEQ ID NO: 285237 - DNA, 100 bp, Homo sapiens
ccgtgtgctgccactgcgggggcaagacgaagatttccaaaagaccttggctcaggtgtcacttttgcagaaaagcatttactgactgttgacttggcca

SEQ ID NO: 285238 - DNA, 50 bp, Homo sapiens
gatgtactacaatctgctaaaactgtataacagagtcttgctctgttgcc

SEQ ID NO: 285239 - DNA, 100 bp, Homo sapiens
aatcagcagcagatgttggttgccaagcttcagcgcctgctcctggtcatcactaaccagatttacttggagtacatgtgaaagaaaacgtcagtctgcc

SEQ ID NO: 285240 - DNA, 75 bp, Homo sapiens
tcaattggagatgtttgggatttcaatcttgatcctatagcattaaagaatggccacatctgttgctcagtggat

SEQ ID NO: 285241 - DNA, 83 bp, Homo sapiens
cgatgctgaggatcgaggaacgttgtctggctctacagattctcccctgcccctggagaaggaggagcaggtccgacttcagg

SEQ ID NO: 285242 - DNA, 99 bp, Homo sapiens
cttttgttggaaatcagctgcctttcatcggatttacctactatagagaaaatttgcattatcctgcactgaaaactctggaacatctagagcatacct

SEQ ID NO: 285243 - DNA, 74 bp, Homo sapiens
ctgaggcggccgcggggcccgagcgcaggttaatttggagtggcccctggagtcagtttcctacaccatccgag

SEQ ID NO: 285244 - DNA, 87 bp, Homo sapiens
ggaggtgtttccaaagaattttttcagctggttgtggaggaaatcttcaatccagatattgttgatgcggatgaaattaaaaggcta

SEQ ID NO: 285245 - DNA, 50 bp, Homo sapiens
tggaagccatggatggccgggaacctatgcaggacaagtactccaaaagt

SEQ ID NO: 285246 - DNA, 82 bp, Homo sapiens
aacaagaggacccaggagaaattcgccctcaaagttgcacactgggccacagaggatccagcaaggatgaagaaatggagca

SEQ ID NO: 285247 - DNA, 90 bp, Homo sapiens
tccctgaaagcattaccgggttcgctaggctcacaggctgtacagcagtcatgacgctggcatctgcttggcttctggggagccctcggg

SEQ ID NO: 285248 - DNA, 99 bp, Homo sapiens
cttcagaccagagtggaacaatttgtacacaaggtggggtggaagacaacccgtgagtattacaccttcatgtgggttactttgcccattgacctaaac

SEQ ID NO: 285249 - DNA, 132 bp, Homo sapiens
ttactccctggatgactggaagctctttgccacaaatcacccagaatgcctgcaggtaatagcctgcagctggtgttttgagaagccctactgctgaaaacttaacaattttgtgtaataaaaatggagaag

SEQ ID NO: 285250 - DNA, 90 bp, Homo sapiens
accggcgccatgtccagcgctcggacccccctacccacgctgaacgagagggacacggagcagtgttatagttttgccgctggactcttc

SEQ ID NO: 285251 - DNA, 101 bp, Homo sapiens
caagggttatatatggaattatggtaccctccctcagggacttgcaacaaagcattgccagagaacctagtgctccttcaattcctacacctgcgtatcag

SEQ ID NO: 285252 - DNA, 98 bp, Homo sapiens
acgggcgggtgaagatcggccactacattctgggtgacacgctgggggtcggcaccttcggcaaagtgaaggatgccatggacaatattaccaggcag

SEQ ID NO: 285253 - DNA, 96 bp, Homo sapiens
tgaccgagagcgtgaccgagagcgcgaatatcgtcatcgttagaagagagcctatctctggcagaagtagccaacgagctggacacggagaccctg

SEQ ID NO: 285254 - DNA, 83 bp, Homo sapiens
agggtgttagccaagcggattgagccaggacacaacaccgcggagccctgcaggcggtgagaagccctaccactgcaactggg

SEQ ID NO: 285255 - DNA, 88 bp, Homo sapiens
ttcgagataccagtgggaccagcagaggtgttggctttgcaagatgctgcacttaaaaggatgcttgttttgatgtcctgctcattgt

SEQ ID NO: 285256 - DNA, 105 bp, Homo sapiens
cgggcacctccgagcgcaaggacagcgcgaggtccgcgcagcccagcgcagccatggggggccctcagcctcttggccttgaacgggctgttcatcttgattcac

SEQ ID NO: 285257 - DNA, 75 bp, Homo sapiens
tgcaggagaaaatacggcattgctaggggtggcctatgtatgcacagctactgattgatttattcaaatatttag

SEQ ID NO: 285258 - DNA, 75 bp, Homo sapiens
agcagtctcaggcctttagtgatgatgtttctccacagacactacccaaagcagtccttcactacagtggcagac

SEQ ID NO: 285259 - DNA, 51 bp, Homo sapiens
gaacaggaaacggaccaatgtctgtgtcaggaatatcccgctatagtagaa

SEQ ID NO: 285260 - DNA, 82 bp, Homo sapiens
gtttggcatgtgaaagtgcaaagccaggcacaaaatctgggtttaaaggttatcaatactctggctgaccatcatcatcgtg

SEQ ID NO: 285261 - DNA, 90 bp, Homo sapiens
aatcaccagcaagtttcgaggcaaatacctctccattatgcccctcgggccaggaaggaatactgggagaatcttcggatagcctcaggc

SEQ ID NO: 285262 - DNA, 105 bp, Homo sapiens
agaacaaagacacaggtcactcaaataggcagctattttgaagatgaggaagaagattctagcaacgttgatttaccttacattcctgctgaaaactcaccaact

SEQ ID NO: 285263 - DNA, 95 bp, Homo sapiens
ccgttggagtttaatgagaggaatatactcatcatcagtctatttagaagagtactttaggatggagctgatgcatgctgaaaaactgaggaagg

SEQ ID NO: 285264 - DNA, 82 bp, Homo sapiens
ctgctcctgctgctcatcccggtggccgccgcgcaggagcctcccggagctggttgattcttcaccacactgaaaccattag

SEQ ID NO: 285265 - DNA, 74 bp, Homo sapiens
ctggattgctgaactttggcgagtttaaggttctccccatgacaccacctgaacgtctcttcctcccaagggtg

SEQ ID NO: 285266 - DNA, 123 bp, Homo sapiens
tgctgggcgacctgcaggcagcaccggaggcccaggtctccgtgcagcccaacttccagcaggacaagaaagcccgttttggcctgagtgcggctgaggacatcaccccccggttcaggtgag

SEQ ID NO: 285267 - DNA, 101 bp, Homo sapiens
tggcgcttggggactttgaccgtgcactgcttcgcaagcttttggaaaagaagaagagagtccaactcaaagatatgggagaggatttggagtgcctctgt

SEQ ID NO: 285268 - DNA, 75 bp, Homo sapiens
ggagattttgtgaatatggtggaaaaaggaatcattgacccaacaaaggtccactggtgtgtcctccccttccga

SEQ ID NO: 285269 - DNA, 83 bp, Homo sapiens
ggggctccgggtcttccagagcgtgaagatcaagatcggaagcggggagaggtggtgagagatgacccctgttgaggatttca

SEQ ID NO: 285270 - DNA, 73 bp, Homo sapiens
gctgaagaggagcgccagatggtggaggaatacacttatttatgaagtgcacctctctgagaaacataagaga

SEQ ID NO: 285271 - DNA, 110 bp, Homo sapiens
ttttagcgtcaaatagtgtgtgttccatattgagctgttgccgctgttgctgatgtggctttatgaaagtttggcagtaatcagtccaaaccagagttcacagtggacct

SEQ ID NO: 285272 - DNA, 100 bp, Homo sapiens
gctggactacaaggacgagttctcgggcagaggcgacctccccgcgttccatgcgcacagggacagggggtctcgctctcacccaggctggagtgcagtg

SEQ ID NO: 285273 - DNA, 95 bp, Homo sapiens
ttttatctcatattagtgcctgtgatggcatctttcatctaacacatgagattgtggggaacctgggtgaaggcacctttggcaaggtggtggag

SEQ ID NO: 285274 - DNA, 100 bp, Homo sapiens
cattcatatcccaacattcctgtgtcaattcgacggagctggatgaactcattcaggttcaagatgttgttcctataactagttatgacactgctggatc

SEQ ID NO: 285275 - DNA, 120 bp, Homo sapiens
cgaggacagagatggcgagcgcccggattggggatgagtatgcggaggacagctctgatgaggagctcttcaccaccaggagtgttccttgagaaggactatgagatttaccgggattac

SEQ ID NO: 285276 - DNA, 75 bp, Homo sapiens
ctgactacagctggagcgcccagaggcgagccctggtggaggaagagggcccagactcccactacggcaccaaag

SEQ ID NO: 285277 - DNA, 83 bp, Homo sapiens
gcagggcctgcagcgggagctggacggcgagcgcgagcggcgcgagaaaggccaccagatgcctccacccagaaaggtcagat

SEQ ID NO: 285278 - DNA, 90 bp, Homo sapiens
cttgcatgagggacaaagctacacagatgctaatactggagaccgtggacagaccaataatgctgcttctgcatcagcttccaactccac

SEQ ID NO: 285279 - DNA, 85 bp, Homo sapiens
gaagaccattcagatgggatctttccggatcaatccagatggcagccagtcagtggtggaggtgaagccatataatgtctacatc

SEQ ID NO: 285280 - DNA, 89 bp, Homo sapiens
tgccatgtggaaaatgatgcttaatatcgatgatataaaccacagtacttcaggatcccattatgaaaattcccagcggggacctgtgt

SEQ ID NO: 285281 - DNA, 101 bp, Homo sapiens
ctgaagttaatggttctatgaaacagtgtatcaaagtgtggactgaggaactcaatgttcgaaaagttacactgtctacagataaaaacaagtatggcatt

SEQ ID NO: 285282 - DNA, 74 bp, Homo sapiens
ccctttgccatgaccggggaaaaggcggaccgagacagtgcagaagctgtgcccaggggggcagctcccattcc

SEQ ID NO: 285283 - DNA, 50 bp, Homo sapiens
tgtgtgtggacattggcgagacccgggggagcgctcgctccaagcactgc

SEQ ID NO: 285284 - DNA, 75 bp, Homo sapiens
ctgaataagcttccaaaatgatggtgagaagccctaccactgcaactgggacggctgcggctggaagtttgcgcg

SEQ ID NO: 285285 - DNA, 88 bp, Homo sapiens
tttcaccagtagcaaatgagatgaaccatcttcctgcacacagccacgatttgcaaaggatcccatggtccattattgcctttaccaa

SEQ ID NO: 285286 - DNA, 89 bp, Homo sapiens
atttttgggaaggtgcaaggggtgtttttccgtaagcatactcaggtataatccagttaccaagaatgtgactgtcaagagtgaaggcg

SEQ ID NO: 285287 - DNA, 100 bp, Homo sapiens
atttcaatcgaatatctcatggcctacagggactttctgcagtgcctctgagaacttacgcagatcagccgactggcctgctgctgtgggtctgcaggct

SEQ ID NO: 285288 - DNA, 97 bp, Homo sapiens
gcagagccttggtacttggacctgaaccttgctccgagagggagtcctcgcggacgtcagccaaggactcgggtcaagctggaaagcctggaagacg

SEQ ID NO: 285289 - DNA, 80 bp, Homo sapiens
cgatccagcctgcggagcctgtggggcagatctgtactgcaccctggaggtggattcctttgggtattttgtgaataaag

SEQ ID NO: 285290 - DNA, 99 bp, Homo sapiens
cacatcttccggccaacttccattgaacttcccagcactcgaaagggaccgaaatggagagcaaaggcacattgcaagcaacccgtgccttgatggtgg

SEQ ID NO: 285291 - DNA, 100 bp, Homo sapiens
taaggccgccgcttaccccggggtctatggaagtaatggaaggacccctcaacctggtctaacttcaaacttgtggctgttaattcaaaactctatgcca

SEQ ID NO: 285292 - DNA, 135 bp, Homo sapiens
gtttcttatatgtgatgccattccagcactggactcatggaggctgagcatttattcagtactctcgcaaaaaactcaaatttagtgcgacttaacctttctgggtgttctggattctctgaatttgccctgcag

SEQ ID NO: 285293 - DNA, 90 bp, Homo sapiens
ttgctgcgccctctcagcttcccaagaaagattactcttgtctctgctgctcctgggaaagtgatttgtgaaatgaaagtagaagaagag

SEQ ID NO: 285294 - DNA, 100 bp, Homo sapiens
gagctgtgcgatgctgctgggcgaccggatcagtctctggatggtcgtcagatccgtgtggatcatgcaggcaagtctgctcggggaaccagaggaggtg

SEQ ID NO: 285295 - DNA, 100 bp, Homo sapiens
aaaactgtggctgttggtttgtggaacagacagctccttctttattggctttcattaaagatagaaccagggacaagcaccccacgttctgctgcttcca

SEQ ID NO: 285296 - DNA, 100 bp, Homo sapiens
ggcgaacctgagccggaacgggccagcgctgcaagaggcctacgtgcgggtggtcaccgagaagtccccgaccgactgtcccacctcttcgtgctgcagc

SEQ ID NO: 285297 - DNA, 100 bp, Homo sapiens
ggaaacgccgaggaacccggctgaggcggcagagcaatggtggaacaaagcggcaaaagatatcccatcaaaattatatagcctatcaaaagcaagttat

SEQ ID NO: 285298 - DNA, 100 bp, Homo sapiens
ttatgagtctctgggatggattggatactgatcacagctgccaggtgcgagacaagaagcttctcaatgacctgaatggagccgtggaggatgcaaagac

SEQ ID NO: 285299 - DNA, 83 bp, Homo sapiens
cgcggacggtggcgttaagggaacgctgaggtcccgcgctccccgaccgaggctttatcctgtggataaacgcagagtgaacg

SEQ ID NO: 285300 - DNA, 100 bp, Homo sapiens
ctcagagtaaaagttgtttctggaattgatctcgccaaaaaggacatctttggagccaggaagcagacagtatgagcatgaccagtggagaaggtactag

SEQ ID NO: 285301 - DNA, 82 bp, Homo sapiens
tttctgcagatgccctgagagaggagattgagaggatccagaatccagatctctggaatagctaccaggcaaagaaaaaaac

SEQ ID NO: 285302 - DNA, 100 bp, Homo sapiens
gcagccggaggatcgcggagtcccaatgaaacgggcagccatggccctccacagcccgcaggtgacagagctgaatgaacctctctccaatgaagatcga

SEQ ID NO: 285303 - DNA, 74 bp, Homo sapiens
acagcaccctcacggaaccagcagaatccagagaccacatttgaagtatatgttgaagtggcctatcccaggac

SEQ ID NO: 285304 - DNA, 90 bp, Homo sapiens
aacagcgcacggccactgtggtcatgatgacacggctggaggagaagtcccgggtggcccactgtgccaagtccttcgccttactcaagt

SEQ ID NO: 285305 - DNA, 90 bp, Homo sapiens
tagctgggagccatcacgcccagctagccatcttctaattttcattccttcaaagaaaatgcttggacagaagagatgagtactatttcc

SEQ ID NO: 285306 - DNA, 98 bp, Homo sapiens
gattatatttcttggagttgtgttggtaatgaagaaaaggtaccacatctgtgtgactgtgctgatctacttcctccccctgctggtgattggctatg

SEQ ID NO: 285307 - DNA, 121 bp, Homo sapiens
taagcacacctcaaactaacacagtccctatcaaacctttgatcagtactcctcctgtttcatcacagccaaaggctttgaagacaagattcccaaaaggagattctctgagatgcaaaat

SEQ ID NO: 285308 - DNA, 100 bp, Homo sapiens
agaaagcgatttcctccgcctcttccaaagcggaacttacaatgtctcagaaaaatggtgggaatgttcttcagatgatgtatgagaaacctgaacgatg

SEQ ID NO: 285309 - DNA, 100 bp, Homo sapiens
aaagtgcgtgaggagtttaaggagctgaaagcgcggaaatatttgatgatgcgtcacctggaaagcaaaaggaaatccaagaaccagatcctacctatga

SEQ ID NO: 285310 - DNA, 90 bp, Homo sapiens
cccgagcgctgcgtcctgcgggacccctgcagctgcagacatctgcttcaccaaggagctacactcccacttcttcagcttgggcaagtg

SEQ ID NO: 285311 - DNA, 99 bp, Homo sapiens
atggagagagactgcatggggagcttctcgggaagttggttaaccacccgtgtccaccctatgccttggcatgggcaaccaatagcatcgtggctgcag

SEQ ID NO: 285312 - DNA, 100 bp, Homo sapiens
ccagtcacctctcaactgtgtgccaaaggctttctgtgaagaattggaatcaatgatacaggagcaatttaagaaggggaagaaccccacaggcctattg

SEQ ID NO: 285313 - DNA, 75 bp, Homo sapiens
cacgggttctgcccgcacggtccaatggccggggaggcggaggtcgcagccagggcggcggggcgcgcccagccc

SEQ ID NO: 285314 - DNA, 51 bp, Homo sapiens
cacttaagaaatgtcatgagattgagagaatccagctatgggacacagcag

SEQ ID NO: 285315 - DNA, 50 bp, Homo sapiens
cggggaccggggtctgactcccttaaactgtactaatggtcacttgatgt

SEQ ID NO: 285316 - DNA, 100 bp, Homo sapiens
tcacagtgagaaggcgacaggaaccagctcgggggccaactctgaggagtccactgcagcagattatctcaactttggtctcctgggaccactcgttgct

SEQ ID NO: 285317 - DNA, 98 bp, Homo sapiens
atctcaggcaacctggatgctcctgagggcggcttcgatgccatcctgcagacagctgtgtgcacgcttcaagaatccagaggctttaggaagaagat

SEQ ID NO: 285318 - DNA, 85 bp, Homo sapiens
tgcccaaaactacagttctgtcactcacttacacagtattgggaaatctgtgaaagagaatctggacgaggctagagaacagaaa

SEQ ID NO: 285319 - DNA, 100 bp, Homo sapiens
ggcggcgccgcgccttctggggagacgcggaggtatcagtcttctcacaagactttcaggattaagcgattcctggccaagaaacaaaagcaaaatcgtc

SEQ ID NO: 285320 - DNA, 97 bp, Homo sapiens
ctgtgggaagtctccatggtgaagtataggctgaggctacctgtgaacagtacgcagtgaatgttggcagaaatttagcatctggagaggttggatt

SEQ ID NO: 285321 - DNA, 90 bp, Homo sapiens
gcaaaagaaaaagaaggtgacaggcgttgagaccaccgaagggaacccatggctagacccggatgcagagtctacagcctgacccagctg

SEQ ID NO: 285322 - DNA, 100 bp, Homo sapiens
agcgcagaggcggcggtggcgagaggtgcggcgaaggaggcagaggcacttatgcttgtcaggggaacacttaagaatctgtcctcaggaatatacatgc

SEQ ID NO: 285323 - DNA, 98 bp, Homo sapiens
aaagagcccctcatcgagctcttcgtcaaggagaccctgccctggttcaccaaaggccagcgccaccctccacagtaacgacggcaggggtgacccca

SEQ ID NO: 285324 - DNA, 100 bp, Homo sapiens
tttataataagaacatatctcagaaagattgtggcatggcagagagaaatgctaattttgaagcccttcctgaggattggagagcaaggctgaagagaag

SEQ ID NO: 285325 - DNA, 75 bp, Homo sapiens
aaagaaagacgcagagttaaaggcggtctctgtggcacattttgtttcccgtgccttgggtgtcaagttgcagct

SEQ ID NO: 285326 - DNA, 83 bp, Homo sapiens
gtggctattgtgaaggagggttggctgcacaaacgagactgtgccctgtccacggtgcctcctgcatgtcctgctgccctgag

SEQ ID NO: 285327 - DNA, 97 bp, Homo sapiens
tgtggcgacatgtcgacctgacgctctacacggttcctcagtggtgtgctgaatattgtctttccatccactaccagcacgggggcgtgatatgcac

SEQ ID NO: 285328 - DNA, 74 bp, Homo sapiens
cctattcagaggggccggtctctctaaatatgccccaggattctaacattttcagagaaccttttggaaagaac

SEQ ID NO: 285329 - DNA, 50 bp, Homo sapiens
ggaaaatgatgcttaatatcgatgggccgcgatgggcctcttggaacatt

SEQ ID NO: 285330 - DNA, 75 bp, Homo sapiens
gtttttcggatcatgtctggtggctccgcggattataacagatgcagattctgcccaagaagcccctgcattgca

SEQ ID NO: 285331 - DNA, 96 bp, Homo sapiens
ctctcatctcgctcggctgcgggaaatcgggctgaagcgactgagtccgcgatggagttcctgacagcctcctcatgaaggtgctgagccagcgcc

SEQ ID NO: 285332 - DNA, 100 bp, Homo sapiens
tcgaatggtaccgccctgcacaaaggacagggagccagcgccggcagccaccatggcgtcacgcatagggttgcgcatgcagctcatgcgggagcaggcg

SEQ ID NO: 285333 - DNA, 75 bp, Homo sapiens
tcagaagaactggatcttaccttgcccaccaacttcagagatttgtccaagtttccaaccggaggccctatcggc

SEQ ID NO: 285334 - DNA, 100 bp, Homo sapiens
cgaacgtgaggctacgctgaccattgcccagtacaggtgaagatggagctggaaaaacaagcttaataagaaaaattcagggaatagaggagtataagaa

SEQ ID NO: 285335 - DNA, 100 bp, Homo sapiens
gtggatattgggcttgacagctgcaaggagttactgaaggctcatggatttgagatcttatgctccaaatgtagcccacatttttctgactgcaagaaat

SEQ ID NO: 285336 - DNA, 75 bp, Homo sapiens
ctggctcggcacatcctcactggtcgggaggaatcagagatcattgatttcttcctgggggcctctctcaaggat

SEQ ID NO: 285337 - DNA, 90 bp, Homo sapiens
ccgcttagaagcctcagctgtgattggctaccttctcccatcaccccaggttttgagtgatgaggtgaagaggaagcagtacgatgccta

SEQ ID NO: 285338 - DNA, 83 bp, Homo sapiens
gcctactcccccaccggggatttcagattgctcatttagaaagtggatgtgtgggataacatgtccaatgtgtccgaggagag

SEQ ID NO: 285339 - DNA, 98 bp, Homo sapiens
cggaacctggtatacctggccacgatcgcagactccaaccagaacatgcagtccctgcttcctgccaggcatcccaacacgctgtcttttcgctgctc

SEQ ID NO: 285340 - DNA, 98 bp, Homo sapiens
gagaatatggagagactatgtggctcccacagctaatttggaccaaaaggacaagcagtttgttgccaaggatcatccagatgcttggtctttgattg

SEQ ID NO: 285341 - DNA, 87 bp, Homo sapiens
cgcggccatggcccggcgctcgccctagctccactgcacagatgccacggcggagccggcgggtctcagccggtcgtcgcgacgttc

SEQ ID NO: 285342 - DNA, 83 bp, Homo sapiens
agaaaatgtcgtctcggcttggaatctttttgccataaattctaaatgggcggacaatttcatggccgagggctgtggaggga

SEQ ID NO: 285343 - DNA, 74 bp, Homo sapiens
ttcaacctgccaaaaaagtctcaccatgcaaactcccccacagcagaaggcagacggtaacaagtactccttgc

SEQ ID NO: 285344 - DNA, 98 bp, Homo sapiens
tggaggctgagtacgacagcctcaaacaggagctggagcagctcaaagagatgttcattctggacagagtggaaggtgatacttgttcccttaatgag

SEQ ID NO: 285345 - DNA, 98 bp, Homo sapiens
ggcgccctgcaccgcgcctcgcaaagttctttggcatggacacaagttcagtgggaggattagaattgactgatcagactcctgttttattagggagt

SEQ ID NO: 285346 - DNA, 100 bp, Homo sapiens
ggtccggtcttcggtttgcacagctagaggccgcgcagcagcaaaggatgagcggaaccttggaaaagacggaatcagtccccaatgcctggaaattcct

SEQ ID NO: 285347 - DNA, 100 bp, Homo sapiens
catgttgggcgccccggacgagagctccgtgcgggtggctgtcaggacttaaagagagatctacttcagagccagcagtcccgccagaagaggctgagcc

SEQ ID NO: 285348 - DNA, 78 bp, Homo sapiens
cgtagggaggacgccgggacacctggaagccgagaaatgttcgatcctttggtacagaagacagaccgacagatcgtc

SEQ ID NO: 285349 - DNA, 98 bp, Homo sapiens
atttgagaacactagaatttcaagtcttcagaaacagtctggtggccaaggaattgggccagacagggacacggctcactccagctgacaaagcagag

SEQ ID NO: 285350 - DNA, 83 bp, Homo sapiens
ctccactccgtcccccgcgggtctgctctgtgtgccatggacggcctgcctgctccgcttcagcggactctcgctggtctacc

SEQ ID NO: 285351 - DNA, 100 bp, Homo sapiens
gctgggagagaggtacctctccttttccctctccctttccctaaggactctgcagacagtgggcccatcccatgcccgaacctacactgtggctgtttat

SEQ ID NO: 285352 - DNA, 100 bp, Homo sapiens
cgcagctgcgggtccgggattcccagccatggcagattcctccgggcagcaggttcaaatctgaacatcaatgatgtactagggaactactcattgactc

SEQ ID NO: 285353 - DNA, 83 bp, Homo sapiens
gtgtctgctcctgtcgccttcgcctcctaatccctagccactatgggaaagcaggcaggatgggagagtcgccgatagaacca

SEQ ID NO: 285354 - DNA, 98 bp, Homo sapiens
gagcaagctgtatgcatccaaagcacacatgaactcagtgctcatggggatgaagaaccagctcggattaatcactcctgaagatcggaaatatggaa

SEQ ID NO: 285355 - DNA, 96 bp, Homo sapiens
gtttgatatcaccaaactggaggatgcctatgtattccctggggatggcgcatcacacaccaaaggggctcacaacgaagtaagacagtagatgac

SEQ ID NO: 285356 - DNA, 100 bp, Homo sapiens
caatgtgaagatacataagatcgtagccagacccccaggagcctcacagtctactcagagaaaaataaaagaaggcaaaatgagtcctccccatttccat

SEQ ID NO: 285357 - DNA, 73 bp, Homo sapiens
ttaccagctcacctctcaccgcgcatgtttggagtggttagcaggaagaagatgagccttaagtctgaacgcc

SEQ ID NO: 285358 - DNA, 101 bp, Homo sapiens
gatgaatccaagttaacccttaccacccagcagcagggcatcaaggcaatgaatcgctccctggctaatgtgattcttggaggctatggcaccacttcaac

SEQ ID NO: 285359 - DNA, 98 bp, Homo sapiens
cggcggatctggacacccagcggtctgacatcgcgacgctgctcaaaacctcgctccggaaaggggacacctgctccagaacctgggtatcaacccag

SEQ ID NO: 285360 - DNA, 75 bp, Homo sapiens
acagtggttttaacagcaggccccggggtcgcgtctacaggttagagcagccagcgggtacagaatggattttgg

SEQ ID NO: 285361 - DNA, 100 bp, Homo sapiens
ttaagtgaaatggtagaatatatcacccataatcggaatgtgatcacagagcctatttacccagaagtagtccatatggctcccacatcaggacgagaag

SEQ ID NO: 285362 - DNA, 100 bp, Homo sapiens
caaacaatacattttatgctaccaagcgtctcattggccggcgatatgatgatcctgaagtacagaaagacatatagaagagtgatggatgtcatttctc

SEQ ID NO: 285363 - DNA, 82 bp, Homo sapiens
gactctgggacattcgaaaacctcagaggtgttgagaataataggcagtcagaaggtctgcatgccaaaggcagaagacatt

SEQ ID NO: 285364 - DNA, 74 bp, Homo sapiens
ggtcagcgtttccctggagaggaagaggcaaggttttccagaagagattcaatggctcagtaagtttcttccgc

SEQ ID NO: 285365 - DNA, 75 bp, Homo sapiens
gcggaagaagtgcccgtccacgcacagcgaggagacaagttggatggcttgaggactggtactaaaaggaaacgt

SEQ ID NO: 285366 - DNA, 78 bp, Homo sapiens
catgacagtggtcatggccgtgtgctccctgcctctcacgcagcagtgttgtactgctacttctataaacggacagcc

SEQ ID NO: 285367 - DNA, 99 bp, Homo sapiens
cgaggacgacttcaactatggcagcagcgtggcctccgccaccgtgcacatccgaatggaatgattatgagcctagctgtgggcgttctttacgcagga

SEQ ID NO: 285368 - DNA, 88 bp, Homo sapiens
aacgcggtgcgcgaccgggagctggacctccgggggttcatagtggcgtcatgcacgcagactcctgcaagttcccctaagttcttag

SEQ ID NO: 285369 - DNA, 87 bp, Homo sapiens
tacagttagagtctgaagttgttaccaatggtgaaactacatgttcagaaaggctgaagtggtactgggaaacatcattaagaagaa

SEQ ID NO: 285370 - DNA, 75 bp, Homo sapiens
agaccatcatgctgcgcggccttcccatcaccatcacagagagcgattgcacagccagagaacaacacatcacac

SEQ ID NO: 285371 - DNA, 100 bp, Homo sapiens
ggacccatttgtgtccattgatctcttggagcagctggggatcatgatcagcttgaacgggtctttttacgacttggccatgctgaaacagatgaacaat

SEQ ID NO: 285372 - DNA, 83 bp, Homo sapiens
aaggaatctgcttttcaagtatgccaccaacagtgaagaggcttctcacggcattcagcagcagcgttgctgtaaccgacaaa

SEQ ID NO: 285373 - DNA, 100 bp, Homo sapiens
gccaagaggaggacagttcgctacacagcaatgcatcgaggaattacatgaatgacagtcttcgaaccaatgtgtttgttcgatttcaaccagagactat

SEQ ID NO: 285374 - DNA, 97 bp, Homo sapiens
cgctcgttctgccttgggccagggacacttaacattcagggacgtggccatagaattctctcaggcggagtggaaatgcctggaccctgcacagagg

SEQ ID NO: 285375 - DNA, 100 bp, Homo sapiens
cgagaaccgtcagtttgagccagatgttccatggaaaatgggagaccacctgatcctgcagactgggccgtgatggatgtcgtcaattatttccgaaccg

SEQ ID NO: 285376 - DNA, 96 bp, Homo sapiens
cttcgacttcctcaaagtcatcggcaaagggaactacgggaaggtaaccatggagaaagagctgcggagcaccattcttttcaatgcctacaaaaa

SEQ ID NO: 285377 - DNA, 82 bp, Homo sapiens
gcgaacatgcgcttttgacacattggagggtgagcttgtcggccacagactgctacattgtgcatgagatctacaatgggga

SEQ ID NO: 285378 - DNA, 75 bp, Homo sapiens
gtaagaagcgactactagacagaaaggatgacaaaagatgtgagtggatctatcgaggctctacacggctggagc

SEQ ID NO: 285379 - DNA, 87 bp, Homo sapiens
atgaaatttatggcattcagaacagtgcccttgctcgtgtgaatgaacagaggccagagaattgcagaaacccacctgtaatatgcc

SEQ ID NO: 285380 - DNA, 90 bp, Homo sapiens
ggacgtggagcctgaggatcccatgttcctgatgtagaatggaagaatctcacttcaattctaacccgtacttctggccttctatcccca

SEQ ID NO: 285381 - DNA, 100 bp, Homo sapiens
agcccccggcccaagggcgacttctccagccgggcccgcgaagtgctatatgttctcctttcagccaagacctttcaccagtgcaggggatagaagattc

SEQ ID NO: 285382 - DNA, 100 bp, Homo sapiens
cctgtggcaggtgcctcccgccaggtcaatggccagcaaggaggggggtccgagccggcggcggcggcggcagtggtggcagcgggagacaaatggaaac

SEQ ID NO: 285383 - DNA, 82 bp, Homo sapiens
gaggctgctggatgccgcgtctccgcttctgctgcctgccgggcgggctccggtggccggtttggtgcacctcgatttggag

SEQ ID NO: 285384 - DNA, 101 bp, Homo sapiens
agaagaggaaacctaaccaatgactgtggaataatatggaagaagatggaaaaaacttgtttaatggccgtacccgtgcgcagaggacgaggagtgcggca

SEQ ID NO: 285385 - DNA, 96 bp, Homo sapiens
ttttagaagacatagaagaagcactgcccaattcccagaaagctgtcaagaccaactacggttgaaaacgtaaaaaggattgatggtgtttctgaa

SEQ ID NO: 285386 - DNA, 75 bp, Homo sapiens
cgcgatgtcagctcagtgctgtgcgggccagggttacacatcattttggaatgactgtatatcatctggattacg

SEQ ID NO: 285387 - DNA, 100 bp, Homo sapiens
tccagggcagaggaccaacatgggcattttgtttatgagcaaggtggtgtatggtgacactgactccgtcatgtgccgattcggcgtgtcctcggtggct

SEQ ID NO: 285388 - DNA, 90 bp, Homo sapiens
aagttacctggcggggggatggacagttttttgctgtgagtgttgtttgcccagaaacagggatatgggattagaactgtttagaaccca

SEQ ID NO: 285389 - DNA, 100 bp, Homo sapiens
gcggccgccgcgctgtggctgctgctgctgctgctgccccggacccgggcggacgagcacgaacacacggttggaaaagagactgttcaaaccactgagg

SEQ ID NO: 285390 - DNA, 100 bp, Homo sapiens
ataagctgagcagagccctgcgatactattatgacaagcacgtcagctaactgttcagatgatgcaaaatcctcagattcttgcagcccttcaagaaaga

SEQ ID NO: 285391 - DNA, 88 bp, Homo sapiens
aacagctatgcatgctgcttttgatgtctgacaacgtggatcgttgttttgaaacttatgccccgtggtgccctgcttgtcaaaatct

SEQ ID NO: 285392 - DNA, 76 bp, Homo sapiens
ggcgctccgtgcgcggagccgtctgcctgcatctgctgctgaccctcgtggtctccacctctgggcaggagagttg

SEQ ID NO: 285393 - DNA, 100 bp, Homo sapiens
gttctacagagtcaccactgaacaatatcagaaagctgctgaagaggtggaagcaaagttcaagcagtactacgagatgctttacaacacagctgacgag

SEQ ID NO: 285394 - DNA, 100 bp, Homo sapiens
tcaagatgaaccatttagagatcctgctgtttggccaccccctgttcctgcagaacacaggttgtccggccataccagaccatgtccaatcccatgagca

SEQ ID NO: 285395 - DNA, 50 bp, Homo sapiens
cgcgcctctcccggaccctgcagggaaaaccagtagattcccagacatcg

SEQ ID NO: 285396 - DNA, 100 bp, Homo sapiens
atgcaagacccttcatcttcacccttggaaaagtgtctcggctcagctaatggaaatggagaccttgattctgtggacatttgggagcaataaaaataag

SEQ ID NO: 285397 - DNA, 75 bp, Homo sapiens
caaccatgctcaacttcggtgcctctctccagcagactgcgcaaaatgatgcttcaacacccaggccaggtctct

SEQ ID NO: 285398 - DNA, 100 bp, Homo sapiens
tagcacagaagaacccagaagagtttaaaacctccgtgtctctggctgtctctaggctaagcagaattcaagatggaaaaggtgatgtaaccattacaaa

SEQ ID NO: 285399 - DNA, 90 bp, Homo sapiens
gcccggctgctgcagcccgcgcacagctgctcccttcgccttcgccctttccacctcgcggcagttcggaggagatatttcatcaaatac

SEQ ID NO: 285400 - DNA, 107 bp, Homo sapiens
cgaccgtctggatccccgcccaggaagcccctctgaagcctcctcgccgccgtttctgagaagccaaactggcaagacgcagtcaagaacgggacaatcttggcatg

SEQ ID NO: 285401 - DNA, 75 bp, Homo sapiens
gtggcagagatcaatggaaccatgaacagacttatgccaggatcccaccataaaagagctggaatcgattataag

SEQ ID NO: 285402 - DNA, 97 bp, Homo sapiens
cactccagctgaaagaggaaggtcttctttatactgcagtgatattgccattgagttgtctctcaaggaacaaaggcagcagtcaaccaccctttcc

SEQ ID NO: 285403 - DNA, 100 bp, Homo sapiens
ttttgttggatgtttggccggctatggagcttaccgtgtctccaatgacaaacgagatgtaaaagtgtcactgtgttgtacatcctggagacctgaagaa

SEQ ID NO: 285404 - DNA, 74 bp, Homo sapiens
aacggagacttggatgaggtgaaagactatgtggccaagggttttggccaaattgggcgagggcacaaaataac

SEQ ID NO: 285405 - DNA, 100 bp, Homo sapiens
cctggaccctgctcagagggacttgtacgtggatgtaatgttggagaactatagtaacttggtgtcactggggaaatcctcattgacgattcaatttgtt

SEQ ID NO: 285406 - DNA, 80 bp, Homo sapiens
ctggagcctcagttggaagcagccgatccagcctgcggagcctgtggggcaggtcctatggcagcgtatacaaagctatt

SEQ ID NO: 285407 - DNA, 50 bp, Homo sapiens
aaattcgtcattggccacttaaagggtgtccgcaatgttgccagtgtctg

SEQ ID NO: 285408 - DNA, 140 bp, Homo sapiens
cttgaagatgcacaagaggaaaggacccccgggacccccgggcagaggcgccgcggccgcccgccagctcccctgatgaggaaacaggatctccctgccggctcctccgtcaaccagaaaaggagccagctccccttcct

SEQ ID NO: 285409 - DNA, 100 bp, Homo sapiens
ccaggtgacagcaatcagctggcctggtttgatactgacctgtaaatcatcctttaggaaagaccacagcaagattctttcattcgtctcctcctagcct

SEQ ID NO: 285410 - DNA, 97 bp, Homo sapiens
gaacagagtctgactggactttctattagctcaactccaccagctgtcagtagtgttctcagtacaggactgtgtgctgaagaggttcatttgtgtg

SEQ ID NO: 285411 - DNA, 75 bp, Homo sapiens
ttatgaacttggtcggctcttccagctacaaactctaggtttgaaagcttttgccttatgaacagtcctctcttt

SEQ ID NO: 285412 - DNA, 83 bp, Homo sapiens
cccggatgagtacgataccgaagcgggctgtgtgccccttctccacccagagccttatgccagcctggaccatcttggaggca

SEQ ID NO: 285413 - DNA, 100 bp, Homo sapiens
cttctccctgttggccaacatcaccatgctggtcagcttggtcatgatctaccagttcattgttcagagtgtgtcctgcccagagctcttggaccagcat

SEQ ID NO: 285414 - DNA, 98 bp, Homo sapiens
cgagttccccgtgttggcctccaggtcctgtgcttgcggagccgtccggcggctgggatcgaggtctcggcgcggaagatggccggcggcgtggacgg

SEQ ID NO: 285415 - DNA, 83 bp, Homo sapiens
ctacaatcttcgcatgaaatggaagagagggtggtgcggatagcttgaggaaggtttgggactgacaatagctgactaacatg

SEQ ID NO: 285416 - DNA, 100 bp, Homo sapiens
ggcaaagaaagaaattgaaatgcactctattaatgacaaacagcaactgccgaccctttacgcgcacgctctatttctgctgttaaaatcattcctgtga

SEQ ID NO: 285417 - DNA, 88 bp, Homo sapiens
accaatgtacccaatccccacccaggactcagcaggatacaatcgcccaggaagccctcctatgacactgaaacagatcctagtgagg

SEQ ID NO: 285418 - DNA, 82 bp, Homo sapiens
ctgccattgaatatattcggcaaggaagcctctctgctaaaccccctgggacagagcacaggaaagggacccccacagtcac

SEQ ID NO: 285419 - DNA, 100 bp, Homo sapiens
ccgtgggcggcgacatgcagcagctgaaccagctgggcgcgcaggaaagcatgaagggagacaccaggcatctcaatggagaggaggacgccggcgggag

SEQ ID NO: 285420 - DNA, 98 bp, Homo sapiens
ctggataagatggagcaagagaggtcaagtctggcaccatctttgacaacttcctcatcaccaacgatgaggcatacgctgaggagtttggcaacgag

SEQ ID NO: 285421 - DNA, 83 bp, Homo sapiens
agttggagcccccggattgcgctgaccctgagacttaattcagtgcacaaatgagatgaatgtgaacatcccacagttggcag

SEQ ID NO: 285422 - DNA, 100 bp, Homo sapiens
ctctaccttaccagtggataatagtctactgtccaattctgtttactctgaattaccatcagctgaagggaaaatgaagttagtgtgactctggatccag

SEQ ID NO: 285423 - DNA, 82 bp, Homo sapiens
tgtatgttcacttacgcctctcaaggagggaccaatgagcagaaaggacccaggagcgataacagtaaatcaaataagatat

SEQ ID NO: 285424 - DNA, 90 bp, Homo sapiens
gtattataactggaaaccctatactggagtcgtgagatggagaataaagaaactctcaaagggttgcacaagatggatgatcgtccagag

SEQ ID NO: 285425 - DNA, 78 bp, Homo sapiens
agcccaagaccatcactgacgagtttgagcagcaagaggcggagtccaacctgcgcaaggccaagcagggttacgtgc

SEQ ID NO: 285426 - DNA, 90 bp, Homo sapiens
ctttgggcctgtgctgaactacctgagacacggcaagctggtgattaacaaagacctcgcggaggaaggacagagcgggatgccaccagc

SEQ ID NO: 285427 - DNA, 91 bp, Homo sapiens
gtggggatgagtgacggaaacccagagctcctgtcaaccagccaggcaccgaccgtcacgagctaacttcctggaagagctttccgtctat

SEQ ID NO: 285428 - DNA, 100 bp, Homo sapiens
cgcaaccaccgccctggccatctaccatgtgtcaccttcaggccattcagaggaggaaagagaggggaatatgaagtcagccaagccccaagtgaaccac

SEQ ID NO: 285429 - DNA, 100 bp, Homo sapiens
atgagaagcccctggtgctggagatgctgaaggtgcggcgatgctgttccccggaggtaacccaccccttggaggagagagaccccgcacccggctcgtg

SEQ ID NO: 285430 - DNA, 75 bp, Homo sapiens
cttcaaacgacctttgcccaaatccaaaccagtgataactcttctgatagcagcttatttaaaactcagtgtatc

SEQ ID NO: 285431 - DNA, 75 bp, Homo sapiens
tggcaatgtgatcgtcatcacagtcaactatcgacttggagtactcggataattctggcctcatagaacaagttg

SEQ ID NO: 285432 - DNA, 100 bp, Homo sapiens
cctgactttgtgggtgacattctctgggaacatctggagcaaatgatcaaaggttggacccaatgatctgcttttaatgaatagaatatagcagatgtga

SEQ ID NO: 285433 - DNA, 82 bp, Homo sapiens
ggaaggtgtgtccggaggtttgcaggggtgcagtgtgtctggtcttatgagttcaaatctgaacatcaatgatgtactaggg

SEQ ID NO: 285434 - DNA, 83 bp, Homo sapiens
cggcgggatccactgtccggcagaggtggcagaatcgtgtcctcgaaaccctttgcacctctgaacttcagaataaacagtag

SEQ ID NO: 285435 - DNA, 82 bp, Homo sapiens
ccagacatggggaacagggtcacagctctcacccaggtatatgagctccctgaaagcacaaagcagttatttccatcttcag

SEQ ID NO: 285436 - DNA, 98 bp, Homo sapiens
catctctcttcctttctcatgttttggctttggggctaggatcctggccatgaggttggatgcctcaccttactgaaaggagacactggacctaaatg

SEQ ID NO: 285437 - DNA, 100 bp, Homo sapiens
atcgggagcgcaaggtcgccctcaaggccatgatcaaaaccgacttttgctcaaaggtgaagaacaccatctactgcaacgtggagccatcggaatcaaa

SEQ ID NO: 285438 - DNA, 74 bp, Homo sapiens
ccgggcccgggctgggggtctggcgggttgcagtattttacagagctagcccaaggcacaagatgaaaattatt

SEQ ID NO: 285439 - DNA, 100 bp, Homo sapiens
ctgatgcttcttcctacatgtcctaatatgttgatggcattccagaatatctcagatgagcaggattacatcccagtagaccaagaagagttaagagatt

SEQ ID NO: 285440 - DNA, 125 bp, Homo sapiens
aaaagatcagattctgcctttttttgggaagaaagagatattatggcctttgccaatagcccctgggtggttcaggtattctctactgccgctgatggtcaaacgcaagtggaaattaaagtgtg

SEQ ID NO: 285441 - DNA, 100 bp, Homo sapiens
ccttgggactcattggaaattgtacagtgacatcttctgggatttagtctgtccgatacatacttctgcatgtctatgcgaataccagtggatgaggaag

SEQ ID NO: 285442 - DNA, 100 bp, Homo sapiens
agcagtgggggttgctgacccagaggagagttctccaaacatgatcgtttactgcaaagagaagaatttggattggtttcctcggatgcgagccatgtcc

SEQ ID NO: 285443 - DNA, 100 bp, Homo sapiens
ctcatcttaggctgtgctgtgaactgtgaacagaagcaaggatctggagtgggagagcaggatgggggactgatcggtgccgaagagaaagtgattaaca

SEQ ID NO: 285444 - DNA, 99 bp, Homo sapiens
gggagattgccagctaaccctcaataagaaatgcacgcatttgattgttccagagccaaagggggtgaccaagaatatggcccaggtgaccaaagccct

SEQ ID NO: 285445 - DNA, 74 bp, Homo sapiens
gggacccgcatcaagaaaatctccatcgaagggaacatcgttggaactgataatgggagagaagcaattgaaag

SEQ ID NO: 285446 - DNA, 89 bp, Homo sapiens
gagtctattcaattcaattcacgagcttcaacagctgcaggagcacttccctatcaggcccagaggaggcagggagtgtgagaagatac

SEQ ID NO: 285447 - DNA, 90 bp, Homo sapiens
ctaccagagaatcaagctatccaaatgcgattagttgatgtggcctgcaaggccaagaataaggagacgggtgctttggctgcggccaaa

SEQ ID NO: 285448 - DNA, 75 bp, Homo sapiens
tttgttaaggattccaagtaactcttatttgagagtattatgagggaggccgaggacttcatgctccggacagag

SEQ ID NO: 285449 - DNA, 98 bp, Homo sapiens
tcctttaagacggtctacaaaggtctggacactgaaaccaccgtggaagtcgcctggtgtgaactgcaggtattgaattgaaacacctttgtttggaa

SEQ ID NO: 285450 - DNA, 75 bp, Homo sapiens
cgcgcgcctcagaagctcccggacgcccaggcatcaagcatgatggaaccatgtgtgatacctgccgccagcaac

SEQ ID NO: 285451 - DNA, 75 bp, Homo sapiens
cctttgtctcctcagcagacgcggaagccatggacctggctcaggcaggcagcacagtggaatctaagatctacg

SEQ ID NO: 285452 - DNA, 100 bp, Homo sapiens
ttctggaaggaaaagaacacctgtgaaagaccgattttctgcagaagatgaagctttgagtaacattgccagagagatatttggagttcttacaacatgg

SEQ ID NO: 285453 - DNA, 100 bp, Homo sapiens
aaaagttcctccaggtttgccatcttcactggcccgagataacttcttccgctgtggtgtgctgtatgaggactccctgtcctcccaggtccggactcag

SEQ ID NO: 285454 - DNA, 100 bp, Homo sapiens
agaacagcacgtaccagaggtggaagtccaagtcaaacgcagaaggactgcctcactgagcaaccaagaagagcagctctaaattgggaagcaatgccgg

SEQ ID NO: 285455 - DNA, 50 bp, Homo sapiens
gcctccccacccatggagaactggagagtcccgtattctcagagtaaaag

SEQ ID NO: 285456 - DNA, 100 bp, Homo sapiens
gaccccggggtcttcaccgagctcattaaaggattcgaaaatgtgccagaggaacttcaagaaccattttacacagatcagtatgaccaggaacacatca

SEQ ID NO: 285457 - DNA, 75 bp, Homo sapiens
cttgcaggagatcgagagcaccgacaccgcctgtgtggggcccaccctccgggaattagaatcatggagatgctg

SEQ ID NO: 285458 - DNA, 83 bp, Homo sapiens
tggatttgaggatattcttaatggtgtttcccattaaacactaccaggacaaaatcaggccttacatccagctgccatcgcac

SEQ ID NO: 285459 - DNA, 112 bp, Homo sapiens
cagaagccactggagaaaaacggccaagaggcagacctaggaaatgggtgcacttcctggagcagcagaacaagctgctggagacaaagctgcagttcttccagaaccgtga

SEQ ID NO: 285460 - DNA, 98 bp, Homo sapiens
caccaacattcgctccaactccctcctgaattgcatccgcgcctgtgggcccagagccctagtggtgggcgcagagccccacagtcttcgttataacc

SEQ ID NO: 285461 - DNA, 96 bp, Homo sapiens
catggtacagccagagtaccgaatctatgagatgaacaagagactgcagtctcgcacagagcctcctgacagtgggcctccaccattgccaacatc

SEQ ID NO: 285462 - DNA, 106 bp, Homo sapiens
caacgcatcatgccagggagccaagcgtcctgcccggcctactatactggcaattgctggagaagattttgcaattgttgcttctgatactcgattgagtgaaggg

SEQ ID NO: 285463 - DNA, 99 bp, Homo sapiens
cttatccctcgtgagaaaaagatctcgatacttgaggaaccttcaaaggcacttcgtggggtcacaggtccacatcttgatacagaaaccccgacagag

SEQ ID NO: 285464 - DNA, 101 bp, Homo sapiens
cggcccccgcctgcctccgccggctacagcgggaagagcgtcaccacgttctgcgcttttccgagtcggacatatgagcagcgtggagctggatgatgaac

SEQ ID NO: 285465 - DNA, 87 bp, Homo sapiens
aaggaaaaactggagagcttcatcaaaaatagtgatagctttgataagggcgctaatcgtactgaaacagtcacgtcttttagaaaa

SEQ ID NO: 285466 - DNA, 100 bp, Homo sapiens
ggctagggcgacggctccgaggccgagtggcggtccgacagagtcctccgtgtcctcccccgcatgacccccttgatggagtcttgctctgtcccccagg

SEQ ID NO: 285467 - DNA, 100 bp, Homo sapiens
aggagcgcgagaaggatatcctgacggccatcgccgccgacctgtgcaagatgaatatttcccccgcttccctcgccagtctttatgaggaagacttcaa

SEQ ID NO: 285468 - DNA, 82 bp, Homo sapiens
cttggtttcgggatctcggtgctgcagacggcgagacctcctgcacaggaagcggggagaggtggtgagagatgacccctgt

SEQ ID NO: 285469 - DNA, 100 bp, Homo sapiens
gcgaggcctcccgggctccgggaaaactacactggccaggaagcctggagccagaggacttttggtggctgaggccttagctacctggcttacacattaa

SEQ ID NO: 285470 - DNA, 50 bp, Homo sapiens
cgcattcgccatccaggctctgcttgaggagatcaaagacgctggccttc

SEQ ID NO: 285471 - DNA, 97 bp, Homo sapiens
cttactagtttgttgcaaaataatgtaaacgtcaatgcacaaaatggatttggaaggactgcgctgcagtgctcctgcgggaagaagtgtcgcggct

SEQ ID NO: 285472 - DNA, 100 bp, Homo sapiens
aattatgggaacgtggtctcactgggtgaatcccagaccttgctggcagcagcagttgagagagaacgtgcagctacagaagaactccttgctaacaaaa

SEQ ID NO: 285473 - DNA, 90 bp, Homo sapiens
gtctgatggccgctttctcggtcggcaccgccatggtcgccgtgagtcaagctgcctccagaacctcagagcttccctggtgggctcccc

SEQ ID NO: 285474 - DNA, 97 bp, Homo sapiens
cggcattggcatttttgtcacctccaacaacatccgcgagatcgagagctctcgatgttctgaagtatgaggaagttgacatggattcattagccaa

SEQ ID NO: 285475 - DNA, 98 bp, Homo sapiens
ggccagaaggctagaagaatcagacgtgctccaggaggccagaaggaaatacgtggtggttgtccaggccatcagtgccctgtgtcagaaatatcctc

SEQ ID NO: 285476 - DNA, 100 bp, Homo sapiens
ctggtgtctaaaccgcctcgggtagtagccatggttatgtgggttccagtagtagaatatcaagaagaacacatttatgctccgctgctaccagtagttt

SEQ ID NO: 285477 - DNA, 75 bp, Homo sapiens
tctctctctcttttctttcagtctgcaactgtgtctgatggcggtgctggagaatctggtaaaagcaccattgtg

SEQ ID NO: 285478 - DNA, 83 bp, Homo sapiens
gggatcacttcatccgaaccctcagcctcaagccgctgctcttcggtgacccgttgcctgcccgccaggaaggtgtgaagaag

SEQ ID NO: 285479 - DNA, 50 bp, Homo sapiens
cttaaggcttctttgtacagtgatttctctgcctcttccaaacttttcct

SEQ ID NO: 285480 - DNA, 87 bp, Homo sapiens
tgaacagcgtcctggaaaacttcaccatcctccaggacggggaggtttactgcatcgacgcgcggttctacgggaacgtcagccggt

SEQ ID NO: 285481 - DNA, 101 bp, Homo sapiens
cagatcacagaccatggtctcaggtttggtgcacctcgatttggaggaagtagggcagggcccttatctggaaagaagtttggaaaccctggggagaaatt

SEQ ID NO: 285482 - DNA, 101 bp, Homo sapiens
gtgctgctaaaggaaggtgagtcagcctcgaacgccacagaaacatccggcccagacatgactatcaagtttaaggaagaaatctctaaacgttttaaatc

SEQ ID NO: 285483 - DNA, 74 bp, Homo sapiens
tttgcgagctgtgggaaacattgtcacaggggatgatattcagacacagattgtcagaagcttcagttctggta

SEQ ID NO: 285484 - DNA, 50 bp, Homo sapiens
tgatggcctttttaggagttcagggtgcaaatagctatgggcaacttggc

SEQ ID NO: 285485 - DNA, 87 bp, Homo sapiens
cctcctcttcattccgcagcagcactccgacagtgcacttacatttcaatcgaccaagttccaaggacctatgccataatgataagc

SEQ ID NO: 285486 - DNA, 100 bp, Homo sapiens
gaagcctcctgccacctatgacgatgggtctgataatttagaagtatgcagattctgaagactactttgaggtcaacattccaacagacctacgagcaaa

SEQ ID NO: 285487 - DNA, 83 bp, Homo sapiens
cctggatcttcgaacttttgacacggctttggaaacgacgtcatgtgttagcaacacagtcactcctggcggcaaaccaaaca

SEQ ID NO: 285488 - DNA, 80 bp, Homo sapiens
ctcgacggggctgaccgctctggcccagggtgggcaccatgccggtggaaaggatgcgcatgcgcccgtggctggaggag

SEQ ID NO: 285489 - DNA, 100 bp, Homo sapiens
gccacctagactggatgcagagcatgacatatctgaagagatggattaagaatgctttggattaaggattgtggagcacatttcaatcattttaggattg

SEQ ID NO: 285490 - DNA, 90 bp, Homo sapiens
cggcggctcagttgtccatgaccctgaaggtccaggagtacccgaccctcaaggaaacctcgacctgtctcccagttggttgcacagcag

SEQ ID NO: 285491 - DNA, 95 bp, Homo sapiens
tttccctactccaccatcatcaacaaaggtccaaaagcttctttgcatgtgtccagtggatttccatgggatcttccagttagatgaaagacgga

SEQ ID NO: 285492 - DNA, 90 bp, Homo sapiens
agaagtccttatacttcagttgttcagtcagattggaccctgtaaaagctgtaaaatgataacagaggctcagtattctcaccatgtgat

SEQ ID NO: 285493 - DNA, 83 bp, Homo sapiens
gggaaatcccaggctgccgcggctcctgtgtgctttgaagggggatatgagactttctactcggaatatcctgagtgttgcgt

SEQ ID NO: 285494 - DNA, 50 bp, Homo sapiens
cagaagactgtgatcgagcccttaaaaaaatgcagaggccaggatgtggg

SEQ ID NO: 285495 - DNA, 100 bp, Homo sapiens
ttgcggaggtgcggctgcaggccgttgttggtcgagctggcgggtcccgcgggccaggccgtggaggaatccagaaccctggctgaaattgcaaaagcag

SEQ ID NO: 285496 - DNA, 50 bp, Homo sapiens
gctgggattggctgcttttccagttggaattgatcacaccttttcagttg

SEQ ID NO: 285497 - DNA, 75 bp, Homo sapiens
tcagtggctgcagagtcgagaagccaagaatgaggagaaacctgtgcaaatgatgtttaagcaatctacttttaa

SEQ ID NO: 285498 - DNA, 50 bp, Homo sapiens
cctggctggccaagttactggagccgatgatcaaatctaaatcgctgtgg

SEQ ID NO: 285499 - DNA, 73 bp, Homo sapiens
cgacaccgatttcctctcgccgagcggcgggatcatgaattttctaaaactgaggaactaaaactagaagatg

SEQ ID NO: 285500 - DNA, 75 bp, Homo sapiens
actgcccatgctgggccggcgccctggggccccggagaggggcaagattcttgccaagagaattaatgtgcgtat

SEQ ID NO: 285501 - DNA, 76 bp, Homo sapiens
cacacggttaatttcaaagcttttcccatggaggtatccacaaattacccattatcaaaaacaaatagttcatcaa

SEQ ID NO: 285502 - DNA, 100 bp, Homo sapiens
tttgcatacaagaatgtgaaatttgttctcaagcacaaggaagtcgagataacatgagtattgtactagtttgcttttcaaatgctcccaaggtctcaga

SEQ ID NO: 285503 - DNA, 75 bp, Homo sapiens
cggggacaagaaactagagcaaataaccgttttgaaattcagaccatccgagagctgtttgatatgcccctggag

SEQ ID NO: 285504 - DNA, 100 bp, Homo sapiens
gcggtggccgctagctccaaggaagacgatcgtcaccggattgaggagaaacgtaaaaggacatatgagaccttcaagagcatcatgaagaagagtcctt

SEQ ID NO: 285505 - DNA, 134 bp, Homo sapiens
caaggcaaagtgaatgcctggacctctggccacaatgaccagtcacaatggttacaggactcacaccacccggcaagaactgctcactacggctccctgccccagaagtcacacggccggacccaagatgaaaa

SEQ ID NO: 285506 - DNA, 101 bp, Homo sapiens
aaggtgataccatctatgattactgctggtattctctgatgtcctcagcccagccagacacctcctagtggatgcccggagcataccagtgttagcaaaat

SEQ ID NO: 285507 - DNA, 100 bp, Homo sapiens
ctgaagccggcgctgctctgtggggctctggccgcgcctggcctggccgggaccatggtctattgatctgtcagaagctctcagcatgcccggtgtggtg

SEQ ID NO: 285508 - DNA, 50 bp, Homo sapiens
gagtaaggagtttgtggctgatgaactgaaccttagccggccgatcgagg

SEQ ID NO: 285509 - DNA, 100 bp, Homo sapiens
gtggaacggtgaaaagaaatctgttgcttcttgcatgggattgaaagaaggtggcaagaggaagaagcagaagcagagagaggagtcgaagaagaagaag

SEQ ID NO: 285510 - DNA, 74 bp, Homo sapiens
gattctgctggtatacagctacatccaggagagaatgctgacagtcctgcaggagttcccaaaagtcgacgagg

SEQ ID NO: 285511 - DNA, 83 bp, Homo sapiens
tgataaaacacaagaaggggattgtcaatgaggacggggacttggttgccttttccagtgacgaggaattgacaatggccatg

SEQ ID NO: 285512 - DNA, 100 bp, Homo sapiens
cctggatcgacaccctctacagcagtattgttgcagcatctggcagtgagactgaggatgaggacagcatggacattcccttggacctttcttcatccgc

SEQ ID NO: 285513 - DNA, 74 bp, Homo sapiens
atggggttgtgatggcccaggttcttcaaaagatattcatgatgttgctatcaaaagttgagaaattgtcagaa

SEQ ID NO: 285514 - DNA, 100 bp, Homo sapiens
tctccctggatgatggttggatccgttttgtagctgcttcccatcagaaaccaaggtgtatgttggtaacctgggaactggcgctggcaaaggagagtta

SEQ ID NO: 285515 - DNA, 101 bp, Homo sapiens
ctgccgaaatgttcaagtttaccaaaagagaggcaccgctggaacactaatgagacacgatgaggcgagtggtacgacagagcaagtttcggcatgtattt

SEQ ID NO: 285516 - DNA, 80 bp, Homo sapiens
tgaaaaacgtatcgaagaccttcgtgtaagaatggatcttggagaatgtctgaaagtccatgacctggctttaagagcgg

SEQ ID NO: 285517 - DNA, 100 bp, Homo sapiens
cggacccggcgccgaggcggccacccgagacgcggcgcgcacgctccggcctgcgggacttaagtcacaacagattatctttcatcaaggcaagttccat

SEQ ID NO: 285518 - DNA, 100 bp, Homo sapiens
gccatcctccccggcacatgactcagaaggaacaagaagagaaactgtatatgatgctgccagtgtttaacaggcatggactggaggaaacagctgccaa

SEQ ID NO: 285519 - DNA, 106 bp, Homo sapiens
cacgccgcggcggggtgggtgcaagatgccgctgccggttcaggtgtttaacttgcaggttcgtgctggccgtgggcagcgccgtctttgatgccatgttcaacgg

SEQ ID NO: 285520 - DNA, 90 bp, Homo sapiens
gaagactgtctgccgagttctcacgtgcccatcagtgacagcaagtccattcagaaagctcctccaagttccccctgatgacgctgcagc

SEQ ID NO: 285521 - DNA, 73 bp, Homo sapiens
acgtggtactcagcaagctcgagttaaagttggatgtgctggaacagaatagctgcaatctccatggcctcta

SEQ ID NO: 285522 - DNA, 75 bp, Homo sapiens
tatgaagcggttggcaccactgaagtgaccgaatgaggggccagacacctgctgagtcggatttccaggtgctcg

SEQ ID NO: 285523 - DNA, 100 bp, Homo sapiens
gggggtgctgcagaggacacgaggcggcgggctggagacatggaccgcggcgagcaagggatgttctgttcttgaaggactgtgtaggcccagaagtgga

SEQ ID NO: 285524 - DNA, 75 bp, Homo sapiens
cttcatgaaaccattaaagttttagaagatcgccacccacacagaatatgcctatgggtcctggagggatgaatc

SEQ ID NO: 285525 - DNA, 75 bp, Homo sapiens
tcagtgagcaaggcatcaacgagtttctcagtgagaaagatcagtctaaagaaaaggagaagaaagtgaaaaaaa

SEQ ID NO: 285526 - DNA, 101 bp, Homo sapiens
cggaggctcaaccagctgctcctgcccctgctgcaggttgaaatcacaaagattagacacctttttagataggtgttcttcagcaccactgacaacacggt

SEQ ID NO: 285527 - DNA, 100 bp, Homo sapiens
ggggatatgacaaggatggaagaggtcctatgacaggatcaagcaaggtggcggtgcaggccgtgcaggccatgaaccgcatctgtgtgctggacgtgga

SEQ ID NO: 285528 - DNA, 90 bp, Homo sapiens
aacttccagaacatctgggagaatatttaatggaaaatcgcttggttaaaacctgacacttttaacaggcaggcagtggttaaaggttcc

SEQ ID NO: 285529 - DNA, 50 bp, Homo sapiens
accgccctggccatctaccatgtgggtgctttcttctgcgacctggtact

SEQ ID NO: 285530 - DNA, 74 bp, Homo sapiens
tatcatctgcctaggaggttggaagttactcaagcggctcaaggaaaaggaggattccctgggagcacccacca

SEQ ID NO: 285531 - DNA, 82 bp, Homo sapiens
caaaagctcaacagcaacacccagggaatctggaaacccaggaaaataccaaatccagatttctttgaagatctggaacctt

SEQ ID NO: 285532 - DNA, 96 bp, Homo sapiens
ggcggccaccgcgactccggctctgcgctcggctgcctgacttcttcctgctgctgcttttcaggggatgaagtaggtgttccaggtagcaattca

SEQ ID NO: 285533 - DNA, 100 bp, Homo sapiens
ccgccaggaaggactcaccgaggcgcaggggctggaggtggtgctggggcgcctggcattggaagcggagaaagttcaagcagctcaccagtggagagaa

SEQ ID NO: 285534 - DNA, 94 bp, Homo sapiens
acggggccaccggctggagcggatcccacacctccggaccgagggacgcggtctctcatcacttttgtgaacaagcacctgaacaagctgaatt

SEQ ID NO: 285535 - DNA, 98 bp, Homo sapiens
gcgccgcgccgagccacccgcccgcccaaggtctctcgcgggcgggagaacggaaaactcccaacttcctggtctgctgagaacagacccagtccctg

SEQ ID NO: 285536 - DNA, 100 bp, Homo sapiens
tgggatgatacaccttttccacagggaattgagttgcttattcagctgattctgaatcatcttacactaccagacctgtgtagattagcacagacttgca

SEQ ID NO: 285537 - DNA, 83 bp, Homo sapiens
ctaaatgcagattccagaaaaattacagcacatctcagtgaatttgcaagtgggagtttgagcctttgctgaagccacacgtg

SEQ ID NO: 285538 - DNA, 90 bp, Homo sapiens
aaaggaatgaccctagccagactcagggatcaaagagcaaacagattcagtggcctgcattggttccagcaacagatagaaatgctttaa

SEQ ID NO: 285539 - DNA, 100 bp, Homo sapiens
tgccaaagaattgagctgaagcagggctacacatttttcatcccttccggtgaaatgacaatggatgctctgttggctcgattgaaacttctgaatccag

SEQ ID NO: 285540 - DNA, 50 bp, Homo sapiens
ctatgaccctggaattactgcagatacaaaagttttgcagtactatttca

SEQ ID NO: 285541 - DNA, 100 bp, Homo sapiens
tctgaatcttgccgccctgcactgccgcttcggtcactaaaaaggtggacaagtcctattttcaagagaagatgacttttaacagttttgaaggatctaa

SEQ ID NO: 285542 - DNA, 83 bp, Homo sapiens
cggcccgcgggtctacttcctcaaaggcggcgctggcggcggccctgggacccgcggaagccggcatgctggagaagctggag

SEQ ID NO: 285543 - DNA, 82 bp, Homo sapiens
ggggatttggaaatgtcatccgatggcacaatcagttggaatcgaagcctcttaaaatggcagatgacttggacttcgagac

SEQ ID NO: 285544 - DNA, 50 bp, Homo sapiens
gcgcttctggccgcgggaaggagaggaagatgaagtcctcagtacattct

SEQ ID NO: 285545 - DNA, 100 bp, Homo sapiens
cagtgatgacacaaaatcccagatctacctgacgggcctgcgagggttgaagattgtgaagcaatagcctaagaattcctagaggacctgtgcaacaacc

SEQ ID NO: 285546 - DNA, 83 bp, Homo sapiens
agtacctgcgctatgaagacacgcttcttctggaagaccagccaacaggagttattcctgatgaagctaaagctttgtctctg

SEQ ID NO: 285547 - DNA, 50 bp, Homo sapiens
tgcgcctcattgactccatgacaaaacaaacaatgcagatcttcgtgaag

SEQ ID NO: 285548 - DNA, 75 bp, Homo sapiens
agaggatctggtgtaccaggcgaagctggccgagcaggctgagcgatacgacgatgatatcatcaagttgaatcg

SEQ ID NO: 285549 - DNA, 98 bp, Homo sapiens
cgaccgcaacctccgtgaggacggcgagaaggcggcgcgcgaggtcaagctgctgctgctcgatatgtgtcacaaagatgtctacacggaactgccag

SEQ ID NO: 285550 - DNA, 75 bp, Homo sapiens
gcaccgtgcggctgctggacgacagcgagtacacctgcaccatccaggccgggatagaaaatcgtcagctggaca

SEQ ID NO: 285551 - DNA, 82 bp, Homo sapiens
atgaactggttgtgcaggaaccaggatccgaacccgcctccccagggcgtctctggccgagcctctttttgtggaaaacgac

SEQ ID NO: 285552 - DNA, 74 bp, Homo sapiens
cggctggttccccagcaactacgtgcgcgaggtcaaggccagcgagtttattaaccacttaacctctcagaact

SEQ ID NO: 285553 - DNA, 75 bp, Homo sapiens
ggccggggcttaccatgtaggggaggggagatctatccacatacctcagggcagctggtggaatttttgaagaaa

SEQ ID NO: 285554 - DNA, 77 bp, Homo sapiens
cagcactggactcatggaggctgagcatttattcagaggaaagaaattcctaagggaacactgctcagaaagtactg

SEQ ID NO: 285555 - DNA, 75 bp, Homo sapiens
tcgcaaccaccgccctggccatctaccatgtggtctcgctctcgaagcagacattcccgtaagagcagaagccga

SEQ ID NO: 285556 - DNA, 101 bp, Homo sapiens
agcagacgcacaacaatgccgtggttaagatgctgccctccttcgtccggagaactcccgacgggaccggtggttcagaatctggggagccttatattcca

SEQ ID NO: 285557 - DNA, 83 bp, Homo sapiens
taaaatagggcaatttagtgggaagagatacttaatttgaagacctgcctagagctggaacgttacctccagagcgagccctg

SEQ ID NO: 285558 - DNA, 82 bp, Homo sapiens
caggacagtagcacacagactgacacatctcacagtggggaatatcacaggagtgatgctgtgttcttcactgcatgatttc

SEQ ID NO: 285559 - DNA, 80 bp, Homo sapiens
agaagattctggacaagtgtaatgaaattatcaactggcttgataagaatcagggtcttgctctgtctcccaggctggag

SEQ ID NO: 285560 - DNA, 75 bp, Homo sapiens
agtgcagctgcctcagttcttagcgcagattctgaaaagaaatcatctctcctgtcagaggaacaacaagaaaca

SEQ ID NO: 285561 - DNA, 100 bp, Homo sapiens
atttttcacattgtggcttttgaatgtatgtttacaaacaaaaccttcactcttgagaaggggctgatagacttccttgtgaaacctcctagtagaaaaa

SEQ ID NO: 285562 - DNA, 100 bp, Homo sapiens
gtggggagacagcgccgggagaggccggcagccccgggacacccccgcaagcgagcaggtctctctgaagaggctatcatggagctgaacctgccgactg

SEQ ID NO: 285563 - DNA, 95 bp, Homo sapiens
gttcagcgacggcggcagcggccggagccgggccgggcagctagcagggcgcttcgggtgacttaagagattaaaattaatttggttgctgttgg

SEQ ID NO: 285564 - DNA, 114 bp, Homo sapiens
atgctaccaccctggatgacaatggaaccatgctgttttttaaagattccttctggaaccccaacgccttcgagacggattccgacctgccggctggatggatgagggtccagg

SEQ ID NO: 285565 - DNA, 101 bp, Homo sapiens
agattcagacaagaaaggcaaggaaacatcttttgacaagatgtcacctgaaagtggtcacagccgcatctttgaaggtaatagcctgcagctggtgtttt

SEQ ID NO: 285566 - DNA, 95 bp, Homo sapiens
tcgtcatcctgctgctgaagatctggaagacgcgctcctgcgccgacctcctgccccccgaggtctgcagtctcctgaacccagcagccatctac

SEQ ID NO: 285567 - DNA, 106 bp, Homo sapiens
gacggattggttgttttttcctgtatgaagcggttggcaccactgaagtgaccgaatgagttggttgaatctggcgatgtggaacccatggatatggagggctgac

SEQ ID NO: 285568 - DNA, 74 bp, Homo sapiens
ggaacctgggcgtattgggcatcacagcccctgacacacaaactcgggccacttctaagagtctcttacctgtt

SEQ ID NO: 285569 - DNA, 100 bp, Homo sapiens
cggctgcatgggcaacggtaacaacttcgtcacagaaaaggagtgtctgcagacctgccgaactgtgggagctttggttcggagacaggcaaaggagcca

SEQ ID NO: 285570 - DNA, 82 bp, Homo sapiens
cctgaaatctggagtgaagaacgccgccatccagccaccattccaaggtgtgatccctcacatccacaaatctctgattgga

SEQ ID NO: 285571 - DNA, 82 bp, Homo sapiens
gagattcaagattatttgcaacagctcacgggagcaagaacgttgaagcttcttgtcatgacggggatgaaacaattgaaac

SEQ ID NO: 285572 - DNA, 80 bp, Homo sapiens
gtacctgaagttgttgtatccaggtgcatgttacagggcagctcagttctggcaccaaaccaaatccccaggtctactcg

SEQ ID NO: 285573 - DNA, 90 bp, Homo sapiens
ggaagtaatggaaggacccctcaacctggtagatcttttgcgagcaggagaagttcctaaaccttttccaacacattataaagatttgtg

SEQ ID NO: 285574 - DNA, 74 bp, Homo sapiens
cgccttaccaagtggctgctgaaattagagaaacttgcccaggccaaagaagagaacgtgggcttacatcagac

SEQ ID NO: 285575 - DNA, 82 bp, Homo sapiens
cttcggcagtccacccaccgccgccgcctcccagaaatactacccgccggactttgacccatcaaagatccccaaactcaag

SEQ ID NO: 285576 - DNA, 134 bp, Homo sapiens
gaagagttcaactttcccagaagttgttctaacgctgcctttgctttaaaacagtattacttgcggacccagatgatgtggtaccagttggccaaagaagagcctggtgttggtgcatgtgctttggactagca

SEQ ID NO: 285577 - DNA, 82 bp, Homo sapiens
gagtatctggtgaaatggagaggctggtcgcccaagccacctcaccgatcagcacctggccgagttcctgcggcgctgcaag

SEQ ID NO: 285578 - DNA, 90 bp, Homo sapiens
gccgtccgacctggatctccaagacgtagaggaagtggagatcggcagagacaccttctggcccggtactactgagcgagtgtgcttgat

SEQ ID NO: 285579 - DNA, 100 bp, Homo sapiens
gttaaccggaagagtacagacagcccggtagagtgtatgggccaggagaaaggggaattcagagatagagtcttgctctgtgacccaggcttgtgtgcag

SEQ ID NO: 285580 - DNA, 74 bp, Homo sapiens
gaggagttgctggccaaaggggcctgtgtacttgctgtagatgaaaatggttatgatgtgattgctcaagccca

SEQ ID NO: 285581 - DNA, 83 bp, Homo sapiens
tccttcagtgagcaaggcatcaacgagtttctcagcactttatgaaaatgcatgctgagaagaagcacaaatgtagtaagtgc

SEQ ID NO: 285582 - DNA, 75 bp, Homo sapiens
gtgggcctgtggactgcagcctcggcggtcagcagtgttgtcatgactggatcttacaataatttcttcagaatg

SEQ ID NO: 285583 - DNA, 100 bp, Homo sapiens
gtttataaacctggacggtatctctctcctcacgcagatggtggagagcggcactgactttgacaattattctgccaatgttatggtagatggaaaaccg

SEQ ID NO: 285584 - DNA, 100 bp, Homo sapiens
aaagcctttgctatgatcattgacaaactggaagagggagtggacatccgccataacaaggaccgaaaggttcggcgcaaggagcccaagagccaggata

SEQ ID NO: 285585 - DNA, 95 bp, Homo sapiens
cccggaccaggggcgagggctacccgctctttgccgtgacaacaccgttcccccagccgggctgggcgccctgcgtccggcagaggaggcgagca

SEQ ID NO: 285586 - DNA, 100 bp, Homo sapiens
caaaaggcttttaaagccatatacagcgatgtgcattttgtaagcactttggagccactatcaaatgctgtgaagagaaatgtacccagatgtatcatta

SEQ ID NO: 285587 - DNA, 74 bp, Homo sapiens
gacagatgatcaaaattcgtttgcagaacctccaagatgcagctaaggccatttgtgtaggaccagaaaacatg

SEQ ID NO: 285588 - DNA, 51 bp, Homo sapiens
gattcgcagtggtcgcttcttctccttgcctcctgttcaggtatacggtat

SEQ ID NO: 285589 - DNA, 50 bp, Homo sapiens
aagatcggagccaaatccaagaaaggctgaccggttccctgatgtgttac

SEQ ID NO: 285590 - DNA, 75 bp, Homo sapiens
cggacgaccccagcgtgttcagcctccctgactccaaggaaatcatcgagttccccatcctaaagctaaatggcc

SEQ ID NO: 285591 - DNA, 75 bp, Homo sapiens
tgcgcatgggctgtcgctgcattgaacgatttgcatgggcaactgatttgtctacagacttagaaagtcaactct

SEQ ID NO: 285592 - DNA, 90 bp, Homo sapiens
tgcttgggacatgcaggacttgtatatgagtatacattggaagaatcctgtaagtacaatcccaagtattctgttgctaatgacaccggc

SEQ ID NO: 285593 - DNA, 101 bp, Homo sapiens
catcaggacagctgttccttggccatcccaaagctattctgggggcaacagagtgtaaaattctggaacaacgattagaacaaggaatggtattcacagaa

SEQ ID NO: 285594 - DNA, 75 bp, Homo sapiens
cagtacctgctgtgcctggggatgcccccggccctgtgcattgccatccatttcaaggccaatactcagtatcag

SEQ ID NO: 285595 - DNA, 100 bp, Homo sapiens
ttccatgatgggaagtgacatggtagatttagacgttactttacctggggaaggtggaaaagatcgacctttcaaggtgtcaatcaaatttgtctctcgg

SEQ ID NO: 285596 - DNA, 82 bp, Homo sapiens
gcccttcgcctgcacctggccaggctgcggctggaggtcctcagccctcgctctcgctggcggagcagcacctggagtcgcc

SEQ ID NO: 285597 - DNA, 82 bp, Homo sapiens
agtggattatcgagcaaaactttgggcttgcaacttttgttaccaaaggaatcagatctcaggaaacaggctcgacagctgg

SEQ ID NO: 285598 - DNA, 97 bp, Homo sapiens
ggaaaggctcaaccaagagaaaaaggtctctgtttatttagaagacacagactaacaattttagatggtgctgttggcagcagcggtctgcacaaaa

SEQ ID NO: 285599 - DNA, 82 bp, Homo sapiens
cgagacttaccagagccacaagcttccccgggcgctgcctggacaggcctgcctgcgtgctgggacatgtctggcctccaag

SEQ ID NO: 285600 - DNA, 86 bp, Homo sapiens
gaaactgttggaactgctttacaaagtattttaggaagaggaagaacgtctgagaaataaaattcgagctgatcatgagaaggcct

SEQ ID NO: 285601 - DNA, 75 bp, Homo sapiens
ttctgatcactactgacttgttgtacctgatggagggcagctacaacaaagtgttcctggccaagggtaacatcc

SEQ ID NO: 285602 - DNA, 82 bp, Homo sapiens
gcgctttggatgccgagagcgagtatctggttgtgaccgagattcccgacgagagagactgaggggaagagaggaaggaggg

SEQ ID NO: 285603 - DNA, 100 bp, Homo sapiens
gggcagcaggatggtggtggatgcggccaactccaatgggcctttccagcccgtggtccttctccatattcgagggcagtaaacggctttgaccccgctc

SEQ ID NO: 285604 - DNA, 50 bp, Homo sapiens
cgttgattcgttccgtgctgctgcagctggagaagaagcaggcgctccct

SEQ ID NO: 285605 - DNA, 75 bp, Homo sapiens
ctcagaaagatggcgtcctcggagcaggcagagcagccgagccaggctgtcagccagatgaaacagcaaaaatat

SEQ ID NO: 285606 - DNA, 75 bp, Homo sapiens
tacgacgtccctcaaaccttgcttctaggagataaaaagcatgcccccggagtccccaagatcctggtggggaac

SEQ ID NO: 285607 - DNA, 51 bp, Homo sapiens
agtattttacgcattttattgtaataacgattatacttactcagctgttaa

SEQ ID NO: 285608 - DNA, 71 bp, Homo sapiens
gaagcctcagctgtgattggctaccttctcccatcaccccagccaaagacagcagcattcccaagcgcaag

SEQ ID NO: 285609 - DNA, 100 bp, Homo sapiens
taccaggaaatcatccactacttcgacaaaggcaaggagagtcgcggttgctgatcgtggtgcttgagtagagccgtggttggtgacagcatgacgagcg

SEQ ID NO: 285610 - DNA, 83 bp, Homo sapiens
ctcccgggctccgggaaaactacactggccagtcctattttgtaacggattatgatccaaccattgaagattcttacacaaag

SEQ ID NO: 285611 - DNA, 50 bp, Homo sapiens
agcctcccgagtagctggaactacaggagtacttcttgcaagcagagctg

SEQ ID NO: 285612 - DNA, 115 bp, Homo sapiens
cagatgacaaaacttcaagccaaacatcaagcagaatgtgatttgcttgaagatatgagaggatgtactgagtaaagatgctggggaatgtgcaatatgccttgaagaattgcag

SEQ ID NO: 285613 - DNA, 88 bp, Homo sapiens
tgagggtgtaacttacaaaaaggagaccatctagctggctgcccccgacagtgagtgtgttggctcttgtgaagcggggggcacctcc

SEQ ID NO: 285614 - DNA, 83 bp, Homo sapiens
cttggactgagtcctgcaggacacaggggaatcacttgcaaggtccacacaagtccgcctatgtactctctggatcgaatatt

SEQ ID NO: 285615 - DNA, 100 bp, Homo sapiens
tctggacatttactggctcatgatttccagatgcagtttcgaaaatggccgccatggcatcagatgaaggcaaactttttgttggagggctgagttttga

SEQ ID NO: 285616 - DNA, 75 bp, Homo sapiens
cgaagaggctggactcggattcgttgcctgagatgtgaagttcatttccaatccgccctccatggtggcagcggg

SEQ ID NO: 285617 - DNA, 97 bp, Homo sapiens
ctggggaccagcctcttaatcggatgtatcttgtattcatgctcactaccctgggaaatcttacaccttcaagcactgtgtttttctgctgtgatat

SEQ ID NO: 285618 - DNA, 98 bp, Homo sapiens
ctttctggagggatgcagagcctttccttaggacaaacaagcttttagtaaaacatggaggagacttgtttgctgagaatgaaaataaagatactcct

SEQ ID NO: 285619 - DNA, 80 bp, Homo sapiens
aagagcgaggagaagcgagaaaagatgaaacggaccctggctgcccctgatggggcctggcaatgactgagcaggcccag

SEQ ID NO: 285620 - DNA, 87 bp, Homo sapiens
attcatcaggctttaaaagaagatattcttgagtttattaagcaagcacaggcacaaagccttctagacaagctcagtggaatctga

SEQ ID NO: 285621 - DNA, 75 bp, Homo sapiens
cggcacccagacaggtggcgacggcagaggagtcctctcagggtgcgccatcattgtccgaggtcagcctcgtgg

SEQ ID NO: 285622 - DNA, 75 bp, Homo sapiens
catcttcaaagcctttgctatgatcattgacaaactggaagaggtacagttgtcagaaagtaagcgggagctgac

SEQ ID NO: 285623 - DNA, 83 bp, Homo sapiens
cggcgacgccaggagaccccaagctgcatcgccgagtgggtcgcaatggaagaagagatcgccgcgctggtcattgacaatgg

SEQ ID NO: 285624 - DNA, 75 bp, Homo sapiens
acgagcgaagtacagcttatggatggcttcttccagaccagctggtcttgcttctggagcatctcttggagcaga

SEQ ID NO: 285625 - DNA, 100 bp, Homo sapiens
attgtcatgattgtttatcctaatcccaatgctgaagtaagattgtcttggaaatactaagttggggatccaggtccggcacgatcaagacccaggctac

SEQ ID NO: 285626 - DNA, 100 bp, Homo sapiens
aaggtaaccacatccctctttaaaaattccgccgaaaaagagaagacgctttacccgactctttgggccgttatctcacagatcgagatggtgatcatgg

SEQ ID NO: 285627 - DNA, 75 bp, Homo sapiens
ggaggcagaagcatgctaagaacaacagtcaggccaagccttctgcctgtgatgactggcacagcctccaggttg

SEQ ID NO: 285628 - DNA, 100 bp, Homo sapiens
cccatgtaaaggagaattgcctgcactatgcccgcaaggtgggctacaggtcctggaatgccagacaaccacggctcctaccatgtcggccagcagcagc

SEQ ID NO: 285629 - DNA, 75 bp, Homo sapiens
ccgacttattcgagagcagcatccaaccaaaatcccgtttggatttaggtggcgagtagaaaaagaagtaatttc

SEQ ID NO: 285630 - DNA, 51 bp, Homo sapiens
gaagtgcagaggtttttttctggaaagtgggaggtagaggaaatgaaggag

SEQ ID NO: 285631 - DNA, 115 bp, Homo sapiens
caaccggctggacctgttcgagatcagccagccgaccgaggagctgtgactgatgagaattaaaggccatggatgaagatgggcttgaattacaacaagagccaaactcattttt

SEQ ID NO: 285632 - DNA, 75 bp, Homo sapiens
ttaattttagggtcctttatatagaagggagagagattcctgtcaacgtccgattctgcctcgaaggcatggagg

SEQ ID NO: 285633 - DNA, 100 bp, Homo sapiens
aaaaagtcaccttgtctttccctagtactctgcaaacaggcttgaagatgcagtggacgccagagcatgcccagtggccagaacagcactttgacatcac

SEQ ID NO: 285634 - DNA, 90 bp, Homo sapiens
aaaggcaaagaaaatgatatggaaatggaaattaaatgggttccagatggtgagaacaagaccaagattggaaagccagcttcagaggag

SEQ ID NO: 285635 - DNA, 75 bp, Homo sapiens
ttaatacagcaagaaagaccatcaagtttaccagcgccaagcccatctttgtgtgcttgcatccaactgtgatga

SEQ ID NO: 285636 - DNA, 100 bp, Homo sapiens
gggagcttgccttgaaggacaagaacagcgccgtcaccagcaggagttgataccaagttgaaattcactcttgagccatctttaggtcaaaatggttttc

SEQ ID NO: 285637 - DNA, 98 bp, Homo sapiens
gcgaatatttggcttgttgatgggtacccttcaaaaatttaaacaagaatccactgttgctactgaaaggacccagattgatcactatgttggcatcg

SEQ ID NO: 285638 - DNA, 75 bp, Homo sapiens
ctccttaggattcgaagaccagttcattcttagtgtcttctgaaataaaattagttcaaaagaatgctgaaccgg

SEQ ID NO: 285639 - DNA, 100 bp, Homo sapiens
tcatgtactctcatctaattagctatttcccagaatacacaggaccgaggctgcgaacgtggagaagatcaccacgaagttgctgaaggcaggcgccaag

SEQ ID NO: 285640 - DNA, 75 bp, Homo sapiens
gccagatctgccagtgagcctcaggctttaggaactgaagaggcacttctgtctcctgctgccatgtgaagaaga

SEQ ID NO: 285641 - DNA, 125 bp, Homo sapiens
aaagaaagaaaacgagcgcgagagggggaaaagcgagcgatcgagcgagcgcgcgcgcgaaaactccgggcaggttcgagaacttgtcttggacaattgcaaatcaaatgatggaaaaattgagg

SEQ ID NO: 285642 - DNA, 101 bp, Homo sapiens
tttcacctctggttcctacatctggattgtagccataagtggacttgaagatgagaatgtgcctactgctcctgatcctccaagtcaacatttacgtgggc

SEQ ID NO: 285643 - DNA, 101 bp, Homo sapiens
ggttttatgacaagaatgactgtcaccgcatagcaaaactcatggctgaatgctgttcatgcaatattagcatacagtcaaagtgcagaagaacttctgag

SEQ ID NO: 285644 - DNA, 51 bp, Homo sapiens
cgaacgggttgcttcccccgctgcgagccgtggggtggggctggtgaatgc

SEQ ID NO: 285645 - DNA, 80 bp, Homo sapiens
acaatggcatttacagaaagagtcaacagcagtggcaacagactgtcccaggtgccctccggctctttgtaaatggagag

SEQ ID NO: 285646 - DNA, 82 bp, Homo sapiens
tttagaccagctagagaccatacagacctaccggtctgtcagtgagatggcttctaacaagaacatccatgatagcagtctt

SEQ ID NO: 285647 - DNA, 101 bp, Homo sapiens
tctgtgtcgccgccgcccgcggcgtccccggtttggtgttgcggcgcccaccttcgggaggatcaggtcagtaacagatccaagagatggaaagagagtag

SEQ ID NO: 285648 - DNA, 50 bp, Homo sapiens
cgcaaagcttgcgaggtggcgttaggtcatgtttactggtgaaaatattc

SEQ ID NO: 285649 - DNA, 87 bp, Homo sapiens
acgcccccgcaggcgcccgcggcagcgaacgagagcgcgccagccttggaaggaatccacggcattccagtgtgtcctcaagtggct

SEQ ID NO: 285650 - DNA, 100 bp, Homo sapiens
ttcgtgcgcgtctggtggcggcggcgtgatgttctcggcaggagcggagagtttgctccaccaggccagggaggtatatcatacaaagagaatgcaacat

SEQ ID NO: 285651 - DNA, 80 bp, Homo sapiens
ctctggttccgagatgggaaaaagggatggggaaagacaccatagtcataaaagaagaaagcaaaaaatataaatgaagt

SEQ ID NO: 285652 - DNA, 102 bp, Homo sapiens
tgatgaaggaaaatacacattttacgcgggagaaaatatgacatctggaaaacttactgtggcagaaacagccagaaaggccctttcagaaatgtctgttgc

SEQ ID NO: 285653 - DNA, 73 bp, Homo sapiens
accgtgaccgagagcgtgaccgagagcgcgaatatcgtcatcgttagaagaaatggaatctatttggaatttg

SEQ ID NO: 285654 - DNA, 82 bp, Homo sapiens
ttctggcaaacagtgtttgcctctggttcagctcatacaacagcttcttaggtctgagaaagaaccccagtttaagtttatc

SEQ ID NO: 285655 - DNA, 100 bp, Homo sapiens
ccaggacatggccaacaaaattggtgaacacatggaagaacatggcatcaagtttataagacagttcgtaccaattaaaacggaatcagcaggaattcag

SEQ ID NO: 285656 - DNA, 90 bp, Homo sapiens
cacctcagcactatcccaagactgctggcaacagaatagcctaacatggcagaccagagacagcgctcactgtctacctctggggagtca

SEQ ID NO: 285657 - DNA, 50 bp, Homo sapiens
aaggattccaagtaactcttatttgtcaggaagcatctaaatatggtgtc

SEQ ID NO: 285658 - DNA, 75 bp, Homo sapiens
tggtcttcagcacagagcgctacaacccagagctctcaaaggtctatggccctgtgttcactctgtattttggcc

SEQ ID NO: 285659 - DNA, 82 bp, Homo sapiens
gacacggtctacaccgacttcgacgtgtcaacagcatctccaccctggagcctgtgagccggtgccagcgcctgagtgagct

SEQ ID NO: 285660 - DNA, 75 bp, Homo sapiens
atgtatctaagaccctggagaggcagatgcagcctcaggaccagctgattcatgatgttgctatcaaaagttgag

SEQ ID NO: 285661 - DNA, 74 bp, Homo sapiens
ccgtgaccgagagcgtgaccgagagcgcgaatatcgtcatcgttagaagattcgggaactggagcctctcctct

SEQ ID NO: 285662 - DNA, 101 bp, Homo sapiens
gaaggaaaacatgacgtctccagccaaattcaaaaaggataaggagatcatagcagagtacgatactcaggtcaaaggctggctactactgcaggtctcca

SEQ ID NO: 285663 - DNA, 51 bp, Homo sapiens
cgattctcctgtttcagcctcccaggcaacgtgttggaccttccggagctt

SEQ ID NO: 285664 - DNA, 88 bp, Homo sapiens
ctcctgacactgtgccaaaggctcctaaacatttaaaagcaggtatggagagaaggggaaagccatccggatcgagaaggtcatctac

SEQ ID NO: 285665 - DNA, 101 bp, Homo sapiens
ctcgcacttgctcaacaagggcctgccgcttggtacatgtcccagagcaagcacacggaggcccgggagctcatgtactcgggagccctgctcttcttcag

SEQ ID NO: 285666 - DNA, 100 bp, Homo sapiens
cacaaaggacatttctgcacccaaaccaggacctctaaaaaaggcacctgctgctaagagaagctcatagccaaactgaaaagcggaggagagataaaat

SEQ ID NO: 285667 - DNA, 83 bp, Homo sapiens
caagaagcgggccgcatgcctgtgtttccgcagcgagagcgaggaggagggggatatgagactttctactcggaatatcctga

SEQ ID NO: 285668 - DNA, 80 bp, Homo sapiens
tttacagttgacagtcctgttcagcagtgaaactggaacgccaagctgaagaagaacgaatacggaagcacaaagcagct

SEQ ID NO: 285669 - DNA, 83 bp, Homo sapiens
ggctttcctgctggtggcaaccgcctacgagacactcaagataacgaaggaggcccaacttcattcaataaggagcctgacgg

SEQ ID NO: 285670 - DNA, 97 bp, Homo sapiens
accactgggcaaagaaagtatccctttgaaagagagcttgaggcaaacaaaaaagaaaaaatgaaagaagcacaacttgaagctgaagtgaaattgt

SEQ ID NO: 285671 - DNA, 52 bp, Homo sapiens
gcctactctgtgaccggggccaagcaggtcctggagctggactccatccgca

SEQ ID NO: 285672 - DNA, 100 bp, Homo sapiens
ggccatggccatgggcagaggcgaagggctggtgggcgatgggcccgtggacatgcgcacctcacacaggtaaccagttaggggccttggtacatcaaag

SEQ ID NO: 285673 - DNA, 82 bp, Homo sapiens
ggccgcactccggagactcgcggttgctacgcgcaccatggctggaggtcgcaatggaagaagagatcgccgcgctggtcat

SEQ ID NO: 285674 - DNA, 100 bp, Homo sapiens
ctcgagttctggcagctttacaggagcgacttgacaatgtccctcacaccccttccagctacatcgaaacaagctatggagatattttgcatagaatgaa

SEQ ID NO: 285675 - DNA, 98 bp, Homo sapiens
atttatagctgcaatgtggggtatcttcatgtttaaggaaataaaggtgtggcctgaagtcactgatcctgagaagttcgtgtatgaagatgtggcta

SEQ ID NO: 285676 - DNA, 75 bp, Homo sapiens
atggagaacatgcaacagtacgttttgctggtgttgtccctcccgtggcaggaggctgtctgcgttagtttggga

SEQ ID NO: 285677 - DNA, 76 bp, Homo sapiens
acgagctggctttaatcctgaaagccatgcagcggcatcaagatggtgctcatgtggaccagtggtgacgccttca

SEQ ID NO: 285678 - DNA, 74 bp, Homo sapiens
tttgatgtctgacaacgtggatcgttgttttgaaacgttggactccatgaaagaattgcacaaaacaaatcgac

SEQ ID NO: 285679 - DNA, 90 bp, Homo sapiens
cggggtgtcagtgtggaggagactgagggacaagaatccttcaagaaacaggaaaaaactcctaaaacaccaaaaggacctagttctgta

SEQ ID NO: 285680 - DNA, 100 bp, Homo sapiens
cgcagcctccggaggaggaggcggaggccgagtattctgaagtctcaggaaactggaccatttaaatgtgcatggcccatgagaaaggcttataagaagc

SEQ ID NO: 285681 - DNA, 83 bp, Homo sapiens
ggaactcaatcaaaccagtattcttttcacacagatgaggaaactgagacccagaaaggtggaagcacttgtctaaggtcacg

SEQ ID NO: 285682 - DNA, 50 bp, Homo sapiens
aacaccacaataatccacagccaagcaagagtgagccatggagctacgtg

SEQ ID NO: 285683 - DNA, 50 bp, Homo sapiens
ctacaggcgtgtgtcactgcgcccagaatgtcatacccaggctatccccc

SEQ ID NO: 285684 - DNA, 96 bp, Homo sapiens
tagaagaaacaattcttcgacatactctccagcttcaagatcgtgtgggtggacgagttgccacatttcgcaaaggaaactatgtagctgatcttg

SEQ ID NO: 285685 - DNA, 134 bp, Homo sapiens
cacattgctccaagccagatatggtacaggactgtcaacgaaacctggcacggctcttgcttccgacccgaccgcatgtctgtcatggacctcgccaatacttgctccagctttcagtcggacctggatttctg

SEQ ID NO: 285686 - DNA, 98 bp, Homo sapiens
cagaagaagctgaggatgaagaagatgtaaaaggcaatcgcaaatgtgagttgaactgccaggcaatgggctaccgcttctatgtacggcaagctgag

SEQ ID NO: 285687 - DNA, 82 bp, Homo sapiens
ggccatagcagggaataatttcaatttgaaaacaagtggaatagtgctgtcttccttgcctcagccaaacagcaaatacaag

SEQ ID NO: 285688 - DNA, 96 bp, Homo sapiens
aacctagctgatgataggggggttccatctcccaacttgtccatgagtgctcccaccccagcccgttgctgcccagctattggaacactgtataac

SEQ ID NO: 285689 - DNA, 98 bp, Homo sapiens
aaagcctcggcgctcacctaagccgcagggagatacacccaactgggaggggtatactctagttgaatatgaaacatacaaggaagcccaggctgcta

SEQ ID NO: 285690 - DNA, 100 bp, Homo sapiens
cgggcagcaggatggtggtggatgcggccaactccaatgggcctttccagcccgtggtccttctccatattcgagggctcattgtcatccccaagccagg

SEQ ID NO: 285691 - DNA, 82 bp, Homo sapiens
gtgatccagcaaggtcggcagagcaaggggcttacgcagaaggacctggccacggttgttgatcattatgaaaatcctagaa

SEQ ID NO: 285692 - DNA, 100 bp, Homo sapiens
acaacgtggatcgttgttttgaaacggtggttctcttcccaaagtggaagccaaattcatcaattatgtgaagaattgcttccggatgactgaccaagag

SEQ ID NO: 285693 - DNA, 50 bp, Homo sapiens
cggccggcaccaccgctgcaagagccgggcatcgttggcttcacagtatg

SEQ ID NO: 285694 - DNA, 112 bp, Homo sapiens
ccgcgcgcagggcctgcagcgggagctggacggcgagcgcgagcggcgcgagaaagtcttctcagtacagcatggtggctggggcaggccgagagaatggcatggagacgcc

SEQ ID NO: 285695 - DNA, 82 bp, Homo sapiens
ggcggccctgggacccgcggaagccggcatgctggagaagctggagttcgaggacgaagccgtttccctggggagatggtaa

SEQ ID NO: 285696 - DNA, 50 bp, Homo sapiens
agcttcagccgattcacacggggccatgcagctcccatcctctacgcggt

SEQ ID NO: 285697 - DNA, 90 bp, Homo sapiens
cagaaaccttcacatcttggtcaaggagctgacatggatgtgtgccttacaaactatggtcactgtaactacgtgtccgggaaacatgcc

SEQ ID NO: 285698 - DNA, 90 bp, Homo sapiens
atgccgctcctaagcctgcacagccgcggcggcagcagcagtgagaggacgtggcccagtggaacatcgggagcctccggaccatcctgg

SEQ ID NO: 285699 - DNA, 100 bp, Homo sapiens
ctgaacacctcgaccttctctgcacagcagaacatacatatgatagttgagaaagacacatattctgatcatgaagaaataaacacaagttaaatatgac

SEQ ID NO: 285700 - DNA, 75 bp, Homo sapiens
tgcgaggcctcccgggctccgggaaaactacactggccaggccactcttcacctccaccatgagcctggacatcc

SEQ ID NO: 285701 - DNA, 75 bp, Homo sapiens
cacagaattatcaaagacttcatgatccaaggaggtgacccaacagggacagggtctcctcatgctgctacagaa

SEQ ID NO: 285702 - DNA, 100 bp, Homo sapiens
actcctctagaaaaaaaaaaaaaaagccggagtattttactaagcccctaaaatgtcgagatttgtacaagaccatcatcaaagaggggatgctgaccaa

SEQ ID NO: 285703 - DNA, 75 bp, Homo sapiens
caagcatgttgcacatgttttaaatgacgaaactcagcggaaatatattcaggactggagagagttcatacagag

SEQ ID NO: 285704 - DNA, 82 bp, Homo sapiens
cgccgcggcgctgtcgccggagagggagggcaccgctgtcgtcggaaaaccaattctgtgtcctcggaggaccacagcccag

SEQ ID NO: 285705 - DNA, 75 bp, Homo sapiens
acgcagtcactgcagcactggtggaacttgagttcaaaaggtgatgacctatcaacagccattctcaaacagaag

SEQ ID NO: 285706 - DNA, 90 bp, Homo sapiens
attaaagtgaagtggttgcggtaacctggcctgggcctgaagtgagtgagaggcacatgaaggagggatttgttcgtgttgaccgagatt

SEQ ID NO: 285707 - DNA, 76 bp, Homo sapiens
gagaacctgaacaagtcccagctgaagctgggcatctggggcgggccacccgttcatcgtgcagttcaatgatgga

SEQ ID NO: 285708 - DNA, 98 bp, Homo sapiens
atggaatgttcttaacccagaagtagctgaatgtgttactccattgctgaggagtggtaccaaccaagaagctgaagaaatatgagaaagaatatcag

SEQ ID NO: 285709 - DNA, 76 bp, Homo sapiens
gggagactcagcttaatcacagacaaagttgtgcatgagagatgttgaacgtcgacgcatttacgatatcgtgaac

SEQ ID NO: 285710 - DNA, 90 bp, Homo sapiens
cagaccctctcctttccctttgagaccgtgaagagaaagatgcaggttcgaagtcaacaataccattcttcacccagagatcgttgagtg

SEQ ID NO: 285711 - DNA, 75 bp, Homo sapiens
gcaccaggctgtctcggtcatcctgaacttggagcagcaagtgcgagggcccctggaggaggcagaggaggcccc

SEQ ID NO: 285712 - DNA, 100 bp, Homo sapiens
tcccccctgagcccgaggtgctgacgtcgcaaaaaaattggatatgggaagtaccttctgtctatagtggtgttatcctgggaattaaagacaatttaac

SEQ ID NO: 285713 - DNA, 74 bp, Homo sapiens
ttggtgaaggccctccagacccaaagtttattgttggccaaaaccaggctttgattgaaccaggatgaatgcgg

SEQ ID NO: 285714 - DNA, 75 bp, Homo sapiens
atcgcttggttaaaacctgacacttttaacaggtcctctcagggtgcgccatcattgtccgaggtcagcctcgtg

SEQ ID NO: 285715 - DNA, 101 bp, Homo sapiens
gaaaaggaaaaagactggtattacgctcaacttcagaatctcactaaaagaatagatagtcttcctttaactgaaaatttctctcaggccaggcacaccac

SEQ ID NO: 285716 - DNA, 87 bp, Homo sapiens
gaaagcaagggattgctggctacagcttcagaagaccgaagcgttcgtatctggaaggaagctctacagaggatcatttcaactctg

SEQ ID NO: 285717 - DNA, 75 bp, Homo sapiens
ggcggcccagagactggttttggacactcttccagccgcttacaaacacgcagatggcaagaagattgatggcag

SEQ ID NO: 285718 - DNA, 74 bp, Homo sapiens
cgaaggctccgctcacgcccggcatatagcactttctacattgtgggtttaatattatcaatgcagataccttt

SEQ ID NO: 285719 - DNA, 90 bp, Homo sapiens
aggggaaggaagagcttgaggggacagtggagaagcaggagttgttgaatgttgggtcacgaagatctcaacctggccaaagaagagaac

SEQ ID NO: 285720 - DNA, 100 bp, Homo sapiens
gttagtcctgagactgaggcgagtgaagagtctttgcagttcaacctggaaagccctggccaacgtcaacattgggagcctcatctgcaatgtaggggcc

SEQ ID NO: 285721 - DNA, 83 bp, Homo sapiens
caatccagatggcagccagtcagtggtggagatttctcgaatgctggcagccaaaaccgttttggctatccgttatgatgctt

SEQ ID NO: 285722 - DNA, 100 bp, Homo sapiens
tcacagagcggtccaaagccacaccaggtgctcctgccctgaccagcatgactccgacagctgtggaaagatgtcggtgcagatctcttgtccatgtgcc

SEQ ID NO: 285723 - DNA, 75 bp, Homo sapiens
ggagtggggaactggctctctggaacgtgtgacagcaggcagaagggagtgatcagcagctggactgtgccttgg

SEQ ID NO: 285724 - DNA, 82 bp, Homo sapiens
gccacttgcttgggatcctttatcctggtcatcttctatttccaaactcctggcaaccactatttgagtttctgcctctaca

SEQ ID NO: 285725 - DNA, 82 bp, Homo sapiens
agctgctgctgtccaagggctctgacatcaacatccgagacaacgtgtctgtgacctttgatgatgtggctgtgactttcac

SEQ ID NO: 285726 - DNA, 108 bp, Homo sapiens
ctccttcctgctgcggttcctgcgcgcccgggatttcgatctggacctggcctggcgggctggatcttacagagaaagactatgaaatacttttcaaatctattaatg

SEQ ID NO: 285727 - DNA, 106 bp, Homo sapiens
cgcctcccgggctccggctccggcttctgctgttgctcttctccgccgcggcactgatccccacaggaaattcagttcatgaagataagaagtttcttgacaaata

SEQ ID NO: 285728 - DNA, 51 bp, Homo sapiens
agcttcctttgccgctctgcatcatgttgataaactcatcctgaaagtcgc

SEQ ID NO: 285729 - DNA, 75 bp, Homo sapiens
ccggaggccggcgtgacaggctctgtcactaaaataggcatgtactggcattgaaaacattgacgaagctattac

SEQ ID NO: 285730 - DNA, 101 bp, Homo sapiens
ggctcccctctcggggcaacccagacgtgcaacaaagtgcgatgcccatcttcccagaaggaaagatgtaacctgacttttgcgccagaataagaacaaca

SEQ ID NO: 285731 - DNA, 98 bp, Homo sapiens
tgaattacaggccattcttaattacctactgactatgcatgagtacgtagagaaatcgacactcttaatgaacgtttagctgctgaaggacaagcgat

SEQ ID NO: 285732 - DNA, 90 bp, Homo sapiens
accagtggtagaaagcacagaaactgaggggacataatcatcactcagtagtcaagctggattatttcagtggaactggcaatcggccca

SEQ ID NO: 285733 - DNA, 73 bp, Homo sapiens
gcaagagctctttgaactctgacattctctagttttacggactcgggactcgctgattcttgagaagagtcaa

SEQ ID NO: 285734 - DNA, 90 bp, Homo sapiens
gtgctgggactacaggtgtgagccaccgtacccagcctcgaagtctgcagcccctctttcctggagtaaatgaactggaccaaatctcaa

SEQ ID NO: 285735 - DNA, 100 bp, Homo sapiens
gacgacgacgaggaagaggaggtttctgaggtgtattacccaaatttgggatggatgtgcattgatgccactgatccagagaagggaaactggctgcgat

SEQ ID NO: 285736 - DNA, 87 bp, Homo sapiens
gaactccgcagctagcatccaaatcagcccttgagatttgaggccttggagactcagaaaaactgcttaaggttgaaaagagaaatt

SEQ ID NO: 285737 - DNA, 75 bp, Homo sapiens
gccggcgctccaaggcccgcccgggagggccggggccgcgctcaggaagcagaatctggtaatataagtcaaaag

SEQ ID NO: 285738 - DNA, 100 bp, Homo sapiens
gcaacttacccgagaacgtgcgggaagagaagatcatcgagcatttcaaacggttagctttatacgtctacgaatatttactgcacgtaggagcacagaa

SEQ ID NO: 285739 - DNA, 88 bp, Homo sapiens
cctcagcctcccgattagctgggattacagaatttactcactacgtgagccgcagacacccactaacgtgataatactttcagaagcc

SEQ ID NO: 285740 - DNA, 49 bp, Homo sapiens
tctgttccaaatgctttgctggtcctcgatgggcttcctggaatattgg

SEQ ID NO: 285741 - DNA, 93 bp, Homo sapiens
agcttcgccgttctatggaaaacattgagctcgggctgagtgaggcccagggaaatgtttcaacgtgcgcaagcgttgcggcggcgggcagag

SEQ ID NO: 285742 - DNA, 50 bp, Homo sapiens
aattacttcgatccttaatggacttcaagttccagtctcatcagattttc

SEQ ID NO: 285743 - DNA, 83 bp, Homo sapiens
ccccgcgccgcctccccgcgccgctcgcgcagccatgtccgaggagaagcccaagcacaggaagtcctggagaacctgaagga

SEQ ID NO: 285744 - DNA, 100 bp, Homo sapiens
caaggaaacaggatgctgatagtctccagcgggcctggactgtgggctggtgtgtggaactgattgcccccgaggaattagcacttgttcacaacttgag

SEQ ID NO: 285745 - DNA, 100 bp, Homo sapiens
gaactttatattgctgttggaatatctggagccatccaacatttagctgggatgaaagacagcaagacttggccttgaaagagctgatacagctgaaaaa

SEQ ID NO: 285746 - DNA, 90 bp, Homo sapiens
ctgagatccatctgcaccacggtgctggtcaagaacttcactgaggtccaccctgactacgggagccacatccaggctcttctggacaag

SEQ ID NO: 285747 - DNA, 101 bp, Homo sapiens
ccagtttccatatgttgagattctacttattcatcagtttgttgtgcttgtcaagatcaggacacattcagctaacgtattttagcaggtggagtgaggtt

SEQ ID NO: 285748 - DNA, 90 bp, Homo sapiens
acggaggaaattctgaatatagggacaccacagctgattcaccccaagagtggccgttcctaccacgaggagttcaaccctccaaaagag

SEQ ID NO: 285749 - DNA, 73 bp, Homo sapiens
tggctgctggggccgctgtgcctgctgctgagcagcgccgcgggccccttcacagatgtagtcactacaaatc

SEQ ID NO: 285750 - DNA, 90 bp, Homo sapiens
agatgttgttgttagtgatgaatgcagaggaaagcagcttggcaaatttgtgtactgtaagcacggtcacctgtgtcccatcgacaccgg

SEQ ID NO: 285751 - DNA, 90 bp, Homo sapiens
cgtggcgtcgtctgcgaccgctgccttctcggcttcctgcctgacacagctcacttcaagaagtgcacaatgtcagaacgtggaattaag

SEQ ID NO: 285752 - DNA, 76 bp, Homo sapiens
gtagctgacttcagcggaaacccactgactagatattatcgtggagctgtaggtgccttattggtttatgacattg

SEQ ID NO: 285753 - DNA, 100 bp, Homo sapiens
agatgtgaaaaaaagaagaagctatggaaactcatctgattccagatatgatgatggaagaggttggagttcagtgatgatattgtgaagatcattcaag

SEQ ID NO: 285754 - DNA, 75 bp, Homo sapiens
cagagtcctgccttcctttgggtggtgagcttcattttctccaaattggaggaacctgtgatgatattgatgaag

SEQ ID NO: 285755 - DNA, 50 bp, Homo sapiens
tccgactcctcggaccagcaggacaggagtcagaaataccatcagaggag

SEQ ID NO: 285756 - DNA, 100 bp, Homo sapiens
actggtgttcttctttggtgcttatttcgtgtttgaaaatacaactgtgacaagcaacgggcagtttggaaattttagcattcaggtgccaggaatgcag

SEQ ID NO: 285757 - DNA, 100 bp, Homo sapiens
gcccaccacgataatgcagttcttattactaggcaaaggcagctcgagcatctcatctgacgtgagttcaagtacagatcacacgcccactaaagcccag

SEQ ID NO: 285758 - DNA, 75 bp, Homo sapiens
agcagattcagcggtactggtgtataataggtgctcgatgtggtggagcgcctggtgacccccggggaaactcca

SEQ ID NO: 285759 - DNA, 100 bp, Homo sapiens
cggcttgtagatgcaggctttgtttggactgagcctcattctaagagacttaaagttaaactgactattcagaaagagggctcagctggcaaagtaacta

SEQ ID NO: 285760 - DNA, 90 bp, Homo sapiens
ggcatacacaagtgtgcattaatggggtcagaagagatcaattctacagaaatttccagtggttctgttgaggctttatggaattcagca

SEQ ID NO: 285761 - DNA, 75 bp, Homo sapiens
cactgactttcagctatggaatcggtggtctttgggaagaagcttcctgcctttgccaccatccccatccaccag

SEQ ID NO: 285762 - DNA, 90 bp, Homo sapiens
cccgtctgccccgcccacatctagaacgataacgagctgcacggccaagagagtcacaattcaggcaacaggagcgacgggccaggaaag

SEQ ID NO: 285763 - DNA, 83 bp, Homo sapiens
cctccactccgtcccccgcgggtctgctctgtgtgccatggacggcggcagtccctgccccggtgggccgagtgcaggctgct

SEQ ID NO: 285764 - DNA, 82 bp, Homo sapiens
cctcgatctcctcgtctcccgctccgccctcccttttccctgcctggagcattggtaagcgtcacactgccaaagtgagagc

SEQ ID NO: 285765 - DNA, 83 bp, Homo sapiens
ctgcggtttgctgggaacggagggctgcagcgcccaccctgcgccagagaccagataaacggagctggagtttgttcagatca

SEQ ID NO: 285766 - DNA, 75 bp, Homo sapiens
cctttctggacagaccaacctgtcagtgctgcaaaaactggcgatggaatatgagaggagccctctggaaagaaa

SEQ ID NO: 285767 - DNA, 83 bp, Homo sapiens
gtctgaactgaagaagcttgggctcacttccacaaatgctatggagttactagtagagaaagcaatcagcagtgcttctagcc

SEQ ID NO: 285768 - DNA, 100 bp, Homo sapiens
aaattcatcagagagcattttactactgagctgcaaaggcggttcaggaccatcatcctccatagccatagcgggcaccaaccaccctgccatcacaaag

SEQ ID NO: 285769 - DNA, 90 bp, Homo sapiens
ggcaagggcttattgttcctccctggtacctgacagtgtaaagaaggagctcctacaaagaataagaacattccttgctcagcatgccag

SEQ ID NO: 285770 - DNA, 100 bp, Homo sapiens
gttgtacatccactggacctaaaatatgaccctgatccaggtgctggagaatctggtaaaagcaccattgtgaagcagatgaggatcctgcatgttaatg

SEQ ID NO: 285771 - DNA, 101 bp, Homo sapiens
aagttttagaaccccaacaataagaagcatcacacctttatctggaactccaggcagaactggggctcccttgcatcttccagttacaaattcagtgcctt

SEQ ID NO: 285772 - DNA, 100 bp, Homo sapiens
gtccggtcttcggtttgcacagctagaggccgcgcagcagcaaaggatgagcggaaccttggaaaaggtgctgagcacagtgctctccatgtatgttgtg

SEQ ID NO: 285773 - DNA, 98 bp, Homo sapiens
tccattttggctccctgaaaccgcggcgtggtgcatgatgcaacaccgaatctggaaagcatgaagactgggctttttttcctatgtctcttgggaac

SEQ ID NO: 285774 - DNA, 74 bp, Homo sapiens
aagaaggtgaagatgatacctttctaacagcccaaggttacacatcattttggaatgactgtatatcatctgga

SEQ ID NO: 285775 - DNA, 75 bp, Homo sapiens
tccccaagccattcagggcctttgcctttgttacatttgcagatgatcagcctgtgacattctggccattgataa

SEQ ID NO: 285776 - DNA, 101 bp, Homo sapiens
gctcttcttgaaaaatgcaaagatgtagatgagagaaatgaggtccagaggtgtccttctaaagctggtagaggtttcacgagtcatcagggacccagaac

SEQ ID NO: 285777 - DNA, 75 bp, Homo sapiens
ttaaggatccttccctctcaacctccaaggtagctgagactacagatgcacccactgggcctatgtaataacaat

SEQ ID NO: 285778 - DNA, 83 bp, Homo sapiens
gacagctcttccttaattgaagagggattgtggtccatcaggagtctgtgtgtgccacctatggaagtggcttaagcagcacg

SEQ ID NO: 285779 - DNA, 75 bp, Homo sapiens
gctactctctctttctggcctggaggctatccagcggcatggtgctgatgtgaaatgtgtagactggcatccaac

SEQ ID NO: 285780 - DNA, 83 bp, Homo sapiens
aggccagccaggcggaggctgaccagcagcagactcgctggagaagaagcaggcgctccctccattccagccacagatcacag

SEQ ID NO: 285781 - DNA, 82 bp, Homo sapiens
ccagaccctggagcctcagttggaagcagccgatccagcctgcggagcctgtggggcagcagcgctggagagcgaggtggct

SEQ ID NO: 285782 - DNA, 78 bp, Homo sapiens
gttcttggtgcccctgggcatcaccaacatagccatcgacttcggggagcaggcacgtctgagaatggtggatgtggt

SEQ ID NO: 285783 - DNA, 100 bp, Homo sapiens
gagtgcgtggaggagacgtgcagctacgaggaggccttcgaggctctggagtcctccacggctacggtagcccgggaccctcgctttgatgatctgtcag

SEQ ID NO: 285784 - DNA, 75 bp, Homo sapiens
tttggcattgacatttaattttagggtcctttatatagaagggagagtagacatatgaagaagttggagatgatg

SEQ ID NO: 285785 - DNA, 74 bp, Homo sapiens
cccccggcgccgtccagcccggagggacctggtcaccgaggaggagcccagctccaaccacacggtcatgatcc

SEQ ID NO: 285786 - DNA, 75 bp, Homo sapiens
tcagaaagtccttagcaacagggttgacagactaatggagttgcattttaaatatctgggtgcaatgcaggtggc

SEQ ID NO: 285787 - DNA, 74 bp, Homo sapiens
ccgccgccactggaaagctgaaatccttcgcccggaaattcatcaagggacagagactgagacacttgctgtct

SEQ ID NO: 285788 - DNA, 100 bp, Homo sapiens
ggagtaaacaacagaagaactgagctatttttgaaagaacatgaccaccttcgaaactagagttgggaagacatcactgattatgtctctggtcagtgaa

SEQ ID NO: 285789 - DNA, 75 bp, Homo sapiens
ctgctcctgctgctggggctgggcttcatcaccatgacgccccagctcttcatcaactacaagctcaagtctgtg

SEQ ID NO: 285790 - DNA, 100 bp, Homo sapiens
agacagcagcgactagggctcgggcgccggcgagatgcctttgttcaccgccaaccccttcgagcaagacgtggctgagatctgtatctgtggacctgaa

SEQ ID NO: 285791 - DNA, 80 bp, Homo sapiens
aagagattcagcagcgaacggaagctcctggaggtcagaggccctttcatcatcaggtgttgacttcaaaatcaaaactg

SEQ ID NO: 285792 - DNA, 74 bp, Homo sapiens
ccacagccccagccaccacccgtaacacaggtatagtggaggattacaagccaccgttctacgatgtggttccc

SEQ ID NO: 285793 - DNA, 100 bp, Homo sapiens
aggaaggttgttgattactcacagtttcaggaatctgatgatgcagtggattttgctctgaaggttctccagtggtctgactacgagatagtgcggcttc

SEQ ID NO: 285794 - DNA, 75 bp, Homo sapiens
tgacagccctgtgtgacaccaagataagtaacctggactgggcagcctttggggtcatgacccttccctccatcg

SEQ ID NO: 285795 - DNA, 101 bp, Homo sapiens
gcaccaggcaggctcagactcactgctgacaggaatggctttctttaggatgaaagaggtacaagcaagtcttctcgacactgttacaagaaggcattttt

SEQ ID NO: 285796 - DNA, 100 bp, Homo sapiens
agcagtacaacattcctgccttcttcttatgcaagacggctgtgctcaccgcctatgaagagcgagctctgtatctcgaagcaataattcagaaccaccg

SEQ ID NO: 285797 - DNA, 75 bp, Homo sapiens
ctccgagtccctcaactctctacgctttgcctccaaggttagaaaatggatttctgactggaatctcaccactga

SEQ ID NO: 285798 - DNA, 103 bp, Homo sapiens
cagcaggtagaccagctcaaggcctttggctatgtcgagatcccctgtgtggccaagaagctggtgtgcggagatgaagagatggggttttgccgtgttgccc

SEQ ID NO: 285799 - DNA, 100 bp, Homo sapiens
cttcctgaggaagcgcgggcggacgacagaggatgccgaaccactccagtccgtggcactcaggtagttggttctgacatgactgtgacagttgagttta

SEQ ID NO: 285800 - DNA, 75 bp, Homo sapiens
gttggcacaccttattacatgtctcctaaagcaggaattatgtttcaaatggacaatcatttaccaaaccttgtt

SEQ ID NO: 285801 - DNA, 110 bp, Homo sapiens
aaccagaccatggctccttcaggagagaggactgactgcattgcacagatgatggatatttacgtatgtttgaaacgaccatcctggatggtggacaataaaagaatgag

SEQ ID NO: 285802 - DNA, 98 bp, Homo sapiens
tgagcctcgagccgcagcacgagctcaaattccgaggatacttttgtggaactctatgggaacaatgcagcagccgagagccgaaagggccaggaacg

SEQ ID NO: 285803 - DNA, 100 bp, Homo sapiens
ctcagaacatgggtccgtggtcgtttgtttctccaaggtttgaaaagcagctggcctgcaagtggcaacatgaagatctacttatcaatagaccacaagc

SEQ ID NO: 285804 - DNA, 100 bp, Homo sapiens
ctctctcctttccctgttagacatgacagttgaaccaactggaaaacgtttcttactagctgttgatgtcagtgcttctatgaaccaaagagttttgggt

SEQ ID NO: 285805 - DNA, 51 bp, Homo sapiens
agttcttatgctgaagcacttcgagaggtgaccgcttcaggtctgtcatag

SEQ ID NO: 285806 - DNA, 75 bp, Homo sapiens
tattgacccattttctaaaacgggaaaccttaggaccttaaaggctttgatccaggagagaaatactttcataac

SEQ ID NO: 285807 - DNA, 100 bp, Homo sapiens
ctacagaaacctggtctccctaggtcgttgaggacttccacatggagattggcacaggaccagactcaagacacacaactcataacagttgatgaaaaat

SEQ ID NO: 285808 - DNA, 82 bp, Homo sapiens
agttgagcctgtgggacacttcggggaaccctactctggaaactgtcagtcccagggcactggggagggctgaggccgacca

SEQ ID NO: 285809 - DNA, 99 bp, Homo sapiens
cacctccgggcgcagaggcctacatcccacagagatacccagacaacaggatcgtctcgtccaagtgttctaagaacggaagcatctgggctggatgga

SEQ ID NO: 285810 - DNA, 100 bp, Homo sapiens
aacatggctatccacttattatttatgatgtgttccctgatgcctgcaaagagtttcaagatgcaggtgaacagaatgctgcgtttttatatggccttgg

SEQ ID NO: 285811 - DNA, 75 bp, Homo sapiens
atgtacagaacatgatcaagggtgttacactgccggaaaactcaaatatatgtgaggtgtgcaacaaatggggac

SEQ ID NO: 285812 - DNA, 50 bp, Homo sapiens
gtcaaatctctgcaggaatcagacagagcaatagtatggttacagaaccg

SEQ ID NO: 285813 - DNA, 74 bp, Homo sapiens
cacagccgcccacttctggaaggttccatcccctgcaggtcctggtgaacgccatcatcaacagtggtccccgg

SEQ ID NO: 285814 - DNA, 101 bp, Homo sapiens
tgactaatcttcgggcagagagaaggaaacacttagaggaagttctggagatgaagtctacaggtccaactgctgccactggcagtaatcgaagacttcag

SEQ ID NO: 285815 - DNA, 103 bp, Homo sapiens
cgagaaggtggacgtgctggtgtctgagtggatggggacctgcctgctgggcgaagctgtgctcaggcccgggctggacgcagagccagagctgtccccagag

SEQ ID NO: 285816 - DNA, 50 bp, Homo sapiens
cttggaaatggctgcaggttcagaattgtagaaggcatgaaacaaaaaat

SEQ ID NO: 285817 - DNA, 100 bp, Homo sapiens
ggagtggaaccgggtcaccatcccagccctggcagttctaaaggtcatctttgctgttgccttttgcctgatatctgctgtcctaatggtactactgttt

SEQ ID NO: 285818 - DNA, 74 bp, Homo sapiens
tcctggccacaggcagtacggcatggtgctcgctccatttatcttaaagaaattggacagcatatgaagacagg

SEQ ID NO: 285819 - DNA, 83 bp, Homo sapiens
gtcgaagacatggaccagggctacggagggtgctttcttctgcgacctggtactcatctacctcatcaaaaagagagagtttt

SEQ ID NO: 285820 - DNA, 76 bp, Homo sapiens
attctagcaggttcctgagtcctcgagcgcgggaagaaaggggctaagtgatggatcttgtactccgtgttgcaga

SEQ ID NO: 285821 - DNA, 100 bp, Homo sapiens
aaacacagatgtgactactgaagaaatgaaacaagaagaaaatttgagtgtaccgtttgagtccatagaggccactgtattctattgaagaacatgtcta

SEQ ID NO: 285822 - DNA, 101 bp, Homo sapiens
ccacaaaagcgaaatgggcacaccacaggagtcctttggaacctctcctcatgcgatgcactcaaaatgccaatcatccaggatgccctagcagtactgac

SEQ ID NO: 285823 - DNA, 100 bp, Homo sapiens
caatggagtcgagtctagaattcacacagagccacctagcttcataaacaagcagatatgcaagaagagaaaaaccgaatcgaaagagtccttggcgcta

SEQ ID NO: 285824 - DNA, 90 bp, Homo sapiens
tgcgcagagaagccgatgtcaagaagaggatcaaggaggccaagcagcgcaagacactaagggcgactaccagaaagcgctgctgtacct

SEQ ID NO: 285825 - DNA, 83 bp, Homo sapiens
cgacgtcttgcctgtgtcccacttgttcgcggcctatagaggctgggaggcggcagaatgcagccagaggagggcacaggctg

SEQ ID NO: 285826 - DNA, 100 bp, Homo sapiens
cctcgcatggtggccagggcacgtcactgcaggccaggagcaggccgggctctcgccatgggtcactgtcgcctctgccacgggaagttttcctcgagaa

SEQ ID NO: 285827 - DNA, 90 bp, Homo sapiens
gtgaagtacaggctcagtctgcggccaagactccatcctgcaagtgttgctaacaaccacaagcagaatttgatgacggtggcaaacctt

SEQ ID NO: 285828 - DNA, 83 bp, Homo sapiens
actctctctttctggcctggaggctatccagctgaggatgaggatgatgaccttcagtatgccgatcatgattatgaagtacc

SEQ ID NO: 285829 - DNA, 97 bp, Homo sapiens
ccaatatcgaactgaagaaaggagggaaggatataccagtcactatccacaatttagaggagtatctaagatgagggccccaaggctgttgcagctc

SEQ ID NO: 285830 - DNA, 90 bp, Homo sapiens
gaaccattgaagcttgagagaaaagcccccaaaagcagctattcagccacccaggctactttgggaaagttggtatgaagcattaccact

SEQ ID NO: 285831 - DNA, 95 bp, Homo sapiens
gggcgctgacggtcccgcacgtctgccgctgccaccggcgcgcccgagccaagctataacatcagaaatggtgaatgaatacaagaaaattcttt

SEQ ID NO: 285832 - DNA, 75 bp, Homo sapiens
cactgcttccctcagccataacaggcagtgatatgacctcccaacaagaattcacttcttgcctaaaggaaacac

SEQ ID NO: 285833 - DNA, 90 bp, Homo sapiens
cattaacaccgaagttctacgtggccctaacaggcacttcctcactaatatcagggcttattttgcctaatagtcccagtgaatattgtt

SEQ ID NO: 285834 - DNA, 100 bp, Homo sapiens
gacttggtggcaaattttttcccaaagaagttattagaacttgatagttttctgaaggcagaaaatgtgctagattggaggtgaagaccctggagccaga

SEQ ID NO: 285835 - DNA, 100 bp, Homo sapiens
tcagttggaactggagtctgggcacgaaatcctcaatatcggggtgacagtccaaagattgacttggccggcagttcgctatctggcatcctggacaaag

SEQ ID NO: 285836 - DNA, 75 bp, Homo sapiens
tcctcctctaacatgtcagcgttattgtaatgcaaacatctgtgcaggttccatcaccagcaaatggcgtgattg

SEQ ID NO: 285837 - DNA, 89 bp, Homo sapiens
ggatcaccgacagcacagacagaatccctgctaccagtcactgcagccagaggggtccagaagagagaggaggcactgcctccactaca

SEQ ID NO: 285838 - DNA, 100 bp, Homo sapiens
acgatggaccctcagctgcggctgctgctggaagtcacctatgaagccatcgtggacggaggtgatgtacagttcattgattatgaatattctggataca

SEQ ID NO: 285839 - DNA, 90 bp, Homo sapiens
tggcaaagactggcaaaagcacaaggattctcgctgtgacagagacaacaccgagtatgagaagtttgaaatatctccattcagctggca

SEQ ID NO: 285840 - DNA, 100 bp, Homo sapiens
atttcagagaaggcctgaacttacaagaaggagaattcttattacagggcaaacttgaagataaatcttttgactccagctctttagaggatctaaagtg

SEQ ID NO: 285841 - DNA, 89 bp, Homo sapiens
tactacctggagatgctgatcgggacccccccgcagaaggatttcaggtgttggcgtctgcttcccattactggccactggagaatgtg

SEQ ID NO: 285842 - DNA, 98 bp, Homo sapiens
cctcatgagccacttcagaccagccaggtcatcgccaaccaccacatgccgtccatctccttcgcgtcaggcggagacacggtgaggccagggatggg

SEQ ID NO: 285843 - DNA, 100 bp, Homo sapiens
caccaggctcatcctgtccatcgtgtgcctgatgatcacgcagctggctggcttcagtggaccagtggaagttaaacgagctgagcctcgggacagcaag

SEQ ID NO: 285844 - DNA, 74 bp, Homo sapiens
cacttgatcctgatcctgccatccgacgtccagctgaggagaagaaagtggaagcaaagaaagaagaatccgag

SEQ ID NO: 285845 - DNA, 100 bp, Homo sapiens
gaacctgacaatgtgaatgccctgaaagatcgagcagaggcctatttgatagaggaaatgtatgatgaagattttaggtgatgggcaagtcagaaagtca

SEQ ID NO: 285846 - DNA, 99 bp, Homo sapiens
cagcttcgagggccgggagctcctggtcatcgagctgtccgacaaccctggcgtccatgagcctgtacttcctcctgtgctggttccaagacacagcga

SEQ ID NO: 285847 - DNA, 76 bp, Homo sapiens
caactgtacaagaggagagtgaagaggaagaggttggagcagaaagaaacgtgctcatctttgacctgggaggtgg

SEQ ID NO: 285848 - DNA, 50 bp, Homo sapiens
gcccaggccccggcagcgcctgggacaagatatttggagtctgggagtga

SEQ ID NO: 285849 - DNA, 100 bp, Homo sapiens
agctacttcagttggacatccgtcacctgtggaaccactcaataattgaagaagaatttgtcaggtacaggtttgcagattccgccagcagcacagcaag

SEQ ID NO: 285850 - DNA, 90 bp, Homo sapiens
tgtccctgctggaggagcgcttccggggtggtatttccaacattttggaggaactggttgtccagcctctgttggtatcagtcagtgctc

SEQ ID NO: 285851 - DNA, 100 bp, Homo sapiens
ctttattctctcagcacactgcagaaaacccgcctagtgccaagcaaccctccaagatgctagttatcaaaaaagtttccaaagaggatcctgctgctgc

SEQ ID NO: 285852 - DNA, 100 bp, Homo sapiens
gtctcggcccgcaccaggagcggaacaagtcggaagtctatgcgtcagtctacagctgagcatacacgacaaacgttccttcgggtacaggagaggcagg

SEQ ID NO: 285853 - DNA, 100 bp, Homo sapiens
acaccgggagtgggagagattggactgggagactcagcaggtctctaattaacagaagatggcaaagcccagccacagcagctatgtccttcagcagcta

SEQ ID NO: 285854 - DNA, 75 bp, Homo sapiens
ttctaagaaatgggactttacagctttgatcgatttctgggataagggcctcagcaaggatgtggtggttatctg

SEQ ID NO: 285855 - DNA, 75 bp, Homo sapiens
gaattggatatcaagccagagaagtgcccgaggagagttaacaggtcaaaatgcagatcttcgtgaaaaccctta

SEQ ID NO: 285856 - DNA, 98 bp, Homo sapiens
ccaattagaacactctgtattaagccagcaatataagcatggattcctggttcattcttgttctgctcggcagtggtctgatatgtgtcagtgccaac

SEQ ID NO: 285857 - DNA, 75 bp, Homo sapiens
cggacagattgaccttcagagcgagctttctaaaaccaatttttccaacaacaacgatttccgtgctcttctgca

SEQ ID NO: 285858 - DNA, 88 bp, Homo sapiens
gcgcctcacactacaccctggaccccagcagccgcaactgcagccgttacaggaaatacaggaggcagaggaacaaataaaagacacc

SEQ ID NO: 285859 - DNA, 100 bp, Homo sapiens
atcctgtcactgtcagtataaactcatggattgaactggttatcaggacaccccatgggagagacttcgatgactctttagaaaaatgtgaagagtattt

SEQ ID NO: 285860 - DNA, 74 bp, Homo sapiens
tggatgtcatacgaacccgtgtgcagggatcctggtgtacgggctgagcctgttatgcttttctgcccttcggc

SEQ ID NO: 285861 - DNA, 82 bp, Homo sapiens
ctcggtctcccggcgctgctactgctgctgctgctccggccgccggcgacgcggggtgacttaagagattaaaattaatttg

SEQ ID NO: 285862 - DNA, 75 bp, Homo sapiens
agcggctgcgcacggactgctggagatggtggagtccgtcagtgagaagccctaccactgcaactgggacggctg

SEQ ID NO: 285863 - DNA, 83 bp, Homo sapiens
ggaaaaggagttcgagcagatcgacaagtccgggagctgggcggccatttaccaggttgtgaccgagattcccgacgagagag

SEQ ID NO: 285864 - DNA, 100 bp, Homo sapiens
tgacgtgtcatttctaagtactttctcctactccataaagacttcaagatctcccagccatccagccccggctagtggcggtcagcaaaaccaaacctgc

SEQ ID NO: 285865 - DNA, 136 bp, Homo sapiens
gtataatgatccaaatagtaacccaaagatcgtgcagctcttggcaggagtagctgatcaaaccaaggatggattcaattagcagagcctcacagacaatggccaaatgtgtcaaagctgtcacagagggtgccca

SEQ ID NO: 285866 - DNA, 75 bp, Homo sapiens
cggccctggagaccgaggggctgcgcttcctgcacaccacggcaaccatgtccaagggacctgcagttggtattg

SEQ ID NO: 285867 - DNA, 75 bp, Homo sapiens
cagacatggcgcgtcttctggagcaatgggagcgaactctagttggcctagtaagagacctgagagggatcgctt

SEQ ID NO: 285868 - DNA, 80 bp, Homo sapiens
tgcatgtgggaccttcagccgtgaactggggaaggtgtggctcattgactttaatccatttggtgaagtcacagattcac

SEQ ID NO: 285869 - DNA, 88 bp, Homo sapiens
gctactcggtcgccctccatcggcagacagagcggcagcagcgctaccttctgcgctcctcagaccaccggcaggtgaacagcctgat

SEQ ID NO: 285870 - DNA, 82 bp, Homo sapiens
accaccgaggctggagggggagaacacccaggtccttatgtcgtcagaagatcgagaagctcaggaggatgaattgctggcc

SEQ ID NO: 285871 - DNA, 74 bp, Homo sapiens
cttgctcaaaatatgcaagaagcatcgactcagctggaagactctctcctgggcgggacctggacttcaccatc

SEQ ID NO: 285872 - DNA, 90 bp, Homo sapiens
aagttattcagtctcgtctcctcggtcagtggactcttattcttcaactcagcatgttccttacgtaggaagcctggacgtgccaaggcc

SEQ ID NO: 285873 - DNA, 82 bp, Homo sapiens
gactgaatgagatcaaaggtcacctggaaattgccttattggaaaaacatttcttacgctaccggctctctgaccagttcca

SEQ ID NO: 285874 - DNA, 100 bp, Homo sapiens
ggctgccttccctgacccccagttacgcctggaatatgaaggcttccccgtcccgatgagtgaccgaggaggtggcgttcctttgaggaaaattgacaga

SEQ ID NO: 285875 - DNA, 100 bp, Homo sapiens
gccgcgctccttcctggtcaagaagcatttcaacgcctccaaaaagccaaactacagcgaactggacacacatacaggtgtgatgaatgcagactctgct

SEQ ID NO: 285876 - DNA, 101 bp, Homo sapiens
ctatcgctaccctccgaagtccggtctggctctgggagaggagtggacagcagctggttgagatacatccccatctggagacaggactgccactgacagaa

SEQ ID NO: 285877 - DNA, 82 bp, Homo sapiens
cgcggacatcgtctcctgtgtggcgatggtcttcctgctggggctcatgtttgaggaccatggccaacctggagcgcacctt

SEQ ID NO: 285878 - DNA, 98 bp, Homo sapiens
ccaggccgggcacctccgagcgcaaggacagcgcgaggtccgcgcagcccagcgcagccatggggatatgagactttctactcggaatatcctgagtg

SEQ ID NO: 285879 - DNA, 90 bp, Homo sapiens
gtcagcatcatcggggctgaggatgaggattttgagaacgagctggagacaatagatctgaaggagcagggacagctcttgcatcgagac

SEQ ID NO: 285880 - DNA, 100 bp, Homo sapiens
caagaaacctcaggacttgagtaacagcaacatgactccagagcatgagggccgttactatgaatgtgatgtccttcctttcatggaaattgggtctgtg

SEQ ID NO: 285881 - DNA, 97 bp, Homo sapiens
tcacctttgaaatcgccaaataagtgtaaacaggaacatcgataagtagtgtaaaaacttgcacaatgaaatccgaagccaaggatggagaggagga

SEQ ID NO: 285882 - DNA, 75 bp, Homo sapiens
aggacactacatcaaggactgcccccagcctaagaaagctgtcaagataaaacctcacccacctgtagctcctcg

SEQ ID NO: 285883 - DNA, 75 bp, Homo sapiens
actaaaatgaaagaaaccgctgaggcttatttgggaaagaagacctgtgaccgcatcaagcagtcagcagctggc

SEQ ID NO: 285884 - DNA, 100 bp, Homo sapiens
cttggacctcctgggaggcgaggacggtctctgccagtataaatgcagtgacggtactaggttttgacaagcttgcatcatgcgtgagtataagctagtc

SEQ ID NO: 285885 - DNA, 100 bp, Homo sapiens
agtcggtcttttgattacaactatagaagatcgtatagtcctagaaatgaagctgtggtctaccaatctagacaactcagtggcaagcattgaggcaaag

SEQ ID NO: 285886 - DNA, 98 bp, Homo sapiens
agacagccatgttttctgtctacgatggacatggagcatctgacgacaccaaaaagaagatgtacagctccatcctagtggtgggaggtggtttgatg

SEQ ID NO: 285887 - DNA, 101 bp, Homo sapiens
aaagtagatgaagatgagattcagaagatgcactttgtgacaacaaactgtgctctgcagttttcatcccgtggaatccgacccggcctgaccactgtcct

SEQ ID NO: 285888 - DNA, 84 bp, Homo sapiens
tcttcggtggactccttcggcagtccacccaccgccgccgcctcccagattattttcgaaataccagtatttcgactccagggg

SEQ ID NO: 285889 - DNA, 90 bp, Homo sapiens
ctgtttgaaacgtctgtgggttacgccatctttaaggtcatcctgtacagttctacagcatgaataggcctgcctctcgccatactcccc

SEQ ID NO: 285890 - DNA, 75 bp, Homo sapiens
acagtacatactccaaggagaggattaatagacgttctgggaacactttttatttatgtcttatttatggttgag

SEQ ID NO: 285891 - DNA, 74 bp, Homo sapiens
gtccgagcgggagccgagccgggcggggcgagggcagctccgtttcactgttacatgccttgaagtgatgagga

SEQ ID NO: 285892 - DNA, 96 bp, Homo sapiens
aaaatattgtgggtgcaataaaaggtcactggaaagaagaatggcaatggggaggcaggggaattccttcctgaggatttcagagatggagagtat

SEQ ID NO: 285893 - DNA, 50 bp, Homo sapiens
ctttgactccttgctgaatctgagcagatataattgacactggcaaaaca

SEQ ID NO: 285894 - DNA, 75 bp, Homo sapiens
tcttttgccctagagcaattgaaggctcatcagattcaagagatgtttccccaggttccataccatctggtactg

SEQ ID NO: 285895 - DNA, 108 bp, Homo sapiens
ctcgcctcgggtctcgggggccgctctgggatcccggccaccagcaattgtccgttgttgacctcctgtactggagagacattaagaagactggagtggtgtttggtg

SEQ ID NO: 285896 - DNA, 101 bp, Homo sapiens
agaaatcccggatctcaagctcgctatggagaattacgttttaattgactatgacaccaaaagggagtggagcttggtttcgggatctcggtgctgcagac

SEQ ID NO: 285897 - DNA, 100 bp, Homo sapiens
cctgtgtggcgatggtcttcctgctggggctcatgtttgagaggacagttatgggatggatgggaaggttaatcagccccgtctcactgcagacatcaac

SEQ ID NO: 285898 - DNA, 100 bp, Homo sapiens
ccgcgcgcagggcctgcagcgggagctggacggcgagcgcgagcggcgcgagaaataaggtacctgccgtgggcagatctgagctttcttcttggacacc

SEQ ID NO: 285899 - DNA, 88 bp, Homo sapiens
tggaaaaaaaattggatgtggcaattttggagaattacgattagatctgacaggagctcaagatggaagtgtcagaatgtttgaatgg

SEQ ID NO: 285900 - DNA, 83 bp, Homo sapiens
gcgacaagccgctggcagccgcggatctcaccgccgctcaggatgctcagccagcattgggcagcccccgcttcctgctcccc

SEQ ID NO: 285901 - DNA, 75 bp, Homo sapiens
tttttttccaaactcagccaggtggttcgaaagacttcaagcaattggctaactatatgtcagaaagcatcagct

SEQ ID NO: 285902 - DNA, 74 bp, Homo sapiens
gttttgttcttcgtgaacatgaaattggagagattcgagattacggtgagccctttcaggaagcaatgtggttg

SEQ ID NO: 285903 - DNA, 75 bp, Homo sapiens
ccagtgttgtggaccctagcacagagcttccagtggtgtctgtagtgagagaaacagagtcccagttactgccag

SEQ ID NO: 285904 - DNA, 83 bp, Homo sapiens
caacagagttgccctgtcaccatttctttcacaaaccttgtgtctcaatttggctacaaaagatgatatcatcaagttgaatc

SEQ ID NO: 285905 - DNA, 105 bp, Homo sapiens
ggagattggatggatgcacaatcggagacaaaggtatttataacagcaatgatgtagcagtatcgtttccaaatgtagtatctggctcgggatctagtactcctg

SEQ ID NO: 285906 - DNA, 74 bp, Homo sapiens
tacggaggagaccgaggtggctatggaggcaaaatgggaggaagctttgtcacccgaaagaaccgccaagtgtg

SEQ ID NO: 285907 - DNA, 100 bp, Homo sapiens
tgatagtattaaagaatgtaagaagaagaagtgccagggaacttttcacacctgagtgcaaattcaaagaatcagtgtttgaaaattattatgtgacata

SEQ ID NO: 285908 - DNA, 98 bp, Homo sapiens
agtggaaggcacggcaatctatttaccaggcagtggagctactgctgtggttcaggcagccctatgcaaacccaggcaagaacgtgtagcaataaaac

SEQ ID NO: 285909 - DNA, 75 bp, Homo sapiens
cgctgtgctcgctggcaccccgaacgggttgcttcccccgctgcgagctccttgctcggattgaacgtatggaaa

SEQ ID NO: 285910 - DNA, 96 bp, Homo sapiens
aggattcaggccaaactggtaaatgacgaaggggcttcttccagagccaaggaggaagggttgtccgggatcttagaaatgaagttgaaaaattac

SEQ ID NO: 285911 - DNA, 87 bp, Homo sapiens
aagacagagggttttcttttgagggagatacttcaggggattaccggaagattctgctgaagatctgtggtggcaatgactgaacag

SEQ ID NO: 285912 - DNA, 75 bp, Homo sapiens
acacggcatgcagcctgtccagtgctagttggcaacaaatggggaaaggcaccaatgcccagacctggctacaag

SEQ ID NO: 285913 - DNA, 84 bp, Homo sapiens
tctctttctggcctggaggctatccagcactacgtctactttgagaactcctccagcaacccatacctgatccggagaatcgag

SEQ ID NO: 285914 - DNA, 88 bp, Homo sapiens
gcgcttgggcgaggccgggcggcgcttctgtcctcctactcggacccgcagattttaccaaatgttgcaagaactctggagttcttat

SEQ ID NO: 285915 - DNA, 98 bp, Homo sapiens
tgaagaaaaccacaaccatgccaatgaacgaatgctatttcatggggttgtagaaggtgatttagctgccatagaagcatacaagtcatcaggaggag

SEQ ID NO: 285916 - DNA, 100 bp, Homo sapiens
gtgaagtgatgctgtccactcggattgggtcaggctcttttggaactgtttataagggtaaatggcacgctgactggaaataccggcatgcaggattgat

SEQ ID NO: 285917 - DNA, 82 bp, Homo sapiens
tgaatgtgcaacttgcaagggaactggagacaatgaaaatcttgtcagagtgtctataaatgtgatttcctgaacttacagc

SEQ ID NO: 285918 - DNA, 95 bp, Homo sapiens
cggcgcctgaggagcgggatctaacccaggagcagacagagaagctgctgcagtttcagggttgtgagtcccggcccagcccctccacccccctg

SEQ ID NO: 285919 - DNA, 90 bp, Homo sapiens
caggggtggagcagctcatgtacatcaaggaggacttgatcatccctcacgaacccagaatgggggcttcgggacacagccctcctggag

SEQ ID NO: 285920 - DNA, 75 bp, Homo sapiens
tcctgtaccgcttatgccaggccgatcccgacctggactcagacaaggaggaacagcacagcatgctgggctctg

SEQ ID NO: 285921 - DNA, 100 bp, Homo sapiens
tggcactcacagcggcagcgatcaagcaggcagcgggctttgccagcaaaaccgaaacaggctgcagcgctggtggaggaggaaactcgcagataccgac

SEQ ID NO: 285922 - DNA, 100 bp, Homo sapiens
tggacttagtgcagtcaatgatggactgtctgtatgccaagtacaagttggatggcttgaggactggtactaaaaggaaacgtgactgggaggccattgc

SEQ ID NO: 285923 - DNA, 100 bp, Homo sapiens
cttatgagtggaacatggctagcaggaatgcttactgttgcgtggttcgttattaacagagaccacgtctccacctcctgggctccaacgattctcccat

SEQ ID NO: 285924 - DNA, 100 bp, Homo sapiens
ctcaatttaagcctgatctaacccctagaaacagatcacaaaatttgtccaggatagacatagagctagaagaaacagacttcgtaaagatcaacttaag

SEQ ID NO: 285925 - DNA, 100 bp, Homo sapiens
ctttactgagaattttccacctcctgacacaacaccactcacaggggaaatgctgtctgtagctgagcacttcctggagcagcagatgcacccaacagtg

SEQ ID NO: 285926 - DNA, 98 bp, Homo sapiens
ggactcgctctcggcttgaccgcattcttcctcccaggtgctggagaatctggtaaaagcaccattgtgaagcagatgaggatcctgcatgttaatgg

SEQ ID NO: 285927 - DNA, 101 bp, Homo sapiens
ttcccagggatcttgagagtgaagatctcgaaggatttcataggaactttatattgctgttggaatatctggagccatccaacatttagctgggatgaaag

SEQ ID NO: 285928 - DNA, 100 bp, Homo sapiens
acccccaatggagagattcgggccagcgagattgtgtgcctggcagtgccccctcctgacacccatggttcccgaggagagatggatgccgcgtcccctt

SEQ ID NO: 285929 - DNA, 88 bp, Homo sapiens
aggacccactggaagcctagaaatgagtgcctggaagagctgggatgtctggttgagtcctatggcatgaatgtttgccaaccaaccc

SEQ ID NO: 285930 - DNA, 74 bp, Homo sapiens
aaggagacaagtgtcacagcctggttggaaaacccaagatatttatcattcagaattaaggaagttcactggag

SEQ ID NO: 285931 - DNA, 83 bp, Homo sapiens
gacggagggaggagggaaggagatgaacgagattaagacccaattcaccacccgggaaggtacatgtcccagagcaagcacac

SEQ ID NO: 285932 - DNA, 100 bp, Homo sapiens
gtctactgggctcagcgacaccgcgagctatatctgcgcgtggagctgagtgacgtacaggaggaggaagccaagaatctggtgagcgaagccatcgcag

SEQ ID NO: 285933 - DNA, 100 bp, Homo sapiens
atttcgatctccgccctggggtcattgtcagtggccataaaatgcagtaaaaacaaatccagttcccaagaagctgtacaaatgctttcttctgttcgac

SEQ ID NO: 285934 - DNA, 83 bp, Homo sapiens
cttcgcccggctttgcagcggggacttcggcggcggcgcctcaggcacctcggcccgggtggtagctgagcacccagatgctt

SEQ ID NO: 285935 - DNA, 74 bp, Homo sapiens
gagcagatttacaaactggccaagaagggccttactccttcacagatcgagatggaatttcaccgtgttgccta

SEQ ID NO: 285936 - DNA, 98 bp, Homo sapiens
ggcgctggagagggggcgctgagctgttgggactgaacattcttcacgatctgaaaggaaaagaagagattctttcgggatgtttgacggttatgata

SEQ ID NO: 285937 - DNA, 100 bp, Homo sapiens
tcggtacagtctctgcacctcgcgccccagcaggttttgggacttggcttacccagaaaggtcctatgttgttgcaggaagtactagttccccatctgtg

SEQ ID NO: 285938 - DNA, 141 bp, Homo sapiens
gacgggctgcaggcgggggtgctgcagaggacacgaggcggcgggctggagacatggaccgcggcgagcaaggtgctggagaatctggtaaaagcaccattgtgaagcagatgaggatcctgcatgttaatgggtttaatg

SEQ ID NO: 285939 - DNA, 75 bp, Homo sapiens
cggccggcagggtggacggtgggctcacttaattcagtgcacaaatgagatgaatgtgaacatcccacagttggc

SEQ ID NO: 285940 - DNA, 75 bp, Homo sapiens
agggataggagaaggatgtggactgcagtgctgcagtgccagggtaagcttgatgattaccaggaacgaatgaac

SEQ ID NO: 285941 - DNA, 90 bp, Homo sapiens
gtggcggcagtcggatagacaataccacaacaacacattttgcagagatgtgtatatctcatgattgatatggagaaactagtcatgggc

SEQ ID NO: 285942 - DNA, 100 bp, Homo sapiens
tgcagatcggtgacacagttcacatcctggagatgtacgagggcaccgaccgtcacgagctaacttcctggaagagctttccgtctattttcaaattctt

SEQ ID NO: 285943 - DNA, 50 bp, Homo sapiens
cggagcttcgccaaggctggcgcagtcgagttctccggggtgctgcacca

SEQ ID NO: 285944 - DNA, 100 bp, Homo sapiens
tctgcggtggcggtttggggtgggcgccgccgaggtgaggtcgtctcgcctcccgcgcgccggtagggctacttctacaagtccgaacagccagtccagc

SEQ ID NO: 285945 - DNA, 144 bp, Homo sapiens
caactggcagaaggattgctttctcattatttgccagatctgcagagatcaaaacaagccctccaggaactcacacagagctcggatagagagtccagccttttctactctcaggggctgtctaactgatggtcaggaagaact

SEQ ID NO: 285946 - DNA, 90 bp, Homo sapiens
acactatgaatgctacttggatgcctcttaagcacacttcatagctgccacgatatagttttacgaagaagttacttgggaagttggggc

SEQ ID NO: 285947 - DNA, 50 bp, Homo sapiens
ggccccagccccatggacctccgagcagaccatggtgaatccgggcagca

SEQ ID NO: 285948 - DNA, 75 bp, Homo sapiens
tgggaaccaagaggacccacacaggtcgggcccctcggggccgcgtggccaatcagatcccccctgagatcctga

SEQ ID NO: 285949 - DNA, 83 bp, Homo sapiens
agatcatccagcacctggcaggacacaatgcagatcttcgtgaagactctgactggtaagaccatcaccctcgaggttgagcc

SEQ ID NO: 285950 - DNA, 99 bp, Homo sapiens
caaggacagtgaggagctgggtggtcccagcctggagctgtgccagcctgacatgggacatcctttgccattcaacctctgatttgcacaaggtgacta

SEQ ID NO: 285951 - DNA, 90 bp, Homo sapiens
cttcatgtgtctcttctaagctgaataaagctgttttggaactgtcaggtacctcaaagcggcaagttaaagtcttcagagccctgtata

SEQ ID NO: 285952 - DNA, 100 bp, Homo sapiens
aaaccgaaaaagatgggccacataaagccagacttgattgacgttgacttaatcagagaattgatgtgactgaagtgcaaatcttcataataatcatgca

SEQ ID NO: 285953 - DNA, 90 bp, Homo sapiens
aacactaaacagtggaacactacagacatttgagattcttcccgtaacaagaatgtggtaaccagagagcacttggaccgtatgaagaat

SEQ ID NO: 285954 - DNA, 110 bp, Homo sapiens
ggcggccaagcagccaaccatgctcaacttcggtgcctctctccagcagactgcggctgaccccgcactacatctacccaccagccatcgtgcagcccagcgtggtgatc

SEQ ID NO: 285955 - DNA, 100 bp, Homo sapiens
ggggcggactccagaacaaccactggagacgagttgtactgctgtcacaggaaatggacgctggattacaagcatggcagctcaggcagcagaagttgca

SEQ ID NO: 285956 - DNA, 141 bp, Homo sapiens
ggaatttgattttgatgatgagccagtgacaccaaaggactccctgattgaccggagacgcaccccagactcagatgccactgcatcatcagataacagcgagacggaggggacacccaagttgtctgacacaccggcccc

SEQ ID NO: 285957 - DNA, 100 bp, Homo sapiens
tcaggggccgtccccaggacactgtccggatcttccctccctgatgtttctttctcagcaaaatagaggagaagcttacccctcttccagaagataatag

SEQ ID NO: 285958 - DNA, 100 bp, Homo sapiens
aatagttccctttcgagttgcagcttacaacaagaaaaagaagcgtatggactactatgactctgaacagttttgcgtgtgaagctgtgtggaaatgtga

SEQ ID NO: 285959 - DNA, 136 bp, Homo sapiens
ttgtcaactcgtacctgagcctcttctacatcggtttctacctcaaggacatggagcgcttgaaagaggggctgaggaagctgccctcgaaaccctccagaagacatctgtcctgcagaggccctaccactgcgag

SEQ ID NO: 285960 - DNA, 50 bp, Homo sapiens
ggagtcttccatcaatcatatctcacagggctgctcttcacctatcgtgg

SEQ ID NO: 285961 - DNA, 90 bp, Homo sapiens
ccccgacatcttcctgcacatctctgagattttggcattagagaagctcggtgctgtcttcaatcaagtagccttcccactgcagtacac

SEQ ID NO: 285962 - DNA, 75 bp, Homo sapiens
cggagttgtagccatgccctaggtacactgaggaggggacggctccgtcttcacattgtgcacagatctgaggat

SEQ ID NO: 285963 - DNA, 101 bp, Homo sapiens
aaggatgtgatgccagaggtcaacaaggttctggacaagatgaagtctttctgccagcctagagtcctggggagcttctgtccacctgtcctgcagaggag

SEQ ID NO: 285964 - DNA, 76 bp, Homo sapiens
atgtctgatcccttgctcccatccctgcagcatgaacaagctgatgttctaatcatgtcagataaagatgatattg

SEQ ID NO: 285965 - DNA, 75 bp, Homo sapiens
cccgtacttgaagccctacgccgtggacttccagcgcagatcacaaaatttgtccaggatagacatagagctaga

SEQ ID NO: 285966 - DNA, 113 bp, Homo sapiens
gcgtcgagaagggcgactactacgaggcgcaccagatgtaccggaccctgttcttcagggcgtgatggtgggcatgggtcagaaggattcctatgtgggcgacgaggcccaga

SEQ ID NO: 285967 - DNA, 90 bp, Homo sapiens
tggtggcaggctgtggccatcttcaccgtgtacctgggctcgagcctgcacatgaagattttgcctgcctgagctcctctagtagtggcc

SEQ ID NO: 285968 - DNA, 110 bp, Homo sapiens
tcagagattgcttcgtgactggaaagtgggaagatgataaagatgcagccaaggtcttagcagaagatgattctggaacttttcaaagcctgactctcttcttgaaacag

SEQ ID NO: 285969 - DNA, 83 bp, Homo sapiens
ggttcctgctgtggttttgatcatgttgttaccctcggacgtagcccggcttgtattggatgcggcattccaaaagaactcac

SEQ ID NO: 285970 - DNA, 83 bp, Homo sapiens
gaggcgacgctaagttgctgatcgtggcgggacccagacatggagctgcgggaagaagcctggtctccggggccgctggattc

SEQ ID NO: 285971 - DNA, 100 bp, Homo sapiens
gagaaagaaaatgccgaaggcactcagacaggttctaagctggtctatgtccatcaccttcttggagaaggagcctttgcccaggtgtacgaagctaccc

SEQ ID NO: 285972 - DNA, 74 bp, Homo sapiens
ggaagctgttttgctccttaagaaacttaaagcctggaatgatatcaaaaaggggaactttggcgaagtgttca

SEQ ID NO: 285973 - DNA, 150 bp, Homo sapiens
aacaccttcaggaaaactcgtgtccatcaaaatccagatgctggatgacacccaggaggcatttgaagttccaggtaatgccctgtacttcaagtctgccagaaatgttacagtgaacattctcaatgaccagactaaagtgctaactca

SEQ ID NO: 285974 - DNA, 105 bp, Homo sapiens
ggaaggcggtgaccaagacgctgcgggagcccggcgccggagcccaagaatccacattcatctcaatggaaggatcctgccttaagtcaacttatttgtttttgc

SEQ ID NO: 285975 - DNA, 74 bp, Homo sapiens
gcaccgcggatctggggccgtcctcagtgtgctggaattgatgttcgtctgtgtgatgttggtgaggccatcca

SEQ ID NO: 285976 - DNA, 76 bp, Homo sapiens
ggccggaaggaacagacccctgtagcgggttgcttctagaactgctggagttactgtttgacaagtttaatgctgt

SEQ ID NO: 285977 - DNA, 90 bp, Homo sapiens
ggcctacccgggatacggaggaggggttcgccaagcagcttttcagtctctgggacctttcatatctacttttgctaatccatctagctc

SEQ ID NO: 285978 - DNA, 50 bp, Homo sapiens
ttccgccctaatggaggtctccagtttcgtcgtccctggggatgagccca

SEQ ID NO: 285979 - DNA, 99 bp, Homo sapiens
tttacagcctcagctgcggcaagtcccttcctgagaaacaaagggtcatcctttctagaaagagaaccgctgtgctatcaggagggaaataatccaagt

SEQ ID NO: 285980 - DNA, 98 bp, Homo sapiens
ttctctccttgaatccactcgccagcccgccgccctctgccgccgcaccctgcacacccgcccctctcctgtgccagcggtcttgcgagtggctggtt

SEQ ID NO: 285981 - DNA, 109 bp, Homo sapiens
aaaagttgatgggaaaaactaccaagactcgaggaccaaaggtttcccaggcagctgcagacttgaaacagttctgtctgcagaatgctcaacatgaccctctgctgac

SEQ ID NO: 285982 - DNA, 75 bp, Homo sapiens
caatgatatacagctgttgcatatttgtgtactgcattctctctgccacgcctggtcgatctggactggagagtg

SEQ ID NO: 285983 - DNA, 100 bp, Homo sapiens
gaaggagttcgtgtggaacccgaggacgcaccagtttatgggccgcaccgggaccagctggggtccctgtccttcgaatggtggaaggtgataccatcta

SEQ ID NO: 285984 - DNA, 75 bp, Homo sapiens
attgtccaggcctgcagaggtggtgaggtccagagatatatccagagaggagtggaagggctcggagacctacag

SEQ ID NO: 285985 - DNA, 74 bp, Homo sapiens
ctcgacctgctaacagaactggaccttttcgtctatccttcactggagtctgatgatgatgaccctgctttgaa

SEQ ID NO: 285986 - DNA, 90 bp, Homo sapiens
tgcagaggggattcaacttcaatttttctgcagtggctctgggtccagccccttacttaaagcactctggagtctccttgaaccagaacc

SEQ ID NO: 285987 - DNA, 78 bp, Homo sapiens
cactggacctccaaggaagccacgtgcagacatctacaaccttcgatctcctgacgaatgccccctaaaaagggaggt

SEQ ID NO: 285988 - DNA, 146 bp, Homo sapiens
atcagttccagttgtgatgcagtgggtgtctacacacttctgatgacacctttattttaaaagctgatgttccaagggtttgtgtttagtgaatcagagggatctgcattagaacagtttgaaggtggcccctgtgctgttattgc

SEQ ID NO: 285989 - DNA, 90 bp, Homo sapiens
ccggagtgagcggagtagcgagtcggcaacccggaggttataaacaacttgtgaaatgagtgatttggaagatgatgagacaccccagct

SEQ ID NO: 285990 - DNA, 50 bp, Homo sapiens
ctgccccaaagtcttagaactggtgtttgtggccagtcctcacaaaacac

SEQ ID NO: 285991 - DNA, 87 bp, Homo sapiens
gaagcttgaaagacttggtaatggcgacgggtttgcagcctcccgcgacgatgcccctcaacgttagcttcaccaacaggaactatg

SEQ ID NO: 285992 - DNA, 75 bp, Homo sapiens
tacattttctgcttttggtaacatcctttcatgtaaggtgtgcagcaatgacaacaagaccttcgactcttcctg

SEQ ID NO: 285993 - DNA, 75 bp, Homo sapiens
ttgagtgatattgaccatgatggaatgcttgacagagatgagtttgcagttgtggagccgccaccaaaatgcaga

SEQ ID NO: 285994 - DNA, 59 bp, Homo sapiens
tgaaagagtcgaatggtttgttggcaggtcttcccagagtttgctgctgcccattcaaa

SEQ ID NO: 285995 - DNA, 104 bp, Homo sapiens
tttttctcaatacgaggcgcaaggtggactggctgactgagaagatgcatgccagagacttcacagtttctgctctgacaggggcaagtgtccgagtggtgaat

SEQ ID NO: 285996 - DNA, 101 bp, Homo sapiens
ttgctacaaatggaggaggaggaggacgacgacgatggggatatcggacccagatgatgtggtaccagttggccaaagaagagcctggtgttggtgcatgt

SEQ ID NO: 285997 - DNA, 76 bp, Homo sapiens
gagtgctcatctcattgaggagcagattaattttgcacatatctgaagagatggattaagaatgctttggattaag

SEQ ID NO: 285998 - DNA, 98 bp, Homo sapiens
ccaattttaggtggcagtcgcaacccatactattcggacagatggcacagaaaccgctgcgcctttcctgcgacctgaaatacacagaaggagtacag

SEQ ID NO: 285999 - DNA, 83 bp, Homo sapiens
cggcggaggacgcgcccggcgcccctgagccggccgagcggcgacggaccgcgagggctccacgtgttccccacgtttgtggc

SEQ ID NO: 286000 - DNA, 80 bp, Homo sapiens
acccaagtgcattgcctttggaaacgagatgaactgagcgccaatggacaatatcaatgtcttgctgaactgtccaccag

SEQ ID NO: 286001 - DNA, 96 bp, Homo sapiens
tgccgcctaccttgggggctatgagcaatgtgatgctggctggctgtcggatcagaccgtgagggaagtctgggacccccggggccgcccgggctg

SEQ ID NO: 286002 - DNA, 100 bp, Homo sapiens
attcagtgggttactgaaacagcattagtgaattcatctagagaactctttcatttattcaggaagctgtgctgaatggtttggtggccactgaggtgtt

SEQ ID NO: 286003 - DNA, 96 bp, Homo sapiens
aatgagaaaatctccctgctccgcagcgacatcaccaagctggaggtggacgccatcgtcaacgccggtggtcttcaagctgacagagaagctgac

SEQ ID NO: 286004 - DNA, 100 bp, Homo sapiens
caatcacttggcgtgacttcactacttttaagcaaaagactccagtggctgttggacaattatgagacagcagaaggagtgagccttcccagaagcactc

SEQ ID NO: 286005 - DNA, 89 bp, Homo sapiens
caggaactgtcggaacagaaccaaaggctattggatcagctcagcaggatcttagacgaattttacaatgtgaagttctgcatagatgc

SEQ ID NO: 286006 - DNA, 75 bp, Homo sapiens
ccgtgagcctcccgcccaaggagaatgcgctcttcaagcggatcttgagactctgacctgtttttgttggacacc

SEQ ID NO: 286007 - DNA, 75 bp, Homo sapiens
cgtatgcggaggttgggaaggagggcaaggtggtggagattgtgaagaagctggagtctcgccagcggggctggg

SEQ ID NO: 286008 - DNA, 75 bp, Homo sapiens
cacggtcaacgtggacggcttgacagccctgcaccaggattggcagccaccatttgcatgtgatgttgataaact

SEQ ID NO: 286009 - DNA, 75 bp, Homo sapiens
caccagggttcggggaccacatcaacaacgagaactgctggcactgaggactatgaagacctgacccaggccttg

SEQ ID NO: 286010 - DNA, 80 bp, Homo sapiens
cgtgctttcccattttgctcagcgactgtttgatgacgtcccgcaggtggattgtctcattgttagtgctgaatcttctt

SEQ ID NO: 286011 - DNA, 100 bp, Homo sapiens
atgaacatcgacagaaatatcactcatctgcaggccaacagagcacttatggcaaggcatctcgagggggtggcaatcaccaaaacaattaccagccata

SEQ ID NO: 286012 - DNA, 98 bp, Homo sapiens
tgctgcagcagacattacttcaggacaacctcttgggcaggtgcctacaccaactaatgttacaattgaatcctataacatgaaccctatcgtatatt

SEQ ID NO: 286013 - DNA, 90 bp, Homo sapiens
tatttagtagtgaaaccaaatacatcctctaaaagaagttcattatcacacaagcttgccttgcgccatggactggcagccagacgagca

SEQ ID NO: 286014 - DNA, 75 bp, Homo sapiens
tctataagattcttcaaggtggggttggcatcccccacatacggttcctaaagagaaagatgaaatggtagagca

SEQ ID NO: 286015 - DNA, 90 bp, Homo sapiens
ctggcggccggcccctgggaggagtgcttccaggcggccgtgcagctggcgctgcgggcaggacaggtgcagcttcaagcttaggaccac

SEQ ID NO: 286016 - DNA, 100 bp, Homo sapiens
ggggcggcgccaagcgcagggagcccggctgagtggcagcccagatccagacatttaatgtggatgcaccatgccagaccgtggaagatttaacgaatgg

SEQ ID NO: 286017 - DNA, 100 bp, Homo sapiens
aatgctgcaaattaattcatcattagagaaattagatctgggtgactgtgatctgtccacaggtcctggctaccctgggaagagacaagaagtaaatgaa

SEQ ID NO: 286018 - DNA, 75 bp, Homo sapiens
cccatgtgtgttgagagcttctcagactatccacctttggtccagaacacatattacataatggagccgggagac

SEQ ID NO: 286019 - DNA, 100 bp, Homo sapiens
cctcccgctgccgctgccgctccaggagacagtttcaccaggtgatatggatcggacacaaattgagcttaatccgtacctcacatgtgtattttcaggt

SEQ ID NO: 286020 - DNA, 100 bp, Homo sapiens
ttgatgaatatgtggctttggtggatggggtattcttgaaccaggtcatgctccaaattaccaaaagaattggtggagctccatttgaagctgatgagga

SEQ ID NO: 286021 - DNA, 98 bp, Homo sapiens
ggagtccagggctggagagaaaacctctgcgaggaaagggaaggagcaagccgtggtggatccataaagaacccagccaacccgcagagggaggggag

SEQ ID NO: 286022 - DNA, 50 bp, Homo sapiens
gcaagattgccacttgatgccgccaaacacttaattcagtgcacaaatga

SEQ ID NO: 286023 - DNA, 96 bp, Homo sapiens
aagagtgaggagaccatagctgcacagccaggggttggccggagacctacgacatgaatacctcggagcccaagacggagcaggaaagcatcactc

SEQ ID NO: 286024 - DNA, 82 bp, Homo sapiens
gccacgccggcgatggaggcggcggcggcggactggcgggtttactcctggcttgggggcattaggaagcactggaggctct

SEQ ID NO: 286025 - DNA, 90 bp, Homo sapiens
cgacatttccacacccagacccaaagtttgcaacaatcagtcagttgaagactgggatagtttccaagctattttggatcatacctacaa

SEQ ID NO: 286026 - DNA, 98 bp, Homo sapiens
cagaaccaccagcagcccaacggcggcgagcccttccttataggcgtcagcgggggaacagctagcggcaagcttggctgaagaggaaataaaaacag

SEQ ID NO: 286027 - DNA, 100 bp, Homo sapiens
agtgccttaccatgggaagaacgagaaaagattttgtcttccatggggaatgatgattttgaagatgtaactgagtttctggaagaggtcattgaagcct

SEQ ID NO: 286028 - DNA, 99 bp, Homo sapiens
ggctgggccagagcgtggttgctgaccagttgaaaggtacgcatagctgctaaattcatcactcatgcacccccaggggaatttaatgaagtattcaat

SEQ ID NO: 286029 - DNA, 97 bp, Homo sapiens
gaagaccaggaggcagacggggaagaggacgaaggaaccagctcttctgtccagagagcacagggggagttactaccagggctctttggggagccag

SEQ ID NO: 286030 - DNA, 100 bp, Homo sapiens
gaagatcagggatttctggattctctacgggatctcatagcagattcaaatccaatggtaagtcagtaatgttgtatgcagcagaaatgatacctaaact

SEQ ID NO: 286031 - DNA, 82 bp, Homo sapiens
gagctccacgcagttcaacaagggcccctcgtacgggctgtcggccgaggtcaagaaccggcaggttacgggcaggacttga

SEQ ID NO: 286032 - DNA, 98 bp, Homo sapiens
cagaaacacaaagcagcccaaccaaagggcgcacctatgttggcagcatgcctggtcgcatcatcaacggcttgaagactgtgggagtgaacaaccca

SEQ ID NO: 286033 - DNA, 51 bp, Homo sapiens
catgagtcgcttcaagtttatcgggtaagcttgatgattaccaggaacgaa

SEQ ID NO: 286034 - DNA, 51 bp, Homo sapiens
gcctggtcgacttcgccggagactgccagctgtgtgccaaccacgatgcaa

SEQ ID NO: 286035 - DNA, 100 bp, Homo sapiens
caaaaattcttcctgggacacaacgacgacattatcagataaactcatcctgaaagtcgctgttgttctcctgctgagcaagaatggaggccccactggt

SEQ ID NO: 286036 - DNA, 82 bp, Homo sapiens
agagagggaagagattcagccagcacactcctcgcgagcaagactagacgcttgaagcaaagctgccatcccagaagacgac

SEQ ID NO: 286037 - DNA, 100 bp, Homo sapiens
cctcaactgccaaaaggcaatggattcctagaggggagtgcctgcgagcctcgggtgagccttcctggaggagcctccgtctgcttgttcccacaggcct

SEQ ID NO: 286038 - DNA, 100 bp, Homo sapiens
cgcttcgaagccgagaaagcccgctgggaggccgagcgcgccgagttacaggtgagaagccctaccactgcaactgggacggctgcggctggaagtttgc

SEQ ID NO: 286039 - DNA, 75 bp, Homo sapiens
cgcggcgcccctcggcctcggagcaacgagcgcagcgccggtatcaacttgaactgaaggatgactacatcatta

SEQ ID NO: 286040 - DNA, 91 bp, Homo sapiens
tctcaggtgaaaggagcagtagatgatgatgtagcagaagctcggattctgaaggtaattttgagactcctgaagctgaaaccccgatccg

SEQ ID NO: 286041 - DNA, 51 bp, Homo sapiens
ggaacccctggaagcctagaaatgttttcaaaccagaagaactacgacagg

SEQ ID NO: 286042 - DNA, 50 bp, Homo sapiens
ggaatcgtagtcttcctaggagttgaatagctattcagtcagacagaacc

SEQ ID NO: 286043 - DNA, 88 bp, Homo sapiens
cggctcgagcgtggagatgaagcttctggcagaaatgaagatgaaaaaggatttatttcctgttgggagagaaattgctggaattgta

SEQ ID NO: 286044 - DNA, 100 bp, Homo sapiens
gttatgcccaccctccaactttgcgacggaaatgtgtcatcgaaagccaggttcatcatgcctagtggcgtataagaagaccccgccaccggtccctcca

SEQ ID NO: 286045 - DNA, 98 bp, Homo sapiens
agcagcggctcctcaacacccctcgaagagttttgccgaattgacaagcccctgtgtcacagtgaggatgagaaactcagcttcgaggcagtccgtaa

SEQ ID NO: 286046 - DNA, 75 bp, Homo sapiens
gttcgagagaagaaaattttagaagttcatattgacaaaggacacttcacggccatggtatggaagaacaccaag

SEQ ID NO: 286047 - DNA, 90 bp, Homo sapiens
caatggacaccttctaagagtttggcgagtcagtgactgaagcgcccgtccattccaaggatggcgtaggggtagatgagaagctatctt

SEQ ID NO: 286048 - DNA, 118 bp, Homo sapiens
agcgatcaaaaaggagatactttaagcttcgagggcgaacgctttactatgccaaaacggcaaagaattcaactagagggcagccttgtggatggccccgaagcaagcctgatggaac

SEQ ID NO: 286049 - DNA, 100 bp, Homo sapiens
ccaccagtttgcggcaagcaaatcaggacaacagttgatatttctacttggtgtgagcagtttgcaactttttgttcagagcaactggacggggccccct

SEQ ID NO: 286050 - DNA, 74 bp, Homo sapiens
cggcgggtggaccgattgtcgctcggcggcgggagtcgatccaaaaggaaagtcctcggccgtagagattcaga

SEQ ID NO: 286051 - DNA, 100 bp, Homo sapiens
tattggggggccgcccaatgcttgcttggatcagctgcagaactggaaatctactttcttcaatgtgttaaccaatagtcaggcttcagcagaaaacttc

SEQ ID NO: 286052 - DNA, 74 bp, Homo sapiens
atagaggaagaaaagaaggcgtttgctgaagcaaggagaaatatggctggtaatcctggtggacctggacctgg

SEQ ID NO: 286053 - DNA, 82 bp, Homo sapiens
ctcagagagggaagagattcagccagcacactcctcgcgagcaaggtgcccgtggttgacacgagctgtgtccccagctgtt

SEQ ID NO: 286054 - DNA, 75 bp, Homo sapiens
aataatttgccagaagaatactaatttgctggtgaccggggcggttgactgtagtttgagaggctgggacttaag

SEQ ID NO: 286055 - DNA, 100 bp, Homo sapiens
tcgacttgcgtgtgatgttgatcagctgccactgcagagccccgccatggaagacacgccgttggtgatatcgaagcagaagacggaggtggtgtgcggg

SEQ ID NO: 286056 - DNA, 100 bp, Homo sapiens
cttctcccgcagcgacgcggctggcaagactgtttgtgttgcgggggccggacttcaaggagacctgagcctgccatactgagtctatggacagttccac

SEQ ID NO: 286057 - DNA, 100 bp, Homo sapiens
gggagggagttgtcggcgccgcggccgctgcggacggacgctcgcctgccggctgagcagctgctgaaatgggttgcggattgaacaagttagagaaacg

SEQ ID NO: 286058 - DNA, 75 bp, Homo sapiens
gttgagcagcccatcgtgcttaaagaaggggggggccctcagcctcttggccttgaacgggctgttcatcttgat

SEQ ID NO: 286059 - DNA, 85 bp, Homo sapiens
tacagcattgtcccagatatagccgttggtacaaagggtttccaggcctgaggtgcccgccctggccccaggagaatgaaccagc

SEQ ID NO: 286060 - DNA, 50 bp, Homo sapiens
gcatcatccgctatgcaattggggctgtagaagccgcccagctggccgag

SEQ ID NO: 286061 - DNA, 75 bp, Homo sapiens
cagaaatcgaaacagatacagagatgtaagcccatatcatgcatgccccgcggtccagggacaggttcacagcgc

SEQ ID NO: 286062 - DNA, 101 bp, Homo sapiens
ccgtccccagccctgcctctccctgggctctggtttctgagtcccttcaacatgatcctgggaggaatcgtggtggtgctggtgttcacagggtttgtgtg

SEQ ID NO: 286063 - DNA, 133 bp, Homo sapiens
cggggcccggggctccggcgcgcccggtgacggcggagaggcgccccccgcagcaggaatactcccccagttgcaagaggcgcaggaccgtggaagacttcaacaaattctgcacctttgtcttggcctatgc

SEQ ID NO: 286064 - DNA, 50 bp, Homo sapiens
ccgggccctcgagacggggacgattttcgacaatgaagccaaagacgtgg

SEQ ID NO: 286065 - DNA, 88 bp, Homo sapiens
tcattgtttgtcaccacaaaaaggacaggtgtgatgaatgcagactctgctaccattttggctgtttggatcctcctttgaaaaagtc

SEQ ID NO: 286066 - DNA, 100 bp, Homo sapiens
atgtggacgtgcacgggatccacttccgcaaggaccctttggaaggccgggtgggccgaggagctttggttcggagacaggcaaaggagccatgtgtgga

SEQ ID NO: 286067 - DNA, 97 bp, Homo sapiens
ccctgttccaaagcctcctggaccgtccaagaaattcctggtcgggtggcttccagtggtcttcagtctgtcgtgcaccgatgagaactctccttat

SEQ ID NO: 286068 - DNA, 75 bp, Homo sapiens
gaatagactgcatatatattgggattttaaaccgattacaatgaaccaactcagcttcctgctgtttctcatagc

SEQ ID NO: 286069 - DNA, 98 bp, Homo sapiens
agaagcagatggattcgtccttttagttcatgcgggagatggcaggggctggcacatgacagtggagcagaaatttggcctgttttctgctgagataa

SEQ ID NO: 286070 - DNA, 51 bp, Homo sapiens
gatcaagatcaagaccggcgtggtgaagcgaaatctcctttacagacaata

SEQ ID NO: 286071 - DNA, 90 bp, Homo sapiens
gtccgccgcatctacaaaaggaggcacggcctcatgcctctgaagagctggatattctttcgcccagttatggcagacaagttaacgaga

SEQ ID NO: 286072 - DNA, 98 bp, Homo sapiens
tagaccagctcaaggcctttggctatgtcgagatcccctgtgtggccaagaagctggtgtgcggagatgaaggctgaccggttccctgatgtgttacc

SEQ ID NO: 286073 - DNA, 107 bp, Homo sapiens
atgcactaggcctcgctcagggcggctgccccgggacccgcaggaaataatgcaaaaggtgtcccaaggctcctgaccagtgaacaaagatttgagaaagacagcca

SEQ ID NO: 286074 - DNA, 97 bp, Homo sapiens
gaacgattctgagtgaattggcaccaagccttcccagttatcataaccttgaatggcgactagatgtacaggggaccgggccgagtactgcaaggca

SEQ ID NO: 286075 - DNA, 82 bp, Homo sapiens
gcgagctgagtggttgtgtggtcgcgtctcggaaaccggtagcgcttgcagcatggtgcagaccatgaattacgtggggcag

SEQ ID NO: 286076 - DNA, 97 bp, Homo sapiens
gaacactctctgaggaagcccaactcctatgagctcctctctggcagggatggaagcttcctggcgccaggtggccggtggccgaggccgatcccgg

SEQ ID NO: 286077 - DNA, 82 bp, Homo sapiens
tggagatgggcagacggattcatttagagctgcggaacaggacgccctctgatgaggccccgtgtgggccgcggcccggccc

SEQ ID NO: 286078 - DNA, 76 bp, Homo sapiens
taatccacagcaagctcccttatatgtaacacaagtggcaagacagccgggaacccctaccccatccccttattca

SEQ ID NO: 286079 - DNA, 75 bp, Homo sapiens
cttggggccgggctgttcatctacttcaggaatcagaaaggacgcatgctgtttcttagggacacggctgacttc

SEQ ID NO: 286080 - DNA, 90 bp, Homo sapiens
ctgctggttagtgtgctctgagggagggtccgagccagccgctgttttgccggaggagcccctcaggccaatgctgtccagtttcaacga

SEQ ID NO: 286081 - DNA, 75 bp, Homo sapiens
aggccagctcagacctcccggctcgacaggcggcgcgggcggcggaggaccactctctgtggcaccctggactac

SEQ ID NO: 286082 - DNA, 97 bp, Homo sapiens
attttgatgaaggctctgatgtatttcagatgaattgccaagaagatgcttttagaagaaattaaagccaatctttcctctgatgaggatggatctt

SEQ ID NO: 286083 - DNA, 100 bp, Homo sapiens
ccacaataaaagagacctctacttagctcagcaattcttaccttccagaatctggtgatttagaagagaagattgaacaaccaagatgaaaacccctgct

SEQ ID NO: 286084 - DNA, 75 bp, Homo sapiens
ccttcgcggaccgagcctgacggagccggaggctgggagccgcggcggcctgggctgccactggtgacatgccaa

SEQ ID NO: 286085 - DNA, 74 bp, Homo sapiens
tgccgaggagcgggaagagttgctgggaatgacaagggtggacctcaggaattacctcgagggcatctataacg

SEQ ID NO: 286086 - DNA, 100 bp, Homo sapiens
agtggcccggcgatgtcgctcgtgctgctaagcctggccgcgctgtgcaggagcgccgtaccccgagagccgatactattcgttacttgtccttgcatga

SEQ ID NO: 286087 - DNA, 97 bp, Homo sapiens
atcagatggcagacatacatcatttaaagggtcattcctgtcccaatcagctgctctactactgatgacattaaagatgccttcattacccaggcac

SEQ ID NO: 286088 - DNA, 100 bp, Homo sapiens
gtatccggtggtgtccgatggcaagaggttcctgggctctggagaggatatgtttgcatggcaaattgatttcaatggtggggaccgctggaaggtggag

SEQ ID NO: 286089 - DNA, 101 bp, Homo sapiens
agacgatcattctgcaagcaggcaacctgaatacaggtgtgctgggcatcaaggtgaagatcatgctgccctgggacccaactggtaagattggccctaag

SEQ ID NO: 286090 - DNA, 90 bp, Homo sapiens
ctcacggagaagcagtggctaaggtttaaggaagaaatctctaaacgttttaaatcacatactgaccaacttgtgttgatatttgctgga

SEQ ID NO: 286091 - DNA, 100 bp, Homo sapiens
gcagaagcaatcactcagtttcttcctaactgtgatccagatgatcctcacagcttcatcactggtccagctgtaataccagggtacttctccgttgatg

SEQ ID NO: 286092 - DNA, 100 bp, Homo sapiens
atgtgccagtaatgaagatcacaaaatcgcttatgacccttctttgtcttcgcactgtgcaggagaagagaattgggtggacagcaggaccatctacgtg

SEQ ID NO: 286093 - DNA, 83 bp, Homo sapiens
gatcgttttgatggatatatcttccttgacagcaaagacttcattagaggggtggtagactcggaggatctccctctaaacat

SEQ ID NO: 286094 - DNA, 74 bp, Homo sapiens
cttttggttcttacagtagtcggcgtaggccttaggttgattcttcaccacactgaaaccattaggaaaaatcc

SEQ ID NO: 286095 - DNA, 75 bp, Homo sapiens
catcaccagtggcttcgtgaagcccaagctgggatccaggtgaatgatctcctggtggaggtggatggaacaagt

SEQ ID NO: 286096 - DNA, 90 bp, Homo sapiens
ctgggtgcgagtggggaagctgctaacccgacccggattggcgctgaggtggcccgtggggcaggaccgcagctgaatgcacagctagaa

SEQ ID NO: 286097 - DNA, 50 bp, Homo sapiens
aaggattccaagtaactcttatttggcaaggaaacagttactattcttcc

SEQ ID NO: 286098 - DNA, 82 bp, Homo sapiens
gctgcgcaagcacgctgaggagataaagatgatattgagactccactgctaactgaagcagcccccatccttgaagatggaa

SEQ ID NO: 286099 - DNA, 89 bp, Homo sapiens
ggacaactgcaagggggaagtagagagataacaaaagctgctcagagtctcaatgaacttgatttggacacctcccacactgagtcccc

SEQ ID NO: 286100 - DNA, 100 bp, Homo sapiens
cggacggggagctgaacgtggacagcctcatcacccggctgctggagggatgtaaatgaagaccctggagaagatgtggccctcctctctgttagttttg

SEQ ID NO: 286101 - DNA, 100 bp, Homo sapiens
gaggtggcagcgcgagctgggaccagcgtctcggaggcgccgcaggtttgtctacagattttgagcgttcgaagttgacccctgactaagtatactttgc

SEQ ID NO: 286102 - DNA, 98 bp, Homo sapiens
agagacgtcgctgaggggcttgcctgaagcgagggcttgatgtagttttagagaccaatctggcaacaatccgggttctggaagcaatacagaagaag

SEQ ID NO: 286103 - DNA, 75 bp, Homo sapiens
ctggacagcttcctccagggctacaactgctcaggtccagctgtagttcctctggacgttctcgaagatgctctt

SEQ ID NO: 286104 - DNA, 75 bp, Homo sapiens
gtctctgccctggcctgccttgtcaccattgccgcctacctctgctccagactctgtttgctggctacacggaca

SEQ ID NO: 286105 - DNA, 96 bp, Homo sapiens
ctcctacctcctcacggctcttcccggcgctctcctggctcccttctgccccagctccgtctcggcggcggcggaagaatggttgagaccggtgat

SEQ ID NO: 286106 - DNA, 76 bp, Homo sapiens
caagtacctgctggtggagttctgtggaggcctgaattttgatctatgttctacctacatccagctggctgaaagt

SEQ ID NO: 286107 - DNA, 100 bp, Homo sapiens
tcctgccaaaaggaaatgcatctttatgtcagaaacacaaagcagcccaaccaaaggcttgatgattccctgaatcagatccgtaagctccagaggtctc

SEQ ID NO: 286108 - DNA, 98 bp, Homo sapiens
gcctgcggaacgaaagtgaacaggagccgctcttaggcgacacacctggaagcaggaacttagtgatttggcccgtgaccctccagcacaatgttctg

SEQ ID NO: 286109 - DNA, 100 bp, Homo sapiens
ggagggtccgttccgggctcggtgcgactgcgcagctcctcggcgcttcctcggtggcttccccgggtcgagcaaacagatgtatccatttttgcctcat

SEQ ID NO: 286110 - DNA, 100 bp, Homo sapiens
gaatatcctgcagaagaaaatggatttcgttatatcccctttagaatatatcaggttgggggccgtcccgctcctaaggcaggaagatggtggccgcaaa

SEQ ID NO: 286111 - DNA, 100 bp, Homo sapiens
cgaacatcaaagacctatcccagatcctgaaaaagatgccgcagtaccagaaggagctgaataagatcttcgagtacttccgcagagacacagagaagcg

SEQ ID NO: 286112 - DNA, 74 bp, Homo sapiens
cagactccagcagccaagatggtgaagcagatcgagagcaaggtgatctggaaagtgcaccagtgttgagaact

SEQ ID NO: 286113 - DNA, 75 bp, Homo sapiens
atccatggagacaagagtcaaccagaaagagattgggtacttaatgcagctaccaagggggtgccagctggaaac

SEQ ID NO: 286114 - DNA, 90 bp, Homo sapiens
ctttctttggcatgcaagctcctagcatctggcagtggggccaagaaaataaggtacctgagctacaccctgaacccggacttaatccgg

SEQ ID NO: 286115 - DNA, 50 bp, Homo sapiens
gccatcagctatggagataggcagatgagagagattaaacagattctaga

SEQ ID NO: 286116 - DNA, 82 bp, Homo sapiens
ggcatttctgccggagagctttgatggtgaaccctgcggcttcgaggcgacctacctggagctggccagtgctgtgaaggag

SEQ ID NO: 286117 - DNA, 100 bp, Homo sapiens
atgtacgtgaaagtgctcatccaggcctatgagagctacaagaagaaggactacacccaggtggactacttaatcaacgggatgtatgcggactcagaaa

SEQ ID NO: 286118 - DNA, 89 bp, Homo sapiens
gagatggtcaggtctggagctcgaccgggccaggaagctgcagtaaaggaagatgaagaagaagtttcagataagggcagtgattctga

SEQ ID NO: 286119 - DNA, 51 bp, Homo sapiens
ggcttcttttggaagttcgagcccagggacttgccatgaggtgttgaagcc

SEQ ID NO: 286120 - DNA, 115 bp, Homo sapiens
gaacttgtgaaaaaattcaaagtcgaatatcatgctggtggctctacccagaattcaattaaagtggctcaggcaatgaatcgctccctggctaatgtgattcttggaggctatg

SEQ ID NO: 286121 - DNA, 100 bp, Homo sapiens
cctgacgaagagccttttgtgaaggctactttgacgcacacgctcttgccatggacttcatgagcataggattccgagagtgcctaacagaagttgcgcg

SEQ ID NO: 286122 - DNA, 76 bp, Homo sapiens
gaagacaaagtcaattccattgctcaagtaaagctctttgtgacagggcttttcagcttaaatcaagatattcctg

SEQ ID NO: 286123 - DNA, 90 bp, Homo sapiens
cgaggctgatggagcgaagccaggaagaggatgcggagacgcgggccttcatcccgcgtggagtctacccccaagcccttctcctcttcc

SEQ ID NO: 286124 - DNA, 75 bp, Homo sapiens
ccaagatgtctctaaatgagcgggctctggtatcagttcctcttcagtattgcatggcatggtttttaagaagga

SEQ ID NO: 286125 - DNA, 83 bp, Homo sapiens
ctggactcggattcgttgcctgagaatgatatggaacctagcaaagctgttccactgaatgcatctaagcaagatggacctat

SEQ ID NO: 286126 - DNA, 100 bp, Homo sapiens
acccaagatgaagatgctgttagcctttgcagtctcgacataagtgaactgtggaaggtgcatcagtgaagaaatggaccaatgtgtataatcatggaat

SEQ ID NO: 286127 - DNA, 75 bp, Homo sapiens
cggtttgtaggtcgtcagaaagaggaggccactgtctgcagctcccgtgaagatgtccactccagacccacccct

SEQ ID NO: 286128 - DNA, 100 bp, Homo sapiens
cgggctgcaagcagtcttccaggctttgcggctgccaaaggaataattgagacgtctgagttgagcaggtttttcccactcggctttcacgtttgggatt

SEQ ID NO: 286129 - DNA, 109 bp, Homo sapiens
gttagacttgtttcttatatgtgatgccattccagcactggactcatggaggctgagcatttattcagatcctgactttaaggaccttggagctttgaaaccattacca

SEQ ID NO: 286130 - DNA, 100 bp, Homo sapiens
atgaagagctcccccgaggtgtccagcatcaaccaggaggcgttggtgctcacggccaaggccacgtcctggagcttgaaaatctgccgcagaatggccg

SEQ ID NO: 286131 - DNA, 82 bp, Homo sapiens
gaaaatgacggttataagaccatttatttctttggagacaaaactatgccaagacaagaggagcagcagcggcaccgcccct

SEQ ID NO: 286132 - DNA, 130 bp, Homo sapiens
gcgagcttagtcctgggagccgcctccgtcgccgccgtcagagccgccctatcagtcacctgaagaaactgataaagagaaagttcacctctctgactcagaaaggaaaatggacccagccgaagaggat

SEQ ID NO: 286133 - DNA, 145 bp, Homo sapiens
gcccgtccccccaggactctccccgcctctccagcttcacccagcaccaccggcccgtcatcgccgtgcacagcggttcttacatccccgcgtccccaggtttagcctgagcagggttgtggaaggccgggacccattgacagca

SEQ ID NO: 286134 - DNA, 75 bp, Homo sapiens
ctgagtttgtagaaaaacggagagcagctcttgaaaggtatcattaacccaattgaagccaagcagagaaaggga

SEQ ID NO: 286135 - DNA, 83 bp, Homo sapiens
gcccagcagcacaacacagggaagcttggggagttgatattcactgatggactccaaagaatcattaactcctggtagagaag

SEQ ID NO: 286136 - DNA, 75 bp, Homo sapiens
tcttcttaataccctggcccagatccacaaggggctgtgtggccagaggcggggtttcaccatgttgcccagact

SEQ ID NO: 286137 - DNA, 99 bp, Homo sapiens
gcgaggccgggcggcgcttctgtcctcctactcggacccgcagaaatcatcctcatcctttgataactgtgcttgaacacagacctgattgctggccag

SEQ ID NO: 286138 - DNA, 100 bp, Homo sapiens
tgttgcgatggcgcagaaaccccgttgacaaggcactgctttttcatgacggaagatgatccctatgatcttgaagatgtttctgcacagaaatgaggga

SEQ ID NO: 286139 - DNA, 98 bp, Homo sapiens
ttacgcgcacgttggaaccgaagagagctctgttgttgcagcccttctgcagaaaaatgtagagtgtgcccgtgtgtatgccgagaacgccatccgca

SEQ ID NO: 286140 - DNA, 50 bp, Homo sapiens
caagagcccacggacaccacctcaacggatatggctttagttgcccctga

SEQ ID NO: 286141 - DNA, 75 bp, Homo sapiens
gggcaggtcatgagtcaccatggttgaaatcacaaagattagacacctttttagataggtgttcttcagcaccac

SEQ ID NO: 286142 - DNA, 75 bp, Homo sapiens
ctgagctgtgcaaccaatcagagtccagtggagaaggtaaccaaggagcagtgaacagcagctactacagtagtg

SEQ ID NO: 286143 - DNA, 98 bp, Homo sapiens
gcaatctacagtcctggcctgaggaaggaacagtatgagttctgctacaaggtggtgcaggagtatattgatgcattctcagattatgccaacttcaa

SEQ ID NO: 286144 - DNA, 103 bp, Homo sapiens
acagcgttgagctggacatttttctggctcaagccatgcattttacagttgaggatgctcacaactgtattcctgagctggacagtgagacagccatgttttc

SEQ ID NO: 286145 - DNA, 90 bp, Homo sapiens
ggcaggtggccgagagtgggtgtggaggaggaagactggatgccaatgatcctgtacctggactatgccagagtccccaatagcaatccc

SEQ ID NO: 286146 - DNA, 98 bp, Homo sapiens
taaagctgctggacaacaccatggaaatatttgacattgaggtgctggagaatctggtaaaagcaccattgtgaagcagatgaggatcctgcatgtta

SEQ ID NO: 286147 - DNA, 82 bp, Homo sapiens
aatccgagaagagcagagcggagggagccccagacacgctggtcagtgagaaggtcggaggggccgaggggaccaagctgga

SEQ ID NO: 286148 - DNA, 75 bp, Homo sapiens
acaaggaggtgaaggacaagctcctacaaggcaggcagtattgggtgcagggcattcttagcagggttacagaat

SEQ ID NO: 286149 - DNA, 100 bp, Homo sapiens
gctgcgaccccgagggaagatgaacgggacgcggaactggtgtaccctggtggacgtgcacccagaggaccaggcggcgaggctgacccgcggctgattg

SEQ ID NO: 286150 - DNA, 98 bp, Homo sapiens
gcaatatttattgctgtcattattctcagtggaggcccagttctggtgatgatttcacttttgacagaagctgtccctcaaaagcaaacatgcaatag

SEQ ID NO: 286151 - DNA, 80 bp, Homo sapiens
aggagatgcctggcagccccgctctctgcactccggtgtcggcgggtggcgcggcgcccccggagggggccatatctaac

SEQ ID NO: 286152 - DNA, 75 bp, Homo sapiens
gacttagcttcaaagaaggcaatcaggaagattatgataaatatggaattcgaattagagtcaaatttcgaagta

SEQ ID NO: 286153 - DNA, 88 bp, Homo sapiens
aagtacgaggagaatcctgggtttagccattgagagagaaaaggaacagttccgtaagctctttattggtggcttaagctttgaaacc

SEQ ID NO: 286154 - DNA, 98 bp, Homo sapiens
cctacatgaggcttgatggctcatccaagatctcggagaggcgagacatggttgctgattttcagaacagggtatttagagaaattcaatcagagacg

SEQ ID NO: 286155 - DNA, 100 bp, Homo sapiens
agccaccggaggagcagctcacctgagagacggagccccggctcgcccgtgtgcagagatacctcttctggctcagaagatgaaggctcagtgcaggggg

SEQ ID NO: 286156 - DNA, 100 bp, Homo sapiens
ggcatttacagaaagagtcaacagcagtggcaacagctcaaactggaggattataaggatcgcctgaaaagtggagagcatcttaatccagaccagttgg

SEQ ID NO: 286157 - DNA, 82 bp, Homo sapiens
tgacggagatggtgcagaagatggaggaggtactggctgtgatcgaacttctcaaccctcagagacttagatcttccacctc

SEQ ID NO: 286158 - DNA, 82 bp, Homo sapiens
gcagaagtcgcgtgtctaggtgagtcgcggtgggtcctcgcttgcagttcagcgaccacggagtgcgccggtctcggggaaa

SEQ ID NO: 286159 - DNA, 82 bp, Homo sapiens
tctggttgctggatttgacccactgattctactgtgcaattcttgacccaagaaactcgagagatcttacatttccactata

SEQ ID NO: 286160 - DNA, 140 bp, Homo sapiens
aaaagccctgtcacagctgtctctgccagtgaaacctcaggtgatattgctactgtgtgtgattcagctccagggtttgagccacaatgtgatcttcaccttggattctttgttaaaaggagacctaaagggagtcaaag

SEQ ID NO: 286161 - DNA, 75 bp, Homo sapiens
cgcagattacggaacattactccacctgtatcaaactgtccactgaaaatcctgtcttagaagtgatctgctccc

SEQ ID NO: 286162 - DNA, 82 bp, Homo sapiens
gctctccagcgctctcagcaccaattggcctctacacctccatcttcggcgtgctccagctgctgtgcctgctgacggcccc

SEQ ID NO: 286163 - DNA, 100 bp, Homo sapiens
cgaagatggcggcggccgccggcgggccgtgtgtgagatggctcggactcaaaagaacaaggccacagcacaccacttagggctgcttaaggctcgtctt

SEQ ID NO: 286164 - DNA, 100 bp, Homo sapiens
gccttcgtacacatggagcgggcagaggatgcagtggaggccatcaggggccttgataacacagagtttcaaggtcctaggcctacttacaagcctccag

SEQ ID NO: 286165 - DNA, 82 bp, Homo sapiens
atagacattcattatggggttaaatccaatagatgaagctactgaatctttacatcaaacgtgcacaaacaggttctggagg

SEQ ID NO: 286166 - DNA, 95 bp, Homo sapiens
tgcaccctgcagttccaggagctgctgcgcacgaccggcgcctcggacaccttcgagggttgggctacgagggccccggttcggtgctggtgtcc

SEQ ID NO: 286167 - DNA, 100 bp, Homo sapiens
tctacaagctgagcggccccgacgacgaccccctgcacaagcagccccgcttctgggctagcatgatggaggcagccagatgctggatgagtactttgag

SEQ ID NO: 286168 - DNA, 97 bp, Homo sapiens
tattgaagacctagatgaaaatcagctgaaagatgagttttttaaacttctgcagacatccagctctgtcacccaagctgcagtgtggtggcatgat

SEQ ID NO: 286169 - DNA, 90 bp, Homo sapiens
agtgtaggcggcagaggattcgctcccagagcagctgcggccaggagccaaaaacctgtatatcatctccgtgaaggggatcaagggacg

SEQ ID NO: 286170 - DNA, 100 bp, Homo sapiens
gccccgccgcggccatggaggacgagcggaaaaacggagcctacggaattgaatgatctggcacgggaccctccagcacagtgttcagcaggtcctgttg

SEQ ID NO: 286171 - DNA, 82 bp, Homo sapiens
agatgatgagtcggtggcagagatcaatggaaccatgaacgcctgaagctgcccagcaggcattccaaggcctgggtcctgg

SEQ ID NO: 286172 - DNA, 98 bp, Homo sapiens
gcgccatttgccagtgatggaccgtgctagtgacctgactgatgccttcgtggaggcacctgttcaccgaagttgaggctggtcacaactccggcggc

SEQ ID NO: 286173 - DNA, 75 bp, Homo sapiens
ctattctttacaactgtacccggacagcgaccgtcaagagaactctaatgaatcattgattgaccagcactattt

SEQ ID NO: 286174 - DNA, 75 bp, Homo sapiens
acggagactacttgtgtgtgaaagtagataggactccgaaaggcacccaggtgtggaaccactttgacagcggtt

SEQ ID NO: 286175 - DNA, 83 bp, Homo sapiens
cgccttcctcaacgacgcggacatggtcatgagctttgtgaacctggcaaacggggattcagcgtccgatcctttggaacagg

SEQ ID NO: 286176 - DNA, 109 bp, Homo sapiens
ctcccggagggagacgcgctgccgaggagaacccagcgggacagagcgggatgccaccagcttgtccaaagggaagttccaggagctcctggtgggcatcgttgtggag

SEQ ID NO: 286177 - DNA, 98 bp, Homo sapiens
cagcggcctggggacccagcaaggtttggagcaggtatgttaagaagttaggggattttgctaagccggagaatattgacttggccgtgcagtgcctg

SEQ ID NO: 286178 - DNA, 98 bp, Homo sapiens
atgcagattatatcgcatcctatggctcaaagaaagatgattatccttccttgaatccagaagctggcaaacagcatcagccatgcagacctattggg

SEQ ID NO: 286179 - DNA, 100 bp, Homo sapiens
agagaagtgactttagttcatgtgacagactggatagagaagaaactggagcaagagtttcagcctctaaagagagcaatcactacacttatggctggga

SEQ ID NO: 286180 - DNA, 50 bp, Homo sapiens
cagaaattctggaacacctatatggttcaatttcagaagcttcagcaact

SEQ ID NO: 286181 - DNA, 100 bp, Homo sapiens
cacctgaaagtggtcacagccgcatctttgaaggtgaatcaggtctaggaaaatcgactctcataaacagcctattcctaactgatctgtacccagaaag

SEQ ID NO: 286182 - DNA, 97 bp, Homo sapiens
gggcctgtggactgcagcctcggcggtcagcagatgaaggtcaccgtgtccaaagggggcgaccgggacagtgacgacgacagcgtcctcgaagcca

SEQ ID NO: 286183 - DNA, 75 bp, Homo sapiens
gcggacatcactttagaccctccacctaattgcaggtttctttacctccagaaagaagaatattggccccttgaa

SEQ ID NO: 286184 - DNA, 100 bp, Homo sapiens
tttcctcccccagctccagcctctctcatcttgggaatctgcgtcagaagtcactcgcagtcccgtcagcccagggaggcttgtggatcagaatctgaac

SEQ ID NO: 286185 - DNA, 75 bp, Homo sapiens
ctcagcgtggtctgcctgctgcactgctttgtggatgattcaacagccacacaaagcagcaacattttttggatg

SEQ ID NO: 286186 - DNA, 76 bp, Homo sapiens
gatgagttgacaccttttgacatgagcatccagggtgtacaactatgagcctttgacacagctcaagaatgtcaga

SEQ ID NO: 286187 - DNA, 100 bp, Homo sapiens
cctcccaaggagctgggacctcaggagaatcttatttatactgctgatccagaatcctttgaagtaaatacaaaagatatggacagtacattgagtagag

SEQ ID NO: 286188 - DNA, 105 bp, Homo sapiens
tgacaattctcatctgaggtccatgccagcaagcttccttcctccttcatcagtgaagaaacgaggaatggtctgccgaaaaccgaccgacccggttgattggcc

SEQ ID NO: 286189 - DNA, 100 bp, Homo sapiens
ggagcattaccacctcagccaccctgaccactatcatcaccatggaaaaagtgacttgagcaggtgaccattgtgaggtagatattttgttctaattttc

SEQ ID NO: 286190 - DNA, 100 bp, Homo sapiens
gtggcaaacgccctctccgccgtcatggcccggcatcggaatgttcgaggctataactacgatgaaggaaagaacatggcctgtgtgcagcggacgctga

SEQ ID NO: 286191 - DNA, 83 bp, Homo sapiens
gtcaggccagaacttcagcaccctggctgagaagcattgtcccagatatagccgttggtacaaaggtaggcacttctcacttt

SEQ ID NO: 286192 - DNA, 100 bp, Homo sapiens
gacgagctgaccctgggagacatcgacggaactgctgctggagtttgaatcgaaaatgcggaagagggagcacgaattccgtctgcaggctgacaacatg

SEQ ID NO: 286193 - DNA, 96 bp, Homo sapiens
ggccgtccaaaatccaccaaagaaagtgacctctgagaaagtgagccagaaacatgctgagcctttgacagttaatggagaatcatcctcatttgc

SEQ ID NO: 286194 - DNA, 100 bp, Homo sapiens
ataatctgtacactctctgctattgtctgctgcatccaaatcttctccctggacctcgtgcatacgttccaagatgagatgggattctccaacatggaag

SEQ ID NO: 286195 - DNA, 100 bp, Homo sapiens
ggagaatgacaagagcttccgcggtgtcattctgacctcgtgtcaacagcatctccaccctggagcctgtgagccggtgccagcgcctgagtgagctgta

SEQ ID NO: 286196 - DNA, 50 bp, Homo sapiens
gtggacccgtaaaataaaatgggaagtgggaaaactcttgcctttgccat

SEQ ID NO: 286197 - DNA, 75 bp, Homo sapiens
attgaccattcctgatgggggcgtgcatattgtagggggtgaactgggatgaaatctttgacatggtaaaaccaa

SEQ ID NO: 286198 - DNA, 83 bp, Homo sapiens
cagtagacaaaaattcacgtgagactaaatgtgttaaatgggcttgccaacaatatggatgatttgaagataaacaccgatat

SEQ ID NO: 286199 - DNA, 100 bp, Homo sapiens
ccgggaactccccatcgcgttttgccagcgataatacgcctcagatgatccagtattcctggaagaagcagggaaagcagaaaaaattgtgatttccaga

SEQ ID NO: 286200 - DNA, 100 bp, Homo sapiens
aaacagacttcaaagttatggcaagagatgagttaattctaagttttactaaagggaggaaaaagagaggaagagaaaccatttagagactgtgcagatg

SEQ ID NO: 286201 - DNA, 114 bp, Homo sapiens
aagaccgcgcgcagggcctgcagcgggagctggacggcgagcgcgagcggcgcgagaaagttatggaaacaaaggacatgctttacatcgtcactgaatttgctaaaaatggag

SEQ ID NO: 286202 - DNA, 71 bp, Homo sapiens
atgtgatgcctgctagccaaaagggcttgtgacaaggactcccaatgtggtggaggcatgtgctgtgctgt

SEQ ID NO: 286203 - DNA, 82 bp, Homo sapiens
ggctactctgcctcggggacgaaagcagcccagacttggagctgaagaagctggaaacatggaaacaccaacagctacagac

SEQ ID NO: 286204 - DNA, 100 bp, Homo sapiens
gacgcgctcactgttcaagggaaacttttggttggggaatggcggtcaatgtgtattctacctcgataacccaagagactatgagcagacatgacatcat

SEQ ID NO: 286205 - DNA, 85 bp, Homo sapiens
caaataaaagagccctgcaatttgaagatacatgagacagcagccaaacccccagtgtctcctttcctcttgggccgggcacttt

SEQ ID NO: 286206 - DNA, 98 bp, Homo sapiens
ggccaagcggagggtgcgcgagctctaccgcgcctggtatcgggaggtgccgaacactggcatatatggtgctggttgtctcattacggaaggatgtc

SEQ ID NO: 286207 - DNA, 98 bp, Homo sapiens
agcttcacccgtacaggtagccccgccgccgcgcacctgccttcgctcccgcaccgggtgagtccaaactattccagagttgcataaatttcaaacaa

SEQ ID NO: 286208 - DNA, 74 bp, Homo sapiens
ctcatgtggcctgcggctcctgtcgcctgtagttctctccataaatgaagaagggctaaggcgatgcgaagaga

SEQ ID NO: 286209 - DNA, 100 bp, Homo sapiens
gagaggtggaaacagcggatgattctggaactgggagaagatggctttaaagaatacacttcaagtgtcatggagaaactccagctgggcccagagattc

SEQ ID NO: 286210 - DNA, 100 bp, Homo sapiens
tgggagcccagttggaagcccgggaccgtttaaaaaactggccttcgtcaagatggttggacaccacgtcgccttcctggaagcagacgtgcttcaggct

SEQ ID NO: 286211 - DNA, 100 bp, Homo sapiens
gtggccttagcgatctatattccctttccagaagatgattccaacgccaccaattccaacctggacatggatttgattgacatactttggaggcaagata

SEQ ID NO: 286212 - DNA, 82 bp, Homo sapiens
tactcctaccagtacacggtggccaacaagggcaaggggacgcgagataaggtcctgatcagaatcatggtctcccgcagtg

SEQ ID NO: 286213 - DNA, 82 bp, Homo sapiens
catggctgcggccgccgcctccgcctcccaggatgagctgagtaacttgggtttttactcctgtaacaactgaaataacaag

SEQ ID NO: 286214 - DNA, 75 bp, Homo sapiens
gagagtggcagaggagctggcggagagcggcctgcgggcgatcgggccgagccactgtagtctgcagatcaaagc

SEQ ID NO: 286215 - DNA, 74 bp, Homo sapiens
atggagtcttgtgaaatcgcgtggactgcaacacccagcagcgcgctttgtgtccctggtgatgttggaacatt

SEQ ID NO: 286216 - DNA, 90 bp, Homo sapiens
gtatagctgtggaccaactgtatatgatcatgcgcaccttggccatgcttggacacagagtctgggatctaataattcagtcattttgga

SEQ ID NO: 286217 - DNA, 100 bp, Homo sapiens
cttgtatgagcccattgatgatggttgtgagagccaggtgttctgtgtgggtcagcttgtctgtgctgtgcttgccgattctgaggttcaggcaaagcga

SEQ ID NO: 286218 - DNA, 101 bp, Homo sapiens
agcgcgggggaccgcggcccccagcagagcccgcctgcccggctggaggttcccctgaaggatgctaaggaatacgctgaatccataggtgccatcgtggt

SEQ ID NO: 286219 - DNA, 96 bp, Homo sapiens
aagctgcaggcgcgcctggccgcgaacccggaccctaagaagtttgcctgagaatacagatcaacccacagaacaaagcggatttccaaggcatct

SEQ ID NO: 286220 - DNA, 75 bp, Homo sapiens
gcaagaccaccttcgtcaatgtcatcgcggtgtacacttaaagcgttctgggaatatgaatcccttctgcaccct

SEQ ID NO: 286221 - DNA, 98 bp, Homo sapiens
tgctgctcttcccgctgctgctcttctccaggctctgtgttacagcagatgaatggaacagcaaccatacgatagaaatagagataaatcagactctg

SEQ ID NO: 286222 - DNA, 88 bp, Homo sapiens
tgaagatgacccattatttccacctattgagtgctgggctgtgctgtggagctccctgatgtcagctgcaagcggtttctggatcagc

SEQ ID NO: 286223 - DNA, 98 bp, Homo sapiens
cgtgtgaggtgctggactacttcttgcggcgcctcggctcctcccaggtggcctcccgcgtgctggccatgaaggtggacccaagtggagagattgtg

SEQ ID NO: 286224 - DNA, 137 bp, Homo sapiens
aagagtagctgaggagctggcattggagcaagccaagaaagaatccgaagatcagaaacggactctgtctactagtgacgatgtcgaagacagggaaaatgaaaagggtcgccttgaagaagcctacgagaaatgtg

SEQ ID NO: 286225 - DNA, 101 bp, Homo sapiens
agctgagtgtgatgaagatgcagaaaatgttggccaacatcccatgcaccatcgtggagactggctggatgccctgtgctctatcagggcatgtcagacca

SEQ ID NO: 286226 - DNA, 100 bp, Homo sapiens
ggccacgtgcttcaacgctctgctgcccgctgtgagggaaaagaaccacaccttcatcaagcggtccgaggtggaagaagtggattttgccggctggttg

SEQ ID NO: 286227 - DNA, 97 bp, Homo sapiens
actgggatgatacaccttttccacagggaattgagttggagtgcatcatcgacgaggactgtgggcccagcatgtactgccagtttgccagcttcca

SEQ ID NO: 286228 - DNA, 100 bp, Homo sapiens
taacattccaacacataaaaattatttatccaacagctcctcccagggaaaaaatgcatttttcaaagacctaacttcaattcagttattacctagtggg

SEQ ID NO: 286229 - DNA, 75 bp, Homo sapiens
caaaggaagacttgtaacctggagaagagttttgggaggtcatcagcgatgagcatgggatcgaccccacaggca

SEQ ID NO: 286230 - DNA, 98 bp, Homo sapiens
attggacctacaaatgggagcaaatcaatgccttgggagctgacaatgagagactctccaacatgtgccttctgaccatacaaatgaaacttccaaca

SEQ ID NO: 286231 - DNA, 49 bp, Homo sapiens
ggatggtgtagcaccccgtccagaacttgtctgtgtgtccagaggagga

SEQ ID NO: 286232 - DNA, 101 bp, Homo sapiens
cggcaactgaaaatcgtcgtgctgggggacggcgcctccgggaagagtatctgactgtcttctctcagatgattgcatttcatgatccagagctgagtaat

SEQ ID NO: 286233 - DNA, 75 bp, Homo sapiens
gctgctgaggagaggcggagggaaaaggccgaggagttagcagccagactgacattgagattacacgagaggagg

SEQ ID NO: 286234 - DNA, 98 bp, Homo sapiens
cccagtccctcggacccatcgccgcttctagaccctactgcggtctcggatattgccgggtgctcttacagcctgttccaagtgtggcttaatccgtc

SEQ ID NO: 286235 - DNA, 100 bp, Homo sapiens
catttcccgcactcagctcgtgtatgtggttgcagacctggacaagcttcaggagcaggttggaaaagagactgttcaaaccactgaggatcagattttg

SEQ ID NO: 286236 - DNA, 88 bp, Homo sapiens
ctgaggtccccttgatcatgaactccataaaatccttttctgaccacgctcaatgtggaagactcttggatactaaattgatggccag

SEQ ID NO: 286237 - DNA, 100 bp, Homo sapiens
cccaccggcccaccctacatttagcgcatcatgtgatccggggaggaatgatcaattggaatcgtctttttcctcctttacgtcagcgacaaaacgtaaa

SEQ ID NO: 286238 - DNA, 50 bp, Homo sapiens
cctacctaccaagaactggaacaggtgaaagatattctctcaaaggtcca

SEQ ID NO: 286239 - DNA, 75 bp, Homo sapiens
ggcagagaagaaggtggcatctgagctcccccaggatgtgccaggtctggagaaaatgatgtggaatataacaac

SEQ ID NO: 286240 - DNA, 82 bp, Homo sapiens
gaggactctggagctgacagcgcgcacttcacccgcagttggttcttcccaggagactctgccggccttttccccaccagcc

SEQ ID NO: 286241 - DNA, 75 bp, Homo sapiens
gtccagagctgaggactgcctgtttgcagctccagaggtcctgaacaaccagaggtacggcctgagccccgacta

SEQ ID NO: 286242 - DNA, 101 bp, Homo sapiens
ttatcagcactatttgaaacttttatctcatctggcttggcgcctgaggttctcccattaggtggcttcccacacttctgactcggacgttccttccggtg

SEQ ID NO: 286243 - DNA, 50 bp, Homo sapiens
cggcctcccagagtgcttggattacagatcactttgggaagcagtgacat

SEQ ID NO: 286244 - DNA, 99 bp, Homo sapiens
gctgaggatgaatcaaatcttctcttacctaaactacctacactgccaaaaaacgtttagtcacatcaagaaatagaacagaattcagccatggcccca

SEQ ID NO: 286245 - DNA, 96 bp, Homo sapiens
gcaaatccaagaaggggctgtcctcgtcctccagctgttatctggaagataacgaaggaggcccaacttcattcaataaggagcctgacggattta

SEQ ID NO: 286246 - DNA, 82 bp, Homo sapiens
ctggagcaccactgcagccagaaagcgagagtcaccggcctgagaaggagtggcctattaagagtctcaaagtctacctggg

SEQ ID NO: 286247 - DNA, 75 bp, Homo sapiens
gaacaatgaggcctacgcagagctcatcgtccttgatctttgtggagttcacctctgtgtttgactgccagaaag

SEQ ID NO: 286248 - DNA, 100 bp, Homo sapiens
ggatgaatggggccggctacatgatgtcagagtctgtgggactgacctgaaggagaagaaggagaaggtggaggagaaggcaagccggaaagagcgaaag

SEQ ID NO: 286249 - DNA, 98 bp, Homo sapiens
caaaaagacacttatactatgaaagagactgttgggcgggagctgctgctccatctgattgactatctcgtaaccagtgatggcaaagaccctgaaat

SEQ ID NO: 286250 - DNA, 75 bp, Homo sapiens
gtcccgctcgctgggagagaggtacctctccttttccctctccctttccctaagtatctggagtccatctttcac

SEQ ID NO: 286251 - DNA, 100 bp, Homo sapiens
gtcggtacagtctctgcacctcgcgccccagcagttgaggagctcaagcttgggaaaatggtgtgcattccttgtatcgtcattccagttctgctctgga

SEQ ID NO: 286252 - DNA, 100 bp, Homo sapiens
tggagaatggctggtctcctactcccagatgcatccgtgtcagatggagagcaatacatcatcatctttggagaatttagcgacggcgcctgtgaaccag

SEQ ID NO: 286253 - DNA, 75 bp, Homo sapiens
cccggggccagcggccggagccagacttaattcagtgcacaaatgagatgaatgtgaacatcccacagttggcag

SEQ ID NO: 286254 - DNA, 100 bp, Homo sapiens
gagatgtgatgttggagaactacaggaacatggtcttgctggatttcttcagaggccccacagtatcaaatatccgcctggctggattagagtatgttct

SEQ ID NO: 286255 - DNA, 100 bp, Homo sapiens
cccttctccctggagtaccgagtcttcctcagcataatcaccagcaacacccgggacaataatacgggggccacctacccccacctgaacttcagcattc

SEQ ID NO: 286256 - DNA, 74 bp, Homo sapiens
tcagctgttgcatcttgcttctgagcaaggtagttttgatgggccgttgctccagggagaactgcaaatatctt

SEQ ID NO: 286257 - DNA, 98 bp, Homo sapiens
cgtcctgctacagacagctttgatgactacccacctagaagaggtgatgatagctttggagacagctccccgttccgggatgagatcacactggccat

SEQ ID NO: 286258 - DNA, 100 bp, Homo sapiens
ggcagagtggaccacggggagccccacgagcactgccagtgaaagatgtagaagataaacctgaacaacaaaccagaacaagagagactgacaaatcacc

SEQ ID NO: 286259 - DNA, 75 bp, Homo sapiens
atggaagggaggagactcctgaccctcagaatgttcgatcctttggtacagaagacagaccgacagatcgtccaa

SEQ ID NO: 286260 - DNA, 76 bp, Homo sapiens
tacccgcaaaatcaacaacagtttcctgcgcgaccacagctatgcgaccgaagaccgggaagcagccctgtgggag

SEQ ID NO: 286261 - DNA, 100 bp, Homo sapiens
aacagagtccgatgaaaggaatgggtctgggaccttaacagggagccatgagtctcacattcccagtcaggaggtcccaggcacccaggtgggacaagga

SEQ ID NO: 286262 - DNA, 115 bp, Homo sapiens
cggcggctgcggccggcagccggcagctttgcagcggtactatactggcaattgctggagaagattttgcaattgttgcttctgatactcgattgagtgaagggttttcaattca

SEQ ID NO: 286263 - DNA, 100 bp, Homo sapiens
cgcaaccttggtggtggcccagctgctcctggtgcagtggaagcagaggcacccacgctcctacaataccacctggtggcccatggtagaatggcagaaa

SEQ ID NO: 286264 - DNA, 87 bp, Homo sapiens
ttgtcccgctgcagccgagatgccgggggagcggggccttccacaccccctccgtgggtgtgtgaggctgggaggcggcagaatgca

SEQ ID NO: 286265 - DNA, 74 bp, Homo sapiens
aaacttcttaacccctagaccggtttttagtccattgactatgcagcctaatgagttcccgattttgaaatgct

SEQ ID NO: 286266 - DNA, 74 bp, Homo sapiens
cccttggaagaggctacaacacaggaagggaaaaggccgaggcatcagcgtgtgaagaccgcaaagacgatccc

SEQ ID NO: 286267 - DNA, 90 bp, Homo sapiens
ggatcattgaccctattgatggaacaactaactttgtacatagattttctctgtgggcagttctttttgttttgggaagacttctgactt

SEQ ID NO: 286268 - DNA, 98 bp, Homo sapiens
gcagcttcaagcttaggaccacccaccatgcctatccaggatcctggtgcacctgagccgtggaggggctgaagtccagatctttgctcctgacgtcc

SEQ ID NO: 286269 - DNA, 100 bp, Homo sapiens
ctgcgcctccatgtacagccgctccatccagggccaccatgtctgcctcctggtgaaaaagagcgcatcagcgaggaggtggggctgctgcagctccttg

SEQ ID NO: 286270 - DNA, 75 bp, Homo sapiens
gttcgctacacagcaatgcatcgagtcctctttgatacgcaacctacggctctctgagtccttgaaaaagaacca

SEQ ID NO: 286271 - DNA, 75 bp, Homo sapiens
aggcagctgcgctcttgacagccaggtaccagcttaccctgaaagaagcagatcccagttcaaaagtagccataa

SEQ ID NO: 286272 - DNA, 101 bp, Homo sapiens
tgaagggaacaggcatcatggactgtgcgcccaaggaggcaagtgaggcctatctggttggcctttttgaagacaccaacctgtgtgctatccatgccaaa

SEQ ID NO: 286273 - DNA, 74 bp, Homo sapiens
gcagaagtcggggccttggaggcgtgactttcccctcgggtccaggtgaatatgcaggttttgatgagacgcag

SEQ ID NO: 286274 - DNA, 75 bp, Homo sapiens
agatagtggaatatcctccatccgttcttttaaggagactccatcctctgccaatggcccttcccgggagggctc

SEQ ID NO: 286275 - DNA, 100 bp, Homo sapiens
agccatcagcagtgccatccagcttctagaagacccattacagagggatgagattcatcttctccacgatgacagaggtcctgtcttagaagctttagtg

SEQ ID NO: 286276 - DNA, 98 bp, Homo sapiens
cgcgagcctcgtggtgtggtgtatggccgtgggcatctcctacattagcgtctacgaccaccaagatgttctcagtgcagctgagtcttggtgagcag

SEQ ID NO: 286277 - DNA, 96 bp, Homo sapiens
ggatggcccagctactgttctcacttctgtgaagaagaaagtgaagaatgtggggattttcctaaagaaacagaccagtggtatggagtataagaa

SEQ ID NO: 286278 - DNA, 100 bp, Homo sapiens
agggtgtctggtccacgacctatcctaggcgccatgagctaccatagaggaggcatactccaggtcaatgacaaaactagcaaaatctgcaagcaattat

SEQ ID NO: 286279 - DNA, 100 bp, Homo sapiens
tccgcgacgagctatccgggaaagggccgaatgcgatcaaacctaatccgcgagacttgctaagtacaggtttgcagattccgccagcagcacagcaagc

SEQ ID NO: 286280 - DNA, 90 bp, Homo sapiens
atcgcttggttaaaacctgacacttttaacaggaggaagacaatggtcctataatgcccttggataagaaaaggaaacttttgagctgca

SEQ ID NO: 286281 - DNA, 100 bp, Homo sapiens
ggacttttttccagattatgaagaaaatggaacagatttatccggggctggtgatccgagcaactacagcgagccctagattttcgaaactcttcagcta

SEQ ID NO: 286282 - DNA, 102 bp, Homo sapiens
gcagtccagaaagcggcttatcgaacagagccgggagttcaagaagaacactccagagctcatgcaccctgtgctggagtccctgaggaatactgaccggca

SEQ ID NO: 286283 - DNA, 90 bp, Homo sapiens
gcctggggacctgcggcctgttgtcagccctgaaatccctctttgccaagcactacacgctggatgcttccctgcctttgcgtctgcgac

SEQ ID NO: 286284 - DNA, 98 bp, Homo sapiens
acgggggctccgcggcgtcctcggcgctgaaggggttaattcaacagttcaccaccattaccggattcctagatgaggttatgaagaagtatggcagt

SEQ ID NO: 286285 - DNA, 89 bp, Homo sapiens
cctgaaagtgggggatcaggtctggctgtttattgatgaggttaaggctacctttccagataatccaacagctaaatcaccagtttcca

SEQ ID NO: 286286 - DNA, 83 bp, Homo sapiens
ctgaactcttcagataatcagagtggaggaagtacagccagcatgtgcaacttgctttggtgtttgctgttttattgccacag

SEQ ID NO: 286287 - DNA, 96 bp, Homo sapiens
cgcttcgtgcaccggggcggtccgttgccaaagccaggcccagaccacactgaccacaaatgacattgtcattagcaagctgacccagatcctttc

SEQ ID NO: 286288 - DNA, 100 bp, Homo sapiens
gagaagttgaaggaggaggagaacacagtggaaaggcctaaagaatgtatttgacgaagcaatattggctgccctggagcctccagaaccgaagaagagc

SEQ ID NO: 286289 - DNA, 75 bp, Homo sapiens
attttcattcaaatctccaccaaaaagaatctgctctagaggttccaattgtggacaagataaggaccattgctc

SEQ ID NO: 286290 - DNA, 83 bp, Homo sapiens
agattatttgcaacagctcacgggagcaagaacgatcggcttcagctccccaggaatatgattgaaaacagcatgtttgagga

SEQ ID NO: 286291 - DNA, 87 bp, Homo sapiens
ggaagatccttcaggtgctggaaaggaatgaggagttacagagggccgagaaggacaggatcagagaaatgttctttactaccatgg

SEQ ID NO: 286292 - DNA, 104 bp, Homo sapiens
cgaccagggacctgcccgcctgcggctgctccggggtctcattctgtcgcacaggttggcgtgcagtggtgtgatctcagctcattgcaacctctgcctcccgg

SEQ ID NO: 286293 - DNA, 75 bp, Homo sapiens
accaggtcttgtagcagcgcctcctcgatgccatggacaatattaccaggcagaaccaattctacgatacccaag

SEQ ID NO: 286294 - DNA, 75 bp, Homo sapiens
atttgaaaaatgaagatgatgtagacactggactattagatactgaaacaagaatggcccaaacattggccaact

SEQ ID NO: 286295 - DNA, 75 bp, Homo sapiens
tgggacgtggagtgcgatacgtgcgccatctgcagggtccagtgtgtggaccagttgacaaagatccaaactgaa

SEQ ID NO: 286296 - DNA, 95 bp, Homo sapiens
ctacttaataatgacaatctcctcagggaaggggcagcacagttcctacaaacttgatgacttttgagtagaagcctgagaaaaaaagagaggtg

SEQ ID NO: 286297 - DNA, 82 bp, Homo sapiens
ggaaggagcagaacgtgagggtgtaacttacaaaaaggggaacgcccttttgcttgtgactggcagggctgcgacaagaagt

SEQ ID NO: 286298 - DNA, 75 bp, Homo sapiens
gaggggacactgaggagacgttccctaagcaggcaccccccgagcccagctccacacaccgttcctggatctcct

SEQ ID NO: 286299 - DNA, 50 bp, Homo sapiens
ccacttcctgtggcaactacaggggatcttatggttggtgatgaggcaag

SEQ ID NO: 286300 - DNA, 98 bp, Homo sapiens
ccggctggccggcgccgcctcctgggaagatggcgctgcacttccagggacaagaatccttcaagaaacaggaaaaaactcctaaaacaccaaaagga

SEQ ID NO: 286301 - DNA, 82 bp, Homo sapiens
aagaagcagttctacaaggcgagccagggggatatgagactttctactcggaatatcctgagtgttgcgtggatgtaaaacc

SEQ ID NO: 286302 - DNA, 100 bp, Homo sapiens
cttcagcgcagtatattactgcaggaatagcgggttttgcagcaattgttgcatatggattatataaactgaagagcaggggaaatactaaaatgtccat

SEQ ID NO: 286303 - DNA, 74 bp, Homo sapiens
tttccttctctccgtgcaacgctggcaagtctcaaagtcgccacagtgtgcgtgaaggaaaattggagcataca

SEQ ID NO: 286304 - DNA, 100 bp, Homo sapiens
cttaaggattcagagaaagagaactctttgttaaagaagagaataagatttttggaagaaaagcataaagatgcctatcaagtgatattggatggtgtga

SEQ ID NO: 286305 - DNA, 96 bp, Homo sapiens
cgtgtaatcaaggacttcatgatccagggcggagacttcaccaggggagatggcacaggaggtaaaatatacccaggaccataaacagatgaaagg

SEQ ID NO: 286306 - DNA, 114 bp, Homo sapiens
caggtcgcagggcggcctgcagctgggccgcggccgaggaggcagcgcgacctccgcacgatctattaatgagatgaagcggttggaagaaatgtcaaatatgtttcagagctc

SEQ ID NO: 286307 - DNA, 82 bp, Homo sapiens
ctgtgtgcccacagctcctggagccccacagggagcatcgagtacagctgtccggcctccaacgagtgtgagatcaccaagc

SEQ ID NO: 286308 - DNA, 87 bp, Homo sapiens
gaaataaagctcctgggcaaggggacgtctgcagctgaactccagatgtggacttttggattatccccatgatccaaggttttgtgc

SEQ ID NO: 286309 - DNA, 90 bp, Homo sapiens
tggcacttatgtcctccctgggtggatgggaagagagtcccaagggatgcagggcatcctctgtacccctttaatgacccgtactgagac

SEQ ID NO: 286310 - DNA, 51 bp, Homo sapiens
aaacaatggaggatttaatttcactggagggcccggaagaaaacagtgcct

SEQ ID NO: 286311 - DNA, 50 bp, Homo sapiens
ggcagcgctggactaggtggcaggggacagagcacaggaaagggaccccc

SEQ ID NO: 286312 - DNA, 100 bp, Homo sapiens
aaacctcctttgcctagaggctatcacacgattcacaatgacatcctttcaagaagtcccattgcagacttccaactttgcccatgtcatctttcaaaat

SEQ ID NO: 286313 - DNA, 127 bp, Homo sapiens
ctgcccagcagaatttgtatagagatgtgatgttggagaactacagaaacctggtctccctaggtcctagcagaagatgtgactcagactgcctctgggtggggctggctggcccacagatcctgcc

SEQ ID NO: 286314 - DNA, 75 bp, Homo sapiens
gtgggtgctctgtgctctgatcacagccttgcttctgggggtcacagggcgattctggaggccccctggtgtgtg

SEQ ID NO: 286315 - DNA, 80 bp, Homo sapiens
ttcgagcgctgttctcgctccggagccgctgcacatttcgcatacagtttgaacatttattcgcctcctgagcttgtaca

SEQ ID NO: 286316 - DNA, 75 bp, Homo sapiens
cgccgcccccccagacaagatggacaccgcggaggaaggtcgcgtggggcaggcagtggcgctgcgggccaaggc

SEQ ID NO: 286317 - DNA, 97 bp, Homo sapiens
tacttggagcaaagggcagtcggcggagcttcgccaaggctggcgcagtcgggtggcattgtgtgtcccagagtgccggagcgagtcccagaagaga

SEQ ID NO: 286318 - DNA, 73 bp, Homo sapiens
agattttattaaagtcgaagctattgatttgttcccgacaaggagttttctggttcagaccgtagacagagag

SEQ ID NO: 286319 - DNA, 82 bp, Homo sapiens
acgcagaaggacctggccacggtttggacatatttgactcttttccccccaggttgaattgaccaaagcaatggtgatggag

SEQ ID NO: 286320 - DNA, 80 bp, Homo sapiens
gtggatacctacggagcacgagaaatacggcgtgggattaagttgtcatcattctgggaagaaaaaaaaaacattaatga

SEQ ID NO: 286321 - DNA, 132 bp, Homo sapiens
acgccttgttgcccagttccccagttctggcagattctggaaactgtacattgaagcagagacttcaaatctcaacctgagccatccccagttcttagccagttgagccagcgacaacagcaccagagccag

SEQ ID NO: 286322 - DNA, 75 bp, Homo sapiens
gcgacagcgaggagcagacccttcagctgtgagctggcaccgagagggttccttttgaggatggccacacagaca

SEQ ID NO: 286323 - DNA, 75 bp, Homo sapiens
ctcctgctgtgaaccagcagaatttttgaacaggtcacacagcggcagtgataaagagcacagggatgtggagag

SEQ ID NO: 286324 - DNA, 58 bp, Homo sapiens
cctcctgagtagctggtattacaggaggtgctcctgtaccctggccacagcccaatcc

SEQ ID NO: 286325 - DNA, 80 bp, Homo sapiens
gactgcgggcccgtagctgggctctgcgagactcaagtgggtgagttcctgggagataatgataaatttaacaaagaagt

SEQ ID NO: 286326 - DNA, 76 bp, Homo sapiens
agttaatggcaagacttgcagaggtggattgtattacacagagcatgaatatacttctttaggttacacgcatggg

SEQ ID NO: 286327 - DNA, 97 bp, Homo sapiens
ggaactgcccagaactccaccaccttgacctcaccggctgcctccgcgtcggaagcgacggtgtcagctgaaaatgagagccggaggcatgagtgat

SEQ ID NO: 286328 - DNA, 100 bp, Homo sapiens
catcccgcgtccagcacctacgtcccgctgccgtcgccgccgccaccatgcccaagagaaaggcactaacataaatagtgactctccagttggaaaaaag

SEQ ID NO: 286329 - DNA, 75 bp, Homo sapiens
ctcagttggaagcagccgatccagcctgcggagcctgtggggcaggggtcggcgctttgcctgatgaccctacct

SEQ ID NO: 286330 - DNA, 98 bp, Homo sapiens
agtccatcatgaatgtcaatgtgaaaggtgctggagaatctggtaaaagcaccattgtgaagcagatgaggatcctgcatgttaatgggtttaatgga

SEQ ID NO: 286331 - DNA, 82 bp, Homo sapiens
ggccagcctgctcatcgcctactgcagtccagccctgctgggagttttctgccacacagatttgcggaagaacctgaccgtg

SEQ ID NO: 286332 - DNA, 80 bp, Homo sapiens
aaaagaaggaagctgctcaaaagaagagccctatgagtttgtctctctggaatggctgcaaaagtggttggatgaatcaa

SEQ ID NO: 286333 - DNA, 75 bp, Homo sapiens
cagagcttgacccaggcactattgggacccctgattttagcaggatggcccaatggaatcagctacagcagcttg

SEQ ID NO: 286334 - DNA, 100 bp, Homo sapiens
atctacaagatgatgcagggaggaggaacactatcaaccacaggacactctaccaactatgtcattgctgtggagatccccacccatcagccccagcgac

SEQ ID NO: 286335 - DNA, 75 bp, Homo sapiens
ttttagctcactggagcctcacagaaccctgtgaggtccagaggtgtccttctaaagctggtagaggtttcacga

SEQ ID NO: 286336 - DNA, 82 bp, Homo sapiens
tcataagtggaattttggagatattcaaaggtcgttccaggggtagaggaggcatgaaggatgaccgtcgggacagatactc

SEQ ID NO: 286337 - DNA, 50 bp, Homo sapiens
cgtcaatcagagcgtcctgtgcggctctacagattctcccctgcccctgg

SEQ ID NO: 286338 - DNA, 100 bp, Homo sapiens
tggtgcttcctttggatcctgccgtccccgccccgctgtgccctcacgggtatcagctctgtgataacagcgtgggggtgctcttcaatgactcaacacg

SEQ ID NO: 286339 - DNA, 83 bp, Homo sapiens
cttcacgcaggctttaagatgatgagcaaactagacttcgggctccttgaggatattcagttttgtatgtttgaatatcctct

SEQ ID NO: 286340 - DNA, 50 bp, Homo sapiens
agactccactccccagctgtgaaaggaggacaaaagcatgtcttcccttc

SEQ ID NO: 286341 - DNA, 101 bp, Homo sapiens
cttgtgcagagaagccaagaccaggcaccggttgctgatttccttgttggagtcttcaccactatgagcagagaccttaatggacagaatcaagaaacagc

SEQ ID NO: 286342 - DNA, 88 bp, Homo sapiens
cggcagaagaggacatcattgatggatttgccatgaccagctttgtcacttttgaagcgctggagatgaccaagcgagacgtgcctgg

SEQ ID NO: 286343 - DNA, 83 bp, Homo sapiens
ctcaacaacgttctgcagcagcagctctttagccaggaggctgccgatgagatctgcaagagtgcagagcagagcgggcggag

SEQ ID NO: 286344 - DNA, 97 bp, Homo sapiens
aaagtgggaaaggttggcgctaatggtcagaatgctgctgggccctctgcagattctgtaactgaaaagactcagaattcatgattgaagaaatgca

SEQ ID NO: 286345 - DNA, 75 bp, Homo sapiens
tcgggcctctggaatttagcgctcgcccagctagccgcagcaaccccaaggtccaggtggaggccatcgaagggg

SEQ ID NO: 286346 - DNA, 82 bp, Homo sapiens
aagaaaagaaggggaagaagatcaaaacccaccatgccccaggttactcactataaacaatatccacccaacacaagcaaag

SEQ ID NO: 286347 - DNA, 109 bp, Homo sapiens
cgcgcccgggaggaaggaacgaggcaaggagctaaagcagcgtgcgttcagccctgggctgcctgtggaggaaccgattgtgtccacagatgaggtcatcttcccactc

SEQ ID NO: 286348 - DNA, 90 bp, Homo sapiens
gggctcctttgccaagatctatgccgacacctttgtgcactgccagaagatcgtccacagggacatcaagccatccaacctgctcctggg

SEQ ID NO: 286349 - DNA, 100 bp, Homo sapiens
ggccctcttgataaaaagagatgtggggggattctcgacctgctaacagaactggaccttttcgaaggagatttaaccatagtagaaagaatggagaact

SEQ ID NO: 286350 - DNA, 75 bp, Homo sapiens
gcatgagggtcggaccccagtaccaggcggtggtgcccgacttcgaccccggttgtgcattatgtgtgactcttc

SEQ ID NO: 286351 - DNA, 100 bp, Homo sapiens
ggaaaatccgcaagaccatcatgcaggagcatctttccttgaagaagtacattattgacattgtggttgaaagtacagctccagcagaagctttgaaaga

SEQ ID NO: 286352 - DNA, 83 bp, Homo sapiens
agcccatggagatccagttcaattatgaatctcaggaacaccaccttctgtcaggtaagaatgattgatgttggctgatattg

SEQ ID NO: 286353 - DNA, 75 bp, Homo sapiens
cggaaatgaaatgtgctactcattcccagcgttgcagaaccagagaatggtggcatgaagctcaaaaaaatccaa

SEQ ID NO: 286354 - DNA, 75 bp, Homo sapiens
gtcggacccttgccagaactgaatagcgggttttgcagcaattgttgcatatggattatataaactgaagagcag

SEQ ID NO: 286355 - DNA, 83 bp, Homo sapiens
cttggactgagtcctgcaggacacagatgtcctgtgaagtcaacgagtgccgaaaaattgagagtcttgaaaacttgtatttg

SEQ ID NO: 286356 - DNA, 100 bp, Homo sapiens
attaaacaatcgctttattaaggtttattggcacagagaaggaagcacccaacagttacaaactacttctccaaagttccaagttcttcgatttgatttg

SEQ ID NO: 286357 - DNA, 83 bp, Homo sapiens
gtgagagggcagcacgcgctgtgggatggacactccacagctgaccttgactgaactccgggtccttcttgagcagatgggca

SEQ ID NO: 286358 - DNA, 82 bp, Homo sapiens
catgctgacctacaagcagaagagcggagcgtgctttggacaccatgaattttgatgttataaagggcaagccagtacgcat

SEQ ID NO: 286359 - DNA, 74 bp, Homo sapiens
gattttttgcctttgttgattaactggacaaattcagggcaagttaaagtcttcagagccctgtatacgtttga

SEQ ID NO: 286360 - DNA, 50 bp, Homo sapiens
ccaacaacatccgcgagatcgagcccaagacctgcaaaatttacagagcg

SEQ ID NO: 286361 - DNA, 75 bp, Homo sapiens
ctgagcagctctgcaaggttctaacaggttggaagtactccatgacacacactcggagaaagtcccttcccatgc

SEQ ID NO: 286362 - DNA, 80 bp, Homo sapiens
catcaatcagctcatccgtcagctgaactagacccagttgcaggaattgtgccttggatccatccatccagtcagctgaa

SEQ ID NO: 286363 - DNA, 88 bp, Homo sapiens
acacagactgcttcaagcaccgcaaggtctgagggaaaaggccataccaatgctggagatgcaatatatgaggtggtgagtctacagc

SEQ ID NO: 286364 - DNA, 96 bp, Homo sapiens
atgaatacaagaagtgtgccactggcactattcctgatcagagaactccagttgcttcaacacacagtatcagtagtgcagccaccccagatcgaa

SEQ ID NO: 286365 - DNA, 75 bp, Homo sapiens
tgttcacaatgagcttgcattccagcctcccatttccaatcatcctgggaccggcagaagctgaagggtctcaga

SEQ ID NO: 286366 - DNA, 73 bp, Homo sapiens
ttcttagttgatgatttagttgattctctgaagggaagtttggttggcttagtggattatccagatgatgaag

SEQ ID NO: 286367 - DNA, 89 bp, Homo sapiens
gtggcgtgtgcggtttcgacccggtcacacaaagcttcagcatgtcatgtgccacaatggtgcgcatgaatgtcctggcagatgctctc

SEQ ID NO: 286368 - DNA, 100 bp, Homo sapiens
gggggaaaaaggaagtttgtcctgtcctggatcagtttctttgtcatgtagccaagactggagaaacaatgtaaatattgcagattttcaagagaatcag

SEQ ID NO: 286369 - DNA, 110 bp, Homo sapiens
gttgaccaagcctctacaggggcctcccgcgccccccgggacccccacgccgccgccagacaatgcagatcttcgtgaagactctgactggtaagaccatcaccctcgag

SEQ ID NO: 286370 - DNA, 134 bp, Homo sapiens
gtggctggaaggagaactaaatgggagaagaggaatgttccctgacaatttcgttaaggtatcgatatcctgaagcttgtagcagcccaagtgggaagccagtggaaagatatctatcagtttctttgcaatgc

SEQ ID NO: 286371 - DNA, 83 bp, Homo sapiens
caagtacaagggctgctgcgaggaccaaggttatgcctccgcctcgttgccctgaaagccgcagcgacagcgaaaagggctaa

SEQ ID NO: 286372 - DNA, 100 bp, Homo sapiens
ttgcgagggtcccacgactcccgcctgatacgtaggtaacctttccagagatgtgacagaagtccttatacttcagttgttcagtcagattggaccctgt

SEQ ID NO: 286373 - DNA, 74 bp, Homo sapiens
cccgcccatgaagccagatttctcccaggtcaccacgtacttgaactggctggttcggatgtcatctgaaatgg

SEQ ID NO: 286374 - DNA, 101 bp, Homo sapiens
ggagacgggtgaggtacaggctcagtctgcggccaagactccgtcctgcaagtggaatgcagtagccctctgggcctgggatattgtggttgataactgtg

SEQ ID NO: 286375 - DNA, 75 bp, Homo sapiens
agatgatcatctgatagaagagatcactttgggaagcagtgacatccaacctgtatcaagtcttctaatctgtga

SEQ ID NO: 286376 - DNA, 100 bp, Homo sapiens
gaatcccaagagtggaggcaaccagggaccactgacatttatggatgtggccatagagttctctttggaggagtggcagtgcctggacactgcacagcgg

SEQ ID NO: 286377 - DNA, 100 bp, Homo sapiens
ctccgctctatccggctttgctaggggagcacccacatgcaggatctccaggaggtgacccaggaccttcattatgaaaacttccgttctgagagactca

SEQ ID NO: 286378 - DNA, 100 bp, Homo sapiens
cgagcggcgagccggagcgcggagcccggctcccgcaccatggaggaggacgacagctacgggcccggcaggaagatgggctcccgtggacagggactct

SEQ ID NO: 286379 - DNA, 75 bp, Homo sapiens
aatcccggaaactccagcgtgtctccagccgtggtgcagccgtccggccagtcggcctgcctcggggccctcctc

SEQ ID NO: 286380 - DNA, 75 bp, Homo sapiens
gcaactatggcatccccccagatgaaatggatgagttcggtctctgcaaggaatcagagatcattgatttcttcc

SEQ ID NO: 286381 - DNA, 82 bp, Homo sapiens
gaacagggacagcacctcatcccctggatgggggaccacaagatcctcatcgacagtttcactgttacatgccttgaagtga

SEQ ID NO: 286382 - DNA, 75 bp, Homo sapiens
gagacatggacgaagccttcaaatccatcaagctcatcaaaagatggactcaccctgtcacccaggttggactgc

SEQ ID NO: 286383 - DNA, 82 bp, Homo sapiens
atagccaatcggaccaaaaattcactcactttgcaatggaaggaacgaatgcaggaatttgggaactgagctgtgcaagtgc

SEQ ID NO: 286384 - DNA, 49 bp, Homo sapiens
ctgaccgctctggcccagggtggcttgtccagccggaagccctgagggc

SEQ ID NO: 286385 - DNA, 49 bp, Homo sapiens
aattgaactgcttcagaaagcacaggaggagcaccgaacagccagttcc

SEQ ID NO: 286386 - DNA, 90 bp, Homo sapiens
gcgctgcggcctggcggcttccaggcgcactaccgcggtccctgtgcgttttattgcgacctgccggtgggaactttgtctccgagtcgg

SEQ ID NO: 286387 - DNA, 74 bp, Homo sapiens
gtggaggttcgcggctctaacggggctttctacaaggtcctggacccaagccagaagcctctgcaaagcttcct

SEQ ID NO: 286388 - DNA, 100 bp, Homo sapiens
accaagctttagccgccgaggccgcgtgtcccaaaggccagattagcctgaggcctgctcagtcgttcctaatgaataaaaatcaagtgccaaagcttca

SEQ ID NO: 286389 - DNA, 100 bp, Homo sapiens
cggaaaggatgttggcggtccctgtgacctgtggagacacggccagatctgccctccagtaccaggatcatctatgaccggaaattcctgatggagtgtc

SEQ ID NO: 286390 - DNA, 75 bp, Homo sapiens
aaaagaagattactctgcaacagctaaaggtgaagcaaaaaatttattgccatatcttggaccccacaaaatgag

SEQ ID NO: 286391 - DNA, 90 bp, Homo sapiens
ggagcagacacagactatgcagatgggagatacgtaggtaacctttccagagatgtgacagaagtccttatacttcagttgttcagtcag

SEQ ID NO: 286392 - DNA, 80 bp, Homo sapiens
aaactggagagcttcatcaaaaatagtgatagctttgataaaccgcaacagatgaccaaggaagtttgggattatgtttt

SEQ ID NO: 286393 - DNA, 83 bp, Homo sapiens
caaaggcggccacgcgcggcgccgctcgccttatgccagcctggaccatcttggaggcagtgtaggatcatggaagaactttg

SEQ ID NO: 286394 - DNA, 100 bp, Homo sapiens
aaaaggctaagcaagcatctaaaaagactgcaatggctgctgctaagtctctagtgatccctgaaaagttccagcatattttgcgagtactcaacaccaa

SEQ ID NO: 286395 - DNA, 75 bp, Homo sapiens
cactggaaatcgtctcgaaactgctctcagaggcgtttcatcaaacgggtatatgtgtctttaccaaatgaggag

SEQ ID NO: 286396 - DNA, 100 bp, Homo sapiens
tggggaccaccatgttcacgtgacatcaagaggaagcggaaaccagtggccacagcatctttgtctagccccagtgcagtctgatgccaatgcaagttac

SEQ ID NO: 286397 - DNA, 75 bp, Homo sapiens
ctcctgcgaggcctcccgggctccgggaaaactacactggccaggtggagtacatcttcacagacaagaccggca

SEQ ID NO: 286398 - DNA, 75 bp, Homo sapiens
tcagcctcctgagcagctgggactacagatcaatgagctgagcaatgttcctgttcctgtcatgctaatgccaga

SEQ ID NO: 286399 - DNA, 75 bp, Homo sapiens
ggagttcttacaacatggcagacattgacaaattatgaagcaattgtgaagctttcggatggctttaatggagca

SEQ ID NO: 286400 - DNA, 83 bp, Homo sapiens
gcaggcagaagattgcatcacacgatcaacagtacaaattctgaagtttgtaaacttgctgatggtggtggtaagccatggca

SEQ ID NO: 286401 - DNA, 85 bp, Homo sapiens
attcgcagtggtcgcttcttctccttgctcatgatggagcagtccaagaagtcctccctcatggtggcccgcagtattctcaaca

SEQ ID NO: 286402 - DNA, 98 bp, Homo sapiens
cacagccataacattgcccaccgagatgtcaaggagggaattgtcgagaatcttttcaaatgggcccgagaggccgatcaaccattgaggacatattc

SEQ ID NO: 286403 - DNA, 101 bp, Homo sapiens
gctacggctactacccctgcttatccaaaggggctattctgaacatttcatctggcagtggcatgctccctgtcccactcttgaccatctattctgcaacc

SEQ ID NO: 286404 - DNA, 119 bp, Homo sapiens
tgactgatcaggctgaggccgagaagcagtacgaagactcctgccgcgtataccaggcatccagccccgatgaggggccattgacgtttagggatgtggccatagaattctctctggag

SEQ ID NO: 286405 - DNA, 100 bp, Homo sapiens
gggccgaccccagagaggcgctggacaggtccggcctctttggcctacccccgttggctccgctgccccaggtcgatgagtcccctgtcaacgacagcca

SEQ ID NO: 286406 - DNA, 107 bp, Homo sapiens
cgggaagaacttcttcagaattagaaaggagctgcttcccaataaggaaacaatgatcatgggaacagcaatagtagtcatgtaaaaatctttttaccgaaaaagct

SEQ ID NO: 286407 - DNA, 98 bp, Homo sapiens
tcttcgggcggaggaggaagtaggggtgcacctcagcactatcccaagactgctggcaacaggaatatggaaggagactgtccctctgactggaaaac

SEQ ID NO: 286408 - DNA, 83 bp, Homo sapiens
ctgaggcagagggtggcccatgagccggttgcgccacccgaggacaaggtatcgagaaccttccctgcgaacttcagaggaac

SEQ ID NO: 286409 - DNA, 100 bp, Homo sapiens
ataggcgtgagccaccgtgcctggctgaaggatctagtgaaaagccatttgatgtatgcggtcagagaagaagtggaggtcctcaaagagcaaatcaaag

SEQ ID NO: 286410 - DNA, 83 bp, Homo sapiens
tccatctgtggaaggacctaccaaccagatttaaggaccatagtacagctatggatactgaaccaaacccgggaacatcttct

SEQ ID NO: 286411 - DNA, 51 bp, Homo sapiens
ctgttggcttgcgagacaaatatgaaaagagtctcatcgtggaaggcaaga

SEQ ID NO: 286412 - DNA, 100 bp, Homo sapiens
cctgtgtgcattcataagaattcggaatgtctgaaagagcagcagaaacgctactttccagtgcttcatgcccaccagtttctgcagaatgaatatgccc

SEQ ID NO: 286413 - DNA, 75 bp, Homo sapiens
cacacatccccgaccacttgcggcctgagtatgatgaaggtcaccgtgtccaaagggggcgaccgggacagtgac

SEQ ID NO: 286414 - DNA, 100 bp, Homo sapiens
tcgggtcctgcgtccgcgcctgccccgccatgaatgaggagtacgacgtgatcgtgctgggcaccggcctgacggctgctctttggcgtaaattgcaatc

SEQ ID NO: 286415 - DNA, 50 bp, Homo sapiens
ggagcctttgagctcatctataagcagacgaagttatacggaagcgtctc

SEQ ID NO: 286416 - DNA, 80 bp, Homo sapiens
gcagttcttcgggccagggacacggctcaccgtgctagattcttctgatgtagagcgactggaaagattcttcgactcag

SEQ ID NO: 286417 - DNA, 100 bp, Homo sapiens
ggagcattgcttctcatacagtaagatataatacattgccaagcagaagaactctgaaaaattcaagattagtgagtaagaaagatgatgtgcatgtctg

SEQ ID NO: 286418 - DNA, 50 bp, Homo sapiens
tggaggccaacggtgtggaagtggacggagtctcgctctgtcacccaggc

SEQ ID NO: 286419 - DNA, 100 bp, Homo sapiens
cagcctatggcctgttatttgtctcaacaaaagagacatccaggcagaaattgatgcccacaatgacatatttaaaagcattgacggaaacaggcagaag

SEQ ID NO: 286420 - DNA, 102 bp, Homo sapiens
ggcacttcattggccacctacagaaacaaaatgtcaacaaattgatggagccagagcccagaggtggagcagttagggagggttgtggaactggacagtgac

SEQ ID NO: 286421 - DNA, 83 bp, Homo sapiens
cgtggaccacatagacatttacgcggatgtcggcgaagagttcaaccagggctgaagaagatgcagagcagcctgaagctggt

SEQ ID NO: 286422 - DNA, 75 bp, Homo sapiens
tccagtcgacactctcgcgcccggaggttcctccccgggcagaagaaatcaccattccagctgatgtcaccccag

SEQ ID NO: 286423 - DNA, 74 bp, Homo sapiens
ctggacaagcacgagggcgcgctcgagacgctcctgaggtctctaattaacagaagatggcaaagcccagccac

SEQ ID NO: 286424 - DNA, 50 bp, Homo sapiens
cgcagtggtcgcttcttctccttgagttgcaacaaatgctgcaaaagtgc

SEQ ID NO: 286425 - DNA, 83 bp, Homo sapiens
agctgccctacaggcagctctgaagaacccccctatcaacaccaagagtcaggcagtgaagagtccctgtgaagcaggaagag

SEQ ID NO: 286426 - DNA, 120 bp, Homo sapiens
ccgacggggcgcgcgcgaagcgagcgagaaggcacggagtcgccgcggagcgcaggcagaggtgtccaggacctgcctgctcacggttcgtgtcctgcaggcccatcgcctaccctctaa

SEQ ID NO: 286427 - DNA, 100 bp, Homo sapiens
cacatggacagtgatgatgaaattcctatcaggttattcagcttctcaaggctggaaaagcgaaggaagtttcctacaatgcactagcctcacacataat

SEQ ID NO: 286428 - DNA, 83 bp, Homo sapiens
tgagatcttacctaactgggaaacaatgagcgagcccagggcgtggtgctgaaagtgctcacaaacttcaagagcagtgagat

SEQ ID NO: 286429 - DNA, 83 bp, Homo sapiens
cctgtctctacaccttagtagcagagtgacggaaggttctaccctttatataccgggccataggctcaaagcatcttcctgcc

SEQ ID NO: 286430 - DNA, 98 bp, Homo sapiens
ggaggttcgcggctctaacggggctttctacaagatcgtcagtatttaaacagatcacatcatgcgtgagtacaagctagtggtccttggttcaggag

SEQ ID NO: 286431 - DNA, 101 bp, Homo sapiens
ggaacccaagcagtggcgaagggaatcgcaaggctcttccctgaccattttctactgtccctgcgcgagggtgaagttgaacaaattgctatgatgaaacc

SEQ ID NO: 286432 - DNA, 75 bp, Homo sapiens
ctccactcactcccaaagccaccaggaccctaatccccagaagaccatgtctgtgttgagctgtatctgtgaagc

SEQ ID NO: 286433 - DNA, 103 bp, Homo sapiens
agcgggcggacggccggcgggggcggcgtgcggcctagcgtctcagaacccacctgcagttcaccagccccagaccaagagcaccttctctatgcctctctga

SEQ ID NO: 286434 - DNA, 100 bp, Homo sapiens
gagcctcgggcaccatgagcgacgtggctattgtgaaggagggttggctgcacaaacgagcgctcctggttgcagccagaatgcatgacttcaggaggac

SEQ ID NO: 286435 - DNA, 100 bp, Homo sapiens
acatggacctgtacagcatcaactacctgcactttggggagcctaagtcctgactgcggacgacgcggacgatgctgctggacacaaaagtttcatctcc

SEQ ID NO: 286436 - DNA, 96 bp, Homo sapiens
tgctacatgctctgatgacggcactgttagaatctgggactttcttcgttgccatgaggaaagaattctccgagctcctctggtgcaagtgtggta

SEQ ID NO: 286437 - DNA, 100 bp, Homo sapiens
gatggtcgcggtgcctgggcccacagtcgcgccgcgctcgaccgcctggagaagctgctgcgctgctcgcgttggagtcagggctaaaggtcaaccagcc

SEQ ID NO: 286438 - DNA, 123 bp, Homo sapiens
ctggcggccgagtcaagccgccgcctcgacccagggcccgcgggccaggagagcgctcggcgggaagtgggacccatggcagccgagacctcccagtcaacagaatcatcgatgtggatcttg

SEQ ID NO: 286439 - DNA, 129 bp, Homo sapiens
tcagtcgcgagcgaacgaccaagagggtgttcgactgctagagccgagcgaagctggtgatcatgtgtgcgagcagtgacaccatccggagcatcatgctggtggcgcacaggcatggcatgaccagtg

SEQ ID NO: 286440 - DNA, 99 bp, Homo sapiens
cgaaacagtccctctaccaaatgttccctctatagccctaccatcaaaacccggacacattcagctaacgtattttagcaggtggagtgaggttgaaga

SEQ ID NO: 286441 - DNA, 50 bp, Homo sapiens
gccaagtccaagtgtcctcgattaagactgttttcaagtcagcaaacatt

SEQ ID NO: 286442 - DNA, 82 bp, Homo sapiens
cagagctgaggactgcctgtttgcagcaaacggggattcagcgtccgatcctttggaacagggactcacgtgaagcttccag

SEQ ID NO: 286443 - DNA, 83 bp, Homo sapiens
atgtcccacgtggacaagttcgtcaagatcaactcactatcctgaaggtccattctcccaagaagaggggacagaaagacaga

SEQ ID NO: 286444 - DNA, 90 bp, Homo sapiens
atttgttaaggattccaagtaactcttatttgactgaaactgttgaggagcccatggaggaagaagaagcagccaaagaagagaaagaag

SEQ ID NO: 286445 - DNA, 100 bp, Homo sapiens
aagaagtacaagcagacaaggagcaaagtgaggccctgtctctgcccctggtggtcatcgtccatggcaaccaagacaacaatgccaaagccactatcct

SEQ ID NO: 286446 - DNA, 100 bp, Homo sapiens
gttcagggtcccaccgtcctcgccagcctgcgtcccagggcaggcgggacagcacagaggcagcgccacctcgcttgctccccaggacctggtgcacccc

SEQ ID NO: 286447 - DNA, 100 bp, Homo sapiens
tttaatgtggatgcaccatgccagaccgtggaagatttaacgaatggggttgtgatggcccaggttcttcaaaagatgatgtttctgcattgaatagccc

SEQ ID NO: 286448 - DNA, 100 bp, Homo sapiens
tcagagatccaagtgcgcgccctggcgggtccggaccaagggggggccctcagcctcttggccttgaacgggctgttcatcttgattcacaaacacaacc

SEQ ID NO: 286449 - DNA, 75 bp, Homo sapiens
ctggttctgccttctggacaatctttccgtcgtgatgagaggagatggattgaaaagcagaacagagcaacaaga

SEQ ID NO: 286450 - DNA, 75 bp, Homo sapiens
ctacaaggccaagttcatctcctccgtcaccagccacatctaccagctgtcgcctggttgggcccggaaatggga

SEQ ID NO: 286451 - DNA, 83 bp, Homo sapiens
attggatgttttgtccagggcagcatctctggtgcatgctgatgacgaaaaacgtatcgagaaccttccctgcgaacttcaga

SEQ ID NO: 286452 - DNA, 100 bp, Homo sapiens
aaaggagacaaacaggtggaatacttagatctcgacttagattctgggaaatccacaccaccacgtaaggaagagctaaggagcaaatccaagatctgtg

SEQ ID NO: 286453 - DNA, 76 bp, Homo sapiens
caggggccttgataacacagagtttcaagaaatggtggagtcaatgaagaaagtagcagggatggatgtggagctg

SEQ ID NO: 286454 - DNA, 74 bp, Homo sapiens
atgcccagacaagtccccagggaatgccacagcatcctccagcacctcaggagaacttacgttccttcacaaaa

SEQ ID NO: 286455 - DNA, 74 bp, Homo sapiens
agagaaagacaaggatgaccaggaatgggaaagccccagacccaacatgagtgaagtttcctgcaagaaacggg

SEQ ID NO: 286456 - DNA, 83 bp, Homo sapiens
gccctggcggtggacgagcaggaagctgcggctgagtcggtgtggagattcacttggagagctctgacaaggagaagccggtg

SEQ ID NO: 286457 - DNA, 98 bp, Homo sapiens
ggaccggagcttcatgcctgcaaagagagttcagcaagaccagcagattggaagtatcaaagtggattatcatcctcatggctttctttagagtgtac

SEQ ID NO: 286458 - DNA, 90 bp, Homo sapiens
ccccgagaaccgtcagtttgagccagatgaccgatttgggatgttgcccctggatgagcctgctattcttgttagtgaattcctagatcg

SEQ ID NO: 286459 - DNA, 90 bp, Homo sapiens
aaaatgcatcttctaagtttttggcaccatatactactttttccagaattcatacaaagagtctccagtgatccacaagctcagaaatac

SEQ ID NO: 286460 - DNA, 100 bp, Homo sapiens
ctgggaagacgtcatcgcttccgccctacttcctcctcctgttggcggcgaatggcttcctttgggtggaagaggaaaattggtgagaaggtctcaaagg

SEQ ID NO: 286461 - DNA, 82 bp, Homo sapiens
gtctgacacacactgctgtggttcccctggatttagtgaaatgccgtatgcaggtttgggaagtagctgctccatacattga

SEQ ID NO: 286462 - DNA, 152 bp, Homo sapiens
cacctgctggccacaggttcctcctactacggtgttgtacggctgtgggaccggcgtcaaagggcctgcctgcacgtccagaaagcagcccaggcctttaactctgggctgctgtgtgtggcatgtggttcataccgacggggaaaggcgac

SEQ ID NO: 286463 - DNA, 75 bp, Homo sapiens
gccagcgagccacgggagcgagccagacccaacatgagtgaagtttcctgcaagaaacgggacgactatttggaa

SEQ ID NO: 286464 - DNA, 100 bp, Homo sapiens
ggcgggaccataagggcttaactcatatatttaacccccctccaaaaacactattggaaataattatgaaaaatggaagcacggctggaaatagccctca

SEQ ID NO: 286465 - DNA, 80 bp, Homo sapiens
tcgccccctcctcgtcgggaagaatcgtttggtctcctgccgtgcccgaaaactttagaaactgttcctttggagaggaa

SEQ ID NO: 286466 - DNA, 113 bp, Homo sapiens
ccgcgcgcagggcctgcagcgggagctggacggcgagcgcgagcggcgcgagaaacgtgagtgcatctccatccacgttggccaggctggtgtccagattggcaatgcctgct

SEQ ID NO: 286467 - DNA, 76 bp, Homo sapiens
gttgaagtggcctatcccaggacaggtggcactctttcagagcatatcatgtcccgagtgggaaaatattagctgt

SEQ ID NO: 286468 - DNA, 99 bp, Homo sapiens
tgtacacctattggaacccttaagaatcctgctgcatcacagaagctggaagttctgatgttccactgaaatcacaatggaaagtcttgacttgactgg

SEQ ID NO: 286469 - DNA, 87 bp, Homo sapiens
cctttaactctccttatgctgggtgaaaacaaagcaacgtggaaggaaccagaggctgttattctaagtgaagtaactctggaatgg

SEQ ID NO: 286470 - DNA, 98 bp, Homo sapiens
gggaggcagcgcgggatcccagcctcaggcgtgcgcggacggtgtgcggagaggacatgtactcccaggattccatagatctccttgctaactcagga

SEQ ID NO: 286471 - DNA, 100 bp, Homo sapiens
atgatgagtgtcctttacaaatcttcagggaatggccaagtgacaaaggttgcactgctgtgatccatcctcatctcctaaagatgcatcctgacttatc

SEQ ID NO: 286472 - DNA, 100 bp, Homo sapiens
cgagcgggcggcgggcgcgcgcaccatgggggagaaacccgggaccaggcatgtcgggccccaggcctgtggtgctgagcgggccttcgggagctgggaa

SEQ ID NO: 286473 - DNA, 75 bp, Homo sapiens
gcggtgcctgagctgagtgaggccgaggccgggaggccgtgcccggaggttttgacctgtagcagagaaccaatt

SEQ ID NO: 286474 - DNA, 75 bp, Homo sapiens
ttgacggacaggaggcgaaatgtgcaaatgtttatgggtctctgacattgacagagcctggacgttggaggaagc

SEQ ID NO: 286475 - DNA, 74 bp, Homo sapiens
agaagctgcggccgcacctggccaagtataaggatgcatttatgaaagcaaatcctggctacaaatggtgtcct

SEQ ID NO: 286476 - DNA, 100 bp, Homo sapiens
ttggtctcagcattgtgggaggaaaagacacacccttgacacaagatggtgaaggagacccagtactatgacatcctgggcgtgaagcccagcgcgtccc

SEQ ID NO: 286477 - DNA, 99 bp, Homo sapiens
cgagagcggattatcgcagaatgcaacgccattcgccaggctcttcaggatctgctttcagagtacatgaacaacccttacgaaggatgaatccaaaag

SEQ ID NO: 286478 - DNA, 75 bp, Homo sapiens
ctcgtcagcactgactttcagctatggaatcgtgttgttaataacagtactggtagtggaagggattgccgtggc

SEQ ID NO: 286479 - DNA, 75 bp, Homo sapiens
ctgcctcccagagaggggagccggcgaggatcaaaatcttcgaaggagggctgtgggtgagcgtggaggatgctc

SEQ ID NO: 286480 - DNA, 100 bp, Homo sapiens
tcaacatcgccagatatcaattaggcatagagaaactactcgatcctgaaggtttgtgaatcttatctcagagaggaagacaaagtttgccaaggtcccc

SEQ ID NO: 286481 - DNA, 90 bp, Homo sapiens
gcccccaccccatccccgggaggattacagagttagtcacattgacttatttactgaaccagaagggttaggaatcctaagttcctactt

SEQ ID NO: 286482 - DNA, 144 bp, Homo sapiens
ccccccctttattaccctttgtgtcatcctccacagctccagggaaggcactcaaaagtggggggcaggaaagggagtcgtcgcatggtggatgtcatggacgtgaacacacagaaaggcattgaaatgaccatggctcagtgg

SEQ ID NO: 286483 - DNA, 75 bp, Homo sapiens
gttcacatttgatcatggcatgagttttgaaaagaaacttgctccagaagaatgcttttcccctttggatctttt

SEQ ID NO: 286484 - DNA, 106 bp, Homo sapiens
cagagaccacatttgaagtatatgttgaagtggcctatcccaggacaggtggcactctttcaggccctcagtaccgcctggagaagcagagcgagcccaatgtcgc

SEQ ID NO: 286485 - DNA, 82 bp, Homo sapiens
ctcgccatgccggcccggcggctgctgctgctgctgacgctgctgctgcccggcctcgggtcacattaactttgctctagaa

SEQ ID NO: 286486 - DNA, 83 bp, Homo sapiens
cttggcccttgttcccccaaatgtctgactctgactctcggactgagaaacgcaagccacgccgcaatgaagagcttcttaca

SEQ ID NO: 286487 - DNA, 82 bp, Homo sapiens
ctccggcgctcgccatggccgacgaaaagcccaaggcggtgcgtctttctacgtgaataggattttgtggctggccagatac

SEQ ID NO: 286488 - DNA, 100 bp, Homo sapiens
aggatccagtgttcaccatcctggccccggaaggtatatgaatgacctaaaggtacaaataaagacggagagagaacagtgccaactgggagcagggcaa

SEQ ID NO: 286489 - DNA, 80 bp, Homo sapiens
caggacaccctctctacagtaaatacatggtttaaccaccaaggactctgagagctggcaggtctgagtaaccctggtaa

SEQ ID NO: 286490 - DNA, 75 bp, Homo sapiens
gccaggctgcgcagtgaagaaaatgagtgtgaccaattcagtgaaaggaacgaatgcgattctctggacctgttt

SEQ ID NO: 286491 - DNA, 75 bp, Homo sapiens
catgtggaaggtgcgcgagctggtggacaaagcgatttggaatgccctgacagataattatgggaatgtgatgcc

SEQ ID NO: 286492 - DNA, 90 bp, Homo sapiens
ctgaaaacctcagtgttgatctcacctatgatattcagtctttcacagatacagggaaatcctcattgacgattcaatttgttgaaggcc

SEQ ID NO: 286493 - DNA, 51 bp, Homo sapiens
aggctataaaagcacagttttaagagagggttcatagtggcgtcatgcacg

SEQ ID NO: 286494 - DNA, 75 bp, Homo sapiens
gctcggcaggaagtgggaccggtgtctggcggatgcggtcgtgaagataggaaaacctcacagcacgggtagctc

SEQ ID NO: 286495 - DNA, 80 bp, Homo sapiens
ctggcagtcaggacatattcgatgccatcgtgatggcggatgagagacaatgcagatcttcgtgaagactctgactggta

SEQ ID NO: 286496 - DNA, 75 bp, Homo sapiens
gaagaagatgaacccacagatttgacaccagagccggaagtggaaccgcccagtgcccccgagctcaagcaaggg

SEQ ID NO: 286497 - DNA, 82 bp, Homo sapiens
cttcggcagtccacccaccgccgccgcctcccagattttgggaaccagtaggacattgacatacatccgagaacattctgtg

SEQ ID NO: 286498 - DNA, 76 bp, Homo sapiens
tgcaaggtccggctgctggatggaggggattttgtcagcttgtcgtcaagtccgggaccatgtctggagaactacc

SEQ ID NO: 286499 - DNA, 82 bp, Homo sapiens
gggctctcagccagcgccccagggtacttcgagaggcagcagggccctggggacaaggggtgatgcccggtatctgatctcc

SEQ ID NO: 286500 - DNA, 100 bp, Homo sapiens
gccgtgcaggcagctgaggctggtgccgaccttgtcctgctggacaacttcaagccagaggcgcggatcaagaagatcatgcagacggacgaagagattg

SEQ ID NO: 286501 - DNA, 98 bp, Homo sapiens
ttggacagcaggatgtttccaaagtcctgctaggccctctctctccctacaccacaatcctggaggaagagaaggctcagcaagaagagcgcatgagg

SEQ ID NO: 286502 - DNA, 98 bp, Homo sapiens
gcggagtgaggcgcagtcgttcgcccaggctttggcccggcttccggagccagatgaaaactcgctggatttttcctcctgtatgttacggcctggga

SEQ ID NO: 286503 - DNA, 76 bp, Homo sapiens
tccattgatctcttggagcagctggggatcatgatggcccactgcgtgaccttggttcagctgtccatttcctgtg

SEQ ID NO: 286504 - DNA, 89 bp, Homo sapiens
cgcggccatgtctgccaggtggtcatttgcaccgtccaggtgaggttagagctggggcatcgcgcccaactgcgcaagaagcccaccac

SEQ ID NO: 286505 - DNA, 83 bp, Homo sapiens
gtttgcctgggtggaattttaccttttggttcaatctttattgaaatgatggatcatttcttattcggaaaagctctggccat

SEQ ID NO: 286506 - DNA, 80 bp, Homo sapiens
cttgcagtacaacatctacaatgttggctcaagtgtgaagcctcagtttaggtcatctggtggttcagaacactcaacag

SEQ ID NO: 286507 - DNA, 89 bp, Homo sapiens
cgcgctgctgggcacccacggagcctccggggctgtgtggacgaatgtggaacctcgctctgtggctgtgttcccttggcactccttag

SEQ ID NO: 286508 - DNA, 82 bp, Homo sapiens
cggtaatgctggtggtctgcatcaccaccggatcaacttcgacaaataacctgcctagagctggaacgttacctccagagcg

SEQ ID NO: 286509 - DNA, 87 bp, Homo sapiens
cacagaccgtgagctggaggagtaccgcagggaggtggagaggaagcagaagggctctgaaggtgtggcatgcagcattttggaagg

SEQ ID NO: 286510 - DNA, 100 bp, Homo sapiens
gcctgggaagccaacgaccacacgcagtgatggtaatgcccgaaggagcagacacggtgtccaggcccagtcccgactaccccatgttacccacaattcc

SEQ ID NO: 286511 - DNA, 100 bp, Homo sapiens
cttcagggatgagtcatgtggcagtggaaaatgcgctcgggctggaccagcaggacacagaatttccaggtgttgtggtgcgaccaattggtgaatttcg

SEQ ID NO: 286512 - DNA, 98 bp, Homo sapiens
ctggaatcgacgaacaggaaaactggcatgaaggcaaagaaaacatcagagctgctgttgcaggtgatgcagaagatggggaagaatatgatgaccct

SEQ ID NO: 286513 - DNA, 98 bp, Homo sapiens
agcaatgagccagggcaaaacagctgcttcctcaacagtgccctgcagggcataattggaatatcatttggagaaagtgtcatggaagttctgcgtcc

SEQ ID NO: 286514 - DNA, 75 bp, Homo sapiens
ctgaactcaggacttggcaagaatccatcaacagcatcaagtccagactaagcaaaagtgggcacatacaaactc

SEQ ID NO: 286515 - DNA, 82 bp, Homo sapiens
ctggacggcgagcgcgagcggcgcgagaaactgcagccgctccggcctccttgctgttcctgggatacgccacactcagtct

SEQ ID NO: 286516 - DNA, 100 bp, Homo sapiens
tcattaaagaactacattactattaaggaccaagaatcgccttcagccctgtctggtgcatccttggcagaaagtgaggaggaaaacacccccattgtga

SEQ ID NO: 286517 - DNA, 90 bp, Homo sapiens
ccctccgcccgtggggactggctgctgccgtcgcagccttcacagttgttgatcacatagcatggtcatccactcacagcttaaaaaaat

SEQ ID NO: 286518 - DNA, 100 bp, Homo sapiens
tcataggattactgatgctggaggcttttgaacacttgcagcaattagaattaataaagcccatggaaagaacttcaggaaattcacagagagagtacca

SEQ ID NO: 286519 - DNA, 87 bp, Homo sapiens
agaatatggagagagccctttgcaggatgcagaagaagccaaaaacattctgggaactgtggctgcaccatctgtcttcatcttccc

SEQ ID NO: 286520 - DNA, 75 bp, Homo sapiens
agtccctcgtccagccacccccagacacctggatttcattagcatcatgacctacgattttcatggagcctggcg

SEQ ID NO: 286521 - DNA, 100 bp, Homo sapiens
ccaagaactcagcaccctgtgtgatattctttgatgaagtggatgctttatgtcctcgaagatcagaccgagaggctggagtgcggtggtgtgatctcgg

SEQ ID NO: 286522 - DNA, 83 bp, Homo sapiens
caggtttcggcacatggagattgattggaagcatcagttcacagcagtaatgcacactgtacagataagacaattgaagctgc

SEQ ID NO: 286523 - DNA, 120 bp, Homo sapiens
caggagctgctttttcaatgagaagaatgaacagacctagtgggcgttgcctttagacccagagcatctgttaagaacatcttcagccagccggcctgcttccctgccaagagtgcctgc

SEQ ID NO: 286524 - DNA, 100 bp, Homo sapiens
caaagtggctcatccccaaagcgcttaatagaattataccgaaaagaagttctagagaaattaatagaaaaatgtgtttctaaaggctacgtcttccaga

SEQ ID NO: 286525 - DNA, 75 bp, Homo sapiens
gagacgcagatgtggacttgaaagaagctgcagcggaggaaggcgagatatgtataatgcgatattcagtaccga

SEQ ID NO: 286526 - DNA, 75 bp, Homo sapiens
tgaagaaatatggtattccctttgacaagcattactctactgactggcagagacaggagaggtagatgtccacgc

SEQ ID NO: 286527 - DNA, 82 bp, Homo sapiens
cagagctgaggactgcctgtttgcaggactggcattgcggactgacctccagggagaggcccagatctgatctgcagagatc

SEQ ID NO: 286528 - DNA, 96 bp, Homo sapiens
ccgcgggcggcggaggcagcggggccgggatggaggacgttaactctaacgtgaacgcggaccaggaggagctgtgccgccagcgtatggccacgc

SEQ ID NO: 286529 - DNA, 75 bp, Homo sapiens
gcacataaaaacactttctgaagctcatgaagactgtgtaaataatatcagacgcaagatggctgtcctctctaa

SEQ ID NO: 286530 - DNA, 100 bp, Homo sapiens
tggtctatgacttactcaccattgctcttggaagaagaggccagtatgagatgctgtcagaggcattcctgcatcgcatccggcagaacgtggccgactc

SEQ ID NO: 286531 - DNA, 75 bp, Homo sapiens
agcgccagagaggacgtttccaactcaaacgatacctctgggtattctagttgtgcgtggagactgtgatttgga

SEQ ID NO: 286532 - DNA, 50 bp, Homo sapiens
gggaggtgccagggctgaaccagttggataacagggcaagattcagagga

SEQ ID NO: 286533 - DNA, 101 bp, Homo sapiens
aagaaaccagccgaacttcagggtttccaccgttcgttcaaggaaataatgcaaaaggtgtcccaaggctcctgaccagtgaacaaagatttgagaaagac

SEQ ID NO: 286534 - DNA, 83 bp, Homo sapiens
gtccagcagatggcggatgccctgcagtacctgcagaaggtctctggagacatcttcagcagatgaaggatttgggggcagag

SEQ ID NO: 286535 - DNA, 111 bp, Homo sapiens
cgcactacgacccaatggccaatatccacaccttttctgcctgcctagtcatgatgctatggactcctactacgactacatatgggatgttaccattttggaatacttgac

SEQ ID NO: 286536 - DNA, 80 bp, Homo sapiens
ggtggctgggagcagcgcagcctccggaggaggaggcggaggccgaggaagggaaaaggccgaggcatcagcgtgtgaag

SEQ ID NO: 286537 - DNA, 75 bp, Homo sapiens
gtgataaactgaaccctaaaacaattaatccgctttctaaaaccaatttttccaacaacaacgatttccgtgctc

SEQ ID NO: 286538 - DNA, 51 bp, Homo sapiens
gcccaggcaccttctccatgcattgcaaggaatgcctaaacgcctcccacc

SEQ ID NO: 286539 - DNA, 100 bp, Homo sapiens
agatagtgttttatttttaaagaagattaacacgtgctggcaggaccactgcagacaaatggtgaatttccagggccatccagagaagctgatcagactc

SEQ ID NO: 286540 - DNA, 101 bp, Homo sapiens
ctggttccccaacatgcctcaccctcatctatatcctttggcagctcacagtttaacggatgaagagtcccggaaaaattgggaagaatttggaaatccag

SEQ ID NO: 286541 - DNA, 98 bp, Homo sapiens
gatcctgggcgatgcctccacagcttccgaaaactcagggactacgctgccaaaggctgctgggaagcgcaggaatcagagatcattgatttcttcct

SEQ ID NO: 286542 - DNA, 75 bp, Homo sapiens
acatttaagagtgaatcagaccttcaactggaatacaatcctcatcaccgggggcatcgtggccacagctgggcg

SEQ ID NO: 286543 - DNA, 75 bp, Homo sapiens
ccttagaacaccaaagattgtctctggcaaagaatttcagaaactgtggaggagtgtcactgtagattccatgga

SEQ ID NO: 286544 - DNA, 75 bp, Homo sapiens
ctcgaatgggcacacctgtgtagcttcagacagcaaagtcctgacatgtgcagccgtgtggaggatgccgaagga

SEQ ID NO: 286545 - DNA, 96 bp, Homo sapiens
caggcgaaattcgccgtggcaccagtggtgctaaaatgatgtattttctggacaagtcaaggcaggagaaagcaattgctatagccactagactag

SEQ ID NO: 286546 - DNA, 100 bp, Homo sapiens
tatgaaagtgattttgatagaagactttcgagagtgtatacaaatgacagacaccaagctggatggtttccttttaggcaagaaggaggtcatcagcagg

SEQ ID NO: 286547 - DNA, 90 bp, Homo sapiens
ttttccttcaacttgtggatgcaggcaaggtggatgatgccagagctctcctacaggcagtatttggcagtcgtattcagagataaaccc

SEQ ID NO: 286548 - DNA, 74 bp, Homo sapiens
tctgcttggtgtggagccatgaagcttgcgcgatctctggcctcttcaactgcatcaccatccaccctctgaac

SEQ ID NO: 286549 - DNA, 71 bp, Homo sapiens
ggaatgaggcgggggtcggcccggggctcggagaatgggcagattgaaaaggctgtggtgtctcagcgcct

SEQ ID NO: 286550 - DNA, 100 bp, Homo sapiens
ccaaggaaaaactggagagcttcatcaaaaatagtgatagctttgataagaatcactagatttgatctacttggcgactttggaaggtttaattggctgg

SEQ ID NO: 286551 - DNA, 100 bp, Homo sapiens
ctttgggactctgaaggctgaaggagagacagcgtctggagaccatcctcagtctctgtgctgaatacacaaagcctgacagtcgcttatctactgggac

SEQ ID NO: 286552 - DNA, 100 bp, Homo sapiens
tcaggggaacgatggccatggagtccacagccactgccgccgtcgccgcggagctggtttctgccgacaagactgtagaagcggccaggaagaaaaccac

SEQ ID NO: 286553 - DNA, 76 bp, Homo sapiens
aggaccctgcggccgtgtctctgcccacgtcgagcgtgcccgagacccgagagcagcccgacggccatggaggctg

SEQ ID NO: 286554 - DNA, 82 bp, Homo sapiens
tcggcttcaaagagaaaaggcaacatcctgtcacaggccatgctctggcaaaaacgtctctaattaacagaagatggcaaag

SEQ ID NO: 286555 - DNA, 98 bp, Homo sapiens
ctgctgctgctgctgcatgtctaccaggagaggagggaactgcggagcgggtgattttacaacgagatgctgctctccatagggatgctcatgctgtc

SEQ ID NO: 286556 - DNA, 90 bp, Homo sapiens
cggaggagagcgacatggacaaagccatcaaggagagcgacttgcagttgtggaggtacagtgtgaacggctgaggatgctctaccggga

SEQ ID NO: 286557 - DNA, 96 bp, Homo sapiens
tccctgcaacgtgcctcgaaggccaggatggggtgcaggatgagttttctctgcagcctgaagaagatagcagaccccacgttagctgaaatggga

SEQ ID NO: 286558 - DNA, 90 bp, Homo sapiens
tacatagacggatctcaatggaggttgacctgacagttcaagaaaaggagaaatatcttaatgtgtctcgctggttttgtcacattcagc

SEQ ID NO: 286559 - DNA, 75 bp, Homo sapiens
cacgcgcagaccttcgttgccctctgtgccacagctgctgtgacttactcgaagcctcgattggccacattttgg

SEQ ID NO: 286560 - DNA, 100 bp, Homo sapiens
ctgcgggaaggtgcggggagcggagccatggcctccggaagtcgagggaccgaacggactgtagtaatggataaatccaaaggggtgcctgtgattagtg

SEQ ID NO: 286561 - DNA, 82 bp, Homo sapiens
cttagctgtgctcgcgctactctctctttctggcctggaggctatccagcaaagaagcttccggttctgaggtcctggaggt

SEQ ID NO: 286562 - DNA, 83 bp, Homo sapiens
acaatggtcaccgtctcttcaggccataaaattttgagtagaaaaatccagaaatttgaaaatcagtatcgtggtagagagct

SEQ ID NO: 286563 - DNA, 89 bp, Homo sapiens
gggcgacgagctgaccctgggagacatcgacgtggctttgaagcgtatgttgaatttcaatgtgcctcatattaaaaacagcacaggag

SEQ ID NO: 286564 - DNA, 90 bp, Homo sapiens
ggagaaggggagtcaatacctccggatactcagtttgtaaaaacatggcggatccagaattctggactggaatgtcacgtggaataccag

SEQ ID NO: 286565 - DNA, 100 bp, Homo sapiens
aacttttatccagctctaaactttatttcctcccagaagacactccccagggcagaaatagcgaccatggcgagtctgatgccaatgcaagttacttaag

SEQ ID NO: 286566 - DNA, 77 bp, Homo sapiens
aacgaagatattgatctaatgatcagcaggcaaagattgtgtgcaacatttcatacaccatttagtcacctaggcca

SEQ ID NO: 286567 - DNA, 82 bp, Homo sapiens
cgggaccggctgtatgattaggccacaatcttcaatgagtaaacatattcctatcaatgtccgagttaccaccatggatgca

SEQ ID NO: 286568 - DNA, 74 bp, Homo sapiens
acattccttcagaaaagatctggcgcccagaccttgttctctataacaagtgctccttgtcttctgagatgttg

SEQ ID NO: 286569 - DNA, 82 bp, Homo sapiens
cactctttccgccctaatggaggtctccagtttcgaatggcgccattttgcggtacggaagctacacagcaacacgtatagg

SEQ ID NO: 286570 - DNA, 90 bp, Homo sapiens
taactccttgtgtcacatgtccagtaccaacacaaagtggccaggaaaattctaaaggtcctactagtagagatagaagttctcctcccc

SEQ ID NO: 286571 - DNA, 80 bp, Homo sapiens
gaaaaagccctggtggagctgaaggttgcagtggtctggaactgaaagtgatgcgtatttctgagttatgcctgtattta

SEQ ID NO: 286572 - DNA, 100 bp, Homo sapiens
ggagcctgttcgcgtcgactgcccagagtccgcgaatcctccgctccgagcccgtccggactcccccgatcccaggaacacccctcactaggccaacttt

SEQ ID NO: 286573 - DNA, 82 bp, Homo sapiens
ttggccttgaggaagaagacatgctctacagtgctcagtctttgaggtggttatcaccaggctaaaactggacaaggatcgg

SEQ ID NO: 286574 - DNA, 75 bp, Homo sapiens
ccaaggccaaccgcgagaagatgacccagattgaggtggtgccttctgcctctgccctgatcatcaaagccctca

SEQ ID NO: 286575 - DNA, 75 bp, Homo sapiens
tgaagcagctggaggaagacctgtatgacggccaggtgctgcagaagctcttggcagggagagcaacaagccccg

SEQ ID NO: 286576 - DNA, 75 bp, Homo sapiens
cccaatggtgggcaagtggctggagaaacaagaacagaaaggcctaaagaatgtatttgacgaagcaatattggc

SEQ ID NO: 286577 - DNA, 75 bp, Homo sapiens
gtgtccttcatcaacatcaagacactcaatgagtgggattccaggaaggaccctctattgtcccaggcctgtgtt

SEQ ID NO: 286578 - DNA, 83 bp, Homo sapiens
gtttgtggatcgctgtgatcgtcacttgggaacccctcacagtccacatccctgcactacatgagcccctaccagctgaacgc

SEQ ID NO: 286579 - DNA, 100 bp, Homo sapiens
cgctcgtcctccacccctggaatccctgtctgggtgcggactcggagaagccctcgagcatccccacaggcttatgatcaacatttaaatatgatcttgg

SEQ ID NO: 286580 - DNA, 75 bp, Homo sapiens
tctaggtgagtcgcggtgggtcctcgcttgcagttcagcgaccacggacctcatgcagcgcctggggcagagcag

SEQ ID NO: 286581 - DNA, 51 bp, Homo sapiens
gatgaagaaccgcagatccagaaactggctgactgtgctcagctgctggac

SEQ ID NO: 286582 - DNA, 83 bp, Homo sapiens
gcgctactctctctttctggcctggaggctatccagcctgcctgtggaggaaccgattgtgtccacagatgaggtcatcttcc

SEQ ID NO: 286583 - DNA, 75 bp, Homo sapiens
tgactcagagagggaagagattcagccagcacactcctcgcgagcaagaaaagtcctccatacattttctcccca

SEQ ID NO: 286584 - DNA, 75 bp, Homo sapiens
gaccttgggcatcatcggacttgagctgcctggagttcagcctcagaatccaggagttcattgaactcatccggc

SEQ ID NO: 286585 - DNA, 100 bp, Homo sapiens
tgcagtgttaagttatgctgtggaggaagaacatgcatatttgggtccaactgtgaagccagatgataagcagaaaaatatggctcaggagactaaccag

SEQ ID NO: 286586 - DNA, 82 bp, Homo sapiens
caccgacagtgccctgagggccttcgagagctaccgcgccagacagccatgccagtgacggtaacccgcaccaccatcacaa

SEQ ID NO: 286587 - DNA, 111 bp, Homo sapiens
gcgctgcccactccgcgtctgaggaggtgcgggagctcgagggcaagaccggctacaatgcagatcttcgtgaagactctgactggtaagaccatcaccctcgaggttgag

SEQ ID NO: 286588 - DNA, 88 bp, Homo sapiens
taggaggtgggcaggctctgaggaatcatcaatcaagagaagagaacatcgccagaaacacgagagggctgctcacaatttatatggc

SEQ ID NO: 286589 - DNA, 83 bp, Homo sapiens
cactccgcccggccccagccctagcgctggccgcgaccccggcgattctggaacttttcaaagcctgactctcttcttgaaac

SEQ ID NO: 286590 - DNA, 100 bp, Homo sapiens
ctgcggcagacggcgacagtggcggcggcgccatggcagggcttgcaggagtacgagagggcctccaaagtggaccagtttgtgacgcgcttcctgctgc

SEQ ID NO: 286591 - DNA, 100 bp, Homo sapiens
ttttactgggataattatccaaataaattgcaagcattctatccaaatggcttggtccagcatagtttatcagctgattcccaatgttcagcagctggaa

SEQ ID NO: 286592 - DNA, 83 bp, Homo sapiens
gaattcatacctgaagagaaatttggaagccatcaatacattgccgagcccctgccactgatggacctgtgccggagatccat

SEQ ID NO: 286593 - DNA, 101 bp, Homo sapiens
caaagctatctccggggtgctgatgcccactgtgctgcaggcattacctgacagaaaccactcaagaaggttattattgaagaaactggtaatttgataca

SEQ ID NO: 286594 - DNA, 98 bp, Homo sapiens
ttcagatctaactctagaagaaatgaaaaaacaggctgctgtccagtgtcttcgatctgcttctgatgaacacccagtcagcttgaagagtttcaaat

SEQ ID NO: 286595 - DNA, 98 bp, Homo sapiens
cagccgctgttttgccggaggagcccctcaggccttggaggtccccctccccactaagtgcctctttgcatagcaccagtccccacccgcacgctctc

SEQ ID NO: 286596 - DNA, 137 bp, Homo sapiens
gagaaaaatcacgggctgtccaggaactgtcggaacagaaccaaaggctattggatcagctcagcagggttcgagactataagaggcttacccccatttctgtgctggaccatgcactagaatctttagataacctt

SEQ ID NO: 286597 - DNA, 123 bp, Homo sapiens
cgtctacactgtacatgctttttattacaagactacggagcataggaggaaaattcatcatctgcttcttggacacttaatgattgttggcaagaaatgtgctgctgatctgggcctgaataa

SEQ ID NO: 286598 - DNA, 51 bp, Homo sapiens
ctgcccggccacgaccccgtctgggagcttgtcagctcatttgcagcttac

SEQ ID NO: 286599 - DNA, 75 bp, Homo sapiens
gggctgccggctgtgcgggcgctccggagagaccgacagaagatgtttgagacggaggcagatgagaagagggag

SEQ ID NO: 286600 - DNA, 75 bp, Homo sapiens
gtctgcggaagtgcagctgcctcagttcttagcgcagctactctcggaaccgcacgtttgacacgtacattgggc

SEQ ID NO: 286601 - DNA, 74 bp, Homo sapiens
gagttcttagaaatgatcgacgagaaggtcagctcaagtaatgtcgtcttgaagacgggatttgattttctgga

SEQ ID NO: 286602 - DNA, 100 bp, Homo sapiens
cgccggctccgcggcgatggcgctctataacccctaccgccacgacatccacagttatttcaggaaattcttctagtgccagcgtttcctcgtcagtaac

SEQ ID NO: 286603 - DNA, 100 bp, Homo sapiens
gagctgattcctgccttgtcttctccactgttcctggaggaatccgagaagagcagagcggagggagccccagacacgaggctgggaggcggcagaatgc

SEQ ID NO: 286604 - DNA, 97 bp, Homo sapiens
gaatggaacaaaggcattgtgggacatgtggcagcgcttggtgagcccttgaacatcaaagatgcatatgagggccaccaccaccactgaagacccg

SEQ ID NO: 286605 - DNA, 101 bp, Homo sapiens
gcgactgacatgtgagatctccacaaggggtacatcagagccccagtttgagggacagcgggatatccaccatgctgctgtgagactcgggcagttgtgac

SEQ ID NO: 286606 - DNA, 82 bp, Homo sapiens
tctgctcattggggcgttgaggagagaacgtcagctgcctcaacaccagcctggtgatcctgatgctggcccgacggaaaga

SEQ ID NO: 286607 - DNA, 90 bp, Homo sapiens
accctgctttttctggtgtcctgaacctggaagttgtgctttttaagagacaaagcatggaggacacaagaatgggaggaaaggcggact

SEQ ID NO: 286608 - DNA, 100 bp, Homo sapiens
attcgcatctcccgctggctggtggaatatggccgcaaccaagggtgtccgcaatgttgccagtgtctgtctgcagattggctacccaactgttgcatca

SEQ ID NO: 286609 - DNA, 82 bp, Homo sapiens
cactgcctggctgcgagcacatgatggcgatacgggagctcaaagtgtgccttctcggggagccttcacgtaaatgggtcca

SEQ ID NO: 286610 - DNA, 100 bp, Homo sapiens
tgacgccatgtcgggttattcgagtgaccgagaccgcggccgggaccgagggaaataagatatgtggaacggagttatgtatcaaaacccactttgaagg

SEQ ID NO: 286611 - DNA, 100 bp, Homo sapiens
gtggagcttggtttcgggatctcggtgctgcagacggcgagacctcctgcacaggttcaaaccttgtactactcagctgatcacaagctgcttgatggga

SEQ ID NO: 286612 - DNA, 51 bp, Homo sapiens
aaactctgagcaatgttgaggtgtttatggacatggatttgattgacatac

SEQ ID NO: 286613 - DNA, 75 bp, Homo sapiens
acctgggtctctggagaatgatggaaaggcagactacaagttactgagcacctccctgagaaaattgaaagtagt

SEQ ID NO: 286614 - DNA, 50 bp, Homo sapiens
ggcctcgccatgtcctgctgcccgataaatttgcgcctcattttggtaag

SEQ ID NO: 286615 - DNA, 83 bp, Homo sapiens
cggtactcttcagggatgagtcatgtggcagtggaaaatgcgctcgggctggaccagcaggagggtgtgaagacagagaatga

SEQ ID NO: 286616 - DNA, 75 bp, Homo sapiens
atgccatgtcaactttgttcggaagaggatgtactgagtaaagatgctggggaatgtgcaatatgccttgaagaa

SEQ ID NO: 286617 - DNA, 96 bp, Homo sapiens
atagcccccaagatggccgccaatgtgggatcgatgtttcaatattggaagcgatttgatctacggcgactccagagagcgcctgctcgctgtgcc

SEQ ID NO: 286618 - DNA, 113 bp, Homo sapiens
catcgccctggctctgaatggctttggtgggatgtgtatgaccttcacctcattaacattggaatcgaagcctcttaaaatggcagatgacttggacttcgagacaggagatg

SEQ ID NO: 286619 - DNA, 83 bp, Homo sapiens
ctccgaaccccttcatgcccaaatcccggaaactccagcgtgtctccagccgtgatcagtcgcatcgaatacattcattcaaa

SEQ ID NO: 286620 - DNA, 82 bp, Homo sapiens
cgggcgtcgggcgcgggcaaggccatcggcgtcctgaccagcggcggcgacgcgcaagcgtgagtgcatctccatccacgtt

SEQ ID NO: 286621 - DNA, 101 bp, Homo sapiens
cgcccggccaagctatcttctcgctagcaggttatgaagacagtatggagtttccagaccatagtagacatttgctacagtgtctgagcgagcagagacac

SEQ ID NO: 286622 - DNA, 97 bp, Homo sapiens
tcctctccattgacaaaatccatctcattaatgacaatcagccatcctggattggacaagccccagtttgagggacagcgggatatccaccatgctg

SEQ ID NO: 286623 - DNA, 90 bp, Homo sapiens
catcgaccggcgacagcagccaggagtcatgagcgacagcggcgagcagaactacggcgagcggattgaccctcttgctggaatgacatc

SEQ ID NO: 286624 - DNA, 98 bp, Homo sapiens
cctgaagttaatggttctatgaaacagtgtatcaaagtgtggactgagggattcgataaacaagtggatgtgtcatatattgccaaacattacaacat

SEQ ID NO: 286625 - DNA, 75 bp, Homo sapiens
gcacacatgtagagacctttgtatcgtccaagccatcttcccaacacctgatcccgcagctctaaaggatcgccg

SEQ ID NO: 286626 - DNA, 96 bp, Homo sapiens
caagacaagctcagaactgagaagctgtcaccacagtgtaaagaactggccaagtccaaagccgaagtggcctgcattgcagtgtatgaaacagac

SEQ ID NO: 286627 - DNA, 82 bp, Homo sapiens
acacatattctgtctgtccacgatagtgccaggcctatgttggaggatttctctctgatcaaacggacagttcaggactcag

SEQ ID NO: 286628 - DNA, 83 bp, Homo sapiens
agaccatctaccagtctgcaagcgtcttcaaaggagccccacatgagatcatggaagggaagtggttgctgtgtatgttactg

SEQ ID NO: 286629 - DNA, 106 bp, Homo sapiens
cgcgcacctgggcgccatccgccctggctccgctgcacgagctccacgcccgtaccccggcgtcacgctcagtagagacggggtttcaccgtgttagccaggatgg

SEQ ID NO: 286630 - DNA, 114 bp, Homo sapiens
gcgaattactctaagcgcggctctcagaagggtgcaagaagaatcagtggagtcctttggaacctctcctcatgcgatgcactcaaaatgccaatcatccaggatgccctagca

SEQ ID NO: 286631 - DNA, 75 bp, Homo sapiens
cgtcgtcgcttcactgtggctcatacatggtaactgtggagaattttttacgggtattaactgggaggatcccac

SEQ ID NO: 286632 - DNA, 78 bp, Homo sapiens
aaaaatcccaaggtctgcaaagagtttatgtggccgaggcagacaagtggaattaggccttgctgcaggggacttcat

SEQ ID NO: 286633 - DNA, 73 bp, Homo sapiens
ctctaaacggactcatgtactttgtcagatatctgtgtgaggctggattttctttgcctactccaaccaaagc

SEQ ID NO: 286634 - DNA, 82 bp, Homo sapiens
ggtgcgtggccttcatcggtcaggcccgcgctgagggccgtgcggtgttggtgcactgatgtcaagccctccaacatcctag

SEQ ID NO: 286635 - DNA, 87 bp, Homo sapiens
tattttgtggaaagttccaaactgtctgatgctggatttggagcaagaggtggtggtggccttcccccgaagaaatttggtaatcct

SEQ ID NO: 286636 - DNA, 101 bp, Homo sapiens
ggatgaacagagaaagcgacaggacaatgtggagctcatactgaaaaccatcaataaccagcacagcgttgagagtcaagacaacgatcagcccgactatg

SEQ ID NO: 286637 - DNA, 83 bp, Homo sapiens
cttcctcaggggttccagtgcgtgaagcgtgacattcaggaaaacgatgaagaggcagtgcaagtcaaagagcagagcatcct

SEQ ID NO: 286638 - DNA, 98 bp, Homo sapiens
gcagaaggactgcctcactgagcaaccaagaagagaagaagaaggaggttcctgctgtgccagaaacccttaagaaaaagcgaaggaatttcgcagag

SEQ ID NO: 286639 - DNA, 101 bp, Homo sapiens
gaaaaaagtcagaaactttaaaattttctacagagcacagaacagaacttcttacagaagcattggcaagaaacctattggaattcgagacttaattaatg

SEQ ID NO: 286640 - DNA, 82 bp, Homo sapiens
ccgccgcagccatgaccgtggagttcgaggagtgcgtcaaggactccccgcgcttcaggcactatgtcgtccgaggcccaga

SEQ ID NO: 286641 - DNA, 75 bp, Homo sapiens
aaagttgaaaacaaagtgctggagtgggaatagctttgcgaaaaatgggcgcaatggccaagccagattgtatca

SEQ ID NO: 286642 - DNA, 97 bp, Homo sapiens
gaatgacagcaagaggcaaaacttcggacatagaggccaaccaacctttggaggttaaggctacctttccagataatccaacagctaaatcaccagt

SEQ ID NO: 286643 - DNA, 100 bp, Homo sapiens
agaggagctgcactgactctgcagccaggacgaagtccaggaaggccagccagttcggccaccctcggcctgcccagcagtgccctggatgtgtcttgct

SEQ ID NO: 286644 - DNA, 99 bp, Homo sapiens
tgtcctttcgatcctcagcagccttttgcttcagtaatgacaggtgtcatcaatcttacagaagaagtgctgtgggtcaaagtgaatataaacatgaat

SEQ ID NO: 286645 - DNA, 90 bp, Homo sapiens
gtagacttgctaaaggagaagtctggtgtaatacaagatgctttaaagaagctgatggtgagaccattctaaaaggcctccagtccattt

SEQ ID NO: 286646 - DNA, 100 bp, Homo sapiens
ctttcgtgtggtagccacaggctctggctgtgccctggtccagctgcagccactgacagggattgtcaatgaggcagatcagattccgatttgacgggca

SEQ ID NO: 286647 - DNA, 100 bp, Homo sapiens
acgggagttgggaggacccgggacaccgcacagccgggaaatggtagtaaacctattgatggcaattttgctgactgtggaagtgactcatccaaactcc

SEQ ID NO: 286648 - DNA, 73 bp, Homo sapiens
ggcagtctctccctgccaggctcttcatccaaggattttaagcttgactttggcaattcccaaggcaaaacaa

SEQ ID NO: 286649 - DNA, 71 bp, Homo sapiens
gacagtgcggaagcacagggagcagaaggagcgcaagaagcgggacctggacttcaccatcgacctggact

SEQ ID NO: 286650 - DNA, 75 bp, Homo sapiens
ctcagaggaagttcctgtttccaaggctcaggcagctgtccaaggacctgttggtacagatttcaaacccttaaa

SEQ ID NO: 286651 - DNA, 100 bp, Homo sapiens
acaaaatccagtccagccacaacttccagctggagagcgtcaacaagctgtaccaggacgaaaagaacaccttccaccatgaccacctcagcaagttccc

SEQ ID NO: 286652 - DNA, 50 bp, Homo sapiens
acctggtccagctgcccgcaggggtggtagtgggcagcagtcagtgacag

SEQ ID NO: 286653 - DNA, 100 bp, Homo sapiens
atctttggctcggggcattgattccagttaccgtccatctcaaaagggtaatcctggccggccgggtctcaatggaatgaaaggagatcctggtctccct

SEQ ID NO: 286654 - DNA, 90 bp, Homo sapiens
aattttgaagtacaccgtggtgacattgtatcattggtgtgtgggtacgccacgctgcatcacgtcattgacaagtccacagaagaccgg

SEQ ID NO: 286655 - DNA, 100 bp, Homo sapiens
gaattatataaagacctcatcttgtattctagtgtgtcagtattgggactatttagtccaaccatgaaaacaggtggtcgtcggttttctgagggtactt

SEQ ID NO: 286656 - DNA, 105 bp, Homo sapiens
caatggcacaaagttctctcgatcagggcatacatctttcttcgacaaaggaaactatgttccaacttcctgtcaacaatcttggcagtttaagaaaagcccgga

SEQ ID NO: 286657 - DNA, 50 bp, Homo sapiens
gggaaattcaacaggagctttccagtgtgacaccatcgccacaacaggct

SEQ ID NO: 286658 - DNA, 98 bp, Homo sapiens
gagccgcagaggctcccgggctggactcaggcttctcaggcctggtctccaagtcctctcctaagaagcctcgtggacgtaacatcttcaaggccctt

SEQ ID NO: 286659 - DNA, 101 bp, Homo sapiens
ggaaggggcagtacaagcttacgtctctgctcttcagtacaatcctgcatgtaatgaatttactacacatgtgatgaaccttctccgagaacagagtagaa

SEQ ID NO: 286660 - DNA, 117 bp, Homo sapiens
cttcgctgcgctaaggaatgaaacccttccagctcgatctgctcttcgtctgcttcttcctcttcagtcaagtttctctgcaggtggatattgttcccagccagggggagatcagcg

SEQ ID NO: 286661 - DNA, 87 bp, Homo sapiens
aagcaccaccaagatgtctctaaatgagcgagaacggagaccaacctgggctgaagaaagaagattaaatgctgaaacatttggaat

SEQ ID NO: 286662 - DNA, 100 bp, Homo sapiens
cagtaccgatattaatactgctgtatctatgctataagaaacctctgtagaggagcaggatgcaaccgacaggctgtggccggacagctgctgcccagca

SEQ ID NO: 286663 - DNA, 75 bp, Homo sapiens
gcggcccccggacaagggcagcttcccgctggatcacttaggggacatcacccagaagggctatgaaaagaaaag

SEQ ID NO: 286664 - DNA, 101 bp, Homo sapiens
ccgcgtccgaggctcgcgggcggcgggcccggatcgaacggttggaagtaagcagccttgcccaaacatccagtgcagtggcctccagtaccgatggcagc

SEQ ID NO: 286665 - DNA, 75 bp, Homo sapiens
cagagccgggcctagcccagagacatggagagttgctacaacccatttcaaatcgccactgtcaccgaaaaaggt

SEQ ID NO: 286666 - DNA, 100 bp, Homo sapiens
cgcgggctcggggcgcctgcgggacggtgaggccctgctgaggactccggttctctacttttagagtcgaaaataaatcctaacactgcataccagaaac

SEQ ID NO: 286667 - DNA, 100 bp, Homo sapiens
tgtgatgccagaggtcaacaaggttctggacaagatgaagtctttctgccaggcccactcttttcttctccccggagtgcagtcaagttgaccaagaagc

SEQ ID NO: 286668 - DNA, 100 bp, Homo sapiens
cgccgcgatggctgcgcagggagagccccagaatgattgaagatagtgggaaaagaggaaataccatggcagaaagaagacagctgtttgcagagatgag

SEQ ID NO: 286669 - DNA, 50 bp, Homo sapiens
atttttagaactccacatttgaggtcctcttcctgatggatgggaacaag

SEQ ID NO: 286670 - DNA, 100 bp, Homo sapiens
gcgcttttcaccgcggccatcctgcaggcacagttgccgattacagccagtaatgttaaagtagagactcagagtgatgaagagaatgggcgtgcctgtg

SEQ ID NO: 286671 - DNA, 75 bp, Homo sapiens
ggcccgccccgcggggggtgggcgcagctcgtcgcgctccgcacaaaatgccatggacaatattaccaggcagaa

SEQ ID NO: 286672 - DNA, 102 bp, Homo sapiens
ttgaagaacctaatcttgctggtgaagcactggtaccaccagggtgtccgcaatgttgccagtgtctgtctgcagattggctacccaactgttgcatcagta

SEQ ID NO: 286673 - DNA, 100 bp, Homo sapiens
tccgccagtcaataggaagtacgagtcaatggctgccatccggaagaaactggtgattgttggtgatggagcctgtggaaagacatgcttgctcatagtc

SEQ ID NO: 286674 - DNA, 100 bp, Homo sapiens
gatgtttcaatattggaagcgctttgatttacagcagctgcaggctggagtgcagtggcgagatctcgactcactgcaggctccgactccccagttcaag

SEQ ID NO: 286675 - DNA, 98 bp, Homo sapiens
cacgatgccgcagtaccagacctgggaggagttcagccgcgctgccgagaagctttacctcgctgaccctatgaaggctgcagtgcagtggcgtgatc

SEQ ID NO: 286676 - DNA, 80 bp, Homo sapiens
gctgagaatttgaaaaatgaagatgatgtagacactggactattaggtttgtggatttccatgcagctgcctccacctgc

SEQ ID NO: 286677 - DNA, 82 bp, Homo sapiens
ttattcagagcgcgtatggagtggaaacgcttgtagggcttcaccaggtagtcaaaccacacactccattaataaggtttcc

SEQ ID NO: 286678 - DNA, 75 bp, Homo sapiens
tgccttttcgtgcaactgaaaatgacattgctaatgaacgagttgaagcagttaatatggctgaaggaatcattc

SEQ ID NO: 286679 - DNA, 80 bp, Homo sapiens
gcggggacgcgaggacccgggctgggctttcctcacccggacaaagaaacagccttggtataatagcacgttagcatcaa

SEQ ID NO: 286680 - DNA, 90 bp, Homo sapiens
tatctgtcttcggtggactccttcggcagtccacccaccgccgccgcctcccaggccgacgcctccccccagggtcagctgcgggctccc

SEQ ID NO: 286681 - DNA, 82 bp, Homo sapiens
ggcctcgtgcccttcgccttcgtgcgcttcgaggacccccggttgcttatggaaccacagagaacagtcccgtgacattcgc

SEQ ID NO: 286682 - DNA, 99 bp, Homo sapiens
ggggatttaaagcactgaaacaaatgattaagattaacttcaagttgttgtatcacggactgattcaccgagcccaaccgtactcaactcacatatttc

SEQ ID NO: 286683 - DNA, 100 bp, Homo sapiens
ccgggatggggccggccccgctgccgctgctgctgggcctcttcctccccgcgctctggcgtagagagtgatcagcagctggactgtgccttggacctaa

SEQ ID NO: 286684 - DNA, 112 bp, Homo sapiens
ccagaccctggagcctcagttggaagcagccgatccagcctgcggagcctgtggggcagctcaaagcttggattctgccgtgccactcacgaatggcgacacagaagacgat

SEQ ID NO: 286685 - DNA, 105 bp, Homo sapiens
tcatctcaaaaacaaaattctgaactcaggacttggcaattgcctgtgtccctggagtgttacacagtgcctcctgaagacaacctggccctccttcagctctac

SEQ ID NO: 286686 - DNA, 75 bp, Homo sapiens
tcccgaccctggccgccccgagcggagcctggaggttggatggcaagcatgtggtgtttggcaaagtgaaagaag

SEQ ID NO: 286687 - DNA, 51 bp, Homo sapiens
aacttaaaattgctgatgaagggtttcatgaagtcttcaaaaccctagctg

SEQ ID NO: 286688 - DNA, 78 bp, Homo sapiens
cctctttgactctgactggagaggtgatgacgaacagagtgattggttctatgaaggagaatgtgtcccaggattcac

SEQ ID NO: 286689 - DNA, 89 bp, Homo sapiens
gaaacgggtcctgctgctcaccaagctgggagtgtccactcgccttccaccagcatggcaacgtcttcacagtaccgccagctgctcag

SEQ ID NO: 286690 - DNA, 100 bp, Homo sapiens
acttcctcaccagcaccttacaggttatcaatactctggctgaccatcatcatcgtgggactgactttggtggaagtccttggttacatgtcattattgc

SEQ ID NO: 286691 - DNA, 80 bp, Homo sapiens
gttcccgctgcgctaggggaagcgggcaggaagtgggaaaactcttgcctttgccatcccaatgattcatgcggtgttgc

SEQ ID NO: 286692 - DNA, 100 bp, Homo sapiens
tgttggaaatggaacatacgggcaagtttataagggatggttgtgcgagctgttacgctggaaagaagatccttctccagaaaacagaaccctgtgggag

SEQ ID NO: 286693 - DNA, 100 bp, Homo sapiens
acggccactgcaaggggcacccggaccccacactaccccagccccagcggctgcaatgggaccttccagaccagagacggtgccgagacctcaaggccaa

SEQ ID NO: 286694 - DNA, 50 bp, Homo sapiens
ctcaccgagaagcttgaggccctgtccgtcctgtcggacacagagcggcg

SEQ ID NO: 286695 - DNA, 87 bp, Homo sapiens
aatggagacggtcatccctgtagatgtcatgaggcgagctggggaggctgaacagtacccagggggagattcgtgtcggtcctagtc

SEQ ID NO: 286696 - DNA, 89 bp, Homo sapiens
gcggcttttggcggcctttctgctcctcgcggcccaggctgaaggtgatgtggccgccctcaaccgacgcatccagctcgttgaggagg

SEQ ID NO: 286697 - DNA, 75 bp, Homo sapiens
acccctgcccctgtctaatctgctaagagacggtaaagaacaggtccaagaaaagctcaaagaaagcaaatacca

SEQ ID NO: 286698 - DNA, 120 bp, Homo sapiens
gtgtccctgtgtgatgcttttgatatctggggccaagggacaatggtcaccgtctcttcagactcctgccaccttatgcttgtcaccaacccttctcctccaaatctgatacaccagact

SEQ ID NO: 286699 - DNA, 95 bp, Homo sapiens
ccgctccccacttcagacgagctcttcctgcctggaatctgttggctggggaacagaccagggaattggtggatttggagaagagccgggaatta

SEQ ID NO: 286700 - DNA, 90 bp, Homo sapiens
gtctggtcggatggggcaggatggctgcgttgacacgtcttatttaatccacatcataggttctaaatggcttctaagaagttgggtgca

SEQ ID NO: 286701 - DNA, 90 bp, Homo sapiens
cttcgacaactgctttgcctcaaactcagctttctaccagcagacagctattgacctgaaaagtggttctggaaaagtgtaccaaggccc

SEQ ID NO: 286702 - DNA, 115 bp, Homo sapiens
cggcccgagatgaatcctgcggcagaagccgagttcaacatcctcctggccaccgactcctacaagtcagagcaccataacatggtgtgggaagtgaagacaaatcagatgccta

SEQ ID NO: 286703 - DNA, 100 bp, Homo sapiens
gtcggggtgtacgaagcggccaagctgctcaacgtgagcgagaacccgagcagcgccatgagcaacactaccgtcgtccccagcactgcaggtccgggcc

SEQ ID NO: 286704 - DNA, 100 bp, Homo sapiens
ctgtcgccgctgctgggagatgggcctactcgcccgccaccctgcgctgccgccgctctgaggagttaaaggtatgcttcagaagtgtccttctgttgat

SEQ ID NO: 286705 - DNA, 100 bp, Homo sapiens
ctgcgaggagtgtgggaagcccatcggctgtgactgcaaggtgcaggcctggggtagtctcctgtctggacagagaagagaaaaatgcaggacactggct

SEQ ID NO: 286706 - DNA, 100 bp, Homo sapiens
attggcagtggttttgacaacatcgacatcaagtcggccggggatttaggttcgtgctggccgtgggcagcgccgtctttgatgccatgttcaacggggg

SEQ ID NO: 286707 - DNA, 90 bp, Homo sapiens
gaatgaactgtatccatccccatcatgatgtacagaaccaagtctcttcactagtgacttcatggtcatgacgattttcttcaatgtgag

SEQ ID NO: 286708 - DNA, 75 bp, Homo sapiens
tacaaatttttggatgatgatggatccatttctcctattgaggagtcaacaacatgccagatccccacaaccttc

SEQ ID NO: 286709 - DNA, 74 bp, Homo sapiens
caaggagccactcggcttcatcaaggtcctcgagtggatttggaggccaatcactgccaccttttatttccctg

SEQ ID NO: 286710 - DNA, 49 bp, Homo sapiens
cgcacaggaaaatctgccctttccagtctcatcagattttccatgtcct

SEQ ID NO: 286711 - DNA, 96 bp, Homo sapiens
cgtcacccttccgggtgacataccggccttgggaattctgcttggtcagaatcgtgatggcattgtgttcagcactgatgactattttcaccatca

SEQ ID NO: 286712 - DNA, 75 bp, Homo sapiens
agtgaacaaatccgggggcaaggccaaaaagaagacagaccccgtgcggctgacacagctgtatgagcaggcccg

SEQ ID NO: 286713 - DNA, 100 bp, Homo sapiens
acgggcatcctggtgcagctcctggtgcgtggcccagcctcagatgtctgcgagattaatctctcatggccgctgcacaagaacctggcttttagctgaa

SEQ ID NO: 286714 - DNA, 76 bp, Homo sapiens
ctttcacggacaacctcagaggacaacgaagtgttcgctaccaagtcaggattgttacccccaccacctgcgctcc

SEQ ID NO: 286715 - DNA, 100 bp, Homo sapiens
gacacctactcagagaagtccctccaccggctctgtgctcctacctcctctttagaatcttccagtagcatagaacaagagaaatacttgcaagccttac

SEQ ID NO: 286716 - DNA, 75 bp, Homo sapiens
cggcttgaacatcgagatgcacaaacaggccaagatcaagcaaaagctgcgggaaattgaagagaatcagaagcg

SEQ ID NO: 286717 - DNA, 100 bp, Homo sapiens
cggtgtggcagctgctctgaaccaggacctggacccggacccaaagtgccatgtctttaatgcagcctggcatcctcgctacaacctcattgttgtgggc

SEQ ID NO: 286718 - DNA, 100 bp, Homo sapiens
ctggacctggcctggctcaaggtgaaggacatcccctgcagcagtgcggtaaaagagaacctgctttcatgcaagatgctgctgcactgcaaacgggatg

SEQ ID NO: 286719 - DNA, 75 bp, Homo sapiens
ggaaactgtttgtaaagtttctcaggccacaccagagccttggaatggatggctttggccaaccagttggcattc

SEQ ID NO: 286720 - DNA, 90 bp, Homo sapiens
gaagatcaggtacacaaatgcacgcgacaggaaccaggtcaactttgtagtgtgccaactctttgccttgctagcagccatttggtttcg

SEQ ID NO: 286721 - DNA, 100 bp, Homo sapiens
gagatccagcagctgaccaagagcgtcagtgaccgcagcagcctcaacaagtggaatgcagtagccctctgggcctgggatattgtggttgataactgtg

SEQ ID NO: 286722 - DNA, 75 bp, Homo sapiens
acaagtcagtgcttcccgggagcaagctggtggactggctgctggctcaggtctagtgacggagcccgcgcgcgg

SEQ ID NO: 286723 - DNA, 106 bp, Homo sapiens
gcgaaggccgggacccggttccccggcccacagtgggggtgtgcaaacccgagagaactgggactcgctgattcttgagaagagtcaaaactggagctctcaaaaa

SEQ ID NO: 286724 - DNA, 97 bp, Homo sapiens
tatatgaacaatccgtctggatcacggatgtaggaagtggtttgatgtggctagcatgatgtctgttacactcagttgtgatcaccgggtggtggat

SEQ ID NO: 286725 - DNA, 100 bp, Homo sapiens
cagctaccatgaccaatgtcttcttagaccgtgttttccaggagtgtctcacttatgatggagaaatggtggacccaagtggagagattgtggaactggc

SEQ ID NO: 286726 - DNA, 100 bp, Homo sapiens
ggggaatggccgcggtgtggcagcaagtcttagcagtggacgcgagagtacctttcactgcgcgcggctggccgcaggggctggactgcagctggtggac

SEQ ID NO: 286727 - DNA, 82 bp, Homo sapiens
tgcagccagtagcttggatccttgtgggcatgatccataatcggtttcaagctaaagctccatggaatagagattcctgaaa

SEQ ID NO: 286728 - DNA, 100 bp, Homo sapiens
gcatccctgggcgggacccccctttacatggaccggcaagcgacctggcatgtcaccagggaaccggatgcccatggctggcttgcaggtgggaccccct

SEQ ID NO: 286729 - DNA, 121 bp, Homo sapiens
ggtcagtgcgcacgttgtaatcagctgaggccatgtcaggagacggagccacggagcagaattctgcttggtcagaatcgtgatggcattgtgttcagcactgatgactattttcaccatc

SEQ ID NO: 286730 - DNA, 98 bp, Homo sapiens
acggaacttgccgcgtcgaggactgtcgggtctcggcgcggaagatggccggcggcgtggacggccccatcgggatcccgttccccgaccacagcagc

SEQ ID NO: 286731 - DNA, 50 bp, Homo sapiens
caaaagcgcactaaatcgtctccaagatgatgatgtgcctgcagatatgg

SEQ ID NO: 286732 - DNA, 74 bp, Homo sapiens
tagcggccgggactctgaactatggcggacctgatcccaaccttgaagaaagtcctaaaagaaaaaatattaca

SEQ ID NO: 286733 - DNA, 51 bp, Homo sapiens
gaaacaagtgcgacctctcagatattagaaattgccacagccaccccagcc

SEQ ID NO: 286734 - DNA, 50 bp, Homo sapiens
gaggggccgggctacgagcggctgagttctcgctctgctgtccagtctgg

SEQ ID NO: 286735 - DNA, 80 bp, Homo sapiens
tgaagagagcagttgaagaagtgaagaaattattggtacctgcacaattctgtggtgttcttggtcacacatttatggag

SEQ ID NO: 286736 - DNA, 76 bp, Homo sapiens
ccgggagccgccgcgggcaggacgcgcgctgcaggctaatgcagagtcaagtaaaacctggctgaaggggaaattc

SEQ ID NO: 286737 - DNA, 98 bp, Homo sapiens
gaaaatctccccggtgactttcaggttattcagcttctcaaggctggaaaagcgaaggaagtttcctacaatgcactagcctcacacataatctcaga

SEQ ID NO: 286738 - DNA, 83 bp, Homo sapiens
aaaagactgggcttgtccttgctggtgcatgcgtcgtcggcctctgggcagcaggagtggctgtaaggtgaagaagcatgaaa

SEQ ID NO: 286739 - DNA, 74 bp, Homo sapiens
ctggagcactcctgagagccatcttcaaagatgggaaactcttgtctagtgatgtgactcattacgtgatccca

SEQ ID NO: 286740 - DNA, 100 bp, Homo sapiens
attggtcgtctgagagctttacgtcatcttcgattagctaataaccaactgcaattcctacctccagaattctgcttggtcagaatcgtgatggcattgt

SEQ ID NO: 286741 - DNA, 146 bp, Homo sapiens
tccattatcaacaaatgtatccgagatctaattccaaaaacaataatgcaccttatgatcaataacatggactagaggcttttaccagatttcttaaaactgaattcagtgaagaaaatattgaattttggatagcctgtgaagat

SEQ ID NO: 286742 - DNA, 75 bp, Homo sapiens
gtgtaacgactgtaatcaggttgtcaaaccgcaggcatttcaatcacattatggcccgatgagagaaagggaaag

SEQ ID NO: 286743 - DNA, 90 bp, Homo sapiens
agcaaacccgccgggatcaaagtgtaccagtcggcagcatggtttgtggggacattcatggacaattctttgatttgatgaagctctttg

SEQ ID NO: 286744 - DNA, 86 bp, Homo sapiens
cagggaaccctggtcaccgtctcctcagccactgaggcggctcccagctgcgttggcgacatggccgacacccccagagatgccgg

SEQ ID NO: 286745 - DNA, 50 bp, Homo sapiens
ggttttgaattcacgcttatggtagtggttcctctgtgacgagggtgcag

SEQ ID NO: 286746 - DNA, 75 bp, Homo sapiens
gggccgggggctgctgcggaagatggacaccaccagaatgttccatttggctgctgcactcccatccaccctgtg

SEQ ID NO: 286747 - DNA, 75 bp, Homo sapiens
cttcaaaatgaagaaattgtgagtgttgaatttcatgaaagaggaaagaatcataaggaaaatgtggcaaaaagg

SEQ ID NO: 286748 - DNA, 139 bp, Homo sapiens
gcctcttcactccaggatccagaattgaaagtatcttgatgtctttacctctaactgcccgtatggcttatcatcaatcagcgtgagctccctggacagaagagtaggcaaccccagcaggcaggagataaaccagatg

SEQ ID NO: 286749 - DNA, 97 bp, Homo sapiens
cgccgactacagaggctggacgtaagcttagcggtggcgcgcgtgcgcagcgccggcccgaggcacttcaaaaaacgtatcagaagatacttcgaga

SEQ ID NO: 286750 - DNA, 99 bp, Homo sapiens
cggggatctgatgagcttctttcttctggcatcattaacggaccttttaccatgaatagttctactccttctacagctggttgtcttcttgcctgccct

SEQ ID NO: 286751 - DNA, 75 bp, Homo sapiens
gatttggttccattgaaaaatggtggagttggaataaagaaaactttagaaactgttcctttggagaggaaaaag

SEQ ID NO: 286752 - DNA, 82 bp, Homo sapiens
gaagatcgtcgccacctggatgctggaggtgacagagttagtccttgataattgcctgtgtgtcaatggggaaattgaaggc

SEQ ID NO: 286753 - DNA, 114 bp, Homo sapiens
cctgccggcgctgctgagtttcttcatctacaacccgcgcttctggccgcgggaaggagaggtgtatgcaacagcgttattgcaacaggctaacgaaaacagacaaaattcaac

SEQ ID NO: 286754 - DNA, 100 bp, Homo sapiens
agatgatctgccatgtgttcgagtcggaggatgatatgctgcaggctgctagtcattatcgccaaaatagaaactctttgtatagaagagaagaatcact

SEQ ID NO: 286755 - DNA, 95 bp, Homo sapiens
accaccaatcagatgtctgtctgccggagatggacagagacgtatgtgcgttggtctcctaagggcacctacctggctacctttcatcaaagagg

SEQ ID NO: 286756 - DNA, 100 bp, Homo sapiens
aagccccagacccatctgtgcgcaacgtggaggtgatcaaggctgtggaggatggcttccggctgccaccccccaggaactgtcctaaccttctgcaccg

SEQ ID NO: 286757 - DNA, 82 bp, Homo sapiens
tgcgccgaggcccgcgaggggtcgccgcccagagcggttctggtgaggttggaaggatgcagccacccggttgtcatgaaag

SEQ ID NO: 286758 - DNA, 82 bp, Homo sapiens
tctggaaccagctgctaagccagaagcgcgtacaatgcagatcttcgtgaagactctgactggtaagaccatcaccctcgag

SEQ ID NO: 286759 - DNA, 100 bp, Homo sapiens
aactcgcgtagagaaactgcaatacaaggaaatccttacgcccagaggaattcagaaaagcagctcagcaacaggaagaacaagaagaaaaggaggaaga

SEQ ID NO: 286760 - DNA, 98 bp, Homo sapiens
cgcctcccccgctcctcccgcctggccgccccggcccgccgtgacccacggccgcctccggagcccgacgcggcaccaccttccatggtcaataatga

SEQ ID NO: 286761 - DNA, 98 bp, Homo sapiens
ctggctcttgggggcacggatgtccagatctacatctgcaaacaatggacggagattcttcactttacaggtcagaagagatcaattctacagaaatt

SEQ ID NO: 286762 - DNA, 74 bp, Homo sapiens
gccgaggagattcaggatgaagttgactctaaaatagagctcaagcttgagaagagagaaccactaaagggcag

SEQ ID NO: 286763 - DNA, 100 bp, Homo sapiens
gccaggaaggaatgatcagctttgactgctttatgaccatattaatgcagatgaggcgttctttggttttggaacttgaaggtgaaaaaggagaatgggg

SEQ ID NO: 286764 - DNA, 90 bp, Homo sapiens
gcgagggcaaagagctggtggcctcaggtgaaaatacaagccagctgccatgttgtgagcacataccacatagctccatggagatgccca

SEQ ID NO: 286765 - DNA, 100 bp, Homo sapiens
tttacaactgtgtaactgtcttcatctttacagaggaatagtctacaaaggaagacttgtaacctggagaagagaaatgagccgtcagactgctacagca

SEQ ID NO: 286766 - DNA, 90 bp, Homo sapiens
gaaaagtggatggaggaggcgatgcacatggaccagtcctgcctctgttgtagaagacatgtggtgtatataaagtttgtgatcgttggc

SEQ ID NO: 286767 - DNA, 75 bp, Homo sapiens
ggaaacatggcggcggcgggtgttgtgagcgggaaggctgacttatccttgtataatgaattccgattgtggaag

SEQ ID NO: 286768 - DNA, 51 bp, Homo sapiens
caccgccctggccatctaccatgtggttttgagcaaaattttggactgtga

SEQ ID NO: 286769 - DNA, 74 bp, Homo sapiens
caccatctcctcctcctgaagaagatgaggacccaggtgttcaggagaatcccttcaaagaaaggatcgtggcg

SEQ ID NO: 286770 - DNA, 75 bp, Homo sapiens
gcgccgggccccggacgccgcgcggaaaaggttattcagcttctcaaggctggaaaagcgaaggaagtttcctac

SEQ ID NO: 286771 - DNA, 83 bp, Homo sapiens
gagcatactttggaccctgttttcagaaagcagccaagtccttctcagcaaatcaaccttggcccgtcgtccaatcctcatgc

SEQ ID NO: 286772 - DNA, 75 bp, Homo sapiens
cattacatgaaaaattttgatgttggacatgtgccaataagattcgagtggtgaatgcatttcgtagttctttat

SEQ ID NO: 286773 - DNA, 100 bp, Homo sapiens
gacgggtctgtcctgcttcgtcaccccagaccttgccagagacctggcaaatgacatcatgacactgctcagcgatgcctgccgctttcaagaggatcag

SEQ ID NO: 286774 - DNA, 83 bp, Homo sapiens
tggagaccttgacacttatatcctccctggcttcctgatttctcccgattccttccttctccctggagcggccgacaatgtcc

SEQ ID NO: 286775 - DNA, 75 bp, Homo sapiens
attttaaggaaagcagtgagtgaggttccccaaggactctagcacctggactgtggaccaccagctcctgtgggg

SEQ ID NO: 286776 - DNA, 101 bp, Homo sapiens
tgcaacctggcctgctgcagtgggtgaagttttggtagatgcttcctgaaacttggagagtggcagctgaatctacagggcatcaatgagagcacaatccc

SEQ ID NO: 286777 - DNA, 90 bp, Homo sapiens
gcccggcagccaccccgtctgggaagatgacgctgtcagtatagaaagtggtacaaacactgaacgccctgatacacctacaaacacgcc

SEQ ID NO: 286778 - DNA, 75 bp, Homo sapiens
cgcttcccgatgccacgttacatcaacacggagcatggaggcagtcagcttctgcagaaagccgtcattacacct

SEQ ID NO: 286779 - DNA, 96 bp, Homo sapiens
cccggcggcggcgggagcccaggagcctgccccgccctggggacgaagagctgcagctcctcctgtgcggcctccacagccacggggacaccctgc

SEQ ID NO: 286780 - DNA, 100 bp, Homo sapiens
tgagcccttagaagtcttcatctcagcaccgagaagtgagcctgaagtgctggcggaaggtgtgggctctgctgtatgcaggaggcccatcaggcgtggc

SEQ ID NO: 286781 - DNA, 100 bp, Homo sapiens
ccgacccgagttatgcccaccctccaactttgcgacggaaatgtgtcatcgaaagccagccactgaggcggctcccagctgcgttggcgacatggccgac

SEQ ID NO: 286782 - DNA, 51 bp, Homo sapiens
gatgaaggtggaggcagcgcggctctcagggtctcactctgtcacccaggc

SEQ ID NO: 286783 - DNA, 101 bp, Homo sapiens
cagggggctgcgctgccccccagccaggaggaaaggccctcgaggggcgcaggcggacgggaacagccgactcttctaccttcagagtggacactgctgtt

SEQ ID NO: 286784 - DNA, 75 bp, Homo sapiens
aaaacttcttgccaaccaaagtaaggggcctggataccaagaagtgactgctcatctaatccataaagctatgtt

SEQ ID NO: 286785 - DNA, 50 bp, Homo sapiens
catgcctgctgtatagcctgcagaacaacggagtttcactcttgttgccc

SEQ ID NO: 286786 - DNA, 87 bp, Homo sapiens
agactttgcggtggaaaaggaggaggcaagtgaggcctatctggttggcctttttgaagacaccaacctgtgtgctatccatgccaa

SEQ ID NO: 286787 - DNA, 76 bp, Homo sapiens
gacccacgtccacacctactcctcctcagcacaggggagtttatagttctgatgtctttgacattttccctggaac

SEQ ID NO: 286788 - DNA, 85 bp, Homo sapiens
ggcgagtttccgatttaaagctgagctgcgaggaaaatggcggcgggagatcttcgtgaagactctgactggtaagaccatcacc

SEQ ID NO: 286789 - DNA, 100 bp, Homo sapiens
tatgagaaggacaacacctacttaggtggtttgtgatgaaaatggttccaagggctatggatttgtacactttgagacgcaggaagcagctgaaagagct

SEQ ID NO: 286790 - DNA, 100 bp, Homo sapiens
tttgcttccccttctgccatgattttatctctaaagactcttcggtgagaagacagatgaagcgaaggtcctggggttccaggttgcagaacaacatgtc

SEQ ID NO: 286791 - DNA, 71 bp, Homo sapiens
cttctgtatatggctgcgccccaaatcaggctgacaaacgggctcatcataatgcactggaacgaaaacgt

SEQ ID NO: 286792 - DNA, 100 bp, Homo sapiens
ctagatcctgtgctttactctgaagactcgagcttcaggatggttcgtactaagacatggaccctgaagaagcactttgttggctatcctactaatagtg

SEQ ID NO: 286793 - DNA, 100 bp, Homo sapiens
cgagccgcagcgccgcggcgacgaacccagggaggtgtcctgtggccaggcggaaagcagtgagaagcccaacgctgaggacatgacatccaaagattac

SEQ ID NO: 286794 - DNA, 82 bp, Homo sapiens
ccctgcccttgccagaatttcctgcgctgttccacctcattcaacttcaggtacggacattgctgcaggagaagaggttgcc

SEQ ID NO: 286795 - DNA, 82 bp, Homo sapiens
gtttctctgctgcaccgacctcgacgtcttgcctgtgtcccacttgttcgcggcctatagatgcctgtgaggagccaccaac

SEQ ID NO: 286796 - DNA, 100 bp, Homo sapiens
ctaagactgcttccaatgtagaagagactgactggagctctcccgtgtcagctcgtagcacagaaggtgaagagcctgctgtggggccagggcttcccag

SEQ ID NO: 286797 - DNA, 82 bp, Homo sapiens
cagaagcagtacgagaactggcagccaaggataacgaaggaggcccaacttcattcaataaggagcctgacggatttatccc

SEQ ID NO: 286798 - DNA, 71 bp, Homo sapiens
ggtgtccccactgagctcttggaagagagtctccaacctgtcccagtatttcagcccagcctcggtgtcca

SEQ ID NO: 286799 - DNA, 98 bp, Homo sapiens
aaggcgggcggcagaggcgatcaggtcagatccgtgcccacctgctgccctccaaggcctgccgcctccggacccctgggtccctctccaccaaccca

SEQ ID NO: 286800 - DNA, 83 bp, Homo sapiens
gcggaagtgcagctgcctcagttcttagcgcagagatcctacagtaaggaattgtttgaagaagttatttcaaagatgcggaa

SEQ ID NO: 286801 - DNA, 101 bp, Homo sapiens
ccagccaccatgagcaccaagcagatcacttgcagatggtgaaaggcttttctaaccgtgctcggaaagcccgacttgctgagccccagctgcgggaagaa

SEQ ID NO: 286802 - DNA, 90 bp, Homo sapiens
agccgctggtccccgggagaccctgtgcccctaaatcgcggtccactgcgcgcgtcagcgtgcctgccagtgtagagccggtggagcagc

SEQ ID NO: 286803 - DNA, 100 bp, Homo sapiens
ggaaagtgctcctgcggctgtatggagcgattttgcagatgcttctaaccgaaaatcttcagttggcgtaaaaaagaatagcaagagcagaacgttaacg

SEQ ID NO: 286804 - DNA, 75 bp, Homo sapiens
agtggaatcctgtatcagaactttggctgaagtggaccacggttgaccacaggtaactgaaaccacaggaatgag

SEQ ID NO: 286805 - DNA, 100 bp, Homo sapiens
ggatattcctcatgacattgctgtctggtagcacaggcggagtgcagcggaggcccctgccgctgccgtcatgccgttcccgtttgggaagtctcacaaa

SEQ ID NO: 286806 - DNA, 89 bp, Homo sapiens
tggaaggcactttccatgaatactgagaatgccaaagtaaccagatctaacatgagtgaagccatgtccctggagggagatgaatggga

SEQ ID NO: 286807 - DNA, 75 bp, Homo sapiens
ggaaaatttcgatattgaagtgtcaaaatccatagatggaaaagatgaaagcaggaattatgtttcaaatggaca

SEQ ID NO: 286808 - DNA, 101 bp, Homo sapiens
aaccggatcccattgtacccagagtgcagagccgcctttccagcatgcaggggctgctcagcctcccctggtgaagacacaaactgtcaccatctcagata

SEQ ID NO: 286809 - DNA, 100 bp, Homo sapiens
gatggcacccgaggtcatcaaacagtcggcctatgactcgaagttgatattcactgatggactccaaagaatcattaactcctggtagagaagaaaaccc

SEQ ID NO: 286810 - DNA, 100 bp, Homo sapiens
tcagacaccttcgaccacctcatcgagatggacaagcgggagggcaaatacgacatgggcatcctggctccccggataccccctgacaagaggattttca

SEQ ID NO: 286811 - DNA, 75 bp, Homo sapiens
actatgactctttgaggacactgagtcaccatgctagcactgtgcaggccttcctagaacggtacctcagtgcgg

SEQ ID NO: 286812 - DNA, 82 bp, Homo sapiens
acacagccggggtcgggagccgcccggggcagggctcgggagagcggaataccctctaccatctgctttggtcagggtgccg

SEQ ID NO: 286813 - DNA, 50 bp, Homo sapiens
ttctgtggcagaagatgatgatgaaagtgatccaatgagttccacctaca

SEQ ID NO: 286814 - DNA, 100 bp, Homo sapiens
ggaaaatgctggcgtcagcatcggaagatcattttattgacattgctgaagtggagacaggtttgacatctacaggaaggtgcccaaggaccttacgcag

SEQ ID NO: 286815 - DNA, 90 bp, Homo sapiens
ctcaggatatgacaggggtaacacccttccagatgatttttgaggtgcacacatcttgaccaactcagcagcaaggtggattttctttgt

SEQ ID NO: 286816 - DNA, 75 bp, Homo sapiens
acttgtccctcgggcccatcgactccagcgtgctctctcggaataagacagaggggatcatggaagctgataaag

SEQ ID NO: 286817 - DNA, 82 bp, Homo sapiens
cttctttgcagactttggttggtggaggctgtggcaatggaacaggcttgagaaacaggctttatcctgtggataaacgcag

SEQ ID NO: 286818 - DNA, 75 bp, Homo sapiens
atgatgggcagcaagatggcgtctgctagtagggtcgttcaggttatgaagacagtatggagtttccagaccata

SEQ ID NO: 286819 - DNA, 98 bp, Homo sapiens
ttatgcagagggagatgtccatggatatcggtcgcttggttatcggacagaatggaatcctctccacccctgctgtatcctgcatcattagaaaaatc

SEQ ID NO: 286820 - DNA, 96 bp, Homo sapiens
gctccaggagggcgcaggagcgggactgagagcgcctggaggctcgagcggagggttgcaagaaagctcaagtagcctatggagaggatgcaaggc

SEQ ID NO: 286821 - DNA, 82 bp, Homo sapiens
gcaaagaaagctcatcacagctcacttgtgcggtctgaaagtagaagtggatatggagaaaattgcagctgagattgcacag

SEQ ID NO: 286822 - DNA, 82 bp, Homo sapiens
ccctctggaataccttgggcattgctgaatatgaaaaggctgatgagccctgaaaacacactcctgcagcccagggaggagg

SEQ ID NO: 286823 - DNA, 74 bp, Homo sapiens
tgggggtgtgcaaacccgagagaactggtggatatcaaagtattgcagagtgccttagcagccatccgacatgc

SEQ ID NO: 286824 - DNA, 82 bp, Homo sapiens
tgcagccgcgaggaggcgcgggaggtgttcgagaacgaccccgagacggtggctattatcatggaaaactaatttttcccag

SEQ ID NO: 286825 - DNA, 100 bp, Homo sapiens
tggtggtgtcttcctgtctcaacgatacctattttctagtgctgagatcctgagacaatgtactatactggcaattgctggagaagattttgcaattgtt

SEQ ID NO: 286826 - DNA, 100 bp, Homo sapiens
ccccgccgctccacagtccctggggccgagcacgagctgtgccttcctcacctactgtgccagggattccgccatcaaagctcagactgccctgcacgag

SEQ ID NO: 286827 - DNA, 73 bp, Homo sapiens
gctactgtactggctattggaaggaggagattctgaagataaggaggcgcctgtgtctggcagagctggtgtg

SEQ ID NO: 286828 - DNA, 74 bp, Homo sapiens
ggataccctggggctgagaggaatcttctggagtactcttattttgaaaagccaggaagaaagctcaggcccat

SEQ ID NO: 286829 - DNA, 100 bp, Homo sapiens
ccgcgtgggcaccctgcaggtggtcagacatgtcatcaactcagctgggcacagactccatcaagatggagaacgggcagagcacagccgccaagctggg

SEQ ID NO: 286830 - DNA, 83 bp, Homo sapiens
ccccacccgggctcggcgggggagcgactcatggagctgccgtaagtactatactggcaattgctggagaagattttgcaatt

SEQ ID NO: 286831 - DNA, 98 bp, Homo sapiens
aacgccagcgatcatgtctacaagggctgcttcgacggcaacgtcaccttgacggcaggaacagaggcggctgagccaggaacgggatcgcctagagg

SEQ ID NO: 286832 - DNA, 83 bp, Homo sapiens
gtcctcagtacttgcaaaagcacttgaagtcattaaaccagctcatatactgaatccacattcatctcaatggaaggatcctg

SEQ ID NO: 286833 - DNA, 118 bp, Homo sapiens
tgaaacgtgaagatgtgtttaaagcagtacaagtccagcggagaaagcagcacgctggctcttctcctgaacttcctcgcctgcctggccagcttctgtgtggaaaccaacaatggcg

SEQ ID NO: 286834 - DNA, 50 bp, Homo sapiens
gaaaaacctgtatgtggaaccacctcaaaatcaccaggacagccaataca

SEQ ID NO: 286835 - DNA, 100 bp, Homo sapiens
tttgctccccctcgtgcagcaacccccacacccagcaccaggatgccttcgtgaagatcgtgaggcacgagggcaccaggaccctctggagcggcctccc

SEQ ID NO: 286836 - DNA, 100 bp, Homo sapiens
ccgtggccaccctgtgggcctggcgctggaggcagcggtgcacgtgcagctgagatctgtatctgtggacctgaatgttgatccctcgcttcagattgac

SEQ ID NO: 286837 - DNA, 82 bp, Homo sapiens
cagacgttagcgtgagtgatcactctcaatcccggacacagaatgttcagcttaacaaagaaatgacacttgccagcaaccg

SEQ ID NO: 286838 - DNA, 100 bp, Homo sapiens
cacgtcttccagatttctactgatttgcaagatctggtcaaatttcagccatcagcaaagtggcagaatttagtgacatttggaagcttttcaaacatgg

SEQ ID NO: 286839 - DNA, 96 bp, Homo sapiens
gactgcatttagcccagagtccttattttatgttgtttggaagattatgccaaactttagactcaatgatgaggcacggcggctcattgctgattt

SEQ ID NO: 286840 - DNA, 75 bp, Homo sapiens
ccgccacacgcgcagcatcttctgggagctccaggtgttcagtgtgaggtggagctgatagagtccatagaggac

SEQ ID NO: 286841 - DNA, 75 bp, Homo sapiens
gatggtgccatttcagtaccaagcctttctgctccaggtcaaggcagacaccacccatcctttaaccaagcacag

SEQ ID NO: 286842 - DNA, 75 bp, Homo sapiens
ataaattcccggaaccgcgattcggcgtgtcaggtccagccctgctgggagttttctgccacacagatttgcgga

SEQ ID NO: 286843 - DNA, 100 bp, Homo sapiens
cttgtgcagcaaagtggcccaaatccatggcattgtcattcccaaaagcaagttcgtcttggtgaagttcgacacccagtacccctacggtgagaagcag

SEQ ID NO: 286844 - DNA, 50 bp, Homo sapiens
aaaaccctagcgcctattatagtgatctgagatctgtatctgtggacctg

SEQ ID NO: 286845 - DNA, 100 bp, Homo sapiens
gtcattgtcatcgtggggcatgtggcaaaacacacagctgaggaacacatgattctgtgcagatttgcagaccagacagctgtccagctcccaccccaac

SEQ ID NO: 286846 - DNA, 76 bp, Homo sapiens
gacaagggggagtcgctgggtatcaagcacgaggacttcgttgttccctctggcttgtgggggcacggctgtgctc

SEQ ID NO: 286847 - DNA, 74 bp, Homo sapiens
gtctattgttgtcagtggagagagtggtgctggaaaggtcttccagaggcggaacactgggcagctggatttct

SEQ ID NO: 286848 - DNA, 98 bp, Homo sapiens
gcgcgtgctcgtagctgtcaagagggtcatcgactacgccgtgaaggtactactgagcgagtgtgcttgatccagggaacggttgaagcactgaatgc

SEQ ID NO: 286849 - DNA, 82 bp, Homo sapiens
gtcctgctttgggggcctcaatgcatccatctttgcttcatcaaggggatcccaacaagccctcaggattcagaagtgttaa

SEQ ID NO: 286850 - DNA, 100 bp, Homo sapiens
gagccaccgcccagccgctcgcaggcgccgcacggagttgcgtcccggggacttggggccgcagggaggaatgggtaccacagaccatgtcatcgtcctg

SEQ ID NO: 286851 - DNA, 101 bp, Homo sapiens
aactagtccagcttcgagcacaagatatcccttggccagaaggtgaagaaaagttatctgataatgctcaaagtgcagtagaaatacttttaaccattgat

SEQ ID NO: 286852 - DNA, 74 bp, Homo sapiens
gccttggagagcccagagcgacccttcctggccatcctgggcgggtatataagaatgtgattctacaagttcca

SEQ ID NO: 286853 - DNA, 82 bp, Homo sapiens
cgcggctcacgctgagagggacacgcagtgacgagcggccgaagcagctttgcgccctgggcgctgcctatggcacagccaa

SEQ ID NO: 286854 - DNA, 74 bp, Homo sapiens
agctgtttctcatctttatactcttccagctttccccagacatggccaacaagggtccttcctatggcatgagc

SEQ ID NO: 286855 - DNA, 100 bp, Homo sapiens
ccatgctcttcagtggcccagtcttaccgttcagtggcttcctgaagtgactaagtgtgactgcacagaaaagttacaaaacaaatttgactttttgcgc

SEQ ID NO: 286856 - DNA, 99 bp, Homo sapiens
agttcggatggcagccacccagattgacagcctgtgtccccaggacggcaatggatacatagatgaaaatgaactggatgctttactgaaggatctgtg

SEQ ID NO: 286857 - DNA, 100 bp, Homo sapiens
ccatcatcaaagagatcgttagcagaaacaaaaggagatatcaagaggatggattcgacttagacttgacctctagtatgttcaacacaccaggaatgca

SEQ ID NO: 286858 - DNA, 100 bp, Homo sapiens
tgacaagacgctcccagagtgttcaaaattacctttaagggaagaaagtcggaggctggctttggctgcgaaaagagaaaaaagaaaagagaagagaagg

SEQ ID NO: 286859 - DNA, 100 bp, Homo sapiens
tagcctcaaactcccaggctcaagcaatcctaccatgtcagccttcccagtagctggaactacaggtgtgcctaccgcatgttgccgctgctgtttctgc

SEQ ID NO: 286860 - DNA, 100 bp, Homo sapiens
ccgtctttgtgggcactggggacctgtttgctgccatgctcctggcgtggacacacaagcaccccaataacctcaagacacagaatgttcagcttaacaa

SEQ ID NO: 286861 - DNA, 58 bp, Homo sapiens
agggaggagatgcgactcgaagcagaaagggaaaactgaggctgccatcaaaaacttc

SEQ ID NO: 286862 - DNA, 100 bp, Homo sapiens
ctcacagtttaggtctcaaggcaagcctattgagttaacacctctgccgctgctaaaagatcccctagacccttccttcccagtggagtttgtaagacat

SEQ ID NO: 286863 - DNA, 101 bp, Homo sapiens
gtcggccgccaccaggtcaccctggaagagtcgctggccgaagaaactggcgatggaatatgagaggagccctctggaaagaaaaggacagaccctgtgct

SEQ ID NO: 286864 - DNA, 75 bp, Homo sapiens
agtggactcaacttcaaagacgttctcaaggagaaggcagacctggttctcagaattcttcatatattttggaca

SEQ ID NO: 286865 - DNA, 74 bp, Homo sapiens
tttcaaaatggccctatgcttagggtgcaggccctagcaggtgcaggtggagtagacaatctccatgtactgga

SEQ ID NO: 286866 - DNA, 74 bp, Homo sapiens
cttggattatctcaacattctgttgattctctcgggcctagccgtccttggaacccgatattcgggctgggcgg

SEQ ID NO: 286867 - DNA, 75 bp, Homo sapiens
gtttggctgcgggcggcttgggcagcccgcgggcgcctcagcctgatgtgtgagaagcggatattggcggcagtg

SEQ ID NO: 286868 - DNA, 50 bp, Homo sapiens
gcgccgcggctcttttctaaaagtgaacatggaggagacatatttccacc

SEQ ID NO: 286869 - DNA, 96 bp, Homo sapiens
gctggtgcaactttcagaagtggtcccaggtactataagatctccgtggtgctcatgtgctttgtggtccccacgctggtgccctggtacatctgg

SEQ ID NO: 286870 - DNA, 74 bp, Homo sapiens
actgctggcgatttatgcagctggcctggccctgccccacaatacccaccggctggagtgcaatggtgcaatct

SEQ ID NO: 286871 - DNA, 100 bp, Homo sapiens
aaatacatgaaaaatggggcagaagaagagcagaaaatagcagccaggaaccaagaaaacttgaaactgggagtgatttttccatgtttgaagctttgcg

SEQ ID NO: 286872 - DNA, 100 bp, Homo sapiens
ccggagctgcccgcgccatgtccgcgcacaatcggggcaccgagctcgccttctcttggagtcaagaagcctaccaaagccctgctctttgtactcttga

SEQ ID NO: 286873 - DNA, 100 bp, Homo sapiens
gcacacattgaatgggccaaggaaaaatcgagcagaaagaatgtctttcaggtggctttctagaagatgaccatagaggaccttccagattttccattag

SEQ ID NO: 286874 - DNA, 100 bp, Homo sapiens
caaagagtgtctgacatttcttttgtgcaagatgagcctcaagtgcttctgcattacaacatatctgaagagatggattaagaatgctttggattaagga

SEQ ID NO: 286875 - DNA, 75 bp, Homo sapiens
gcatccccaccatcaacatggagaacaagaccacgtggaaaccagcccaaaagacttcctcttttgaaagagaag

SEQ ID NO: 286876 - DNA, 75 bp, Homo sapiens
gcagcctgctggaccctgccaagaagtcgcccatcgcagcagctcgccgcagcaatggcgctgagttcctctgct

SEQ ID NO: 286877 - DNA, 101 bp, Homo sapiens
ctcggatgtctggtggggcggagcagacacagactatgcagatgggaggaaggagctcattgccaagttagatcaggcagaaaaggagaaggtggatgctg

SEQ ID NO: 286878 - DNA, 100 bp, Homo sapiens
cgtgcccgagaatagctccgtccagcaggatgctgaaaacgccattcaacagatgggtggccagtggcttggtggaagacaaatcagaactaactgggca

SEQ ID NO: 286879 - DNA, 82 bp, Homo sapiens
cgagagcgtcatgaacccgagctatagagaaaggagatgagcaaattgtggctactaatttgccccctgaagatcaagatgg

SEQ ID NO: 286880 - DNA, 100 bp, Homo sapiens
gctgcccatgatccccgacctcccggctgacctattcacctcctgcctcaccacccccatcaagatcgccctgcgctgagctccatgaacctgcctccag

SEQ ID NO: 286881 - DNA, 48 bp, Homo sapiens
aatatcaagaggaggagttgttgggttccccactgaaggacttggtcc

SEQ ID NO: 286882 - DNA, 101 bp, Homo sapiens
agtaaaacccactgttgccccaccactagctgagccaggagctggcaaaggtctgcgttcagaacatcggacatctgaatgggactccgagtgccttacat

SEQ ID NO: 286883 - DNA, 82 bp, Homo sapiens
ggccgtgttgctgatcgcctgggtggttgttggcgtgtccctgcagcgaaggatcctgagacaagaggagcagcagcggcac

SEQ ID NO: 286884 - DNA, 75 bp, Homo sapiens
ctggtgtctgagtggatggggacctgcctgctgatcacccggaagttcaggctgaattctgaaggcaaacttgag

SEQ ID NO: 286885 - DNA, 89 bp, Homo sapiens
cgaggggtgcacggcggccacctgagtggcgcggcggtgtcagaggagatttgcaccctagttatcgctgagactttccctgaagatgc

SEQ ID NO: 286886 - DNA, 80 bp, Homo sapiens
gcttggtaggcagcttggagctggaagaagagcagccagacattcactactttcactgcctaagaatcctggaccttctc

SEQ ID NO: 286887 - DNA, 96 bp, Homo sapiens
ggaggaatgtctcagaaaaacatcggaaaccgtcaagtacctgacgcggggcaagattctgctgtgcacagaaaagaaatgattgcccagcagcgt

SEQ ID NO: 286888 - DNA, 114 bp, Homo sapiens
caactctgcttttccagaaactgtgccaggatcacgtttgggcttcctgtagacacccttttcctgcgcaacagagctgggcctccctttctctaatttcccccttaacatgcc

SEQ ID NO: 286889 - DNA, 76 bp, Homo sapiens
agtcttctatgtttccacatcggtcagaaaaagatcctttctgagaaaagtctacagcattctttctctgcaggtt

SEQ ID NO: 286890 - DNA, 75 bp, Homo sapiens
attggatgattcgtagctaagacttcgcgacacccttgaagctgagaaatggaaaatgtttataggaggccttag

SEQ ID NO: 286891 - DNA, 90 bp, Homo sapiens
cttctgagacggcggcagcagcggcattcaggcaccatgactcctgtgaggatgcagcactccctggcaggtcagacctatgccgtgccc

SEQ ID NO: 286892 - DNA, 75 bp, Homo sapiens
cctggaggaatccgagaagagcagagcggagggagccccagacacgcggagctggagtttgttcagatcatcatc

SEQ ID NO: 286893 - DNA, 83 bp, Homo sapiens
agtgaccaagaacgtgagcaagcccaggcacagccgacgccgcgggatcattgagaagcagccaggccacattcggagcaggg

SEQ ID NO: 286894 - DNA, 100 bp, Homo sapiens
cagagcctgccggaaggctccctcggtcgcgagtatctccgtttcctggatgtgaacattgtcctgggtcacataatgccagctgagcgtaaaaagccag

SEQ ID NO: 286895 - DNA, 82 bp, Homo sapiens
ccccaaatgtctgactctgactctcggactgagaaacgcaaggtgtccctggccagtgtccttccacctgtccacaagcatg

SEQ ID NO: 286896 - DNA, 98 bp, Homo sapiens
ccagagagctgcggcgggagctgtatggccgccgtcgcaagaagtgtcccgacccaggctaagcttgagcatggctgagcaggagcccacagccgagc

SEQ ID NO: 286897 - DNA, 137 bp, Homo sapiens
tggaaagctacgctatgtggcgaatatcttcccttacaagggttatatatggaattatggtaccctccctcagccaaaagaatgcaatggtgtaaagattccagttgatgccagtaaacctaatccaaatgatgtgg

SEQ ID NO: 286898 - DNA, 98 bp, Homo sapiens
gggagtcgtggcgtcgtctgcgaccgctgccttctcggatgcctaccttaatgcctctgaaacaaccactctgagcccttctggaagcgctgtcattt

SEQ ID NO: 286899 - DNA, 108 bp, Homo sapiens
catgagcagcctgcccaacttctgcgggatcttcaaccacctcgagcggctgctggacgaagacaatgcagatcttcgtgaagactctgactggtaagaccatcaccc

SEQ ID NO: 286900 - DNA, 90 bp, Homo sapiens
ctggcttggtggatgactttgagaagaaggaagagagaagggcacagttacctaagtatcaacgtaatcttcctcggccaggacaggccc

SEQ ID NO: 286901 - DNA, 82 bp, Homo sapiens
tcagattttgggttgagctacagaagatagattctgttgctgttaacatttcaaacttggtgcttgagaatcagccacctcg

SEQ ID NO: 286902 - DNA, 50 bp, Homo sapiens
cttggtttaggagagataatcctggggtatactctagttgaatatgaaac

SEQ ID NO: 286903 - DNA, 88 bp, Homo sapiens
ccgggaggggacggccgccggagccgcgaggccaagccatcagcatcagcaaagccatcaacacccaggaggcccccgtgaaggagaa

SEQ ID NO: 286904 - DNA, 98 bp, Homo sapiens
tgagacagggcacaccaaactccatctgagtgcctggtgaagaatgtgatgggatcactagcatgtctgcggagagcggccctgggacgagattgaga

SEQ ID NO: 286905 - DNA, 50 bp, Homo sapiens
aacagatctgtctgcctgcaatctacaagtatgaaaagacacagactgta

SEQ ID NO: 286906 - DNA, 75 bp, Homo sapiens
ctggaggtggacgccatcgtcaacgccgacaagttggatggcttgaggactggtactaaaaggaaacgtgactgg

SEQ ID NO: 286907 - DNA, 75 bp, Homo sapiens
ccgcgaaatgatgggatagcgttgcaaatccttaaaagagtcttaacggtcatgggttataggtgcaatagctct

SEQ ID NO: 286908 - DNA, 106 bp, Homo sapiens
ctgccgccacctggtggtttgtgtatgacgccgagggacctcacatcaacttctaccagctgcagtcctgcgttaactgcggccgggaggctatgagcgagtgcac

SEQ ID NO: 286909 - DNA, 93 bp, Homo sapiens
tcccacctgtcctcaggcatatcaaagatcggccatggatatggaacattccttatgtcaaagcaccggatacgcatgggaacatgtgggtgc

SEQ ID NO: 286910 - DNA, 75 bp, Homo sapiens
aagaaaaggattgagaactttaagagtggtgtggctcttacagcactactttcagatgatagcaagtttggattc

SEQ ID NO: 286911 - DNA, 100 bp, Homo sapiens
atgaccagttctggagctactggaataggttttggaaggtgacaatgaaatgtgaagaagttacatttctcaaacttgaaagttagtgacggcttaccaa

SEQ ID NO: 286912 - DNA, 100 bp, Homo sapiens
tggaacacatccaggaaaagataactttcgacacacctgtagacgttcgccaggtaaaggtatctttcagatgaaggcattgaagcttgcacaagctctc

SEQ ID NO: 286913 - DNA, 75 bp, Homo sapiens
gaggcgaaccgggtgcggagccaatacccgcggcagcagcaccaggccttgaaccggggcattgctgctgtcaag

SEQ ID NO: 286914 - DNA, 121 bp, Homo sapiens
cagtgttaaaggaacctctacaacgaaggtgaagccacggaagataagtgtcttgggacaaggtgcgcattcctggtgtgctgcagcgattgggagtgacatactttgtggttgctgtgtt

SEQ ID NO: 286915 - DNA, 90 bp, Homo sapiens
ctcacattcaagctgataggctgcgctaccggaatgtcatccagcgagtgattagggagcagattaagcgagtaaaagactcggatgatg

SEQ ID NO: 286916 - DNA, 97 bp, Homo sapiens
gacatgctcagggctgcggccgcccgaagaggagagagcgcgggcctctaggaaggtcatcatgcaccccttgaaaccccggatctcaatcacaaag

SEQ ID NO: 286917 - DNA, 96 bp, Homo sapiens
cctgaagaaaatcaagcttcttgggccaagtcagcaggcattgagatgttccacaagagcctggagagggccgaggccggagataacctcggggcc

SEQ ID NO: 286918 - DNA, 100 bp, Homo sapiens
gcggcgtccatttcgggctacaccttcagtgctgtgtgtttccacagcgccaacagcaacgcggaccacgagatcatgaatcagacagataaaaatcaac

SEQ ID NO: 286919 - DNA, 100 bp, Homo sapiens
cgtgattgagcgccaccctgtggacatcagcgccatccccgagcagcggtggaagctggaattcactatgcatgataccattggatgttacctggatata

SEQ ID NO: 286920 - DNA, 98 bp, Homo sapiens
cggcttgttgtcttcaattaaaaaatttattaaaggaagcacacctaagagagacaagagagacacctccaacttcgacaaagagttcaccagacagc

SEQ ID NO: 286921 - DNA, 100 bp, Homo sapiens
gggaggctccgcggagccgaggcgtggaggcggaagcccggctcgctgcaaaacgggcggcccgcgcggaggctcgcgagatccgcatgaaggagctgga

SEQ ID NO: 286922 - DNA, 100 bp, Homo sapiens
ttcaagctgataggctgcgctaccggaatgtcatccagcgagtgattaggattacggggcgctgaaagacatcgtgatcaacgcaaacccggcctcccct

SEQ ID NO: 286923 - DNA, 100 bp, Homo sapiens
ctgtgaaaaggaaagcatccagctcagaaggttccatgaaagtcaaagagaaagccacagatggctccctgcagagcgaggactgggccctcaacatgga

SEQ ID NO: 286924 - DNA, 82 bp, Homo sapiens
gaagccatttccaaagacaacatcctttacctacagggaaggatggagacgctgaaggataagaccctgcaggagctggagg

SEQ ID NO: 286925 - DNA, 100 bp, Homo sapiens
gaatctgcgtcagaagtcactcgcagtcccgtcagcccagctgcactgggtgttcaacagccatcactccttggagcatctcctaccatttatacacagc

SEQ ID NO: 286926 - DNA, 49 bp, Homo sapiens
ttgctcagctcagtatcaacacttatggaagaactcttggatataaaag

SEQ ID NO: 286927 - DNA, 50 bp, Homo sapiens
cgcgggctggcggtggctccacgataaagcaacagaagcctccagcgact

SEQ ID NO: 286928 - DNA, 78 bp, Homo sapiens
gatgcaagatgtggcagaagaacaagaagttgagaccgagaatgtggaaacaggaccttaaaggctttgatccaggag

SEQ ID NO: 286929 - DNA, 75 bp, Homo sapiens
caacgagcacaacaggagctacgaggagttgtttggatttaggtggcgagtagaaaaagaagtaatttcaggaaa

SEQ ID NO: 286930 - DNA, 96 bp, Homo sapiens
gaaaaatggaccaacttctttggcaagtggacattttactggctcaagtgctgacagctgcagaagaaattgtacatggtgctgtacagaaggtat

SEQ ID NO: 286931 - DNA, 90 bp, Homo sapiens
tccagcagcacagcctcctccagccagactcacaggatgacaaggccacaccccctgtgaccattccaggatcggccaagttcaccccca

SEQ ID NO: 286932 - DNA, 90 bp, Homo sapiens
gtccggaggtgaggcggaactctgaggctgacttcaaaatttctgaggagtgcatcgcacagtggaagcaaaccaacttcatgaccaagc

SEQ ID NO: 286933 - DNA, 101 bp, Homo sapiens
ctctgagagaatatactcaactgtcctgctgtgattaaacaagactgctgtattttgagagcaagccctggaggttcactctttcaagaagtcgtgtgctg

SEQ ID NO: 286934 - DNA, 100 bp, Homo sapiens
ggtgtatcagtacaaaggcatggggctgtccatgggcaccatgatctgtggctgggataagagaggccctgggttaatgcgagatgatacaatatacgag

SEQ ID NO: 286935 - DNA, 75 bp, Homo sapiens
ctgcagcctgctgttgagtgagttctccaagttgcagagtaaagtggagacagccgaatcacgagtgtctgtcct

SEQ ID NO: 286936 - DNA, 75 bp, Homo sapiens
gagccagacgacaagcacacactatggcgctgaaacggattaataagctattcaggattatgaaactgctcagga

SEQ ID NO: 286937 - DNA, 88 bp, Homo sapiens
gacagctgggaattgctgaattagaactgcagaggttcctctacagcaaggttcatgccgcctgatgaccccctgggccgccatggac

SEQ ID NO: 286938 - DNA, 75 bp, Homo sapiens
gagaccgcggccgggaccgaggatttggtcgtattgggcgcctggtcaccagggctgcttttaactctggtaaag

SEQ ID NO: 286939 - DNA, 100 bp, Homo sapiens
ccagccaccacgagcccagagggacagcccaaggtccaccgagcccgcaaaaccatgtccaaaccaggaaatggacagtggtcgtttttcaatgagctag

SEQ ID NO: 286940 - DNA, 99 bp, Homo sapiens
cggggactgaagatggcgccgcgaggtgagattccggagagcgatgaccccacagtatctgcctcacggtggaaaataccaagttcttggagattactc

SEQ ID NO: 286941 - DNA, 80 bp, Homo sapiens
cgcccgtccacacccgccgccaggacatggcaaccacagagagagcagcccttttctttcccccttggaggcttccagag

SEQ ID NO: 286942 - DNA, 100 bp, Homo sapiens
ccggctccacaaacgcttcagcgctctggagttggagcgggcttacagtgaaatagaacaactgcaggggatcctgctaaagcggagcggcaagtccctg

SEQ ID NO: 286943 - DNA, 100 bp, Homo sapiens
agaactcttcctaaaagcagtagaagaagaacaaaatggagctctctatgaaggtatttggtagctttaggctgcattaaaccactttgtgatcttttga

SEQ ID NO: 286944 - DNA, 76 bp, Homo sapiens
cagacatgcaagttgcagctggaaagctgggaaggtgtggctcattgactttaatccatttggtgaagtcacagat

SEQ ID NO: 286945 - DNA, 100 bp, Homo sapiens
ttcggagggcagcactgtgaaatagatggaacagatttggagttgaggctggtcaatggagacggtccctgctctgggacagtggaggtgaaattccagg

SEQ ID NO: 286946 - DNA, 75 bp, Homo sapiens
gcccagtgcggactcgcctccgtgaagatcaaaggtttggagtggctggtgtccctgtacaacaacaacctgaac

SEQ ID NO: 286947 - DNA, 51 bp, Homo sapiens
gcgtggtctgcctgctgcactgctttgtgtcagatcatataccctcgccag

SEQ ID NO: 286948 - DNA, 101 bp, Homo sapiens
gaaaagaggaactaaggcggaggaactgagacgtttcgaattccaggttcttgctggtgtgaaatgactgagtacaaactggtggtggttggagcaggtgg

SEQ ID NO: 286949 - DNA, 97 bp, Homo sapiens
agtagctcttctagtatctgcaaagacaatgcaggactttccttatcccagttgattgtgcagaatacactgcctgtcgcttgtcttctattcacca

SEQ ID NO: 286950 - DNA, 75 bp, Homo sapiens
cagagcctcatcccccaggcaggcggagccgcctgctcaggaagaactcagagaagatccagattttgaaattaa

SEQ ID NO: 286951 - DNA, 90 bp, Homo sapiens
gccccgcacgccgtgcgcgtcccgagcccgcggggcagctaccgctcgggtgatattcatgaggatttttgcagcgtttgcagaaaaagt

SEQ ID NO: 286952 - DNA, 97 bp, Homo sapiens
agaatatgcagagcgacttgcgcgccttgtcactggagtgcaagaagaaattcccacctgtcaaagagcttgccgggattgctgtccttgccattgg

SEQ ID NO: 286953 - DNA, 98 bp, Homo sapiens
cgacatgttgcttttcgtggagtgtatgctgatggtagcatatgtttagatatccttcagaatcgatggagtccaacatatgatgtatcttctatctt

SEQ ID NO: 286954 - DNA, 78 bp, Homo sapiens
tgcttttatattcatctcaaaaacaaaattctgaactcaggacttggcaacaaagccttctagacaagctcagtggaa

SEQ ID NO: 286955 - DNA, 76 bp, Homo sapiens
cagcgattggacagaatttgtgaaggccaagtcctgtatctgccatgtctgtggcgtccacctcaacaggctgcat

SEQ ID NO: 286956 - DNA, 98 bp, Homo sapiens
ttgaatgctgtcttccaagaacagaagaaaatgatccaggcccagggtatcgaggcaccaagccagattcgctcttcaagttggagcaaggagaaccc

SEQ ID NO: 286957 - DNA, 100 bp, Homo sapiens
gcagttcgggcgcagcacgccggccgcaggagcacggatgccccccggagccgcgggctggcagaagttggacggactagcgaagatccggactgctcgg

SEQ ID NO: 286958 - DNA, 80 bp, Homo sapiens
cccaccgccgcggctgcccccaccgggaccgaggtgagaagccctaccactgcaactgggacggctgcggctggaagttt

SEQ ID NO: 286959 - DNA, 74 bp, Homo sapiens
tatgaccttaacgtggagctctccaagattcttagatatggcagaggtattgcccccatctggatttctggtga

SEQ ID NO: 286960 - DNA, 110 bp, Homo sapiens
actgagtaccggagacaggtgcagtccctcacctgtgaagtggatgcccttaaaggaaccaacgagtccctggagaggcagatgcgcgagcaggaggagcggcacgtgcg

SEQ ID NO: 286961 - DNA, 81 bp, Homo sapiens
attcccctgcctcagcctcccagaagttgaactaattgacacctaccaccgcttgctggaggttgaggacgcccagtgagt

SEQ ID NO: 286962 - DNA, 100 bp, Homo sapiens
ccccaacgtgtaccatgagaatgacacgatagccaagtacgagatcatggacggggcaccagtgcgagctcagtctggatgacttccagctccaaccacc

SEQ ID NO: 286963 - DNA, 127 bp, Homo sapiens
aaaaccacatcctcaacaacctcgtggaagcatacctcatccagcatccagttggcgttccgggccgcgtggcggtgaatgccttggctgtaggagaacccggaacggcctccaaaccagcttctcc

SEQ ID NO: 286964 - DNA, 100 bp, Homo sapiens
tagaatatacaaagacaaaaggagattctgatgaagaagttattcaagatggcctcaggagtgcaagtagctgatgaagtatgtcgcattttttatgaca

SEQ ID NO: 286965 - DNA, 74 bp, Homo sapiens
attttctgcattcatattacaaacttggtggacttgctttgtgaagagacagttcatgaacaagagtctttcag

SEQ ID NO: 286966 - DNA, 75 bp, Homo sapiens
tggcatttacagaaagagtcaacagcagtggcaacagtgtgcttctaaaattggggataaaaccatccatcaatt

SEQ ID NO: 286967 - DNA, 100 bp, Homo sapiens
atggttccccttctactacatgctgaagatttctgatgcagataatatcccaggacttttggttctcaaaagcttggcctatcggaacaaaggttcattt

SEQ ID NO: 286968 - DNA, 100 bp, Homo sapiens
ggaagctcacccacaagatcaacactgagagttctctctggagtctcgagcccgggaagtgcgttttggcatcattcttaacaaagaagttaaatattgg

SEQ ID NO: 286969 - DNA, 87 bp, Homo sapiens
aggaaatcgagactcatgactcccagagaggatggcatctagaagcctccagaggtgaagtccccagtggagcctatggctactctt

SEQ ID NO: 286970 - DNA, 99 bp, Homo sapiens
ggtattttacttcctcgttatgctattttgaaccgtgacccaaataatcccaaagattgtcaccatcagtgagaaaccgaacaagaagaggaaagcaaa

SEQ ID NO: 286971 - DNA, 73 bp, Homo sapiens
gatggcattaatgcagaggtcagatatcttcagggttccatcaatggtgagcaccagcctgaatgcagaagcg

SEQ ID NO: 286972 - DNA, 100 bp, Homo sapiens
ctgggagaggaaacttgatgcttctgggccaccatttgccagggcctcgctcgaggtatgaacatagacagtgaaactaaagcaaataatggagagaaga

SEQ ID NO: 286973 - DNA, 111 bp, Homo sapiens
actgaggatcagattttgaagagagatatgccaccagcatttattaagtacatggactatatcgcacaacaggtgctagttttgagaaggcccaacaggagtttgcaacag

SEQ ID NO: 286974 - DNA, 83 bp, Homo sapiens
ccatgagctggtgtgcagccgcccaggagggcgccaaatcttaaaggcagaccacgcaaaaagaaaccatgcccacaaagaag

SEQ ID NO: 286975 - DNA, 90 bp, Homo sapiens
gaacaaacagcagagacgaagtgacctcgatcgcttttggctagagacaagagcagcacttgaggcatgtcacaagggctggggcgtcag

SEQ ID NO: 286976 - DNA, 75 bp, Homo sapiens
gcgatgctgagctccctactggctgagggcagagactctcccgtgtaccacatgaaggaagatggttgggtgaaa

SEQ ID NO: 286977 - DNA, 98 bp, Homo sapiens
gcacctggggcggcatccccgcccgacttcggaaggaccgggaggcaaagatctttgatggaaaacagattccacagagaatggttgatggatggaat

SEQ ID NO: 286978 - DNA, 88 bp, Homo sapiens
cggcccatagccgagcagactggcatctgtaaggtgcggccgccgccgatgtccagctcgccgctgtccaagaaacgtcgcgtgtccg

SEQ ID NO: 286979 - DNA, 75 bp, Homo sapiens
atgggccagaacttaattctgaacatgaatgaccacggctttgtggtgcctgtcaaaggtcgaggcctttcctcc

SEQ ID NO: 286980 - DNA, 101 bp, Homo sapiens
cacgccaccaccctcccagccacctctgaagttgccaggcttcccaacattcttgtctgtgacaatgcagatcttcgtgaagactctgactggtaagacca

SEQ ID NO: 286981 - DNA, 104 bp, Homo sapiens
gcccctgcgcagcccaagaagatcgtggcccctacggtgtcccaaatcaatgcggagttcgtgacccaggtgctggagaatctggtaaaagcaccattgtgaag

SEQ ID NO: 286982 - DNA, 75 bp, Homo sapiens
gtcaagaccaaggatggcgtggtggagatcaccggccctgggaggagcggggacactgaggacctctctccaaat

SEQ ID NO: 286983 - DNA, 112 bp, Homo sapiens
cggcagccgagcagcctggcaacggcggtggcgcccggagcccgagttcacacaaaagatgttggacaatttctacaattttgcttcatcatttgctgtctctcaggcccag

SEQ ID NO: 286984 - DNA, 82 bp, Homo sapiens
cagccttgggcctcgcgccggctatggccgtgccctggggctgagccctcaggctgatcagctgaccgaagaacagattgct

SEQ ID NO: 286985 - DNA, 83 bp, Homo sapiens
gtcagcatgagcaaaaactccaaactcctctccaccagcgccaagagcatgatgccttcttctgtagagtgggcgctttgcag

SEQ ID NO: 286986 - DNA, 75 bp, Homo sapiens
cagctcgtgtgcaacgcgctactggcccagagatcctcaccatggagaaggaagtggcccagagccttctcaatg

SEQ ID NO: 286987 - DNA, 100 bp, Homo sapiens
tcctcctcctgacgttgtaaatcaggaccccaacaataacttacaggatccatcttcccctcgagggagcccagcacattcccccagagagaatggccta

SEQ ID NO: 286988 - DNA, 75 bp, Homo sapiens
ctcgggagcagttcatgcagcacctctacccacagttgaaggagaagagccaggcgtgcggagggaacttggggt

SEQ ID NO: 286989 - DNA, 97 bp, Homo sapiens
atgatggtcgagggccgcctgctcgttcctgacagaatacctgcctagagctggaacgttacctccagagcgagccctgctatgtttcagcctcaga

SEQ ID NO: 286990 - DNA, 90 bp, Homo sapiens
aattcctgacgttcattgatctggttaacacagaaatctgcctcctgggccatgccgcttctaaggcctgtttcttctcatgagccccag

SEQ ID NO: 286991 - DNA, 95 bp, Homo sapiens
tttgctttaaaacagtattacttgcggtggaatatgtgatcaagtgtgacatgtcagctctgcagaagattctgtatcgccatatgcaagccaag

SEQ ID NO: 286992 - DNA, 100 bp, Homo sapiens
agagtctccatcaggaaaacaagcctggttcagttaaacctactcaaactattgagaatccaaggatggagagccaagcccacgatcagctgcccacacc

SEQ ID NO: 286993 - DNA, 98 bp, Homo sapiens
gaagagacaggaggcagtagccaaacacccagagtcttcggatgactcctacgtgtccgctggagaagagcccctagaggcccctgtgtttgagatcc

SEQ ID NO: 286994 - DNA, 89 bp, Homo sapiens
tcccccacaaggccaacgttgactccagtgagaaagatcagtctaaagaaaaggagaagaaagtgaaaaaaacaattccttcctgggct

SEQ ID NO: 286995 - DNA, 82 bp, Homo sapiens
aacttctgctccaggaaattcagcctcaaaaccgtcctgctgcttgctgaccaaatggttcgtgctggccgtgggcagcgcc

SEQ ID NO: 286996 - DNA, 83 bp, Homo sapiens
cggaggagcagctcacctgagagacggagccccggctcgcccgtgtgcagagcattttgaaagcgaagcagaagccgtagaat

SEQ ID NO: 286997 - DNA, 90 bp, Homo sapiens
agacgctccaagaggctcctcagtgtgggcgagtaaaatgccctgcgtgtgagaagcagctggccgcccggatcctggaggcgcaccaga

SEQ ID NO: 286998 - DNA, 95 bp, Homo sapiens
gctgtgtacaaggacctggtgctcttgctccagaaagactcactgctcacagctgcccagctgaaagccaaggagaagatggagttccggacggc

SEQ ID NO: 286999 - DNA, 100 bp, Homo sapiens
ccgagaccgtgaccgagagcgtgaccgagagcgcgaatatcgtcatcgttagaagactccattcagaagagagaagaggggagtgactttatgtctttgg

SEQ ID NO: 287000 - DNA, 50 bp, Homo sapiens
gagagctgccgcaggctgctaagatgtttgctcagcatcaattcagatac

SEQ ID NO: 287001 - DNA, 96 bp, Homo sapiens
ttacagaagccgctattcgcctgggattggagggagaatgaagttgaagaggtaaaagaggagggtccaaaagagatgactttggatgagtggaag

SEQ ID NO: 287002 - DNA, 98 bp, Homo sapiens
cgtcacctgtccttctacattttcgatagagacgttttccggagggattccatcatagggatcgcttacacctgagacgaactacagaacagcacgta

SEQ ID NO: 287003 - DNA, 100 bp, Homo sapiens
gaactacagaacagcacgtaccagaggtggaagtccaagtcaaacgcagaaggactgcctcactgagcaaccaagactgttctccatagtggtgttcggc

SEQ ID NO: 287004 - DNA, 100 bp, Homo sapiens
actccccacagagtacggtgttcaggctgagctccaagtggcacaacaggagaaccatcacttaaatttggacctgaaggaggcgaagagctggcaagag

SEQ ID NO: 287005 - DNA, 90 bp, Homo sapiens
ggagtaggagactcagaatcgaatctcttctccctccccttcttggtgggaaactacctccgtatgttccgaggttctctgtacaagaga

SEQ ID NO: 287006 - DNA, 100 bp, Homo sapiens
tctcgtgggcgccgcagcctcccggggccctacggccgcccgccaccagctaactgccttctatgaaagcagtcattattcaaggtgatcgtattcttcc

SEQ ID NO: 287007 - DNA, 100 bp, Homo sapiens
gccagacaaagccgcctgatggagcgttggctgtgaggagacagagcatcccaggtttttggcgcattctcacagacttagatgaaactgtgatggccac

SEQ ID NO: 287008 - DNA, 100 bp, Homo sapiens
agaagatgcctcgaactaaacaaattcatcccagaaatctaagagctggattgccttttgcaattcttacttcaaggcatacccccttccaacgaggagt

SEQ ID NO: 287009 - DNA, 50 bp, Homo sapiens
cgcacgggagccagctgggtgacaccatgccacaaggagagtgatctctt

SEQ ID NO: 287010 - DNA, 100 bp, Homo sapiens
ctgttcctattcggccatcttggctcctccacaaatttaaggaccatagtacagctatggatactgaaccaaacccgggaacatcttctgtgtcaacaac

SEQ ID NO: 287011 - DNA, 82 bp, Homo sapiens
gccagccctcgctggaccagaccatggccgcggccttcggtaactaggatttctacctcaaccgcgagacctatgcaaggac

SEQ ID NO: 287012 - DNA, 112 bp, Homo sapiens
agctacagcaggggaaagtttcatagtctatcagtgggtcagaaaatggaggcaagaaactatattcagtctttgactcagatgccgaagatgaactttgcgaatgtattta

SEQ ID NO: 287013 - DNA, 75 bp, Homo sapiens
ggagaggttaaagagacccgttcagagtcctacagtggcagattggctctaccagtgcacctggacagggaggaa

SEQ ID NO: 287014 - DNA, 75 bp, Homo sapiens
cgctggagggggtcaggccatcaccccagcagcctcctgacaaggtgatccgggcgggccccgcaggaattttat

SEQ ID NO: 287015 - DNA, 82 bp, Homo sapiens
ctgttagacagtgaatgtggaaaggagattgacagtcacaattttgtaataagaaacattgctgaggctcttgtcagcaaag

SEQ ID NO: 287016 - DNA, 83 bp, Homo sapiens
gccgcacctccgtagctgactcggctccctggggaagggaatgcagggttgctggggctgggcccagaagcagcagcaccagg

SEQ ID NO: 287017 - DNA, 83 bp, Homo sapiens
ccggcggccttgagcgctgagcaagcaaagggatgtggagccacccaaaatttcaagcacaaaaaacatttccattaagcaag

SEQ ID NO: 287018 - DNA, 97 bp, Homo sapiens
ctagtgggcgcagaagcgttgtcactgcagcaactgctggttcagaagcagtggttggcacttaccatggttccccagaccagtcccatcaagtgac

SEQ ID NO: 287019 - DNA, 97 bp, Homo sapiens
ccagattggaggaggctggctctggtcttcgatgcacaggagtggccgttatggaacgcagtacttcctcctgtgctggttccaagacacagcgaat

SEQ ID NO: 287020 - DNA, 98 bp, Homo sapiens
aacaacgattgctgtgaaagtcaacccggagcgtgaggacagtgagactcgaacaaccctttggctttgctgagagaggactcagatgatagtgacga

SEQ ID NO: 287021 - DNA, 82 bp, Homo sapiens
cgcagaaggactgcctcactgagcaaccaagagtttactcctggcttgggggcattaggaagcactggaggctcttcgggaa

SEQ ID NO: 287022 - DNA, 87 bp, Homo sapiens
aggcatacgctgaggagtttggcaacgagacgtggggcgtaacaaaggcagcagctaccaagaaaccagcccctgaaaagaagcctg

SEQ ID NO: 287023 - DNA, 82 bp, Homo sapiens
atctgcactgctatatatagcacttcatctcaaagactgggcagtttgacccttaagcctgaagattcaactgtcctgctct

SEQ ID NO: 287024 - DNA, 90 bp, Homo sapiens
cagagatagttgtgcttttacacggttttccaacatccagctacgactggtacaagtcaccaggagactaaagtccatcaaaaacatcca

SEQ ID NO: 287025 - DNA, 98 bp, Homo sapiens
cgcgtggctccgtaggccacaccgaggaacagggcggagtagcggccgagctgcgaaagaggcgacgttccgctgtcccctggagctcccttggagcg

SEQ ID NO: 287026 - DNA, 100 bp, Homo sapiens
atcataaagtctctgcgttctggccatgacccccgggcccaggggaccctgtgaaatactgtaaaggttctgccattacaggaccagtagcaaaggagtg

SEQ ID NO: 287027 - DNA, 98 bp, Homo sapiens
tacattttctccaaaagctgtgaccaaggatcttatggttggtgatgaggcaagtgaattacgatcaatgttagaagttaactaccctatggaaaatg

SEQ ID NO: 287028 - DNA, 88 bp, Homo sapiens
ctatgagcgggaccaccctgggcacagcaggcatcggagatgaaggatttgggggcagagcacttggcaggtcatgaaggggtccaac

SEQ ID NO: 287029 - DNA, 82 bp, Homo sapiens
gggaacatggacatgaagaggaggatccacctggagctgaggaaccggaccccggcagcttttaattagacacttcagaatt

SEQ ID NO: 287030 - DNA, 99 bp, Homo sapiens
cttcagcaagaggaccgggctgggcgcgcccggccgcgacgcccgggacccagattgcgggttcagctagagaccgttggatggcagcttaaccttcag

SEQ ID NO: 287031 - DNA, 90 bp, Homo sapiens
cggcaagtcctacaccatgatgggcaagcaggagaaggaccagcagggcatcatcccacagtttttccagaaaggaggagtcaaggaagc

SEQ ID NO: 287032 - DNA, 76 bp, Homo sapiens
ggaattttgaagtacaccgtggtgacattgtatcattggtaagtctcaggggatccagaactgcagccagtccttg

SEQ ID NO: 287033 - DNA, 98 bp, Homo sapiens
tgcaagtggccctttggtgcgttcttcatataaagcagatgagcagcaccagcagtaagagggctccgaccacggcaacccagaggctgaagcaggac

SEQ ID NO: 287034 - DNA, 75 bp, Homo sapiens
tccttggcggtccacattgcaatggacaacactgttgtgatggaggaaatcagtgctggagaatctggtaaaagc

SEQ ID NO: 287035 - DNA, 74 bp, Homo sapiens
gggatccagcccttctggtgtcacctcccagggtgactcaactccagattatgtttgagaccttcaacaccccg

SEQ ID NO: 287036 - DNA, 90 bp, Homo sapiens
ggaagtaggggtgcacctcagcactatcccaagactgctggcaacaggttcgagaacatcatcgaaaattaagaaaggaggctaaaaagc

SEQ ID NO: 287037 - DNA, 100 bp, Homo sapiens
aacgaagattcgaaaagccacttgaagaaaagggtgaaggaggcgaattttcagttgatagggaacattattacagcagccagacgatcatgcagctact

SEQ ID NO: 287038 - DNA, 100 bp, Homo sapiens
ataaataagccctttgcacagcagtgccaagacttggttaaagtcattgaggactttccagcaaaggtggacccaagtggagagattgtggaactggcga

SEQ ID NO: 287039 - DNA, 83 bp, Homo sapiens
gaggaaggaacgaggcaaggagctaaagcagcgtgcgttcagccctggggttgttgatcattatgaaaatcctagaaacgtgg

SEQ ID NO: 287040 - DNA, 83 bp, Homo sapiens
gtcatggagcggcccaagacttgtggagatcacccaatcaggtttgcctgcaatgagatttcattctctacatttaaaggaca

SEQ ID NO: 287041 - DNA, 100 bp, Homo sapiens
ctttttgggttggggaaacgcagtggattatagctctgttttcttctttccaaaactgtgcacccctggatgaaagaagtgtctaaaaacctcaccaagg

SEQ ID NO: 287042 - DNA, 100 bp, Homo sapiens
atggccagcgacggggccaggaagcaattctggaagcgcagcaacagcaagctcccgggcagacaccattcgcttttcacccaagatgatttgatgtctt

SEQ ID NO: 287043 - DNA, 50 bp, Homo sapiens
tatacaagattccctaacagtgtctgttacttcttgctgcagattctgcg

SEQ ID NO: 287044 - DNA, 83 bp, Homo sapiens
agtctgctcagctggggtcatctgggaacctatagaggctcccttaatgcggagaaagggcaagccaaaattccttccggata

SEQ ID NO: 287045 - DNA, 51 bp, Homo sapiens
gtcgacgaccgacagggtggtgaaagggaggaatgatcaattggaatcgtc

SEQ ID NO: 287046 - DNA, 51 bp, Homo sapiens
ggggctctaacctcattcctctggaagatcattgctcctcctgagcgcaag

SEQ ID NO: 287047 - DNA, 97 bp, Homo sapiens
gcccgggggcgcgggccggggtgccacccctttgctgtgaagttgcttgcgctctgtaagaaagaaatcaagaattcaaaagatatccagaagctcc

SEQ ID NO: 287048 - DNA, 74 bp, Homo sapiens
ccgagaggtcgttttcccgtccccgagagcaagacgcaagatggctgtcctctctaaggaatatggttttgtgc

SEQ ID NO: 287049 - DNA, 96 bp, Homo sapiens
aaccctgaatttataactgaagtatgttggataaaggacattgttgtggcagtaactggagagaacatggaagtaatgaaaagtattattcagaag

SEQ ID NO: 287050 - DNA, 83 bp, Homo sapiens
acagagatcacatttcaactagattcttaggaagtatggattcactaacttcagcgaagaacactcgtgaaactgctcaggcc

SEQ ID NO: 287051 - DNA, 75 bp, Homo sapiens
ctgtttgacaaagctggcaaaggagaagtaacttttggtgccaaatctgattccagttttgatgttcaaattggg

SEQ ID NO: 287052 - DNA, 75 bp, Homo sapiens
tcgcctaacttctactgacgaagcttggaagttgcagaaggtgaactactgagttcttcattatgtctgatggag

SEQ ID NO: 287053 - DNA, 78 bp, Homo sapiens
tcaaggacacggtctacaccgacttcgacgggacccagacatggagctgcgggaagaagcctggtctccggggccgct

SEQ ID NO: 287054 - DNA, 100 bp, Homo sapiens
tgtcagagagagagcttggttaacttgggagaaagtttcatctgtggatggagtattgatgttgatatatcactacttgtgtcttttaacaaaatgaaaa

SEQ ID NO: 287055 - DNA, 90 bp, Homo sapiens
catcgttttgaagagttctgcgttttgccagtcacctctcaactgtgtgccaaaggtcaaaatgcagatcttcgtgaaaacccttaccgg

SEQ ID NO: 287056 - DNA, 90 bp, Homo sapiens
ggaatttcccttatctccttcgcagggcctcctgcactggccatgcccatgcccacggagggcaccccgccacctctgagtggcaccccc

SEQ ID NO: 287057 - DNA, 78 bp, Homo sapiens
tcggtttcctggacccattccgactcaggaaggtgggagtcaatcattttgacaagtctcctgaaaggaacagctagc

SEQ ID NO: 287058 - DNA, 75 bp, Homo sapiens
agtcagctcaaggcatggaatatttattagcaaaatcaccaggacagccaatacaagtggtttatgtaccatccc

SEQ ID NO: 287059 - DNA, 75 bp, Homo sapiens
cagatgctgccagggtccctgaagagggaagacacgcggaaacagatgagtgatgtagaagctggtggtgccacc

SEQ ID NO: 287060 - DNA, 83 bp, Homo sapiens
ttttgtggccttagctacaggagagactgttggcaagagtagcaagatgctgcagcacattgactatagaatgagatgtatcc

SEQ ID NO: 287061 - DNA, 82 bp, Homo sapiens
agacggctcacctgtgcgggatggaacaaaaggtgagaagccctaccactgcaactgggacggctgcggctggaagtttgcg

SEQ ID NO: 287062 - DNA, 51 bp, Homo sapiens
caagagtccaaacagagagtgggaagggggacttgatctcatcttcatgcc

SEQ ID NO: 287063 - DNA, 96 bp, Homo sapiens
ccagagatcactctatgatcgtccagcctcatataagaagaaatctatgttaggtgctccaatattacctcaaggattacagcctgaacaacagct

SEQ ID NO: 287064 - DNA, 111 bp, Homo sapiens
ggtgaatcccctgtttgagaaaaggcctaagaattttggcattgttataggtgcacagcgaaggagaagccccagtgcactagccattgaagtatttgaagcacatttggg

SEQ ID NO: 287065 - DNA, 75 bp, Homo sapiens
gtgacacctggactctttcaggttctgaagtcagaagacatgtcttcatctacatggcatctttccttacctcta

SEQ ID NO: 287066 - DNA, 90 bp, Homo sapiens
agacgggccggcccagagctcccgggtcgtctttcgtgtggccgcgagatcttctcactcagatatggcaacaagcagccttcactttgc

SEQ ID NO: 287067 - DNA, 74 bp, Homo sapiens
cagctccctggcgggagccccttctttaaaagactctgagattccagtctcatcagattttccatgtcctggtg

SEQ ID NO: 287068 - DNA, 100 bp, Homo sapiens
tatcccagtgatgctgacgggccctcttggggaagccacggtcgttcccacatgcagccagtaaagatcccagagaagttcgagaagctagagatcataa

SEQ ID NO: 287069 - DNA, 75 bp, Homo sapiens
atcaacaagatgttgtcctgtgctggggctgacaggcctcaggcccaggcccaaggccaagtgagagagcccagg

SEQ ID NO: 287070 - DNA, 74 bp, Homo sapiens
gggtggaggtggtgcctctggcagtgacgaggacgaagtgtccgaggctcagtttatgaacctcttaaaagcat

SEQ ID NO: 287071 - DNA, 82 bp, Homo sapiens
atttatggtcgcctttttgaatgagaccaattttaacactgttttaacaagagagaaaatgagaaaagaaaacataataaat

SEQ ID NO: 287072 - DNA, 83 bp, Homo sapiens
cagtggcagaagattttaattaggaactgtggctgcaccatctgtcttcatcttcccgccatctgatgagcagttgaaatctg

SEQ ID NO: 287073 - DNA, 100 bp, Homo sapiens
ctccttcatggcaatgcccagaaatggaagcagattagcaggggaacaggaacctgataaagaatcaggagcctcagtggatgaagtagcaagacagttg

SEQ ID NO: 287074 - DNA, 75 bp, Homo sapiens
aaaggtcttcagactaatgttagcataccaaaggtggtgaagcagtattttccaatttgaagattcatttgaagg

SEQ ID NO: 287075 - DNA, 102 bp, Homo sapiens
taagaagaggtcccaatcccccactctttccgccctaatggaggtctccagtttcggtacatgtcccagagcaagcacacggaggcccgggagctcatgtac

SEQ ID NO: 287076 - DNA, 80 bp, Homo sapiens
cagcctgcggagcctgtggggcagtgtggacgaatgtggaacctcgctctgtggctgtgttcccttggcactccttagtc

SEQ ID NO: 287077 - DNA, 100 bp, Homo sapiens
cggcggccccgcgcagcccccggccgcagcgcaggcagcccagcagagttgaagtattgataacaccaaggaactctatcacaatttgaaaagataagca

SEQ ID NO: 287078 - DNA, 101 bp, Homo sapiens
gggcaagaagaggcacgagatgccccctcacatctatgccatcacagacaccgcctacaggagtatgatgcaagatgatacaccccctgaagactccattc

SEQ ID NO: 287079 - DNA, 74 bp, Homo sapiens
cgcacttggcgcgcggcgcgggctgcagacggctgcgaggcgctgggcacagggatatcagtatgaacaacatt

SEQ ID NO: 287080 - DNA, 90 bp, Homo sapiens
cgcgccggctgctgctactactaccactttgggctgatggcaactgaggcagaagaggcctggaccttggcgcacacagacccaggaaca

SEQ ID NO: 287081 - DNA, 98 bp, Homo sapiens
agggagtcgccgctggagaggggctcggcgcccggcggggactgcagtttttggctttcacccccaaccagtgaccaaagacttgaccactcaaagtc

SEQ ID NO: 287082 - DNA, 76 bp, Homo sapiens
cacaaagtcaagagacagcgattggacagaatttgtgaagggctttttggtggtgctggagttggcaagactgtac

SEQ ID NO: 287083 - DNA, 101 bp, Homo sapiens
tgggagaagaaccggaagctcaagagcttcaacctgtcagcgctggagaaacatgggcctgtttatgaggatggtgaggaagaggatggagatgaagatga

SEQ ID NO: 287084 - DNA, 83 bp, Homo sapiens
tgccataaacaattcatatctcatggtgattcaagacattactgctatggagctgcatgctgtttcccttgaacaacatcttc

SEQ ID NO: 287085 - DNA, 75 bp, Homo sapiens
aggacgaggggctccgggtcttccagagcgtgaagatcaagatcggtgtctgtgacctttgatgatgtggctgtg

SEQ ID NO: 287086 - DNA, 90 bp, Homo sapiens
gctacatgtacgtggacttatatcagaccagtgtggatcttcaagaatcattggctgaagaagatgcagagcagcctgaagctggtggac

SEQ ID NO: 287087 - DNA, 100 bp, Homo sapiens
tgaccctttgatcaacccaatctcccataggcactcagtcaaggacatggtctgctatacagctcagactctcgtccgaatcctctcacatggtggcttt

SEQ ID NO: 287088 - DNA, 90 bp, Homo sapiens
cgtctccaggatacctacaatttggatacagataccatctcaaagggtaatcttccaggcaaaccacagggaagctggaaaagaagcggc

SEQ ID NO: 287089 - DNA, 97 bp, Homo sapiens
gatttctcttggatttggctacacacttatagatcttctgcactgtttacaggcacaggaaacatgccctgaactgtcacagaatgaaaccagcgct

SEQ ID NO: 287090 - DNA, 90 bp, Homo sapiens
gccggagccgctgtgtgcaaagttcctattgatggtccccccataaggaggggataccaactggagcctgacctatcagaagaagtgtcg

SEQ ID NO: 287091 - DNA, 100 bp, Homo sapiens
gcagtaccgagtgggcaccgaccgcacgggcttcaccttcaaatacaggttgatgctatgaaactgggagtaaaggaaatgaagaaggcatacaagcaag

SEQ ID NO: 287092 - DNA, 99 bp, Homo sapiens
agcaggctcaaataccctccttttgcgaaaaagtggatcaatattcggaagtcatatggaaatttttacaagaaaactttagaaactgttcctttggag

SEQ ID NO: 287093 - DNA, 100 bp, Homo sapiens
aatggacagttagtcacccacctacatgttgaggtggtgagctatgccccattcacgctcttcccctcactggtccccagtgccctgctggagcaagcct

SEQ ID NO: 287094 - DNA, 83 bp, Homo sapiens
gtcgaagacatggaccagggctacggagggctgggttacgacccctacaaccctgagctgcccaagccccccgcgcagaggga

SEQ ID NO: 287095 - DNA, 142 bp, Homo sapiens
actgaagcccttgcactgtgcctgtatggtgtcagatgctgactgtgtggagttacttctggaaaaaggagccgagatgatattgctgataggatgaggatggatgctggagaagtgactttagtgaaccacaactccgtat

SEQ ID NO: 287096 - DNA, 100 bp, Homo sapiens
agggggccagctcaggacacacagacccagctggaactcggcagcttgaaatccactctccagatgctaagcacacggtgatcctaaggagcaaggactc

SEQ ID NO: 287097 - DNA, 82 bp, Homo sapiens
ctgacctctctgatgagatggatcggaagccatcttcgacaagagcacagggaaggttgttttgaagacgttcagcctctac

SEQ ID NO: 287098 - DNA, 51 bp, Homo sapiens
tggctggcggtgcctggacgtacaaatggccgccctgctcccccaatgaaa

SEQ ID NO: 287099 - DNA, 82 bp, Homo sapiens
aagatccctgtggtagagagaaaaatcctggatctgtatgctttgagcaagtgatgtcttggcattgcccattttcaagcag

SEQ ID NO: 287100 - DNA, 83 bp, Homo sapiens
ggggaaggagccccacagtccccagtcgtgagatggagaataaagaaactctcaaagggttgcacaagatggatgatcgtcca

SEQ ID NO: 287101 - DNA, 100 bp, Homo sapiens
ggaaaggtggctgccgatcatcttgttaactgctgatgggatggtccatcttttaccagaagcctggctacagataagggaccaaaatgactgactcaaa

SEQ ID NO: 287102 - DNA, 90 bp, Homo sapiens
cggtcggctgcggtggcggcgtttggatgattgtctctcggcggcggagtcgatgtgcactcccagcaacacccctgccacgccgcccaa

SEQ ID NO: 287103 - DNA, 100 bp, Homo sapiens
atcatcctcatcatcatcataggagctatgcctgttccagaccagccttcatcagcctcagagaagacgagttccctgagccccggcttaaacacctcca

SEQ ID NO: 287104 - DNA, 100 bp, Homo sapiens
caattccggacacataacaagcagcagtgaggacaccaaaggttttgacaagcttgcatcatgcgtgagtataagctagtcgttcttggctcaggaggcg

SEQ ID NO: 287105 - DNA, 87 bp, Homo sapiens
caataagagcagaggatggaacacttcagtgcattcaaggtgtgagcctcagcagcgatttcattgctggcttttgtggtgagacgg

SEQ ID NO: 287106 - DNA, 75 bp, Homo sapiens
tactctccactatttgtcttcattacccacatattctctttccgtggaaagctccctgtgctgtcaggaatctac

SEQ ID NO: 287107 - DNA, 50 bp, Homo sapiens
tacgttccctaaatgctttcttggaagccgctgggagccgcgggtcggac

SEQ ID NO: 287108 - DNA, 98 bp, Homo sapiens
tgaaccgggtcgcggcggccgaggctcgggatatggccgcgtggaaagtgtcaaaattcttcccaagaggggatctgaaggaggagtggctgcctttg

SEQ ID NO: 287109 - DNA, 100 bp, Homo sapiens
tcaggacagttcccagcgggctccgtttcgtctccagaaccctggacagctcctccagctccgtggatggccgcgtgagacgctatgacctaaggatggg

SEQ ID NO: 287110 - DNA, 100 bp, Homo sapiens
atcaaggccaagtatccgccagtcaataggaagtacgagtgtgatgaagaacagtccagactggcagcaagaaaatatgctagagttgtacagaagttgg

SEQ ID NO: 287111 - DNA, 100 bp, Homo sapiens
cctgccacacagtgtgcctgcaacctgtccggggatcccagggaggacccttgaacatctgtgaagaaatgactattctgcatggaggcttcttgctggc

SEQ ID NO: 287112 - DNA, 75 bp, Homo sapiens
agaaaaaaagagcgacgagtgcaaggcagtaacagagaagaattttgaaacaaaagattttcgagcctctctaga

SEQ ID NO: 287113 - DNA, 78 bp, Homo sapiens
attttcaggatttatgctcctgaagctccttacacatcccctgataaactaaagtttaatagaaaatggtcagcttga

SEQ ID NO: 287114 - DNA, 97 bp, Homo sapiens
agaagagaagcagtgaaggagtgcagaggcatcacctgaaaggcccaccttgtgaactcctcgtgcccagggctgatgtgcgtcttccagggctact

SEQ ID NO: 287115 - DNA, 75 bp, Homo sapiens
ctttacagaggaatagtctacaaaggaagacttgtaacctggagaagagattaactgctgaagtactgatcgagt

SEQ ID NO: 287116 - DNA, 75 bp, Homo sapiens
ctacgagctggctttaatcctgaaagccatgcagcggatgaaggatttgggggcagagcacttggcaggtcatga

SEQ ID NO: 287117 - DNA, 100 bp, Homo sapiens
agagttaacttctgtttacatggaactcagacatctgcaaatcatggccagaaatgtacacacaggagagctggctgcagtaaaaatcattaaattggag

SEQ ID NO: 287118 - DNA, 80 bp, Homo sapiens
acagatgtccgacgctactggggaactaagcgtcttgtagaaggaactattaatccaggagaaacctgtttaatcattga

SEQ ID NO: 287119 - DNA, 76 bp, Homo sapiens
aacaacgtgtgcaccggtgtgctcacccgccgcggtggcatctgcaatagctcccccatccaggaatccactgctc

SEQ ID NO: 287120 - DNA, 100 bp, Homo sapiens
ggaggcctcgggggcgtacaggcgcagcggccgcagcagcagcggcagtcacaggcacatcagcaaagaggttttaaaatcaaagatgggaaaatcggag

SEQ ID NO: 287121 - DNA, 82 bp, Homo sapiens
catcttcgaacttagacttccggaaggactttggcgaggttacagaatgtctgaaggggacagtgtgggagaatccgtccat

SEQ ID NO: 287122 - DNA, 99 bp, Homo sapiens
gatggcaccggttacactggctgggcagacatgcacatgatggtgtccaagccagaacagtgggtaaagccaatggctgtagcaggagccaatcagtac

SEQ ID NO: 287123 - DNA, 80 bp, Homo sapiens
tgaacatcccgcacagcccctacagggtgatgagatttccatccatgctgactttgagaatacatgttcccgaattgtgg

SEQ ID NO: 287124 - DNA, 74 bp, Homo sapiens
gaagctgcagcggaggaaggcgagaataactgaagtgaagtgatggactccgatttggagagtagtaagacgtg

SEQ ID NO: 287125 - DNA, 100 bp, Homo sapiens
caggcaggccctgagcacgctgctgtgtgagcagcagactccgtgggaaggaggcttgtttaaactacggatgcttttcaaagatgattatccatcttcg

SEQ ID NO: 287126 - DNA, 50 bp, Homo sapiens
atgatgtggaggttaacagctatctttctattaataaagaactcttcaga

SEQ ID NO: 287127 - DNA, 78 bp, Homo sapiens
cgtgtgggacgggtttagcggcagcctcttcgaggaggaacccgttttcactagacaagacagcaatcgcagtgaaaa

SEQ ID NO: 287128 - DNA, 100 bp, Homo sapiens
gtgtaagaagtactccagggaaacctcccaggaaggatcgagatcgagaccgggatcgtgaagatcggtctaaagatcgagaccgagaacgtgatagagg

SEQ ID NO: 287129 - DNA, 87 bp, Homo sapiens
tagcctttgccatcactgccattaaggtcatcatcctgaaccacccggggcagattagcgccggctactccccggtcatcgactgcc

SEQ ID NO: 287130 - DNA, 50 bp, Homo sapiens
gtccagctcatgcaccagtgcgagaaggtggtcttctgccctgttaaaga

SEQ ID NO: 287131 - DNA, 90 bp, Homo sapiens
gagatgcttctgtggaagatgatgcttttatcaaggctttccttaaagtttcccatgtctcaatggactcctgaatataacgagctctac

SEQ ID NO: 287132 - DNA, 100 bp, Homo sapiens
ggaagaggaggaggaagccgagtttggcgaggaggatcttttccaccaacagggctgaccttgctggcctcagccagtcgggaccggctgatccatgtgc

SEQ ID NO: 287133 - DNA, 98 bp, Homo sapiens
agagtcgctggagcgggcggagctgtgcgagagcctcctcacttgggagtcagaaataccatcagaggaggggtactgtgactttaatagtaggccaa

SEQ ID NO: 287134 - DNA, 97 bp, Homo sapiens
aatacggggtgaagaccacccccgagggccggatcgtggcacccagaggctgccaggactttggctgggacccctgctttcagcctgatggatatga

SEQ ID NO: 287135 - DNA, 83 bp, Homo sapiens
cattggtatctacaagacattatagagcacctgaagttattttaggtgaaactgaacagtattttaaagaatctgatcgagga

SEQ ID NO: 287136 - DNA, 98 bp, Homo sapiens
gtccccactttcccctgagcctcagcacctgcttgtttggaagatattaataaggcagcggaaagaagaaatatgaatacggctccatcaagacccag

SEQ ID NO: 287137 - DNA, 115 bp, Homo sapiens
gctgcgtcaccgccgcccccccagacaagatggacaccgcggaggaaggcatagaatgtcaagctaaccaggcgtccgctacttcagaagagtgtactgtcgcatggggagtctg

SEQ ID NO: 287138 - DNA, 89 bp, Homo sapiens
ggaatggagtacaagggctatctggtatctgtagatggctacatgaacatgcagaggttggaaagaaccatgactgtattcaggaaggc

SEQ ID NO: 287139 - DNA, 100 bp, Homo sapiens
gcgctccctgtttcccatttccacagccgatgtccagggtcgatacggcccttaaaatccccgtacactccaccccagttaattggccttggtcctcaca

SEQ ID NO: 287140 - DNA, 75 bp, Homo sapiens
ggacctgcggactagcgaacccggaggtcatggcaaaaccccaaaagatgccgcgtcagttcgagccacgcatcc

SEQ ID NO: 287141 - DNA, 97 bp, Homo sapiens
gacaacaaaatgcttgatgatctctatgaagatattcactggcttattttagttacagggacccgagctgatccagaaagccaacggtctccacggc

SEQ ID NO: 287142 - DNA, 75 bp, Homo sapiens
gccaagagaagcttctgagagaggtagacgtttttaaggagaaacaccgctagtcctgctgatgggcaaagaagg

SEQ ID NO: 287143 - DNA, 82 bp, Homo sapiens
aagcgactgagtccgcgatggagggaggaacatcacatcatttagggcagaatttttccaaaatgtttgaaatcgtttttga

SEQ ID NO: 287144 - DNA, 50 bp, Homo sapiens
caaccaatgatatatatctgtggaggtcggattgtttgtgctgaacgaac

SEQ ID NO: 287145 - DNA, 82 bp, Homo sapiens
gtcaggttgaaaatggaagagtaattgcctgctttgattccctaaaggttacaactgatggaaaaccaaaaatcgttgatat

SEQ ID NO: 287146 - DNA, 80 bp, Homo sapiens
gaccaaaaaacacaataccaggcatacatttggcagaataaatgaaccagggtatttgaagtataccatacaactgtttt

SEQ ID NO: 287147 - DNA, 90 bp, Homo sapiens
tcctgcctggcccccagccagttccctgctgaagatggccagatccccttgtctggacttcagaaatgggcttgggaaccagctgagttc

SEQ ID NO: 287148 - DNA, 100 bp, Homo sapiens
taagagcagtttgaaggcgattgttgctgagtcactgaacaataccagcatcaaaggcttttattcaaagacgagttgtactgctgtcacaggaaatgga

SEQ ID NO: 287149 - DNA, 100 bp, Homo sapiens
acaggactacatggatgccatggctgagaagatggactcaccctgtcacccaggttggactgcactggcctcaacctcctgagttcaagtgatcgtccca

SEQ ID NO: 287150 - DNA, 74 bp, Homo sapiens
agggccttactccttcacagatcggcctactgaacttgacgcactggtatttggccatctatacaccattctta

SEQ ID NO: 287151 - DNA, 80 bp, Homo sapiens
cacgacgtggacttctacaaggcccgcatggagatgccatggacaatattaccaggcagaaccaattctacgatacccaa

SEQ ID NO: 287152 - DNA, 82 bp, Homo sapiens
aaatagtgagacccacttccacaatggtacagcagttccatgaaagtcatttgcgtgtggttgactgatagattagacctcc

SEQ ID NO: 287153 - DNA, 82 bp, Homo sapiens
ctcagcatggccaactccgggcccaacagcaacaggtctcaattggtgacgagaacaagtcagtgcgcgaccgtttcaacgc

SEQ ID NO: 287154 - DNA, 82 bp, Homo sapiens
ctcgcctcgactccaaatggttgaaaacagatatacaggattttcctaagcccagtgaagagaagattaagttaattctcaa

SEQ ID NO: 287155 - DNA, 100 bp, Homo sapiens
taaaagacagtcctcgtcagcactgactttcagctatggaatcggtgacaaaatatctgaacagaagaggacttaggagagatctgaactccagctgccc

SEQ ID NO: 287156 - DNA, 50 bp, Homo sapiens
ttaaagagtaaagttgtgctcaacgggctgatggagttatgagaacaatg

SEQ ID NO: 287157 - DNA, 75 bp, Homo sapiens
agactctggctggtgatgttcatattgtgagaggagacttcgatgaggggtgtgtctagcaatgatttctcttct

SEQ ID NO: 287158 - DNA, 98 bp, Homo sapiens
ccaaaagctgtgagaacaactacacgttacgctattcgttgtggtccaaaacagtttacctcttatctaacagatatttggagttcttacaacatggc

SEQ ID NO: 287159 - DNA, 100 bp, Homo sapiens
cacaaatgcaaatacttgtgcactgggagagaccgagacatgggtgcccggcaccgcgcccgagcccactccattcagatcatgaaggtggaggagatcg

SEQ ID NO: 287160 - DNA, 74 bp, Homo sapiens
aaatttgatgtttcgtcagagttactagaggttttgatgatgatggttcagaatttcatgaacatatatttctg

SEQ ID NO: 287161 - DNA, 100 bp, Homo sapiens
gcaagcaccatgcagtggataaggggcggatcgggaatgccttcccaccatggattgccaagaaaatgagtactgggaccaatggggacggtgtgtcacc

SEQ ID NO: 287162 - DNA, 50 bp, Homo sapiens
ctgcagttccaatttcccaaaaagagaagattcttacctctgaagacaat

SEQ ID NO: 287163 - DNA, 82 bp, Homo sapiens
cgtctctccgccactgcgcacattttgcagcctgcaccggccaacgattttggaaataatcagggttattttaaaactatat

SEQ ID NO: 287164 - DNA, 100 bp, Homo sapiens
taccacaaccccgattgctttcgtgaaggtctccaactggtttggcaacaagaggattcgctataagaaaaacatcggaaagttccaagaggaggcaaac

SEQ ID NO: 287165 - DNA, 87 bp, Homo sapiens
tgaggttcagattaagaaatctgccccaaagtcttagaactggtgcagcggaactgctgcctgacgctctgcaacttcagcatcccc

SEQ ID NO: 287166 - DNA, 97 bp, Homo sapiens
cgtcaacgccttcaaccaggaggacctcaagattcctggaaagaagccccagcccccaggggaaacctccagaggaacaaggtcaatgcatctttcc

SEQ ID NO: 287167 - DNA, 75 bp, Homo sapiens
gttcgagaacgaccccgagacggtacgtggtggagccaccccggctgccgctcgcggtgagtttgaagccgcctt

SEQ ID NO: 287168 - DNA, 75 bp, Homo sapiens
ggagccaccagcccaaccgtgttgtatgtgagtggaggaaatacgcagcaactattggatgattatccgaaatgt

SEQ ID NO: 287169 - DNA, 100 bp, Homo sapiens
gatacattaaatgcaatagcccttcagtactgttgtacgaggatgccagcccccatcagattgcgggagctgatccggaccatccggacagcccgaaccc

SEQ ID NO: 287170 - DNA, 73 bp, Homo sapiens
aaaagccaagaggaggacagttcgctacacagcaatgcatcgagggatttgtcttggctgttactatgacacg

SEQ ID NO: 287171 - DNA, 88 bp, Homo sapiens
tcgcctctacagccggttcaccagcctggacaaaggagagaatgggactctcaggcaaccaagttgttaaaagccttgaaaggctaca

SEQ ID NO: 287172 - DNA, 100 bp, Homo sapiens
gtcgccctcggggtggcagttcccgttaaccttagccacaaagtcaaagtattctagatcggaagttgtgctcaccttcttcgaaagatctcctctggat

SEQ ID NO: 287173 - DNA, 75 bp, Homo sapiens
ttttaattggtaataaagcagatctggatcatcaaagacaggttaccattaagaatatcgaaagggagctcattt

SEQ ID NO: 287174 - DNA, 87 bp, Homo sapiens
ttgagaactactccttcaagatttcctacatcccggatgaagagtttctccacagacactacccaaagcagtccttcactacagtgg

SEQ ID NO: 287175 - DNA, 83 bp, Homo sapiens
taggaaacacctctacctcctgcgaggcctcccgggctccgggaaaactacactggccaggcagaacgagatcttgtggcggg

SEQ ID NO: 287176 - DNA, 50 bp, Homo sapiens
caacctcactgagttagaatcagagctattccaatagaaactgctaagca

SEQ ID NO: 287177 - DNA, 100 bp, Homo sapiens
acccagacaggtggcgacggcagaggaggatggttttagattgtcatctcaagaagctgcttctagttttggcgatgatagactactaatagaaaaattt

SEQ ID NO: 287178 - DNA, 83 bp, Homo sapiens
caagctgtcatcacaaaagagttgattgaaattatctctggtgctgcagctctactaatagcatgtgttttacaatgaaaaca

SEQ ID NO: 287179 - DNA, 74 bp, Homo sapiens
gctggtagcccgaagtaacatcctgacactaatgtatcagtgcatgcaggtgattgttatgaagaggtctttgg

SEQ ID NO: 287180 - DNA, 82 bp, Homo sapiens
tcagacccatttccagtcatgagtactaggttttgacaagcttgcatcatgcgtgagtataagctagtcgttcttggctcag

SEQ ID NO: 287181 - DNA, 103 bp, Homo sapiens
caatatctgtcttcggtggactccttcggcagtccacccaccgccgccgcctcccaggctaccggctctctgaccagttccacgacatcctcattcgaaagtt

SEQ ID NO: 287182 - DNA, 101 bp, Homo sapiens
cctccgccaccgtgcacatccgaatggcgtgatgagacgctccaggatggctgtgatactcacttctgcaaggtcaatgagagaggagagtacttctggga

SEQ ID NO: 287183 - DNA, 82 bp, Homo sapiens
tgggagcagctggctctgggccttgaacattccgaaactgtcaagattggcaaggctgggccagtaataaaggtgaaaattc

SEQ ID NO: 287184 - DNA, 98 bp, Homo sapiens
gccaagcaagtgctctacgtgcctgtcaagaccacggccctgagcctgtgcaattatttcgagagtcaaaatgtggatttccgaggcaagaaggtgat

SEQ ID NO: 287185 - DNA, 73 bp, Homo sapiens
ggaaattgaagctcaagaaggtgaagatgatacctttctaacagcccaagttgcccccaagtttcctggcagt

SEQ ID NO: 287186 - DNA, 75 bp, Homo sapiens
gaggaggaggaggaggaggaaggcacctatgccacagtcttcaaagggcgcagcaaactgacggagaaccttgtg

SEQ ID NO: 287187 - DNA, 82 bp, Homo sapiens
ctaacaagaggaacacggtagatctagtatttgggaataagatgatcattccttccctggatggagccctcttccagtggga

SEQ ID NO: 287188 - DNA, 83 bp, Homo sapiens
atggcggacggcgtggaccacatagacatttacgcggatgtcggcgaagagttcaaccaggaaattgcaagacctaacatggc

SEQ ID NO: 287189 - DNA, 100 bp, Homo sapiens
gaaagagtcaacagcagtggcaacaggtgactctgacatcattagaagcatgccagaacagactggtgaaaagtaaaccttttcacctacaaaatttcac

SEQ ID NO: 287190 - DNA, 90 bp, Homo sapiens
agccaagtcaaaatattctccagaattactcaaataccgcggacaaggcaaaatctcagcaagttcggacctctagtacaataaggcgaa

SEQ ID NO: 287191 - DNA, 100 bp, Homo sapiens
gagcttcttcctatttgccatgggaacctaattcatctctccagcaaaggacacatctctccagcaaaggacacctctctccagcaaaggacacctgcag

SEQ ID NO: 287192 - DNA, 74 bp, Homo sapiens
cggctccccccaccaccagcccagctcctctcctccaaacaagctgtcagtagagacggggtttcgccgtgtta

SEQ ID NO: 287193 - DNA, 80 bp, Homo sapiens
gaacctaggagatcacgaacttttacacatgtatcctggcaatgtgtctaaattacatgatctcactctgtcactcaggc

SEQ ID NO: 287194 - DNA, 100 bp, Homo sapiens
acaggaatcggataacaaggagctaaaggtatcatgaactgatcactaaatatgggaagttggagcctttggcagaagtggacctaagaccccagagcag

SEQ ID NO: 287195 - DNA, 98 bp, Homo sapiens
atcttgcaccaacatctggtacttcagctaagacaccctctgagcttgctctgtcaccatcgccccggaatcctgcagagcccattgctgtccagaat

SEQ ID NO: 287196 - DNA, 74 bp, Homo sapiens
gattgtcctctttctacaaaagaggaaggcattactgggtaccggccaagaggctgtttggtggtcagatcgtg

SEQ ID NO: 287197 - DNA, 83 bp, Homo sapiens
agagaaactcagcgctggggaagaagtaccaaaagaattggtggagctccatttgaagctgatgaggaaaattggcaaatctg

SEQ ID NO: 287198 - DNA, 75 bp, Homo sapiens
actctgattctgaaacagactccagtggcctgaagctgcccagcaggcattccaaggcctgggtcctggtttctc

SEQ ID NO: 287199 - DNA, 72 bp, Homo sapiens
cgcccctcaccaaagccacagcagcagaaagtagtgacgggagcatcaaatctgccccctggaggagaagac

SEQ ID NO: 287200 - DNA, 98 bp, Homo sapiens
agctgaaccaggcccttttggatcttcatgccctgggttctgcccgcacggacccccatgcatggcgcaggccctgggccctgacacgccattcacag

SEQ ID NO: 287201 - DNA, 101 bp, Homo sapiens
gccggggcccaaccacaagacgactcaataggaggaagtttttcagtgaatatgagaagttacttcattcagaaaattatgtgacaaaaagacagtcactg

SEQ ID NO: 287202 - DNA, 117 bp, Homo sapiens
accgggatcgtgaccgagaccgtgaccgagagcgtgaccgagagcgcgaatatcgtcatcgttagaaggtcttagtggtgcaatggctagtataagcgtgcgttcgagtaccccagg

SEQ ID NO: 287203 - DNA, 100 bp, Homo sapiens
tccaaccccgggctcggcggcggcggccaggtccctgctgaatcacacgccgccatccgggaggcccagggaaggcccgatgagagaaagggaaagttaa

SEQ ID NO: 287204 - DNA, 100 bp, Homo sapiens
tttctcacatatacaacacgattcttctaatggatgggaacatggggaagggaaaaggccgaggcatcagcgtgtgaagaccgcaaagacgatcccgagt

SEQ ID NO: 287205 - DNA, 75 bp, Homo sapiens
aattaggtcccctcaatggggacacagctgtctgtgatcctggaaacatacgtgtgactgaagctcccaaacacc

SEQ ID NO: 287206 - DNA, 100 bp, Homo sapiens
ccaaggaagtgactcaaactgtgagaacttcagatccctctctgggcgcattgttggaggtgtgtggtggttctttaccctgatcataatctcctcctac

SEQ ID NO: 287207 - DNA, 100 bp, Homo sapiens
ctttaccacaacaatgaagagaaaaataggctgccagcaaacagtcttccgcaggaaggagatgtggttggcaaaagcagcttttgatgatgcaattgca

SEQ ID NO: 287208 - DNA, 100 bp, Homo sapiens
atgatgttttgtttgtttgtgaaggagagccatttattgggcttatttcaaaacctttgtccctcagttccaggaggcagcatttgccaatggaaagctc

SEQ ID NO: 287209 - DNA, 99 bp, Homo sapiens
gattctttgtagcagacactgcaaatgaagctctcgaggctgctaagagactaagaaaaaccatatggcatagttgaaaagaagtccagaatattccct

SEQ ID NO: 287210 - DNA, 99 bp, Homo sapiens
catggagctaacatcacaaggtgctggtacttattgctggttcgatgcccagaactgaatgctgtgctccagctgtggcctcaccggtgctgaatagag

SEQ ID NO: 287211 - DNA, 83 bp, Homo sapiens
cctgcgaccacccctacattgtgaagctcctgggagcctactatcacgacgggaagctgtggaaactatgttccaacttcctg

SEQ ID NO: 287212 - DNA, 89 bp, Homo sapiens
aatggacaagaatatcatcttcaacttgtagacacagccgggcaagcggcgctggcggcggccctgggacccgcggaagccggcatgct

SEQ ID NO: 287213 - DNA, 87 bp, Homo sapiens
gaggagaacgactgggttcgcctgcccagcaaatgcgaaggacgtcccagtgatcgggaggagtgggaagagcttcagctacaacca

SEQ ID NO: 287214 - DNA, 88 bp, Homo sapiens
aaaacctattgactatacaattctagatgatattggacatggagtaaagtttttttacaggaagtggcatgggttttgaagcctttat

SEQ ID NO: 287215 - DNA, 82 bp, Homo sapiens
caggccgagtgtcaggccgggcagctgcatatctatgtgagactgaattttcctcttagacttcagctaaaactgtgtattg

SEQ ID NO: 287216 - DNA, 89 bp, Homo sapiens
tgcggaacaaatccaggctcgcagaaccgtgaaaaaggagtggcaggctctgacgacggctccctgcggctctgggaggtggccactgc

SEQ ID NO: 287217 - DNA, 83 bp, Homo sapiens
agcctgcggagcctgtggggcagagctccagagattatattggggttgccattttgtgaagccatagacatgtggtcattggg

SEQ ID NO: 287218 - DNA, 50 bp, Homo sapiens
gatgtggcagactttgctccctggcaaaaaggagcctaccatggatgcag

SEQ ID NO: 287219 - DNA, 78 bp, Homo sapiens
tcgctttggacaggtttacacagaagccatggccacagatgtctttaattccaaaaacctggccgttcaggcacaaaa

SEQ ID NO: 287220 - DNA, 100 bp, Homo sapiens
gcctcatttaacaccattgaagactctgggattaatgctaaatttgtgaatgctgtgtatgataccttacttaatactagtacccaaaggcaagtggaac

SEQ ID NO: 287221 - DNA, 98 bp, Homo sapiens
aaagagatgtggggggattctcgacctgctaacagaactggaccttttcggaacatcatttacagcgagcaatttcagcacagcaagtgtttagagaa

SEQ ID NO: 287222 - DNA, 88 bp, Homo sapiens
gtgtatatattgcatcttcctctggctctacagcgattttaccaaatgttgcaagaactctggagttcttatggtagtaaaatgccgg

SEQ ID NO: 287223 - DNA, 75 bp, Homo sapiens
tttcagttttggtcatcggaagtggtgccttcagcacaggttctaagctggtctatgtccatcaccttcttggag

SEQ ID NO: 287224 - DNA, 98 bp, Homo sapiens
tgggagtctccgcgtcccgctcgctgggagagaggtacctctccttttccctctccctttccctaagaactgttcgtcaggtggcacaggagcagttc

SEQ ID NO: 287225 - DNA, 100 bp, Homo sapiens
cgagtcctccctgttcatcattgcctccaagcccctcaagaccctctcccgagaacggcccctgcccaacatcttcaacctgtacaccatcctcaccgtc

SEQ ID NO: 287226 - DNA, 96 bp, Homo sapiens
ctgctgttctagagcagggatcagcaaacttgctgtaaagagccaggtgcaggttttgcagcatttggacaaacaaagccagtagtaacccctttt

SEQ ID NO: 287227 - DNA, 80 bp, Homo sapiens
cagtctcccattgcccttgcttcaggacagagggacacttgacattcagggacgtggccatagaattctctcaggaggag

SEQ ID NO: 287228 - DNA, 90 bp, Homo sapiens
gaaagaaacaaggggccagggcagagggcacctgagcggctggagagcctgttggagaaacacaaagagtgaaactggaacgccaagctg

SEQ ID NO: 287229 - DNA, 76 bp, Homo sapiens
caccatgttcggaatgctgctgttcgctggtgggaaggcttcaagctcaacaagaagctgtacgagctcatcatca

SEQ ID NO: 287230 - DNA, 100 bp, Homo sapiens
tctgtgaccatgacaatgattgccaagacggcagtgacgaacatgcttgcagcctttgaggggagggactgcacctgagtacagcacccaggcgtcttct

SEQ ID NO: 287231 - DNA, 75 bp, Homo sapiens
caacgatgacatgcatgaaaggcacctgccgccagatcccacccttggacccccatgaaaatggaaacaatggaa

SEQ ID NO: 287232 - DNA, 101 bp, Homo sapiens
gttcctattgattcatcagattttgcattggatattcgcatgcctggggttacacctaaacaggtggccaccaaatatgaagtgagtgtctatgctcttaa

SEQ ID NO: 287233 - DNA, 126 bp, Homo sapiens
gcagagctaagtcctccagttctcgattcactgacagtaaacgctatgaaaaggacttccagagctgttttgggcccaagaaacagatattttcaagaaaaagaagaggaaaggacaggaggacag

SEQ ID NO: 287234 - DNA, 75 bp, Homo sapiens
cggatctggaggagcagttgtctgatgaagagaaggttatcaatactctggctgaccatcatcatcgtgggactg

SEQ ID NO: 287235 - DNA, 74 bp, Homo sapiens
cccaggtgatgcctgaagctcaagggactgtgtccaccctcaggccaccagcttgggctccccacggagggcag

SEQ ID NO: 287236 - DNA, 97 bp, Homo sapiens
aggagccaagaaaatcaatctaaacatttgtgggaagttgtattcatcaataatgaaatgctgactaaggaacaagctcttgtaaatgtaaaactct

SEQ ID NO: 287237 - DNA, 101 bp, Homo sapiens
gaaaaaatgtggcagcgcctgaaaggaatgaaagaccacagcaagattctttcattcgtctcctcctagcctgggggaccaggctcgaactgaccctggac

SEQ ID NO: 287238 - DNA, 82 bp, Homo sapiens
aagatgccccgtctgattgccaagcctgagaaatgccagtggcctgacagcagcagacattgcacaaacccagggtttccaa

SEQ ID NO: 287239 - DNA, 74 bp, Homo sapiens
tagaagagaagtacccttatatggtggaatgttgtcatttacgtgctgaagcatattgacttgaggaaaacgcc

SEQ ID NO: 287240 - DNA, 97 bp, Homo sapiens
acaccctgagtgcggatttctgctatgatgacaggcgaggattaaatccaccacacagggtgaaatctatctccatgacaacattcacacaacagga

SEQ ID NO: 287241 - DNA, 74 bp, Homo sapiens
ttttagggtcctttatatagaagggagagtagatcatgacaagatgtttaagatgagtgaaaagatattactcc

SEQ ID NO: 287242 - DNA, 75 bp, Homo sapiens
atttaaacagatcacatcatgcgatgagatgaacacttttaacaagagaacaggactctatataaatcgctgtgg

SEQ ID NO: 287243 - DNA, 74 bp, Homo sapiens
ctggcaccagcaataacagccaagcctgtgcccaggtggccccaatgtcagtgtatgcttgtctgggcaatgat

SEQ ID NO: 287244 - DNA, 100 bp, Homo sapiens
agagtggggcctgggatgagagtggggtatttatctataccacaagcaaccacatcaaatatgctgtcaccactggctgataggaagatgtcttcaggaa

SEQ ID NO: 287245 - DNA, 74 bp, Homo sapiens
tggccctgatcatcctgctgggcttcgtccagatcgggaaggggtcagttaaatgaaagcatggaccatggggg

SEQ ID NO: 287246 - DNA, 89 bp, Homo sapiens
tgccgagaagctttacctcgctgaccctatgaagaggatgaagtttttgctgctgcagcagaagtacctagaatacctggaggatggca

SEQ ID NO: 287247 - DNA, 144 bp, Homo sapiens
ccatgattgcacccttgcacttcctggaggtgaaactgggcaagaggccccagcccgtgaaaagtgagaactgcagttcccacgttagaagagcagttgtcacctgcttctcagcagggtgctgtggtcgtcacggaaacaggc

SEQ ID NO: 287248 - DNA, 75 bp, Homo sapiens
gtaactgattcccaaaagcgaagggaaattctttcaaggaggccttcctacagaattttccccagagaatacctc

SEQ ID NO: 287249 - DNA, 74 bp, Homo sapiens
tccgaaccccttcatgcccaaatcccggaaactccagcgtgtctccagccgtgatattaataaggcagcggaaa

SEQ ID NO: 287250 - DNA, 50 bp, Homo sapiens
caataggctacttcaaatctgaactggcacgagatgtgcgtaccaatgaa

SEQ ID NO: 287251 - DNA, 75 bp, Homo sapiens
atgatggtgacgcttctcactcacgtgtgaagcacgagtacacgagacaggattgagaaaggagagattcaaatt

SEQ ID NO: 287252 - DNA, 100 bp, Homo sapiens
ccgggaggtaagaggtttgggactgccccggcaactccagggtgtctggtccacgacctatcctaggcgccatggtggttgtgggaagagaagtttgcag

SEQ ID NO: 287253 - DNA, 100 bp, Homo sapiens
ctaaaaaccttagacaagcatggaataaatggagtgaaggtacctgagcgcaggaaccatggtcttcattgctgcctcagcattagcggaagtgccacgg

SEQ ID NO: 287254 - DNA, 101 bp, Homo sapiens
ctcgcaggaaatgggaattctacttgtgtgggctgaccccgcactacatctacccaccagccatcgtgcagcccagcgtggtgatcccagccgcccctgtc

SEQ ID NO: 287255 - DNA, 100 bp, Homo sapiens
cttcgatcccttctctgatttgctgtcagccatgaacggatggatgtgatgcctgctagccaaaaggaaaggtgactcttttgatggtgggacttgataa

SEQ ID NO: 287256 - DNA, 82 bp, Homo sapiens
ccacatagacatttacgcggatgtcggcgaagagttcaaccagacacagccgccagcccaaacagcagcggcatgggcagcg

SEQ ID NO: 287257 - DNA, 90 bp, Homo sapiens
tcttgagaaaggaaagacttctgtgctcccgagaacttcctatcagcttactgcagagtgggtctgggcatctgctacgacatgcggttt

SEQ ID NO: 287258 - DNA, 106 bp, Homo sapiens
caccatgccgctcctaagcctgcacagccgcggcggcagcagcagtgagaggtgtggacactgccagcggctgcagccgacttggaatgacctgggagacaaatac

SEQ ID NO: 287259 - DNA, 50 bp, Homo sapiens
gcagtcccgcggcagcaggatcacaggaagcccctccgcttggccagaat

SEQ ID NO: 287260 - DNA, 50 bp, Homo sapiens
caactgggacgacatggaaaagatctggcaccactccttctacaatgagc

SEQ ID NO: 287261 - DNA, 75 bp, Homo sapiens
gggccgttgatcttcggccccacacggtgacttaagagattaaaattaatttggttgctgttggttctgaacaaa

SEQ ID NO: 287262 - DNA, 125 bp, Homo sapiens
aaattaaaagaggagcagcatggcatttcagtcactggtttgcagagtccaggactgaccactgagcagatgctgagaaaagaccagaagactatctatagacaaggcgtcaaggtggccattag

SEQ ID NO: 287263 - DNA, 100 bp, Homo sapiens
ctggacaccgttctaccagcgagggcacaactcggtaagatcctgaggaggcaggagagggacagggaaggagtatgggtaggggcaggaggagccctgg

SEQ ID NO: 287264 - DNA, 75 bp, Homo sapiens
ctactgttccaacctctttgaggaactcacaaagctgctgtccaagactgcaggcaccacctgtgtgaaccggac

SEQ ID NO: 287265 - DNA, 73 bp, Homo sapiens
tatacgtggattctagaggggtgacagcgaaacgtacaggtttgcagattccgccagcagcacagcaagctct

SEQ ID NO: 287266 - DNA, 80 bp, Homo sapiens
gggcagacggattcatttagagctgcggaacaggacgccctctgatggcttgtcaatgaggcagatcagattcaggttcg

SEQ ID NO: 287267 - DNA, 100 bp, Homo sapiens
cccaaatgatggtcctcctcctgacgttgtaaatcaggaccccaacaataacttacagtgaaccacgagactgccaaggtgatccagaccgccttccagc

SEQ ID NO: 287268 - DNA, 74 bp, Homo sapiens
tttccttagaacaccaaagattgtctctggcaaagtgtctgagcagcaggagagagccttcacgctggggctag

SEQ ID NO: 287269 - DNA, 100 bp, Homo sapiens
tggtgatgcagggagacgtgatccgccattacggggagcacgtgtgcactgctaagttctcaacatcagcacctcggttcagctggcagcctccatgcct

SEQ ID NO: 287270 - DNA, 97 bp, Homo sapiens
gaagactgatagagacttcgttaaggatcaactgcctgtagtcaccagtaaagtgtacaatgcagtagcaaacctctggaaaccatggctagatgaa

SEQ ID NO: 287271 - DNA, 75 bp, Homo sapiens
ccggcgccgccgcgtcttcccggtctcctttcccggccgcacaggttttcggctttgtgagaaaccttaccatca

SEQ ID NO: 287272 - DNA, 83 bp, Homo sapiens
ctttgactactggggccagggaaccctggtcaccgtctcctcaggtgttcaaagctgaaacaggagagaaacttctagaaatc

SEQ ID NO: 287273 - DNA, 83 bp, Homo sapiens
ggcgggcgcagtttctcacgacgggccgagcctgccactgattttttatcaagcagaaatgcatcgaacaacgagaatcaaga

SEQ ID NO: 287274 - DNA, 100 bp, Homo sapiens
aacctggctggcctcaagtacagggtcatcaagggcagtaggtgcacgtctcatcgcacatgctggcagcctcaccaacctggccaagtatccagcatcc

SEQ ID NO: 287275 - DNA, 100 bp, Homo sapiens
aatcttcaagaacttcctcgcactgtgacatgtctgatcccttgctcccatccctgcagcatgaacaaggtctcaacatatgcactagtggaagtgccac

SEQ ID NO: 287276 - DNA, 100 bp, Homo sapiens
cgcggatgtcggcgaagagttcaaccaggctactgcagcactggggtgtcagttgttggtccgacccagaacgcttcagttctgctctgcaaggatatat

SEQ ID NO: 287277 - DNA, 88 bp, Homo sapiens
caaacagcaccaaccactgtatcaaacgatcaagtcttccataccagggaccaggccaaaaccagactgccactgcccctacttgggc

SEQ ID NO: 287278 - DNA, 83 bp, Homo sapiens
ctgatcagtgacacgggggagttaaagctggcagatttcggactttttttatgaagacatggagtccttgacgcagatgctta

SEQ ID NO: 287279 - DNA, 83 bp, Homo sapiens
ccccctcttcctcacttccctgtactctcatcgctctcggcctccgacacgaatggaacaaaagtgggacttttaaaatgttg

SEQ ID NO: 287280 - DNA, 75 bp, Homo sapiens
aaagaagaccacacactgggaaacatcattaaatctttgtgaagtgtggatatgcaggctctaactttccagaac

SEQ ID NO: 287281 - DNA, 100 bp, Homo sapiens
ccctgcccgggccctcctgaagaggcggcgctcagacagatatggctcgtggacagcagaaaattcagtctcagcagaaaaatgccaaaaagcaagctgg

SEQ ID NO: 287282 - DNA, 100 bp, Homo sapiens
tgaagaacaaccgcaggtcgaattgttcgtgaaggtggtccagctgctcacctgtgacctgctactgtcgctacggacagcgctctggcaaaaacaggcc

SEQ ID NO: 287283 - DNA, 100 bp, Homo sapiens
gctacagaagccttctttgcaatgacgcgattgtttcaatctaatgatgtatctcagatgaagacatcatcaacattactcttcctactggagtccccat

SEQ ID NO: 287284 - DNA, 75 bp, Homo sapiens
aaagaacaatacgagcagatccttgcatttgtccaaggacactttgccaccatcaccttgaccttcatcgacaag

SEQ ID NO: 287285 - DNA, 76 bp, Homo sapiens
agtttctctagtgggcccttctagagaacggagaccaacctgggctgaagaaagaagattaaatgctgaaacattt

SEQ ID NO: 287286 - DNA, 101 bp, Homo sapiens
atggctcattatagcctcaaactcccaggctcaagcaatcctaccatgtcagccttcccagtagctggaactacaggcggtggatgaattttattccaaga

SEQ ID NO: 287287 - DNA, 80 bp, Homo sapiens
gcactgactttcagctatggaatcgggtgaggatccacgacctccgcagtggtaacatcgccctgtcgctctccgcccat

SEQ ID NO: 287288 - DNA, 98 bp, Homo sapiens
cctttgtccgtgttcggtgaccgcagcactggggaaacgatccgctcccaaaacggccacggcatatgcctccaaggacggggtcctcactgaggcca

SEQ ID NO: 287289 - DNA, 98 bp, Homo sapiens
ccagcatctctccaccatcgactacgtggaggacgacacctggatttcattagcatcatgacctacgattttcatggagcctggcgtgggaccacagg

SEQ ID NO: 287290 - DNA, 90 bp, Homo sapiens
acacaggtcactcaaataggcagggacaagaatccttcaagaaacaggaaaaaactcctaaaacaccaaaaggacctagttctgtagaag

SEQ ID NO: 287291 - DNA, 100 bp, Homo sapiens
gtgaattaactagcacggtcatgtgtgaagaatgtgcaaatgcttctgaattcccttctgagttaatgtcaaatgacagcaaagcactgtgtggctgaat

SEQ ID NO: 287292 - DNA, 88 bp, Homo sapiens
acagttcgctacacagcaatgcatcgagctgcatgaaagcggttacgatgctggcaaagccctgcagcgcctggtgaagaagcctgtg

SEQ ID NO: 287293 - DNA, 90 bp, Homo sapiens
ccctcagcgccggtgcatgtcgatacatcgatgagtgtgctgaagggcgccattactgtcgtgaaaatacaatgtgtgtcaacaccccgg

SEQ ID NO: 287294 - DNA, 82 bp, Homo sapiens
gtgcgcgcccgccagctgctccggagatacgatttggagcaagaggtggtggtggccttcccccgaagaaatttggtaatcc

SEQ ID NO: 287295 - DNA, 88 bp, Homo sapiens
tgtccaggtggatgtcagcaacctgcagtcattcttccgggcctccaaggaacttaagcaaaggtgcaatgaagggcgtgttggtaga

SEQ ID NO: 287296 - DNA, 88 bp, Homo sapiens
gtgctgtttgtatgcacgacttgaagacacgcacttatcattcagtggacagcccacctgaggatattgaccataaggactcatatct

SEQ ID NO: 287297 - DNA, 101 bp, Homo sapiens
ccgccggagaggctgggcggctgccggtgacaggccacgtggcggaagtctatctcgtccatctccatgccagtgtgtacgcactctttcatcgcctttat

SEQ ID NO: 287298 - DNA, 50 bp, Homo sapiens
aaaaaagtagggcttctcaaggagaaaacagaatcttggcattgtcttcc

SEQ ID NO: 287299 - DNA, 76 bp, Homo sapiens
cgggagccagaggccagggaggactacttcgggagtgttggtggtcttcaatggtgtggagagccaaaacgtttag

SEQ ID NO: 287300 - DNA, 51 bp, Homo sapiens
cccgcctaccacgaggtggtggacgcggagtttgtgaagcctggagctgag

SEQ ID NO: 287301 - DNA, 50 bp, Homo sapiens
ccggcagcggcgcgggaggccgtgcgggtgctgaccttaaggaaagagcc

SEQ ID NO: 287302 - DNA, 89 bp, Homo sapiens
gctctggtccttgctgcactttattatgccggagaactctgcttatgataatgtcaacaaagttcgagtagctatcaagaaaatcagcc

SEQ ID NO: 287303 - DNA, 50 bp, Homo sapiens
ggcggcataccaccctgcactgtgagattattcactgaccagcgctgacc

SEQ ID NO: 287304 - DNA, 90 bp, Homo sapiens
cacaaagaatgtacaacagacagtgagtgctaaaggcccccctgaaaaacggatgagacttcaggctgggcttcaacatcgtcggtggga

SEQ ID NO: 287305 - DNA, 100 bp, Homo sapiens
tcacattccatgtccatatcagtgtggagatgtactttcctcagaatgactcttggattggtttggcacccctaaacattcctcgctatgaatttggaat

SEQ ID NO: 287306 - DNA, 82 bp, Homo sapiens
caatgaggctccctgctcagctcctggggctgctaatgctctgggtctctggcatggcagccctgctgagcctggccatggc

SEQ ID NO: 287307 - DNA, 82 bp, Homo sapiens
tttttattatcatcatggacatgctccaggattcctctttgttggccaaaaggcagccgagaggccccagcaacatgcagct

SEQ ID NO: 287308 - DNA, 101 bp, Homo sapiens
cttcacaccccggacatccgcgccacacaccctgtccccagaggggctggttctgccatgagtactgatgcttacccaaagaacccacaccttcgagccta

SEQ ID NO: 287309 - DNA, 100 bp, Homo sapiens
tttgagatcgcttcagctcgcatcgaggagagaaaagtctctaagtttgtgtgcagctgtctgcttcagaaagtgagggctccaggaatgaggagaatct

SEQ ID NO: 287310 - DNA, 75 bp, Homo sapiens
ccagctcgccctaaacttcgcctggtccaacttcagggcttccgagtggacctgccaatcaagtcggcccgctac

SEQ ID NO: 287311 - DNA, 100 bp, Homo sapiens
gaaaactttgaggatgcagcactggaagaaaatggtttggctgtgataggagtatttttaaaggtgcagaaaatgcttttaaagtgagacttagtatcag

SEQ ID NO: 287312 - DNA, 74 bp, Homo sapiens
gtggaggcgccgctctagcggccgggactctgaactatggcggaattacatgaacgacagccttcgcaccgacg

SEQ ID NO: 287313 - DNA, 90 bp, Homo sapiens
tcagcatcatgtttggcagctgagtattggagccaggagcctgccatgagtttagaaacctgctgaagtggtatgctaaggagttcaaag

SEQ ID NO: 287314 - DNA, 98 bp, Homo sapiens
gcttccactcctgccgtgattgtcagcttcctgaggtctcctcagccatgctgaactaactggtcatgctgctggagtggtggtcctgcacggagtgt

SEQ ID NO: 287315 - DNA, 90 bp, Homo sapiens
acgctactgccatgataataacataattcacagggatgtgaaggcacttcaggtggcaagacagctccttcttcagcagcaacagcagca

SEQ ID NO: 287316 - DNA, 87 bp, Homo sapiens
cagcaagagattaaagatgcagtacgccacggggccgctgctcaagttccagatttgcatgttggcagataaattgaacatgactcc

SEQ ID NO: 287317 - DNA, 106 bp, Homo sapiens
ctagtctgtatcctgtagcatcaccatctcttcagcaactggtagtagaggtttccctaggacttctgcatgcccatgccacacatatcctgtggcccccagagcg

SEQ ID NO: 287318 - DNA, 96 bp, Homo sapiens
gggcaggggacgtggcttttgtgaagcacagcacggtactggagaacacggatggtacaggctttctgttggcaccaacgagaagatccagctgag

SEQ ID NO: 287319 - DNA, 100 bp, Homo sapiens
ccagatggtgttacctggagcttaaaaagctgcacgcaagtgttaaacttctgataaacaggggtcacatgacgacagaagccaagagggctgcaaagat

SEQ ID NO: 287320 - DNA, 129 bp, Homo sapiens
cttcaagatggcggtgcaggagtcggcggctcagttgtccatgaccctgaaggtccaggagtacccgaccctcaaggagcaggccgggctctcgccatgggtcactgtcgcctctgccacgggaagttt

SEQ ID NO: 287321 - DNA, 100 bp, Homo sapiens
cgacattgacatgtcatgcctgggtgcagcttctctagctggccttgctgttgtcactcaagactgcttgcaactgattgcagacagtgaaacaccaact

SEQ ID NO: 287322 - DNA, 100 bp, Homo sapiens
ttctatgaccctatgaccccagtcaatgccagatctattaatgagatgaagcggttggaagaaatgtcaaatatgtttcagagctctggagtccagcacc

SEQ ID NO: 287323 - DNA, 73 bp, Homo sapiens
gatgataattgggcctccaagagcaccttcttactgagatacgtaatgagaagtttcgattatacaaattaaa

SEQ ID NO: 287324 - DNA, 96 bp, Homo sapiens
aaaaaggagagcctctgagctcaacggaggattgtgcctgagaagaacccacagagatctttgtagaatttgatggctgtaactggaagcaacact

SEQ ID NO: 287325 - DNA, 83 bp, Homo sapiens
cacccactatctggatgccgggcaggagccgctcccactcaggggaccgctacaggcggggcggccggggcctcaggcaccac

SEQ ID NO: 287326 - DNA, 98 bp, Homo sapiens
cggacggggagctgaacgtggacagcctcatcacccggctgctggagggagaggcagatgcgaaccagaacaatgggacctcctctcaggacacagcg

SEQ ID NO: 287327 - DNA, 82 bp, Homo sapiens
ccacgctctcgtctggtttgatcacaagacgggcaagaatctcattttcagcttctgccagagccagtagcagttgggaaag

SEQ ID NO: 287328 - DNA, 75 bp, Homo sapiens
ccttcacgcaggctttaagatgatgagcaaaaatccagacatctgttgagcccgcagttggtacagtaccagtgt

SEQ ID NO: 287329 - DNA, 89 bp, Homo sapiens
ctgcggtcgggccaaggttccgcgccgggcgtggacggtgtggggcggtcccggccccgcagatttgcttgtaaatgcatcacgaagag

SEQ ID NO: 287330 - DNA, 76 bp, Homo sapiens
cgaggacctgggcgcggactacaacctctcccagtcctcctgcatatgcccaagaggattgggagtggaatggaca

SEQ ID NO: 287331 - DNA, 101 bp, Homo sapiens
gaggaggaggcagcggcagagaaggaggaccgcggtgggagctgaatgccatgaccaccaacagcaatatcagtcgccccatcgtctcctcccatgggtag

SEQ ID NO: 287332 - DNA, 82 bp, Homo sapiens
tccactcagcctgtgggagtctctatgctgcagtacagccctcagcgcctttttccaggagaccaacatcccctacagccac

SEQ ID NO: 287333 - DNA, 82 bp, Homo sapiens
cgaactggaatctggatgagcagctcaagcaggaccaacttggaggccttgcagaagaagctggaggagctagagcttgatg

SEQ ID NO: 287334 - DNA, 82 bp, Homo sapiens
ggaacagaagcggaacagccacagcagcctcccaaggagtctgcaagttggaccaggagctgcattatctattctagacaaa

SEQ ID NO: 287335 - DNA, 82 bp, Homo sapiens
gcctgcacttagccccgcgcccgaggattttttatcaagcagaaatgcatcgaacaacgagaatcaagatcactgagctaaa

SEQ ID NO: 287336 - DNA, 98 bp, Homo sapiens
ctggcacagcccggcggcagcagctggaggaggatcgcactgctcatcttggccatcactatacacaacgttccaggcagacctgttatcctaaacta

SEQ ID NO: 287337 - DNA, 87 bp, Homo sapiens
ggttcgaagctgagtatgtgacagaaaccttccttccttccagatgtgtgtcagtagaattacagagtgtccacggaaacagctcat

SEQ ID NO: 287338 - DNA, 100 bp, Homo sapiens
cgcggcgtgatcaccgaccagaactcggacggctactgagccccacagtcttcgttataacctcacggtgctgtcctgggatggatctgtgcagtcaggg

SEQ ID NO: 287339 - DNA, 83 bp, Homo sapiens
agagaccaataaaaataaactgcttgaacatcctttgactggttagccagaaagtgttgtgaagagcgaagacttttcgctcc

SEQ ID NO: 287340 - DNA, 100 bp, Homo sapiens
gtggccgtcaggcagaagaagaatgtgcccatcgaggaagcccccttcctaaaaaggccaaaattgtgcgcaatgccaaggacacagcacacacacgggc

SEQ ID NO: 287341 - DNA, 82 bp, Homo sapiens
acaagttgctgcaatgtctgtgtctaatctatcatggtgccagaaccctgtggagcatcatgaactgggaagagtagctgag

SEQ ID NO: 287342 - DNA, 100 bp, Homo sapiens
tcctgtgagctgtgtctggggtcacgggacccccactgtggctggtgtgtcctgcacagcattatttcatggttctatcaaagcagcagtaaaaaaaata

SEQ ID NO: 287343 - DNA, 75 bp, Homo sapiens
ttctctattttgcaccagacctagtctttaatgagtggcctgccatgggtatccatggtgacaagagtcaacaag

SEQ ID NO: 287344 - DNA, 83 bp, Homo sapiens
cattgttttcagctaacagtaaccccagcattttgaaagcgaagcagaagccgtagaatcagcggcgagcctgttgaaagaac

SEQ ID NO: 287345 - DNA, 100 bp, Homo sapiens
cctcaagaccgagaacctcctgctggatggcaacatggacatcaagctggcagagccggtgccatctgtgggggctttgggccaggggtctccggacagc

SEQ ID NO: 287346 - DNA, 100 bp, Homo sapiens
cggtctgacatcgcgacgctgctcaaaacctcgctccggaaaggggacacctggcttgcattgatgacaatgttgatatggtgaagtttctggtagaaaa

SEQ ID NO: 287347 - DNA, 100 bp, Homo sapiens
cagcaagatggcggacgagaaggacagggaagagaatggatcttggagaatgtctgaaagtccatgacctggctttaagagcggattatgaaattgcatc

SEQ ID NO: 287348 - DNA, 82 bp, Homo sapiens
ggagcccagtcccaacttcgggccccggccccgcgcgccccggcccggccccgcgagcattgtcccagatatagccgttggt

SEQ ID NO: 287349 - DNA, 88 bp, Homo sapiens
cacccgctgccgggcaccgaggaccagctcaatgacagcctacaacacagcagtcccctcaggatgagcaggaaaagctcttggatga

SEQ ID NO: 287350 - DNA, 137 bp, Homo sapiens
ggatcctgaaactaaaagatgtcacaaaggaaaacgaggaaagtcccaggatgactactgtgtcaagctcttgatggaaatgtgtatgatcatctcaaggattatttaatagccttcagccggactgagctagaaac

SEQ ID NO: 287351 - DNA, 96 bp, Homo sapiens
tcaaaatttcaggtcttaaatctgagctctgagtcagcatccaaccttaaatgatgacctgccaaatcgtatcatttctggcttggtgaaagtgaa

SEQ ID NO: 287352 - DNA, 98 bp, Homo sapiens
cgcctccaggccaagagggatccttcacccgtgtctgccggccaagagccactgcacaatgaggagctggcaggagcaggccgggtggcccagcctgg

SEQ ID NO: 287353 - DNA, 90 bp, Homo sapiens
aaaggtgatctggacaaaggaacaggtatctcaggtttccattaactttggaccatgcttcaagtatcctccgaaggatctcacttaccg

SEQ ID NO: 287354 - DNA, 102 bp, Homo sapiens
gggcgagcctctcagccggccgggatggctaccacggccgagctcttcgagagaagagcaagttagtaccttgtaccaaaacatcaaccttgtggagccaag

SEQ ID NO: 287355 - DNA, 115 bp, Homo sapiens
gccttggtagcagcgggtgacatggaaggggcagtacaagcttacgtctctgctcttcagtacaatcctgataccatacttgcagagctccttcagatacataaagaacacattg

SEQ ID NO: 287356 - DNA, 143 bp, Homo sapiens
ccgagccatggcgtccgagcggctccctaacaggcccgcctgtctgctcgtggccagcggcgccgccgaagctcaccatggatgatgatatcgccgcgctcgtcgtcgacaacggctccggcatgtgcaaggccggcttcgcg

SEQ ID NO: 287357 - DNA, 50 bp, Homo sapiens
ctggtgtgcagggccatgtgtgctatgcctagaagaagtccaaagtgccc

SEQ ID NO: 287358 - DNA, 87 bp, Homo sapiens
cggctctgcggccgtcaccatgaattaaacaaccaccatgtcgagcaaaaaggcaaagaccaagaccaccaagaagcgccctcagcg

SEQ ID NO: 287359 - DNA, 90 bp, Homo sapiens
gcagttcaaccgcatgaagcagctggctaaccagaccgtgggcagatgacgtccggttgtttgccttcgtgcgcttcaccaccggggatg

SEQ ID NO: 287360 - DNA, 75 bp, Homo sapiens
caaccgcctccgcctattacagaggttattaatgctgcactggctttagcagcaaaaccacagagtaaactggcc

SEQ ID NO: 287361 - DNA, 75 bp, Homo sapiens
agtatctctgtatgaaaaccttactgcttctctcttcagacagtatgctggctatgactattcgcagcaaggcag

SEQ ID NO: 287362 - DNA, 75 bp, Homo sapiens
ttcaagcgaggctctgggcagagtggaccacggggagccccacgagcagcctcgtcttacagcgtgactgcaaag

SEQ ID NO: 287363 - DNA, 75 bp, Homo sapiens
caagaagacgtccaatctgagcgtgctgcggacggcgctgcggtacatccaggtgccaagtcctgccctgccaac

SEQ ID NO: 287364 - DNA, 74 bp, Homo sapiens
caaaaatgttgtcacaacgttgctaaatgctggagtgaaagaactcttttcttctttgggagtcgaatgtaatg

SEQ ID NO: 287365 - DNA, 100 bp, Homo sapiens
gaaggaggaagtgatccgaaaatctgggctaagtgctggcaagagcgatgtctactacttcagggaatggcatttactttacaagaacgacaaatgcttg

SEQ ID NO: 287366 - DNA, 76 bp, Homo sapiens
cactattctcttgctcgatggctactctgtaatggcagaactaagttcagaaaatcttagaacttgctttaagatc

SEQ ID NO: 287367 - DNA, 100 bp, Homo sapiens
caacctcttcctctacccgtggaagaaggaattcagaagcatcaaggttctgtacagagtaatgagatgtgtgacggctgcaaaccaggtgtttttttct

SEQ ID NO: 287368 - DNA, 75 bp, Homo sapiens
tccggagcaagcgggcgagggcagcgccctaagcaggtgaaagaaaatggcccgaaccaagcagactgctcgtaa

SEQ ID NO: 287369 - DNA, 74 bp, Homo sapiens
ctgtccggagacagcctaaggttttctggatatgccgcagaaggatccgtgccagaagcaagcctgtgagatac

SEQ ID NO: 287370 - DNA, 100 bp, Homo sapiens
ctggtgcctgtgcaagttgttgagagtaaacatcagtctccaaagataactacatcccttcttcccatcaacaatggctccaaagaaaatgggatccatg

SEQ ID NO: 287371 - DNA, 100 bp, Homo sapiens
ctgagcgactatattgagaaggaggtaaagtgtgttctaggtcagtggcttcaaagactccagttggattcattggactgggcaacatggggaatccaat

SEQ ID NO: 287372 - DNA, 50 bp, Homo sapiens
ctcagcgtcgctggcagccgctgtacttgaacacagatatgtagaactct

SEQ ID NO: 287373 - DNA, 87 bp, Homo sapiens
cgccgccaagagtgagcgagcggacccgcgatggctccggctcccaccttgtctttgtcccgtcattgagagatgtgcaccatgagc

SEQ ID NO: 287374 - DNA, 90 bp, Homo sapiens
gaccactggattagcagaccctggaggcacaggtgtactatggtggctgtatgcaaagcaaagaaggtctcccaaagaaactgttactcc

SEQ ID NO: 287375 - DNA, 90 bp, Homo sapiens
aggggaaaaatgttgtctatggctcctggtcatacagatagatctctagtgatccctgaaaagttccagcatattttgcgagtactcaac

SEQ ID NO: 287376 - DNA, 100 bp, Homo sapiens
ccccagttggttgcagttccagaaattcttatgccggtctagatccaagcaaccagattccagactccatcatttctcgtggtgttcaggtgctcccacg

SEQ ID NO: 287377 - DNA, 50 bp, Homo sapiens
gggaggctgaggtgggtggatcacaaggtcaggagatcaagaccaccctg

SEQ ID NO: 287378 - DNA, 74 bp, Homo sapiens
cctggtggtaaaggcgaaatgggtcccgctggcgagagaggtgaacaaggccctgctggctcccccggattcca

SEQ ID NO: 287379 - DNA, 89 bp, Homo sapiens
tgtggagcaagtcaccaactttgaagagtttgatgaaggccggaacaactttgaaggggaggtcaccaaggagaacctgctggacttta

SEQ ID NO: 287380 - DNA, 50 bp, Homo sapiens
gccttcccagtagctgggaccacagatttggaacattgctaccaataaac

SEQ ID NO: 287381 - DNA, 100 bp, Homo sapiens
gtgatcagagccgtgttcggggagtctttcagttcgatcctttggtacagaagacagaccgacagatcgtccaataccacctcgagatgaagtctttgaa

SEQ ID NO: 287382 - DNA, 75 bp, Homo sapiens
gccctatttgcagtggagtcttggaggagccagtacaggggtcatcctgtatatcctcctggtgggctatcctcc

SEQ ID NO: 287383 - DNA, 75 bp, Homo sapiens
tgctggctaagatcaccaacacagacgtgcctcagttttatgaccctgtggagccagtggactttgaaggacttc

SEQ ID NO: 287384 - DNA, 75 bp, Homo sapiens
tgagccaggagcagcagcctttctgagcacgtgaattgcctctgcttacgttcaggccctgtcctaaacccagcc

SEQ ID NO: 287385 - DNA, 74 bp, Homo sapiens
tggagcgaccccttgttctttggtggcgctggtttcaagtgccccatttgctccaagtctgtggcttctgacga

SEQ ID NO: 287386 - DNA, 90 bp, Homo sapiens
tggtggaaaacctggctggcctcaagtacagggtcatcaagggcactatacacagaatgggattttacatatgctggacagaaataagag

SEQ ID NO: 287387 - DNA, 75 bp, Homo sapiens
agccatgggagacaagaagagccccaccaggagtacgagagggcctccaaagtggaccagtttgtgacgcgcttc

SEQ ID NO: 287388 - DNA, 100 bp, Homo sapiens
cagtgctgaagcctttaaatgcagcatctgcgatgtgaggaaaggcacctccaccagatttccttgatagctgccgtgccagtactctattggctgagct

SEQ ID NO: 287389 - DNA, 82 bp, Homo sapiens
aaagttgtgtcagtgaatacaaacagaactaaagatgactcagagccatctggagaagaaacagtagaaaggacaaggaagc

SEQ ID NO: 287390 - DNA, 89 bp, Homo sapiens
gacgctggcaaagcggggcagaccctgaagactcactgctcagcccaggccggaaggtggtggtcgtacgctgtgaaggcatcaacatt

SEQ ID NO: 287391 - DNA, 83 bp, Homo sapiens
ggatcttcctgctcatctttcccttcttactgtacatggtgtttgagaagtcccccctgcgggtgaagaacttcgggatctgg

SEQ ID NO: 287392 - DNA, 75 bp, Homo sapiens
ttgaatgttgaagatgtccttaccagctttgacaatacaggaaatgttttgcggttggtgagcagctcctgccca

SEQ ID NO: 287393 - DNA, 75 bp, Homo sapiens
tgttactgcaatggcatgaaaaggttcaatacttcttcaagatcttggataattagtggtgtggaaagtaaagaa

SEQ ID NO: 287394 - DNA, 99 bp, Homo sapiens
gtcgtcaccacaaatccagtgaacaacgatggcattttgaaaacagcaaaggctgtcattatttgtatcaaaaacaaagaatttgaaaaggcttcaaaa

SEQ ID NO: 287395 - DNA, 101 bp, Homo sapiens
cggcggcgctcggcgatggtaggcgtccctggagcggccgccttccagcgtcacagatgtgacattgatgtgtccactgaagccatgtatgctgcaaccag

SEQ ID NO: 287396 - DNA, 100 bp, Homo sapiens
ctttggtaggcatcatgttctgtttacttgaaccagtgagaagatggccgagcaagcaaggataagtatagttttgaggcagctgtgccatcaaatagcc

SEQ ID NO: 287397 - DNA, 51 bp, Homo sapiens
cgagaacgtggatgaagactcttcgggtggtctttgggaagaagcttcctg

SEQ ID NO: 287398 - DNA, 92 bp, Homo sapiens
cgcagttcttgtttgtggatcgctgtgatcgtcacttggagccttcacgtaaatgggtccagtcatgcctcccagtaagaagccagaaagct

SEQ ID NO: 287399 - DNA, 99 bp, Homo sapiens
cctgcgcttcgtgcaccggggcggtccgttgccaaagccaggtgttggtgtgttaaacaatttattgtatgctgtaggaggtcatgatggccctttagt

SEQ ID NO: 287400 - DNA, 83 bp, Homo sapiens
cagaagacagagggttttcttttgagttaattgcacttaagcggaagatatttcccagaaggaggatacacaaagaagctagt

SEQ ID NO: 287401 - DNA, 51 bp, Homo sapiens
ggccaaccagtgcctctcccaagatgtcatatggtagagagagcctgtgaa

SEQ ID NO: 287402 - DNA, 88 bp, Homo sapiens
ggtgcagcgggcccttggcgggggactctgagggaggagctggggacggcgaccctaggagaggacagagcgggatgccaccagcttg

SEQ ID NO: 287403 - DNA, 75 bp, Homo sapiens
tgcttttgatgtctgacaacgtggatcgttgttttgaaacgggctttgttatgcacctaaagccatattggaagc

SEQ ID NO: 287404 - DNA, 98 bp, Homo sapiens
ccggctcctccagctaccggcccaaggccatctacctggacatcgatggacgcattcagaaggacgtggcccagtggaacatcgggagcctccggacc

SEQ ID NO: 287405 - DNA, 107 bp, Homo sapiens
ccgggccacgctcagacacttcgatcgtcgagtctgtcactggacaacgagacattagaggtgcacccacccccgaccactacatatcaggacgtcatcctaggcac

SEQ ID NO: 287406 - DNA, 50 bp, Homo sapiens
gatgcacacggcactcgagtgtgaggcgaggattaaatccaccacacagg

SEQ ID NO: 287407 - DNA, 80 bp, Homo sapiens
atctccgttggctgcttggccatatttgtcactgtgatctccctcttggtgtacaagtgcaggtggtaccattataacga

SEQ ID NO: 287408 - DNA, 51 bp, Homo sapiens
gttttgccggaggagcccctcaggccacggaatcagtccccaatgcctgga

SEQ ID NO: 287409 - DNA, 87 bp, Homo sapiens
cccagctcgcccagcgtccgccgcgcctcggccaaggccccgccagcaggcgaagcagggagatgtcagactgctacacggagctgg

SEQ ID NO: 287410 - DNA, 75 bp, Homo sapiens
ggcgttgaattccgggaagtgggagcttcaggctcgctccgtgcggggaacgggtatggcaatccccgaaactca

SEQ ID NO: 287411 - DNA, 128 bp, Homo sapiens
caacgtcgtggtgactggcctgaccctggtgtgcagctcggccccgggccccctggagctggacctgacgggatctcgaggacctggaagaagcagaggagccagacatggaggaagacgatgatcag

SEQ ID NO: 287412 - DNA, 74 bp, Homo sapiens
aaagatacaacgaactagcacaacgaggggactggtttggctgaaagacaaagaagcaacacattgtaaacttt

SEQ ID NO: 287413 - DNA, 100 bp, Homo sapiens
ccgttgacaaggcactgctttttcatgacgagatgcagaggatgctatttatggaagaaatggttatgattatggccagtgtcggcttcgtgtggagttc

SEQ ID NO: 287414 - DNA, 87 bp, Homo sapiens
gaaacaagccgtggaataggtgtatcaagtaatggtgcaaagcctgaagtattagtcactgtaccactggctttactacagaaaggt

SEQ ID NO: 287415 - DNA, 90 bp, Homo sapiens
cgcgattacactggatcagaaacaggccatggagggacaggatccggaggcgccagctcaacctggtattggaaggaactggccctgggc

SEQ ID NO: 287416 - DNA, 83 bp, Homo sapiens
tcgcactaccctgactacagctggagcgcccagaggcgagccctggtggaggaagaggggacagagcacaggaaagggacccc

SEQ ID NO: 287417 - DNA, 100 bp, Homo sapiens
cgctgcagaccctgagcctgggcggcaaccaactgcagagcatcccggctgagatcgagaacttgcagagccatcactggtgcaagctatatttaacgga

SEQ ID NO: 287418 - DNA, 100 bp, Homo sapiens
cccagatgtgaggaaagtaaaagttgttgtcaactgcaagtgaaccggagcaaacgacttccgatccagtctgcgctgttgcggctcccgtttgggattt

SEQ ID NO: 287419 - DNA, 85 bp, Homo sapiens
gccggagagggtgctggctgccgcgcggccgagctccaaaaggaattcttcatttgtctcctgatgtttatcaagagatggaagc

SEQ ID NO: 287420 - DNA, 75 bp, Homo sapiens
ggacagctctcagtccacactcccaaaagggaaaggaggatttgttggtattgaggaaaacggtgaaatcctttt

SEQ ID NO: 287421 - DNA, 98 bp, Homo sapiens
cctcagaggcctgagcaagaacctttccaatgggctgttgaacttcagttatcctgcaggcacaggtatgttcgcaattcgtgctgatcatgattttg

SEQ ID NO: 287422 - DNA, 118 bp, Homo sapiens
gagtccggggccaaccatcccgtctccagcccgggcttacgccccgccgacagaaaaggcaacagatggctccctgcaaagtgaggattggacgttgaatatggagatctgtgacatc

SEQ ID NO: 287423 - DNA, 100 bp, Homo sapiens
ggggcttgccctggtcttgctcggccgatgaagtgcagaggtttttttctggtctcctctgagcctccggcctccataagacccaaaacagatgacacct

SEQ ID NO: 287424 - DNA, 74 bp, Homo sapiens
aatttccatgtcaacatagtccagggagatcttgtgcgaaaactcaaagaagataaagcaccccaagtagacgt

SEQ ID NO: 287425 - DNA, 90 bp, Homo sapiens
attaaatacaactgagaacaaattgcttgatgcatatactcagatttctgatttgaaaaggtattccataaaacctaccaactcatggat

SEQ ID NO: 287426 - DNA, 74 bp, Homo sapiens
gattccaagtaactcttatttgaagagaagctgaatttggacgacagccagtgggaggacatccacgttgtcac

SEQ ID NO: 287427 - DNA, 101 bp, Homo sapiens
ctctgatgtcaatcttgagggctaggatcttctggatgacctgaaatcagaactaactggaaaatttgaaaaattaattgtggctctgatgaaaccctctc

SEQ ID NO: 287428 - DNA, 101 bp, Homo sapiens
ttctctcccaccaaagtgatggaaacaccattccagaaaatgggattgcccaccacgataatgcagttcttattactaggccctcgattgattaaatggtg

SEQ ID NO: 287429 - DNA, 100 bp, Homo sapiens
cgcccgcgccgacgcggggcccatggccaggaccaccagccagctgctctctagagcgctctggtgtatggctggtggcccccctcattgctaaactgcc

SEQ ID NO: 287430 - DNA, 95 bp, Homo sapiens
ctggcggcagcgcattttcctcagggttgcttctcccatgaacaaatctccctcagcaatgcaacagcaagggatatgggattagaactgtttag

SEQ ID NO: 287431 - DNA, 97 bp, Homo sapiens
acgctggccgccgcaggcacaggcgcagagtccactgcgcgggggcgggaccggggagctagctgcaggtctcttgtggctcagagcataatttggc

SEQ ID NO: 287432 - DNA, 100 bp, Homo sapiens
gctgcctctatttcctgctgtctgtggtgcctgctgccttatataccagggcatcctaacagctgaagtttttgagtcccagagagccattctatgtcaa

SEQ ID NO: 287433 - DNA, 75 bp, Homo sapiens
gacccagaccctctcctttccctttgagaccgtgaagagaaagatgcagggtgtttgctttgatgtacctaccgc

SEQ ID NO: 287434 - DNA, 54 bp, Homo sapiens
ccgaccaagaggcagaagtacggggttggttttaaaaagttgcagaaagaagaa

SEQ ID NO: 287435 - DNA, 110 bp, Homo sapiens
acctgcgtaagggggcagagacagaatcatgtccctaaggaggaagctggagctccacgaggggaggggccggccatcccaggagacaccccaccacccactccccgctc

SEQ ID NO: 287436 - DNA, 100 bp, Homo sapiens
gctggcctagacctgaactcttcagataatcagagtggaggaagtacagccagcattggagtgcttagtgcagttggtgagagcgggagccacactcaac

SEQ ID NO: 287437 - DNA, 100 bp, Homo sapiens
gacaccttctaagagtttggcgagtcagtgactgaagcgcccgtccattccaagatcgaacggttggaagtaagcagccttgcccaaacatccagtgcag

SEQ ID NO: 287438 - DNA, 50 bp, Homo sapiens
gccggaggcagcgggggaccggcaggtctcctctgagcctccggcctcca

SEQ ID NO: 287439 - DNA, 91 bp, Homo sapiens
gcgaaggcggagcagagttcttctcagtttcagtcattcagtcagtaccgctgtaagactgccaagaagtcagaggaggagattgactttc

SEQ ID NO: 287440 - DNA, 82 bp, Homo sapiens
aaacaacagacagccctatgctgtcagtgaattagcaggtcaagctttccgtgtactgggactacatgaaggccatcggact

SEQ ID NO: 287441 - DNA, 100 bp, Homo sapiens
ggtcaacaaaaggagtttctgggaggtctccagtccccagatttctgtgcatcctctctcatgcaaagaaggctggaagacaaacttgtgaagctagagg

SEQ ID NO: 287442 - DNA, 73 bp, Homo sapiens
gatgcccgggctgccagggtcaaggagctgctgctcaagaggtcatcaaaataatcaccaaacaatttgtaat

SEQ ID NO: 287443 - DNA, 75 bp, Homo sapiens
ctcagtagccctgtgcacttggatttttcttcaggctgcagccttggatatagccatgattaaaatggtcgcccc

SEQ ID NO: 287444 - DNA, 100 bp, Homo sapiens
agacctgcctcctgttccgcttctcagaggacgccttcaacaccaccttcatctccaccatcggttcagaatttaacattacgcagccagaagttgggtg

SEQ ID NO: 287445 - DNA, 50 bp, Homo sapiens
aaatgtttgacgacactgatggtttgtttggaaattttagcattcaggtg

SEQ ID NO: 287446 - DNA, 100 bp, Homo sapiens
cctagttttcagatagctttgcttacctctgaagatcacattaatcgcaaatatgcttttaaggcatggattccgtgaaggaacaacacctaaacccaag

SEQ ID NO: 287447 - DNA, 98 bp, Homo sapiens
cagctgtccaatcacctcgcaggagccctagggtccttatgtcgtcagaagatcgagaagctcaggaggatgaattgctggccctggcaagtatttac

SEQ ID NO: 287448 - DNA, 74 bp, Homo sapiens
ctggttcgtccttactgcggaaagcttgtcctggtataaagatgatgagctcaagactgcagtgcagatgacga

SEQ ID NO: 287449 - DNA, 80 bp, Homo sapiens
atctcatagacaagtttgtacatccaaaggcactgtgttggcactcactgaaaataacttcgatgacaccattgcagaag

SEQ ID NO: 287450 - DNA, 100 bp, Homo sapiens
gagttcttcaacacctacagcgacctgggcatgcataacctgggtcctggtttacaggacagacaagtacaagagactgaaggcagaagtggaaaaacag

SEQ ID NO: 287451 - DNA, 87 bp, Homo sapiens
agtaccgagtgggcaccgaccgcacgggcttcaccttcaaatacagatattcaagagaagcttatgtggagttagttcaccatatta

SEQ ID NO: 287452 - DNA, 90 bp, Homo sapiens
gagctgcagctcctcctgtgcggattgaaaatattgaacttcccatggatacaaaaacaaatgaaagaagaggattttgttttatcacat

SEQ ID NO: 287453 - DNA, 80 bp, Homo sapiens
cgctttcggccggcctcgggcaccgggcttctggaggaggctactcacagtcgaactacaactccccggggtccggccag

SEQ ID NO: 287454 - DNA, 50 bp, Homo sapiens
cttcagttgcggtgcggagctgagcaggtggccaccttccactgtggaag

SEQ ID NO: 287455 - DNA, 90 bp, Homo sapiens
gtgcttggagcatgaggatgagaagtgctgctcaacaagagttcgaagacaactggacaggaatctcacctttcataaaatggtggcatg

SEQ ID NO: 287456 - DNA, 73 bp, Homo sapiens
cacaatgtcggggatggacctccagatttccttactgaacgccaatctgaattgccaacgcaaagcaaagcga

SEQ ID NO: 287457 - DNA, 97 bp, Homo sapiens
ggtgaatgtcggaatccattatctttcgggaaagctctctggggcaggcatgcttgagagttcaaaccggcttgatgaagaacacaggctaattgcc

SEQ ID NO: 287458 - DNA, 100 bp, Homo sapiens
cgggccccgctccgcttcgaatggtttcaccagtgatcattaaagaatgggcagcttacaaaggaaagtctcctcaaaccccggaactggttgaagctct

SEQ ID NO: 287459 - DNA, 96 bp, Homo sapiens
taaagatgatgatatccttctcaaccttgtgggatgtgaaaactctgttactgaaggaagcttattttcgatacatggcagaaaacccaactgctg

SEQ ID NO: 287460 - DNA, 73 bp, Homo sapiens
atttctccgcctcagcccaacggggaggttgtgaactaaaggccgacaaagattatcactttaaggtggataa

SEQ ID NO: 287461 - DNA, 88 bp, Homo sapiens
ggagttcgtctcttacgtctgcggaagtgcagctgcctcagttcttagcgcagaatacctaaaggggcaggacctggatgctatcttg

SEQ ID NO: 287462 - DNA, 51 bp, Homo sapiens
caatggaacatcagcaatgcttctgggtgcaacaccggaggatttcagcaa

SEQ ID NO: 287463 - DNA, 50 bp, Homo sapiens
aatgaagccgtggaccctcacggtgaatgcttgagatgcatgttctggaa

SEQ ID NO: 287464 - DNA, 75 bp, Homo sapiens
agttttccggggccctctcagcaagaacgggaacaaaactctgacctgtcatttactccatcctttatagtgatg

SEQ ID NO: 287465 - DNA, 100 bp, Homo sapiens
atgcccaaatcccggaaactccagcgtgtctccagccgtggcagcggaggaggagaaagagatggacctcccggactcggcctcgagggtcttctgcggc

SEQ ID NO: 287466 - DNA, 100 bp, Homo sapiens
ggccgtgggggtcgtgggccggagcgcctccttcgcaggcttcagcagtgcacagagccggaggatcgcctcccttgcctcagctcctatgatagctact

SEQ ID NO: 287467 - DNA, 100 bp, Homo sapiens
ttttaccaggttggccaggctgtcccctgatctttaccttaaggctggccggaagccctgggagcggagcaactcggtggagaagcctgtgtcctcgatt

SEQ ID NO: 287468 - DNA, 75 bp, Homo sapiens
aacattcgtaaggtccattcctgatggctctggctacccacctttctgttctgagacccctcaagagacatataa

SEQ ID NO: 287469 - DNA, 89 bp, Homo sapiens
attgtgtcggggatctgggcactgctgtggatagaatatgtaacggtgactccagagggattccggtaccggggccagatcttcccaac

SEQ ID NO: 287470 - DNA, 75 bp, Homo sapiens
gaggagttccgccccaccatctacagcaacgtgatcaaaggttatgatgtgattgctcaagcccaatctgggact

SEQ ID NO: 287471 - DNA, 100 bp, Homo sapiens
gtgccagggtccggcgagcatcacgccgaggcccattttccagacgaccacgacgaggccggggtcacgtcttgggtggtgcctatgatgagttcatctt

SEQ ID NO: 287472 - DNA, 96 bp, Homo sapiens
gttcacgcacgggatccagagcgccgcgcacttcgtcatgttcttcgcgccctggtgtccctggccagtgtccttccacctgtccacaagcatggg

SEQ ID NO: 287473 - DNA, 100 bp, Homo sapiens
tcctgtgatgttctggggaggccttggaaggctagcgcatccctcatagaaaggaagtgcacggctgtctataacgtgctgccgggtctcaggatggagg

SEQ ID NO: 287474 - DNA, 90 bp, Homo sapiens
gtttttttaatgtggttggaacaactgaggagtacaagcgcaagctagccagagtttccctggtgcgcaaagaactcaggtcccggatcc

SEQ ID NO: 287475 - DNA, 100 bp, Homo sapiens
gcgtcgcccgaggcgaggaggagcgctggcgtttctgatgaagaattgaaaagaagagtagctgaggagctggcattggagcaagccaagaaagaatccg

SEQ ID NO: 287476 - DNA, 75 bp, Homo sapiens
ccctgtgggaggcctctcatttttagttaatcacgatttctctcctcttgaggagctgcgggcgtctttggagac

SEQ ID NO: 287477 - DNA, 51 bp, Homo sapiens
gtttctgcatttagtgagataagtcaagtccatcatctccagaaccagcta

SEQ ID NO: 287478 - DNA, 100 bp, Homo sapiens
agtctgtcactctggagcagttccgggagctgctggaggctcgcggcgccggctgctctagcgagcagttcgaggaggtggacgccctgcttcatctggc

SEQ ID NO: 287479 - DNA, 100 bp, Homo sapiens
agtacgagagtggccctgacggaggggaggaaggttggggtctgctaggtccccggaatgagttgtttgacgcagccaaataccgagtgctagctgatcg

SEQ ID NO: 287480 - DNA, 100 bp, Homo sapiens
acctgctgacagagcagatggcctggagattcatgacaaaatcatggagcaacatctgaatgaattgatgacgaagaagtggctattagggtcaaacgct

SEQ ID NO: 287481 - DNA, 100 bp, Homo sapiens
cccattgaggatacctaatcagggccaaaagagaaacattggctactttgacaaccttaaagcggactccaggaatatcaccaacagcatgacctttgcg

SEQ ID NO: 287482 - DNA, 80 bp, Homo sapiens
tggagattgtccgctcgagcctgaaggaccctgagaaaggttctctttgtaaagaatccttttctggtcaagtttcttct

SEQ ID NO: 287483 - DNA, 100 bp, Homo sapiens
atgaaaatggagagccttcagcaaggacaactgccagacatatctgaagagatggattaagaatgctttggattaaggattgtggagcacatttcaatca

SEQ ID NO: 287484 - DNA, 90 bp, Homo sapiens
gagggtgtacaaatacccctttgaattaattatggctaaattaagctgctcagcaaggaactgcggagcttcctgacagctcttgtatca

SEQ ID NO: 287485 - DNA, 50 bp, Homo sapiens
ctcgtcgcctccagccccgaccccggatgacacttctgtggtgtgtagtg

SEQ ID NO: 287486 - DNA, 75 bp, Homo sapiens
acatgttccacaagaagtgcagcttataatccaagctattactcagtgtttcaggctgcatgtaccaagtagttc

SEQ ID NO: 287487 - DNA, 101 bp, Homo sapiens
gcgctttgcccggtgctgggcgcgcaccgtggccaccctgtgggcctggcgctggaggcagcggtgcacgtgcagttttttgctccactcaagcctgttag

SEQ ID NO: 287488 - DNA, 98 bp, Homo sapiens
ttccctgatgatcagactcagaaaattttggaaagagaagatgctcggctgatggataacttcaaactaatgtgtactaatgccatgatttacaataa

SEQ ID NO: 287489 - DNA, 83 bp, Homo sapiens
tccttgtgtcttttagcaacattaatggaaagttcaggagccctggaaaggagaaggaataagacggcaggaggaagagagag

SEQ ID NO: 287490 - DNA, 75 bp, Homo sapiens
gctggaatcgggggaaccaaagcttcaagttcttggaacaaattctctccaaatgagaagatgaagcaagtgtta

SEQ ID NO: 287491 - DNA, 51 bp, Homo sapiens
acccgactctttgggccgttatctcacgttatttcttatgagggtcatgga

SEQ ID NO: 287492 - DNA, 100 bp, Homo sapiens
cagctatgtgtatccatggagacaagagtcaaccagaaagagattgggtacttaatggtgacagagctgaatgaacctctctccaatgaagatcgaaatc

SEQ ID NO: 287493 - DNA, 75 bp, Homo sapiens
tcccagaacagttttcttctgggctccaattatgaaatggggatgctgtgaagaagtgttttgccgtgtgtcttg

SEQ ID NO: 287494 - DNA, 75 bp, Homo sapiens
cgtggagtgacggtcatgctgcggcgtgttacaagatgttcacctaagattgagacctagtgactacatttccta

SEQ ID NO: 287495 - DNA, 100 bp, Homo sapiens
gagcagtggcgccttccattattttctttgatgaactggatgccttagcagttgaaaggggcaggagcatattaatgaaaagtgccataaactgaaaaac

SEQ ID NO: 287496 - DNA, 100 bp, Homo sapiens
aaagtgctgggattacagtcagccactgcaccggaaatgttttcaaccgtgacccataaaggagcgttcctgggtgcctgtgtggctgggtctgatgagc

SEQ ID NO: 287497 - DNA, 74 bp, Homo sapiens
gatcagaaccggtacctggatggcatgttcctgagggaagacctcaattaccatgacccaacagtgaaacacag

SEQ ID NO: 287498 - DNA, 75 bp, Homo sapiens
gtctgggggcgctggcggcctgcgcagccacctcaagatttatgtgatcagtttggctgaaccccgtctgcccct

SEQ ID NO: 287499 - DNA, 90 bp, Homo sapiens
gcggcgcggcgcgggctggcggtggctccacggcttcagggatgacttcttagggggcaggggaggtagtcgcccaggcgaccggcgaac

SEQ ID NO: 287500 - DNA, 99 bp, Homo sapiens
gcctttctaattaatggctacacttcgatggacctgttgaaaaaaatctgggaggttgaacttattaatcttggattccttagcaccaccacagctcag

SEQ ID NO: 287501 - DNA, 90 bp, Homo sapiens
gtccctctctctgtccccggccgccatggagcagccgccggcgcctaagaggatgggtcatcagttaaggaagttgaaacctaccaccgg

SEQ ID NO: 287502 - DNA, 129 bp, Homo sapiens
tcagaggcagcttcaagtgccttttgctgcgcaccaatgcccagcaggggaggaaggccaacagctcaggagaagccatgtcactggggagccacagcccgcagagtgactccctgacacagcttgtcc

SEQ ID NO: 287503 - DNA, 98 bp, Homo sapiens
ctgcctcagcctcccaagtagctgggattacaggtgctggagaatctggtaaaagcaccattgtgaagcagatgaggatcctgcatgttaatgggttt

SEQ ID NO: 287504 - DNA, 75 bp, Homo sapiens
gaggaagatgtcgtaatgagcgttggcaaacatgaattgactgggcataaagtagctgtgaagatactcaatcga

SEQ ID NO: 287505 - DNA, 98 bp, Homo sapiens
ttcgagtctactcgccacacgaactcagcctcctcccaagctccctgtgggtcctagccacaagctctccaacaattactattgcactcgcgatggcc

SEQ ID NO: 287506 - DNA, 100 bp, Homo sapiens
cagacctggacctgcatcagggtcctgacttccagggagcccgcggccagcctcccaactacgagatgctcaaggaggagcaggaagtggctatgctggg

SEQ ID NO: 287507 - DNA, 100 bp, Homo sapiens
gcgccttcccctacagcctcctcatcttcatctatgatgaggtccgaaagctcatcctgcggcggtatcctggtgggccatagccaccaaagggcaaagg

SEQ ID NO: 287508 - DNA, 76 bp, Homo sapiens
cagatcgggagcgcaaggtcgccctcaaggccatgatcaaaacattcctggtcgggtggcttccagtggtcttcag

SEQ ID NO: 287509 - DNA, 89 bp, Homo sapiens
ctcactgagttttgactagcggaagaaaagccaactgggtacatggaaaactcagtctcctacagcgcaattgaagacgttcagctgct

SEQ ID NO: 287510 - DNA, 82 bp, Homo sapiens
tttggtcagttgctgtgtttctgccggatcagatgagcagattggttagtgaagaacactctgctccagccaaggtggtgag

SEQ ID NO: 287511 - DNA, 113 bp, Homo sapiens
tctggtactgtgacctacagcaggaatccagtggcatcgcggaggcttcgtgacggagttatcagagacattgagaggcaaattcggaaaaaagaaaacattcgtcttttggg

SEQ ID NO: 287512 - DNA, 74 bp, Homo sapiens
ttaaaaatcaccagttactttaatgagatgcactgcgcaactctggtggcgatgggctggggcagatgtccttg

SEQ ID NO: 287513 - DNA, 74 bp, Homo sapiens
ggagctgtggccctcagaatttaaacttaaggaaagagtgggaaagtgagggatttggtgctatggagaaattt

SEQ ID NO: 287514 - DNA, 82 bp, Homo sapiens
cagccggcagccagcggcagtggatcgaccccgttctgcggccgaagtactagccggacatcatgagtggctgtcgggtatt

SEQ ID NO: 287515 - DNA, 83 bp, Homo sapiens
accacactaacgagattcaagattatttgcaacagctcacgggagcaagaacgaacactctgctccagccaaggtggtgaggg

SEQ ID NO: 287516 - DNA, 100 bp, Homo sapiens
aacttggtggccagcgccgcgcccggggccgtgcgctctcgggccactcggccgcaggaagacagagatgtcaatgaccccatgcccaaccgaggcggca

SEQ ID NO: 287517 - DNA, 75 bp, Homo sapiens
tgcctctgccacgttactacagccaaccagcccagaggctcatcaggacttgtaaacagcagacagaagagctat

SEQ ID NO: 287518 - DNA, 74 bp, Homo sapiens
tgtgcgccaggggcgccggcaatctgggcgtctctggccgagcctctttttgtggaaaacgacagcagcagcag

SEQ ID NO: 287519 - DNA, 101 bp, Homo sapiens
tgaagactgattacaagaatcctatagaccagtgtaataccctgaatcccacctctgtgagtgaaagccttcagagggaagctgctaagaagcaggccatg

SEQ ID NO: 287520 - DNA, 50 bp, Homo sapiens
caggctcctgctgacccgggcagagaaggacgtgatgcctgggccacggc

SEQ ID NO: 287521 - DNA, 82 bp, Homo sapiens
tgtgtgctgagcgttctaaaggaaggcgtccgttggccttcgtacccgtcttgattgaggatacatgatcccttaattcagg

SEQ ID NO: 287522 - DNA, 90 bp, Homo sapiens
gagagcgcgaatatcgtcatcgttagaagcagcgatggattttgggtggggaagtcctccttgcggagttggcgccagctagctcttgaa

SEQ ID NO: 287523 - DNA, 75 bp, Homo sapiens
gctaccttgctgatgacctcacatggtgtggtgaattcaacacttccagtgctggagaatctggtaaaagcacca

SEQ ID NO: 287524 - DNA, 100 bp, Homo sapiens
gtggtgacgggctctcgctatgttgcccaggatcagttccatgacaagaccccttatacgattatgtttggtccagataaatgtggagaggactataaac

SEQ ID NO: 287525 - DNA, 100 bp, Homo sapiens
ttgatgactcttccgcgtctatttctctggcccagcttacaaaggtgaccaagaatatggcccaggtgaccaaagccctggacaaggccctgagcaccat

SEQ ID NO: 287526 - DNA, 100 bp, Homo sapiens
cggggactggggctggctcacgtatccggctcatgggattgacgagatgcctgaggctgccgtgaaatcaacagccaacaaataccaagtcttttttttc

SEQ ID NO: 287527 - DNA, 100 bp, Homo sapiens
gaaaccccgcctcttacagtcacgagggaaggttgggtgtggctctccaagaatacattttggtggactcattgaggaagatgatgtgattctccttgct

SEQ ID NO: 287528 - DNA, 75 bp, Homo sapiens
tgaacaagtgctggttctctttgaacagatgctggatggaggaaccaggggacgccgctgtgccattgaagcaga

SEQ ID NO: 287529 - DNA, 73 bp, Homo sapiens
tcgtatcctatatcatgcagagaaaagagatggaaacttacttgaagaaggatatttgcttaagagcaggcta

SEQ ID NO: 287530 - DNA, 100 bp, Homo sapiens
ctgcgcggctgcggggcttccctgcggctggagatagttcatttaaagcccccatccctgcaaggtggtgctttctaccaatatgaatcttttcaacctg

SEQ ID NO: 287531 - DNA, 145 bp, Homo sapiens
aagaagggcgcgtgctacggggacgacgcgtgcttcgtggcccggcaccgttccgcggacgtgctcggcttatcaggagggcagacttcaaaagctactaaaaatgaacggccctgaagatcttcccaagtcctatgactatgac

SEQ ID NO: 287532 - DNA, 82 bp, Homo sapiens
tcggcgccgagtgggaggatggcggaaggggatatgagactttctactcggaatatcctgagtgttgcgtggatgtaaaacc

SEQ ID NO: 287533 - DNA, 49 bp, Homo sapiens
aagaggcggcaatcgtggcagagaatgatgatccagattccagtaccag

SEQ ID NO: 287534 - DNA, 100 bp, Homo sapiens
ttgagagaagtttaagagaagaaatggacatgattgcctaaatcagccaaacacaggagctcagagttctacagagtcaccactgaacaatatcagaaag

SEQ ID NO: 287535 - DNA, 100 bp, Homo sapiens
cggacatttagccgctcatcttcgcatggagatatggaccaaaaggaacgagacgtgattatgagggagtttcgttctggctctagcagagttttgatta

SEQ ID NO: 287536 - DNA, 90 bp, Homo sapiens
tggtacaaggaccagaagaaactgcaccggaaatgtgcctaccaggtgagacgtggtcttgtaacacagtggttaagaatgtgactttgg

SEQ ID NO: 287537 - DNA, 100 bp, Homo sapiens
gtgaaaagcagcagaagtgactcaaattttcaagtgccaaacggaggaatacctcgtatgcaacctcaggcttcagccaatcaaagaccaagctcaccaa

SEQ ID NO: 287538 - DNA, 75 bp, Homo sapiens
cgggtccgtgcgcccagcgtcccagggcccaggccgagcagggagcatttcctgaagacgtagtcatgcagcacg

SEQ ID NO: 287539 - DNA, 100 bp, Homo sapiens
gccgacgccgaggccttcaccgcctacctgcctgctcctgcaaccagcacgcccgacgctgccggttcaactctgagctgttcagactgtcgggcggccg

SEQ ID NO: 287540 - DNA, 90 bp, Homo sapiens
ttaaggattccaagtaactcttatttggtttattgactggtgtagtggtagactctggagatggtgtgactcacatttgcccagtatatg

SEQ ID NO: 287541 - DNA, 95 bp, Homo sapiens
gtctccagtgatgtcattgaccagaaggtgtatgagatccaggacatctatgagaacaggtacggttcctggagcagcagaacaagatgctggag

SEQ ID NO: 287542 - DNA, 100 bp, Homo sapiens
ggagaagctgggattggagattccacccaaacttgctggtcactgggagtcttccaggatctcaaccagttctctcactgcagagtctggagaagcccag

SEQ ID NO: 287543 - DNA, 100 bp, Homo sapiens
ggagttcgtctcttacgtctgcggaagtgcagctgcctcagttcttagcgcagagaacgtgactgtcattcctaaccaggtgtatcagccccttggccct

SEQ ID NO: 287544 - DNA, 96 bp, Homo sapiens
gcgataaccaactctcagaggtggccaataagttcgccaaagcgacaggagctctcatctttgggtgaaaaattgtcgggatcttctgcagtccag

SEQ ID NO: 287545 - DNA, 101 bp, Homo sapiens
ccataaagtatgcattgctcaagattctcagactgcagtctgcattagtcaccggaggcttacacacagaatctgtcactgcgaaggggatgaagagagcc

SEQ ID NO: 287546 - DNA, 60 bp, Homo sapiens
tgtgaagagagttcgcctgagccagatcccaggttgttattgatgccttcagattgatca

SEQ ID NO: 287547 - DNA, 75 bp, Homo sapiens
tctcattacaacagtgccacccaatcttcgaaaactggatccagaactccattggctgagaaagggcaatgagat

SEQ ID NO: 287548 - DNA, 100 bp, Homo sapiens
ggaagacccggaaacttaggggccacgtgagccacggccacggccgcataggattgtcagtggcttcgccccgaggagagctgactgccctgggctgctg

SEQ ID NO: 287549 - DNA, 83 bp, Homo sapiens
agccagcccaccccaccttccccgtggaagtcctcatcaacgccggccgcgtgtggcaggggggatatgagactttctactcg

SEQ ID NO: 287550 - DNA, 73 bp, Homo sapiens
ttaccgctgaggagctgcagtctctgtcaagatattgcaattgctgctccatatgggggtgaagataaaaaag

SEQ ID NO: 287551 - DNA, 100 bp, Homo sapiens
caggactgcgcccccgggagcgggcgcccagaggcatcaagcatgatggaaccatgtgtgatacctgccgccagcaaccaatcattggcattcgatggaa

SEQ ID NO: 287552 - DNA, 99 bp, Homo sapiens
ccggggcaccgtcatgtatgtaggcaggccagaaagcagacccagggaggatagcacatgtcttcggctacactggtgaaggcatcgtgcctgctccac

SEQ ID NO: 287553 - DNA, 98 bp, Homo sapiens
tgaaggggagaatcctgaagacactaaaacccaagtgattttgcagttacagcctgtgcaacaaggggtcagttaaatgaaagcatggaccatggggg

SEQ ID NO: 287554 - DNA, 83 bp, Homo sapiens
ctgatcatctccatcttcctggggccatgccacttcattttttggcccagccttggagcgctactcatcctttcaagtcaatg

SEQ ID NO: 287555 - DNA, 100 bp, Homo sapiens
gtcctcatcatcatcgcctcctgcgtcatcaacttaggcggtgcaagggaaccagttgcaaactgcagtgctgtgcttgaggatggctcctcctgagccg

SEQ ID NO: 287556 - DNA, 83 bp, Homo sapiens
atgtcttccagactcggtgctgtacccgccgtcggttgatgcgctgtgtccgctgtcctgtggcataccacgccaatgacttt

SEQ ID NO: 287557 - DNA, 78 bp, Homo sapiens
ggaattttcagcttttctcgagcagcagcgagacccagactcggttcccgtgtcagtggctatgatgacacctcaagt

SEQ ID NO: 287558 - DNA, 96 bp, Homo sapiens
cacctcaccatgtgtctacattttgttgcttagaaaagcctaggcatttctgtaacatttgagcaagctaggaattgtttcccttctactgggcac

SEQ ID NO: 287559 - DNA, 75 bp, Homo sapiens
ggagcaaaatggcggatcatgtgcagatttatcatagaatccccgactcagacccatcttctagcaaaacaaggc

SEQ ID NO: 287560 - DNA, 51 bp, Homo sapiens
tcctgcccttttaggagtgcaaaaagttgtatcacggactgattcaccgag

SEQ ID NO: 287561 - DNA, 90 bp, Homo sapiens
attcttttaaaggaacttgatctggaaaagggtgactgtcgttcctacagttacgtgtgtggaatctccagtaaagatgaacctgactgg

SEQ ID NO: 287562 - DNA, 87 bp, Homo sapiens
ggaggactgtgctgtgcctctctcgcccacattttccccaagcactctcaggaacctggcaacagtgaagttattgccagtggactg

SEQ ID NO: 287563 - DNA, 49 bp, Homo sapiens
aatgggtatggaggaggacctggaggttcaagtgattcttctgcctcag

SEQ ID NO: 287564 - DNA, 100 bp, Homo sapiens
gttttgaaaaaccaggacgaaaagatgtagggatagttgctgttctcttctgtggagtcacacaagcacattatacctacaacaatctgtcttcggattc

SEQ ID NO: 287565 - DNA, 74 bp, Homo sapiens
gccatcgtccagtgctcgtgctcaagcttcacacactgtggcagaatgaggaacgggcagctatttcctcgggg

SEQ ID NO: 287566 - DNA, 90 bp, Homo sapiens
gccagaggttccctccgagccccttcctgagaagatcccagggaattcctggggaagtcggagcctgagcaccagcactgagcctggccg

SEQ ID NO: 287567 - DNA, 75 bp, Homo sapiens
ccttcagggccattcagcttctattacttccatacaggcactgcctccttacctgtgaggaatgcaaaataaagc

SEQ ID NO: 287568 - DNA, 50 bp, Homo sapiens
gaaaaaaatgttggaagccattggtgtgatgaatgcagactctgctacca

SEQ ID NO: 287569 - DNA, 74 bp, Homo sapiens
ccagaaagggaaaccagttccacgtatagctgaactcatggacaagggttttccaggagatattgggattcctg

SEQ ID NO: 287570 - DNA, 100 bp, Homo sapiens
gaagatacccgccctgcgccccgctctgctgtgggcgctgctggcgctctggctgtgctgcgcgacccccgcgcatgaatcatattctaagaactcagcc

SEQ ID NO: 287571 - DNA, 98 bp, Homo sapiens
tctagcccagtggaccttctgaaggttcagaaacagcatatttagaaaacagatctaattctagacctttagaaagcaaaagatacggatcaaaaaag

SEQ ID NO: 287572 - DNA, 111 bp, Homo sapiens
ctccactccgtcccccgcgggtctgctctgtgtgccatggacgggatgatcggctgaatgtaacagaggaactaacgtccaacgacaagacgaggattctcaacgtccagt

SEQ ID NO: 287573 - DNA, 100 bp, Homo sapiens
agatatattccgggtggtcccattcatatcagccctggaacagctgctgacagagttggatgacttcctcaagattcttgaccaggagaacctgagcagc

SEQ ID NO: 287574 - DNA, 100 bp, Homo sapiens
gcggcagcacctgggagcgacgggcggcccaggcgcgcagctgggcgcctccttcctgcaggccagagttatggtgaatggttgcatggatttgaaaaaa

SEQ ID NO: 287575 - DNA, 98 bp, Homo sapiens
gaaatgctaagattcttggataccacagtatcataaaattcctctaaatgcattgctgaacagaagacttttgagagtcagcagaaatcttccacttt

SEQ ID NO: 287576 - DNA, 76 bp, Homo sapiens
ttcaagatagacattgaccccgaggagacggggtttcctggagtctttggggaaagaggccctcctggactggatg

SEQ ID NO: 287577 - DNA, 100 bp, Homo sapiens
ggcaaccagaacctcttgttcctcctgtcccaaaagaccatcctgctctcaactacaacatcgtttcagggtttgctgagaagcacaactttgcaaaacc

SEQ ID NO: 287578 - DNA, 51 bp, Homo sapiens
cggagggagtccatctggagcggccaagaatcagagatcattgatttcttc

SEQ ID NO: 287579 - DNA, 101 bp, Homo sapiens
tacacaaagttgtctctgaccaaggaactcatttaatggtttggaaatatcttgggatggagacagttttgtagaagtcatggctgcgccgcatctcaagg

SEQ ID NO: 287580 - DNA, 75 bp, Homo sapiens
gcagaagcactgaaacaaggcaatgcaattatgagaaaattcttgggccagctgcgggccgtccagcggctgtgc

SEQ ID NO: 287581 - DNA, 75 bp, Homo sapiens
aaaatacaaatcacacgcataatggatgaaaggaaccgacagatggactcaccctgtcacccaggttggactgca

SEQ ID NO: 287582 - DNA, 82 bp, Homo sapiens
gccgatccagcctgcggagcctgtggggcagggtggcccagttgaaatccttcccttcctctaccttggaagtgcctaccat

SEQ ID NO: 287583 - DNA, 101 bp, Homo sapiens
gtacaggtgccctctgtgcctattcagcaattccctactgagataagatcctgctatgttgcccaggatgggctcaaactccttgcctcaagtgatcctcc

SEQ ID NO: 287584 - DNA, 82 bp, Homo sapiens
ccctgttccccgcgctgcggcctggcggcttccaggcgcactaccgcgcctcccgcgacgatgcccctcaacgttagcttca

SEQ ID NO: 287585 - DNA, 100 bp, Homo sapiens
tggactcttcacaccagagcttgatcgtcttcagattggctgtgagcccattcctgtgcgctatcttgagtggagcaacatcgaatccattatagccatc

SEQ ID NO: 287586 - DNA, 96 bp, Homo sapiens
caaacaggtggctcagcaggaagcagagagggccagatttgtggtggaaaaggctgaggctgaggtggcctccttgaaccgtaggatccagctggt

SEQ ID NO: 287587 - DNA, 49 bp, Homo sapiens
ggtggcaaccgcctacgagacactcaagatagcagaccccacgttagct

SEQ ID NO: 287588 - DNA, 97 bp, Homo sapiens
tcctggcaagcccatgtgtgttgagagcttctcagactatccacctttgggtaaaatatacccaggaccataaacagatgaaaggtagaccaagtct

SEQ ID NO: 287589 - DNA, 100 bp, Homo sapiens
cagcaagatttaaaaactatgcagaattgactgtcatgaaaacattggaagcacataaagatcctcataaggagataacgtggttagaaggccattcact

SEQ ID NO: 287590 - DNA, 100 bp, Homo sapiens
ggacactttgcgttcgggctgggagcgtgctttccacgacggtgacacgcttccctggattgggttggtgttcgaggaagagacattgttgttcttggtg

SEQ ID NO: 287591 - DNA, 99 bp, Homo sapiens
tgttcgcggtgacggtggcgccgcccggggcgaggcagggccagcagcaggcgggagggcgtgatggtgggcatgggtcagaaggattcctatgtgggc

SEQ ID NO: 287592 - DNA, 75 bp, Homo sapiens
acatattcctctcctgatctggcctcatctgttccagggaggtgggattgagcatcaccaactctgaatttcata

SEQ ID NO: 287593 - DNA, 100 bp, Homo sapiens
cagccaagctccaagtcaatatagccaacagagcagcagctacgggcagcagaatcaacctctccacttctcctacacctgcacagttaataagccgttc

SEQ ID NO: 287594 - DNA, 90 bp, Homo sapiens
gcggaaagcatgttgtggctgttccaatcgctcctgtttgtcttctgctttggcccaggtatctctcctaaatgtgtgatcaaggaatta

SEQ ID NO: 287595 - DNA, 97 bp, Homo sapiens
gcaatttttacatcaccaacaggtgaagaaaacctcatgaatagcaatcacagagactcggagagcatcactgggcctattccactagaagcaagat

SEQ ID NO: 287596 - DNA, 100 bp, Homo sapiens
caacaaatggaggcatatgaaattcctcatcgaggaaacactggagatgttgctgttgaggcagtgctcggaatgtgaccaggcagggagcagtgacatg

SEQ ID NO: 287597 - DNA, 74 bp, Homo sapiens
gcggaggggacggcagtgctgaggcggaacaggccgggcaccaaggcgcaggttatgaagacagtatggagttt

SEQ ID NO: 287598 - DNA, 75 bp, Homo sapiens
tttggatttctccacttccagtctttcaagaagtaagggtaaagttctttacaaagttcgctggaaaggctatac

SEQ ID NO: 287599 - DNA, 50 bp, Homo sapiens
cagcacaggacctggaaaaattacatcaattctgtggtgttcttggtcac

SEQ ID NO: 287600 - DNA, 100 bp, Homo sapiens
gccgtatttcatgggaagctcttagatggagctgctgacgtgctgtgaggaaggaaagggagagattaaagatggcctggaggtgatgctcagcgtgccg

SEQ ID NO: 287601 - DNA, 75 bp, Homo sapiens
tgggcacaggcagtgtctggaattgcacaaacatttcactgaagatattcaaacaaggcaatatcgttccttgga

SEQ ID NO: 287602 - DNA, 97 bp, Homo sapiens
agggtgatgggattattttactgcatgcactgctgaggttagcattgaagaacgtctgggagcaatggatatagacacacacaaaaaaggaaaggaa

SEQ ID NO: 287603 - DNA, 100 bp, Homo sapiens
agacccttcctgagggccgagcaacagtgtagtggcgtattccacatagcaaacaggtccacagagcagtcagagaagagcaacacatgcctgtccgatg

SEQ ID NO: 287604 - DNA, 89 bp, Homo sapiens
agagcggccgccgccgctgccgcttccaccacagggtaagcttgatgattaccaggaacgaatgaacaaaggggaaaggcttaatcaag

SEQ ID NO: 287605 - DNA, 83 bp, Homo sapiens
ggatccgacttgccggcagaacttacgctgcgggaccccgggcactgttgctgctgcgggagataaatactgcaacaactgta

SEQ ID NO: 287606 - DNA, 74 bp, Homo sapiens
cgcgactccgccgcgctgcgcacgcccagttttccaagagataacttcaccaagatgtccagtgataggcaaag

SEQ ID NO: 287607 - DNA, 83 bp, Homo sapiens
cgagccgcaagaagcacgaactgatgcttcaggactgccccaaggcccgcagggaggtggagctgcactggcgggcctcccag

SEQ ID NO: 287608 - DNA, 75 bp, Homo sapiens
tcagaagaggtttggctttccagagggcagtgtagagctaggtgctgagacaggtgtgcaaagttctgaccttca

SEQ ID NO: 287609 - DNA, 99 bp, Homo sapiens
ctgtcctcagtcgcttggtcagatagtctaatctcagtttttcagggtattcattcaggagaaggaccctacagatggagggaatgcaggaaagctaag

SEQ ID NO: 287610 - DNA, 83 bp, Homo sapiens
acaagaaccagataggacaaggccaactggaggaggacttcatccaacccagcagccgagaagaggcccagcagctgtgggag

SEQ ID NO: 287611 - DNA, 74 bp, Homo sapiens
ctctcctgctgttgctactactgtatgggcgggctgcatgctgttcccccacatctccccctgtgaggtgcgcg

SEQ ID NO: 287612 - DNA, 74 bp, Homo sapiens
cgcgcctttgtgcgcgcgccgagtactatactggcaattgctggagaagattttgcaattgttgcttctgatac

SEQ ID NO: 287613 - DNA, 98 bp, Homo sapiens
acaccgtctattgtcattcagagaaagtctctcggactttttccaagtttgtccgatatgtgcctcgatgccctggggagaccccaactaccgcagcg

SEQ ID NO: 287614 - DNA, 100 bp, Homo sapiens
atgaaagccacacagggatcctgagacgtctggatacctcgttaggatcagctcgcacagaggttgtctgcaagcaggctgaccggttccctgatgtgtt

SEQ ID NO: 287615 - DNA, 75 bp, Homo sapiens
ctttccacttagattcagacctgaatccagactccaaaatgatgcaaatcaacctgactggatttttgaatggaa

SEQ ID NO: 287616 - DNA, 75 bp, Homo sapiens
ccctcctacaacatggaccgggccgcggtccagaccaacatgagagacggtatgggggggcagcacaattacttt

SEQ ID NO: 287617 - DNA, 100 bp, Homo sapiens
cggcactgccggcggggaccgctgggaaggcgaggacgaggacgaggacgtcaaggcaaacataaatggccgtgtgttagctcagtgtaacattgatgag

SEQ ID NO: 287618 - DNA, 107 bp, Homo sapiens
aggtggaagagaagaagccagaccccctgcaccagttggtcctgcacttcagccgcactgccctgacggaaaagagatggagtcttgctgtgtcacccaggctggag

SEQ ID NO: 287619 - DNA, 100 bp, Homo sapiens
atgggacctgtgaagcaactgaagaaaatgtttgaagcaacaagattgcttgcaacaattgttatgcttgaggcactggctacaattaggcttctcgacg

SEQ ID NO: 287620 - DNA, 116 bp, Homo sapiens
cccggccgccgcccgagcgctcgagaaagtcctctcgggagaagcagcgcctgttcccggggcagatccaggttcaggatggtgccatgacaatggtgtgaactacaagattggag

SEQ ID NO: 287621 - DNA, 101 bp, Homo sapiens
ggagcctcagttggaagcagccgatccagcctgcggagcctgtggggcaggaattggattcaagtacgtggctctgggagacctcatcatcctcatcactt

SEQ ID NO: 287622 - DNA, 50 bp, Homo sapiens
cctatgtgtgtgatcttgaagggaacagatattaataaggcagcggaaag

SEQ ID NO: 287623 - DNA, 74 bp, Homo sapiens
aacaatgcatacagatggaacagaaaagatggattcagttatttaaggtggaaaaggtttataagaatgggtgc

SEQ ID NO: 287624 - DNA, 75 bp, Homo sapiens
ctcacgctgagagggacacgcagtgacgagcggccgaagcagctttgcgctctccagggcacaccgtattcagct

SEQ ID NO: 287625 - DNA, 100 bp, Homo sapiens
ggccggcctcctactcttggccttcttggcagcctctaccatgcgcttgccggagccctcatgacttcagtgacctgcttctgcccctctaggtctatca

SEQ ID NO: 287626 - DNA, 83 bp, Homo sapiens
gcggcgctggagagggggcgctgagctgttgggcgtctgaccaaacacaccaagttcgtgcgggacatgattcgggaggtgtg

SEQ ID NO: 287627 - DNA, 75 bp, Homo sapiens
agacggggtggagcccatggaatcggtcctggaggacagaaatcctgcaggacggactggactggtgggccgggg

SEQ ID NO: 287628 - DNA, 100 bp, Homo sapiens
cgcgtggcggcggccgaggagagcaccgggaaagcctctcatggaggagcaggacttggagcgaaggttcgagctgctgagccgcgagctgcgggccatg

SEQ ID NO: 287629 - DNA, 100 bp, Homo sapiens
gtagagaggaggtccgcgagatcctaggggaccaggacttcttccagtggataacaaagccattgacctttgccgattgtgttggggacgaacttccttt

SEQ ID NO: 287630 - DNA, 82 bp, Homo sapiens
cctggctcttgccctcatcctggttctggaatcctcagttcaaggtgttgacagctcttctaccacaagcagtgcttctcca

SEQ ID NO: 287631 - DNA, 100 bp, Homo sapiens
ctcaggcagtggatttcatcaactagagttccgattctgaagaggcatttgagaccccggagtcaacgacccctgtcaaagctccgccagctccaccccc

SEQ ID NO: 287632 - DNA, 75 bp, Homo sapiens
gatcgcatggaagacgcagcctggccgcgctctcccaatggtggaagagagtgaagagcggctcacggaggagca

SEQ ID NO: 287633 - DNA, 98 bp, Homo sapiens
cttttgttgttttaatgagtggggaaaattctgccaaaccaacgcagctttgggaaggaagggaaaaggccgaggcatcagcgtgtgaagaccgcaaa

SEQ ID NO: 287634 - DNA, 75 bp, Homo sapiens
tggagaggtcatctcagttccacacaagatcatcacccaccttcgaaaagagcaggtcaatggccagcaaggagg

SEQ ID NO: 287635 - DNA, 100 bp, Homo sapiens
ggggcaacagaagaagccctttgaggtgcactggaggaagcacaccctgtcctatgtggacgtcggcactgggaagggtaagaaagctcggaccaaggca

SEQ ID NO: 287636 - DNA, 73 bp, Homo sapiens
ctctgtcagctctttccccgtcagcatcccagccgtgctcacgagatcttcgctttaacagaatcagagagat

SEQ ID NO: 287637 - DNA, 74 bp, Homo sapiens
cctctgtcactacggtgggaaaagaacatggcttccagacagttcgtgttgggacagtgggcacccctgtgggc

SEQ ID NO: 287638 - DNA, 100 bp, Homo sapiens
tccagacatgatcaaagccatcaaccagggcaactatggatggagtcggataactgttcaggaggagatgatgactggacccatctgtcttcaaaagaag

SEQ ID NO: 287639 - DNA, 101 bp, Homo sapiens
ctctggaagagggaatcccatcaaagtcagccgtgtggggtctgcaatgtgactgtcatgtggcatgggtctctgcccaagctcgtaatgagactatagca

SEQ ID NO: 287640 - DNA, 123 bp, Homo sapiens
tgaactggagctctgggcccagaggacttctggcctttggcacgtcctgctccgtggtgctctatgaccccctgggatggagcctatagaggtgcctcttgaggaaaatagtgaacggactca

SEQ ID NO: 287641 - DNA, 75 bp, Homo sapiens
ttccatctgtggaaggacctaccaaccaggagccaggaggaactctctcccagtccgcctttgttgaatccatcc

SEQ ID NO: 287642 - DNA, 97 bp, Homo sapiens
ggccaagagttgtgataaccaacttggaatttcctgactcctatgcttactgatttttcccaacctggtcttagtggtgcaatggctagtataagcg

SEQ ID NO: 287643 - DNA, 75 bp, Homo sapiens
cgcgtgggtgaggaaggtcaggtctagagctagcaacatggaccacagatatactggtgactccgctctcctctg

SEQ ID NO: 287644 - DNA, 76 bp, Homo sapiens
tgaagagggaagacacgcggaaacagaaacttgaagggtcaaagtgcaaagggcagcttttgatttttggggcaac

SEQ ID NO: 287645 - DNA, 98 bp, Homo sapiens
ctggacccagcacggagggacttctgcagagagagtgcgcagaaggattccgggagcacagttccgccgaatatttggagttcttacaacatggcaga

SEQ ID NO: 287646 - DNA, 74 bp, Homo sapiens
agcgtcctccccaccccacctgccaccgaggccccctcttcgcctcctccagtcactcaagactgcttgcaact

SEQ ID NO: 287647 - DNA, 81 bp, Homo sapiens
attctagagcctaaagagcaggaatcatggactgtgatactgaaacaagaatggcccaaacattggccaacttttatcagt

SEQ ID NO: 287648 - DNA, 100 bp, Homo sapiens
atggaacatggccaaggggtccttctactcctaactgaaggaagaggatcaccttccaagacaaaacagtcttcatgggggaaaaatgacgcttgtccag

SEQ ID NO: 287649 - DNA, 82 bp, Homo sapiens
ctgccgccgctctgaggagttaaagaataccacttgggtcgctcgaggaggaagagtgtcccaggggggaagcagtacagca

SEQ ID NO: 287650 - DNA, 75 bp, Homo sapiens
accgcgcgggagagcacggatgggcaccctgggctcgatgtgtatgtgctcaagaggccttatgtggatgagttc

SEQ ID NO: 287651 - DNA, 75 bp, Homo sapiens
caggtctggagctcgaccgggccagtgggtaaaggaagaagccccagatatactgtgccttcaagagaccaaatg

SEQ ID NO: 287652 - DNA, 75 bp, Homo sapiens
taatcttcaggatcaacttgagaagttgtaatcgtaaaatgaaaccaccttaccttaaagaattatatgtaagct

SEQ ID NO: 287653 - DNA, 97 bp, Homo sapiens
ggcggcggctgcgggctgagcggcgagtttccgatttaaagctgagctgcgaggaaaatggcggcgggagaccaagatcactccatggatgaaatga

SEQ ID NO: 287654 - DNA, 76 bp, Homo sapiens
cctggggcttctggtcatccttcagaccatgctcgacagctgaccaaggccatgatgcgaaaggccacggccagcc

SEQ ID NO: 287655 - DNA, 50 bp, Homo sapiens
aatggcatcaaccagggatacaagatgatgattattccccaccttctaag

SEQ ID NO: 287656 - DNA, 83 bp, Homo sapiens
gtgacctgtggagacacggccagatctgccctccaaccgcgctgagcacgttcttccaagaaaccaacattcccaacagccac

SEQ ID NO: 287657 - DNA, 100 bp, Homo sapiens
agctgaggaggggagtaaattgaaaatattggggccatttagtaacttctttgcaaggcctcatgcattgtgcgtcagcagcaatgtttatggtgaaaaa

SEQ ID NO: 287658 - DNA, 100 bp, Homo sapiens
ggaacctctaccatgacacatgcttcacctgtgcagcttgcacatgcagcagattggaataaatatgatgaccgattgatgaaagcagcagaaagggggg

SEQ ID NO: 287659 - DNA, 100 bp, Homo sapiens
ctggaaaccgagccagggctgagccggctgacaacagatcgggcccgggacacccagacagatgagattgtcgcactgaagaaggtgcggatggacaagg

SEQ ID NO: 287660 - DNA, 74 bp, Homo sapiens
gcagtacctgcagaaggtctctggagacatcttcagcaggacactcatgaggaccatgatacttccactgagaa

SEQ ID NO: 287661 - DNA, 100 bp, Homo sapiens
taggaccacccaccatgcctatccaggtgtctttcctgaagactatcttcccgtctcaaaatggacatgatggatccacggatgtacagcagagagccag

SEQ ID NO: 287662 - DNA, 100 bp, Homo sapiens
ccggtgaccacttttggaccaaaggcctgtgtgctgcagaacccccagaccatcatggagtaccctgacttctaccggaagctctacggcctcttggacc

SEQ ID NO: 287663 - DNA, 75 bp, Homo sapiens
caagactctcttcgctctttgcatcttaactgcagacctcctgccccccgaggtctgcagtctcctgaacccagc

SEQ ID NO: 287664 - DNA, 90 bp, Homo sapiens
agacagtcctcgtcagcactgactttcagctatggaatcgatccccataccgagtgtgcctacgttccagccgtctacacctgtccctga

SEQ ID NO: 287665 - DNA, 101 bp, Homo sapiens
agaagtgctatctggaaagagagtgtcagatagtgcccctcatcttgagggcctagcagaatttcaagagaatgtaaggaagaccaacaatttttcagctt

SEQ ID NO: 287666 - DNA, 82 bp, Homo sapiens
tggaaagcgcatacaggaccctaaacagatgatgatgtgcctgcagatatggttgcagaagaatcaggtcctggtgcacaaa

SEQ ID NO: 287667 - DNA, 50 bp, Homo sapiens
tcgacgtgctgttttcataggagatggggcctcactctggtcacccaagc

SEQ ID NO: 287668 - DNA, 100 bp, Homo sapiens
aaaagagttgattgaaattatctctggtgctgcagctctgatctagtttgaagcactaagaagaataagacatcagtttgaaaagaggctctatcagaac

SEQ ID NO: 287669 - DNA, 90 bp, Homo sapiens
ccgtcgcggagccggagggcgggaggaacatgacatcgcggagggagaaacaaaggcagcgctgccctcgggggagcattggccctggcg

SEQ ID NO: 287670 - DNA, 82 bp, Homo sapiens
ccatctcctatgaagaatggaatgaccctcctgctgtggatttgcgcaagcaggtagcgccgctgctgaagagtttccaagg

SEQ ID NO: 287671 - DNA, 100 bp, Homo sapiens
attattgagcataagattgtcatagctgatgtcaagttggttgctgatttccaaaggataagttctgaacgtcgaaaagaaaagtctcgagatgcagcca

SEQ ID NO: 287672 - DNA, 75 bp, Homo sapiens
atgaaacatcagttcttgatcctgatgagcttcttggacacttaatgattgttggcaagaaatgtgctgctgatc

SEQ ID NO: 287673 - DNA, 74 bp, Homo sapiens
aggcggtgaaaggacaagggaccatctgctgggtggactgtggttactccacaggatccgctgaacataggatg

SEQ ID NO: 287674 - DNA, 50 bp, Homo sapiens
ctttacgatgtcacttgggaaggtggtgaagaaggtgaagtccatgcaga

SEQ ID NO: 287675 - DNA, 100 bp, Homo sapiens
gcatcacgttgacgtccatttaccagtcttccctggcaagattcttctgaattgtgctgccttggccaaaagaggcatccattctggacttgcactcagg

SEQ ID NO: 287676 - DNA, 75 bp, Homo sapiens
tccccaggagcttggggctgcagacaagcatggtgggcgtgtgatgaggaggcgagcttggctttggagtgctgg

SEQ ID NO: 287677 - DNA, 100 bp, Homo sapiens
gaggcgggggcgtctggaataacagaggcgcgcccgggggctggagaaggccaggcagcagctgcaggaggagctccggcaggtcagcggccagctgttg

SEQ ID NO: 287678 - DNA, 100 bp, Homo sapiens
cggcggccggggaccctgccagcctggacttcgcgcagtgcctggggtactacggctacagcaagccttgaaaagatcttttgaggtcgaggaggtcgag

SEQ ID NO: 287679 - DNA, 80 bp, Homo sapiens
gacgagggacggcgcagacggaggcggcggagccgggagcgcaggcaccgtctgcgtcctgctgtccttccccttcatct

SEQ ID NO: 287680 - DNA, 95 bp, Homo sapiens
agatttctgcccctttgtccgaagagccaaaaatgaccaagtccctggttcattcctgaatctccccgatggctgatatcccagagaagatttag

SEQ ID NO: 287681 - DNA, 74 bp, Homo sapiens
tttttatactgtaaagttccttgctgtgtctataggatcgggtgaaccaccaaccggcaattgaaagctgcaca

SEQ ID NO: 287682 - DNA, 100 bp, Homo sapiens
ctggatccacagcagtgggggctggggtgttgaaagcagcaggggcctagaagacattaaaccgataccacagaaatacaaaggatcattagagactatt

SEQ ID NO: 287683 - DNA, 89 bp, Homo sapiens
tcagttccaagctgacctcagcaacctgcacttgaaccggcactgtgagaagaaactgaaaagctccatcattggcaagaagaagccag

SEQ ID NO: 287684 - DNA, 75 bp, Homo sapiens
ctcccaaagtgctgggatgacagaggagcccaaggtgggcatcaagaccatcaaggtgtactgccagcgcatgca

SEQ ID NO: 287685 - DNA, 51 bp, Homo sapiens
ctggagcttctggactgagggccgcgcattatcctgtagcgtgggtaaata

SEQ ID NO: 287686 - DNA, 75 bp, Homo sapiens
gccgccaccgggaagcggggctgcagatgaataatacggcagctagtccaatgtctactgcaacttcaagtagtg

SEQ ID NO: 287687 - DNA, 90 bp, Homo sapiens
gctaggcggagacagtgcagggaagagagaccttagaaaggatcaggactggcgggatggaatccgacgtggtaggcccagagcagatac

SEQ ID NO: 287688 - DNA, 100 bp, Homo sapiens
aacagggacagcacctcatcccctggatgggggaccacaagatcctcatcgacaggtaactaggatttctacctcaaccgcgagacctatgcaaggacgg

SEQ ID NO: 287689 - DNA, 75 bp, Homo sapiens
tgagcctgccacgccgaggacgtggactattgcccagaagaaaagatgtttggttttcacaagccaaagatgtac

SEQ ID NO: 287690 - DNA, 113 bp, Homo sapiens
tgaagggagagaagtggatttgggagacatttaggagagtgtgaacatggctacgcctcttcattcccgtccatgccgagcccccgactgcagcattcaaagcccccacggag

SEQ ID NO: 287691 - DNA, 75 bp, Homo sapiens
acagtgaatgtggaaaggagattgacagtcacaattttgtaataaggtggtgatgatgtccagcaactctgtgaa

SEQ ID NO: 287692 - DNA, 101 bp, Homo sapiens
gcggaagaggctgaccgcaaatacgaggagtctgaattaggtgacttagatacctggcaggaaaataccaatgcatgggaagaagaagaagatgcagcctg

SEQ ID NO: 287693 - DNA, 75 bp, Homo sapiens
cggcggcgttcttctgtgtggcccgcctgcagcctaaatggaaacctgataaaaccagaggaggccaaagtctat

SEQ ID NO: 287694 - DNA, 101 bp, Homo sapiens
ccaagtggaagtcctgcaacgggatccaaactcccctctgtactcggtgaagtcgtttgaagagcttcggctgcctactgaacttgacgcactggtatttg

SEQ ID NO: 287695 - DNA, 82 bp, Homo sapiens
gcctcgggcgccccgcagccccccaacatcctgctcctgctcatggacgacttgcagagtgggcaggatcttaagacccgat

SEQ ID NO: 287696 - DNA, 100 bp, Homo sapiens
acacaatcttctaaataattgaatagttctgtcccaagaagaactctgaagatgattcagccttctgcatctggatctcttgttggaagagaaaatgagg

SEQ ID NO: 287697 - DNA, 108 bp, Homo sapiens
ctgaatggcaatggcacaaagttctctcgatcagggcatacatctttcttcgacaaagggtgacttaagagattaaaattaatttggttgctgttggttctgaacaaa

SEQ ID NO: 287698 - DNA, 82 bp, Homo sapiens
cgagtgcatcgcccagctgaaggatctcctacccgaacatctcaaacttacaggtgaggaccctttcaccagtgaaactgtt

SEQ ID NO: 287699 - DNA, 100 bp, Homo sapiens
gtcgcagcccccgccgtagccgcctccgagcccgccgccacatcctctgaggtacctactgtcaacaacgggaagtggaggccattactgaaggtgtaga

SEQ ID NO: 287700 - DNA, 83 bp, Homo sapiens
ataatgtggggaggccagccagtcggtctaatttgaaagatcgaagccgcggtcaaggccgccagagaagcctttcccagctg

SEQ ID NO: 287701 - DNA, 82 bp, Homo sapiens
ccgcgcgcagggcctgcagcgggagctggacggcgagcgcgagcggcgcgagaaactgtgttggagtagaagaacatcatgc

SEQ ID NO: 287702 - DNA, 82 bp, Homo sapiens
gtggcgaacggggcgagcctggaggattgtcactccaacctcttttcgctgggccgcgatgggcctcttggaacattggtgt

SEQ ID NO: 287703 - DNA, 98 bp, Homo sapiens
cgcggggtcggcgctgggctggaggcggcggagcgcgagagcttcgagcggactcagccacttccggctcctgcgtcgctccggaagcctgcgagttc

SEQ ID NO: 287704 - DNA, 82 bp, Homo sapiens
cccaaacagatgttctgggtgcgagcccggggctatattgagttcaaggctgcctttgacatgtttgatgctgatggtggtg

SEQ ID NO: 287705 - DNA, 83 bp, Homo sapiens
tgttacttccaagtcatcaccagaaagtgtcgagttatagcagtgctggattgggagctgtcaaccattggtcatcctttgtc

SEQ ID NO: 287706 - DNA, 82 bp, Homo sapiens
tcagatgaaggaatttcttacattttagagatggaggaagaaacttcagttattaatgctgcactggctttagcagcaaaac

SEQ ID NO: 287707 - DNA, 75 bp, Homo sapiens
gacctgattggtaaaaagactcagaaaacggcaataactgtggaggtatgatctcgtgaaatcttgagagaaact

SEQ ID NO: 287708 - DNA, 83 bp, Homo sapiens
caaagacctggttgtgcaacaggcaggcacaaacaagactgatgttgtctgtggatgatcggctgaatgtaacagaggaacta

SEQ ID NO: 287709 - DNA, 100 bp, Homo sapiens
acctgatcccaaaattattgaaaacactcgaaggcaggaagaagatgagccttaggtctgaacgccgaggaattcatgtggatcctgtgcaagaaaggat

SEQ ID NO: 287710 - DNA, 75 bp, Homo sapiens
tcccaaagcgctgggattacagaactgatagtgcatcagccgacccaggtaatttaaaatattcttcatccagag

SEQ ID NO: 287711 - DNA, 82 bp, Homo sapiens
gccgaccgcacgctcggctgctacgtggaaatcctcaagctgctctcggagcccaagatcctcttctcctacaaatgccaag

SEQ ID NO: 287712 - DNA, 83 bp, Homo sapiens
tgggaacctactgtggggccgcggccggaccgagcgcctcgacctcggtctgagttatctgactggatcaagattggagatct

SEQ ID NO: 287713 - DNA, 101 bp, Homo sapiens
ggacttcgacacctacgacgatcgggcctacagcagcttcggcggcggcagagggtgctggagaatctggtaaaagcaccattgtgaagcagatgaggatc

SEQ ID NO: 287714 - DNA, 100 bp, Homo sapiens
caaaatattgtgggtgcaataaaaggtaaaataccatgaagattttgaaaaaacaaaggggagaggctttactcccgtcgtggacgatcctgtgacagag

SEQ ID NO: 287715 - DNA, 50 bp, Homo sapiens
tgacaagaccaagtactaccttcaagacttgggatgtagctttatcacgg

SEQ ID NO: 287716 - DNA, 121 bp, Homo sapiens
cgaggtgctcatcactcccttggagaagtttcgaaaggaacagatcggggctgccaaggtgaagaacgaggtggagaagctcccccgacagcagcggaaggaaagcatgaagcagaagatg

SEQ ID NO: 287717 - DNA, 90 bp, Homo sapiens
gcgtccctggagcggccgccttccagcgtttcagcagagcagctttaccatttgggctggtgaggcgagaattatcctgtgaaggttatt

SEQ ID NO: 287718 - DNA, 71 bp, Homo sapiens
agattgctgcgctctttgatcttgaatattatgtccatcagcgccatcatgaccgggtcctataacaactt

SEQ ID NO: 287719 - DNA, 74 bp, Homo sapiens
aggtgcccagggctgcttccacgacgtgggtcccctgccagatttgtgctggtaatgaatcttgccctcagcct

SEQ ID NO: 287720 - DNA, 75 bp, Homo sapiens
cgagaatgaggaggacaacagctacaaccggggagtcattcttatagaagagcatcagaggaagataaaaaagaa

SEQ ID NO: 287721 - DNA, 109 bp, Homo sapiens
cacctcatgttgctcctgtgatgccattagatcgtttcattacagatcttggccctgattgcattcatctgcatagagaccatcatggcatgctccccgtgtgaaggcc

SEQ ID NO: 287722 - DNA, 100 bp, Homo sapiens
ggaagcgctccgggcctggaatccctacgcgtccctttgggtttagcacgatgagctcaatcggcactggggcaccgtggagctggtccgggcgctgccg

SEQ ID NO: 287723 - DNA, 100 bp, Homo sapiens
cccatgatccccgacctcccggctgacctattcacctcctgcctcaccacccccatcaagatcgccctgcgctgctccttcgagaactcatagaacggaa

SEQ ID NO: 287724 - DNA, 75 bp, Homo sapiens
cttcggtggactccttcggcagtccacccaccgccgccgcctcccaggtgtccattccaacttttccaccaccat

SEQ ID NO: 287725 - DNA, 109 bp, Homo sapiens
ctggagcacctctccggggccggcaaggccatcggcgtgctgaccagcggcggggatgctcaaggaaacttggatttaactggccagaagcaggtattcaaagcagaga

SEQ ID NO: 287726 - DNA, 75 bp, Homo sapiens
tcagcctcccgggtaactgggattacagccacagctccggagcaagccccagccccggcccggccataccagggc

SEQ ID NO: 287727 - DNA, 121 bp, Homo sapiens
aggagaagatccctgggaggtggagaaagacggttctggcgtctcctctctagcaaagccgccgcagggaagatgaacctgtacgagtcatttgcccaggctacccagctgggcgatctgc

SEQ ID NO: 287728 - DNA, 91 bp, Homo sapiens
gggcgttcatgatcctggccagcctgctcatcgcctactgcattcatagccctgatgaagcaagttactctgctctcctaataaatgcaag

SEQ ID NO: 287729 - DNA, 100 bp, Homo sapiens
agatacacgctgctgtgagctctgcaagtatgacttcataatggagaccaagctcaaacccctccggaaggtaaaccccagtgataggtaccatcttatg

SEQ ID NO: 287730 - DNA, 90 bp, Homo sapiens
ctgaagagggacgggtcccgcggcgagcgagctcctgagctgccttcctatttcaaggaaagacgccaaggtaattttgacccagaggag

SEQ ID NO: 287731 - DNA, 88 bp, Homo sapiens
ccccaccgaggccccccggcaccgcgcctgctgccgggttgcgctccgtgcacctcttgcggagacagggcagggcattgttcatgca

SEQ ID NO: 287732 - DNA, 83 bp, Homo sapiens
cgccgattcctcctccttggtcgccgcgtccttggctggcgtgcaccccagctaccatgtcccagatagccaaggatgtgtgc

SEQ ID NO: 287733 - DNA, 87 bp, Homo sapiens
ggagtctctgtccgggggcctggctaaggaaaccctattacctccaggagaagttgccccagtgcaaggcactgcattcgacctgag

SEQ ID NO: 287734 - DNA, 82 bp, Homo sapiens
ttagtcacccacctacatgttgagggccgttgctccagggagaactgcaaatatcttcatccacccccacatttaaaaacgc

SEQ ID NO: 287735 - DNA, 90 bp, Homo sapiens
ttcggaggctgccagcgtcccacaccagccgcagaaatctcctgcaaagaagctgagccatgcaattagtaaatctttggggtgtgtacc

SEQ ID NO: 287736 - DNA, 74 bp, Homo sapiens
ggaatgtatatgaatggtggttcagatggaggttagaccgttatgaggagatgttaaagtaacccatcttgcag

SEQ ID NO: 287737 - DNA, 98 bp, Homo sapiens
gggcgttcatctaccacgcctacgtgacttgggaccctggaggactgacgctgctggcctgggcgtccccttccgctgagccatggcgactcccgacg

SEQ ID NO: 287738 - DNA, 75 bp, Homo sapiens
ttttaatattgcactaggagtttttgctttagctggactaacagatttggaacaggagtacagctgtgtagtaaa

SEQ ID NO: 287739 - DNA, 75 bp, Homo sapiens
aatcatgggtcaccaagagaggctgagagaccagaactgtaagagtaaatgggtccagtaattggaatgactcca

SEQ ID NO: 287740 - DNA, 142 bp, Homo sapiens
ataaccatgtttcggaatagtctcaagatgctgcttactggtgggaaatcaagtcgtaaaaacaggtcaagtgtgagggccccaaggctgttgcagctcctcgacctgatcggttggtcaatcgcttgaagaatatcactct

SEQ ID NO: 287741 - DNA, 90 bp, Homo sapiens
acagttcaggagacagatggccccaagagcccagatccagggttcatcatttacaacccaacagcctcaggcttataaccttttcctgac

SEQ ID NO: 287742 - DNA, 100 bp, Homo sapiens
ctgtttgacatcatccctccccagattttgcaagaacgaggctcaaggatgtgagggacacagtattgacagctgaagaaatgatttacgttttcccgag

SEQ ID NO: 287743 - DNA, 75 bp, Homo sapiens
tccgcggcccaccaccaaagctcatccctgtctctggaaagctggagaagtcttgctggtggatgccctccttac

SEQ ID NO: 287744 - DNA, 51 bp, Homo sapiens
atatcctccaggaatactggccaggggaggatactgaggcacacagagggg

SEQ ID NO: 287745 - DNA, 96 bp, Homo sapiens
ccttttcatcctctcactcagatgatgtatagccctcagaattctgattatcttttagctctcagcactgaatttcctagaggaagttctggcttc

SEQ ID NO: 287746 - DNA, 116 bp, Homo sapiens
gcgagctgagtggttgtgtggtcgcgtctcggaaaccggtagcgcttgcagcatggcagttatacttaagcatgaacattgacgacaaactggaaggattgtttcttaaatgtggc

SEQ ID NO: 287747 - DNA, 83 bp, Homo sapiens
ccttattcagagaaggaaggatcttctcatgcacagaggcaacaaatggcaactttctgagtgccagaaccctgtggagcatc

SEQ ID NO: 287748 - DNA, 75 bp, Homo sapiens
ggcccggggagggtggttaccgctgaggagctgcagtctctgtcaagaacatcgggtcagaagttgagatttcca

SEQ ID NO: 287749 - DNA, 74 bp, Homo sapiens
tcacggtcaacgagcggggcaaccactgcgagtactgcttcaccaggaacagtacgtatttggcattcaagcac

SEQ ID NO: 287750 - DNA, 83 bp, Homo sapiens
gataagtgtttcgaaaatgtgtgtgaattggatttgatcttccatatggataagagtcgtccttgtctactccactaccaaat

SEQ ID NO: 287751 - DNA, 100 bp, Homo sapiens
aagaatttcgatctccgccctggggtcattgtcaggcttatggtgaaggctctggtgctgattgtagacgccatgtccaaaagttaaatctactacaggg

SEQ ID NO: 287752 - DNA, 49 bp, Homo sapiens
gacccacggcgtctgttcgaaggtctggtccgagagcaggaggctgggc

SEQ ID NO: 287753 - DNA, 88 bp, Homo sapiens
gaaggcgagcagggtgcgggagagccccttgcagaagacgccgtacgagaccttagctggatctccaaaatacaagtgaatcacccgg

SEQ ID NO: 287754 - DNA, 74 bp, Homo sapiens
ctggggaccagcctcttaatcggatgtatcttgtattcatggctgtgtggttccggtgctggtgccgtggaagt

SEQ ID NO: 287755 - DNA, 75 bp, Homo sapiens
tggagcaggagatcgccacctacagccgcttgctagaggttgaggacgctcagagcatcagatccatgctgctgc

SEQ ID NO: 287756 - DNA, 74 bp, Homo sapiens
cgccggcctcctctacgcgctgatggagttttaacattgaatgcggagaacactaattatgcctatcaagttcc

SEQ ID NO: 287757 - DNA, 75 bp, Homo sapiens
aatcctaatgacagtctccaaattcgcctccatctgtaccatgaacaagttgaaatcatcgcagaaggataaagt

SEQ ID NO: 287758 - DNA, 100 bp, Homo sapiens
agaattcagaaggaacttgcagaaatcacattggaccctcctcccaactgtaggtcctcagaatggttggaatgaccctccagctttgaacagagtaccc

SEQ ID NO: 287759 - DNA, 83 bp, Homo sapiens
ataacatggggcttcagctgagcgtggtgacaagggatggaattgaaagatgttggccatcgtgatcagatggctgcagctag

SEQ ID NO: 287760 - DNA, 100 bp, Homo sapiens
tcactcggagtatggccttggccgaccctgagaacagctgcagccagctggaaggacattcaggtacccgggtaggctcctccctgcgacagaccttcag

SEQ ID NO: 287761 - DNA, 98 bp, Homo sapiens
cggccctcaccgccctcaccacccctatccagacggctgcccttcaagtaccagaattgaatgatctggcacgggaccctccagcacagtgttcagca

SEQ ID NO: 287762 - DNA, 115 bp, Homo sapiens
ccgggagcgccgagcgtcgccgccgccgccgccatgaacaactcgggcgccgacgagatcggggtgaggtggctttgaccccgggttgcccggccagcacgaccgaggaggtggc

SEQ ID NO: 287763 - DNA, 100 bp, Homo sapiens
gtttttccgaagcctgcatttttttgtggagtggtttgaatatcgtaagcgcacgtttaaacatctcaagggcggcgctgtgaggtctgtgatgatggct

SEQ ID NO: 287764 - DNA, 75 bp, Homo sapiens
acgagcagcaagtcagggagcttaaggtggaagagatcatgcagctggtgaatgcctacttggccaacccctccc

SEQ ID NO: 287765 - DNA, 50 bp, Homo sapiens
gattcgcagtggtcgcttcttctccttgagtctctggtaagaagagtgaa

SEQ ID NO: 287766 - DNA, 83 bp, Homo sapiens
acgggagcgcaggaggaacaaatggaaaggactagacattgatctgttccggtctactatgaagcccgtccagaaagtgttgg

SEQ ID NO: 287767 - DNA, 100 bp, Homo sapiens
tgatcctgtagagaaaacaatggaacttaaatctactaattttaacaggcttttctcatgaagaactagacgactcttggtaaccatgtttgctgcccag

SEQ ID NO: 287768 - DNA, 75 bp, Homo sapiens
aagtgctcagaagggcaacatcccagaaagcttccaagagagcgaagacctggagaaacagaacgcggctctacg

SEQ ID NO: 287769 - DNA, 83 bp, Homo sapiens
ggggcgaggaggctgtcgtgctgtcttcagaaaagcgaggaccgggcccgggagacaatgcagatcttcgtgaagactctgac

SEQ ID NO: 287770 - DNA, 74 bp, Homo sapiens
taaattctgccgaaaggactgaggaacggtgcctggaaaagacttaattcagtgcacaaatgagatgaatgtga

SEQ ID NO: 287771 - DNA, 100 bp, Homo sapiens
cttctagggactcttgaagatggggacccaagtggttatgagattcaataactccttgctgccaacagagccttcttattctaccttgtaaatactgtta

SEQ ID NO: 287772 - DNA, 75 bp, Homo sapiens
cgagatttgaaagagctcagacatctgcaagtgcccagcaggtacctgtgatgggtgtacgttctatttcctgtg

SEQ ID NO: 287773 - DNA, 100 bp, Homo sapiens
cagcagaatttgtatagagatgtgatgttggagaactacagaaacctggtctccctagactctaaaatagagctcaagcttgagaagagagaaccactaa

SEQ ID NO: 287774 - DNA, 83 bp, Homo sapiens
gttaattcaacagttcaccaccattaccgggccatgatccaaaggaaccagagcagttgagaaaactgtttattggtggtctg

SEQ ID NO: 287775 - DNA, 88 bp, Homo sapiens
aagaagaccaacaaacaaggagcctaagggagttaaggtgtgtgggaatgccctcatgaagcaataccaggttcagttctggaagatg

SEQ ID NO: 287776 - DNA, 75 bp, Homo sapiens
tattcgagtgaccgagaccgcggccgggaccgaggtgagcaggggtgagcgcagccactgcccaacgcaaaccgt

SEQ ID NO: 287777 - DNA, 51 bp, Homo sapiens
ctacaaggcgaggcggaaagatggtgtaaacaggaacatcgataagtagtg

SEQ ID NO: 287778 - DNA, 100 bp, Homo sapiens
cagcaggcatcatccgctatgcaattggggacagcagcctgcctgtaggagtctttgtgtgggatgtggaaaatgaaggggacgaagctctagatgtgtc

SEQ ID NO: 287779 - DNA, 75 bp, Homo sapiens
tggctctgctgaccttgtgccttgccccattggatgagaatgacctagaggaagatgtggactcagaaccagccg

SEQ ID NO: 287780 - DNA, 100 bp, Homo sapiens
ctttcaaggatatgctgtattcagctcaggaccaggcaccttctgtggaagcttggatttacactgggcaacgtggttggaatgtatctggctcagaact

SEQ ID NO: 287781 - DNA, 75 bp, Homo sapiens
gacagaccaacctgtcagtgctgcaaattgaagaattagggtctgaaggaaaagtagaagaagcccaggggatga

SEQ ID NO: 287782 - DNA, 100 bp, Homo sapiens
cctgacttgggaccatggtgattcttcagcagattgtaaaccatggctgtgtggatacaagctcagcagctccaaggagaagcccttcatcagatgcaag

SEQ ID NO: 287783 - DNA, 82 bp, Homo sapiens
cattcgagggcagccggcgggaggaacgctcactgtcagcgcctggaaacttgctcacgccgccatggcatcagatgaaggc

SEQ ID NO: 287784 - DNA, 82 bp, Homo sapiens
tccgtcactgtacaagtactcggaaggtcagttctgatacattggagaccattgctcctgatctgcttggctttgaggaaga

SEQ ID NO: 287785 - DNA, 100 bp, Homo sapiens
cgcccggccgcgggagcctcgtggctgcgtcaccgccgcccccccagacaagatggacaccgcggaggaaggtcaccgacgatgagggcgcacctgctgt

SEQ ID NO: 287786 - DNA, 83 bp, Homo sapiens
cagacatcagccacgcatctgaccttgttgacttcccaagtaagaagcggaagaggagccgctggaaccaagacacaatggaa

SEQ ID NO: 287787 - DNA, 51 bp, Homo sapiens
cttcagcaacataaactgcttaaggtgatgtcagagtttaataacaacttc

SEQ ID NO: 287788 - DNA, 75 bp, Homo sapiens
ggcagattcctccgggcagcagggtcacgggatggatagccggcctgccatggccatctttgaactcctggacta

SEQ ID NO: 287789 - DNA, 75 bp, Homo sapiens
tggtgtaccaggcgaagctggccgagcaggctgagcgatacgacgcgtggtgacccgggctgtgtggaaattcac

SEQ ID NO: 287790 - DNA, 98 bp, Homo sapiens
agcataaacctatcttctttcattatggagggaggtttggcagatggagaacctgatcgaacttcgatacgaaaaccggtgaggtccaaacattgtgg

SEQ ID NO: 287791 - DNA, 78 bp, Homo sapiens
cgggcgctggtctgctcccagccgagttgcatgctgagaatttgaaaaatgaagatgatgtagacactggactattag

SEQ ID NO: 287792 - DNA, 75 bp, Homo sapiens
caaggacagacatttttggcagagggagaagatggtgagtgcagcattcatgaagaagtacatccatgtggccaa

SEQ ID NO: 287793 - DNA, 83 bp, Homo sapiens
gggcgcctcggccgccatggtcttcagcgatgtccagctcgccgctgtccaagaaacgtcgcgtgtccgggcctgatccaaag

SEQ ID NO: 287794 - DNA, 100 bp, Homo sapiens
atcttcaaagaatgatatttccaaagtttgcagaaaagaatatgaggtgtctttcctgaagactatcttcccgtctcaaaatggacatgatggatccacg

SEQ ID NO: 287795 - DNA, 87 bp, Homo sapiens
gtggtcgtgctggtcctcgtgctgaccgcgctctgcctcagcgacgggggatatgagactttctactcggaatatcctgagtgttgc

SEQ ID NO: 287796 - DNA, 90 bp, Homo sapiens
gatgttcagatccccaaaggagcattcatttccaacttctccatgacactgcccatctctaagataagaacctggaaaggggactctgtt

SEQ ID NO: 287797 - DNA, 87 bp, Homo sapiens
aaatcttgtttgagaaccccgatcagaatgccaaatgtgtttgcatgctgggtgtctttaagagtgattgaagagaataattcaaaa

SEQ ID NO: 287798 - DNA, 82 bp, Homo sapiens
gcggcggcaacgagggaatagtggacgaactgcacgtgtacaacacggcggaaggagagttttacatggaagtggcttacag

SEQ ID NO: 287799 - DNA, 76 bp, Homo sapiens
aggtgatgaggttgaagatctctatgagcttttgaaacttgttaagaatgttctgaaggatctggaaaagagaaaa

SEQ ID NO: 287800 - DNA, 100 bp, Homo sapiens
gtccacctcgacctgctctccctgaggctccaggctgctcagctgccccacacaggggtctttgggcaaagtctgcagggaactggccaggcaagggggc

SEQ ID NO: 287801 - DNA, 75 bp, Homo sapiens
gccatggagcccgactcggtgattgaggacaagaccatcgagctcatgtgaatgatttgggaggggacttcaaag

SEQ ID NO: 287802 - DNA, 82 bp, Homo sapiens
gctggacttcttggctggatgcgcgggggaaaccaaggtgtatgttggtaacctgggaactggcgctggcaaaggagagtta

SEQ ID NO: 287803 - DNA, 84 bp, Homo sapiens
agagagatgccatctacaaagaattctccttccacaattttaatcagagttgtctgctggttctcagcttgaagaagattctgc

SEQ ID NO: 287804 - DNA, 75 bp, Homo sapiens
gaagcagatgcgcattttgatggttcaaatctgaacatcaatgatgtactagggaactactcattgactcttgtt

SEQ ID NO: 287805 - DNA, 74 bp, Homo sapiens
gcagaggtgctggagctggcagattgcaacacctgctcggtataccgtgactttgggaggaacatctgtcactg

SEQ ID NO: 287806 - DNA, 100 bp, Homo sapiens
gacagggatgataattgggcctccaagagtatgggcactaggaaaagacttcttccatcaagcttaattgttttgttattcatttaatgactttccctgc

SEQ ID NO: 287807 - DNA, 100 bp, Homo sapiens
acagcccgagtgcaaaaagcgcctcaatgaccggattgagatgtggagttacgcagcaaaggcactcttaaaagacccattttacatgggcttgtaccag

SEQ ID NO: 287808 - DNA, 83 bp, Homo sapiens
ccaaagacgggcgcaaagattgcttgaagaaatccatgccatgaagtgttttacctcaatcatatatccacacaagtgcttct

SEQ ID NO: 287809 - DNA, 101 bp, Homo sapiens
gccaaccctgctttcatggagggacctgtgaggccacagcaggatcacccctgggtttcatctgccactgccccaagatggagctggaccttcaccagaag

SEQ ID NO: 287810 - DNA, 75 bp, Homo sapiens
cctgtttcaagtttctgatataaaacgatgacattttcaggaaaatcctggaatttggataaagagagggcagtg

SEQ ID NO: 287811 - DNA, 98 bp, Homo sapiens
agactcactagtaatatggtctgcaaacactgtgaacaccagcctgcctagggtagttaaaagacgagtgaatgctctcaaaaacctgcaagttaaat

SEQ ID NO: 287812 - DNA, 75 bp, Homo sapiens
aggcaggaccccgggacaccctggaagccaggaaatggtattgttgcagcatctggcagtgagactgaggatgag

SEQ ID NO: 287813 - DNA, 51 bp, Homo sapiens
ttgatccagaacttgcagcaacaatagttaccttatcccatatcacacaac

SEQ ID NO: 287814 - DNA, 101 bp, Homo sapiens
gaggaagagaagatgaaggaagactgtctgccgagttctcacgtgcccatcagtgacagcaagtccattcagaactcctccaggtcccggggctctgcatc

SEQ ID NO: 287815 - DNA, 50 bp, Homo sapiens
ttttcaagggacggatacaacgactagagatggtgagaacaagaccaaga

SEQ ID NO: 287816 - DNA, 82 bp, Homo sapiens
cttcggcagtccacccaccgccgccgcctcccagacagtgagaccgtgcactaccactatggccctaaggacctggtcacaa

SEQ ID NO: 287817 - DNA, 98 bp, Homo sapiens
gcccaggacctccaggggaacaatgaggcctacgcagagctcatcgtccttgagatcgcggattcaggtgtggctctatgagcaagtgaatatgcgga

SEQ ID NO: 287818 - DNA, 90 bp, Homo sapiens
cgccgctctagcggccgggactctgaactatggcgatggacttcagcagaaatctttatgatattggggaacaactggacagtgaagatc

SEQ ID NO: 287819 - DNA, 95 bp, Homo sapiens
ctatgacaagaccaaggtcaacaaggacaacaatgagatcgtggacaagatcatgggcaaaggacagatccagacagaagccctgggggatgcgg

SEQ ID NO: 287820 - DNA, 89 bp, Homo sapiens
atgctgacgactgtgcaggaagaaaacgagccagtgatttacaatagagcaaggtttggagcaggtatgttaagaagttaggggatttt

SEQ ID NO: 287821 - DNA, 101 bp, Homo sapiens
tggcgcttgacggaccagagcagtggctttcctggagatggcatgcagcagccagcatacacacagcatcaaaatatggatcagtttcagccacgaatgat

SEQ ID NO: 287822 - DNA, 74 bp, Homo sapiens
aacgattaaaagaagaactcgcaaaagctcagaggtatcatggtacagtcaccagaaaaagcttacagttcctc

SEQ ID NO: 287823 - DNA, 98 bp, Homo sapiens
cattatagcctcaaactcccaggctcaagcaatcctaccatgtcagccttcccagtagctggaactacaggagatgagctgccctgtgacatgcggat

SEQ ID NO: 287824 - DNA, 124 bp, Homo sapiens
tttcatcttctcagatacagcggtgcttctgtttgatttctggagtgtccacagtcctgctgaatcttctgctgactctcaacttttcctggaaaaaatggatcattcccaccatatggggatg

SEQ ID NO: 287825 - DNA, 100 bp, Homo sapiens
gttaccaagaagacttatgagatctggcatcgacggcatgactactggctgctagccggcattataaagctattcaagatctctggcagtggaggaagtc

SEQ ID NO: 287826 - DNA, 95 bp, Homo sapiens
tattggaaggaggagattctgaagataaggagttgccaccttccagagaagaggtacgagatgacaagacaaccataaagtgtgaaacctccccg

SEQ ID NO: 287827 - DNA, 75 bp, Homo sapiens
cctcaatttaagcctgatctaacccctagaaacagggaggtggggaagacagggctccagctaccacaggacggg

SEQ ID NO: 287828 - DNA, 125 bp, Homo sapiens
cagcctctgcggagccgggctcgggtcgccggagccgcgccccaccccgccagctccagagccacgtacggctgaagccgacgtagcttctctgaacagacgcatccagctggttgaggaagagt

SEQ ID NO: 287829 - DNA, 100 bp, Homo sapiens
ggactcatgtaaagtctctcccttaatgctcagttcttagaagaccgaggagcggtggtgccccccccgggcacggggccatgtacaacgggatcgggct

SEQ ID NO: 287830 - DNA, 127 bp, Homo sapiens
tcacagtaaggccaaaaatgtgcatactcacagagttagagagagggatggtgtcattgaaattatgagactatcattcaaatggaagcattatagttcttcggaaccattatgatctcaaaacgaa

SEQ ID NO: 287831 - DNA, 101 bp, Homo sapiens
gggaaagaaaacaatttctcctgctctgcagcttctgttcaggttgtttacattcagagctctatcaataagaggaatacatattacagtgaattcgacaa

SEQ ID NO: 287832 - DNA, 74 bp, Homo sapiens
gcagacgcgggcgagctgcggctcggacgccagcggacacgcgggcgaggagccaagccgccatggcctaccac

SEQ ID NO: 287833 - DNA, 99 bp, Homo sapiens
gagcaaaagtattaagtaagctgaatatgaagcgagttgcagacctggagcaagaaaatgctctcttgaaagatgagaaagaacagctcaacaaccaaa

SEQ ID NO: 287834 - DNA, 90 bp, Homo sapiens
caggaccgggatccccaccggctcaactcgcatctcaagccccgccggctgctgtgggagcggcggccgtccctctcctggaggtcgtct

SEQ ID NO: 287835 - DNA, 100 bp, Homo sapiens
ttaggcaattctaaaacacctccaccagggcaagcaggaaaaagcgtcccaggatacaatggtaacccattaacccaggagaaatcaagtgatcctcaag

SEQ ID NO: 287836 - DNA, 75 bp, Homo sapiens
agcgcgagagcttcgagcggactcagtttgcccgaccatctgtaagtcacacggctgcaccgccgaaggcctctg

SEQ ID NO: 287837 - DNA, 75 bp, Homo sapiens
catgaggaaagctggtcacgaagccctcagcattattgtggatgaatataagccgggggccatcaagtataagac

SEQ ID NO: 287838 - DNA, 80 bp, Homo sapiens
tgtggctgtgccgttggtcctgtgcggtcacttagccaaggaaatctggcattttttaaagtttgcgccccacaaagagg

SEQ ID NO: 287839 - DNA, 75 bp, Homo sapiens
tcaagggatggtgaaatggatgatagtcgaggtccttatgtcgtcagaagatcgagaagctcaggaggatgaatt

SEQ ID NO: 287840 - DNA, 71 bp, Homo sapiens
tgcatggtgtttcaaagggtggtgaagaactaaggctcaggaagagcttactgtctgccttgagaacttat

SEQ ID NO: 287841 - DNA, 75 bp, Homo sapiens
tccactggtgtttggtgtacccatgtgactaatttgtccaaagagagaaaaagatcttactctccagatggcaaa

SEQ ID NO: 287842 - DNA, 101 bp, Homo sapiens
ggccaagtcgagggccaagacgaagacaggaaaagtctgaagacgcttatgtccaaggggatcctgcaggtgcatcctccgatctgcgactgcccgggctg

SEQ ID NO: 287843 - DNA, 100 bp, Homo sapiens
ttcagagcgtcacggcgtacgccctcatggggaaaatctccccggtgactttcaggccctactgaagatggactgccagggcctggtggtcagactcatc

SEQ ID NO: 287844 - DNA, 75 bp, Homo sapiens
gaaaaacctcagcgacctgatcgacctgacctcaaaggaagaccttctgcaggctgattttgaaggtgctttaaa

SEQ ID NO: 287845 - DNA, 100 bp, Homo sapiens
ctacaacatgacgtttttccctaatctgatgggtcattatgaccagagtattgccgcggtggaaatggagtcgactcctttacatctagcagcgggctac

SEQ ID NO: 287846 - DNA, 96 bp, Homo sapiens
cttcatcatcttgctctggcggacgctcaagtacctgtggaccgtgtgctgccactgcgggggcaagacgaagacaaatcttcctattttcaagct

SEQ ID NO: 287847 - DNA, 75 bp, Homo sapiens
cccattgatttgatgcataaaggcagctttgaaacagagtccaaaactacttacctggaagaccttccaccaccc

SEQ ID NO: 287848 - DNA, 90 bp, Homo sapiens
ggaagccctcctgctcctcctcatcagcgaatccatgatgtggaaagcttcagcaggccacgctgtgtccatcgcccaggatgacgcggg

SEQ ID NO: 287849 - DNA, 98 bp, Homo sapiens
tgcggttaaaaaggtgatgggtatctttaagagcagcttattccaagctttgctaggcttgtctggagcgggaaagactactgtgagcatggccttgg

SEQ ID NO: 287850 - DNA, 99 bp, Homo sapiens
agcatgtctgacaaactgccctacaaagtcgccccgtcgcagaatttagtctcaaaggaaacttcaaccacagcactgcaggcctctgttgccagacca

SEQ ID NO: 287851 - DNA, 97 bp, Homo sapiens
cccagagctcctggaccaatgcatcttcccaccaccttaaaccactgccctggcaggtgcccggcccgccccccaccctccggctcccagggcctgc

SEQ ID NO: 287852 - DNA, 82 bp, Homo sapiens
ggaacccttcgctggcgggagcgcggttcggggccgcagaggtcagcccaaggccaaccccactgtcactctgttcccgccc

SEQ ID NO: 287853 - DNA, 100 bp, Homo sapiens
cacagaaggtgtgaccccaacgaagagtggagaacggcaacccatccagatcaccatgccgggagattcttcaagcaatcactatgtcaacagacacagg

SEQ ID NO: 287854 - DNA, 99 bp, Homo sapiens
agtcgtaccaagtacaccattacaccagtgaagatgaggaagtctgggggccgagaccacacaggtgtgagcgacgtctcctcaccacagtgctgtgtg

SEQ ID NO: 287855 - DNA, 90 bp, Homo sapiens
atcccggcagggagcaatagctatcaaccggtccccatcaccatccccaaagaagagctaaaaaagtccctgtacgccatcttctcccag

SEQ ID NO: 287856 - DNA, 92 bp, Homo sapiens
atccaggagagcccatggcaggaccggcacggcgaaaccttcaccttcaggcatccgtgtcattctggaccttactcccaactaccggggtg

SEQ ID NO: 287857 - DNA, 74 bp, Homo sapiens
tgcttggccagcgacagatcctttgctgctctgtctgccggttcttgaggttcgatacaagaggctgttttcct

SEQ ID NO: 287858 - DNA, 83 bp, Homo sapiens
gcgcgccccaccaccgccctcaccatgagttttatggacgaggagccccctacaatgccttgacggggaaggactccactaga

SEQ ID NO: 287859 - DNA, 121 bp, Homo sapiens
ggaggatcgtgcgggtcgcaaagggaagccgagtgctcctgcggctcccagactgcaaccaggcatgttatgttacccagagaactttccaaacaagtacctaaaactcatctgatgtctg

SEQ ID NO: 287860 - DNA, 75 bp, Homo sapiens
ggggctccgcgagcggaattccggcggctgccgtgactccagtgcaaacctgcctagagctggaacgttacctcc

SEQ ID NO: 287861 - DNA, 101 bp, Homo sapiens
caaatctcctttgggacacaggggtctttcgaggcccggtactacccaaacgtcagtcgaatcacaggcaggagggctgtcacatggtgactgaagaactt

SEQ ID NO: 287862 - DNA, 74 bp, Homo sapiens
ctgtggctccccttcaggaaataaagcaggatctgaaaccaaacaacttgttgctagatgaaaatggagttcta

SEQ ID NO: 287863 - DNA, 75 bp, Homo sapiens
gtgatggaccgtgctagtgacctgactgatgccttcgtggagctagtgtcagcagtgggatacctgcgcttgaag

SEQ ID NO: 287864 - DNA, 75 bp, Homo sapiens
ggagacctgttcagtggaatgaattcataagactttgaccccgacgcaggcttcagtgattgccgcggatcagaa

SEQ ID NO: 287865 - DNA, 75 bp, Homo sapiens
tgggagccctcacgagtcccgattctggctgtgactcagtcactgacactgagcctgaggacgagaaggttgttt

SEQ ID NO: 287866 - DNA, 73 bp, Homo sapiens
aagaccttgagggaatcccaggcaacgtttctactacacttagcggacaaaactggtggcataattgtgacaa

SEQ ID NO: 287867 - DNA, 88 bp, Homo sapiens
agtttaaccaaacaaccagaagaagtatttgatgtcttagagaaacttggagaagggtgtgagttcttgatacgaatgaaaggccaag

SEQ ID NO: 287868 - DNA, 100 bp, Homo sapiens
cgcctttttcacacggaaactctcaagcacctgcaggacatcaacatcgccacccctgttcacaacatgctgccaggttcgtcacaaggcatcgcagaag

SEQ ID NO: 287869 - DNA, 75 bp, Homo sapiens
atggtgaaacaccactgaagcattgccaagaagtgtctgatacaaacttgtacagcccatttaaaccaagaaatt

SEQ ID NO: 287870 - DNA, 101 bp, Homo sapiens
ctctggtgcatgctgatgacgaaaaactggaatgcagtagccctctgggcctgggatattgtggttgataactgtgccatctgcaggaaccacattatgga

SEQ ID NO: 287871 - DNA, 82 bp, Homo sapiens
gccatgtccgggagaagacacacatgattaagtaccggtacatcccgttcacacatgggaagagaaggtacagaggcaagga

SEQ ID NO: 287872 - DNA, 75 bp, Homo sapiens
gtacgggatcctttctggaatggaggtcttatgagctgctattgaacacggcagtatacctgaggtgcaccggag

SEQ ID NO: 287873 - DNA, 99 bp, Homo sapiens
tcaagcccatatcttgccgaaatgtaaggtgcttcctggaggggcctgccccactgttcctgtgctgagttccaggacagcctcaacttcagctaccat

SEQ ID NO: 287874 - DNA, 83 bp, Homo sapiens
ggagctgctcttcctccagaatgcgctcggacggaacgttaggaaggccctggtctgcagcccagagggcaccttctgcaaac

SEQ ID NO: 287875 - DNA, 100 bp, Homo sapiens
tccagcctcctggccaacctgtggcagtacaacaagctccaccgtgacttccgggcgggcagctggtggaatttttgaagaaaatggaatctcgaggccc

SEQ ID NO: 287876 - DNA, 100 bp, Homo sapiens
cttttatattcatctcaaaaacaaaattctgaactcaggacttggcaaattggtgaggaaatgagccagaacagtttcataaaacagtatctggaaaagc

SEQ ID NO: 287877 - DNA, 112 bp, Homo sapiens
tttgctgtgtaatcctgagaatggactgcaagagaggaaaaactgggcgtctgcttgggaatctattgtggaaacccagatccagacatttaatgtggatgcaccatgccag

SEQ ID NO: 287878 - DNA, 100 bp, Homo sapiens
ctcaaggcagaatgtttagcaatgctgggtcgttatccagaagcacagtctgtggctagctgaccacgtatcccacttggagaatgtgtcagaggatgag

SEQ ID NO: 287879 - DNA, 90 bp, Homo sapiens
cgatcagtcacccagtcggctggagtcggaggcgatatttctaggggtgtacttgttggggtcaggacagcccacctgaggatattgacc

SEQ ID NO: 287880 - DNA, 88 bp, Homo sapiens
tttcaagtgcatgcagctcactgatttcatcctcaagtttccgcacagaccaggtggatgcaacccttattcctattacaaatttcag

SEQ ID NO: 287881 - DNA, 100 bp, Homo sapiens
ggtttgtcgccagaaggaagatggcggatctggaggagcagttgtctgatgaagagaagacactacccaaagcagtccttcactacagtggcagacagac

SEQ ID NO: 287882 - DNA, 82 bp, Homo sapiens
cagatacagagatgtaagcccatgcgtgccttcagatgctgattcttctgctgccagtaataaaataagtggtgcaagtaat

SEQ ID NO: 287883 - DNA, 100 bp, Homo sapiens
gccgcccagccctgccagctgcgccgggacgatcaatgtccgagttaccaccatggatgcagagctggagtttgcaatccagccaaatacaactggaaaa

SEQ ID NO: 287884 - DNA, 90 bp, Homo sapiens
cttcctgctgctgctgccctggttccccggccccacccgatgcggcctccaaggttcctgcgtgaagaccagctgggagcccactgcctg

SEQ ID NO: 287885 - DNA, 74 bp, Homo sapiens
gcggcggcgggggtggctccgcgcgcggtggtctcggggggccaaaccagtgctcctgccacctctctggctgc

SEQ ID NO: 287886 - DNA, 51 bp, Homo sapiens
ggatcccccagttccaaagtgtcttaaaggagatgttgcagtaaagatcct

SEQ ID NO: 287887 - DNA, 75 bp, Homo sapiens
caacagtgacagctccctgaccctccgcgagttctacatggccttccaatgaacactccatgagagcagggacct

SEQ ID NO: 287888 - DNA, 74 bp, Homo sapiens
atcaaagaatctttgacctgaaattcagaagaagatgttgttgaaactcctgcagtgtctcatgatgaacatac

SEQ ID NO: 287889 - DNA, 75 bp, Homo sapiens
ttcaacaaccacgggaagccgcggctctccaagttctaccagccctacgcatagacgtgccagagatcaatgagg

SEQ ID NO: 287890 - DNA, 74 bp, Homo sapiens
aacattctgccgaagagaacaagacgtgtgaagactcagacttttttgtataacgagctctatgtctacaatac

SEQ ID NO: 287891 - DNA, 96 bp, Homo sapiens
gttggctagactagaaatcaaacaacttggaaatcgatcacaaccaggcattaagttcacacttttctgggagaagaggctacaaggacttagtgc

SEQ ID NO: 287892 - DNA, 98 bp, Homo sapiens
caaagatccccgttcctggagattctgattgaggtcagaagagatcaattctacagaaatttccagtggttctgttgaggctttatggaattcagcat

SEQ ID NO: 287893 - DNA, 99 bp, Homo sapiens
ctccctgtaccatgagctgtcgacggcagggtctgaggtcatcggggatgtggacgaaggggccgacctcctagggcgaactttctgaccaagtataca

SEQ ID NO: 287894 - DNA, 98 bp, Homo sapiens
agccgctgctgtcttcgtgggaggcgccgtgagttcgccgctggtggctccgggtatcagatacacaccggacttcaacattctatcataagacctac

SEQ ID NO: 287895 - DNA, 96 bp, Homo sapiens
ctactccatcaaggtcatcgaggccaacaacccattccaggctgtgcaggaagatacgacgacatattccacagagcgatccgagcacttcaaacc

SEQ ID NO: 287896 - DNA, 90 bp, Homo sapiens
ctcccttcccaatggggaagggctgcagctgaaggagaactcggttatcttatgatgaggcttttgctatggctaatgatcccttggaag

SEQ ID NO: 287897 - DNA, 83 bp, Homo sapiens
cggaacccgcacctgtgaacctcggcagtgcgtccccgggactctgttctgtgagccgcttacaaacacgcagatggcaagaa

SEQ ID NO: 287898 - DNA, 100 bp, Homo sapiens
gcaccctgttttgcaaaaaccatcagtgtttgggaatgattctgatgatgatgatgagctagagttgggaagacatcactgattatgtctctggtcagtg

SEQ ID NO: 287899 - DNA, 90 bp, Homo sapiens
ctgccctcatccacgatggcctagcacgtggaattcgcgaagctgccaaagccttagacaattagttgaatccatggacatgaaacccac

SEQ ID NO: 287900 - DNA, 90 bp, Homo sapiens
cctgtacagcctgcagaactagccctgaagacaaggggtaacactccaaaatatggactcattttccactccaccttcattggccgagca

SEQ ID NO: 287901 - DNA, 96 bp, Homo sapiens
gactgagctggctaagcaggtgctgcagacggagctggagcgaccgagagaggtgtcatggagaaactccagctgggcccagagattctgcagcgg

SEQ ID NO: 287902 - DNA, 75 bp, Homo sapiens
ggcaacaagtacaagcggcgggtgccccggcgtctgcttctgcgctttgcctgggagaggccctggtggcctcgt

SEQ ID NO: 287903 - DNA, 50 bp, Homo sapiens
gtccagcatgaatcccgaatagttccatcataatgaatggatccaatatg

SEQ ID NO: 287904 - DNA, 75 bp, Homo sapiens
ctgctcctggacccggcctgggagaagcagcagagaaaggatgtacagttacccagcacgtgtacctcctcctcc

SEQ ID NO: 287905 - DNA, 100 bp, Homo sapiens
cgctaacaactgcccagctttgaggatagaatcacttgaattcctggatgaaatggagctgctggagcagctcatgcggcattactgcctttgctgggca

SEQ ID NO: 287906 - DNA, 100 bp, Homo sapiens
gtggaagaagaagccaatgcctttgtgggtcaagtaaaaaatccaaaggactgcatgacacaccataggatatagtcaagaagcctttggacatgggagt

SEQ ID NO: 287907 - DNA, 75 bp, Homo sapiens
atataatgaacctcatgaaagcagaaccaactcggatattgttgaggactgactgcattgcacagatgatggata

SEQ ID NO: 287908 - DNA, 76 bp, Homo sapiens
gacccaagcctcagcagttctttggattaatgggcaaacgggatgctgcttcttggacacttaatgattgttggca

SEQ ID NO: 287909 - DNA, 50 bp, Homo sapiens
tccactgcgggccggcgaaagctggtgaaagaacttgtcctggacaacag

SEQ ID NO: 287910 - DNA, 101 bp, Homo sapiens
atactacgataaaaatgccatagctattacaaatgctctatgtaaggacaacatctacccagctttccagatgtttgctaaaggttatgggaaaaataatg

SEQ ID NO: 287911 - DNA, 100 bp, Homo sapiens
tcagggcaattcctatccaagtgagaccactgtgaagtatgtcttcaggattaaactgcaaatatctcatgaagctgctgcctgtatcactggtctccgg

SEQ ID NO: 287912 - DNA, 100 bp, Homo sapiens
acccctttgaattaattatggctttgctgatcatctgggctgtgatccacaaacccggttctttgtccctcctaatatcaaacagtggattgccttgctg

SEQ ID NO: 287913 - DNA, 73 bp, Homo sapiens
cagctattggaaagtttttttaatgtggttggaacaactgagagctggaagtcgagtgtgctactcaactcag

SEQ ID NO: 287914 - DNA, 75 bp, Homo sapiens
catttaggagctctgctcaaagccagacggaagatgatccctatgatcttgaagatgtttctgcacagaaatgag

SEQ ID NO: 287915 - DNA, 100 bp, Homo sapiens
attctccttcgctgtggcgggaagatggccggatttgaaggtctcctctgagcctccggcctccataagacccaaaacagatgacacctcttcccagtcc

SEQ ID NO: 287916 - DNA, 100 bp, Homo sapiens
tatgaccatattaatgcagatgaggcgttctttggaaactcccagtacagccagcagcaggccgggtaccagcagggtgccgcgcagcagcagacgtact

SEQ ID NO: 287917 - DNA, 98 bp, Homo sapiens
atggatgagcagaggcggcagaatgttgcctatcagtacctgtgccggctggaggaggccaagcggtgaaaggtgtagcagtcactcggcctacaccc

SEQ ID NO: 287918 - DNA, 100 bp, Homo sapiens
ctcagctacatcttccccacttacggacacagcattgttggttttgccatgtactattttacctatgacccgtggattggcaagttattgtatcttgagg

SEQ ID NO: 287919 - DNA, 100 bp, Homo sapiens
agaaagcggcttatcgaacagagccgggagttcaagaagaacactccagaggacctgctggtgacaaccccctggagctgagtaggattcctgatgaaaa

SEQ ID NO: 287920 - DNA, 75 bp, Homo sapiens
caagctcgtagcctgccactccgtgcagtttatgtggccgaggcagacaagtggaattaggccttgctgcagggg

SEQ ID NO: 287921 - DNA, 100 bp, Homo sapiens
acgtgatcaagtaccttgagacactcctttactcacagcagcagatatacgtccatcatgaaatttacaacctgatctttaaatacgtggggaccatgga

SEQ ID NO: 287922 - DNA, 100 bp, Homo sapiens
agcagctctcgctccagaagcttcactttgttgtggacatcggatacccaaggagacgaagctgaagcaggagaaggaggggaaaattaaccggccttcc

SEQ ID NO: 287923 - DNA, 75 bp, Homo sapiens
cgccaatgtggacggactcactgccctgcaccaggaccagttacagaagtggatccgcggtaatgtgagtgcatg

SEQ ID NO: 287924 - DNA, 100 bp, Homo sapiens
ttcagtggaataaatggcgtccaaagtcacagatgctatagtctggtatcaaaagaaggtatcattggaacatttcaagatcatcaaatcaaattccaca

SEQ ID NO: 287925 - DNA, 100 bp, Homo sapiens
tctgcacttcgcattttggcattgacatttaattttagggtcctttatatagaagggagagtaggctgatttaaactgcaatattcaagatgatgctggg

SEQ ID NO: 287926 - DNA, 88 bp, Homo sapiens
cgtcctcatctgggttctcactggccattggcttctcatggatggctcacgaggcccagggaatcctctggaccatcagattaccaat

SEQ ID NO: 287927 - DNA, 98 bp, Homo sapiens
ggcaatgaatgacagcactgtagaacagctttatgaaacagcttgcttcctacaggtacttgatgaagaagcagaagtttttatagtcaaaatgtgga

SEQ ID NO: 287928 - DNA, 125 bp, Homo sapiens
gccggatgtctgatctccgaataactgaggcgtttctgtacatggattatctggtgaatgccaaagatgacgaaggtgtcctcgttggatcctgggacaatatctatgcctatggcgtcccccca

SEQ ID NO: 287929 - DNA, 87 bp, Homo sapiens
agaggacgccttcaacaccaccttcatctccaccatcgatttgattagaactatccgggacccagaaaagcccaatactttagaaga

SEQ ID NO: 287930 - DNA, 75 bp, Homo sapiens
cggcagccaccccatctgggaaatttggattcctagacttgcccaagcacttctgtctgctgtagcagatgtgag

SEQ ID NO: 287931 - DNA, 90 bp, Homo sapiens
ctagattgattgatcctccagaattagacactcacatgttaacattctcctgtgcctcctgttggctctctttgcatctggcctcatcca

SEQ ID NO: 287932 - DNA, 98 bp, Homo sapiens
cttgagaagcaactatacacctagaagtaatggctcaactgatttacagacaaatcagactgaaactgttgaggagcccatggaggaagaagaagcag

SEQ ID NO: 287933 - DNA, 75 bp, Homo sapiens
cgagctgagtggttgtgtggtcgcgtctcggaaaccggtagcgcttgcagcatgaatgttcgcatcttaccacat

SEQ ID NO: 287934 - DNA, 75 bp, Homo sapiens
gcatgtggagctgccgtctcagcagtccctgaagaggaaggagaaggaatatgagcatgaaatggagcggctggc

SEQ ID NO: 287935 - DNA, 75 bp, Homo sapiens
ttcagggctagcccagaggggcggggccagcttagaccatgctcagcctccaagcagccttgtcatcgacaaaga

SEQ ID NO: 287936 - DNA, 75 bp, Homo sapiens
tatcttttgttctctggcatggaaggggtcctcagagttactggggtctcctctgagcctccggcctccataaga

SEQ ID NO: 287937 - DNA, 90 bp, Homo sapiens
tccaggaccccctcgggtaggggggctggagagcccccaggtggaccatggcggtgagattccaggtgccttgtccacattttgcgagag

SEQ ID NO: 287938 - DNA, 143 bp, Homo sapiens
aatcaatggaggctggaagttcaacagaaggcaaatacgaagacgaggcaaagcacccagctttcttcactcttccggagaaacctcaattatttttccaatgcttatgcagctgcagttagtgctgtggaccctgatgcagg

SEQ ID NO: 287939 - DNA, 73 bp, Homo sapiens
gaagcgactttggtgagactctggtattctgcctttgactgcaactcttgtcgtcttatgtgggtgttgaatt

SEQ ID NO: 287940 - DNA, 75 bp, Homo sapiens
cctacacttgcgcaaatgtctccggtttgagcacaaaatgaacataattagggaaaataaggatctggcatgttt

SEQ ID NO: 287941 - DNA, 75 bp, Homo sapiens
tagaggaaaaaattgaaagagaaaaggaattagcagaagacattatgtcagatttgtcccatcagatgaaaagaa

SEQ ID NO: 287942 - DNA, 100 bp, Homo sapiens
gaacctgcctcagcaagcgtacctgagaatacttttaaaggaacctgttgataaatgcaaaacagtggctgttgcaggttcgtgagccacacatctcccc

SEQ ID NO: 287943 - DNA, 96 bp, Homo sapiens
gccaatggagtgtgggagctgaaagggtcttcgctggcggccgggtatttgaagtataccatacaactgttttgaaaatccagcgtggacaatggc

SEQ ID NO: 287944 - DNA, 83 bp, Homo sapiens
ggaagaatttcctctgaagcaccgaaggaaggggagttcaccctgcacggccgggccatcctggagatggagcaatacatccg

SEQ ID NO: 287945 - DNA, 107 bp, Homo sapiens
cccatgatcctgctggtgggccagtacagcaccggcaagaccaccttcatcagacaatgcagatcttcgtgaagactctgactggtaagaccatcaccctcgaggtt

SEQ ID NO: 287946 - DNA, 74 bp, Homo sapiens
aagatcaagaccggcgtggtgaagcgacaagttggatggcttgaggactggtactaaaaggaaacgtgactggg

SEQ ID NO: 287947 - DNA, 89 bp, Homo sapiens
gccttgggaaccgctcgagcctaccaggcagagatcctacaagaatccaggatgatgatcccagattgccagcgcaggttggaagccgc

SEQ ID NO: 287948 - DNA, 100 bp, Homo sapiens
ttctatcagatgttccacgtaataatgctgcaggaggatgcattagcacaacaggcctttgaagaggctcggagaaggacacgcgaatttgaagatagag

SEQ ID NO: 287949 - DNA, 74 bp, Homo sapiens
atgtacctgaaggactacgagaggaaggttatcttggagaaggcagggaggtgttgcccatggcccccggggcc

SEQ ID NO: 287950 - DNA, 71 bp, Homo sapiens
cgactgcccagagtccgcggccggggcgcgggagatgatcacggaagccttggcccaaggtgggatgcaca

SEQ ID NO: 287951 - DNA, 100 bp, Homo sapiens
tgccaatgtccagatgcagctcgtggatacgaaggcgggatagccctggtcctttctccagatgttgacaatgcgtctctggcacgtcttgaccttgaac

SEQ ID NO: 287952 - DNA, 75 bp, Homo sapiens
cttttggttcaatctttattgaaatgtctggaggcggctggtggaaatccaattccccgcggagcatggctggaa

SEQ ID NO: 287953 - DNA, 75 bp, Homo sapiens
gatgaaggacgagtccagatgactgcagctgcttttgcaaaggtgtttggagaagagggattgaccctgaatctt

SEQ ID NO: 287954 - DNA, 100 bp, Homo sapiens
atgcagctgcggcggccttccgaccgggagctcagtgagcccatggaattccagtacctgccagatacaggcccccgatttctacgttgagatgaagtgg

SEQ ID NO: 287955 - DNA, 75 bp, Homo sapiens
cacaaatggttctgaagagtatggagcctacgtagattcataagatgcagatgttggacaaatttcccatggaag

SEQ ID NO: 287956 - DNA, 73 bp, Homo sapiens
gaggaacgaatgggacaagatcccgtccatgaatcagatgaacgactttcgaagtaaaatgcaatcaatattt

SEQ ID NO: 287957 - DNA, 82 bp, Homo sapiens
cgcaagggctgcggagccgcgggccggcgagcgcgtcgccaccatgatctggtggctggacccagagctgacctatggctgc

SEQ ID NO: 287958 - DNA, 90 bp, Homo sapiens
aatccatttacagcaaaattcagggcttcaaatataatgccatcttcaagatacgtctaccgcctctgccccttcaagcttgtctcgcag

SEQ ID NO: 287959 - DNA, 87 bp, Homo sapiens
ggattccaagtaactcttatttgggctcagaaacacttatgggattttctaagcacggagggttcacttccttaacatcacctgaag

SEQ ID NO: 287960 - DNA, 100 bp, Homo sapiens
actgattttatgggaaaattaagcagatgctccagtttgagaaacctggatctgcgatctgtttgtgagttaaacatgaagtttctggagagacagtggt

SEQ ID NO: 287961 - DNA, 51 bp, Homo sapiens
tcaaaagagcttctctccagagtagaaagtacagaacctgctaaggccatc

SEQ ID NO: 287962 - DNA, 75 bp, Homo sapiens
ggggtaatggggggtcagagtgccggaccccagcacacagaagccgagacgggtgttttgaatgctgtatcaaat

SEQ ID NO: 287963 - DNA, 51 bp, Homo sapiens
gacagagacaacaccgagtatgagaagtcctccacagcctgtgaatccccc

SEQ ID NO: 287964 - DNA, 82 bp, Homo sapiens
tcacgacgggccgagcctgccactatgatatcatcaagttgaatcgaaaggaagggaagaagcagaattttccaagactaaa

SEQ ID NO: 287965 - DNA, 90 bp, Homo sapiens
gttttagctctgctaaaaactccagcgcaatttgatgctgatgaacttcgtgctgccatgaagatcagccaaatggccgatgacacagtg

SEQ ID NO: 287966 - DNA, 101 bp, Homo sapiens
gggaaatggtcgtgctttcggtccccgccgaagtcaccgtgatcctgttagatatcgaagaatgacagcccatatcaaggcggtgtattctttttgacaat

SEQ ID NO: 287967 - DNA, 82 bp, Homo sapiens
ccgagaggagctggcgcgagacaaggtgagaagccctaccactgcaactgggacggctgcggctggaagtttgcgcgctcag

SEQ ID NO: 287968 - DNA, 97 bp, Homo sapiens
cctgtactgtcgggacacctttgaccacccgactctcatagaaaacgagagtatatgcgatgagtttgatctttaatctcatgaagtacgacagcta

SEQ ID NO: 287969 - DNA, 50 bp, Homo sapiens
cgcacccgctctaagtcagccaaaagtacaggtttgcagattccgccagc

SEQ ID NO: 287970 - DNA, 100 bp, Homo sapiens
ctgatgccacctcatcaagaagcatgatggacaggatgtttgccctcgaggaccgccgggagagcctgcccacctccccaccctggacgccgggcgcgtc

SEQ ID NO: 287971 - DNA, 100 bp, Homo sapiens
ttatctgccctatttgcagtggagtcttggaggagccagtacagcaacacagtcactcctggcggcaaaccaaacaaaaccagagtcatctggggaaaag

SEQ ID NO: 287972 - DNA, 95 bp, Homo sapiens
tggcggcggcgcttgggctctctaaaagatggcggcaaggcagcccaggcaaatgtaagaataggcgatgtggttctcagcattgatggaataaa

SEQ ID NO: 287973 - DNA, 75 bp, Homo sapiens
ctacacccaaaggctcccatggagagctcagttggccagtcagtgctgaaagatgtaagcaaagtgaagaagctg

SEQ ID NO: 287974 - DNA, 83 bp, Homo sapiens
gaactgtttcctgctgttgtgaagaatgtggccagtaaaaatattgagctctctatcaatatcagctcacatcattgaaaaga

SEQ ID NO: 287975 - DNA, 75 bp, Homo sapiens
cttacgtctgcggaagtgcagctgcctcagttcttagcgcaggttggagtgggtggagatcatcgaaccgcgcac

SEQ ID NO: 287976 - DNA, 100 bp, Homo sapiens
tggtgagacggagctatcggcgccgcggcaagagccaggcctttgaacatgctgccccctctgcctggaacactctccctcctgccttggtctggatgac

SEQ ID NO: 287977 - DNA, 100 bp, Homo sapiens
gagattcccctacctcactggacagatggcaaggatttatggagctgttgggcatgtggatgaagtggccatggctaccgggcaggtgttgttccagcgg

SEQ ID NO: 287978 - DNA, 75 bp, Homo sapiens
ctggccccgagatcagaatgccggtacgaatgtgaagaatcttttacgaccctaaacgtagacattagaaatcac

SEQ ID NO: 287979 - DNA, 100 bp, Homo sapiens
ccgcggtggcggcgctgccgcctgaagtgcgggcgcagctggcggagctggagctggagctctcggaggggtctggaacagaatctgacagtgatgaatc

SEQ ID NO: 287980 - DNA, 99 bp, Homo sapiens
tgaaggaggaatggcaggacgaagatcttcccagatgcagagcaaagcggcagtccccggacagggatgggctctgaccaggaggacagcaagcccatc

SEQ ID NO: 287981 - DNA, 90 bp, Homo sapiens
atgttcctggggttactgtaaatgggaaggacaggcagagctaaacaagggatccatatggctttggagacagtcgagattcaaggcgtg

SEQ ID NO: 287982 - DNA, 98 bp, Homo sapiens
gcccaatgttttgatgattggcagagacccactgtctgtgagaaagatcagtctaaagaaaaggagaagaaagtgaaaaaaacaattccttcctgggc

SEQ ID NO: 287983 - DNA, 101 bp, Homo sapiens
cttcatcaaaaatagtgatagctttgataacggctgcatttcaacaaggaaagatacctcctactccattctctgctcctcctcctgcaggggcgatgata

SEQ ID NO: 287984 - DNA, 100 bp, Homo sapiens
gaagcaagaaggccctggacacagcaatatctctgggctttcacagggtaagaaggtggatggctctgtaaatgcctatgccataaatgtctctcagaag

SEQ ID NO: 287985 - DNA, 51 bp, Homo sapiens
ctgcccctgagatccacccaagttgtgggccttctcttcccaactcccagc

SEQ ID NO: 287986 - DNA, 92 bp, Homo sapiens
aacatccgagtgcccaacagacattttgctgctgctacaaagaaaatgtttataggaggccttagctgggacactacaaagaaagatctgaa

SEQ ID NO: 287987 - DNA, 101 bp, Homo sapiens
aacttatcagagattgagaatgtccatggatttgtttctcattctcatatttcaccaataaaggagagctggaggtgtttcagaaagatggggaacgaaaa

SEQ ID NO: 287988 - DNA, 82 bp, Homo sapiens
gcgccgagtcggagggggcgaagattgacgccagtaagaacgaggaggatgaaggtgctcatcatcactgtaggggaccttt

SEQ ID NO: 287989 - DNA, 75 bp, Homo sapiens
ctgaaaacctttgggcttcatggagtcgtcttagatgttgattcataagatgacctccttaaaagaagatgtgcg

SEQ ID NO: 287990 - DNA, 89 bp, Homo sapiens
agacatccaaatctggtattcaacaaataattgagtgctttcgatcagcatcatattctcgaaaagataaagaccaaaggaagcaacag

SEQ ID NO: 287991 - DNA, 98 bp, Homo sapiens
cgacgcgcagcagctgcagcagctcaagcacctggagtccttcaccagatttgactagaacagtaagcttttctgtttatctgaaaagaagttataca

SEQ ID NO: 287992 - DNA, 100 bp, Homo sapiens
atctcccatcattttgcatgagaataatgaccttaacagcaggttgggatgaacttgagtgccatcgcgtttataatttcttatgcgaactgactaatct

SEQ ID NO: 287993 - DNA, 82 bp, Homo sapiens
ttcggcagtccacccaccgccgccgcctcccagtgtctcgactgcattgtgagagtgaatctttcaagatggatctaatctt

SEQ ID NO: 287994 - DNA, 83 bp, Homo sapiens
ccgccttggcctcggggtctccctacaccaacggccttagcagtaggaggactaggctccattataagagttcttacagcaag

SEQ ID NO: 287995 - DNA, 107 bp, Homo sapiens
agcctttccacgctatcctcaggctcatctgttttctgaagatgggaaaagccctttggacaagattagaaatgatatttgccaaatttgatgaagtgcaaagttca

SEQ ID NO: 287996 - DNA, 100 bp, Homo sapiens
cctacagcagcttcggcggcggcagaggtgaccgaagctggctttggtgctgacatcggaatggagaaattcttcaacatcaagtgccgagcttccggct

SEQ ID NO: 287997 - DNA, 75 bp, Homo sapiens
aggagccatagtacctacagcagcactccagggctgtggtggaggctgtgcatcgacttgacctcatcctttgca

SEQ ID NO: 287998 - DNA, 100 bp, Homo sapiens
gagcgtgaccgagagcgcgaatatcgtcatcgttagaaggaagccttggaagatcgtttggaaaggattaatcgagaactgggttcagttcgcatgacgc

SEQ ID NO: 287999 - DNA, 90 bp, Homo sapiens
ccagagcctcagtttgtgcaggacaccgacatggaacagggactcactgggggaggacggagtcccagagaactacaactcccatcaagc

SEQ ID NO: 288000 - DNA, 76 bp, Homo sapiens
tgacagtcaagtggaaacaactgtctgaatgtatgacaacatgtccacaatggtgtacataaaggaagacaagttg

SEQ ID NO: 288001 - DNA, 75 bp, Homo sapiens
ccgccgacgcctcagccgcttggggcccgcacggaccctctacttcagtaaggggcctggataccaagaagtgac

SEQ ID NO: 288002 - DNA, 50 bp, Homo sapiens
atccagacggctgcccttcaagtaccaatgactcctgaggactacgaaaa

SEQ ID NO: 288003 - DNA, 83 bp, Homo sapiens
tgatgccccacttggtgaatggagatgcagctcagcaggccagaagcggactcctagaagaggggagcagcaaggatggaatg

SEQ ID NO: 288004 - DNA, 149 bp, Homo sapiens
gagaaaaaaagaaacataaagtaatgaatgagatcaagaaagagaatggagaagtaaagattttgctgaaaagcatgcccaagagaatcgtaaatgcaaaaattgcttgccttgacttcagcctgcaaaaaacaaaaatgaagcttggt

SEQ ID NO: 288005 - DNA, 74 bp, Homo sapiens
tgaagtatccagcgctcattgggaatttagttaagtgcaagaagaaacacacgctgctgtgccccgactttgcc

SEQ ID NO: 288006 - DNA, 74 bp, Homo sapiens
atttcttggtgattctgcaaacctaagcattttgtctgggcttcatgaacagttgactgagtcagaacaggctg

SEQ ID NO: 288007 - DNA, 83 bp, Homo sapiens
caacatgcaagatggcggcccatcaccggcagaacacagcagggcggaggaaagtgcaggatctatcttgggatcccatggct

SEQ ID NO: 288008 - DNA, 51 bp, Homo sapiens
ccttcgaggagttctgcctgccgacaaagaagtatgctgatgtgatcatcc

SEQ ID NO: 288009 - DNA, 82 bp, Homo sapiens
catccacactggacgcgagctgcgctgcaaggactgggaggtgctggtcctagggaagctcaagtgggacctggctgctgtg

SEQ ID NO: 288010 - DNA, 100 bp, Homo sapiens
ccgcgttccatgcgcacagggacaggggtgattttcttccacccccacctccacctctagatgattccagtgcccttccatctatctctggaaactttcc

SEQ ID NO: 288011 - DNA, 82 bp, Homo sapiens
cccgcggccgcaccttcccgccttctcaggccaagtcctgtatctgccatgtctgtggcgtccacctcaacaggctgcattc

SEQ ID NO: 288012 - DNA, 100 bp, Homo sapiens
tcaaagactccacaatgagaaggtatacaatttccagtgccctcaatttgatgcaaatctgcaaaggaaaggccaaagaggtgctgaaaaaatatttgga

SEQ ID NO: 288013 - DNA, 96 bp, Homo sapiens
gtcctaccatgtcagccttcccagtagctgggaccacagaaaactgtcgctgaaaagcaggagaagagaaatcaggatcgcttgaggaggagagag

SEQ ID NO: 288014 - DNA, 100 bp, Homo sapiens
acagttaactgcagctcaacagcagcaatatgcattagcagcagctcagcagccacatatagttgacaatgacacaccagttactctgggagtatatctt

SEQ ID NO: 288015 - DNA, 74 bp, Homo sapiens
cctcgcttcctgctcgacctgcggcagtacttgggatgccctgcacagcgtaaagaagagacttttaagaaata

SEQ ID NO: 288016 - DNA, 76 bp, Homo sapiens
aggaaaaacagccaccttcagtatctcagtcctccagtgtttggatattcagcactgccagtgaaagatgtagaag

SEQ ID NO: 288017 - DNA, 75 bp, Homo sapiens
cagaaacatgctgagcctttgacagagtacatccaagccattatgatgatggaggaatctgttcaacatgttgtc

SEQ ID NO: 288018 - DNA, 88 bp, Homo sapiens
cgccgccaagagtgagcgagcggacccgcgatggccaccatcatagcgaattgcatcgtcctcgcactggagcagcatctgcctgatg

SEQ ID NO: 288019 - DNA, 75 bp, Homo sapiens
gctgcccagatggtggctcccggagtccaggtgtcccaccggccttccgggttccagcgccaggcctggtgcctg

SEQ ID NO: 288020 - DNA, 75 bp, Homo sapiens
agcatgctgtgctcacagcccgccggcacggcagtgagattagtgaaatcaccagcatcaagaaggaggatgtca

SEQ ID NO: 288021 - DNA, 75 bp, Homo sapiens
aggaaagcagtggaaacaatgcccaggatctatttgtgatgactatatggcaactctttgctgtcctcattgtac

SEQ ID NO: 288022 - DNA, 90 bp, Homo sapiens
agcggctcccagtccctgaaagcattaccgggttcgctaggctcacagtttgacaagtatgcgcccaagctggacagcccctacttccga

SEQ ID NO: 288023 - DNA, 100 bp, Homo sapiens
tttcattgatctagaagagtatattggctccctgactggcagtcctcacctttccgagctgtctgtgaactcgcaggggggagtggcccctgccaacgtg

SEQ ID NO: 288024 - DNA, 75 bp, Homo sapiens
caactcccggggattttcctaagggtcttgtagccagagataacactgctctccactcccttcctagactttctt

SEQ ID NO: 288025 - DNA, 73 bp, Homo sapiens
tcagccctggacctggcagatccttcagcaaaagctgtccttacaggtcgtgtcacgtggaacctcttaatct

SEQ ID NO: 288026 - DNA, 75 bp, Homo sapiens
tggatgttcttcttcgagtatttgtagaagggaaaggccgagggggacggcaagatgcacatcaccctctgtgac

SEQ ID NO: 288027 - DNA, 100 bp, Homo sapiens
ggcagccttttccccatggcagcccctgttctgcggctccagcaggagaaccatgagctccggcgaggcctggcagcccgaggagccgagtgggaggccc

SEQ ID NO: 288028 - DNA, 97 bp, Homo sapiens
tgcaattagccattgaggagagagatgaagcaattgcacgagccaagcatatggaaatgtctctaaaagtgtttcagattcagagatgtgcaaccga

SEQ ID NO: 288029 - DNA, 75 bp, Homo sapiens
attttggatatctgtgataaagttggtcagtctcgcactgggtatgattacgaggaggtggaagctgagggcgca

SEQ ID NO: 288030 - DNA, 100 bp, Homo sapiens
cgggaggagccgcagcgccgggcgaccccgcccgggcctcggcaattctgtggtgttcttggtcacacatttatggagtttctgaagggcagtggagatt

SEQ ID NO: 288031 - DNA, 96 bp, Homo sapiens
acatagctttgcgttcaagtttagagtggaattcgtgtgttgtacagacccttaaggtgactggctactagggaaataaatgaatgtggaattgag

SEQ ID NO: 288032 - DNA, 98 bp, Homo sapiens
cattcagatgataatggacagaatcatctagaaggacaaatgaacttcaatgcagattctagccaacataaaggaggaagagttcatcgattggtgga

SEQ ID NO: 288033 - DNA, 122 bp, Homo sapiens
ctcccctcccaggcgccgccgcagccggagcggctcccgggccctgggccgccgccggccagagcccataggcagcatgtcatccatggaagtgaacgtggacatgctggagcagatggacc

SEQ ID NO: 288034 - DNA, 96 bp, Homo sapiens
tctggaaccgggatggcgacgtctacactgagtcggaggcgaaggtatttggcaccaatgtgatggtgacagtggccaagtccttcgaggcaccaa

SEQ ID NO: 288035 - DNA, 89 bp, Homo sapiens
ctacattagatggaaccccaggatcaagcaacaagctctaagggatggaaataagctggcacagatggaagaggctccacttttcccag

SEQ ID NO: 288036 - DNA, 75 bp, Homo sapiens
taagcactattattcatgaggcaaatgaggaacagggcaatagtatgatgaaccttcaacaactagtactgcttc

SEQ ID NO: 288037 - DNA, 75 bp, Homo sapiens
aggaggaagtaatgaccaaattaagtcattttcgagaattcatgctccttggggtgaccctcttgaagaagaagt

SEQ ID NO: 288038 - DNA, 90 bp, Homo sapiens
tatatcttcaaagcacataaaaacactttctgaagctcatgaagactgtgtaaataatatcaggaccgccgggagagcctgcccacctcc

SEQ ID NO: 288039 - DNA, 75 bp, Homo sapiens
gaagatggcgtctaccagccggccatttgtgtaggaccagaaaacatgcagataatgtatccagctatatttgac

SEQ ID NO: 288040 - DNA, 83 bp, Homo sapiens
ggagacaagtgtcacagcctggttggaaaacccaagatatttatcattcagatgacagacaaccttctgtgccttcatcaagc

SEQ ID NO: 288041 - DNA, 90 bp, Homo sapiens
ccgtggcctcgctcgtctgcctgctgcgccacggcggccggacggtggagaacatgagaacccttaggagaaatcttgagagtggacagc

SEQ ID NO: 288042 - DNA, 76 bp, Homo sapiens
cttcatggagtcgtcttagatgttgattcagtttgttttggaacagtacaatgcactctcctggctaacctgtgac

SEQ ID NO: 288043 - DNA, 100 bp, Homo sapiens
gtttgtttctgctgattacacccgtgcccaggagcttgacgccttagataacagccatcctattgaacttaccagaagtacctttactggttgatgtgcc

SEQ ID NO: 288044 - DNA, 100 bp, Homo sapiens
cggaggtgcggagagactccttgggggtcgagcacataacggggttcgggtgtctcgtgtgtgaacatcacagaccccaagactgcttctgagacagaaa

SEQ ID NO: 288045 - DNA, 100 bp, Homo sapiens
acttcaagtagtggaaggagtacagggaagtctataagctttgcaacagaattacagagtatgatgtaagaatgattgatgttggctgatattggagtgc

SEQ ID NO: 288046 - DNA, 75 bp, Homo sapiens
atccattgggatatctggagagatactgagccttcataagggttgactacctcagatttgctgcactcattgtgg

SEQ ID NO: 288047 - DNA, 100 bp, Homo sapiens
gctttgactgctttatgaccatattaatgcagatgaggcgttctttgagctaacacatgagtttctacaaatattggagaaaacgcctaataggttgaag

SEQ ID NO: 288048 - DNA, 74 bp, Homo sapiens
cctggaagtgcacggtgtgcttcgaggacaggttaaccccaaagattggctttccttggagtgaaatcaggaac

SEQ ID NO: 288049 - DNA, 75 bp, Homo sapiens
aactacagatactttgaagtagaagaagctgatggttggttaaatctagacttaagaggctctgctcctcagaag

SEQ ID NO: 288050 - DNA, 75 bp, Homo sapiens
ctgaaagctgagctaggaattcccttggaagaggcttcttctcatatcggtaattccactcaggccactgtgagg

SEQ ID NO: 288051 - DNA, 100 bp, Homo sapiens
ggctcacttttcttcagctccttctcatctcgtccttgccaagaggtaactcgggaccaaatgaagatgtttatacagcaggaatttaagaaagttcaga

SEQ ID NO: 288052 - DNA, 83 bp, Homo sapiens
gtggagatcgtcccgcgcctgccgggtcctcactgagcagcgagtcgtcccccgtgtcctctccggccaccaaccacagctcc

SEQ ID NO: 288053 - DNA, 75 bp, Homo sapiens
gctcttacgtatttgtgtgacttgactcttcaaacacaaagattcatgatgttgctatcaaaagttgagaaattg

SEQ ID NO: 288054 - DNA, 65 bp, Homo sapiens
ctgccagtccgcagagcccggcgacgaagagctggattctgatggcaccattactatagaggagc

SEQ ID NO: 288055 - DNA, 89 bp, Homo sapiens
tcaaaggtgcctaccaaggtcaaaggctatgacaacctctttgctatggttcctttgcccaaagactcaacaggtgcagcagatccccc

SEQ ID NO: 288056 - DNA, 97 bp, Homo sapiens
agcgaggaaaggtgtgctgtgcctgaggccagataaacattgacgatcttgaggatgaccctgtggtgaacggggagaggtctggctgtgcgctcac

SEQ ID NO: 288057 - DNA, 73 bp, Homo sapiens
gaatttaacattagaaagacatcaactcactgaagtagctacgtggtgaacatgggtctgattgacaaactgt

SEQ ID NO: 288058 - DNA, 98 bp, Homo sapiens
gtgtgaagacgctaggctggacgaagcagaaaggcgggtgtcactggggacgttctgagggtgctgggtaggccaggtttcagcatcgcagacaagaa

SEQ ID NO: 288059 - DNA, 100 bp, Homo sapiens
cggcacagctgcagggcattgaggtatccatcatcccacgtggcaaaggactaggttatgctcagtatttaccaaaagaacaatacctctataccaaaga

SEQ ID NO: 288060 - DNA, 100 bp, Homo sapiens
tggcgaatttgaaatcattgatgaccacagagctgggaaaattgttgtgaacctcacaggcaggctaaacaagggacactccggacgcaggcccggccag

SEQ ID NO: 288061 - DNA, 76 bp, Homo sapiens
ctctcatctcagcctccaaaagtgctggcattacaggtgacagagctgaatgaacctctctccaatgaagatcgaa

SEQ ID NO: 288062 - DNA, 83 bp, Homo sapiens
tctcgtcggcggcgccctgcaccgcgcctcgcaaaccttatgccagcctggaccatcttggaggcagtgtaggatcatggaag

SEQ ID NO: 288063 - DNA, 97 bp, Homo sapiens
tccagccgccggattccagcccggccggggcctgcgggcgcccagagccgcgccgtccgcgccgcccgttctggtgtcatggagaaactccagctgg

SEQ ID NO: 288064 - DNA, 82 bp, Homo sapiens
gcgggagaggtaaacagaacaccaggacatcccagagtctgggaaatggtcccttcaccgatgttgtcaccaccaacctaaa

SEQ ID NO: 288065 - DNA, 50 bp, Homo sapiens
ctccggggaggtcacctgacgaggaggtgcctcaggaaccctgaagctgg

SEQ ID NO: 288066 - DNA, 75 bp, Homo sapiens
ctctaaggccctggagccccagctgtcagcctatgtgcttcccaagctgtatgtgaagctacattactgtgtgag

SEQ ID NO: 288067 - DNA, 100 bp, Homo sapiens
acgctatatcaggatgagataactgaaagggaagcagaaccatactatgagggaaaacccctgatcctaaaatgaatgctaggacttacatggatgtaat

SEQ ID NO: 288068 - DNA, 75 bp, Homo sapiens
acatccaggagagaatgctgacagtcctgcagcgttgacagaaggctacgttggggccctgcacgagaatagaca

SEQ ID NO: 288069 - DNA, 82 bp, Homo sapiens
gcagtcagaaggggaacggatctgtgtgcccacagctcctggagccccacaggaagctcttcgtgggcggtcttgactggag

SEQ ID NO: 288070 - DNA, 115 bp, Homo sapiens
gagcagctggcccggctgggcccggggcgcgcagctgcccgccggggcggggtgcttgaagtttctgggaagtcggcatccaaccctggtgcttcccttggtgccagagcttctg

SEQ ID NO: 288071 - DNA, 87 bp, Homo sapiens
gataacaagttttgtgcagattgccagtctaaaggacccccgcagcaaacacaagtttaagatccacacgtactccagccccacgtt

SEQ ID NO: 288072 - DNA, 83 bp, Homo sapiens
tggacgtggttggtgattggcaggatcctggtatccgctaacaggtcacgcatgaagggagcaccgtggagaagacagtggcc

SEQ ID NO: 288073 - DNA, 78 bp, Homo sapiens
aggccctggacacagcaatatctctgggctttcacagatgtaggtgcaaaaaactacagacatctctgtgctgtttat

SEQ ID NO: 288074 - DNA, 50 bp, Homo sapiens
ctccgggaaaactacactggccaggctgacaaacgggctcatcataatgc

SEQ ID NO: 288075 - DNA, 87 bp, Homo sapiens
gagataaaatccattgctgctaagtactccggttcccagcttctgcaaaagttgctctaggtcgtaaccagcctttgaaaaaggaga

SEQ ID NO: 288076 - DNA, 85 bp, Homo sapiens
cggcgcccagtggcgtccacctgctcgtccgcagagagttgtggaaagtaaaaatgtagccctaccaaaaggaactattgtactg

SEQ ID NO: 288077 - DNA, 100 bp, Homo sapiens
agcgcgtgcccgcgaggagccgccgcgcgcccgcgccctccgcgcgacgccaggcccagggccccggccagtgcccagccccgctgggagacccggccag

SEQ ID NO: 288078 - DNA, 75 bp, Homo sapiens
ataggctgcgctaccggaatgtcatccagcgagtgattaggatcgagatttagagagacttcgtagaaaatggct

SEQ ID NO: 288079 - DNA, 75 bp, Homo sapiens
ctctccccagaaatccaacttctcaagttttcggctttgtgagaaaccttaccatcaaacacgatggccagcaac

SEQ ID NO: 288080 - DNA, 75 bp, Homo sapiens
ggtggatccggatcgcatggaagacgcagcctggccgcgctctcccagggtccagtaccagcacctctcaccagt

SEQ ID NO: 288081 - DNA, 98 bp, Homo sapiens
ggactcacggctgcttggagcgtccgccatgaggagaagtgactacctgtttaagctgcttttgattggcgactcaggcgtgggcaagtcatgcctgc

SEQ ID NO: 288082 - DNA, 100 bp, Homo sapiens
gtttgagccaatagtttctcttcctgagcaagaaattaaaacactggaagaagatgaagaggaactttttaaaatctcaaaagccaaaagtctctgagaa

SEQ ID NO: 288083 - DNA, 90 bp, Homo sapiens
acctcatcccctggatgggggaccacaagatcctcatcgacaggagagcctgacaaggagctgaatcctaagaagaagatttgggagcag

SEQ ID NO: 288084 - DNA, 100 bp, Homo sapiens
cggaaccacagccaccttccaccgctgcgccaagagtgcagcagctgccccgagccccgtgcttggcaacattccccccaacgatgggatgccgggaggc

SEQ ID NO: 288085 - DNA, 75 bp, Homo sapiens
ggatttcttaaaggatagccaattgcagtttgaggctagcaaagatggtcgacctttgccagcaagggataaacg

SEQ ID NO: 288086 - DNA, 52 bp, Homo sapiens
gcagccatgatctccttaacggacacgcagaatacactgcctctaggactgg

SEQ ID NO: 288087 - DNA, 75 bp, Homo sapiens
cactgcccaaagcggaagactgattgaaaagaggtaagaaggtgttttaccctgtggtgttcagtctttacaatc

SEQ ID NO: 288088 - DNA, 50 bp, Homo sapiens
agaaggttggaggcaagctgctgtccaggccacggaaaggtatgatatat

SEQ ID NO: 288089 - DNA, 100 bp, Homo sapiens
ccagggactacaggttcccgccgtgtccctttatccttcacggaagaaagtgcccgtaaaggatctcccaccttttgtaatctatgccagcaattatgac

SEQ ID NO: 288090 - DNA, 80 bp, Homo sapiens
cgtgcttgccctgtcatcccacctgagaaccatgctcaccgaccctgattttttatcaagcagaaatgcatcgaacaacg

SEQ ID NO: 288091 - DNA, 101 bp, Homo sapiens
tgactgatgccatccaagataagaagaacttccgccggcgagagggtacgagtgcttccatatccatttacccaccattggcaatttgaaaggaccatcca

SEQ ID NO: 288092 - DNA, 75 bp, Homo sapiens
ccgggagcacttcgagaagctggagaaggccctgccctgggagaagccctgccacacgtcgtgcccacgctgagg

SEQ ID NO: 288093 - DNA, 74 bp, Homo sapiens
acatcctggccgccacgctggacaagtggttcagtcaggtggcaaaaacattgaacttgctgtcatgaggcgag

SEQ ID NO: 288094 - DNA, 50 bp, Homo sapiens
cgcgcggaggcggaggcttgggggactgttgacatttagggatgtggcca

SEQ ID NO: 288095 - DNA, 80 bp, Homo sapiens
ctttacaaggtagccgtttggcgtcgtgagataacgaaggaggcccaacttcattcaataaggagcctgacggatttatc

SEQ ID NO: 288096 - DNA, 100 bp, Homo sapiens
acaagcttacgtctctgctcttcagtacaatcctgaatcccagtcagaagttccagcctgccactgttctctgatgccatgccagcaccaactcaactgt

SEQ ID NO: 288097 - DNA, 74 bp, Homo sapiens
tgatcctcggcgtccgggcactttgggcggcgggaccttgcggtgaagagcacccaccaaggctccggatgtgt

SEQ ID NO: 288098 - DNA, 85 bp, Homo sapiens
acctgatgcccagagtcaaggtacaatcagttgaaactgttgaagggtgtacacatgagctttatcttcaagccaggatgaaggg

SEQ ID NO: 288099 - DNA, 104 bp, Homo sapiens
ggctcctcgagcaaaaatgaaccagcagcgtgggaggcgttttaggttgggtatctacagccattggttgctgttcaggtcagctttgctcctaacaacactgg

SEQ ID NO: 288100 - DNA, 78 bp, Homo sapiens
ttcaaccaaaatctcttgtacggtctacagcagctctgagttcctggccgtccagcccactcctaccttcgctgaaag

SEQ ID NO: 288101 - DNA, 96 bp, Homo sapiens
ggcggatgccctgcagtacctgcagaaggtctctggagacatcttcagcaggaaactggccaagaagcggaaagagaccatgagcagcacccgaca

SEQ ID NO: 288102 - DNA, 83 bp, Homo sapiens
ggtgcggctgcacgtctcgcggatcatgcttttccaacatggctagatccatcagaaactgaagccgtggagaacgctctcgg

SEQ ID NO: 288103 - DNA, 78 bp, Homo sapiens
ccgagattcgcttcttctcctttcctgcccacgcccagccacacagtcactgatggagtctcgctctgttgcccaggc

SEQ ID NO: 288104 - DNA, 97 bp, Homo sapiens
taactttggatgaatggaaaaagaaactggaatctcccaacagagaaattattattttacacaatccaaaggaattgaatgatctggcacgggaccc

SEQ ID NO: 288105 - DNA, 112 bp, Homo sapiens
ctcaaaccacttctcagacaagttccatcccacctttgagtcagattgtctccagctttaagaccacgacatcgagagctgcctgccagctcgtgaaggagtacatcggcca

SEQ ID NO: 288106 - DNA, 100 bp, Homo sapiens
aaggatcattggtttatgcaggaattaaatcaattgtaaagtcatcgttgggatttaagtgccctgtatgctcaaaatttgtatcctcagatgaaatgga

SEQ ID NO: 288107 - DNA, 110 bp, Homo sapiens
caccttgggaagagaaagaaaatgccgaaggcactcagacaggaagatgaagtcctcagtacattctgaagaagatgattttgttccagagctacatagaaatgtacacc

SEQ ID NO: 288108 - DNA, 83 bp, Homo sapiens
agatctgggtgcccgtggaccacaggccctcgttgcccagattttggtgccctggttgtcagatgttggaaagcagtaggacg

SEQ ID NO: 288109 - DNA, 74 bp, Homo sapiens
agggtccctgaagagggaagacacgcggaaacagctgacaaaaagtttgcccggaagccaccccgattttcctg

SEQ ID NO: 288110 - DNA, 82 bp, Homo sapiens
ttcctggcatgtcagagaacccctccgtctatgtgcctgacttgaaactgcatctgcagagcactgattatggtaacttcct

SEQ ID NO: 288111 - DNA, 82 bp, Homo sapiens
acgaggcaaggagctaaagcagcgtgcgttcagccctgggtcctgtgcctcctgattgctgagtgttcacctggaccttctg

SEQ ID NO: 288112 - DNA, 99 bp, Homo sapiens
ctgcgcgaagctggccaaagcctgcccagacggctcacctgtgcgggatggaacaaaaggcagactcagtgggatcctcctacttgggaaagcccagga

SEQ ID NO: 288113 - DNA, 100 bp, Homo sapiens
gcgcatgcaacagaagtatgaggccagccgggaggacatctacaagcggtggttggatttcatcccttactggtctcaaccaaaatattcctgttggaat

SEQ ID NO: 288114 - DNA, 99 bp, Homo sapiens
ctgcttgcccagactccaatctgtgactgcttgggctttgacgaccagagccccgctgaaaagaagggactgcgctgtcagaaccccgcctgcatggac

SEQ ID NO: 288115 - DNA, 82 bp, Homo sapiens
gcggggctgaggcggccgcggggcccgagcgcagaggttgacggatatattcagacgttacgacacggatcaggacggctgg

SEQ ID NO: 288116 - DNA, 87 bp, Homo sapiens
aggaccttgcagccgagcagaacacgcagatcacttcaattgcaatcggtagcgctggtatatggtcaaatgaatgaaccacctggt

SEQ ID NO: 288117 - DNA, 100 bp, Homo sapiens
gaaaccaataagaaatacagcaatgtttcaatattacttacagaacagaaaccagactgtgatgactgggagagcgggctgaatgcaatggagtgtgcat

SEQ ID NO: 288118 - DNA, 74 bp, Homo sapiens
tgtgccggggggaaaggggcagcatgatggtctgagatggaaaatcaggaaaatgtttccaacctggtgattga

SEQ ID NO: 288119 - DNA, 100 bp, Homo sapiens
cagtgaccccgctttcctcacgcccagcatccagtcagaagtgtcctttgagggagcctatgggaacctcaagcggctgtatgacaaggcagccaaaatg

SEQ ID NO: 288120 - DNA, 100 bp, Homo sapiens
atgtttctggacgcggatttttggcctcatactctgttatagataaacaagataaagatgacctctccccaactgctgaggtttgggatgtagaccaggg

SEQ ID NO: 288121 - DNA, 89 bp, Homo sapiens
cgggaaatgggggtggaagggcctgcggtgtcgagatggagcagctatcagatgaagaaattgatcatggtgctgaagaagacagtgac

SEQ ID NO: 288122 - DNA, 95 bp, Homo sapiens
aatgaagctgaggcgtgagcaatggttgcagagttttttattggcacctcagtctcaacattttcttttcggattcatgaggaaagagaaatcct

SEQ ID NO: 288123 - DNA, 82 bp, Homo sapiens
tgcggacatcggcttctgcctggtgctctgcgtcctcatcgggcttatgttcgagggcgccctgcgtccggcagaggaggcg

SEQ ID NO: 288124 - DNA, 100 bp, Homo sapiens
gcagcgacaacatggaggccgtgaagaccttcaatagcgaggctcttcgtcagattgggcagaggacgataagcactgcttcccgcaggcattttaaaaa

SEQ ID NO: 288125 - DNA, 103 bp, Homo sapiens
ccgctatggatgatcgagaggatctggtgtaccaggcgaagctggccgagcaggctgagcgatacgacggttctggcctataggaacaagacattttcagtaa

SEQ ID NO: 288126 - DNA, 100 bp, Homo sapiens
tgtgaatgctgtgccaccaagctctgcctgcaatgtgtccaaggaattactggaagctaatagaaaatgcaacatggcagcagcaatggaaacagaacag

SEQ ID NO: 288127 - DNA, 75 bp, Homo sapiens
aaaaagtatgatggattacagcaacagttgtcttcagtagaaaggggctgcttccccaagcccacagtctgtaag

SEQ ID NO: 288128 - DNA, 96 bp, Homo sapiens
cctcagctggatgcactacaaccagacagaggagaaaagccatactcctgtggcatttgtggcaaatccttctctgactccagtgccaaaaggaga

SEQ ID NO: 288129 - DNA, 100 bp, Homo sapiens
tgtgtctggtgtgggtttcccaagcaaggttccttggaagaagatgtctgcagagtttttatgaagaacagtttgtcagcatcttcatttatgcaggaca

SEQ ID NO: 288130 - DNA, 90 bp, Homo sapiens
ggagacgcagccgcccgtggcgcttaagaaagaaggtggaagaagagcccgaagaagaacctgaagagacagcagaagacacaacagaag

SEQ ID NO: 288131 - DNA, 50 bp, Homo sapiens
acagatgaggcagagcccagcaagttttttgctccactcaagcctgttag

SEQ ID NO: 288132 - DNA, 100 bp, Homo sapiens
catctgtgatgtgggcaaccgggaggaggtgtaccagacggccaaggccgtccgggagaaggcggcttacagggagaacacagttggcctccaccgtttc

SEQ ID NO: 288133 - DNA, 90 bp, Homo sapiens
ggagagcatcgactggaccaagatcgagcccagcgtcaacttcctcaagtcgcccaaagtgtacgtgatagaacgggaaaggaagatgga

SEQ ID NO: 288134 - DNA, 74 bp, Homo sapiens
acgcggcagcccgtggagtcggctgagggaaaagcgaggcaaggcaggcggtgaactgaattcaaagctgcaag

SEQ ID NO: 288135 - DNA, 89 bp, Homo sapiens
ctcctccgaggtggcgcggcacctggtgcaatggatgagcttcatagtctggatccaagaaggcaagagttattggaagctagatttac

SEQ ID NO: 288136 - DNA, 97 bp, Homo sapiens
tggccaacatccctctcctcctctaccctcaggacggcccccgcagcaagccccagccaaaggtccacatcacgctgagcacccatgagtgtgccgg

SEQ ID NO: 288137 - DNA, 100 bp, Homo sapiens
cagctaagacgccaggacccactggaagcctagaaatggccaggagtggtggctcacacctgtaatcccagctctgggaggccaaggccagtggattgct

SEQ ID NO: 288138 - DNA, 50 bp, Homo sapiens
ctacatgggcagaccaactcagagttcatgatcaagtgttgcccacacca

SEQ ID NO: 288139 - DNA, 75 bp, Homo sapiens
ttgttttataaactgcctggccgaatcagccttttcacgctcaagagctctcgatgttctgaagtatgaggaagt

SEQ ID NO: 288140 - DNA, 75 bp, Homo sapiens
tctcgctcggctgcgggaaatcgggctgaagcgactgagtccgcgatggaggcctgttgattgcatactgtagaa

SEQ ID NO: 288141 - DNA, 75 bp, Homo sapiens
tgtcccggaactcatcggtcaccagcgaggcggaaattcaactactgaggaggttacggcacaaaaatgtcatcc

SEQ ID NO: 288142 - DNA, 82 bp, Homo sapiens
tgcgtaactttctcccttgatccgggagtctttccactggaacatggtccaagacaattcctgggaaagttcagttcttctc

SEQ ID NO: 288143 - DNA, 88 bp, Homo sapiens
acctaacggacaagggctgcaatagatgaacatgatgccatcatttaaggaaatccatggaccaaggatggaatacagattgatgctg

SEQ ID NO: 288144 - DNA, 51 bp, Homo sapiens
cggaaacaaagttattttgctcgacatatctgaagagatggattaagaatg

SEQ ID NO: 288145 - DNA, 100 bp, Homo sapiens
taagacgccaggtaccccggaagcctagaaatgctccgccgcatgcaagagatgattgcaaggatgcaggcgcagatgcagatgcagatgcagggcgggg

SEQ ID NO: 288146 - DNA, 90 bp, Homo sapiens
aagaagccagccctgtgcaagagctaccagaagctggtctctgaggtctggcataagaaacgaaatgtgcctgtggctgccttgcctgta

SEQ ID NO: 288147 - DNA, 82 bp, Homo sapiens
gcctgggtggttgttggcgtgtccctgcagcgaaggatcctggttggccaccagcttgggctccccacggagggcagcaagt

SEQ ID NO: 288148 - DNA, 101 bp, Homo sapiens
ccggggatgcccgggcggctcggagcgcgggcagcggcagccgtgcggtgagggcggtggcgcccgcgggacctgcgaaacatgggctgaggcttcatctt

SEQ ID NO: 288149 - DNA, 50 bp, Homo sapiens
gcctgcgccggcatcctccgagggtgtgctgatctgcaaaccctggacac

SEQ ID NO: 288150 - DNA, 100 bp, Homo sapiens
taagtgaaaaaggggaagaaagagaatattgttcagttgattatgccagccagatgcaggtacaggtttgcagattccgccagcagcacagcaagctcta

SEQ ID NO: 288151 - DNA, 75 bp, Homo sapiens
ggggagcctgccagctgagcatggaggaatctttggccatctatgaaacaatttccatgggaaaatgacttgttt

SEQ ID NO: 288152 - DNA, 96 bp, Homo sapiens
acgtccagggccgcgtctacaacttcctcgagcgtcccaccggctggaaatgcttcgtttaccacttcgccgttactatactggcaattgctggag

SEQ ID NO: 288153 - DNA, 82 bp, Homo sapiens
cgctgccgtcgccgccgccaccatgcccaagagaaagggaagagtttcaccctgaccatcactgtgttcaccaaccccaccc

SEQ ID NO: 288154 - DNA, 100 bp, Homo sapiens
ttacaccttaactccatatattcatccacatccaaaagattgggttggtatattcaaggtgttggagaaaatttgacagatccatctgttataaaacctg

SEQ ID NO: 288155 - DNA, 87 bp, Homo sapiens
atccgaaaatctgggctaagtgctggcaagagcgatgtctactacttcagactggattatggacagaacttggaaatattgagaata

SEQ ID NO: 288156 - DNA, 100 bp, Homo sapiens
gataaagataaggaacagtggaaagaggttcacaagcaggtggttgagagagttgatctctctaatgtattagatcttcatgcctttgatagtctctctg

SEQ ID NO: 288157 - DNA, 96 bp, Homo sapiens
agaggggccactgctgggccctgaggctgcaccaagtggcgaaggagccggctccaaggagcttactccacgggaacagcctctagataatctgag

SEQ ID NO: 288158 - DNA, 95 bp, Homo sapiens
gttgagtggaacgggtcgtggagcgacagtggtattgttggaaatagtgcaactgcattattgactaccattgaagaaatgcatttgctaagcaa

SEQ ID NO: 288159 - DNA, 90 bp, Homo sapiens
tcgaagttacagagatcaaacaattgtagatcccttcagttcaaaacataatgtgattggtgaattatgtaacctcattacgctggatgt

SEQ ID NO: 288160 - DNA, 100 bp, Homo sapiens
ccaccccgaaattcgccccgattaaagactgtgttgcattatcagtctgagtaccactatgagtacacggcgtgtgacagcacgggttccaggtggaggg

SEQ ID NO: 288161 - DNA, 100 bp, Homo sapiens
tgagctgtccctgctggaggagcgcttccgggtgctggacgtcattgctcctccttatacctctgacttcgtgcaacttttcctccccatcctggagaat

SEQ ID NO: 288162 - DNA, 75 bp, Homo sapiens
gcttggagccggagctgcgagcgaggcagtgaaagggtggcagatgacaacattgatgagacatacggtgtgaat

SEQ ID NO: 288163 - DNA, 111 bp, Homo sapiens
ggctgacagctgagcagtgggtggtcatgatgctggatactcagtcagtctgaagttgacaagcagcagcatagaccctggtctgagtatcaagcagttgggtggtttgta

SEQ ID NO: 288164 - DNA, 75 bp, Homo sapiens
caggcgggagggttcgaggccaatgatgggagaccaccgggatgggcaggcagtagaaactgatgaaggaattga

SEQ ID NO: 288165 - DNA, 74 bp, Homo sapiens
acaaaccttgtgtctcaatttggctacaaaagctatccagacagagcagctaccctcagctctagctgatacta

SEQ ID NO: 288166 - DNA, 100 bp, Homo sapiens
gaagcactacaagggtcctgaagtcagttgttgcatcaaatacttcatatttggcttcaatgtcatattttgggctggcaaacattcagcagcacaccct

SEQ ID NO: 288167 - DNA, 78 bp, Homo sapiens
ttggagaaggaacgagagaaggaaattagtgatgatgaggcagaagatagtttacgaagagaaaagaacctggaagaa

SEQ ID NO: 288168 - DNA, 75 bp, Homo sapiens
atcgtattacacctgaggaggccaagtacatcatccggtgctcagaaatcccaaagctccccgcagtctcactcc

SEQ ID NO: 288169 - DNA, 101 bp, Homo sapiens
cgagcggagacccgggagcaggagctgggcctaggtctgcgccctgacacgatgaggcgagtggtacgacagagcaagtttcggcatgtatttgggcaagc

SEQ ID NO: 288170 - DNA, 75 bp, Homo sapiens
ccggacagagcccgtggtcgcgcaggccgaatacatcaagcaatggtaacatctttaaatgaagataatgaaagt

SEQ ID NO: 288171 - DNA, 74 bp, Homo sapiens
ttcgagtctggggctgtcgctgtgctctgttctgcttggattctgctagacagacccgacaaagactgtctatc

SEQ ID NO: 288172 - DNA, 100 bp, Homo sapiens
cctactacgatgcaatcctgactccaggtttacaccctgtacctggtggagtgttcccagtccctcctgcagctgttgttttaatgaaacttctccctcc

SEQ ID NO: 288173 - DNA, 100 bp, Homo sapiens
ccagatcggatcacggtgagggaaagatgagcgaggagacggcgacttctgacaacgactctattatcaagtcctaaattttggaatgattgtctcatcg

SEQ ID NO: 288174 - DNA, 75 bp, Homo sapiens
aaaatcttggggtatcgcacatttttataaagtgcaagatggacaacaagagagacaaggcgaaggcaggggccg

SEQ ID NO: 288175 - DNA, 100 bp, Homo sapiens
gtgaccgatgccaatgatgaggcgcccaggttcatccaggagccttatgttgccctggttcccgagcggctggctgtcggcaattggattcttccagtac

SEQ ID NO: 288176 - DNA, 137 bp, Homo sapiens
ttctgttggttttatgcatctttatccaatcaagtgcccttggacaaagcctgaaaccagattcagaatggacagtttagaagaacctcagaaaaaagtctttaaggctcgaaaaacgatgagagtgagtgatcgtc

SEQ ID NO: 288177 - DNA, 71 bp, Homo sapiens
cgggcgcgcaggccgcggggagcacctgggtacatggtgcagtggccgggagcacgcatccttcggcgtca

SEQ ID NO: 288178 - DNA, 95 bp, Homo sapiens
catgtcctcgtgcaggaagtactcatcgactgatgtggcagactttgctccctggcaaaagttttgctgttactgctcagtgtagtcacaccttg

SEQ ID NO: 288179 - DNA, 96 bp, Homo sapiens
gacatcgtgtaccgcaccatggagatcttccagctcctgaggaacatgcagatgacaaatcctctgagggaaatcgacaaaattgtggggcaatta

SEQ ID NO: 288180 - DNA, 75 bp, Homo sapiens
gtgaaacagaagaaggccagctttgaggaagatttattgctaaacatgggtgcatttttggataaacccaaaact

SEQ ID NO: 288181 - DNA, 50 bp, Homo sapiens
tcaaaatggagtgacccacaagtcttgatgtaattggctgtactcaggag

SEQ ID NO: 288182 - DNA, 82 bp, Homo sapiens
tgaattattctgccgtggctgatggagaggtggccagcatcgaaatgttcagccttttagtgatgaagatgcatcaattgaa

SEQ ID NO: 288183 - DNA, 50 bp, Homo sapiens
cagacgagctcttcctgcctggaatctggagctcatgggacacatgtagc

SEQ ID NO: 288184 - DNA, 75 bp, Homo sapiens
gatcaacatcaccaacggcgagttctttattggtgaaaacatgaatccagatggcatggttgctctattggacta

SEQ ID NO: 288185 - DNA, 82 bp, Homo sapiens
agccgcagtgggtcccggacaaggagggtaacaagatgctcaactatagtgctcccagtgcagggggttgcctgctggacag

SEQ ID NO: 288186 - DNA, 83 bp, Homo sapiens
agcacaggcatcagtcaggcagatgtttgtcgactggaatggcttcctgcagatttcacaaaactgcatcttactgacagtct

SEQ ID NO: 288187 - DNA, 82 bp, Homo sapiens
cttttagagcaggtgtatgatcttttggaggaggaggatgaatttgatagagaggactcatctgatgatgtgagaagagttc

SEQ ID NO: 288188 - DNA, 90 bp, Homo sapiens
cagattcgcagtggtcgcttcttctccttgcatggaggagcaggacttggagcgaaggttcgagctgctgagccgcgagctgcgggccat

SEQ ID NO: 288189 - DNA, 75 bp, Homo sapiens
ctggaagccgcagaccttgtgatattccagattcttggtgccaccattgagaactccaggattgtcctgcagatc

SEQ ID NO: 288190 - DNA, 100 bp, Homo sapiens
tgggaaaggaaagcagcctccagggaaatgttttctgccttcctgcttctagaaccacctcagccacctgtctttaccagtttccaagactatgttactg

SEQ ID NO: 288191 - DNA, 99 bp, Homo sapiens
ggcacgggcagccggaaggacaccaagatgcggatccgggcctttccgatacttgccagaactaatacagctgatgaaatacctgaccttttctgctcc

SEQ ID NO: 288192 - DNA, 90 bp, Homo sapiens
gagcaggagctgggcctaggtctgcgccctgaaactggcgatggaatatgagaggagccctctggaaagaaaaggacagaccctgtgctt

SEQ ID NO: 288193 - DNA, 100 bp, Homo sapiens
acggtgtgctgttagaaggttctggtcttgcactaagtatcagagaagcagacactggggggaaggttgactatggcaaatccatttgatggatactcca

SEQ ID NO: 288194 - DNA, 75 bp, Homo sapiens
accaggccgattatgtccattgttctcttggagcagctggtcatcatgatttcaggaaaccttactgtgccttgg

SEQ ID NO: 288195 - DNA, 82 bp, Homo sapiens
gccgtaggactgaacacggggaggcagctgcgggagcccgcgggggtgcagaccttgcgctggcagcggtggcagcgccggc

SEQ ID NO: 288196 - DNA, 75 bp, Homo sapiens
acacagttggagaaaatcggcagctgagacggccttggccgaacaccaatcagggtcttcaggcctggaagattg

SEQ ID NO: 288197 - DNA, 83 bp, Homo sapiens
tatgtggcaattgtccaagaaaaggtatgatccgaaggagaacaagtggactcgggtagcttctatgagtaccagaagactag

SEQ ID NO: 288198 - DNA, 132 bp, Homo sapiens
gcagtttacggaagtgtaacgttgaggcccttcttgtgtatctggagaaaatagaggtgtcatggagaaactccagctgggcccagagattctgcagcgggaaaatccaaggcttatttatgccaggctgag

SEQ ID NO: 288199 - DNA, 74 bp, Homo sapiens
aaaaatcttagctctctcaatctctgtctgaactggatcataaatgacagagacggggtcttgctctgtcaccc

SEQ ID NO: 288200 - DNA, 75 bp, Homo sapiens
gggtgatcgagccaccctgcccaggggcgcccagcactggtaacaaacctgaatttggcaactggcatcataaac

SEQ ID NO: 288201 - DNA, 100 bp, Homo sapiens
tgagaaagctaggccatctgaataactttactaagatttgaaaaatgtgtgagtgctaaggaagctttggagactgatctttataagcggtttattctgg

SEQ ID NO: 288202 - DNA, 83 bp, Homo sapiens
gcggggaccgctgtgctctcggtggaacacctgcagcaggagactgctgctctgaaaaagcaaatgcaaaaaataaaggaaca

SEQ ID NO: 288203 - DNA, 50 bp, Homo sapiens
cggagcccggagcccgccgccccagatggtcagtaggacagaaggtaaca

SEQ ID NO: 288204 - DNA, 90 bp, Homo sapiens
cctactgagccgtgagagccgcagtggatggctggaggtgcagggccaggaggaacatgagcaagagtgagccatggagctacgtgtggg

SEQ ID NO: 288205 - DNA, 75 bp, Homo sapiens
caccaagtaggactgatcaggtcttacaattctaaaaccatgacctgtaagaagcctgggaagtttataaacaga

SEQ ID NO: 288206 - DNA, 89 bp, Homo sapiens
tgtaaaggatgttcatgaagattcaataacagttgcatttgaaaacaaacaacgtgtcctggagagacagcacaatgggctctatcttc

SEQ ID NO: 288207 - DNA, 100 bp, Homo sapiens
cgagagcgtgaccgagagcgcgaatatcgtcatcgttagaagttacagaaaccccagaaccagcgatgactagtggtgtgtataggcctcctggggccag

SEQ ID NO: 288208 - DNA, 75 bp, Homo sapiens
tcagcctccagaaacggtccagaactggattgaattacttagtgctttggaggaattttttacatcacttgtgaa

SEQ ID NO: 288209 - DNA, 100 bp, Homo sapiens
cgcagctggaaatatgctggtcaagaaaattcagcctttagcaaaagccacttccagatcagtgatatggagaatgcagaaaacattctcacagtgatga

SEQ ID NO: 288210 - DNA, 74 bp, Homo sapiens
ctaaacaaagttttgcataaagttcaacagtattgctatgaggtggagataagtaattaacatttcgaaacagg

SEQ ID NO: 288211 - DNA, 83 bp, Homo sapiens
tcgtcttctgcggctctcggtgccctctccttttcgtttccggaaacatgtaatttctatgcagcccccgacccagagccgag

SEQ ID NO: 288212 - DNA, 75 bp, Homo sapiens
gggaacctgctcaaagccctgggtcgcttggaagaagccaaggtaaaaggattcttcagctctttgaaagaaaat

SEQ ID NO: 288213 - DNA, 100 bp, Homo sapiens
cgccatcttgagtaaatgccctccaggacccgttcgccttgtcatcggccggcaccctaatccaaaggtaatctgtaagtcagatgctccaacaggggat

SEQ ID NO: 288214 - DNA, 100 bp, Homo sapiens
tcctacctgatcggtctctctaacatcactcagttgcttttgaaatcagaaagtcagtgcagggttgtagtgttgatgggctctacttctgatcttggtc

SEQ ID NO: 288215 - DNA, 83 bp, Homo sapiens
ttttgaaatcgacacacaaagaatagagttgagcctgtgggacacttcggcaggttacgggcaggacttgagtggcttcggac

SEQ ID NO: 288216 - DNA, 95 bp, Homo sapiens
gggatcccagcctcaggcgtgcgcggacggtgtgcggcagcagccgctcttctaaaacattcaaaccaaagaagaatatccctgaaggatctcat

SEQ ID NO: 288217 - DNA, 74 bp, Homo sapiens
agagcatttgggtacaaagtgagaatttacagagatcatcctcttcagaaacacaacatctgaatgaattgatg

SEQ ID NO: 288218 - DNA, 83 bp, Homo sapiens
ccaaaaccgtgaatggtgtctggaggagtgagagccggcaggtataccgctgggccgaccactcaagcacggtgctgcagcgg

SEQ ID NO: 288219 - DNA, 100 bp, Homo sapiens
gtcagagctgaggtacttcgtgaagaaatcaatgtggactgaacataaatcacctgatggaaggacttactactacaacactgaaaccaaacagtctacc

SEQ ID NO: 288220 - DNA, 100 bp, Homo sapiens
tttgatattcagagccttggaagtcaacactgtcaaaatggctattcctacaaagtggcagtcgcattgtctctttttcttggatggttgggagcagatc

SEQ ID NO: 288221 - DNA, 100 bp, Homo sapiens
aggagttcagctctgtgggaacagaaatgatcatcaccaaagctgggaggttatcaatactctggctgaccatcatcatcgtgggactgactttggtgga

SEQ ID NO: 288222 - DNA, 83 bp, Homo sapiens
cgatactgagcttcttcctatttgccatgggaactgctgttgtaagcggctcatcaagagttgaacttcacgtagccttgttg

SEQ ID NO: 288223 - DNA, 100 bp, Homo sapiens
attggaatattggtgggccagcaatcctcagacgcctcacttaggacaagataagttctgaacgtcgaaaagaaaagtctcgagatgcagccagatctcg

SEQ ID NO: 288224 - DNA, 82 bp, Homo sapiens
gagcgacaagccgctggcagccgcggatctcaccgccgctcagggaacgcaacgccgagagtgccatcgaggccctgaagga

SEQ ID NO: 288225 - DNA, 82 bp, Homo sapiens
cggagctgaaacacgacgtgaaggatgtcctggaacaggtggaggcctatcaagctgaggctcgtgaggctctggccacact

SEQ ID NO: 288226 - DNA, 98 bp, Homo sapiens
cggacgaagatggcgaccgccatgtacttggagcactatctggacagtgttgggatggccaccaactgggggagcctcttgcaggataaacagcagct

SEQ ID NO: 288227 - DNA, 75 bp, Homo sapiens
gattttgcagttacctgggatccatggagtcctgctataagatatgagatcctgactccaaactccattcccaag

SEQ ID NO: 288228 - DNA, 100 bp, Homo sapiens
agcacagccagatcttattaaacctcttcctcttcataaaatattgtgtatggatgcaaagatcaattttgactctaattcagcctatcgccaaaagaaa

SEQ ID NO: 288229 - DNA, 90 bp, Homo sapiens
catgaaggtgctgggagtgcagcggcctctcctacagagcatgcttgagaagggaggataaaaactttcagaatgagcaaaacaccatca

SEQ ID NO: 288230 - DNA, 74 bp, Homo sapiens
gggagcccggcctcgtgcgccgcgctttgaggccaggtcagagcagcccaccatgggatggggagggggtggag

SEQ ID NO: 288231 - DNA, 75 bp, Homo sapiens
tcctcctgacggctgtacttgagcagtcacctggcacaggggaagctgctcgctgatctggccaggcgcctgggc

SEQ ID NO: 288232 - DNA, 97 bp, Homo sapiens
gtggttcgagggaaacccaccttgcgtacaagaggtgtaccagccccagcaataaccagggatggtaggatgctctttgactacctggcggacaagc

SEQ ID NO: 288233 - DNA, 99 bp, Homo sapiens
caccgagtccggaccggagactttggggcctaactagcaatatgttaaggatacctgtaagaaaggccttagtaggcctttctaagtctcctaaaggat

SEQ ID NO: 288234 - DNA, 88 bp, Homo sapiens
agaggatccagtgttcaccatcctggccccggaagcggtggagacacagagcaccagctcagaggagatggtgcccagctcgccctcg

SEQ ID NO: 288235 - DNA, 91 bp, Homo sapiens
ctgaagagcgacaagccgctggcagccgcggatctcaccgccgctcaggaccatggtgaatccgggcagcagctcgcagccgcccccggtg

SEQ ID NO: 288236 - DNA, 100 bp, Homo sapiens
ggagctctgaccgaggcgcctcgctggggcggggaccttgccttgcccgggaaccaccgggaggaactgggccattctaacacccgttgctaccatgctg

SEQ ID NO: 288237 - DNA, 98 bp, Homo sapiens
ctcccaaagtgctgggattgcaggttgaaaaagatcatctagcaaagccttttttcccagctacatataaggaatttgaaagtcacataaaatggtta

SEQ ID NO: 288238 - DNA, 75 bp, Homo sapiens
ccagttcaattatgaatctcaggaacaccaccttctgtcagctttaccgatttgttacaactcaagcaagggcca

SEQ ID NO: 288239 - DNA, 89 bp, Homo sapiens
agatggagcgggcgcactgggaggtggaacgggccgaactgcaggttatgatgtgattgctcaagcccaatctgggactgggaaaacgg

SEQ ID NO: 288240 - DNA, 100 bp, Homo sapiens
acaggtccagttgcagatacaaacttggattttttccagtctgatccttttgttggcagcaagctttgttgcttctgaaaacaggacagatatttctttg

SEQ ID NO: 288241 - DNA, 100 bp, Homo sapiens
tgtgaagtccctggtggtttcctagatgactacacagttgagttgcctctgattggaaaagcaggaacatcggaatttgccttttatgcgtgagctgagg

SEQ ID NO: 288242 - DNA, 75 bp, Homo sapiens
acatattgactgtatttgggctgcagcacagggggacttgatctcatcttcatgccaggccttgggtttgacaaa

SEQ ID NO: 288243 - DNA, 82 bp, Homo sapiens
ccgactccttgcagctgctgtcagcatggcccaggctcctgctgacccgggcagagaagtgcgaagtgccagagggtggact

SEQ ID NO: 288244 - DNA, 99 bp, Homo sapiens
aatcaagtaagaaactggcctctgagttaagttttgattttcgcattgaatctgtaggacttgcaattgtgaccaaatatattacaaagggctggaaag

SEQ ID NO: 288245 - DNA, 83 bp, Homo sapiens
tggagggaaaacaacacacattgcagcactaatgcatgatcaggacttgcaattgtgaccaaatatattacaaagggctggaa

SEQ ID NO: 288246 - DNA, 87 bp, Homo sapiens
ggggcggctctgcgctggccgggggcgcgggcggcggcgccggcaggaagtacggcaagaagaagctgaaatacctgccctacaatc

SEQ ID NO: 288247 - DNA, 100 bp, Homo sapiens
aggacccgcctggctgcgagatattttttggctttcacccccaaccagtgaccaaagacttgaccactcaaagtccagctccccagaacactgctcgaca

SEQ ID NO: 288248 - DNA, 83 bp, Homo sapiens
gcaggattttaaaaaggctatctaaatatttggttgtttacattcagagctctatcaataagaggaatacatattacagtgaa

SEQ ID NO: 288249 - DNA, 77 bp, Homo sapiens
ttgtcctggctcttgccctcatcctggttctggaatcctcagttcaaggaaaatctctaacttccaaggtcccacca

SEQ ID NO: 288250 - DNA, 75 bp, Homo sapiens
ggctggacagctagctgcttatggctataaaattacagggattaatgaaaatcaagttccatcctcagacaagag

SEQ ID NO: 288251 - DNA, 97 bp, Homo sapiens
cctctcgctgcttcaggaggacctgcaggaggacgcagacggatagctggaggccgaggagtggtgcaagcacctctgcatggagtgtctggggacc

SEQ ID NO: 288252 - DNA, 82 bp, Homo sapiens
tcttggcagccttcctgatttctgcagctctgtgtgaaggtggagtattgctcctggaaaatccaaaaggtgacaataggtt

SEQ ID NO: 288253 - DNA, 87 bp, Homo sapiens
acctgccatttccaggccttctgggtctcacagatttcaagcctggctactggattggtgtccgctatgatgagccactggggaaaa

SEQ ID NO: 288254 - DNA, 99 bp, Homo sapiens
ctgccacaaacgccgcaccaggtcttgtagcagcgcctcctcgtccttcagtgaatctacagacctattttctcaggagctcagcctggccttacttca

SEQ ID NO: 288255 - DNA, 83 bp, Homo sapiens
tcgcagtggtcgcttcttctccttggaaagtgactattttaccccacagggagaattccgtgtagacaaagcaggatccccta

SEQ ID NO: 288256 - DNA, 75 bp, Homo sapiens
gcacccagcccgtgaccagcacgacaccttcttccttcgagctcgagccgtcatgctgtttgctctcatccccgt

SEQ ID NO: 288257 - DNA, 100 bp, Homo sapiens
gaccctccgactggacacccaccctgccatggtcaccgtgctggagatgggggctgcccgccacttcctgcgcatgcaattacctaaaacctcgggcaga

SEQ ID NO: 288258 - DNA, 108 bp, Homo sapiens
ccgcgtccgccgattcctcctccttggtcgccgcgtccttggctggcgtactacgtctactttgagaactcctccagcaacccatacctgatccggagaatcgaggag

SEQ ID NO: 288259 - DNA, 101 bp, Homo sapiens
ggataacctgtaatgggcaaggagccacaaagaagaaaacatttcttttaatttttaaacttggtttgaaaggtgggatgtgtgtgggctgaaattccgag

SEQ ID NO: 288260 - DNA, 98 bp, Homo sapiens
ctttgcaataacaatggaaaggtcatttcaaagatggagtttcaccatgttggccagactggttccgaactcctgacctcaagtgatccacccacctc

SEQ ID NO: 288261 - DNA, 90 bp, Homo sapiens
cagaagatcagagaactagagtctatgatcggcatagacccaggatcgaacctgcaagcacttatagacagtactcgggaaccaaatagc

SEQ ID NO: 288262 - DNA, 100 bp, Homo sapiens
aagaaacggcacaaaatgttcaagtgatgtttagaaataacttgtgagatatgtgcagcgggggctacagcgagtggggctagatccccagctgccactg

SEQ ID NO: 288263 - DNA, 90 bp, Homo sapiens
caagctgctggatggcattcaggaggcactggctacaattaggcttctcgacgtcctgtgcgaaatgactgtgaatactgagctgctcgg

SEQ ID NO: 288264 - DNA, 100 bp, Homo sapiens
acatgtctgggaggataattgggatgatgacaatgtagaggatgacttctctaatcagttacggtgtctgatgatttgtgagcctcaagtgactactctg

SEQ ID NO: 288265 - DNA, 82 bp, Homo sapiens
gttcacgcacgggatccagagcgccgcgcacttcgtcatgttcttcgcgccctgaacccttaggagaaatcttgagagtgga

SEQ ID NO: 288266 - DNA, 83 bp, Homo sapiens
aacattaatcagatactgcatttaaggaacttagtgatttggcccgtgaccctccagcacaatgttctgcaggtccagttggg

SEQ ID NO: 288267 - DNA, 73 bp, Homo sapiens
tcggacaggatttctccgcctcagcccaacggggagaaatgagccgtcagactgctacagcattacctaccgg

SEQ ID NO: 288268 - DNA, 99 bp, Homo sapiens
ctgatgtgtctctcacagcttgaaaagcccccaaatacatcaagatgtttgtactggatgaagctgacgaaatgttaagccgtggattcaaggaccaga

SEQ ID NO: 288269 - DNA, 80 bp, Homo sapiens
tttatggtcgcctttttgaatgaggacctgatcccaaccttgaagaaagtcctaaaagaaaaaatattacatatgaggaa

SEQ ID NO: 288270 - DNA, 80 bp, Homo sapiens
aggcgccggccctgggccgccctcccgggaatcgggagccgccgctgcagatttgaacatggaattcaatccttcagatc

SEQ ID NO: 288271 - DNA, 114 bp, Homo sapiens
ccagaccctggagcctcagttggaagcagccgatccagcctgcggagcctgtggggcagacttaattcagtgcacaaatgagatgaatgtgaacatcccacagttggcagacag

SEQ ID NO: 288272 - DNA, 75 bp, Homo sapiens
caacatcaactacgtccctctgaagaccctgcgggagattgtgattggcgtcctgcaccaattgaaaaaccagct

SEQ ID NO: 288273 - DNA, 80 bp, Homo sapiens
gccgcccggctgccgggagccgacagcttcgcgccgggagcagcatttctttctattactactatctatgctgagactgg

SEQ ID NO: 288274 - DNA, 100 bp, Homo sapiens
gtgaagccacacagtgtccagatacgagggaggtagaagaggatgatccagtgcctgagatccgtcgagatcactttgaagaagccatgcgctttgcgcg

SEQ ID NO: 288275 - DNA, 50 bp, Homo sapiens
tcaagtactaccggccaactgaagtgactgcttttcaggaagccttggac

SEQ ID NO: 288276 - DNA, 144 bp, Homo sapiens
cgcggaggaagcccccaccgaggccccccggcaccgcgcctgctgccgggttgcgctccgtgcacctcttgcggatcaagaagctactctagaagtcggagcagaggatggtacagcagaggccgaaccagaagccggagcagt

SEQ ID NO: 288277 - DNA, 50 bp, Homo sapiens
tgtgggggaagccgcccccggcagcaggcatattttggtggtgaagctcg

SEQ ID NO: 288278 - DNA, 82 bp, Homo sapiens
aatatctgtcttcggtggactccttcggcagtccacccaccgccgccgcctcccagtctgaccagtgcacaggacttcaggg

SEQ ID NO: 288279 - DNA, 100 bp, Homo sapiens
ccgagacagacagagtaatggttgcattgaagcacttctgttaggaatttacaatttggaaaatcaggaaaatgtttccaacctggtgattgaggacaca

SEQ ID NO: 288280 - DNA, 85 bp, Homo sapiens
tccttcgcccccaagactgcgactctaaacggactcatgtactttgtcaggatcatgcggccagatgatgccaacgtggccggca

SEQ ID NO: 288281 - DNA, 100 bp, Homo sapiens
gtctgcggaacggagcagtatttcaatgtggaggacactgccttaggaaaaccacgagaggtgtttcgacttcctacagatttgacagcatgtgacaacc

SEQ ID NO: 288282 - DNA, 83 bp, Homo sapiens
cttcggtggactccttcggcagtccacccaccgccgccgcctcccagtgagacggtttaagcggaagcatcttactgccattg

SEQ ID NO: 288283 - DNA, 75 bp, Homo sapiens
ggctcttgccctcatcctggttctggaatcctcagttcaagactccgcgtgcagcagcgccccaggctccggacc

SEQ ID NO: 288284 - DNA, 90 bp, Homo sapiens
atttccgggtgaaaggtgtaaccagcatttcagctgacacccataagtgaaaggactatggatctggttttggaaatgtgcaataccaat

SEQ ID NO: 288285 - DNA, 82 bp, Homo sapiens
cccctctgggatccccgccgctctgtctacaacccgagatttggagtggtatgagaagtccgaagaaactcacgcctcccag

SEQ ID NO: 288286 - DNA, 80 bp, Homo sapiens
agtgaccttaaacctgaaagtggtagcaagttcctccaagagaaagatgagatgctgcaagagctggagaagaaactgac

SEQ ID NO: 288287 - DNA, 133 bp, Homo sapiens
cacacctcaggaacacctttcggctgcccgctccccagacacacctgcagccctgcccagccggctttgctcacccactggggaagttcttcaggtgcaccgacttgtccaagatgacagaggaggagtgcag

SEQ ID NO: 288288 - DNA, 80 bp, Homo sapiens
ccagcctgcggagcctgtggggcaggcactgaacttcccagccctgccgtggaagctgcctgccaggtcctccccatcct

SEQ ID NO: 288289 - DNA, 52 bp, Homo sapiens
cagcagagaacgggcagatggaggtgacgcatccaaagaagacattgacact

SEQ ID NO: 288290 - DNA, 90 bp, Homo sapiens
gcacttactatgacaatttctgtgccattgctaggttaattgggaccaaaacatgtagacaggaaacttttgagaagaactttgaaagag

SEQ ID NO: 288291 - DNA, 50 bp, Homo sapiens
attttggctgctgcaggagccattttagggaaaaggacttggaggccaag

SEQ ID NO: 288292 - DNA, 99 bp, Homo sapiens
acctcaggatggaaatgtatttcttcatccccctctctacttccctgtgacctcctgcaaataaggcagtatttggcagtcgtattcagagataaaccc

SEQ ID NO: 288293 - DNA, 75 bp, Homo sapiens
cgggtttgagattatccacgtgtgtaaggctgcaatcaatgggaaactctatgccaaccttaggggtcttaccat

SEQ ID NO: 288294 - DNA, 50 bp, Homo sapiens
cacctcagtgtaaatggggaagcgctgtgatagcagtggcagctccgagt

SEQ ID NO: 288295 - DNA, 51 bp, Homo sapiens
caagcatgcagcttactgcttgaaagtttttcagaagaagtgaagtcaaga

SEQ ID NO: 288296 - DNA, 98 bp, Homo sapiens
agccgtccccagaacgcagatcagaggtagtcggacctttcccgctggcgcgcagcctcagctagagacattaaacctgacaatgtccttttggacgt

SEQ ID NO: 288297 - DNA, 100 bp, Homo sapiens
ggaaggggagcccgggacccccgggggcgcaggcagctgcagttgcactttcctccctgattcatgctttggatgacttagacatggtggccatagttcg

SEQ ID NO: 288298 - DNA, 100 bp, Homo sapiens
catcaggacggaagcacaggggccactcagagtcgcccgagaaatgacagcatattaaagtgagtgaccctgcgacccactctttggaccagcagcggat

SEQ ID NO: 288299 - DNA, 82 bp, Homo sapiens
ttccccaccggaggtttatcacaagccccaaatccagggttttccaaagtgtggttcaagaaccacctgcatctgaatctag

SEQ ID NO: 288300 - DNA, 85 bp, Homo sapiens
gcctcgcgccggctatggccgtgccctggggctgagccctcagcggagctggagtttgttcagatcatcatcatcgtggtggtga

SEQ ID NO: 288301 - DNA, 75 bp, Homo sapiens
cggccggtcaggctcgccgccgagctgctggctggaggcgtgatcctgggtgtggccctgtggctccgccatgac

SEQ ID NO: 288302 - DNA, 80 bp, Homo sapiens
aggtgctggagaccttcctggccaagtccagacctgagctcctggagtataacgaaggaggcccaacttcattcaataag

SEQ ID NO: 288303 - DNA, 100 bp, Homo sapiens
cgtcccccctggatccgccgtcagccgggcccggggctttcgacatgccccccaggaggtggagatcgccagtgtggacgcctttcagggacgcgagaag

SEQ ID NO: 288304 - DNA, 100 bp, Homo sapiens
tacttagggaggcagacgtcaaaggcaagtacatctgtattcaactgggtaaaggatgattatttcagaaactggaatcccaacaagccctttgaccaag

SEQ ID NO: 288305 - DNA, 82 bp, Homo sapiens
tttttcggatcatgtctggtggctccgcggattataacaggttccatcataatgaatggatccaatatggcaaatacatcac

SEQ ID NO: 288306 - DNA, 130 bp, Homo sapiens
gtgataacctgcgggcagtcatggccacacacggtgtgaagggcacccgaaccacctccaataacacctatgagtttgtgatggacgcctctgaccccacccagctctctgcatcctgtgtgcagctctt

SEQ ID NO: 288307 - DNA, 50 bp, Homo sapiens
ctgcagatggtttagtttatgaaccagtccaggtcaagacctcgtctccg

SEQ ID NO: 288308 - DNA, 75 bp, Homo sapiens
agggccccgagcccgagcgccccagcccgggcactgaacttcccagccctgccgtggaagctgcctgccaggtcc

SEQ ID NO: 288309 - DNA, 100 bp, Homo sapiens
aaagaagaggctgcagaatatgctaaacttttggccaagagaatgaaggtggagccgccaccaaaatgcagattttcgtgaaaacccttacggggaagac

SEQ ID NO: 288310 - DNA, 102 bp, Homo sapiens
ctttgcctttgttacatttgcagatgatcagatgtcaaggttcgcttcatcgttcgaggctgtggacagtacatttcctaccgctgccaagaaaaacgcaac

SEQ ID NO: 288311 - DNA, 122 bp, Homo sapiens
aaattgttggcgggtttcatgggcgtcatgaataacatgcggaaacagcctactttggggataaaggattatttggtcttctggatttggaggcaatcagcggacagcatggaagatgtgtg

SEQ ID NO: 288312 - DNA, 102 bp, Homo sapiens
tttttctgcatctgtatccagctcctgaacaagacatggaaggaaatgagggcaacttctgaagacttcaacaagggttacattccgaaaagcaaatgggag

SEQ ID NO: 288313 - DNA, 90 bp, Homo sapiens
tatacatcagtagtaaccttggtgaaacctcatttagtaaagtaggtgagtcaacacaagatggcaaatcaggatcaggtgaaaagatca

SEQ ID NO: 288314 - DNA, 75 bp, Homo sapiens
aaccgggaggaggtgtaccagacggccaaggccgtccgggagaaggttgtacatcctggagacctgaagaattct

SEQ ID NO: 288315 - DNA, 100 bp, Homo sapiens
gcttgtccatctgtaacttcattaagttcctccgtgtcacaaagcagtacctgccccacgtggcgcgcctctgtctgatcagcaccttcctggaggacgg

SEQ ID NO: 288316 - DNA, 83 bp, Homo sapiens
gacctgagctgtcagatcaccattcccaaagatgtcatgtggcctgtgttttggaccgtggttcgtacctatgctccttatgt

SEQ ID NO: 288317 - DNA, 73 bp, Homo sapiens
ggcactgcaggaggagaaccgcgacctgcgcaaagccagcgtgaccatcaacttggagcgtgatgcccagaag

SEQ ID NO: 288318 - DNA, 100 bp, Homo sapiens
cgttccttcttcagtcctgctcgtcggaggacccggttgccatggtgaaggaaaaagggagaagatgtcaaccggacactagaaggtggaaggaaacctc

SEQ ID NO: 288319 - DNA, 75 bp, Homo sapiens
gaaaaccattggtccctcttgattatccaatggatggtagttttggtggtgaagcagtattttccaatttgaaga

SEQ ID NO: 288320 - DNA, 100 bp, Homo sapiens
cagatctgcaacaagcaggactgtccaattggatcctggtgcacctgagccgtggaggggctgaagtccagatctttgctcctgacgtccctcagatgca

SEQ ID NO: 288321 - DNA, 100 bp, Homo sapiens
taacactaagtttagatctcatgagaacctggagctggttgaaaaaggcttcagtaacttgaagaaacaaattgaaaatgccagaatgtttggaattcca

SEQ ID NO: 288322 - DNA, 83 bp, Homo sapiens
atttgtagcattgatttcccggatctggtaacatggcaaaagattaagactttgaccccgacgcaggcttcagtgattgccgc

SEQ ID NO: 288323 - DNA, 112 bp, Homo sapiens
ttttttgcctttgttgattaactggacaaattcaggatgtaatccctgttcattactacttaatacctccaccaacaaagactaagaatggcagcaaagataaggaaaaaga

SEQ ID NO: 288324 - DNA, 83 bp, Homo sapiens
gattgctggctctcctgacaccttctcgtggcatccatgtggtttatccagttttctgaaaattgtctggcgccgggagtgag

SEQ ID NO: 288325 - DNA, 83 bp, Homo sapiens
ggctgctgctggccgaagcgaagggcgacgccaagccggagggatctgtgccagttcagaagcaggcgagcctcttccctgat

SEQ ID NO: 288326 - DNA, 100 bp, Homo sapiens
agaaccattgttagtgaacgtggacaaagctgttgtctcagggagcacagaaaccaagagtgcagatttccataagcgggaggtaagttctggagctggg

SEQ ID NO: 288327 - DNA, 76 bp, Homo sapiens
cagacttcggaacgggtgtcctgctactcctgctggggctcctccaggccacccctgttctccgatgtgtaagggc

SEQ ID NO: 288328 - DNA, 50 bp, Homo sapiens
gaaacttattcacagttaccaaagctggttgggccatgcaggctgctgcc

SEQ ID NO: 288329 - DNA, 50 bp, Homo sapiens
cattgcagttgcgtgttgttcagaaaggtgtacatgttcctggtgaaatg

SEQ ID NO: 288330 - DNA, 101 bp, Homo sapiens
gcacagttcctgggaaggtggagccaccagcctctccttgattttaacagcttctctgtggatgatgagtgcttagtgaagttacttaaaggatgttgcct

SEQ ID NO: 288331 - DNA, 100 bp, Homo sapiens
ttttaaagcttcaaaatcctaagactcagcactgttgcgggattgggaaaatgaggtacgttagtgttcgcgattttaaaggcaaagtgctaattgatat

SEQ ID NO: 288332 - DNA, 50 bp, Homo sapiens
tggagaatatggtgcagaggccctccacgatgcttgctctgtcaaggcac

SEQ ID NO: 288333 - DNA, 87 bp, Homo sapiens
aaacgcatctatctaacgtttaccctagcaaaccaacggcactgagccctcccacatgcattatgcactagatgagaattatttccg

SEQ ID NO: 288334 - DNA, 50 bp, Homo sapiens
gtggtaggctatgaccacgagaagccagaggtgtgctctgaacaagccga

SEQ ID NO: 288335 - DNA, 90 bp, Homo sapiens
caaagcgaaattggtcattctcgctaacaactgcccagctttgagagctcagagttctacagagtcaccactgaacaatatcagaaagct

SEQ ID NO: 288336 - DNA, 98 bp, Homo sapiens
tcgcggtgcgcaccgtttgcgacttggtctgccatcatggatgttctcgcagaagcaaatggcacctttgccttaaaccttttgaaaacgctgggtaa

SEQ ID NO: 288337 - DNA, 100 bp, Homo sapiens
cctcagttggaagcagccgatccagcctgcggagcctgtggggcaggactgcctccgggcctgccaggagcagatcgaagccctgctggagtcaagcctg

SEQ ID NO: 288338 - DNA, 98 bp, Homo sapiens
caccatgtacatgaagacacggcttttccagtaatctatgccagcaattatgacaatgttagcagaccatgcagctcgtcagctgcttgatttcagcc

SEQ ID NO: 288339 - DNA, 90 bp, Homo sapiens
gtgtccagagctaatagcatcggttccaccagtgcctcttctgtccccaacacagactcagaaccgtgctgcatactatcctcctagcca

SEQ ID NO: 288340 - DNA, 101 bp, Homo sapiens
gagcgtggggaatctggaagaggctggggagtctgtgtccttccagctgcagatacggagggatctggacaactctcctctgtccccaccttcaccaagga

SEQ ID NO: 288341 - DNA, 100 bp, Homo sapiens
aaccggcacctgcacacctggatccaggataacggaggctggggctgatagttcaggaccattcagaccccatgttcagttcatatgcctataagtccca

SEQ ID NO: 288342 - DNA, 75 bp, Homo sapiens
ccaggctgcagcaaattggcttattaatgtggaacgtgtgaaagctgagtctgcacaggcttcagcaaaaatgtt

SEQ ID NO: 288343 - DNA, 100 bp, Homo sapiens
tttttgatttattagagatgcttgcatcatttaaaccaccctcaggaaaagtggcagtggatgatagtgagggttggattagtagaatctaaaatccgtg

SEQ ID NO: 288344 - DNA, 102 bp, Homo sapiens
gcaaaagttacctgttgctattccagcacacaaactccctgacagaatactgccaaggaggcaggtggaagtcatcataaagtttctgtttcacccgtcgtc

SEQ ID NO: 288345 - DNA, 100 bp, Homo sapiens
gatggacttactagcggattccagggaagttatacgtaatgatcagccatggcaatgacaggctcaacaccttgctcatccatgagtaaccacacaaagg

SEQ ID NO: 288346 - DNA, 98 bp, Homo sapiens
acagccagagaaggggccagtcggaaacagaatggaagtgaggaaaggcaaccagctgacacaggagccagagtgagaccagcagactctcacactca

SEQ ID NO: 288347 - DNA, 83 bp, Homo sapiens
cattgacgccatgtcgggttattcgagtgaccgagaccgcggccgggaccgagggacgtggtgggtcctctggtgcgaaattc

SEQ ID NO: 288348 - DNA, 82 bp, Homo sapiens
cagaaacccattatacttcaagtggtaaccctcaaaccaccacacggaaattggagaattaacactgaatcctccggaagga

SEQ ID NO: 288349 - DNA, 100 bp, Homo sapiens
cggccacagattgacaagaaaggacgggctgtctcatggaccttctctgagttcctggtccagaactttacacagaaaaggtgctcaaaggatatttgtt

SEQ ID NO: 288350 - DNA, 100 bp, Homo sapiens
ctcacaatctgtcttttgatgaaatcaacaaagcctttgaactgatgcattctggaaagaggaagatcctagtacctccccctctccggggacccgagca

SEQ ID NO: 288351 - DNA, 100 bp, Homo sapiens
gggcagagatgaagaacaggatgatattgtttcagcagatgtggaagagggaagaaggagaaagggccaacccctgaagaagcaatacagaaactgaagg

SEQ ID NO: 288352 - DNA, 82 bp, Homo sapiens
ccgaagtcatcctgggtatgggctacaaagagaacgaccgcgctgagcacgttcttccaagaaaccaacattcccaacagcc

SEQ ID NO: 288353 - DNA, 50 bp, Homo sapiens
ggtgctaatccagtggaaatcaggagaggggatcattccagaataacagt

SEQ ID NO: 288354 - DNA, 97 bp, Homo sapiens
gacgagccgtggtacgaccaccaggacctccagcaaggtatggaattgtttgaagaggcattgcgtcgatgggaacaagctctgacctttcgcaata

SEQ ID NO: 288355 - DNA, 100 bp, Homo sapiens
cgcagggttcggatgagaccagattggaggtggacacaaaggaagaggcagccagacagctacttcagcgtcctcaacgcattcatcgacaggaaggaca

SEQ ID NO: 288356 - DNA, 75 bp, Homo sapiens
acattgtgggtttcacagcgctgtcggcggagagcacacccatgcagagattggaaaggtgtatgagcattgtga

SEQ ID NO: 288357 - DNA, 82 bp, Homo sapiens
gccgcctggacggctcgggcgctggagggagcatcgagtacagctgtccggcctccaacgagtgtgagatcaccaagcggag

SEQ ID NO: 288358 - DNA, 50 bp, Homo sapiens
aaatatggcaaagaaacctattctgagtgtccacaggatgaaatgtccga

SEQ ID NO: 288359 - DNA, 96 bp, Homo sapiens
tccaataaagtctttgtggtgaagggactgtcaaggtgtgagctaccacgccttgcctgagttgatcttctacaagagttcaaacaaaaaacagac

SEQ ID NO: 288360 - DNA, 100 bp, Homo sapiens
tgaagagcgagaaggagcagcgccggcggctggagtcaccttcaggccattcagaggaggaaagagaggggaatatgaagtcagccaagccccaagtgaa

SEQ ID NO: 288361 - DNA, 96 bp, Homo sapiens
ttgtcttctgggctgtgtggacctaattgactgcttgtcccagaagcaatttaaggagcagatggagtcccctgtttccacaccagcagtgctgcc

SEQ ID NO: 288362 - DNA, 51 bp, Homo sapiens
ggattccaagtaactcttatttgaaagtgaagtcactgcttttgctgtctt

SEQ ID NO: 288363 - DNA, 74 bp, Homo sapiens
ctgcaagtcatccttgctctctacctcctgtggctgcttgtgagaagaatgagttgatgacatgctccatacca

SEQ ID NO: 288364 - DNA, 74 bp, Homo sapiens
gaagaactaatagagaaacctggaggcatcattgtacgatggtgtaaggagtctctgcattagttggacagctc

SEQ ID NO: 288365 - DNA, 90 bp, Homo sapiens
cgacaagaaaaacaatcgcttcaatgatgggaaggtggatcccgccgggaggtactttgctggtaccattagcagacgaaaggagttccc

SEQ ID NO: 288366 - DNA, 100 bp, Homo sapiens
attatgacaactgaaatgagacatgcacataatatagtgagaactatctaattcgttggggcagtaacgggatgcccaaggaaatagagaagctcaataa

SEQ ID NO: 288367 - DNA, 75 bp, Homo sapiens
gccatgatgtctgccgcaatgggagccgacttccatttctcttctgctagcaatgtctcccacactgtggtcctg

SEQ ID NO: 288368 - DNA, 74 bp, Homo sapiens
ggctctacccagaattcaattaaagtggctcaggtggattttgcaaatcgttttgttggaggtggtgtaaccag

SEQ ID NO: 288369 - DNA, 100 bp, Homo sapiens
ggagaatctcctgcaggatctcagtgatgcacttttccagccattaactccaggctctcgagaatttgaagatgttgtaaatattctccattcttcttac

SEQ ID NO: 288370 - DNA, 96 bp, Homo sapiens
gcattgtgggttactggaggaacccgacatggattccacagctgggagtgtccactcgccttccaccagcatggcaacgtcttcacagtaccgcca

SEQ ID NO: 288371 - DNA, 75 bp, Homo sapiens
gacatccaggcgaactcggcctatcgctaccctccgaagtccgcccgaccattttgttcaggaccctgcagtgct

SEQ ID NO: 288372 - DNA, 100 bp, Homo sapiens
gtgggaagtagtttcccaacttgataaggttgcacactgggccacagaggatccagcaaggatgaagaaatggagcagcacagacttgggggcagctgcg

SEQ ID NO: 288373 - DNA, 95 bp, Homo sapiens
ctgctggcagttttgccaggtgtttgttaccttgaattaaacaaccaccatgtcgagcaaaaaggcaaagaccaagaccaccaagaagcgccctc

SEQ ID NO: 288374 - DNA, 100 bp, Homo sapiens
ggcgctggtcctcctggccatgcgccttgcctttgagagcggggatctgacgagcttttctctacttgtgtcactaacggaccgtttatcatgagcagca

SEQ ID NO: 288375 - DNA, 49 bp, Homo sapiens
cgtagtgtggaagcagcttcaggatcaacactctgtggtaggccagaac

SEQ ID NO: 288376 - DNA, 82 bp, Homo sapiens
gaggaagaagaagaagaacagaaaattggaaaagttgttcatcaaccaggttacttttcacatagaaccatatagcaatcga

SEQ ID NO: 288377 - DNA, 101 bp, Homo sapiens
gtcagagaatgataacgacatctcaggaaaattgtgaaaataatcagcaaccagtggacaagattacatctgaaaatgcaccaactaaagaaaccaataac

SEQ ID NO: 288378 - DNA, 100 bp, Homo sapiens
ccgggactgcgctggaacaatggataacttcttcaccgagaagactggactttatgagtataaagtctttggtgttctggaggactgctcaccaactcta

SEQ ID NO: 288379 - DNA, 51 bp, Homo sapiens
cggattcaggattcagatgaaccaggtacttaagagattatggcatcagaa

SEQ ID NO: 288380 - DNA, 90 bp, Homo sapiens
caaatggttgaaaacagatatacagaagtcctggagggtatttgggagccaaaaagaaaaagaagaaacagaagagaaaaaaggagaaac

SEQ ID NO: 288381 - DNA, 100 bp, Homo sapiens
gaggactttccttacctgtttttccagctcacccactgccagcagagatgccatggacaatattaccaggcagaaccaattctacgatacccaagtcatc

SEQ ID NO: 288382 - DNA, 100 bp, Homo sapiens
gtcaggatgtcactgactctaaatcagttgtggaagaaggactctgggaaaatggcctttcctatgaatgtaggacgctgctcttcaaagcgatccacaa

SEQ ID NO: 288383 - DNA, 75 bp, Homo sapiens
acggaggagccaggtccctgtctgagccaactatgaagaaatcgggagtgcactttttgactgtagattgttcga

SEQ ID NO: 288384 - DNA, 75 bp, Homo sapiens
agtggctatggtgggcaaactaagccgattttccggaaaaaggtacctggcaaagaattctgcaactttgttcag

SEQ ID NO: 288385 - DNA, 100 bp, Homo sapiens
tgccactttcatattgcagccagcatcaacccagccacagtggccacagatgtctttaattccaaaaacctggccgttcaggcacaaaagaagatcttgg

SEQ ID NO: 288386 - DNA, 96 bp, Homo sapiens
ctgccgtcttttgaagcaccctaatattgtactatactggcaattgctggagaagattttgcaattgttgcttctgatactcgattgagtgaaggg

SEQ ID NO: 288387 - DNA, 55 bp, Homo sapiens
acaagtactggagaactttaaactaaaggtggcgtcatcacctacattggctcca

SEQ ID NO: 288388 - DNA, 75 bp, Homo sapiens
cggactcctcagatgccaccaacaactccatccagcagtttcttcaccaagcatgctacaagtgaaaactgatga

SEQ ID NO: 288389 - DNA, 73 bp, Homo sapiens
gaaattgaatttcccgatattccagagaaagatcttcaagatgtgttaaaggcgtcgaccagaagattatgat

SEQ ID NO: 288390 - DNA, 50 bp, Homo sapiens
ccggaatggagaaggaagaggagtcggttttgagcaaaattttggactgt

SEQ ID NO: 288391 - DNA, 101 bp, Homo sapiens
aggttatagatggagagacctataaagatctcacattcttgaaggtggcattgaagagcactaagatcggaagatgagtgagcttgaccagttacggcagg

SEQ ID NO: 288392 - DNA, 100 bp, Homo sapiens
cttaagtgtcggtactgcaactatgccagcaaaggaacagcccggcttattgaacacatcagaatccacacaggctcagcctctgaggaaagaacctgaa

SEQ ID NO: 288393 - DNA, 74 bp, Homo sapiens
actacagctggagcgcccagaggcgagccctggtggaggaagagtattaaaggtggaagaaggtccatatcttt

SEQ ID NO: 288394 - DNA, 100 bp, Homo sapiens
ggaatactatcacctcttatatagacaaccaaatctgtcaagggcaaaagaacctttgcaataacactggggacccagaagctgcacacatacatgtaag

SEQ ID NO: 288395 - DNA, 76 bp, Homo sapiens
tggcaccaccacccgagactccttaaccgagatcaacctgtctgtacgctacttcctgaagaataaggtcagccct

SEQ ID NO: 288396 - DNA, 50 bp, Homo sapiens
caaatccgggggcaaggccaaaaagaaggaggtagaagaggatgatccag

SEQ ID NO: 288397 - DNA, 109 bp, Homo sapiens
caacttacccgagaacgtgcgggaagagaagatcatcgagcatttcaaacgtttcactgttacatgccttgaagtgatgaggaggtttctgttactatatgctacacag

SEQ ID NO: 288398 - DNA, 82 bp, Homo sapiens
cgggacctgggctgggaacccgcggtggagcgggacacgaacgtggcaaaacaacgagtggatgagaaacccagcctgggag

SEQ ID NO: 288399 - DNA, 100 bp, Homo sapiens
acattagcagatatactattgtactatggacttcatcgctttatagttcaaaccttgtactactcagctgatcacaagctgcttgatgggaacctactag

SEQ ID NO: 288400 - DNA, 100 bp, Homo sapiens
ggagctcttctctgctggcttggtggatggtcacgatgtagttatagtgagtttttagcagaagacagtcaagagaaattttggaattttgtagaagcca

SEQ ID NO: 288401 - DNA, 87 bp, Homo sapiens
ggaaacacatgaaagacttcctcaaggactacagtatgcacttaatgtccctgtatctcagatgaagacatcatcaacattactctt

SEQ ID NO: 288402 - DNA, 50 bp, Homo sapiens
ctggagattcatgacaaaatcatggaggttgtctaccttcataacaacaa

SEQ ID NO: 288403 - DNA, 90 bp, Homo sapiens
cacaattgtggtgagacagagctcagggaatacttcaagaagttcggagtgggacatctacgagagggcaagtgccacctctctctgggg

SEQ ID NO: 288404 - DNA, 75 bp, Homo sapiens
tcaagaactgtaatacttctggaatccagacagaatgtgccggtggtggtgtgcacattgagccccggtatagac

SEQ ID NO: 288405 - DNA, 75 bp, Homo sapiens
tcctgatgacacagccctcagcgagagtgccaaccaggccttcctgggccactgtgcatgtgcgggtcaacgatg

SEQ ID NO: 288406 - DNA, 50 bp, Homo sapiens
cctcacatcaacttctaccagctggtaactgtgacatttgatgatgtggc

SEQ ID NO: 288407 - DNA, 101 bp, Homo sapiens
gccaggcgtacggtgccaagggattcagcctggcggacatcccctaccaggagatcgcaggtcctgctcaggttccaatgatgtccccaaatggttctgtg

SEQ ID NO: 288408 - DNA, 82 bp, Homo sapiens
tgtgtcccacttgttcgcggcctataggctgctctttggcgtaaattgcaatcgattagggatcgtttctcagaatcaagtt

SEQ ID NO: 288409 - DNA, 100 bp, Homo sapiens
gggactctctaggctgccgggcgctggtcgtcagcgccgaggctgggctgaggcgccgcggtaccatgaggcgccgacctgagtcagaactccatcacag

SEQ ID NO: 288410 - DNA, 75 bp, Homo sapiens
aaaagaataacagcagtagcaggtaatttggtgtcccgacccaggctaagcttgagcatggctgagcaggagccc

SEQ ID NO: 288411 - DNA, 50 bp, Homo sapiens
tgaagatgaaaccaagcccttgctaaaagatggcggcaaggcagcccagg

SEQ ID NO: 288412 - DNA, 73 bp, Homo sapiens
gggaggcgaggccggacgcacctctgtttgggggtcctcaggtgctgatagtctgcagcacaggtttagctgg

SEQ ID NO: 288413 - DNA, 88 bp, Homo sapiens
gacaagttcagctacatcggcctctctcagaacaacctgcgggtgcactacaaagttcgatcctttggtacagaagacagaccgacag

SEQ ID NO: 288414 - DNA, 83 bp, Homo sapiens
tgagcgagcagaggcttaaggtcttcagcggggcgctccaggaggcactcacaggtaatagcctgcagctggtgttttgagaa

SEQ ID NO: 288415 - DNA, 100 bp, Homo sapiens
tgaaaacagtctctttgttgggagttaaagttcctcgtaattttcgcttgttggaagaacttgaagaaggacaaaaaggagtaggcgacggtacagttag

SEQ ID NO: 288416 - DNA, 51 bp, Homo sapiens
tgagcagatactgaatgtaaaccctgcaggcaatggatcacttggagtcct

SEQ ID NO: 288417 - DNA, 82 bp, Homo sapiens
ttgatcgcatccatatttttttcagtaattacagtgaaaaatgtgacgtcttcagctggggtattattctttgggaagtgat

SEQ ID NO: 288418 - DNA, 88 bp, Homo sapiens
acgcaggactgttcaacacctatgaacacctactgccggggaacgcccgctgcctgccaggaatgggtaccacagaccatgtcatcgt

SEQ ID NO: 288419 - DNA, 90 bp, Homo sapiens
taaagccaagctcatctctgagacccggaggaggttcgaagctgagtatgtgacagaaacagaagcctatcagttgctgaagaaggccac

SEQ ID NO: 288420 - DNA, 87 bp, Homo sapiens
ccagaaggggatcacccagaatgcacttgactacatgaaaaagcacatccctagcgccaagaactcgccgcgcatggccgggaacgc

SEQ ID NO: 288421 - DNA, 90 bp, Homo sapiens
tgtggatgtcggcgaagccgcgggcgagaaatctcctgcaaagaagctgagccatgcaattagtaaatctttggggtgtgtacccacgag

SEQ ID NO: 288422 - DNA, 75 bp, Homo sapiens
ctgcaccagcttctaaccgaacccaacatgagtgaagtttcctgcaagaaacgggacgactatttggaatggcca

SEQ ID NO: 288423 - DNA, 94 bp, Homo sapiens
cgagcggcgagccggagcgcggagcccggctcccgcaccatggaggaggacgacagctacgaattcagaaggagctggcggacatcactttaga

SEQ ID NO: 288424 - DNA, 100 bp, Homo sapiens
gggcgtctggacatctgtagctgtcgtttggtttgatcttgttgactatgaggaagttctaggttcgatacaagaggctgttttcctagcgtggcttgct

SEQ ID NO: 288425 - DNA, 81 bp, Homo sapiens
cagattcgcagtggtcgcttcttctccttgaattctgcttggtcagaatcgtgatggcattgtgttcagcactgatgacta

SEQ ID NO: 288426 - DNA, 100 bp, Homo sapiens
actcacccaggacacactatggtgcttcagccaagtgaaaggcactatcgagattggaaccacagaaggtatggcccatctcctgtacgcttggagcgac

SEQ ID NO: 288427 - DNA, 82 bp, Homo sapiens
ggagaagcacgcagatggaatgatagttgctgctaaaaccttgcctttttataaggactacttcaatgttccttatcctcta

SEQ ID NO: 288428 - DNA, 76 bp, Homo sapiens
gtgagaagttgggctatcaatggaagaaaagttgtatgaatcagtttatgggaaaaacagatggagactattacac

SEQ ID NO: 288429 - DNA, 96 bp, Homo sapiens
cgaggacgagatccagtttctgaggactgtatcgcaggacttccctttcctccaccccagtgagaccagtgtcctgaatcgactctgccggctcgg

SEQ ID NO: 288430 - DNA, 100 bp, Homo sapiens
gccacggccacctggctcgtgaaaggacttgacccaatgaaagaagcatatggcacttgtgaagataaatgttactcctccctttttaattggaacttct

SEQ ID NO: 288431 - DNA, 49 bp, Homo sapiens
gggtaacatggcggatgcggaagattctggatgaaattgaagaacataa

SEQ ID NO: 288432 - DNA, 98 bp, Homo sapiens
atctaagaggcagtgaacactggcgcccacagaacaaagatacttatgagcctttctgcaaggtccctgtgatcacctcatccaaggaagaacaaaaa

SEQ ID NO: 288433 - DNA, 80 bp, Homo sapiens
cgggcagtttgtcgaacgatgttggactcatagtcactgccagaaagatttggtgcttccagatgtgagttatcaggtgg

SEQ ID NO: 288434 - DNA, 95 bp, Homo sapiens
ctggtttgatactgacctgtaaatcatcctttaggccggattcagaagccagccagagcccacaatacagcttcgagtcattacctcagaagatt

SEQ ID NO: 288435 - DNA, 100 bp, Homo sapiens
gctggtgaacggcgactgccagtggatcaccgcgctgcactacgcctttcaggacgagaaccacctggtcatcactggaggccactacgatgttgactgc

SEQ ID NO: 288436 - DNA, 83 bp, Homo sapiens
gtcgacgactccgtcgcagactacggacctgtctgggtctcagccgccaaagaccccgtccgctgtggcggggccttcgtggg

SEQ ID NO: 288437 - DNA, 75 bp, Homo sapiens
cagaacatccactagcctcactaaaggtctcagccacctttgcggctagtcttgtcagcagcccggccattggag

SEQ ID NO: 288438 - DNA, 100 bp, Homo sapiens
catgcccaatggagatcatatagtgtctgcctcaagggataaaactataaaaatgtgggaagtgcaaactggctatcatggtgaacttacttcagattgt

SEQ ID NO: 288439 - DNA, 50 bp, Homo sapiens
gtggggtcttccacaacggtctcaaggcatccccaatggattggacaatt

SEQ ID NO: 288440 - DNA, 87 bp, Homo sapiens
ctgatggtgctgctcacatctgtggtccagggcagggccactccaggttctaagctggtctatgtccatcaccttcttggagaagga

SEQ ID NO: 288441 - DNA, 90 bp, Homo sapiens
aagacagaaccatttgaagaaaattccttcttggaacaatttatgatagaggcccgatacttctccccacaagctcgccgtcgattccac

SEQ ID NO: 288442 - DNA, 100 bp, Homo sapiens
caaatgatgtagttattactgtcccgtttgattttggagaaaagcaaaaaaatgctcttgggaaggcaacagcccccaggggagcaaccagggagtcaaa

SEQ ID NO: 288443 - DNA, 75 bp, Homo sapiens
cggggccagaggctcagcggctcccaggtgcgggagagagacagaatgttgctgcgggatgtaaaagctcttacc

SEQ ID NO: 288444 - DNA, 91 bp, Homo sapiens
tacattaaatgcaatagcccttcagtactgttgtacggccaatggaagcactgttgtgaagaacttatgaaaattgagattatgtcaccac

SEQ ID NO: 288445 - DNA, 83 bp, Homo sapiens
ccgccagcagcactgtggaggccgtcctcgatgaaggatttgggggcagagcacttggcaggtcatgaaggggtccaacttct

SEQ ID NO: 288446 - DNA, 90 bp, Homo sapiens
aaggcgaaggctgcaggcgtgaggtttatcttgcagattatggactttcctacagatattgtcccaatgggaaccacaaacagtatcagg

SEQ ID NO: 288447 - DNA, 82 bp, Homo sapiens
cctcatcctggttctggaatcctcagttcaaggttacctacatctcatacttgctttaatgtgcttttacttccggaatact

SEQ ID NO: 288448 - DNA, 100 bp, Homo sapiens
ctgaggaagaagagcaagtaatacatgaagatgatgaaagaccttctgagaaaaaaaatggtgtgaatggaacattaacttcaaatgtagcagactctcc

SEQ ID NO: 288449 - DNA, 100 bp, Homo sapiens
gccgagccgtctcctgcagcggcccccgccggattgttaaaggaaatgggctggcaggaagacagtgaaaatgatgaaacatgtgctcccttaactgagg

SEQ ID NO: 288450 - DNA, 100 bp, Homo sapiens
gcgctttggagccggccccaggcagcgtgtgtcggtcgcctagtctggagaactagtcctcgactcacggtgttataactaaggctatttataagtccag

SEQ ID NO: 288451 - DNA, 75 bp, Homo sapiens
catcagccgctacgtgactcttttctccaggctgctctttggcgtaaattgcaatcgattagggatcgtttctca

SEQ ID NO: 288452 - DNA, 82 bp, Homo sapiens
tcatccttgtttaatgactttggtgccctcaacatctctcagagacgaaagcccgtgccccgcatcatggtgcagtcagcca

SEQ ID NO: 288453 - DNA, 144 bp, Homo sapiens
acagaggtcttcttcctattacttcatggactgtatgaattccacccagctggtgacatcatggcagacatggctccttactatgaagccttgtgcaaatccctcgactggcagatagacgtggacctactcaataaaatgaag

SEQ ID NO: 288454 - DNA, 50 bp, Homo sapiens
ctccagggatgatgtcagaaaatgagataacgaaggaggcccaacttcat

SEQ ID NO: 288455 - DNA, 50 bp, Homo sapiens
ggccactcagagtcgcccgagaattcttcgaagggaaggagctgcggctg

SEQ ID NO: 288456 - DNA, 82 bp, Homo sapiens
cattctttgagggacccccattcaagttcaagttcacaattggcgtgatgtgtccaatctagatcccaacttctcatttgaa

SEQ ID NO: 288457 - DNA, 50 bp, Homo sapiens
cgatcccggggctcaagtggcttaacaagaattcagcttagagaactatc

SEQ ID NO: 288458 - DNA, 96 bp, Homo sapiens
gggatctgcgctgcagccaccgccgcggttgatactactttgaccttccgagtgcagtggcatccaggctggagaagcagaacagcacacctgaga

SEQ ID NO: 288459 - DNA, 50 bp, Homo sapiens
atgtcatccacttcgcccaacctccagtgagaaagatcagtctaaagaaa

SEQ ID NO: 288460 - DNA, 98 bp, Homo sapiens
gaaaaaaatagactaatggattaacgtccctgtcgtgtgacattttctggaatagctattcagtcagacagaaccacttatcacgttttgcagtatct

SEQ ID NO: 288461 - DNA, 50 bp, Homo sapiens
tgttgctgccgtctcgactcgtggatggatggcccaacagcaggccttga

SEQ ID NO: 288462 - DNA, 83 bp, Homo sapiens
cttcaaaagcccacttggcgatgggttacagtaagagagttgaagtattgataacaccaaggaactctatcacaatttgaaaa

SEQ ID NO: 288463 - DNA, 60 bp, Homo sapiens
actagatgtttccacagcagaggaattacaggtagcctatgtggtgttccagaagccaag

SEQ ID NO: 288464 - DNA, 50 bp, Homo sapiens
aaaatattgaagcactggacaaggaatgtatcctgtcaggtataatgtca

SEQ ID NO: 288465 - DNA, 75 bp, Homo sapiens
aagaaactagagcaaataaccgttttgaaattagtgcttatgccttaccaaccatggctttttcatttctctgcc

SEQ ID NO: 288466 - DNA, 80 bp, Homo sapiens
gcacgagatgcttcgccacccagttttcggttttaaaatcaaagatgggaaaatcggagaaaattgcccttccccatggc

SEQ ID NO: 288467 - DNA, 100 bp, Homo sapiens
ccttccatttcaaagaacagaatgctaaggaagctgtggcaacatgattccacctttccactgatagactcaagttcccagaaccagattagaaaacgca

SEQ ID NO: 288468 - DNA, 100 bp, Homo sapiens
agcggacaaggctccggcctgcgaggagacctgcgaccgcatcaagcagtccgccagcggaaccaagcggcgcgtgttcatcatcgagaccatgggcggc

SEQ ID NO: 288469 - DNA, 80 bp, Homo sapiens
agcagccgatccagcctgcggagcctgtggggcaggacctgaaggagaagaaggagaaggtggaggagaaggcaagccgg

SEQ ID NO: 288470 - DNA, 75 bp, Homo sapiens
acagccaccaccaccaccagatggtggttattaacttggtgatgcttttggctgaaatgaaaatacaggaccgcg

SEQ ID NO: 288471 - DNA, 90 bp, Homo sapiens
agccgcgagggcggctacacctgcgagtgcttcgaggacttcactgagcaagtgcaccggcacctggaccaacacgaagtgagatacctg

SEQ ID NO: 288472 - DNA, 100 bp, Homo sapiens
ctggaacatggacaggaactgtggacagtgaagagaggcctctcccaaagcacctgcgcagaaatctcctgcaaagaagctgagccatgcaattagtaaa

SEQ ID NO: 288473 - DNA, 83 bp, Homo sapiens
tactgaagccggcgctgctctgtggggctctggccgcgcctggcctggccgggaccatggattatatctgtccaagatgcgag

SEQ ID NO: 288474 - DNA, 75 bp, Homo sapiens
ctgcatccatattctggtgtaactgtggacatcaccattcaggaagagccctaatttgtttagaactgtaatatg

SEQ ID NO: 288475 - DNA, 83 bp, Homo sapiens
ccagcatgtgaaggcctgggtgtctgacatccaagaatgcctgagcccagggagagtcgcggttgctgatcgtggtgcttgag

SEQ ID NO: 288476 - DNA, 50 bp, Homo sapiens
cagcaacgtgcggtgggaccacgagagcgactatggcagccagggacgcc

SEQ ID NO: 288477 - DNA, 100 bp, Homo sapiens
gcggggaggccggcgccggccagctgctcttcgccaacttcaaccaggacaacactgtaaggagaggatgaggcccgtgaaaaaggcactgaaacagctc

SEQ ID NO: 288478 - DNA, 100 bp, Homo sapiens
tcacgttgcagctgctaaaggctatacggaagttttaaaatatgggacccgtacacatggactttttaagagactgggaattccagggcccacacctctg

SEQ ID NO: 288479 - DNA, 50 bp, Homo sapiens
acagagagcctggtgtggagcaagataagaatgagtccctggaacgccag

SEQ ID NO: 288480 - DNA, 75 bp, Homo sapiens
gtgaaacaccactgaagcattgccaagagctaatgtcaaaccccgaaattccacaccacctagtttggcaagaaa

SEQ ID NO: 288481 - DNA, 50 bp, Homo sapiens
cctcggagcgagcaggtgttgtggtggacttgctttgtgaagagacagtt

SEQ ID NO: 288482 - DNA, 100 bp, Homo sapiens
gatgctctgccgctaccgcaccttcgtgccagcctcctcccccatgtaccacacctgtgtggccttcgcctggactggcatagtgagtatggtatacaca

SEQ ID NO: 288483 - DNA, 99 bp, Homo sapiens
cgccgcggctggtgggcgctgctggcgctgcagctgcacttgctccgggcgctggcgcaaggtgtaccttccggtttcccagcacggccatcaagatcc

SEQ ID NO: 288484 - DNA, 120 bp, Homo sapiens
gcttgatccccggccgcggggccaggaagtcggagtttgagccccggaggcagagcggctgccatgcattgaagataatgatgatgacagcaaaatggcagatctcttgtcctacttcca

SEQ ID NO: 288485 - DNA, 98 bp, Homo sapiens
gtaagagataatattttaaaatatgatgaagaaggtggaggagaagaagaccagaaacacagtgctctgtgcctatacagtgtacggataaaacagat

SEQ ID NO: 288486 - DNA, 99 bp, Homo sapiens
cgagcagcgctactgcgccgtgtgccgcgaggagctgcgccagagtccggcagcgtcttctcttgagggagcaatttggagaagagctggaacccagac

SEQ ID NO: 288487 - DNA, 100 bp, Homo sapiens
acgaacaagtgctcagaagggcaacatcccagaaagcttccaagtggcagtagagaagagcatcacagaagttgctcaggagctgacagagctggtggaa

SEQ ID NO: 288488 - DNA, 100 bp, Homo sapiens
ctaaacttggcaccaagtatgagccctatgagtttgtctctctggaatggctgcaaaagtggttggatgaatcaacacctaccaaacctattgataatca

SEQ ID NO: 288489 - DNA, 75 bp, Homo sapiens
caacatattgactgtatttgggctgcagcacaggttgattcacaaaaggctgcaacaaagcaagtcaacaaggca

SEQ ID NO: 288490 - DNA, 83 bp, Homo sapiens
aaaaaaaaaattcatctgggcggtatctggaacttgaattaaacaaccaccatgtcgagcaaaaaggcaaagaccaagaccac

SEQ ID NO: 288491 - DNA, 75 bp, Homo sapiens
acgaagtgcacggctgagatagaacaccgtgccctggatgtgcagggcattcacacgggccagtttgtgtattgc

SEQ ID NO: 288492 - DNA, 98 bp, Homo sapiens
cgaaaccagatgaaaaaaagtgattccaagtcaagatttcaaatggaaatctaagtcgtgagatggagaataaagaaactctcaaagggttgcacaag

SEQ ID NO: 288493 - DNA, 100 bp, Homo sapiens
agaggatgatgctgactttgatgaagatcccttctgcttactatgacattacccagagccacggcggacagtggtgagagtgcagcagactcactggcac

SEQ ID NO: 288494 - DNA, 80 bp, Homo sapiens
tggtggactcgctctccgagggcgacgcataccccaacggcctgcaggatgaagatttgataaagtggaaggcactgttt

SEQ ID NO: 288495 - DNA, 83 bp, Homo sapiens
ccaatttgtccgtaaccttgtggagaagaccccggcgctggtgaacgggtgtcttttatgaataatcaaaagcagcaaaagcc

SEQ ID NO: 288496 - DNA, 75 bp, Homo sapiens
cgaggcagaccactgccgccgcatactggtgcgagctttccccacaaataaaccagagaaagatgcaagacatgt

SEQ ID NO: 288497 - DNA, 98 bp, Homo sapiens
ctggaggagttctctgctcagcacagccaaggaacagaattagaagaaaaggaaccctggcctgagaaaaggtcacggatcgcctacagtgacgaagt

SEQ ID NO: 288498 - DNA, 100 bp, Homo sapiens
ctttgtgatgacagccaagaagcagtgcctgctgcggctgggggtgctgcgccagatgcctgaggaaacccagacccaagaccaaccgatggaggaggag

SEQ ID NO: 288499 - DNA, 90 bp, Homo sapiens
acatcatgcagatatggcaaatggagccagatgaccaagatgctccagatgaacatgagtcgcctccacctgaagatgccccattgtacc

SEQ ID NO: 288500 - DNA, 50 bp, Homo sapiens
aaatgtgaatgttggaccccaaatgatctggtggttctccggagagcagc

SEQ ID NO: 288501 - DNA, 101 bp, Homo sapiens
tgctcctccttctgcccttccttctgtatatggctgcgccccaaatcagctggcataaccttgacaacagattgccttgaagatagcctccttacatgcta

SEQ ID NO: 288502 - DNA, 74 bp, Homo sapiens
gaagccatctctcaacttcacagccactgcagcctggcatcctcgctacaacctcattgttgtgggccgatacc

SEQ ID NO: 288503 - DNA, 51 bp, Homo sapiens
actcaccgcttctcatgccaccaaggtccattgttctgttgagcacaagag

SEQ ID NO: 288504 - DNA, 100 bp, Homo sapiens
ccggcgaattgaaagcagtgatctctcagatcagaatcaagctttgcgactctgtctgggtagcactagtgttggaggtcagtatggcgctatctctgcc

SEQ ID NO: 288505 - DNA, 90 bp, Homo sapiens
gaaagtacaattctattgcacatcaatgatatcatcccaggtgcgttccatggatgaactgaatcatgattttcaagcacttgctctgga

SEQ ID NO: 288506 - DNA, 100 bp, Homo sapiens
gtcaccgccgcccccccagacaagatggacaccgcggaggaaggtgtaatggataggtaacagagaagacctcgtcccttcctagtcagggcatcagcat

SEQ ID NO: 288507 - DNA, 100 bp, Homo sapiens
ctggtgaagtacatgaactcagggccggttgtggccatgaacattgatgatggcacctcagatcgcccctacagccatgctctggtggctggaattgacc

SEQ ID NO: 288508 - DNA, 90 bp, Homo sapiens
atgcagttataatgccattcagagaagtagccaagccaacagagcctgatgagcatgtggtgccagtgaagaagaggacacatgaaggct

SEQ ID NO: 288509 - DNA, 100 bp, Homo sapiens
ggaaaattaagcagatgctccagtttgagaaacctggatctgcgatctgtttgtggtgtttgagaagctgcagctgctcaaccctgaaatagaagcagaa

SEQ ID NO: 288510 - DNA, 128 bp, Homo sapiens
gaagaaaacaacgacatgaagaataaattggaagaattgcaaacactttgtaaaacaccaccaagcagctgcagctactggaggttctgttctcaatgttgctgccctgttggcatcaggaacacaag

SEQ ID NO: 288511 - DNA, 75 bp, Homo sapiens
gaagagttctgcgttttgccagtcacctctcaactgtgtgccaaagtgagaaagatcagtctaaagaaaaggaga

SEQ ID NO: 288512 - DNA, 113 bp, Homo sapiens
cactgaagaagtagagtatttcaaccataaagacatcttaattgggcacgaaagaggtatcgagaaccttccctgcgaacttcagaggaacttccagctgatgcgagagctgg

SEQ ID NO: 288513 - DNA, 75 bp, Homo sapiens
gttaaaaggatgctgctgggtgtcagggacttagcctagcgcctgggagatgcttggagagttcccttaaaagtg

SEQ ID NO: 288514 - DNA, 75 bp, Homo sapiens
gaaaggcaaaactaggaaaggaaccagtattggccgcagagaataaagttggctggggaacagaccagggaattg

SEQ ID NO: 288515 - DNA, 50 bp, Homo sapiens
ccaaggacagcttttttcctgcaaggtcaaaatgcagatcttcgtgaaaa

SEQ ID NO: 288516 - DNA, 75 bp, Homo sapiens
cagcacctttcggcttctgagacggcggcagcagcggcattcagaggctgaggggatctggcggtggagcgctag

SEQ ID NO: 288517 - DNA, 88 bp, Homo sapiens
ctgggcaaagaatgtagtcaatttaggtttgtataacaaaggatttatttatctggatgtaccaatatctgatgacagttgtatagca

SEQ ID NO: 288518 - DNA, 82 bp, Homo sapiens
tttctccgtcgattaaagagccatctgtggtgccaattgaagctttagatagtgacgggggcagagagctggactgccagct

SEQ ID NO: 288519 - DNA, 75 bp, Homo sapiens
ggagcgttgacagggaagcagccggatggctgctttgaatgctgcatcaagtgtctgggaggagtcccctacgcc

SEQ ID NO: 288520 - DNA, 80 bp, Homo sapiens
aggcaccttcgggccctcctgccttcctgataccccaatgtccttctttgactttgtggttgatcctcattctttccccc

SEQ ID NO: 288521 - DNA, 78 bp, Homo sapiens
aaaaacagaacaggaggtggtagagggcatggatatctctactcgctccaaagatggagtctcgctttgtcacccagg

SEQ ID NO: 288522 - DNA, 74 bp, Homo sapiens
tccttcctgaacctcctgttcctctgctatccgctgtgtttgatgtggacaagaagaaagggttgactctgatt

SEQ ID NO: 288523 - DNA, 101 bp, Homo sapiens
gaagtcagttgttgcatcaaatacttcatatttggcttcaatgtcatattttggacccaacatgagtgaagtttcctgcaagaaacgggacgactatttgg

SEQ ID NO: 288524 - DNA, 95 bp, Homo sapiens
tcacacttggccccggcaaactccccatccagctccagatatgagggaaggcaccattggagatatggctatcctgggtataacagaaagttttc

SEQ ID NO: 288525 - DNA, 75 bp, Homo sapiens
atcagcgagactctgcggcgcatggaggaggaggagggtttccaggcctgaggtgcccgccctggccccaggaga

SEQ ID NO: 288526 - DNA, 83 bp, Homo sapiens
gcgctgcctggcccaggcgcacacggaagtggtgctggagaatctggtaaaagcaccattgtgaagcagatgaggatcctgca

SEQ ID NO: 288527 - DNA, 100 bp, Homo sapiens
atgaccgaacagaaacccctcctcccctagcttcactcaatgttagtaaggtctccagaaatgctttgggttcatctttcattgctgcaaggaacttcca

SEQ ID NO: 288528 - DNA, 80 bp, Homo sapiens
atagcaatgatgatgtgaaaacagaagctgtggctgaatggaagttggatacactttgtgacttgtacgagacactgacc

SEQ ID NO: 288529 - DNA, 100 bp, Homo sapiens
cgaggcttctgggcgccgcggatacacattctagatatatcccagccatcatgtccatagagaagatctgggcccgggagatcctggactcccgcgggaa

SEQ ID NO: 288530 - DNA, 82 bp, Homo sapiens
ggtgtaccaggcgaagctggccgagcaggctgagcgatacgacggtatcatgatattagctggtttgacatcaagtcatttg

SEQ ID NO: 288531 - DNA, 100 bp, Homo sapiens
gggagggggactccaggaaaagccgttgagaggaccatcacaacctgagcagcacagcttgcattcacaagagatgggctctgtggtctgtggaatgaaa

SEQ ID NO: 288532 - DNA, 90 bp, Homo sapiens
tcttactcgggagctggctgaagatggctactctggagttgagactgtgagctgcttgtccccatcctgcggccgtcctggggacacaga

SEQ ID NO: 288533 - DNA, 78 bp, Homo sapiens
agggcctgtgtgtgctgaggcggctgagcggcggcactgtgacttctgccgtgttcaccgtgggagacaacgtggttt

SEQ ID NO: 288534 - DNA, 50 bp, Homo sapiens
caattataaaatgtcagcttttaaggggattaatgaaaatcaagttccat

SEQ ID NO: 288535 - DNA, 100 bp, Homo sapiens
cctgagggtgcgactccgccgcgatggtgacccggttcctgggcccacgctaccgggagctggtcaagaactggactcagtgacctttgaggatgtggct

SEQ ID NO: 288536 - DNA, 100 bp, Homo sapiens
ggaaaatggcggtgtctacagtgttctcgacttcgtcgctgaggagaaggcagagcccccccaggctatgaatgccctgatgcggttgaaccagctgaag

SEQ ID NO: 288537 - DNA, 91 bp, Homo sapiens
ggattatcgcagaatgcaacgccattcgccaggctcttcaggatctgctttcagagtacatgaacaacgccgggcatggtggctcacgcct

SEQ ID NO: 288538 - DNA, 93 bp, Homo sapiens
cccgcgcctctcttcgcctcgcctcgggacccgcggtccccgctcttgctggtcatcatcagatttgaaatatttaaagtggatacaaaacta

SEQ ID NO: 288539 - DNA, 75 bp, Homo sapiens
cgcaacctggcagccgccgccgtggaaggcataatcaccagcaacacccgggacaataatacgggggccacctac

SEQ ID NO: 288540 - DNA, 100 bp, Homo sapiens
tctcctggagctcacggcagccctcactgaaggtggatcagtacaagggaaagcgggatttggagtcactgagggagtacgtggagtcgcagctgcagcg

SEQ ID NO: 288541 - DNA, 100 bp, Homo sapiens
tccgcgccgcggccgttagtcatgtcggatactgaaacaagaatggcccaaacattggccaacttttatcagtgatattgttggagcaagtaggaccagc

SEQ ID NO: 288542 - DNA, 100 bp, Homo sapiens
catgaagtcatggaacagcagactctgtccattgcaaaggtgaaaaggagaacagcttgaagacagatgattatggccgagacctgtcttctgtgcagac

SEQ ID NO: 288543 - DNA, 142 bp, Homo sapiens
tgctgcccctgcctcagaggatgaggacgatgaggatgacgaagatgatgaggatgacgatgacgatgaggaagatgatttcgatggggtcctctatcatatttcaaatcctaatggagacaaaacaaaagtgatggtcagt

SEQ ID NO: 288544 - DNA, 75 bp, Homo sapiens
tatccctgcccatgtggagataacttctccatcaccaagggtaatgatggtggcaaagaaattcctggatgctgg

SEQ ID NO: 288545 - DNA, 105 bp, Homo sapiens
cttgtgggagcaaaaccaacgcctggctcggagcagcagcctctgagatgatatcatcaagttgaatcgaaaggaagggaagaagcagaattttccaagactaaa

SEQ ID NO: 288546 - DNA, 74 bp, Homo sapiens
gcatcgttaaagtctctcttcaccctgccgtcatgtctaagtcagagggtcctacagtgctagccagggtgtca

SEQ ID NO: 288547 - DNA, 83 bp, Homo sapiens
ggctctgattcaccttataaagcaaagagtggaagctggacacactatgtgacttgtatgaaaccctgaccatcacccaggca

SEQ ID NO: 288548 - DNA, 75 bp, Homo sapiens
aattaaagaatattttggagcctttggagagccgccagaagatatcagctgcattgcatggaacagacaagttca

SEQ ID NO: 288549 - DNA, 102 bp, Homo sapiens
aaaaagctacaagaattcaggtgttatcagtgtgaaacagtgtgaggatttaagcgagagcctcactggttcccaggacatcaacctgaactggatcctccc

SEQ ID NO: 288550 - DNA, 100 bp, Homo sapiens
cgaagggcaatcattccttctcacttggcctatggaaaacggggatttccaccatctgtcccaggcatccgtgtcattctggaccttactcccaactacc

SEQ ID NO: 288551 - DNA, 98 bp, Homo sapiens
ctgtgggctttcattttcagtctttagaaagaagcctgtggacatctctacagcaatgagtgaacgggcacttgctcagaaaagactcagtgagaatg

SEQ ID NO: 288552 - DNA, 89 bp, Homo sapiens
tccaagtggaggttcctacagagattcatatgagagttatgagtcacctaaggtcctgcgagtacaagggtcgacccccaaaggcaggg

SEQ ID NO: 288553 - DNA, 98 bp, Homo sapiens
gtctcttaccagccagccccaccaagtgctggccagtgagcccatcccgttctctgatttgcagcaggggcatggtctagtggcccagtcaggacgcg

SEQ ID NO: 288554 - DNA, 90 bp, Homo sapiens
cagctgtgccgcaccgaggcgagcaggagcagggaacagaataagaccacagcttgccaaagagaagattgaaggatgccatatttgtac

SEQ ID NO: 288555 - DNA, 98 bp, Homo sapiens
agagaacttaggaacttggattcaaggcagtggtgcaccttcgctctgccaggcgtctctgtgagctctgctgtgccaaccggggcaccttcatcaag

SEQ ID NO: 288556 - DNA, 101 bp, Homo sapiens
gtgtgtgcactgccacagactgccaggagcagcatttctttctattactactatctatgctgagactggttcaggttttgtagtaccaagtgcttctgcca

SEQ ID NO: 288557 - DNA, 82 bp, Homo sapiens
cggcgagcggttccttgtgggctagagcctggcagagagcaggtgtgtgatacacgtcgtcaggtgactgaccgaggaattc

SEQ ID NO: 288558 - DNA, 100 bp, Homo sapiens
gcgaacttggtggccagcgccgcgcccggggccgtgcgctctcgggccactcggccgcagagtggccaaatcaatgaaggtccctgtatatgagacccca

SEQ ID NO: 288559 - DNA, 100 bp, Homo sapiens
accccttccgggagcctagatcctgtgctttactctgaagactcgaggctggcaggatgtacagtttttatcacaggtgcaagccgtggcattggcaaag

SEQ ID NO: 288560 - DNA, 75 bp, Homo sapiens
caccaggctggagaatatggtgcagaggccctccacggcacgtgtggttctcaaatataggcattctgatgggaa

SEQ ID NO: 288561 - DNA, 100 bp, Homo sapiens
gtcatcttcgattagctaataaccaactgcaattcctacctccagggggcagctggcattttatgctatgtgggagcctatgtcttcatcacttatgatg

SEQ ID NO: 288562 - DNA, 83 bp, Homo sapiens
tcctccctcggtgttaacgtctgctccagctcgcagcccgctgctggataacgaaggaggcccaacttcattcaataaggagc

SEQ ID NO: 288563 - DNA, 75 bp, Homo sapiens
gttggaagcagccgatccagcctgcggagcctgtggggcagataatcagacagctaaatggagtctgagcagctg

SEQ ID NO: 288564 - DNA, 75 bp, Homo sapiens
gtcgcgaggttcgagtgttgcagagcctgcggggcaagatctctcaccatggatgatgatatcgccgcgctcgtc

SEQ ID NO: 288565 - DNA, 78 bp, Homo sapiens
ctgtcgctcttgtgccctagcaccccgagaaccgtcagtttgagccagatggtttgcctgcaatgagatttcattctc

SEQ ID NO: 288566 - DNA, 75 bp, Homo sapiens
ggcccgcccaccagttcgcccgtccccctgccccgttcacaatgttaaagatcgaggtccggaagccactaggag

SEQ ID NO: 288567 - DNA, 96 bp, Homo sapiens
cggccacagattgacaagaaaggacgggctgtctcatggaccttctctgaggccaagaaagcagagaactcatcaaatgaggaggaaacgtcaagt

SEQ ID NO: 288568 - DNA, 100 bp, Homo sapiens
aaggaattacataacatcaaacgtggaatccaaaggactgcatgacacaccataggatatagtcaagaagcctttggacatgggagtttcaagctcaaag

SEQ ID NO: 288569 - DNA, 100 bp, Homo sapiens
cctgaatctcactcaggactgtcagaatgcccatcaggggtcctgggaagcctcctttctgctcacagaataataactgactccaagcagccctttggtg

SEQ ID NO: 288570 - DNA, 82 bp, Homo sapiens
atgtgatcaacaagcagacgccaaacaagcaaatctggctatcttctccatccaggttgatgataattagaagcatgctttc

SEQ ID NO: 288571 - DNA, 80 bp, Homo sapiens
cgcgaccgcggcgcgagtcaccatgaaaccaaggtgtatgttggtaacctgggaactggcgctggcaaaggagagttaga

SEQ ID NO: 288572 - DNA, 82 bp, Homo sapiens
gtctccctgtacgccgagggctccgtcaatggcttcatcagcactttgggatgtgcccgtggagaagctggccgccatgcca

SEQ ID NO: 288573 - DNA, 100 bp, Homo sapiens
ctggggcaactgccagaaggatggcggtgccctgggaggaatatttccgactggctttgcaagagaaactgtctacccctattacttatgcctgggaagg

SEQ ID NO: 288574 - DNA, 82 bp, Homo sapiens
cacccgcctcccaccatggctctgaagagaatccacaagcggtgacggaggccctgcgggcgccaggcaaggtccccaactg

SEQ ID NO: 288575 - DNA, 100 bp, Homo sapiens
atcaggtcattaggatgctgtcctacggaaggagagctgcatgatctgattgcagagaaggatgccctgcagtggtctcgccatccagctacagtggagg

SEQ ID NO: 288576 - DNA, 75 bp, Homo sapiens
gttggcaagtcgaacaaagtcagctttctccaatctttctacatcccagaggaaaactttcacttatctcttctt

SEQ ID NO: 288577 - DNA, 98 bp, Homo sapiens
gcagcctggcatggcttctggggacctttacgagcactttatgaaaatgcatgctgagaagaagcacaaatgtagtaagtgcagcaattcgtacggta

SEQ ID NO: 288578 - DNA, 75 bp, Homo sapiens
caggacatcttcatttacagagcaacttgatgaaggtacacccaatagagaggatgactcactggttgtgtggaa

SEQ ID NO: 288579 - DNA, 76 bp, Homo sapiens
ccagagccaagtgcgagcccagcgggagaaaatcaaggaggagctggagttcctacgcgtggccaagaaggagaag

SEQ ID NO: 288580 - DNA, 82 bp, Homo sapiens
gaggaggcagccacggggcccctggccctgggcgctgcctatggcacagccaagagcggtaccggcattgcggccatgtctg

SEQ ID NO: 288581 - DNA, 98 bp, Homo sapiens
atcgacaagacgatccgggtaaagttccagggaggccgcgaaggtgaccattgtgaggtagatattttgttctaattttccagatgaggaagctgaga

SEQ ID NO: 288582 - DNA, 50 bp, Homo sapiens
ggaagggccaggatcgcgatcaatgggttcatagtggcgtcatgcacgca

SEQ ID NO: 288583 - DNA, 96 bp, Homo sapiens
tccaggaccctctggaagcctagaaatgagcccgaacccagccctcaccttctgcgtaaagacccatgaccggctgtactacatggtggccccatc

SEQ ID NO: 288584 - DNA, 82 bp, Homo sapiens
gttaactgtacaaactacacagctcatgatgaagataaaacgttacctgcagagtcgggatgtacaatagaggatcacgtaa

SEQ ID NO: 288585 - DNA, 90 bp, Homo sapiens
cccacttcttcagcttgggcaagtgtgtgcctgtgtgccgagacctcctgccccccgaggtctgcagtctcctgaacccagcagccatct

SEQ ID NO: 288586 - DNA, 90 bp, Homo sapiens
cgtgaagctcggtgaccttggtctgggccgcttcttcagctctgagaccaccgcagcccactccctaggaggaggaagccaagaatctgg

SEQ ID NO: 288587 - DNA, 97 bp, Homo sapiens
cgggagacgagaagcctgaaaagtcgcagcgagctggagccgccggagggaatgacagaggaagaggaagacaaacttctggcactgaaagacttca

SEQ ID NO: 288588 - DNA, 98 bp, Homo sapiens
gcgtctgccgcccacgtacatgcacgccatgtggatagctagcggccaggagaaatacagtggaaaatgcaaaacaacgaaattataaagcctgccaa

SEQ ID NO: 288589 - DNA, 99 bp, Homo sapiens
agtcaccactggacctccaaggaagccacgtgcagacatctacaaccttcgatctcctgacgagcagaagaagagttcaacatagagaaaggtcggctt

SEQ ID NO: 288590 - DNA, 75 bp, Homo sapiens
aatgaacttcacaagttcctcatctgggacactgctggtcaggaacgggaaatgatgccagtgaatgcgtagtcc

SEQ ID NO: 288591 - DNA, 83 bp, Homo sapiens
agcgccttcctcaacgacgcggacatggtcatgagctttgtgaacctggggagatacttcaggggattaccggaagattctgc

SEQ ID NO: 288592 - DNA, 100 bp, Homo sapiens
atggttgggcccgtcattgctaaaagtctgacccctgataatctggcagcagaaaagacctacaacaacctagatgtatctgtgactaaagccttgcaac

SEQ ID NO: 288593 - DNA, 83 bp, Homo sapiens
tgaaaaacagtaaagatggaaaaccagttattgaatatcaagaggaggagttgttgttggcctttaccagagtttgatccaag

SEQ ID NO: 288594 - DNA, 75 bp, Homo sapiens
aggcagagatcccaggtgcaaacctcaatgtggaggcttcaacggaccacaccaaaatgccatctcaaatggaac

SEQ ID NO: 288595 - DNA, 90 bp, Homo sapiens
gtaatggtgcaaagcctgaagtcagagacgagcagcaccagtgttccctggggaacctgaaggtccccctcagccagctgctcaccagtg

SEQ ID NO: 288596 - DNA, 87 bp, Homo sapiens
ggaatatgaaatcaagactaatcatcctgattcagcaagtgagtgtgtttcctgtaacaaatcgttcaagaaactctggtcccttca

SEQ ID NO: 288597 - DNA, 98 bp, Homo sapiens
tgtatctgtttttctcagaagagaattccacaaggtgtcatggagaaactccagctgggcccagagattctgcagcgggaaaatccaaggcttattta

SEQ ID NO: 288598 - DNA, 76 bp, Homo sapiens
ccggtgctgggggcccctgcgccgagtggacgcctaccgcatctacttggaagcgttgttgacgaccatggacatc

SEQ ID NO: 288599 - DNA, 73 bp, Homo sapiens
cgcctggggcgatggatccgtttacggagaatcatgtcaaccctgccatggacttcacgcagactccacctgg

SEQ ID NO: 288600 - DNA, 74 bp, Homo sapiens
cacatctgtgacataattaacactacccaggatggagtaccaagttcgatccatagcaagtcatgttcgtcctg

SEQ ID NO: 288601 - DNA, 101 bp, Homo sapiens
gactttaagaaaggaatgaacatgtatttaaccaagttccaacaaaagaatgctgccacaggtagcaaaacagtggtatgattttgaccgatcttcatttg

SEQ ID NO: 288602 - DNA, 71 bp, Homo sapiens
gagtggttgtgtggtcgcgtctcggaaaccggtagcgcttgcagcatggtctccacctctgggcaggagag

SEQ ID NO: 288603 - DNA, 100 bp, Homo sapiens
cgacgcccgcaggtcctcgcggtgcgcaccgtttgcgacttggattcaagccaaaactcgagaatttagggaacgacaagctcgagagcgtgactatgct

SEQ ID NO: 288604 - DNA, 50 bp, Homo sapiens
gccagagattgctcaggaagcaatggaggaattacatgaacgacagcctt

SEQ ID NO: 288605 - DNA, 121 bp, Homo sapiens
cgggaaggaagatccggcgcggggcacaggatccggagctggagcccccagcaggatggagctggagtgaggtggaggggccgcaagctgctgaccggcgtgtggaacactggtggtttgc

SEQ ID NO: 288606 - DNA, 50 bp, Homo sapiens
caggccatgctctggcaaaaacgccgagacgcatccagagctttcgtgac

SEQ ID NO: 288607 - DNA, 75 bp, Homo sapiens
ccatacccaataaccaggtgcttggcaaaatcgagcgggccattgttcaaagaggaaatctcccggaggtttaag

SEQ ID NO: 288608 - DNA, 75 bp, Homo sapiens
tgccttgtttttggattcagttctcctgtgtgcatggctttccaaaaggatgccctataaggactgccaggcaat

SEQ ID NO: 288609 - DNA, 75 bp, Homo sapiens
aaatccctgggctgaactcgcccatccctgaggtgttccaggtgcgaaaggtgcaaggcaccaacttgggcaaaa

SEQ ID NO: 288610 - DNA, 99 bp, Homo sapiens
cagcctcctcccccatgtaccacacctgtgtggccttcgcctggaccctgctctcagcggcccacgaggtggagttgcagcggcagaaggaggcggaga

SEQ ID NO: 288611 - DNA, 88 bp, Homo sapiens
ctagaagaatcagacgtgctccaggaggccagaaggaaatacatggagtttgacgagaaggacttacgacgggagatcagctatgcca

SEQ ID NO: 288612 - DNA, 100 bp, Homo sapiens
catcagatacactcatgcagcaaacacagttgtttacagctctaacaaaatagacgggtcagttaaatgaaagcatggaccatgggggagttggaccata

SEQ ID NO: 288613 - DNA, 50 bp, Homo sapiens
agggccaggcgccgctcagaacgtgttatagttttgccgctggactcttc

SEQ ID NO: 288614 - DNA, 74 bp, Homo sapiens
aatggataacttcttcaccgagggtttcgaaaaaacgatgaaatgaaagctatggatgttttaccaattttgaa

SEQ ID NO: 288615 - DNA, 101 bp, Homo sapiens
gaagaagaggccagtatgagatgctgtcagaggacccagatgatgtggtaccagttggccaaagaagagcctggtgttggtgcatgtgctttggactagca

SEQ ID NO: 288616 - DNA, 82 bp, Homo sapiens
caagaacgggaacaaaactctgatgacagacaaccttctgtgccttcatcaagctggttgtgtacccaccatgtccctggcg

SEQ ID NO: 288617 - DNA, 100 bp, Homo sapiens
gaattacctgcgatacagcttggagggaggacgatctgacaggtgccagcgagatttcagattcctgtaaacctctaaagaaaaggagtcgcgcctcaac

SEQ ID NO: 288618 - DNA, 100 bp, Homo sapiens
ggaagttctggggaaacgactcaacccatctgtgtggaagccttctctggtctgcggctcagggtgtccgcaatgttgccagtgtctgtctgcagattgg

SEQ ID NO: 288619 - DNA, 100 bp, Homo sapiens
gacctgcgcgcccgcctcggcccgcacgccaagcacgtggtgggctatggccaccttggtctcctctgagcctccggcctccataagacccaaaacagat

SEQ ID NO: 288620 - DNA, 50 bp, Homo sapiens
taacagttgctgccgccggaagtacagggtttttaatgaccacaacaagc

SEQ ID NO: 288621 - DNA, 100 bp, Homo sapiens
ctgtacaccccatcccagacgaagacagtccctggatcaccgacagcacagacagaatccctgctaccagggaatttggcttacggagatcatctttata

SEQ ID NO: 288622 - DNA, 100 bp, Homo sapiens
acttctcccgctctacctcagcctgcgggactgctcggctcggcttctaggcgtttctcttcagcaacgggtagcagaattggaaaaaattaatgcagaa

SEQ ID NO: 288623 - DNA, 98 bp, Homo sapiens
aggacgccgtgcgcgccctgcgggaccgcatcgaccgcctggagccttccttgaatccagaagctggcaaacagcatcagccatgcagacctattggg

SEQ ID NO: 288624 - DNA, 75 bp, Homo sapiens
ggccctgagtgaatacccagaaaatttcatgcacagttggcgggcagctcccaggtctccatgagtacggcgccg

SEQ ID NO: 288625 - DNA, 105 bp, Homo sapiens
tgaagattgctcctggagcagttgtatgtgtagaaagtgaaatcagaggagatgtaactatcgtgttaaaagatcactgaagttggatggtctgttagaagaaaa

SEQ ID NO: 288626 - DNA, 100 bp, Homo sapiens
tgcacagcccggagtggagcgaggagcgcttccgcgtggacaggaagaaacttgaggccatgttacaagactttcaaacctctggttgaaagaaatatac

SEQ ID NO: 288627 - DNA, 83 bp, Homo sapiens
ccgagaagcgggcagccgagaaggtgtccgaggcccgcaaaagctcagctggaagctcagaaagccacgcaggacttccagag

SEQ ID NO: 288628 - DNA, 74 bp, Homo sapiens
caaggtgacccatgcattggttaatatcaggattttatggaagaccttgggttatggaacagagaaaagaactc

SEQ ID NO: 288629 - DNA, 100 bp, Homo sapiens
ctagggctccttacccaagtacatatcctgtaagaccagaattgcaaggccagggtgcttcaaggatgaccgcatcgtcttctggacttggatgttctcc

SEQ ID NO: 288630 - DNA, 100 bp, Homo sapiens
gagataacatcctacatcactgaagatgatgtggtctacagaccaggagcagaagcagtctcaaatgctggagatgcaagtggagctcagcagtatgaaa

SEQ ID NO: 288631 - DNA, 75 bp, Homo sapiens
ctacgtcaaggagaggtctaaggttttataggatcacattgacaaaagtaccatggagttttatgagtcagcata

SEQ ID NO: 288632 - DNA, 98 bp, Homo sapiens
ggaatttaagaaacatccacagcagcgactggcccaagttctttgaaaaggttctcagaggcactgtgactgacttccctggatttgatgagcgggct

SEQ ID NO: 288633 - DNA, 101 bp, Homo sapiens
tagtggttcctggatgttcctggatgcctgacatcacattgatacatgctggaggtctggctcaggttaccttttcgacaaaatgattcatctagtcattg

SEQ ID NO: 288634 - DNA, 50 bp, Homo sapiens
tggaggagtcccgctcgaagctaggaagtggttacctggaaggaaaggag

SEQ ID NO: 288635 - DNA, 101 bp, Homo sapiens
gccaaggtgggcagatcacctgaggtcagagtcagagttggaatcagggctacggcaactactggaaccagggctacggctaccagcagggctacgggcct

SEQ ID NO: 288636 - DNA, 100 bp, Homo sapiens
gcggatgctgcccgattacttcaaccaccgagtgatcggaactccttgcctttgccgattggaagcattaacaatttcatcctttctacgtgactgtaca

SEQ ID NO: 288637 - DNA, 75 bp, Homo sapiens
agctgctgaagcgggtgctcgtccgaccgagaaggacatcctgctgcgacctgagctggaggaactcaggaacaa

SEQ ID NO: 288638 - DNA, 75 bp, Homo sapiens
gatgatcagaaacttatgatgaatatacagatgttgccacaggaatctaatctgaaatcgtacaaatggaaatga

SEQ ID NO: 288639 - DNA, 100 bp, Homo sapiens
gaaatgaagagttttccaaagaaagatttgatatagctattatctattacaccagagccattgaatatagggttacccctctttgtccagcgcacagtgg

SEQ ID NO: 288640 - DNA, 75 bp, Homo sapiens
atcccaggagcccatcccgcttcctggtgttcttctacccggaggacgagaagtatatcagagaattccctggta

SEQ ID NO: 288641 - DNA, 71 bp, Homo sapiens
gagttcagccgccgcctcatcaaggacctggagagcatgttcaaactgtacgtgcattacttcagtggcct

SEQ ID NO: 288642 - DNA, 100 bp, Homo sapiens
acccaactgctggcacagagactcagccggacctgcttccgccagtggagacaacaggaagtacatgacctgctcagtgactatgagctcaaatactgtt

SEQ ID NO: 288643 - DNA, 75 bp, Homo sapiens
gggagttgtcggcgccgcggccgctgcggacggacgctcgcctgccggctgagaccagcatctcagacatgtcga

SEQ ID NO: 288644 - DNA, 99 bp, Homo sapiens
gttttcttatttagccggagtgagaagcaagaaggccctggacacagcaatatctctgggctttcacaggctgtcatggaagttcagactttgagacca

SEQ ID NO: 288645 - DNA, 50 bp, Homo sapiens
actcaaactgtgagaacttcagggccgttgctccagggagaactgcaaat

SEQ ID NO: 288646 - DNA, 100 bp, Homo sapiens
ggcaggtcaatcaaagggaaaactaaggtggaggtggcgaagatgattcaggaggtgaaggtcagtgaagtttaacaagggctatactgctcttagccag

SEQ ID NO: 288647 - DNA, 100 bp, Homo sapiens
atagaatcctgacctgtgaaaacaatgactctgcaataagggtgataaaagaaaatgtggctgaagttacccgaagttcagcttgcagtgtaattcagaa

SEQ ID NO: 288648 - DNA, 100 bp, Homo sapiens
gctgtagtctgaatcaacctaagttttaaacagaaggtgaacctctgaggttatgatgtgattgctcaagcccaatctgggactgggaaaacggccacat

SEQ ID NO: 288649 - DNA, 88 bp, Homo sapiens
tcgggcattccatgcagccttgcggaactctcccgtcaacaccaagaatcaagctgtgaagaagcacatggaacaagcagctataccc

SEQ ID NO: 288650 - DNA, 95 bp, Homo sapiens
cttcggcagcagctggatgacctcagagctctcaagcatgaacttgcctttaagctgcagctgtgtgccaaccacgatgcaaacatggtgaatgt

SEQ ID NO: 288651 - DNA, 80 bp, Homo sapiens
tttggcttaacagatgatcaggtttcaggcaaacaatttacattttcttatgaaaatgaagtctgcaaacaagattactt

SEQ ID NO: 288652 - DNA, 100 bp, Homo sapiens
gtcagttccttgtggagccggagctgggcgcggattcgccgaggcaccgaggcactcagaggagcctcccgcgacgatgcccctcaacgttagcttcacc

SEQ ID NO: 288653 - DNA, 82 bp, Homo sapiens
ccgctgtacagattcatcaccacgtttttggtgttgagccagacttgaccagggaaggcggcagtattcccgtgaccttgac

SEQ ID NO: 288654 - DNA, 50 bp, Homo sapiens
cgccgccgtcagagccgccctatcaggagagcaagccctggaggttcact

SEQ ID NO: 288655 - DNA, 75 bp, Homo sapiens
catctccccaccctctcttctccaccagccaacgtccgggaaaaacgatgaagctgtggtctaccaatctagaca

SEQ ID NO: 288656 - DNA, 80 bp, Homo sapiens
ggactactggtgcctgcgctgaaaaagctgggatctagcaattgggaggcagcagacttgggtaatgaagagagaaaaca

SEQ ID NO: 288657 - DNA, 83 bp, Homo sapiens
cttagactaccccaggaacccgcgccgcgagggctccttccctcaggggcctcaaatctgaccctatcggaaactcaaaatgg

SEQ ID NO: 288658 - DNA, 100 bp, Homo sapiens
cttggccctctttaaaaagaaataataaaatgggagagaatgaagcaagtttacctaacacgtctttgcaagatcattgagactgaaaatatgatggacc

SEQ ID NO: 288659 - DNA, 75 bp, Homo sapiens
tgatgccgccatgttttatacaaaccgagtcctcaaagagtacaaagatgtctcatcatgtcactacagtgaaca

SEQ ID NO: 288660 - DNA, 80 bp, Homo sapiens
cgaccggtggctgtggcgacatgtcgacctgacgctctacacggcactgggtgcaagttcctgtgaaatatgccacgagg

SEQ ID NO: 288661 - DNA, 80 bp, Homo sapiens
cgtccccggcgcgaagaggctggactcggattcgttgcctgaggaatggttagactctccgaactcaaatcgacagttca

SEQ ID NO: 288662 - DNA, 50 bp, Homo sapiens
gccaccccagccagtggaaccaagattgctcgctgtaagcagctcatctg

SEQ ID NO: 288663 - DNA, 98 bp, Homo sapiens
cagaccaaggccacttcttgcaaaccacatacacagcacaaagaatgtcagacaggctgggttgcggcccatttgtgaatttatgaccttcaatttct

SEQ ID NO: 288664 - DNA, 98 bp, Homo sapiens
tgaggcggcgcggcagcggagggacggcagtctcgcgcggctcttgtcaggatggtgaagctgttcatcggaaacctgccccgggaggctacagagca

SEQ ID NO: 288665 - DNA, 82 bp, Homo sapiens
ccttgtgctcgttgtcgccgcggtcctgctgttggtctgcagcccagagggcaccttctgcaaacatgtctgtggatcccct

SEQ ID NO: 288666 - DNA, 76 bp, Homo sapiens
tgaattttggttttactataaatccagagcatcctggccagaacaagccaaggagccaagacgagagggacacacg

SEQ ID NO: 288667 - DNA, 43 bp, Homo sapiens
gcggcgactactgccaaccccgtattctaccttgtaaatactg

SEQ ID NO: 288668 - DNA, 100 bp, Homo sapiens
gcggaacccgtgggcctgtggactgcagcctcggcggtcagcagggaagaaccccacagacgaatacctggagggcatgatgagcgaggccccggggccc

SEQ ID NO: 288669 - DNA, 83 bp, Homo sapiens
cttatggagccagcatattccaggtttttagaacttcagccataaaaatgggcagaattttccttgatcatatcggtggtacc

SEQ ID NO: 288670 - DNA, 75 bp, Homo sapiens
cgcgcccctcggacggccacgagactcgggtgccgtgagcgatgtggagatgcaggaacactatgatgagttttt

SEQ ID NO: 288671 - DNA, 71 bp, Homo sapiens
cgggctccacatggctgaagcaggcaaccaggaggctggactctgtgaagctgagcaggagcagatgcgga

SEQ ID NO: 288672 - DNA, 87 bp, Homo sapiens
cggttcttggtgcccctgggcatcaccaacatagccatcgacttcggggagcagcatattgtttgcagacagtgactgaggataacc

SEQ ID NO: 288673 - DNA, 87 bp, Homo sapiens
aagagaagcagaactgaagaaggaatataatgcattacatcaaagacacactgagtactctaccacctatgaagagaggaatatcac

SEQ ID NO: 288674 - DNA, 75 bp, Homo sapiens
caggggtcagtgatggagctgcttcaggttgccaaggaaagtgtactgcagttttacccgaaagctaatatcgtt

SEQ ID NO: 288675 - DNA, 83 bp, Homo sapiens
acaggatgcagaaggagatcactgccctggcacccagcacaatgaagatcaagtttgcgcgataacaatatctcagaccgagg

SEQ ID NO: 288676 - DNA, 90 bp, Homo sapiens
cttttgtagaagtttcctttgctggaaaaaaggcaccccctgtaatggcctatcctgctactacaccaacaggcatgataggatatggaa

SEQ ID NO: 288677 - DNA, 75 bp, Homo sapiens
ggtcctgcacatgcaattcagggaaaaccgtgaaaaagtatcatgagaaatatggctacacacacctttctgcag

SEQ ID NO: 288678 - DNA, 98 bp, Homo sapiens
gagacaccgctatcacagctgctgcaatcgcttgggagagctcctgggccacccctcctttcaggtcaagcgggggctcaacccccagacctccagaa

SEQ ID NO: 288679 - DNA, 100 bp, Homo sapiens
aaggtgccccgcgctggggtcccgagggtcttgcagaaacagtccattgtgaccttcagcctgtgggccccgagaggggcgaggtgacatataccactag

SEQ ID NO: 288680 - DNA, 51 bp, Homo sapiens
gtgagaggcatgcttccttagaccagtatacaattggaccgtggatgaggt

SEQ ID NO: 288681 - DNA, 74 bp, Homo sapiens
tggccgccccgagcggagcctggagacacgatgaggcgagtggtacgacagagcaagtttcggcatgtatttgg

SEQ ID NO: 288682 - DNA, 100 bp, Homo sapiens
aagctcctggaaaccagaggcccaacaacacctgttgcttttgttggtgctgttgttgcagctgctcctgatgacacctttgaggccctgtgcatcgagc

SEQ ID NO: 288683 - DNA, 100 bp, Homo sapiens
taaggggagaaggaatgtgtgaccatttccaacggtttgcctgcaatgagatttcattctctacatttaaaggacatcctttctgagctgctgtgaataa

SEQ ID NO: 288684 - DNA, 98 bp, Homo sapiens
gctttagtggcagcatgaagcgcaccccgactgccgaggaacgagagcgcgaagctaagaaaaactgtcttctcagattactctcctagaggctcaga

SEQ ID NO: 288685 - DNA, 76 bp, Homo sapiens
ccttaagaaacttaaagcctggaatgatatcaaaaaggtacaagtaagttagtggataacagaccacctgccctag

SEQ ID NO: 288686 - DNA, 101 bp, Homo sapiens
atttgggatcacttccaacagtgacgtgttctccaaataccagctcgacaaagatggggttgtcctctttaagaagcactatggagatgaccgccatggcc

SEQ ID NO: 288687 - DNA, 100 bp, Homo sapiens
tatcgtgcctctagcaaaaagggtggacaagttccggcagttcatgcagaatttcagaactcctgtagcctgtaataccagctgtgggtactactctcag

SEQ ID NO: 288688 - DNA, 75 bp, Homo sapiens
gctatggcgactttgacttcctgccaaaatcctgttaccctagcaacaggaccaggaagaaacaggctcctgcca

SEQ ID NO: 288689 - DNA, 100 bp, Homo sapiens
caaatatgagtgtgtggccaccaacagcgccggcgtgcgctactcctcacctgccaacctctacgtgcgagggggggccctcagcctcttggccttgaac

SEQ ID NO: 288690 - DNA, 75 bp, Homo sapiens
tggacaccctgtcgcagcttctgaagacaccctgtagaccttgaatctgcagaaagcagctccgagccccagacc

SEQ ID NO: 288691 - DNA, 100 bp, Homo sapiens
ctgcaatggcccccaagggcatcttctgtaacccgtacaacaatctgatcttcatctggggcaacttcctcctgcagagagtctcgctctgtcgcccagg

SEQ ID NO: 288692 - DNA, 100 bp, Homo sapiens
caaaaagacctgctagagccattattgcccctgatccgggccaaggtggtggggaagaagctggtaaaggaggggcccttcggcacgctggtctacacca

SEQ ID NO: 288693 - DNA, 90 bp, Homo sapiens
ccgcgacgagctatccgggaaagggccgaatgcgatcaaacctaatccgcgagacttgctaagctctgccaccctctccatggcgtatgc

SEQ ID NO: 288694 - DNA, 99 bp, Homo sapiens
acaccatctgtggtcatgtcaacagtagcacaagggaaatcctcattgacgattcaatttgttgaaggccaatttgtggactcctacgatccaaccata

SEQ ID NO: 288695 - DNA, 100 bp, Homo sapiens
caattaaggatgactgaaaacatcctggaatcaaatagtgttacggcaacaagacacacaaactcgggccacttctaagagtctcttacctgttaggtcc

SEQ ID NO: 288696 - DNA, 74 bp, Homo sapiens
caaaagcaagatatactactaactttgaaatggaataaggtgctggagaatctggtaaaagcaccattgtgaag

SEQ ID NO: 288697 - DNA, 100 bp, Homo sapiens
tggacaaggctttggcaaagctggggattggccagctgactgctcaggaagtaaaatcggtgtgcctaccgcatgttgccgctgctgtttctgctgggac

SEQ ID NO: 288698 - DNA, 80 bp, Homo sapiens
ccttccccacgcaaccccagatccatttacactttacaaactcttcatcttggcttatacctatactgcctgatatgctc

SEQ ID NO: 288699 - DNA, 75 bp, Homo sapiens
taccctggaggagattctggggcagtatcaacggagtctccggggcgttgacccggacgacacctataatgagac

SEQ ID NO: 288700 - DNA, 75 bp, Homo sapiens
cagttgttgagcttctcttggctcatggggctgaccctactcatcgactcaaggcgggatgtagctcattttggg

SEQ ID NO: 288701 - DNA, 98 bp, Homo sapiens
gaccagccgcacgccgaccggcgccgggagatcctggttaaacacagtgggaatatcacttttgatgagattgtcaacattgctcgacagatgcggca

SEQ ID NO: 288702 - DNA, 108 bp, Homo sapiens
gaaatgaaatgatggccacgcgtcggactggtctgtctgagggagatggtgacaagctcaaggcctgcgagagggtatattacctctctctggaattttacatgggcc

SEQ ID NO: 288703 - DNA, 75 bp, Homo sapiens
aaaaaggccaggttggagccccgggatggggactatgcagccatcgtcttctttgctaacaaccgctttgagaca

SEQ ID NO: 288704 - DNA, 100 bp, Homo sapiens
ctgggcacggtgaagcccaatgcaaacagcttcagccccaggaaatcagcccccctcctactgccaacctggaccggtcgaatgataaggtgtacgagaa

SEQ ID NO: 288705 - DNA, 82 bp, Homo sapiens
tacctacatcctgagctacatggccccctggtttagggagggtggatagatacttctcaagacatcacacagcgtgagtcaa

SEQ ID NO: 288706 - DNA, 97 bp, Homo sapiens
gtttttgaccagaaaaccgacaaccttcccagaaagtccaagctcgtggtgggtggaaaagtgttcgccgagggaccacttaatagtgagtcttcca

SEQ ID NO: 288707 - DNA, 82 bp, Homo sapiens
gcagcccccagccttgcgcgtcgtcgctacctcctcggacaggtagcagcagcagcagcagcagcagcagcagcagcagcag

SEQ ID NO: 288708 - DNA, 74 bp, Homo sapiens
tactggagtaggtgttagtaaggcaccgtccacattttccaaattgaagatggagatcaagaagagccggcgcc

SEQ ID NO: 288709 - DNA, 108 bp, Homo sapiens
agaccctggagcctcagttggaagcagccgatccagcctgcggagcctgtggggcagcaatcagccatgactgcctttgcactgtccatgctctcagcccaccacctc

SEQ ID NO: 288710 - DNA, 76 bp, Homo sapiens
tctagcagtggcagtggactcggctccggaggtggcagttaaggtaacccaggcctgcacagtcccatgttggatc

SEQ ID NO: 288711 - DNA, 82 bp, Homo sapiens
ggccgtagcggcttgttggataaggcagctgacacacaagagttcaggaccaaactgcacaaagtatttcgtgagatcaccc

SEQ ID NO: 288712 - DNA, 88 bp, Homo sapiens
gtcggggaaccatggctgccccgagaggacactcatgaggaccatgatacttccactgagaatacagacgagtccaaccatgaccctc

SEQ ID NO: 288713 - DNA, 97 bp, Homo sapiens
accggcacccagacaggtggcgacggcagaggaggtaagcttgatgattaccaggaacgaatgaacaaaggggaaaggcttaatcaagatcagctgg

SEQ ID NO: 288714 - DNA, 75 bp, Homo sapiens
cctgctggaggagcgcttccgggcctagccagggttgagttctcacccacctgtgccgccctgccttgttacctg

SEQ ID NO: 288715 - DNA, 101 bp, Homo sapiens
acagaacgcggctcccagccacaccaagttcagaatgtggatatactgaaagatcctgaaacagtcaagcagcttggtagcattttgaaaacaaatgtgag

SEQ ID NO: 288716 - DNA, 98 bp, Homo sapiens
ggagctcccccaagagccggaaagaattgccaatgctactcccatccctggagacttgcttcgagaaaatacagatgaggtatttccagatgaacagc

SEQ ID NO: 288717 - DNA, 76 bp, Homo sapiens
caacgccaggcgccgctcctttacaggtgacagagctgaatgaacctctctccaatgaagatcgaaatctcctctc

SEQ ID NO: 288718 - DNA, 90 bp, Homo sapiens
gaccctgcccttgccagaatttcctgcgctgttccacctcattcaacttcagagcctcagctcaaaggcatcgtcaccaaactgttctgc

SEQ ID NO: 288719 - DNA, 90 bp, Homo sapiens
cgaggatgatttcggaacctggagaaaatatcccagatgcagtgactggttactacctgaaccgtgctggctttgaggcctcagacccac

SEQ ID NO: 288720 - DNA, 90 bp, Homo sapiens
tagtattgcatcctacagatgtgctgtaaacatcaaaagaagacggtgggatcaggagatggtagattttcgttccgtcacccaggctgg

SEQ ID NO: 288721 - DNA, 75 bp, Homo sapiens
gaagatggtataaactggtccatcagtgacaaagacattgaggaaccatctctttttgctgttgccaaattgtta

SEQ ID NO: 288722 - DNA, 88 bp, Homo sapiens
cgggcacctgtgtcagccctgccccttgcccctaaccacctggggttggggtgctggaggactgcttcaccttcctgggcatcttcct

SEQ ID NO: 288723 - DNA, 75 bp, Homo sapiens
ccttccgggcagagaccagagggaagcaataccaagtttccaggcccgaagagcatcccagactattgggactcc

SEQ ID NO: 288724 - DNA, 82 bp, Homo sapiens
ccgttatgaaatgtatcgccgctcagctttccctaaggcagccatcaaaagggctgacaagacctacatgttacgagaatat

SEQ ID NO: 288725 - DNA, 82 bp, Homo sapiens
agctggcgccgctctcgcagtccctacagccctgtgctcagactctatcaagaagaatatctaatccgtaccttgaacatac

SEQ ID NO: 288726 - DNA, 98 bp, Homo sapiens
ttgttcagggaccagcggaacgaggctttctgtcgttaataggcctaatgcatggaaagctaacaggatggagcacaagtcaggatccctttcctcta

SEQ ID NO: 288727 - DNA, 87 bp, Homo sapiens
gctgcgaggaaaatggcggcgggaggtctcctctgagcctccggcctccataagacccaaaacagatgacacctcttcccagtcccc

SEQ ID NO: 288728 - DNA, 87 bp, Homo sapiens
acgtgaaacatgtgaacactcaagtgaagcaaaagccttccatgattacgaccgtataatagacgctggccccaaaggaaactactc

SEQ ID NO: 288729 - DNA, 100 bp, Homo sapiens
ctcggacgggcaagccctggtcctgggcaggggacccctgacccaggttacggaccggaagtgctccagaactcaagggatacaccaacatcagctggac

SEQ ID NO: 288730 - DNA, 102 bp, Homo sapiens
actatgtcttcattgaattttgtgttgaagacagtaaggatgttaatgtaaattttgaaaaatccaaacttacattcagtactatactggcaattgctggag

SEQ ID NO: 288731 - DNA, 100 bp, Homo sapiens
cccgagtgactcactcggccaaggaaactcccagggcccgcccaggacccccaagccgccgcggacgcagatcaggagaacctcagtctgacgacattga

SEQ ID NO: 288732 - DNA, 75 bp, Homo sapiens
ctaattttgtggatagagaaactgttggaactgctttacaaagtattttagatttgctcgaatatttgggtaccc

SEQ ID NO: 288733 - DNA, 78 bp, Homo sapiens
atcgacggcacctcgggggccacactgcaggcctccgcgctcagtgagctccttaataagcatttatagtcagttttt

SEQ ID NO: 288734 - DNA, 100 bp, Homo sapiens
agatcctggatggggtgaactaccttcacacaaagaaaattgctcactttgatctcaaggatcagatgtggccgcccagcagttgtgcacataggaggag

SEQ ID NO: 288735 - DNA, 100 bp, Homo sapiens
tgagaaaggaaagacttctgtgctcccgagaacttcctatcaggtacttccaatgaggtagcccagtttctctccaaggaaaatcaagtcattgtccgca

SEQ ID NO: 288736 - DNA, 50 bp, Homo sapiens
caacttggctactccctgccttgtgtggggcccttggaagaaaatcctcg

SEQ ID NO: 288737 - DNA, 82 bp, Homo sapiens
ccgcgggagaggtaaacagaacaccaggacatcccagagtctgggaaatggtgaaatgacaatggatgctctgttggctcga

SEQ ID NO: 288738 - DNA, 75 bp, Homo sapiens
gagaagtgattcttgtgggtggcatgactaggatgcccaaggaaactagcagagttgttcacatcatggattttc

SEQ ID NO: 288739 - DNA, 100 bp, Homo sapiens
cttcatgtgttcctgtagctctgatgagtgcaatgacaacatcatcttctcagaaggaaggcaacagcccccaggggagcaaccagggagtcaaaatcac

SEQ ID NO: 288740 - DNA, 82 bp, Homo sapiens
tacagcaccggcaagaccaccttcatcagaccgcgctgagcacgttcttccaagaaaccaacattcccaacagccaccacca

SEQ ID NO: 288741 - DNA, 88 bp, Homo sapiens
ttaagcagagaatggagaagaaggttgattccaggtgatccgggagccgaagccacgttcagcccgctggctcagcacctctatcccc

SEQ ID NO: 288742 - DNA, 82 bp, Homo sapiens
cgtggagaaggaagaactgtgctgagttgaagaagctggatctggcagctgcggcagcacacaccttctttgtagcaaaccc

SEQ ID NO: 288743 - DNA, 90 bp, Homo sapiens
ccgaaacctagccccggacgagaagcgcagcaacgtgcggtgggaccacgagagcactgggccagtgccattcgcgtcgcagctctggac

SEQ ID NO: 288744 - DNA, 74 bp, Homo sapiens
cagcttcaagcttaggaccacccaccatgcctatccagttcactagagaaaaaatccttattgcgagataacgt

SEQ ID NO: 288745 - DNA, 94 bp, Homo sapiens
tgtatttgaagataagtttaggccagacatggaggctctgaagggctccaagaagctggtgctgtctgtgtactcagcagggcgcatccctggg

SEQ ID NO: 288746 - DNA, 75 bp, Homo sapiens
ctattttggaactctgggatcaatttgaatacttgcagcttccaaaggaaagatacactctggaaatgattaaac

SEQ ID NO: 288747 - DNA, 98 bp, Homo sapiens
gacgttcgagaggaagattcttacctctttgatctcgacaataaggccatcagcatcagcaaagccatcaacacccaggaggcccccgtgaaggagaa

SEQ ID NO: 288748 - DNA, 100 bp, Homo sapiens
cgagccgtgcgatctggacgcggcgctgctgaccgacatcgaagagaatagtgacagtggtacaggaaagaaagaaaaagaaaagaaaaacagaaagggc

SEQ ID NO: 288749 - DNA, 100 bp, Homo sapiens
cgagaacagcaatccagacctctctggagacgagaatgtaaagctacttcttcttctaatccaagcagcccagctccagactggtacaaagattttgtta

SEQ ID NO: 288750 - DNA, 83 bp, Homo sapiens
gggcacgacctctcggacacggtgcaggcaggtgctgggcgtcctcttctttgccatagcctgcttcttatacaagcccctgt

SEQ ID NO: 288751 - DNA, 74 bp, Homo sapiens
tccaaatactgcatatcagaaacaacaggtgttccatttggtttaaaaaatacttcaagtctcaggcccttaaa

SEQ ID NO: 288752 - DNA, 82 bp, Homo sapiens
tgagaaaagcgagaccgcgtgcgaggaccgagtgaagacatttccacctggacacctgaccatgtgcctgccctgagcagcg

SEQ ID NO: 288753 - DNA, 75 bp, Homo sapiens
cctttcctggatgaggatggctgtggcttcgtaactactccagacccccagcgtatagtggggtgcccagtgcaa

SEQ ID NO: 288754 - DNA, 74 bp, Homo sapiens
atgccttctattatgagaacaatctttgggaaaaaacaggtggtaaggtgcgccaaggccaaagccagaataaa

SEQ ID NO: 288755 - DNA, 101 bp, Homo sapiens
gcatggatatctctactcgctccaaaggatagagggaggaatcagcagcttggaaattcaagcacgtgatctggcgggatgggcgtttgcctaacgtattt

SEQ ID NO: 288756 - DNA, 76 bp, Homo sapiens
cctattatcagatcaaccaccaaagtgggaaacattgaaatcaaggtgtgatgaatgcagactctgctaccatttt

SEQ ID NO: 288757 - DNA, 101 bp, Homo sapiens
cctcccagtacgttgtgtgaagagtatcattcgacagatggagttggctgtgggtccattctgtagacgagtatctgatttaggaaagtcctatcggatgc

SEQ ID NO: 288758 - DNA, 82 bp, Homo sapiens
ccagtcccaacttcgggccccggccccgcgcgccccggcccggccccgcgagtcctcctgcatatgcccaagaggattggga

SEQ ID NO: 288759 - DNA, 75 bp, Homo sapiens
ctcttgctggagccgggctccctctacatccttaggacatttcattaccatccagaagtgtctcccactgaaggc

SEQ ID NO: 288760 - DNA, 100 bp, Homo sapiens
ttttcaggaccaaaattgtggaaaagtcactctggccctgtttgtgctcttcgtcctggcctacatccacatcgtcttctcccgctcgcccatcaactgc

SEQ ID NO: 288761 - DNA, 80 bp, Homo sapiens
gaggcaggagagggtagttgtgcttccctagatcagctgtttcatgtattagccttgcacatgcggctttatagcattga

SEQ ID NO: 288762 - DNA, 96 bp, Homo sapiens
agttcaaatggcctgtttcaagtttctgatataaaacgatgacattttcaggaaaatcctggatcccattgaagataccacgctgcatgtgtcctt

SEQ ID NO: 288763 - DNA, 75 bp, Homo sapiens
cgctgaacggcttgaggctccagtcaaaaaccattaagaacctagaagtcggaatccggaagaagatcgaacatg

SEQ ID NO: 288764 - DNA, 95 bp, Homo sapiens
gttgacagcctttcagctgctgtttgcctggagggataaaacagctcgcagggaagatgaaagttacggtgatcaagttgttcctgcagcacagt

SEQ ID NO: 288765 - DNA, 80 bp, Homo sapiens
tattttggctgctgcaggagccattttaggcggctatgagaggttttcctccgagtacccagaattctgttctaaaacca

SEQ ID NO: 288766 - DNA, 82 bp, Homo sapiens
gagcccggagcagctggctggctttgataagtacaaggaactctccggagtcctttctgtattgttgtgattttgcttctgg

SEQ ID NO: 288767 - DNA, 80 bp, Homo sapiens
tcggccgccctgcccagctgcctgcccccggaggtgcccacgcagctgcctggacaaggtggcccagttgaaatccttcc

SEQ ID NO: 288768 - DNA, 75 bp, Homo sapiens
cgtggctcaagcaggacaatcgcactttataccacctgcgattactaacccctgaacagtgcccaagtgttgtct

SEQ ID NO: 288769 - DNA, 75 bp, Homo sapiens
cttctgaataaaccctgtcaaatggcgttttttagagtggaccatggccttaagaagctcattcacacagaagac

SEQ ID NO: 288770 - DNA, 90 bp, Homo sapiens
cagaggtgcctggggcaacctccaccttgacggttccagaatttcacggtccctcatggtgtctcactccagcagacagaggattgtgtc

SEQ ID NO: 288771 - DNA, 89 bp, Homo sapiens
cacacctccggaccgagggacgcggctatgacagagactccactttcaatgtgtttgtgggaaaaggacagctgatcacagggatggac

SEQ ID NO: 288772 - DNA, 101 bp, Homo sapiens
gggcctgtcctgcttcggctccgtcaatgggtccctgttcacatcctccagtgagaaagatcagtctaaagaaaaggagaagaaagtgaaaaaaacaattc

SEQ ID NO: 288773 - DNA, 74 bp, Homo sapiens
ccaagcattggtatctacggcctggacttctatgtgggacagaatgatgctgctgaaattggaacaagaaattt

SEQ ID NO: 288774 - DNA, 90 bp, Homo sapiens
aatagagaaatggttgttcaactactagatgactttaaaatatcaggagttaatggaacacacatcgtggacatcaagcctgctaacatg

SEQ ID NO: 288775 - DNA, 100 bp, Homo sapiens
ctgccgaggcgttcggtcctgctgttgcggccgctgccccagggctgcggggacggtacctgtctgaggaggaggtgctggacactgagaacccatttgt

SEQ ID NO: 288776 - DNA, 100 bp, Homo sapiens
aatgtgtccattcgagggcggatcctctctgaatgtgattgatggagacctctgtgagcagttcaattccatggaacccaacaaacaaaagaacgtctct

SEQ ID NO: 288777 - DNA, 96 bp, Homo sapiens
taatttcaacagaagagtgagagatggaacccgaagaagaaaggattcgttacagccagagattgtggctgacaagattttgaaaaagaaagaata

SEQ ID NO: 288778 - DNA, 100 bp, Homo sapiens
aagagcgccttgggacagggggatttggaaatgtcatccgatggcacaatcaggactgcatcgacgtaggctggtgggaaggagagctgaacggcagacg

SEQ ID NO: 288779 - DNA, 80 bp, Homo sapiens
agccgatccagcctgcggagcctgtggggcaggggtagaaatatttctgtcatggctcattcaaagactaggaccaatga

SEQ ID NO: 288780 - DNA, 75 bp, Homo sapiens
cctgggactacgtgcaggctcaggtgttggggatgtcctttgcactgaccctgaactgccagattgacaaaacca

SEQ ID NO: 288781 - DNA, 100 bp, Homo sapiens
attactgcagcacaaaaagaagctcagaagtcctcagatattggtgccaactctttttaacttgctatcaagaacttcagaggacgaggaaacaatcgtg

SEQ ID NO: 288782 - DNA, 75 bp, Homo sapiens
cagcctgcggagcctgtggggcagcagctccacagctgggtcctgctcctcagacaagatggggccagaggcggc

SEQ ID NO: 288783 - DNA, 101 bp, Homo sapiens
aaaaaagagaggatttgcttttgtaacttttgatgatcatgatacagttgataaaattgttgaattgcggcgagcagtaagaagcagcgtgtggaaaaggg

SEQ ID NO: 288784 - DNA, 98 bp, Homo sapiens
tgggaagactaagactttagatccaaaggctgtctttcagagaacaaagagcaatggtggaacaaagcggcaaaagatatcccatcaaaattatatag

SEQ ID NO: 288785 - DNA, 50 bp, Homo sapiens
cgaggtgttgcggacgctggccggctggagtgcggtggcgtgatcttggc

SEQ ID NO: 288786 - DNA, 100 bp, Homo sapiens
acccagggcagcctgctttcctttatgatctaccaggagagcgtggggagctatgtgcaggatgtatttgagttccgttatgccaagatgccagatgaac

SEQ ID NO: 288787 - DNA, 82 bp, Homo sapiens
caacccctgcactgataacgtctgttacagagtactgggatttaatgaatttgtctgaaaaacatgataagataccagaaat

SEQ ID NO: 288788 - DNA, 75 bp, Homo sapiens
tctggcacgcggctgcctgcactgaccgacctgcctagagctggaacgttacctccagagcgagccctgctatgt

SEQ ID NO: 288789 - DNA, 90 bp, Homo sapiens
cactaagaacaacttctttgttgagaagaatccaactattgtcaatttccctattacgagcgaatccagccacagacctgagaggcgcag

SEQ ID NO: 288790 - DNA, 87 bp, Homo sapiens
tctggagaactagtcctcgactcacgatcatatctgaagatattagtgagctacaaaagaatcaaactacatctgtagccaaaattg

SEQ ID NO: 288791 - DNA, 87 bp, Homo sapiens
gcccagcaagagattaaagatgcagtacgccacggggccgctgctcaagttccagatttgtgtcgagttatagcagtgctggattgg

SEQ ID NO: 288792 - DNA, 111 bp, Homo sapiens
aaggatgtggggcagatgctgatgggcaaactagaaaatggacccaagtggggtcaaagtgctggaaacagcagaggacatccaggagaggcggcagcaggtcctagaccg

SEQ ID NO: 288793 - DNA, 74 bp, Homo sapiens
cgctgccagtttgcacagcagcagatagcctgggctggaagctcttctacgtcacaggctgcctgtttgtggct

SEQ ID NO: 288794 - DNA, 101 bp, Homo sapiens
tgaaaagcagcagagccgatgggtcatgaggatgtaagtgcgtttgaaggcttccacaccctctactccaggggccagccgggggaccaggctgctctctt

SEQ ID NO: 288795 - DNA, 99 bp, Homo sapiens
ctggcacccggtgcttatgtctttggctgccaaacgtaccaagaaagtcgggatcgtcggtaaatacgggacccgctatggggcctccctccggaaaat

SEQ ID NO: 288796 - DNA, 101 bp, Homo sapiens
ccaccgcacgttcagaagtcgggaagagccaggacttctgaatttaccttgaatacagacaggaggatgttgcctaaggaatagcagagatcttgtctcat

SEQ ID NO: 288797 - DNA, 74 bp, Homo sapiens
gaccgaccatgggcagatcccaggatgaggaagtacagacaattggtcagatagaactgtgcctcactaagcaa

SEQ ID NO: 288798 - DNA, 82 bp, Homo sapiens
cgaggcgaccacgaaaacggtgaaggtcggaaccgacagcctcctccgagaagggctgtattcatcaccaaagaaaaaactt

SEQ ID NO: 288799 - DNA, 100 bp, Homo sapiens
cgtggccatgctcatgattggggtctttggctgcaccctccaggttatcaatactctggctgaccatcatcatcgtgggactgactttggtggaagtcct

SEQ ID NO: 288800 - DNA, 51 bp, Homo sapiens
atcggatgctgaagcagatgcttttcaggtcagagccctatgtgaccagcc

SEQ ID NO: 288801 - DNA, 90 bp, Homo sapiens
ggatgttgctgaacagttggagaagatctatgggtcagacagaattcatgacgtatcccagactttactcaaggcaacactggacagtgt

SEQ ID NO: 288802 - DNA, 100 bp, Homo sapiens
ttggagctcatcagactgaccgtgtcttacatcagttcagagagtataaccccgttttcacacgaatggccccttcacatatttgaagactaccgtcgtg

SEQ ID NO: 288803 - DNA, 74 bp, Homo sapiens
ggaagcctgtcccgttgtcagagtggaagacagcatcgatggcagcaacgtgacggtcaccccagggcctggag

SEQ ID NO: 288804 - DNA, 100 bp, Homo sapiens
ccccggtgcaagaggcgcaaacaagccaatcccaggaggaaaaacggtgtcgtgaaaactacccctaaaagccaaaatgggaaaggaaaagactcatatc

SEQ ID NO: 288805 - DNA, 82 bp, Homo sapiens
gggtgctgggcctctgctgcgtcctgctgaccttcggtgtggtggacacaggcctattcatcaacatggctgagagagtcta

SEQ ID NO: 288806 - DNA, 75 bp, Homo sapiens
agagagtgagagcgctcctggggacttctccctctctgtcaagttatcaatagtctggctgtctatcgtcatcgt

SEQ ID NO: 288807 - DNA, 100 bp, Homo sapiens
ccttctccgaggcgcagaagtggattgaggtcatttgattgcccgcctcagaacgatggatctgcatctcttcgactactcagagccagggaacttctcg

SEQ ID NO: 288808 - DNA, 51 bp, Homo sapiens
ggtgcagagaccagcatccttggagaagttattgccttgtctgtcaagatc

SEQ ID NO: 288809 - DNA, 90 bp, Homo sapiens
tggagagggagtgatgtcttccagactcggtgctgtacccgccgtaccaggatcatctatgaccggaaattcctgatggagtgtcggaac

SEQ ID NO: 288810 - DNA, 50 bp, Homo sapiens
gcgatggcagaaatgaaccctgcacaggcccagacatgtccgtccttgta

SEQ ID NO: 288811 - DNA, 82 bp, Homo sapiens
gctcggagcagcagcctctgagatgtggacgagtgctcactagcagaaaaaacctgtgtgaggaaaaacgaaaactgctaca

SEQ ID NO: 288812 - DNA, 74 bp, Homo sapiens
ggcgaacagccatcccgggcactatgtgaatttggggagcatcagatccatgctgctgctgactcggagcccca

SEQ ID NO: 288813 - DNA, 75 bp, Homo sapiens
gcagacggagctggagcgaccgagagagaatttgcaccatcctgggattgtaaacctggaatgtatgtttgaaac

SEQ ID NO: 288814 - DNA, 74 bp, Homo sapiens
aaaagaatcgctgtttcatgtgcaggaagaaagtgggacttactggctgcacttaccagtgggctaccatggcc

SEQ ID NO: 288815 - DNA, 100 bp, Homo sapiens
caacgtcctccgggaccggagtcagaaccctccgcagagtaaagcctctgaagagccaatccattcaggatgggaaaccacgcaggcaaacgagaattaa

SEQ ID NO: 288816 - DNA, 101 bp, Homo sapiens
ctggcctccagcctgagccccagccaggacgagaggatgcggagcccgcagaacctccacagtcaagaggacgacaatgcagatcttcgtgaagactctga

SEQ ID NO: 288817 - DNA, 98 bp, Homo sapiens
tctactgtctggatgacacccaggatgccctgaagtgggtaattccagaattgattggccataccattgtcactgtattactgctcatgtcattgcac

SEQ ID NO: 288818 - DNA, 100 bp, Homo sapiens
gtgctggccgtgatcaaacactgcaaggaccccctccggctcaagtgtgtcaagcaaggttctccgtggaggagccagccaacgtcctttgaccccaaac

SEQ ID NO: 288819 - DNA, 51 bp, Homo sapiens
gccggacacgcttctcttggagattctgaaagtcaagaagacatcatccgg

SEQ ID NO: 288820 - DNA, 75 bp, Homo sapiens
gaacagaagtttcacaatgggaaaaaccaaaagagtggcttgaaaggtggatccataaagaacccagccaacccg

SEQ ID NO: 288821 - DNA, 100 bp, Homo sapiens
ggctgtgtatagaaacatacaagcttgcaaggagcttgcccaaaccactcgtacagcatatggaccaaatgtttaattagacacttcagaattttgatca

SEQ ID NO: 288822 - DNA, 88 bp, Homo sapiens
cagcctcccgggtagctgggactacagattgactatccaccatttgaaaaaaacttttacaatgagcatgaagagataaccaacctca

SEQ ID NO: 288823 - DNA, 100 bp, Homo sapiens
caagaagaagaagttgcgaaggatccccaacggggaggccaacgtgaagaagccccttcccagctgcctgcctgccctagccagctcccaggtgaagaga

SEQ ID NO: 288824 - DNA, 100 bp, Homo sapiens
cccggacatgatcctctccgcctctcgagtaagactttgaccccgacgcaggcttcagtgattgccgcggatcagaagcctgagcactttggctcgagac

SEQ ID NO: 288825 - DNA, 83 bp, Homo sapiens
ggcttctaccagaaggggaggagacgttggaatcaggttatcttcattgtaatgaatatgatagtctgagattgaggtggcta

SEQ ID NO: 288826 - DNA, 87 bp, Homo sapiens
aaaagaaagatgcagaggaagaggaaagcgaactgggccgcaagcttcttatcattgggaccactagccgcaaagatgtccttcagg

SEQ ID NO: 288827 - DNA, 50 bp, Homo sapiens
cgcagaggaggagcgcagcccggcctcgtctattatcctcccagtccaca

SEQ ID NO: 288828 - DNA, 82 bp, Homo sapiens
ctgtcccatcgcaaacccaaagatccccgttcctggagattctgattgaggtaaggctggcctctctgcagtcagaggtctg

SEQ ID NO: 288829 - DNA, 100 bp, Homo sapiens
tttccaacttcttgatccatctgggagagaagacgtaccattatgtgcccgaattccgaaaagattctttcagtgacctgtatagttcctatgtaatctt

SEQ ID NO: 288830 - DNA, 75 bp, Homo sapiens
cttgaacttaatacagcaagaaagaccatcaagtttaccagagctttcaagttgtggatggaataaaaaagaaaa

SEQ ID NO: 288831 - DNA, 136 bp, Homo sapiens
gcctacaacatgacgtttttccctaatctgatgggtcattatgaccagagtattgccgcggtggaaatggagagagcagagctgacatctgataaagacatgtaccttgacaacagctccattgaagaagcttcag

SEQ ID NO: 288832 - DNA, 75 bp, Homo sapiens
cttaacctgagtatagaggtcccgtcaccttcccagatcttcttggaaacagaattgttctacaaaggtatccgc

SEQ ID NO: 288833 - DNA, 75 bp, Homo sapiens
tgcctctgaggaacacgccgcaggtatcgagaaccttccctgcgaacttcagaggaacttccagctgatgcgaga

SEQ ID NO: 288834 - DNA, 90 bp, Homo sapiens
ggacgagggcaaaggcaaggtggtggacctgctggccacggacgccgacatcatcagccgctgccaggcccctggccccaacatggcccg

SEQ ID NO: 288835 - DNA, 96 bp, Homo sapiens
ggaatgggaagtggatgaagtgctgaactggacaaatacactgaactttgatgaacagacaattttcccgcagagcccaattacatgggcagcagg

SEQ ID NO: 288836 - DNA, 100 bp, Homo sapiens
cggcgcaggcccagatgcgcgcgatgctggaccagttgatgggcacctcccgggacgggagtgggtcctgaagagcagcatcctcattgccatggctgtt

SEQ ID NO: 288837 - DNA, 82 bp, Homo sapiens
acctttaacaaccagctgaccactgtccacaaccagagggtctccccagacacccgagcacccacccgcttcgtggatgatg

SEQ ID NO: 288838 - DNA, 51 bp, Homo sapiens
caaaggattgtgaccgcagaccgaggcaagaaacctattggaattcgagac

SEQ ID NO: 288839 - DNA, 75 bp, Homo sapiens
accagaaagatctccatcggttgcccaaggctataccccatgtttccccatcactcgaggagtctgggcagagac

SEQ ID NO: 288840 - DNA, 108 bp, Homo sapiens
atgagggattgctactgcacggtgaacctggaccaggaggaggttttcaggaccaaaattgtggaaaagtcactctgaatagcctaacatggcagaccagagacagcg

SEQ ID NO: 288841 - DNA, 82 bp, Homo sapiens
tttacttctggatgccaatctgaatatcaaaatagcagaactccatccggcacaacctgtcactgcatagtcgattcatgcg

SEQ ID NO: 288842 - DNA, 101 bp, Homo sapiens
actactttgcatctgtaaatgcaccttcaaacccaccaaggatggctgcagctcctccaagttactgttttgttgccttccctccacgtgctaaggatggt

SEQ ID NO: 288843 - DNA, 100 bp, Homo sapiens
ccggagcccaccaagttctgggaagtctcagtggcccttagcagcagctccattcgtgtggccatgctggaggaaaatggggagcgcgtcctcatggaag

SEQ ID NO: 288844 - DNA, 74 bp, Homo sapiens
cccgctctgggaggaccgcgaggttatgatgtgattgctcaagcccaatctgggactgggaaaacggccacatt

SEQ ID NO: 288845 - DNA, 90 bp, Homo sapiens
acagcttcgccgaggacctggacctggaaggggagactctgctgacacccatcacccacatctcacattgctgatagtccaactccaccg

SEQ ID NO: 288846 - DNA, 96 bp, Homo sapiens
gtgacagcaccatactggaacttcaaaaagttctgaaaacatgttggaatctaggtaaaaatggcttatctaacagtagcattttgttggataaat

SEQ ID NO: 288847 - DNA, 100 bp, Homo sapiens
cctgagtcaaagaagatgcctcgaactaaacaaattcatcccagaaatctaagaggaaatggaagttccagtattaccgaaaatctctctaccgatcacc

SEQ ID NO: 288848 - DNA, 74 bp, Homo sapiens
gaggggaggcgccggacagatcgcgtttcggaggcggcgcagcttttctgggagaagaggctacaaggacttag

SEQ ID NO: 288849 - DNA, 75 bp, Homo sapiens
cgcccctccgagctggggttggacgctgccagtttgcacagcagcaggacttgggaccctggaggactgacgctg

SEQ ID NO: 288850 - DNA, 74 bp, Homo sapiens
aagtgacctctgagaaagtgagccagaaacatgctgagcctttgacagagtctgatgtgaatgctacacaggga

SEQ ID NO: 288851 - DNA, 80 bp, Homo sapiens
atccaccgccatccgccaccatggttttaaaatcaaagatgggaaaatcggagaaaattgcccttccccatggccagctt

SEQ ID NO: 288852 - DNA, 90 bp, Homo sapiens
gacagggcgacctggaagtccaactacttccttaagatcatcccttcctacagcaacttcccactccaggtggccagacgggagttccag

SEQ ID NO: 288853 - DNA, 100 bp, Homo sapiens
cttttatattcatctcaaaaacaaaattctgaactcaggacttggcaagctctgattgtactttctccacaagcttcagcatggcagtatctctcaccac

SEQ ID NO: 288854 - DNA, 100 bp, Homo sapiens
tttctgtgtcgcgctcagcggctatgaccaggtgctccacgaagacgaaaccacggagctccttcccttaacagagctgagagaggcatctggagctgca

SEQ ID NO: 288855 - DNA, 96 bp, Homo sapiens
ggcccctgtcaagaaggtgccggtggtgcgagtcttcggagcgaccccggcaggagctatgaagacatgattggtgaggaggtgccatcggatcaa

SEQ ID NO: 288856 - DNA, 82 bp, Homo sapiens
cctttatccactctatggccttggagaactgccccaaggatttgcaagcactgttgcaagaattcaattccgtcttcctgat

SEQ ID NO: 288857 - DNA, 74 bp, Homo sapiens
tttgatatgttttttggaggaggaggaaggatgcagagagaaaggagaggtgtgatgttagctgttgatgctgt

SEQ ID NO: 288858 - DNA, 100 bp, Homo sapiens
gaaacttgggactctgcaatagatacatggagcccatcagaatggcagatggcttatgaaccacagggtgtgggccgaagatatgctcatgtggtgttga

SEQ ID NO: 288859 - DNA, 90 bp, Homo sapiens
ccaccaccggccgcctcagccatggacgcgtccctggagaaggtttcaggcacagaactgtatatccaataatagtgaaatggatcccac

SEQ ID NO: 288860 - DNA, 100 bp, Homo sapiens
ggacaggcgacagcgacctgcggcagggtttaatgaagaaattcattcgatgttctacacgtgtaactgtgggaactattaaaaaatttctaagtttaaa

SEQ ID NO: 288861 - DNA, 124 bp, Homo sapiens
cctctcagcttcggagaatggagtcttccatcaatcatatctcacagacctagaggatcaagacataatgggagcatttttagacaagccaaagatggaaaagcataatgcccaggggcagggt

SEQ ID NO: 288862 - DNA, 98 bp, Homo sapiens
cagaatggagagcacaatgcccttgaagatctggtgatgaggtttaatgaggataaggaagcctgtgtgggtaccaacaatcaaagctacatctgtga

SEQ ID NO: 288863 - DNA, 75 bp, Homo sapiens
aagactcctacctgaaacatacggagattgacaatcaatgggccatcttggacgatatgaagatcaatgatgcag

SEQ ID NO: 288864 - DNA, 75 bp, Homo sapiens
gcagaccttcactggccacgagtctgacatcaatgccatttgctttgtgatggacgcctctgaccccacccagct

SEQ ID NO: 288865 - DNA, 100 bp, Homo sapiens
gcgccggggcctagcgctatgcctgcggcggagactgcatcaggctctcgccaagcccgaagcatgagtgggcatcctgaggcagcccagatggtccgcc

SEQ ID NO: 288866 - DNA, 82 bp, Homo sapiens
tcaaaaatagtgatagctttgataagtatcttcaaagaacagtaaaacatccaactttactacaggatcctgatttaaggca

SEQ ID NO: 288867 - DNA, 80 bp, Homo sapiens
gaaaggacggaggctgttatctatggcagttaattggccttggtcctcacagctccaaaaagaaacaggatctcgataag

SEQ ID NO: 288868 - DNA, 87 bp, Homo sapiens
agacggtgcgcctgtgcagccctcccaggtggagtacacggcagactggggggccctcagcctcttggccttgaacgggctgttcat

SEQ ID NO: 288869 - DNA, 98 bp, Homo sapiens
gtgcctgctatcgccgagttctacaacacggttagaagtttcatgcattcaaataatggcaccatttctgtggtatctgtattgtgaaccatctcagt

SEQ ID NO: 288870 - DNA, 74 bp, Homo sapiens
agtcgacgcgctcaccggctgggtgggttcgagcaactaccggtttgaaaaagtaccagaaggtcctatccctc

SEQ ID NO: 288871 - DNA, 100 bp, Homo sapiens
gatgtcaaacatagaaccagagtacgtagagaaatcgacactcttaatgaacgtttagctgctgaaggacaagcgattgatggagcagagctgagtaagg

SEQ ID NO: 288872 - DNA, 97 bp, Homo sapiens
gtctggctgtgatgctcgggagggagactgttgttcccggagatgcggcgcgcaggtttgagatttttaagagctctgagactgatacagttttcag

SEQ ID NO: 288873 - DNA, 100 bp, Homo sapiens
gagaaatccaattcagctttttgtgctgccagcaagaaatgatcagtagcaccagtgtttatgaccctacagcttggggcctgggctcctctgaccatcc

SEQ ID NO: 288874 - DNA, 101 bp, Homo sapiens
gagtccggagcgcctagccctaccggactacgagtatctgggaggcaagtgaggcctatctggttggcctttttgaagacaccaacctgtgtgctatccat

SEQ ID NO: 288875 - DNA, 51 bp, Homo sapiens
cgccggagcagcgccggagatggggtcctgctcaatctggaattttgtcag

SEQ ID NO: 288876 - DNA, 75 bp, Homo sapiens
ctcctcagtgcgaagaagctgcagccgcacctggccaagggcagctgcattcagcctcagcggaggacacgcctg

SEQ ID NO: 288877 - DNA, 60 bp, Homo sapiens
gatctctgcccaccacccccagtgaacagggcgggaagcttcagagtacctttgtatttg

SEQ ID NO: 288878 - DNA, 74 bp, Homo sapiens
gattcatctcgacactgaaattacagtggctgacaagattttgaaaaagaaagaataccctctttatataaatc

SEQ ID NO: 288879 - DNA, 75 bp, Homo sapiens
gtcgggcctgtggaagaagcgccgcgcacggacttcggcagagcagggtttccaggcctgaggtgcccgccctgg

SEQ ID NO: 288880 - DNA, 74 bp, Homo sapiens
tcaatttaagcctgatctaacccctagaaacagcatctgagaagaagtcactggcaagtcgttcaaatgttgca

SEQ ID NO: 288881 - DNA, 96 bp, Homo sapiens
cagtatcgctacttcaaagggtactttttagaaccaaagaaaccagactgtgatgactgggagagcgggctgaatgcaatggagtgtgcattacat

SEQ ID NO: 288882 - DNA, 75 bp, Homo sapiens
aaggatgcagctagctgcatgacagtccatgacaaggggacttcagacgcagagcgagcccttgctgtggccagg

SEQ ID NO: 288883 - DNA, 100 bp, Homo sapiens
agtgacgagtgggatattccagagaaacagcctttcaaagacctggttggatggcaagcatgtggtgtttggcaaagtgaaagaaggcatgaatattgtg

SEQ ID NO: 288884 - DNA, 98 bp, Homo sapiens
gcaccagaatggactgattaaaatagaatggcctaattggaaagaatttcaggatcaccggtttctcctgcttcatgccttataatgggactaatttt

SEQ ID NO: 288885 - DNA, 90 bp, Homo sapiens
agcagcccccagtcgctccagccataaccactgaggccacagcacagtgcataccagtttgtagtctatcatctggaaaatttgggacat

SEQ ID NO: 288886 - DNA, 100 bp, Homo sapiens
gcggtgtgagaatggagtgggcaggaaagcagcgggactttcagggagaatgctggagaaccagactcctggagcagtttatcctatgaaataccgtatg

SEQ ID NO: 288887 - DNA, 100 bp, Homo sapiens
gtctccctgtacgccgagggctccgtcaatggcttcatcagcactttggggaggagactgcaagcatcgggatgcccaggccccaaggaggccctcttcc

SEQ ID NO: 288888 - DNA, 121 bp, Homo sapiens
gtccttcttccagtgccgctgggatgactccgtcacctacatcttccaccagcttctgggctgagcagtccaaagtcctgagcgccgtggaggaccgcatggacgagctgggtgctggcat

SEQ ID NO: 288889 - DNA, 74 bp, Homo sapiens
cttcaggaatggagacacggcttcccccaaggaatatacaggtgctggagaatctggtaaaagcaccattgtga

SEQ ID NO: 288890 - DNA, 51 bp, Homo sapiens
ttccagtatatacatcaagtcactgagggagagcctggggatgtacaggag

SEQ ID NO: 288891 - DNA, 100 bp, Homo sapiens
cggcggcctcgcctcgcacccccagccagtccgtcgatccagctgccagcgcagccgccagcgccggacctgctcccctcaaaagcttcgtgccaacaga

SEQ ID NO: 288892 - DNA, 98 bp, Homo sapiens
gggagcgaccgagcgggccgccgccgccgccatgaaccccgaataggactttgcctacgtagctcgtgataagctgacccagatgctcaagtgccacg

SEQ ID NO: 288893 - DNA, 87 bp, Homo sapiens
cccgcctgcgatggggcgagaaaggtcccactgcagccctccaagcagactgaaactgttgaggagcccatggaggaagaagaagca

SEQ ID NO: 288894 - DNA, 76 bp, Homo sapiens
ggcctcggctccactcactgggtttacgatggcgtgggaaacaggacatcggcagaaactagatgatcagaccaag

SEQ ID NO: 288895 - DNA, 82 bp, Homo sapiens
cagggagggacccaccgtagagactaagatttttggaagtaccagcacagtgacgcttcctgaaaccttgttgtttgtgtca

SEQ ID NO: 288896 - DNA, 83 bp, Homo sapiens
gctcagccgcaagtacccgtccatcatagtcaactgcgtggaagagaaggtcagctggccgccggcacctgtgagattgtgac

SEQ ID NO: 288897 - DNA, 75 bp, Homo sapiens
gcacagagacgaggagaagatgtggagacttccaagaaatccacctcgtacatctcatcctgtagtgaagttttc

SEQ ID NO: 288898 - DNA, 97 bp, Homo sapiens
tgaagaatagagccataaagaaagcaaagcgcagaaatgttggatttgaagtccttgaatgggcaagagggcacatgaagtacggcgtcctccacat

SEQ ID NO: 288899 - DNA, 114 bp, Homo sapiens
cgcactttttggatcggcatctagtctttccgcttcttgaatttctctctgtaaaggagacactggccaaaagaagaccctagacaagaaagatggaagacgaatgtcttttca

SEQ ID NO: 288900 - DNA, 98 bp, Homo sapiens
tgaggcacccgaagaagagaccatccatatttccaggacccagatgatgtggtaccagttggccaaagaagagcctggtgttggtgcatgtgctttgg

SEQ ID NO: 288901 - DNA, 100 bp, Homo sapiens
gagcacaccaggagagagctggccaagatgaagcaggatgccaggccaaggtggagcaagcggtggagacagagccggagcccgagctgcgccagcagac

SEQ ID NO: 288902 - DNA, 82 bp, Homo sapiens
caggaagttccgccatgacaaaagggtttacttgggcagcagtgttgtactgctacttctataaacggacagccgtaagact

SEQ ID NO: 288903 - DNA, 82 bp, Homo sapiens
gaggactcggagttcacctgcaggatttttagactctgaggagcagttggagctaatccacattatggaaatggaaaccacc

SEQ ID NO: 288904 - DNA, 100 bp, Homo sapiens
aggaggcggcggcggagatctggctggaaccctacatggatgagaacttcatctccagagcctttgccaccatgggggagaccgtaatgagcgtcaaaat

SEQ ID NO: 288905 - DNA, 100 bp, Homo sapiens
gccaaggaaaaactggagagcttcatcaaaaatagtgatagctttgataactattcaaagtgtgattagagctgggcttggtggcttgcatctacagttc

SEQ ID NO: 288906 - DNA, 100 bp, Homo sapiens
agatcactgattcacaggggagcaggcggaggcaagggccaacttgcccctgctgcagcgtgagctcctccactgcgcaagactggccaaacagaaccct

SEQ ID NO: 288907 - DNA, 82 bp, Homo sapiens
ttggactgagtcctgcaggacacaggtgtggacactgccagcggctgcagccgacttggaatgacctgggagacaaatacaa

SEQ ID NO: 288908 - DNA, 100 bp, Homo sapiens
ggcggcgactactgccaaccccggtaagtaaggaggtctctgtaccatggctcgtacaaagcagactgcccgcaaatcgaccggtggtaaagcacccagg

SEQ ID NO: 288909 - DNA, 75 bp, Homo sapiens
gcagaagatgatgcagaattaacattaaataaagtggatgaagaatttgtgggccccgtggttatgaatgtgctt

SEQ ID NO: 288910 - DNA, 100 bp, Homo sapiens
agtgcctgaagtgacacaacacatgttttcttctggtatctggctaaaaattataaggctgtctgcagagatttgaaaaatggcaacaaatgaaagtgtc

SEQ ID NO: 288911 - DNA, 75 bp, Homo sapiens
catttacctcggatccattcacgaaaaacccttccttaccttcgaagaccattactgggacttccacccccacca

SEQ ID NO: 288912 - DNA, 95 bp, Homo sapiens
ggcgaacactgaggatgctttccacatgaaccctgaagttttacatgtggcacccataaaagatgaggctgagaacacggaaagcttctcagcag

SEQ ID NO: 288913 - DNA, 50 bp, Homo sapiens
ggcgcccggatgggcagctgaggtgaatggaagagaatccgaagaagaaa

SEQ ID NO: 288914 - DNA, 50 bp, Homo sapiens
catttagcctgcttacattcaaggactcagtgacctttgaagatgtggct

SEQ ID NO: 288915 - DNA, 101 bp, Homo sapiens
gccgttcgttcgtttccagcctcaggaatttatggtcgcctttttgaatgaggttcaaaccttgtactactcagctgatcacaagctgcttgatgggaacc

SEQ ID NO: 288916 - DNA, 74 bp, Homo sapiens
cgagggtttgatgaaggtggaggcagcgcggctctcagtttgctggcctagacctgaactcttcagataatcag

SEQ ID NO: 288917 - DNA, 105 bp, Homo sapiens
gtactgcacatcgtggtggtcggatttcaccacaagaagggctgccaggttttgccagtcagtcagatgatgatcaggtgaatgtaatgggttttcacttcttag

SEQ ID NO: 288918 - DNA, 90 bp, Homo sapiens
tctggctttggccactttacttcctgccaggtgcgccattatgaaaagcagctggacgaaaccgtggtcagctgcaagaaggcacaggag

SEQ ID NO: 288919 - DNA, 100 bp, Homo sapiens
ggactcaggcagtacgggaagaacttcttcagaattagaaaggagctgcttcccaataaggaaacattgttgaatgttgggtcacgaagatctcaacctg

SEQ ID NO: 288920 - DNA, 90 bp, Homo sapiens
attttgatgaaaagcatagtatctatccaagtgaaaaaagtctggtaaaactgcataaacaggtgaatcagtggctaacctggttagaaa

SEQ ID NO: 288921 - DNA, 88 bp, Homo sapiens
atcatcacccgcaatagccaccccgctgagcttgacctccctcgagccccccagccacccaatgataaacctctcataatgaaggccc

SEQ ID NO: 288922 - DNA, 100 bp, Homo sapiens
taaggtcatacaggcaagacctggcataatacattttggaggctatcaagtagaaaaacaacaccaacagattctgatcctgggaagactctgcctgaag

SEQ ID NO: 288923 - DNA, 100 bp, Homo sapiens
aaattgccaaggaactgggatttcaacctgaaagtggaggctgcgaaaatagttgatgcggatgaaattaaaaggctaggaaagagatttaagaagcttg

SEQ ID NO: 288924 - DNA, 75 bp, Homo sapiens
ttggcattcccattgctgtgcctacaccttcgccacccactattggaccagttgaaaacaatcctcgaacaggaa

SEQ ID NO: 288925 - DNA, 73 bp, Homo sapiens
agaggctgcggagccccaggaggtacagaacctgctaaggccatcaaacctattgatcggaagtcagtccatc

SEQ ID NO: 288926 - DNA, 87 bp, Homo sapiens
ggtgcctctagtgaaaagaacaagaagtcttaccctcaggtcaaagaaagtccatcagcttgataatggaggagaacaatgactcca

SEQ ID NO: 288927 - DNA, 100 bp, Homo sapiens
ctgctgcccggccttgaagagggctccgagatctccgacagaggccccacagtatcaaatatccgcctggctggattagagtatgttctgcacttcactg

SEQ ID NO: 288928 - DNA, 82 bp, Homo sapiens
caaattaaaggatggatattacatgagaccttgtgtattaagaggcaagtgaggcctatctggttggcctttttgaagacac

SEQ ID NO: 288929 - DNA, 74 bp, Homo sapiens
cggcagtacggcaaatatggcggaggaataagacgagttggaagaagacctgatcaacaacttcagggtgaagg

SEQ ID NO: 288930 - DNA, 93 bp, Homo sapiens
gcgggaagtgtgaagcggccaatggcacggaggcctgcgtctgtcgcctggttgggcccggaaatgggacgtcgcgctttctcagggagcgta

SEQ ID NO: 288931 - DNA, 97 bp, Homo sapiens
cgctggcccatagtgatctttgcagtgacccagagaatggatcttggagaatgtctgaaagtccatgacctggctttaagagcggattatgaaattg

SEQ ID NO: 288932 - DNA, 82 bp, Homo sapiens
ttattggaggccaggtttactggagtaggtgttagtaagcttacaacaggttgatgaacatagtaaacctcctcatctgagg

SEQ ID NO: 288933 - DNA, 75 bp, Homo sapiens
agccccgaagatgcagagttcattgttgccaaggtgaggacagcaatgacctcatccgacacttcctcatcgagt

SEQ ID NO: 288934 - DNA, 74 bp, Homo sapiens
tggcagctttctcctggctgagagcaaccatgctcgacagctgaccaaggccatgatgcgaaaggccacggcca

SEQ ID NO: 288935 - DNA, 82 bp, Homo sapiens
ccagtcggagcctcatggccttttcgtgccggtggtggtgtgcacattgagccccggtatagacagttcccccagctgacca

SEQ ID NO: 288936 - DNA, 101 bp, Homo sapiens
aattcttcagcttcagctgaccttgtagtgagaggacacattcagctaacgtattttagcaggtggagtgaggttgaagattcctgtgacagcgatgccat

SEQ ID NO: 288937 - DNA, 100 bp, Homo sapiens
gagctggctgaagatggctactctggagttgaggaaaggccgagggggacggcaagatgcacatcaccctctgtgacttcatcgtgccctgggacaccct

SEQ ID NO: 288938 - DNA, 100 bp, Homo sapiens
gtatgaggcaagcgcagggggacggggaccagcagctgtcgccgccgctctcagcacttttcaggattagaagaggctgtgtatagaaacatacaagctt

SEQ ID NO: 288939 - DNA, 75 bp, Homo sapiens
cgaatagttacggtcggaggccgatccagatgtttggctgtggctccgtggcccaggttgtgctcagccggggca

SEQ ID NO: 288940 - DNA, 75 bp, Homo sapiens
gagtacgataccgaagcgggctgtgtgccccttctccacccagagatatttggagttcttacaacatggcagaca

SEQ ID NO: 288941 - DNA, 82 bp, Homo sapiens
aatttcctgagccttccaaacaggtttctcctcttcaaaaatctgaagttgttgagatggttaagaaacaagtcaaagtcgt

SEQ ID NO: 288942 - DNA, 100 bp, Homo sapiens
aacagaataagctggagcaagtagaaaaggagttgttgagagtagcagaaagtaatggaccagtgaaggtgtggggaagcattaaaggactgactgaagg

SEQ ID NO: 288943 - DNA, 100 bp, Homo sapiens
tgacctgcatgtactgggggattcgcagggaggatgtcgggacaccccggaagctgggaaatgggcagagcggcttgggtaaatccaccttaatcaacac

SEQ ID NO: 288944 - DNA, 102 bp, Homo sapiens
agaaggcgcatcactcccagctgcgcaaagcttgcgaggtggcgttaggtgtcatggagaaactccagctgggcccagagattctgcagcgggaaaatccaa

SEQ ID NO: 288945 - DNA, 71 bp, Homo sapiens
caacatacccattatcgattatgagtgtgatccagctttgcttcctgagcccaatcacgtcatgctgaacc

SEQ ID NO: 288946 - DNA, 75 bp, Homo sapiens
cagatctttgagaggtctgtgtacagtgacagaaatgaagctgttgtcatttctggaaggaaactggcccagcag

SEQ ID NO: 288947 - DNA, 100 bp, Homo sapiens
gacctgctccgggacaacatgctgcggggcacaggccttctggcggccgcccctggtttctcctggggggtgatgagcgggagcggctctgggccgagct

SEQ ID NO: 288948 - DNA, 98 bp, Homo sapiens
agacggctcacctgtgcgggatggaacaaaaggttatcccatcatcaggtagcaagttgaaacgaccaacaccaacttttcattctagtcggacatcc

SEQ ID NO: 288949 - DNA, 74 bp, Homo sapiens
tgaaaatgcactcggatgccgccgctgtcaacatgtagactgccaaagtgtatgggatgctttcaagggtgcat

SEQ ID NO: 288950 - DNA, 74 bp, Homo sapiens
tgaagagctatggtgaaacaccactgaagcattgccaaggttctggcctataggaacaagacattttcagtaat

SEQ ID NO: 288951 - DNA, 101 bp, Homo sapiens
gaaccaggcgtccaggacgccgctgaccaccctcaacacggatatcagcatcctgtccttgcagtccccagttgtaggtcgttctcaagggcagcagcagg

SEQ ID NO: 288952 - DNA, 100 bp, Homo sapiens
gtaaacaaatgaagcagcgctttgaaagatccagctccaggtcccacaggggctcttcttccccacgaaaaagatcttattcaagttcatcatcttctcc

SEQ ID NO: 288953 - DNA, 90 bp, Homo sapiens
gggaaaattaagcagatgctccagtttgagaaacctggatctgcgatctgtttgtggttgtgcagcctgactctgaagaagctggtggtc

SEQ ID NO: 288954 - DNA, 101 bp, Homo sapiens
aaaaggtgatctggacaaaggaacaggtatctcagattccagagtcattaaaaagtatcacatggcagagattgggaaaaggcaattcaggacagttctta

SEQ ID NO: 288955 - DNA, 75 bp, Homo sapiens
agaattggtatttcaaatgaccaccatgttgcaaaagggagccagcgccggcagccaccatggcgtcacgcatag

SEQ ID NO: 288956 - DNA, 75 bp, Homo sapiens
ccaggaagtttgtgcatgaagacagcagccacatcattgctttatgtggttcttctgtgtggcagttcagaatga

SEQ ID NO: 288957 - DNA, 100 bp, Homo sapiens
tacatgagagagccaatcttggacctaccacttgaaaccattagtgagctgcacaagctccgggtggataaggcagctgctgcagcagcggcactacaag

SEQ ID NO: 288958 - DNA, 74 bp, Homo sapiens
ccccaactgaagaggcacaaaggaaaacgggccttactatacatcatatcccccatcaccagatttgtgacctg

SEQ ID NO: 288959 - DNA, 75 bp, Homo sapiens
ctgggattggagattccacccaaacttgctggtcactgggagacccaacatgagtgaagtttcctgcaagaaacg

SEQ ID NO: 288960 - DNA, 90 bp, Homo sapiens
gtgcgcaccacttttgtgtccaggcataagaaatttgacgctctggatgccgggcaggttggtttggcactgtcctatgccctcacgctc

SEQ ID NO: 288961 - DNA, 50 bp, Homo sapiens
agtcagcagcacaacagaggcggcctgtggacatctctacagcaatgagt

SEQ ID NO: 288962 - DNA, 99 bp, Homo sapiens
cagaaagctcatttcactacagacgaaatccactagatgtgagtatgcagtgctcacaggatatacttcgaatgctcctctctcttcagccagttcttc

SEQ ID NO: 288963 - DNA, 101 bp, Homo sapiens
gaaaaacaagctgaagaaatggcatcaggctatgaccagggccagagcactcagatctcagtcagaggagtctgcttctgcctttagtgctgatgacctta

SEQ ID NO: 288964 - DNA, 100 bp, Homo sapiens
cggacgcgcgcagcccgcccgcccggcgaccagcaaggagactccatcctctgccaatggcccttcccgggagggctctaggctgccgcctgctagggaa

SEQ ID NO: 288965 - DNA, 99 bp, Homo sapiens
ggaagaccgcgcgcagggcctgcagcgggagctggacggcgagcgcgagcggcgcgagaaagggccaaaccagtgctcctgccacctctctggctgccc

SEQ ID NO: 288966 - DNA, 75 bp, Homo sapiens
acttagaagctaccgagttaccctaagaaaggaacttagtgatttggcccgtgaccctccagcacaatgttctgc

SEQ ID NO: 288967 - DNA, 100 bp, Homo sapiens
gtggacacctgagtcccggggtaggggtctcccgcgagtgcacgatctgattttctggagagatgtgaagaagactgggtttgtctttggcaccacgctg

SEQ ID NO: 288968 - DNA, 100 bp, Homo sapiens
aaactcagcctgtgaccccagcgtgggtgaagataggatcaagatggccatgtggcaggagggagacgtggtgggcggtccttcctgtgacacgaccctt

SEQ ID NO: 288969 - DNA, 98 bp, Homo sapiens
gaaaagcattcctctcagagtgtggacatgttggcaaagactcatccatataacccactttgggcacaactggaacactctgctccagccaaggtggt

SEQ ID NO: 288970 - DNA, 100 bp, Homo sapiens
caaggagctaaagcagcgtgcgttcagccctggggttaatttggagtggcccctggagtcagtttcctacaccatccgaggccccacccagcacgagcta

SEQ ID NO: 288971 - DNA, 90 bp, Homo sapiens
cagccaagctccaagtcaatatagccaacagagcagcagctacgggcagcagagcttgccttttgtcactgctccgaataaatttgaagc

SEQ ID NO: 288972 - DNA, 100 bp, Homo sapiens
aagcccagacaatgccggtggaggaatttgtggctggctggatctctgctctggattaatcgaattacagctgctagccaggaacatggactgaagtatc

SEQ ID NO: 288973 - DNA, 100 bp, Homo sapiens
tgagccgttgccgaacgtggtggagctgtggcaggcagaagaaggggaactcctgctgcccactcagactggtgaattttcagctcgtttccttttgaag

SEQ ID NO: 288974 - DNA, 73 bp, Homo sapiens
ctctacacgtatcctcctgcctagcgcagatccaaaatacggagctggcatatacttcaccaagaacctcaaa

SEQ ID NO: 288975 - DNA, 73 bp, Homo sapiens
caaaatttgtggcgcatcttattaaccaaaatgtggtttacttagaaaggcttttaacttatgctgaaatcga

SEQ ID NO: 288976 - DNA, 83 bp, Homo sapiens
actcgctacgcgggtcttgcgagatatctggccgcctctgccgcagctggagggatccaggtccggcacgatcaagacccagg

SEQ ID NO: 288977 - DNA, 83 bp, Homo sapiens
cttcggtggactccttcggcagtccacccaccgccgccgcctcccagacttaattcagtgcacaaatgagatgaatgtgaaca

SEQ ID NO: 288978 - DNA, 96 bp, Homo sapiens
cctcagcctcctgagaagctgggattacagactgcctcttcaaggtgtgccccatgaaccgctactcggcccagaagcagtactggaaggccaagc

SEQ ID NO: 288979 - DNA, 100 bp, Homo sapiens
gctcgcactggcgctgatgtagtttcctgacctctgacccgtattgtctccagattaaagatttttattgaaggatggtcagctgtggctatgtgctcct

SEQ ID NO: 288980 - DNA, 100 bp, Homo sapiens
tgcggccaacaacaaggagacactgctcgccggccgcctggtcgtgggactcggcatcgttgctcctactattcaggaaattaaatctggcaccgtgacc

SEQ ID NO: 288981 - DNA, 100 bp, Homo sapiens
gtacatagattttggtggaaagtttcattgtgtatgtagaagaccagaagtggatggagaagaccttcagagaagacatggcttccagaaaagagaatgc

SEQ ID NO: 288982 - DNA, 100 bp, Homo sapiens
ggatgtggaggggaatagactccatctatccatatgagaacctccaacatgttctcctcagcagtttacttgtttcacgggggaaattgactgtatccct

SEQ ID NO: 288983 - DNA, 82 bp, Homo sapiens
tggagaagaaatagttacctatgatcgaagttggtgaaccatctaaagaagagaaggctgtggccaagtatcttcgattcaa

SEQ ID NO: 288984 - DNA, 50 bp, Homo sapiens
gccgaggccgcgtgtcccaaaggccagattgcccccgaggaattagcact

SEQ ID NO: 288985 - DNA, 126 bp, Homo sapiens
gcctttggctatgggctgctttgtctaggaatggcctatatttcctcccagatgggacctgtgctgcagttctggatgcgggtacccttggtggcaccagaggacctgagagatgatataattgag

SEQ ID NO: 288986 - DNA, 82 bp, Homo sapiens
ttggggacggagcagcgcgtcgtggggcgagcggcagccttatgccagcctggaccatcttggaggcagtgtaggatcatgg

SEQ ID NO: 288987 - DNA, 51 bp, Homo sapiens
cgctggaggagttccaagatgtaatcagcatgattcttcagaggctcttca

SEQ ID NO: 288988 - DNA, 98 bp, Homo sapiens
gacgagcaggaagctgcggctgagtcgggagatgcacttatttacatggaaccagagaaacaagtgatgtccaggtcgtcagatgaatgtgttgtggc

SEQ ID NO: 288989 - DNA, 73 bp, Homo sapiens
aaggatggtttagaaatggaaaaatgtgccctgctacccacaaggcgctggtttaataccatcctggatgatt

SEQ ID NO: 288990 - DNA, 75 bp, Homo sapiens
cattgtgggcaagcaccattgttgcatcaggaacaagcacatcatgattgacttggggactggcaacaacaacaa

SEQ ID NO: 288991 - DNA, 75 bp, Homo sapiens
tcgacgaccacgtgcggaggaaggactcctcgctctatatagtgtaaggagaggatgaggcccgtgaaaaaggca

SEQ ID NO: 288992 - DNA, 50 bp, Homo sapiens
agtaaataaagctgctgtttttgaagaggagtcagagtattcatcgaaaa

SEQ ID NO: 288993 - DNA, 75 bp, Homo sapiens
gcctccttctctgcccagcagcacaagggcagtttgcagaggtctgcggggtttccgagaggctcgccgggattt

SEQ ID NO: 288994 - DNA, 90 bp, Homo sapiens
gagctgcgctatggagtcgcccgcagtgaccaggtcatagcaaatgacagaagtcccttggtgggcaaaattcactgggagaaaatggtt

SEQ ID NO: 288995 - DNA, 75 bp, Homo sapiens
ctctgaccatctggacggtgtgtggggtcctgtcactatttggaatgtatcctgtcaggtataatgtcagtgaat

SEQ ID NO: 288996 - DNA, 100 bp, Homo sapiens
caaggatatgatatcatggaaccagcagcaaagaagtgctatctggaaagagaggatgaaaactttcggaagagaaagttgcctgtggtaagttcagttg

SEQ ID NO: 288997 - DNA, 75 bp, Homo sapiens
caggaagcaattctggaagcgcagcaacagcaagctcccgggcagtgtatccaaagtgtgtacatcagtaagatc

SEQ ID NO: 288998 - DNA, 100 bp, Homo sapiens
gaacaaaaggtcccggaccccccggatctgacggggcgggacctggcgccaccttgcaggcagacatctggtccctgggcataacagctattgaacttgc

SEQ ID NO: 288999 - DNA, 51 bp, Homo sapiens
gagcagcagctacgggcagcagagctttcttcgagagtcacccagctcctt

SEQ ID NO: 289000 - DNA, 100 bp, Homo sapiens
gccgggtgttgcgcctggcctacagcgaggctgggttttttgattaactcaaaaccagagaatgcctgtgaacccatagtgcctccaccagtaaaagaca

SEQ ID NO: 289001 - DNA, 100 bp, Homo sapiens
tcggggagacgctgtggtgtgactggggcaggaccatcaggcgcattctacattctaaaggggagctcagtgaagatagacataaacagtatgaggaatt

SEQ ID NO: 289002 - DNA, 82 bp, Homo sapiens
ggttgcagtatttacatgaacacaaaattgtttatagaaatatgtgccgtatcacgaatttctaagaaagaaattggtcggt

SEQ ID NO: 289003 - DNA, 98 bp, Homo sapiens
tgtgggctgtggctcagcgggactccatcgacgccataagcatggtatgagatgcaagatgctggaattacttcagactcaatgatgaagaacttctt

SEQ ID NO: 289004 - DNA, 83 bp, Homo sapiens
caaatttattcaagtcaattaccatcctttaccaggactgggctggcttagatgaagatgaagatgcacatgtctgggaggat

SEQ ID NO: 289005 - DNA, 80 bp, Homo sapiens
ggatgagctatgacttgctaaacaatctgttggcgatctttgagctttcccaaggagaagaagacttgatagaagacttg

SEQ ID NO: 289006 - DNA, 100 bp, Homo sapiens
tttcgaagtctcggtcccgaagccgatctctctctcgttcaaggaagcgcaggctgaggaatacaaacagaagcttgcacgagtaacccaggtccgcaag

SEQ ID NO: 289007 - DNA, 49 bp, Homo sapiens
gcggttccatcctacacttggataaaataccatgaggagtttgagaaga

SEQ ID NO: 289008 - DNA, 100 bp, Homo sapiens
ggaaggcccggtgcgattgcatgaggatgctgaggctgtcctgtcctcgtccgtctcatcaaagacaaagatcattccactcagcctgggacgatgggga

SEQ ID NO: 289009 - DNA, 96 bp, Homo sapiens
gagagcgagctgagtggttgtgtggtcgcgtctcggaaaccggtagcgcttgcagcatggtggaagcagggaaaggcctggagatgaggaagctgg

SEQ ID NO: 289010 - DNA, 104 bp, Homo sapiens
cgagctgcagctgcgatctctgtggtaggcccagagacagggcagggcattgttcatgcactgaccgacctcagcagccccggcatgacctcagggaacggaaa

SEQ ID NO: 289011 - DNA, 95 bp, Homo sapiens
ttcggtgcgggggacgaggacgacaccgatttcctctcgccgagcggcggatgtttctttctcagcaaaatagaggagaagcttacccctcttcc

SEQ ID NO: 289012 - DNA, 75 bp, Homo sapiens
caagtgatatgttctattttgcagttgaagatggtggactatacaggctccaacccaagttccagtggttgtgtc

SEQ ID NO: 289013 - DNA, 89 bp, Homo sapiens
aagatggaagatgaggaggtcgctgagagctgggaagaggcggcagacagcggggtgcgctacaaggaggagtttgagaagaacaaggg

SEQ ID NO: 289014 - DNA, 50 bp, Homo sapiens
cggcgcgtgaagctggagctctgccggagcggttgcagggcacacattac

SEQ ID NO: 289015 - DNA, 50 bp, Homo sapiens
cttagaggaagttctggagatgaatgatggaatggggagaagatattaaa

SEQ ID NO: 289016 - DNA, 98 bp, Homo sapiens
ttcgcgatcttcgccgttaccttcttgctggcgttggtgggagccgtgctctacctctatccgggtggagagattcaaccagttagcgtgaaagttgg

SEQ ID NO: 289017 - DNA, 75 bp, Homo sapiens
aagggactttggaaaaaggctgtctctagacagcagtcttgtggtttgtggagaaaaacagcgctttgagaagtt

SEQ ID NO: 289018 - DNA, 74 bp, Homo sapiens
gcttgatgaaggcgtggatagcctgaaggcagccattcaggaaaaacaagaatggtggtggctttacattgcag

SEQ ID NO: 289019 - DNA, 100 bp, Homo sapiens
gatcataaagagacacataccaaattggatctatccagagtctagaaggaagctcataccgggggagcttgaaagaccctgcaggctgcctgaatgaggg

SEQ ID NO: 289020 - DNA, 83 bp, Homo sapiens
ccagaatacgaggaggaagaggtggccataccgttgaccgctcctccaactaaccaaactcttcatcttggcttatacctata

SEQ ID NO: 289021 - DNA, 100 bp, Homo sapiens
tcaagatccagaagctcttaaagatatcaagtctttggagaagtatatcattgagccctgagtattccctctttgtgggggacctgaccccggacgtgga

SEQ ID NO: 289022 - DNA, 90 bp, Homo sapiens
gtgccgaggagcgggaagagttgctggggttgaaatcacaaagattagacacctttttagataggtgttcttcagcaccactgacaacac

SEQ ID NO: 289023 - DNA, 83 bp, Homo sapiens
ccttcgactggctgcttggggagattgagtccaagttcaaccaagccattatgccgacaaaaggatcaaggtggcgaagcccg

SEQ ID NO: 289024 - DNA, 90 bp, Homo sapiens
ttcacttgtggcccaaatgaggccatggtggtctccggtgggacgagctatggccattgcagccctggacatggcggaatgtaatccgtg

SEQ ID NO: 289025 - DNA, 80 bp, Homo sapiens
cacgttcatgggcgagggaacagatgagaaacccggcaatgaaagtctcggcgcggaagatggccggcggcgtggacggc

SEQ ID NO: 289026 - DNA, 80 bp, Homo sapiens
ggccagctggctggcatgtaccaaggtgcagacaccttcatgcagcagctgctaaacagaatctcctctcagcctttaag

SEQ ID NO: 289027 - DNA, 75 bp, Homo sapiens
aagcagtgacggaggagcttgtaccaccggtccaccatctgctcccctgaacttgatttcaaatgtcaacgagac

SEQ ID NO: 289028 - DNA, 51 bp, Homo sapiens
tgagatcaccaatatccgacctagctttgaacatccagtcatggataaaaa

SEQ ID NO: 289029 - DNA, 97 bp, Homo sapiens
ccgaagcaggacccgaagcctaaattccaggagggttgtggcagcactgcctgaaggtatgagaccagattctaatctttatggttttccatgggaa

SEQ ID NO: 289030 - DNA, 74 bp, Homo sapiens
cgcgcctgatgggtcgaggcggacgcgcggctgcgtcagaaagagacatcgggaagattctgatgtggaaatgg

SEQ ID NO: 289031 - DNA, 83 bp, Homo sapiens
tgtgagcagggctgagatgggcaccgcggatctggggccgtcctcaggtctcaccaacggctttgggggtgcgaggagcgagc

SEQ ID NO: 289032 - DNA, 87 bp, Homo sapiens
gaagccttccctgggctaaaggcatcatcaagagctggcagccaggaggcaggagcagcgggcgacagtgcgggccctgtggttctg

SEQ ID NO: 289033 - DNA, 100 bp, Homo sapiens
gcggcggcggtcctggtgcggaccctccggccgcagccatgtgggacccgcgggcagctagggagaagtgagtcatctcattcccctccgtggatcagag

SEQ ID NO: 289034 - DNA, 75 bp, Homo sapiens
ctgggaccaaagtggatatcaaacgtgatcccattaagatactaatgccatcactgtctcctacaatggaagaag

SEQ ID NO: 289035 - DNA, 100 bp, Homo sapiens
ccggcccgggaccggcggcgcgcggcggccgaggccagatttatcacacgtcctgatgtcaagcaaagcaagatggctgagttcctggactggagcctgt

SEQ ID NO: 289036 - DNA, 123 bp, Homo sapiens
cgcgcttcctgaacgtgattgagcgccaccctgtggacatcagcgccatccccgagcagcggtggaagctggaaggtgctcgggtcttcggggcactgggtcccatcggtccctcctcacctg

SEQ ID NO: 289037 - DNA, 100 bp, Homo sapiens
ggaaggcgtgaccgccatgcacaagctctttgactgggccaataccagccggcgcgggactggtacgttcatcttgtcaaatcccagtgttggaccaggt

SEQ ID NO: 289038 - DNA, 74 bp, Homo sapiens
tatgagtactgtcagcaaaagggaatttcctacaagcagtgtggcaagaatcctcactatggatgggctcattg

SEQ ID NO: 289039 - DNA, 99 bp, Homo sapiens
gaagaaactgtccgagaagcccaaaggcatccgcttcgatcctgaaattccgcaaacactacgactagagtttgctaaggcaaacacgaagatggccaa

SEQ ID NO: 289040 - DNA, 127 bp, Homo sapiens
tggaaacctatggttatctgcagagggagtcatgctttcaaggacctcatatgccaattctcggaagcaagaagcagagtggaaagaaaaggcaataaaggagctagaagaatggtatgcaagacag

SEQ ID NO: 289041 - DNA, 101 bp, Homo sapiens
ttcaagtagtggaaggagtacagggaagtctataagctttgcaacagaattacagagtatgatggtaagcttgatgattaccaggaacgaatgaacaaagg

SEQ ID NO: 289042 - DNA, 100 bp, Homo sapiens
gtggcagtgagcggcggcagaggctacggggctcggtttggctgactggggagtcggcaggcggcagaaaagatgactccacagggtgagtgttctgtag

SEQ ID NO: 289043 - DNA, 76 bp, Homo sapiens
aggctacaagctgtccccagaggactacacgctcaagcccacagcccccatcccgtagcccttcctggatctggag

SEQ ID NO: 289044 - DNA, 90 bp, Homo sapiens
aaaagtgtctgtctgttggaatgtcaagagatgtgctggtcccaaaggcgataacatctatgaatggagatcaaccattctagggcctcc

SEQ ID NO: 289045 - DNA, 75 bp, Homo sapiens
gattttctattacttcagcaacagtccttcaaagtaagtacaaggtggactgtgcatgcctcaaagaaaacccag

SEQ ID NO: 289046 - DNA, 87 bp, Homo sapiens
agacactgctgagcaccattaagtgtgggcgtctacagaggcatgtcgggccccaggcctgtggtgctgagcgggccttcgggagct

SEQ ID NO: 289047 - DNA, 100 bp, Homo sapiens
ccaccagcaatgtatgagagatccagtgtctccgaatcttcgccagcatttgatctcccttgagtttagaaatctggctgagaaataccaaacagtgatt

SEQ ID NO: 289048 - DNA, 98 bp, Homo sapiens
cgcgtgcccgcgaggagccgccgcgcgcccgcgccctccgcgcgacgccagaacatacggtccctaatgagcacagagaagaccaagggcttctgcca

SEQ ID NO: 289049 - DNA, 90 bp, Homo sapiens
catcatttcagattttgagtctgtcagcaagataaccaagagtggagtcaaggtgcctcgagtctttattggtaaagattgtataggcgg

SEQ ID NO: 289050 - DNA, 82 bp, Homo sapiens
ctgggcggtatctggaacttgcaaagaatggctcaagaagtactgacacatttaaaggagcatcctgatgcttggacaagag

SEQ ID NO: 289051 - DNA, 98 bp, Homo sapiens
gagcatctgcaaagaaggttaaatcaggatggctggataaactctctcctcaagggttttaaaatcaaagatgggaaaatcggagaaaattgcccttc

SEQ ID NO: 289052 - DNA, 74 bp, Homo sapiens
ctccggggacaagaaactagagcaaataaccgttttgaaattatgtgtcttgctgaatcagggctctcttatcc

SEQ ID NO: 289053 - DNA, 100 bp, Homo sapiens
atcgtgggtgcactcataggctcgtctggtgctatcctgtcatacatcatgtgtgtggtgaatgaaaactttgccattgatttgatagcagagcagcccg

SEQ ID NO: 289054 - DNA, 75 bp, Homo sapiens
gccgaccacggatttgcattgccgaggacgggaccccagggcagcgaagcagtgagacggtttaagcggaagcat

SEQ ID NO: 289055 - DNA, 87 bp, Homo sapiens
aaggaaaaggaggaattcgccgtgcccgagaatagctccgtccagcaggtgctggctgccagctgctgcgccccccatgtagaaggt

SEQ ID NO: 289056 - DNA, 51 bp, Homo sapiens
caggcgctcaccatgttccctggagtcccgtggagtctccatctgagccct

SEQ ID NO: 289057 - DNA, 50 bp, Homo sapiens
gaccagacaaatcaaattagtggttttgttgtgtgacttcattgagacac

SEQ ID NO: 289058 - DNA, 95 bp, Homo sapiens
ggaagacaaatatggaaacaaatactatgaagacaacaagcaattttttgggctgttttgctgcagcttctgaagtgttaaagcacttgaaggaa

SEQ ID NO: 289059 - DNA, 100 bp, Homo sapiens
ctcgctcccttgatgatcttgagatcatggaagggaagtggttgctgtgtatgttactggtgcttggaactgctattgttgaggctcatgatggacatga

SEQ ID NO: 289060 - DNA, 74 bp, Homo sapiens
cggaatgcactacaacaggaaaatcatattatagatggagtaaaggcgcagcccagcctcgaaatgcagaacga

SEQ ID NO: 289061 - DNA, 82 bp, Homo sapiens
gttattcgagtgaccgagaccgcggccgggaccgaggaggcaaatttctggagatgtgcaatgatctcttagctagagtgga

SEQ ID NO: 289062 - DNA, 75 bp, Homo sapiens
gctgcagtcggcactgctactgcgaagacagctggcaggcccgatgagagaaagggaaagttaaggatgctggag

SEQ ID NO: 289063 - DNA, 100 bp, Homo sapiens
cagactacgagggagtttgacagctattaaaaccagggctccacagttaggaggtgactaataaaggtaccagaagaatatggctgcacaaataccagaa

SEQ ID NO: 289064 - DNA, 75 bp, Homo sapiens
taagcactgctgcactttatgagggagtgcatccgccccaacccttttccccctcgtctcctgtgagaattcccc

SEQ ID NO: 289065 - DNA, 101 bp, Homo sapiens
tctacccagaattcaattaaagtggctcagtaattcgccaaaatgacgaacacaaagggaaagaggagaggcacccgatatatgttctctaggccttttag

SEQ ID NO: 289066 - DNA, 75 bp, Homo sapiens
tcctctcctggtttagggaggggaagggcatatcaagagaggagatttctttcacaactcatccagaagtttatc

SEQ ID NO: 289067 - DNA, 82 bp, Homo sapiens
caggcttactgtggatctggattctaaggcaacacttccttgaagaaacaagcttacaggaccaagaatcgccttcagccct

SEQ ID NO: 289068 - DNA, 100 bp, Homo sapiens
ccctgcgcttcgtgcaccggggcggtccgttgccaaagccagcaatctgcagagcgctgtgtaagcacattgcttgatctaatccagaccaaagtgaatt

SEQ ID NO: 289069 - DNA, 75 bp, Homo sapiens
gcggtggagcgcagagcgggcgagcgcggcacccagattggctgaaaacttctgtgtctgccatttagctactgg

SEQ ID NO: 289070 - DNA, 98 bp, Homo sapiens
acccgttctccctccagaacatacacttacatctctagataacagtctgcactttcacccgtttcagagggaggaatcagcagcttggaaattcaagc

SEQ ID NO: 289071 - DNA, 87 bp, Homo sapiens
gcacccctaccagtgggcgaagcccaagcccctgtcccctacgtcctacatgaggtattgttgcagcatctggcagtgagactgagg

SEQ ID NO: 289072 - DNA, 100 bp, Homo sapiens
atgagcgagcggcagctggctctctggaatccgttcaaacgatatgtcaataaacttcgaagcaagagtacagttttcaaaaagaagcatcagataatag

SEQ ID NO: 289073 - DNA, 100 bp, Homo sapiens
agcgtttcagcgcctacaattacagcaatcatttggggaagaatctacagttgctgatggacagagtggatgaaatgagccaagatatagttaaatacaa

SEQ ID NO: 289074 - DNA, 98 bp, Homo sapiens
gactggatccacagcagtgggggctgggatgtctccccgttcaatgttgtggcctggcacgggaattatacaccctacaagtacaacctgaagaattt

SEQ ID NO: 289075 - DNA, 101 bp, Homo sapiens
ggcgggggagcgactcatggagctgccgtaagtggcggcacctgacttgctggatcctaaatctgccgctcagaactccaaaccgaggctctcgttttcca

SEQ ID NO: 289076 - DNA, 76 bp, Homo sapiens
tttatgccatgaaggtattgaagaaggccacactgaaaggaacaactggaaacctccaggagggaaatgattgggc

SEQ ID NO: 289077 - DNA, 75 bp, Homo sapiens
aagaatgaagccacggacccttgcggacatgggcttaaaggcattcaccaactcaaagattcgtaaacccaaaat

SEQ ID NO: 289078 - DNA, 74 bp, Homo sapiens
acaggaacaggagggtctgatgtcctccagatctcaggccccaatgtttagaccggacacaactcacctccatc

SEQ ID NO: 289079 - DNA, 50 bp, Homo sapiens
gaaataactcagctgaagcatcaggtatgaaaatgaaagtcttcagaatg

SEQ ID NO: 289080 - DNA, 100 bp, Homo sapiens
aaaaagctccgcaacaagatagcaggatcttgcttctgaaatatctacctgggatggagtgatagtaacaccttcagaaaaggcttatgagaagccacca

SEQ ID NO: 289081 - DNA, 100 bp, Homo sapiens
ctcagacctgccaatttaccagagataattgataacaccctgtaacagctgaaaaaaatgtgagcgctattggcctttgtatggagaagaccccataacg

SEQ ID NO: 289082 - DNA, 100 bp, Homo sapiens
cgtgagccaccgtgcctggctgaaggtaaaataccatgaagattttgaaaaaacaaaggggagaggctttactcccgtcgtggacgatcctgtgacagag

SEQ ID NO: 289083 - DNA, 96 bp, Homo sapiens
cttcaatatttgcaggacaaaatgatcccttgaaagacagttacgcttggaagctcgaagtctggctgtggccatgggagatacagtagtggagcc

SEQ ID NO: 289084 - DNA, 83 bp, Homo sapiens
catcacagacaccgcctacaggagtatgatgcaagatggagaaggaggagacaacccgggagctgctgctgcccaactggcag

SEQ ID NO: 289085 - DNA, 80 bp, Homo sapiens
gcctcgtcgacatgagtgatgtggaggaaaacaacttcgagggcagacaaacggggattcagcgtccgatcctttggaac

SEQ ID NO: 289086 - DNA, 97 bp, Homo sapiens
ggagagaaaacttgtcagttcctctcactcttgaagtcctattggctggataattttgcaaaagattctgtaaaccctggagtcatggtgttgctgg

SEQ ID NO: 289087 - DNA, 98 bp, Homo sapiens
ttaaacaagagatttccacagaagaccaagatgaagagacgagctgtggggatctggcactgtggttcctgcatgaagacagtggctggcggtgcctg

SEQ ID NO: 289088 - DNA, 75 bp, Homo sapiens
gtccacccaccgccgccgcctcccaggttctcttagaagcacaagatatggcagtgagagaccataacgtggaat

SEQ ID NO: 289089 - DNA, 78 bp, Homo sapiens
ttttggcatcaaggacaaacccaccttcatcaaaggggtttcagccatgccacagagctccggcagtcatgggcccgc

SEQ ID NO: 289090 - DNA, 82 bp, Homo sapiens
ggagttccccttcgagaggaggcagattcccctctacatagacgacaccctgacggtcacctccgcgaagccccctccccgc

SEQ ID NO: 289091 - DNA, 83 bp, Homo sapiens
aggccaaggcactctgggagaacatcgtggccttctgccgggagccccgagcctggagatgagggggagccggggcggtcggg

SEQ ID NO: 289092 - DNA, 100 bp, Homo sapiens
gtccactacgaaggccacctacaaatagcaggttgggataattcttcactattccacccttgccacagtactatgggtaggagtgacagctcgaaatatc

SEQ ID NO: 289093 - DNA, 100 bp, Homo sapiens
gcgggagcctgggcggcgagccgggtgtgagctgcctgaaaatgcactcggatgccgccgctgtcaatgtctcgaagtcggagtccttctccaataagat

SEQ ID NO: 289094 - DNA, 100 bp, Homo sapiens
tcggtgtttggagaaaaggactcaggatgtacagttacccagcacgtgtacctcctcctcctcctattgctcgggctgtagtgccctcgaaacgtcagcg

SEQ ID NO: 289095 - DNA, 98 bp, Homo sapiens
gaaaataaaaaacgtaacaaatcagatcgcactcctgaaattaggaaaattgccactgctttataagactctttttgatcagaacaatgctgcaaaaa

SEQ ID NO: 289096 - DNA, 88 bp, Homo sapiens
ctgggccgaccccagagcggcgctggacaggtgactagcatgcagatacccatgctctgactttctgcccctccactgacatggccca

SEQ ID NO: 289097 - DNA, 95 bp, Homo sapiens
gaggagcaaggctccggcactaccacgggctgcgggctgcctaggcagatcgggagcggtgccgagaaaaatttccttactagatgacatttcat

SEQ ID NO: 289098 - DNA, 98 bp, Homo sapiens
gcaccaccgtcctgctcttccagttcgggatggaattcctcctgatcagcagagactgatctttgctggcaagcagctggaagatggacgtactttgt

SEQ ID NO: 289099 - DNA, 110 bp, Homo sapiens
tggaggctccgggcgcggggaagtcatgctcgcttcacggaggcaatagctagccggttagcactctacgtatatgaatatctgctccatgtaggagctcagaaatcagc

SEQ ID NO: 289100 - DNA, 96 bp, Homo sapiens
ggatttcaccacaagaagggctgccagagtgatcagcagctggactgtgccttggacctaatgaggcgcctgcctccccagcaaatcgagaaaaac

SEQ ID NO: 289101 - DNA, 74 bp, Homo sapiens
ggcaacggggctccgggccctaagggatacctcttccaaatgcatgatgaagatgttctcatcaacaggacaag

SEQ ID NO: 289102 - DNA, 100 bp, Homo sapiens
ctcgctgcacaagaacagcgtcaggttctggaagcgctcgcgggccgtcaagccacgctgcgagctctgcttaggaacgtccagccgcccgccgaagctc

SEQ ID NO: 289103 - DNA, 100 bp, Homo sapiens
ggacctgctccgggacaacatgctgcggggcacagcaaatggttatgagccttagagtttctgaactccaagtactgttgggctacgccgggagaaacaa

SEQ ID NO: 289104 - DNA, 75 bp, Homo sapiens
gtggctacatgacactcttattgaaacaacagactatgctgggcttattgactcagaattcatgattgaagaaat

SEQ ID NO: 289105 - DNA, 51 bp, Homo sapiens
gctggctcttatcttccttcatgacagagatgtccatgaggagccccatct

SEQ ID NO: 289106 - DNA, 74 bp, Homo sapiens
accacttgaaaccattagtgagctgggtgataaaagaaaatgtggctgaagttacccgaagttcagcttgcagt

SEQ ID NO: 289107 - DNA, 82 bp, Homo sapiens
tcgagcgccgcggacgcgtcatcgagtgtgacgtggtgaaagcaaattcaacacccaacagcttccttaatagcaaaggtag

SEQ ID NO: 289108 - DNA, 75 bp, Homo sapiens
gagtgggagagattggactgggagactcagcagagctttttagatgaggaatttcctcactatgattccctgtcc

SEQ ID NO: 289109 - DNA, 100 bp, Homo sapiens
agacatgaatactgtgacactgaccaccaggccaacttaacatcagcagatatcctgtctcagatgaagagtgttaagggatcagatcttgatcctgaag

SEQ ID NO: 289110 - DNA, 100 bp, Homo sapiens
catgttattgagaagaaactcaaacagttacgggagcaagtgtcccaagatttaatggccttgcagggaacccaggagttcatgatcaagtgttgcccac

SEQ ID NO: 289111 - DNA, 74 bp, Homo sapiens
agtccccagaggagacccgcgccgccctggaggagtggctgcctaggattttttatcaagcagaaatgcatcga

SEQ ID NO: 289112 - DNA, 76 bp, Homo sapiens
gcaaactctggaaaaaaacttgggtatcctggtcagatataggaggactggaaagtatcaaactgaagttggaaca

SEQ ID NO: 289113 - DNA, 100 bp, Homo sapiens
cccgtaaggaaaggctcctagaagactccaagggagtaaaagagctgatgaaacaatggcaagataacaaagccattgacctttgccgattgtgttgggg

SEQ ID NO: 289114 - DNA, 75 bp, Homo sapiens
ttgttgggatagaagaacacacagtcggctatggagagctactcttgatgtgcactcccagcaacacccctgcca

SEQ ID NO: 289115 - DNA, 100 bp, Homo sapiens
ttgcagactgcttgctggaactcacaggaggcacacttgagcttggggagccaacttccatgatggaagaagagggagggctccaaatgtgaagtacaag

SEQ ID NO: 289116 - DNA, 98 bp, Homo sapiens
ggagtacgagacgaggttcctgtgcaactcttcacaggtgggatatgagcctcttcctccaacaataggacgaaatatttttgggcggcaagtgtgtc

SEQ ID NO: 289117 - DNA, 100 bp, Homo sapiens
ggagaacacctacttttgtccatgatacaaatgaagttgacataccacctaacactcgagttggcaccaaacgctatatgcctccagaagtgttggacga

SEQ ID NO: 289118 - DNA, 50 bp, Homo sapiens
cagctgcaaacccccgaaaaagatgagcagcaccagcagtaagagggctc

SEQ ID NO: 289119 - DNA, 114 bp, Homo sapiens
ctgcatgtgaagctcaccgagacggcgatccgggcgctcgagacttaccagagccacaagaacatccagtcatggataaaaatgagctggttcagaaggccaaactggccgagc

SEQ ID NO: 289120 - DNA, 100 bp, Homo sapiens
caccaggccgggaagcccatcgggatggctaaaggtgaccccaagaaaccaaagggcaagatgtccgcttatgccttctttgtgcagacatgcagagaag

SEQ ID NO: 289121 - DNA, 75 bp, Homo sapiens
cccccaatgctgaccaaggaggagcctgttccagaactgctggaagctgaggatttgttaaggattccaagtaac

SEQ ID NO: 289122 - DNA, 98 bp, Homo sapiens
tttcttcactcctcttcacttcttcatactatactggcaattgctggagaagattttgcaattgttgcttctgatactcgattgagtgaagggttttc

SEQ ID NO: 289123 - DNA, 100 bp, Homo sapiens
aggattcggacagcaagcatgtggatgtacatctagttcaactaaagcgggtcacagaaagtcgagagagccaaatgacgattgaggagaggaagcagct

SEQ ID NO: 289124 - DNA, 100 bp, Homo sapiens
agaaaactaaagtttaagctggaactccaagagaaagaaacagaagctaaaattgctgaaaagacagcaggaggaatgcaggctcaggttggaatgccag

SEQ ID NO: 289125 - DNA, 98 bp, Homo sapiens
aagtttactcttggggtgaggcagaagatgggaagttggggcatggcaacagaagattgctcagctacctctgaaacttgaatctgaagtgatggaga

SEQ ID NO: 289126 - DNA, 90 bp, Homo sapiens
tcccagtctttcaatggcttcaagacaaccagaagtgcctgatctctttgcagagtccctgcagtgcaaggtggactgtgaggccaattt

SEQ ID NO: 289127 - DNA, 100 bp, Homo sapiens
gagacctcctgtccgaaaataaccgccttcgcatggagctggaaaccatcaagggttattttggagctgttggagcactccttgagctgttgaagatccc

SEQ ID NO: 289128 - DNA, 75 bp, Homo sapiens
gttcacgcacgggatccagagcgccgcgcacttcgtcatgttcttcgcgccctgtcaccttcaggccattcagag

SEQ ID NO: 289129 - DNA, 100 bp, Homo sapiens
cccgaagcacctcccggcgccgggacgcttcttctagtgcttgtgatttcacgtatttttgctgaactcgtaaaagagacacttggatggtggattaacc

SEQ ID NO: 289130 - DNA, 76 bp, Homo sapiens
tgcatgcagagatgctgtggttcggggggtgctcgcacatccgggcaacgtttgatcctgacacagggctgttgat

SEQ ID NO: 289131 - DNA, 100 bp, Homo sapiens
ggtggaccccaagaagaccattcagatgggatctttccggatcaatccagatggcagccagtcagtggtggaggtggactttcactgctggatgtgtggg

SEQ ID NO: 289132 - DNA, 88 bp, Homo sapiens
ctcacagtttgctctgctcttccaacaccagtggaagatgatcacatcccaggtgaaaggtgtagcagtcactcggcctacacccaca

SEQ ID NO: 289133 - DNA, 100 bp, Homo sapiens
accggcagggcttctcctatgactacgtctttgactggaacatgctgaaattcgcttctcacggcattcagcagcagcgttgctgtaaccgacaaagaca

SEQ ID NO: 289134 - DNA, 97 bp, Homo sapiens
ttcaacatgattgaccagaaccgtgatggcttcattgacaaggaggacctgcacgacatgctggcctcgctgggtttggtgcacctcgatttggagg

SEQ ID NO: 289135 - DNA, 51 bp, Homo sapiens
gccgtgcccgagaatagctccgtccagcagatcatcaatgctgtggtactg

SEQ ID NO: 289136 - DNA, 75 bp, Homo sapiens
gggttattcgagtgaccgagaccgcggccgggaccgagggacgtggcccagtggaacatcgggagcctccggacc

SEQ ID NO: 289137 - DNA, 82 bp, Homo sapiens
aaaaaatttattaaaggaagcacacctaaggttggtactaagaagtgcctttcctgacgtctctgctgcttggaaccgcttc

SEQ ID NO: 289138 - DNA, 82 bp, Homo sapiens
taagcgcagaaagcaggcgaacccgcggcgcaataacggtcactcctggaagcaaggcggctctagctaatttatgtattgg

SEQ ID NO: 289139 - DNA, 100 bp, Homo sapiens
aaaggaggaaactgcttattggaaggaactttccttgaagtataagcaaagatcctcattgaattttgtgcaggtggagcagtagatgctgtgatgcttg

SEQ ID NO: 289140 - DNA, 101 bp, Homo sapiens
gcttcacggaggcaatagctagccgaaaagaggcacagttagatgaagaaggacagtttcttgtcagaataatatatgatgactccaaaacttatgatttg

SEQ ID NO: 289141 - DNA, 83 bp, Homo sapiens
ctcgtcagactccagcagccaagatggtgaagcagatcgagagcaagtgtactaatggtcacttgatgtgcgctggctgtttt

SEQ ID NO: 289142 - DNA, 100 bp, Homo sapiens
gaaagatgagcgaggagacggcgacttctgacaacgaggagaggctagtggtaacaggccgagctggatggatgggtatggggagaggggcaggacgttc

SEQ ID NO: 289143 - DNA, 51 bp, Homo sapiens
gggtcctttatatagaagggagagtagaaaccatcatagcctttgcctggg

SEQ ID NO: 289144 - DNA, 100 bp, Homo sapiens
gaagtcctctcttctccttgccatcctcggtgagatgcagacattggaaggaaaagttcactggagcaagtttggtgcacctcgatttggaggaagtagg

SEQ ID NO: 289145 - DNA, 100 bp, Homo sapiens
ctacgtggagcggaagaacagcctgaagaagggctccctcgtgaagaacctgaaggacacactaggaaatctactttcttcaatgtgttaaccaatagtc

SEQ ID NO: 289146 - DNA, 88 bp, Homo sapiens
accttttccacagggaattgagttgaacggtggcagccgaagttaggaagcagatctccggacaatatagtggttctccccaactgct

SEQ ID NO: 289147 - DNA, 75 bp, Homo sapiens
ttgaaatcttggatactgcaggaacgcccccttacccaggaatggaacaacctccacaccatccttactatcagc

SEQ ID NO: 289148 - DNA, 83 bp, Homo sapiens
cgtggacaagtttgcagatcgggagcgcaaggtcgccctcaaggccatgatcaaaacgaaaccctggaggacatcgacaagaa

SEQ ID NO: 289149 - DNA, 82 bp, Homo sapiens
atgtttggattgaagccgcctctgtattacttaccaggtgacaaacagcatgtttggtgcttcaagaaagaagtttgtagag

SEQ ID NO: 289150 - DNA, 75 bp, Homo sapiens
ggagaaaccgcctcgaaaacggagaagcaggttgaagaagaggatgaacttgaatctggagaccaagaggatgag

SEQ ID NO: 289151 - DNA, 82 bp, Homo sapiens
ccttgctgaagagaaaagccccagactgtattttgagcctgaaccaatttcttccacgcccaattatttgcaacggggagaa

SEQ ID NO: 289152 - DNA, 100 bp, Homo sapiens
gagactacaaggacagcagcgactttggggcccgtcaccctcagatgccgacaaaaggatcaaggtggcgaagcccgtggtggagatggatggtgatgag

SEQ ID NO: 289153 - DNA, 87 bp, Homo sapiens
gtgttgtttgtctacctgggactacatcttcatgatacagttaagaggaatcttgacagcgccacttcccctcagaatggcgatcaa

SEQ ID NO: 289154 - DNA, 100 bp, Homo sapiens
cgcgcgggccgggaggggacggccgccggagccgcgaggccaagtctggaaatctctccaggcaccctgctttggccctctagaatacagacagttcctg

SEQ ID NO: 289155 - DNA, 75 bp, Homo sapiens
ggcggaacaggctaccaagtccgtgctgtttgtgtgtctggggcccccagatgccgacggccctctctacctccc

SEQ ID NO: 289156 - DNA, 95 bp, Homo sapiens
gactggacttacgaggagcagtttaagcaggggcggaccgcggaacccgaggccatgtcccatgaaaagagttttttggtgtctggggacaacta

SEQ ID NO: 289157 - DNA, 95 bp, Homo sapiens
gaagataaatcagaatcatttatgcaaaaatatgagcaaaaaatcagacattttgttttctggatatgccgcagaaggatccgtgccagaagcaa

SEQ ID NO: 289158 - DNA, 97 bp, Homo sapiens
tatgtgatcgattttaacaaagagaatattcactaccagaggaattttatgataaatggggaagatgtccagaatcgagaagaagcagtggccttgc

SEQ ID NO: 289159 - DNA, 90 bp, Homo sapiens
ctgatgaacttagactgctctatggcatggcattggtcagtctctggatggtcgtcagatccgtgtggatcatgcaggcaagtctgctcg

SEQ ID NO: 289160 - DNA, 82 bp, Homo sapiens
gcaaaaatcccatctaccgcaactctcagttcgagagtaaagcactccttgctcaagacccctccccagtacctacccttcc

SEQ ID NO: 289161 - DNA, 82 bp, Homo sapiens
gcaagaccgggcagatctggcccaacgatggcgagggcgccttccatggagacgcagagacacctatggctgccgatgaagg

SEQ ID NO: 289162 - DNA, 98 bp, Homo sapiens
aatctgggaccagtctcggcaaatattacacttctctccttggaaaactcgatgccttgtgggtcctactgaggaaaggatatgatcgtgtgtctgtg

SEQ ID NO: 289163 - DNA, 100 bp, Homo sapiens
aggatgctgatagtctccagcgggcctggactgtgggctggtgtgtggaactgggtacagccaaagaccggagctttggagagatgaagtttaaacagtg

SEQ ID NO: 289164 - DNA, 51 bp, Homo sapiens
gtccacgttaggatcccaaagctcagcaagatgctctctgtgtgggtatgt

SEQ ID NO: 289165 - DNA, 50 bp, Homo sapiens
tgtgcaggggactctgtcacagtgaagaacgaggtggagaagctcccccg

SEQ ID NO: 289166 - DNA, 90 bp, Homo sapiens
ggcaagggcgagatcctggcgagcctgcaggatggcgcggccgagtccccgtacggccacccggcgggaaagaccacagcaagattcttt

SEQ ID NO: 289167 - DNA, 82 bp, Homo sapiens
gctgcggctctcactgtgcgggctgctgctccagagggcggaggagaacaagaacctggttcatggtaatgtgtgtggccgg

SEQ ID NO: 289168 - DNA, 75 bp, Homo sapiens
gagagaaagtgaggctggtgttggtttgcaaaggcaagagtacagcactgcatctgctctgtagccagtgaccac

SEQ ID NO: 289169 - DNA, 80 bp, Homo sapiens
tgtgcacgatgaggagggcaagctcttggagaaagtgactgagaccgaagatgatagtgatagtgacagcgatgatgatg

SEQ ID NO: 289170 - DNA, 100 bp, Homo sapiens
gcaggcgctgtcacccagtgctgagcccaataacttgaaggcccgcaattccttccgctacaacggactgattcaccgcaagactgtgggcgtggagccg

SEQ ID NO: 289171 - DNA, 82 bp, Homo sapiens
ttcaatgtcactgtcaccaagactgacaagagcaagattgtggcagagcgtcctggcactaactcaacaggccctgcaccca

SEQ ID NO: 289172 - DNA, 74 bp, Homo sapiens
acgggtcccgcggcgagcgagctcctgaggtacggcgtcggggttaaccccaaagattggctttccttggagtg

SEQ ID NO: 289173 - DNA, 100 bp, Homo sapiens
gcggtaaggatttcaacatgcctctgacaatctctagtatcacccttgaaggcagacattgtcctctcaagttacagatgaagaaatggaggagcagaat

SEQ ID NO: 289174 - DNA, 100 bp, Homo sapiens
agaggagcaggctcgcctccttgatgaactggcaggcaagctacaaagcctagacctttcagccgctgccgaaatgggttcagtttggcaaagacttggt

SEQ ID NO: 289175 - DNA, 100 bp, Homo sapiens
cgggatcctccagttcctgcacatctaccacgccgtcaaggaccggcacaaggacgttctcaagtggggcgatgaggctgaagctatgtgcatagttggg

SEQ ID NO: 289176 - DNA, 82 bp, Homo sapiens
cggcttccgtcccggacagagcccgtggtcgcgcagactacatgaggaaataattgacttttataacttcatgtccccttgt

SEQ ID NO: 289177 - DNA, 100 bp, Homo sapiens
tctgcagaggagatggatgagaggaggcggcagaacattgcttatgaatatctgtgccacttagaggaagccaaaaggatctagtgaaaagccatttgat

SEQ ID NO: 289178 - DNA, 100 bp, Homo sapiens
ccggctctgagggcactggcctagttcccgacttgtttctcaggacagagcgggatgccaccagcttgtccaaagggaagttccaggagctcctggtggg

SEQ ID NO: 289179 - DNA, 100 bp, Homo sapiens
gacatgatgagcagcatgtcagaccagaccgtccgggtgaaggtagacgtcgtggacactggttcaggatggaccccactcatgagagtctctgcggtgt

SEQ ID NO: 289180 - DNA, 100 bp, Homo sapiens
gttggaaattgaagaacgagaacggcgtagagaggaagagagaagacttggcgatagttccctttctagaaagacctttgaagacaatttaattgaagca

SEQ ID NO: 289181 - DNA, 98 bp, Homo sapiens
atctggaagcgattcaagccaagctgaccaagaagccaaagaactggctaggcaaataagctttaaggtggtttcatggacatctctctgggaaagaa

SEQ ID NO: 289182 - DNA, 82 bp, Homo sapiens
ctattttggagggcatagatccggccaagcatcaggtgcgcttcccttcccacttcagctctgacttgaaggacctgctgcg

SEQ ID NO: 289183 - DNA, 100 bp, Homo sapiens
cgcagccgcggcttccggagccctcggggcggcggactggctcgcggtgcaggtgcagcggaactgctgcctgacgctctgcaacttcagcatccccgag

SEQ ID NO: 289184 - DNA, 99 bp, Homo sapiens
catcaaaaatagtgatagctttgataatatcctggtgtgaaccagctatcctccagtataggaggattgagtcttcagagttctccacaaccagaaagc

SEQ ID NO: 289185 - DNA, 83 bp, Homo sapiens
gccaaaagtgccatgccaatagaggtaaatgtctgctctaagaagcagacaaccggacatgcgcattcatagcagaaggaaac

SEQ ID NO: 289186 - DNA, 75 bp, Homo sapiens
ggaaaaaaaccttcgactatgcagagacatgagatggtagccaacccctcagatggggacccagagcctgctctt

SEQ ID NO: 289187 - DNA, 100 bp, Homo sapiens
ccaggaagtcatttgtttggacagtagcagtggcagtgaggatgaaaaaagcagtcgagatgagcaaaggatatgcgattggcaatgccccggagttggc

SEQ ID NO: 289188 - DNA, 100 bp, Homo sapiens
gccaggaagtcggagtttgagccccggaggcagagcggctgccatgtacaagttgtgcaaagtgaggaagattactgtgggagtgaagggaatccctcac

SEQ ID NO: 289189 - DNA, 75 bp, Homo sapiens
gtgcgctctcgggccactcggccgcagaagaatgtcttccaagcaagccacctctccatttgcctgtgcagctga

SEQ ID NO: 289190 - DNA, 100 bp, Homo sapiens
cagaaagcaagtgaatacgagtcagaaggttacccatagatggttgtattggaagaaggttttttcaaagtcctgctcatatcaatttgttgaaagaaat

SEQ ID NO: 289191 - DNA, 83 bp, Homo sapiens
ttcatttgcttccacaagaaccgcgaggacagagagctgcgggtggaagtggagcagccccatcaccagctgccccgggaagg

SEQ ID NO: 289192 - DNA, 83 bp, Homo sapiens
tgattcggcgcgatttgaggagctgctgctgcagggggtgaatctctacattaagaacttggatgacactattgatgatgaga

SEQ ID NO: 289193 - DNA, 95 bp, Homo sapiens
cgggaagatgaacaacggcggcaaagccgagaaggagaacaccccgagcgaggccaaccttcaggaggaggaggatgcctaaatcaaaggaactt

SEQ ID NO: 289194 - DNA, 89 bp, Homo sapiens
ccgagcacgagcggatcttgcaggagatcgagagcaccgacaccgcctgtgtggggcccaccctccgattgtgttcaattagaccttca

SEQ ID NO: 289195 - DNA, 82 bp, Homo sapiens
tgaagacgtctgcgtgagaatagagaccaccgagacctgatggccaaaagaaaggaagaaaatttttcctctcctaaaaatg

SEQ ID NO: 289196 - DNA, 101 bp, Homo sapiens
aggagggcggcgggactgcactcgagtgtccagacctgctcgatgttgttcttcctaacataaaatcagaagatacaccatgccttctgtctatagatctg

SEQ ID NO: 289197 - DNA, 75 bp, Homo sapiens
aaaacccccattcattctggattggtggatctgaagtacaaaatattttccagttttggttacctgcagcaaact

SEQ ID NO: 289198 - DNA, 51 bp, Homo sapiens
cctttgagaccgtgaagagaaagatgcagaggctgggaggcggcagaatgc

SEQ ID NO: 289199 - DNA, 75 bp, Homo sapiens
ttcccatctcccatgatgtatgctggaccaactgaggttctcagaggcactgtgactgacttccctggatttgat

SEQ ID NO: 289200 - DNA, 100 bp, Homo sapiens
tacctgaacggcgtcgtcgggccgccgcagcccgccgaaggcgcgggagatacaactcgtcaacgaatcaaattcagtgatgacagagtatgcaagagtc

SEQ ID NO: 289201 - DNA, 82 bp, Homo sapiens
ggtggctccagcatgtatcagccgaggtggagctgcggggccctggcatgaaagaacatccagtcatggataaaaatgagct

SEQ ID NO: 289202 - DNA, 100 bp, Homo sapiens
tactatccatttcaactacagatactttgaagtagaagaagctgatggaactcgctttgaacgcttgcttatgagaataggacatcaatcaaagaatgcc

SEQ ID NO: 289203 - DNA, 82 bp, Homo sapiens
tggccgtgccctggggctgagccctcaggggagtacgccgagggcgtcagtgagcgagacatcctgctcatccactcctgcc

SEQ ID NO: 289204 - DNA, 80 bp, Homo sapiens
ctggctgactgcgagaaggtggctgtggagttcgggaaccagctggaggtaactaggatttctacctcaaccgcgagacc

SEQ ID NO: 289205 - DNA, 90 bp, Homo sapiens
ggggaaaaaatcccaaggtctgcaaaggtcatattgaacattccagatacctatcattactcgatgctgttgataacagcaagatggctt

SEQ ID NO: 289206 - DNA, 90 bp, Homo sapiens
ttggttcgagtttgtgatgctacatatgataaagctccagttgaaaaagaaggaatccacgttctagaggaagagctgcgcaaaggtgga

SEQ ID NO: 289207 - DNA, 111 bp, Homo sapiens
agctgaagagcgacaagccgctggcagccgcggatctcaccgccgctcaggggaaccttctgaccagcctcatgggctcctcagagcaggaggatggggaggagagcccca

SEQ ID NO: 289208 - DNA, 128 bp, Homo sapiens
agggagagaaccagcacttctgggacgcacagagaccgtgaagattccaagttcaggagaactcgaccggtcgctctggtgcagtggacagagagtgtgggcctcacgctggtcagcagggacctcac

SEQ ID NO: 289209 - DNA, 90 bp, Homo sapiens
cagatggcagacatacatcatttaaagggaaacttggatttaactggccagaagcaggtattcaaagcagagaacaatccctgggtgacc

SEQ ID NO: 289210 - DNA, 75 bp, Homo sapiens
gctttgttcagctgcagcatggagagatagataaacggaacactcctatgccaccttcaccagctgtacaagtgc

SEQ ID NO: 289211 - DNA, 100 bp, Homo sapiens
gggaaatcaagcatcgtgtgtcgatttgtccaggatcactttgaccacaacatcagccctactattggatccagtgcacattgcaggacgtcggctcggc

SEQ ID NO: 289212 - DNA, 98 bp, Homo sapiens
tctcgctccgtggccttagctgtgctcgcgctactctctctttctggcctggaggctatccagcggcaacgggcatgaggaggtagttgcatgcgcct

SEQ ID NO: 289213 - DNA, 75 bp, Homo sapiens
tgcgcgccctggcgggtccggaccaagagcgcatcagcgaggaggtggggctgctgcagctccttggggaccccc

SEQ ID NO: 289214 - DNA, 75 bp, Homo sapiens
cggtgagggcggtggcgcccgcgggacctgcggtgatgtgtccaatctagatcccaacttctcatttgaaggcac

SEQ ID NO: 289215 - DNA, 90 bp, Homo sapiens
tggacggtgtgagggggaccgggagaggcaccaaatctggcctgggggcccgagaagcttcctctcagcacctgtggaatcctctcaaga

SEQ ID NO: 289216 - DNA, 75 bp, Homo sapiens
ggcggggccacgctgcgggcccgggccatggccgccgccgatgccgagtttccaggagactgacaaggcgtggca

SEQ ID NO: 289217 - DNA, 50 bp, Homo sapiens
cgcaactctcagttcgagagtaaaggcattcctgcatcgcatccggcaga

SEQ ID NO: 289218 - DNA, 75 bp, Homo sapiens
cgccgccatccagccaccattccaagtgccggtggtggtgtgcacattgagccccggtatagacagttcccccag

SEQ ID NO: 289219 - DNA, 100 bp, Homo sapiens
tgcgttgtgaggggtgtcagctcaggtatggacctgtctgccaatcaggacgaggagaccgaccaggagaccttccagctggagatcgaccgcgacacca

SEQ ID NO: 289220 - DNA, 101 bp, Homo sapiens
gccattcaggagaagctcagggagcaggtggtgaagcgtgaggagctcttcatcgtcagcaaggaaagaccacagcaagattctttcattcgtctcctcct

SEQ ID NO: 289221 - DNA, 90 bp, Homo sapiens
atgatatgaaagattccagtaatggatgcacttgagccgacctaagcattcatggtcatgagatttgtggttgccactgttggttaggag

SEQ ID NO: 289222 - DNA, 100 bp, Homo sapiens
tttggactgtgctgttaattcaattagtgataatgtatgggaagtccttatcttaatggaatattgtcgaggtagctacagcaagctgggtagcaggcag

SEQ ID NO: 289223 - DNA, 98 bp, Homo sapiens
aagccggaggaacgggcccgtcaagctgcacctgacaggtttggtgcacctcgatttggaggaagtagggcagggcccttatctggaaagaagtttgg

SEQ ID NO: 289224 - DNA, 90 bp, Homo sapiens
ctggcacttatgtcctccctgggtcattcctgtcccaatcagctgctctactactgatgacattaaagatgccttcattacccaggcaca

SEQ ID NO: 289225 - DNA, 100 bp, Homo sapiens
atgacttgcaggcacaagcccgagcgcatagaattggtcaaaagaagcaggatgactttgacaacgatgtggatgctctgctggaagaaggcctttgtgc

SEQ ID NO: 289226 - DNA, 100 bp, Homo sapiens
ctagcatcttcaggagatgatgggtgtgtaagattgtggaaagatcagaacactgaggctcagagaagttaactactccaaagtcatatagccagtattt

SEQ ID NO: 289227 - DNA, 101 bp, Homo sapiens
agaagcgaaccaagcctgtctgtgtgttctggaaccattccctggcgtaaatgtgatgccgggagttctgcatcttcattagagacggggtttcgccatgt

SEQ ID NO: 289228 - DNA, 100 bp, Homo sapiens
tgtccccccggcttccagggaccccgctgtcagtatgatggactcaccctgtcacccaggttggactgcactggcctcaacctcctgagttcaagtgatc

SEQ ID NO: 289229 - DNA, 74 bp, Homo sapiens
tacagcgatggcgagatcagtatctgcatggagcacatgtctgaagatgatgagaaactgaaaaagaggaagga

SEQ ID NO: 289230 - DNA, 101 bp, Homo sapiens
gcatatccgtctgtcagaaagagctgaacactctgtgcagcgagttacatgttgagccatttcaggctttcttcgagagtcacccagctccttcagctgag

SEQ ID NO: 289231 - DNA, 80 bp, Homo sapiens
caggacggcgcggcagagtccccgtacgcctacagtaacggacgagattgaggagctgcgggccgagatgctggagatgc

SEQ ID NO: 289232 - DNA, 100 bp, Homo sapiens
aagatgaccacactccaggaatgccagtgcatcttttgcacagctttacctagaaaagtacgagaaagttcatcattttggggaggatgatgatgaggta

SEQ ID NO: 289233 - DNA, 112 bp, Homo sapiens
agcaagttgaagcccgaagttgtggaggagctgaccaggaagacctactgtgctggagaatctggtaaaagcaccattgtgaagcagatgaggatcctgcatgttaatgggt

SEQ ID NO: 289234 - DNA, 75 bp, Homo sapiens
acggaagaaaaggtctggccgtttttgaaatcatgaatcctgtttatagtcctggatcttctggggttccctatg

SEQ ID NO: 289235 - DNA, 82 bp, Homo sapiens
atcctgccgtccttctccactttcgccagcccgtgccgcgagcgcggcctgcaggagagatggtgaattgtctttgagtcgg

SEQ ID NO: 289236 - DNA, 83 bp, Homo sapiens
cggagaggtagccatgatgccccacttggtgaatggagatgcagctcagcagctattgtggacgatgaaaggctctctgcaga

SEQ ID NO: 289237 - DNA, 50 bp, Homo sapiens
cgactcagctctcggcctgctgatgatttatcagcgatgctggttagtat

SEQ ID NO: 289238 - DNA, 75 bp, Homo sapiens
gtgttttaagaaagtggacaaagagaggagtcaggctgaactcacgggaatcaaatggcgtaggtacaattttgg

SEQ ID NO: 289239 - DNA, 105 bp, Homo sapiens
cggggcccgagccccgcccggcccgggccatgtcggtgggcgagctctacagccagggagtgcatccgccccaacccttttccccctcgtctcctgtgagaattc

SEQ ID NO: 289240 - DNA, 83 bp, Homo sapiens
gcgaacgcggagagcacgccatgaaggcctcgggcacgtttggcaatgaggagcagcagctggcgtgggccaagcgggagagc

SEQ ID NO: 289241 - DNA, 75 bp, Homo sapiens
ttcaaaggggaaagcaaggccaaagacagggagaagaattggcagagggggtcgatttgggaggaaaggtgtggc

SEQ ID NO: 289242 - DNA, 100 bp, Homo sapiens
ctcctgcaccacggggacttctcagcagaggatgcagtgaccagcctttgctttggccggtacgggcgggaggacaacaccctcatcatgaccactcgag

SEQ ID NO: 289243 - DNA, 87 bp, Homo sapiens
gcgaacccctctgggatccccgccgctctgtctacaacccgagatgatatcatcaagttgaatcgaaaggaagggaagaagcagaat

SEQ ID NO: 289244 - DNA, 97 bp, Homo sapiens
ccgacctcgacgtcttgcctgtgtcccacttgttcgcggcctatagcacggggtcactctggtgcccattgaggagttcagcccggagttcgtggag

SEQ ID NO: 289245 - DNA, 83 bp, Homo sapiens
tatgcatactccacagcacctggtgaaaggaagcatgtttacaccaatgccaaaaagcagatgctaatttctcttgctcctcc

SEQ ID NO: 289246 - DNA, 98 bp, Homo sapiens
cgaatgcttgaagacagagatttattcgtaatgcgactcaaagctgcacggcagtctgtttatgagcatggagatatggaccaaaaggaacgagacgt

SEQ ID NO: 289247 - DNA, 50 bp, Homo sapiens
ctgagaagtcgtcctcttcagaaagggtgccaaggactcacccgtacgtc

SEQ ID NO: 289248 - DNA, 75 bp, Homo sapiens
cttagcttcaaagaaggcaatcagattgctaagaagcctcgaacgccaacctctggtccagtaatcacgaagctg

SEQ ID NO: 289249 - DNA, 82 bp, Homo sapiens
gaaaatcaagaagctgaatttccaggccttcgccgagctgtgcagcaaattgtggctactaatttgccccctgaagatcaag

SEQ ID NO: 289250 - DNA, 100 bp, Homo sapiens
taagtatggtggcttggagcggctttgcagggacatgcagagcatcctctatcacgggcttatccgtgaccaggctggagtgtagtggcacgatctcggc

SEQ ID NO: 289251 - DNA, 97 bp, Homo sapiens
agagaagaaatacaggatgcctctcagctgccacctgcctttgacctttttgaagcctttgcaaaaggcctgggatacaacagtgatgagataaggc

SEQ ID NO: 289252 - DNA, 100 bp, Homo sapiens
gctctttgaggagccagaggagaccagaggcttgggttttgatgaaatccggcaacagcagcagaaaattatccaagctatgaagacggccaagtgggag

SEQ ID NO: 289253 - DNA, 75 bp, Homo sapiens
ccactcgtattaacataatgaacctgtgtgaggcagaccgattattgaccgacctattcgaggtcgtggtggtct

SEQ ID NO: 289254 - DNA, 100 bp, Homo sapiens
ctgctgaagatggccagatccccttgtctggattttatagctaccttgggaaaactttcaggattacatggccaggacctttttggaatttggagtaaag

SEQ ID NO: 289255 - DNA, 100 bp, Homo sapiens
ggcgctatggaggagctcgatggcgagccaacagtcactctgcatcttcctcccgtgaggctggccgagctccacgctgatctgaagatacaggagaggg

SEQ ID NO: 289256 - DNA, 90 bp, Homo sapiens
ctgtgtgatgatgcctgagttcagccctcagcagcagacggttgatgatgaagcgccggccgtgtaaatgaagatcgggtgaggagcagg

SEQ ID NO: 289257 - DNA, 75 bp, Homo sapiens
acttctcagacaagttccatcccacctttgagtcagtaagactttgaccccgacgcaggcttcagtgattgccgc

SEQ ID NO: 289258 - DNA, 100 bp, Homo sapiens
gcctccgtattgaatgaaagacccagtgcaaagacatcaccatgaacactagcagcatttatgtttgaatcatctttaagtctggcggtcacaaagtggg

SEQ ID NO: 289259 - DNA, 100 bp, Homo sapiens
tttttcaagcccatatcttgccgaaatgtcaacatccatttttcaccctacatgaatccaaaggaacagatgtggcatcttttgtaaaactgattcttgg

SEQ ID NO: 289260 - DNA, 82 bp, Homo sapiens
catcctgctgggcttcgtccagatcgggaaggaacccagcgggtgccgcttctccacccgaggcttccacctccaacgagcc

SEQ ID NO: 289261 - DNA, 98 bp, Homo sapiens
ttgaactgaggaagccattagtgctctggtctctgacccttgcagtcttcaggaaaatgtttataggaggccttagctgggacactacaaagaaagat

SEQ ID NO: 289262 - DNA, 100 bp, Homo sapiens
gtcccagaccaccctcctccaccgtcgcctcccactgcaaaaaggcctggggctatgtgacctttgaggacgtggctgtctacttctcccaggaggaatg

SEQ ID NO: 289263 - DNA, 103 bp, Homo sapiens
accacagtacttctgggaagaggaggaagagctgaatgactcaagtctggacctgggacccactgcaggtgtcatggagaaactccagctgggcccagagatt

SEQ ID NO: 289264 - DNA, 76 bp, Homo sapiens
aagaacatgagaactgcgactcagcatgcagaagtatcctagaaggaaaacatcaccatggctacagaaattggtt

SEQ ID NO: 289265 - DNA, 89 bp, Homo sapiens
cggagtgtgcgacggattgggaggagactacctaggtggagaagcgtactgggccggcggcctgcacctctacaccccattacctttcc

SEQ ID NO: 289266 - DNA, 75 bp, Homo sapiens
ggagggaggtttggcagatggagaacctgatcgaacttcggactatcctattaagtgtaatctcactgcttaatg

SEQ ID NO: 289267 - DNA, 82 bp, Homo sapiens
tggtcccgcagacgccgagatggaggtcttccccagggaggtcctgaactacacagctgagaacatctgtaagtgggcctta

SEQ ID NO: 289268 - DNA, 75 bp, Homo sapiens
ggaaaatgcgctcgggctggaccagcagatttggagcaagaggtggtggtggccttcccccgaagaaatttggta

SEQ ID NO: 289269 - DNA, 75 bp, Homo sapiens
tcgctccgtcgcacccaccatgatggaagacgacgggcagccccggactctttacagttacatgatcgacaacgt

SEQ ID NO: 289270 - DNA, 83 bp, Homo sapiens
aaataccagtccccagtgagggtgtacaaatacccctttgaattaattatggctcccagggccttgctgccgccatgactgag

SEQ ID NO: 289271 - DNA, 75 bp, Homo sapiens
cgcgtgtctaggtgagtcgcggtgggtcctcgcttgcagttcagcgaccacggtagcagtagctgatgtgcagtt

SEQ ID NO: 289272 - DNA, 98 bp, Homo sapiens
tgggattgagatcaaagtctgggccatcgcctgcttcgcaccccaaaaacagtgtcgagaagaggtgctcaagttagctccattcagaaccaaatgca

SEQ ID NO: 289273 - DNA, 83 bp, Homo sapiens
gttgactaccaccagtggagtccaggatgaggttggaagtactccatgacacacactcggagaaagtcccttcccatgctgag

SEQ ID NO: 289274 - DNA, 99 bp, Homo sapiens
aagcgaaggattgtggtcccgcctcacctggggtatggagaggaaggaagagatgaccgcacctcgagcaggagtggggatgccacgtctgcccccagc

SEQ ID NO: 289275 - DNA, 90 bp, Homo sapiens
ggatctttgagtctagcaagtgttattatttctgccctttgtacccttacaaggaagagagaagggcacagttacctaagtatcaacgta

SEQ ID NO: 289276 - DNA, 90 bp, Homo sapiens
aagagcaagtgtcagaactgcttcaagccccgcgagtcgcatctgctcaacgacgaggacctgacgcagataaccagcccgagtcatgca

SEQ ID NO: 289277 - DNA, 97 bp, Homo sapiens
aaagatggagagagctcaatgcttgagaaaaggaattctgtcctttgaaaggtctctagaacaaaggggttttggccaaattgggcgagggcacaaa

SEQ ID NO: 289278 - DNA, 74 bp, Homo sapiens
ggcgcgctgggctggcgcggcctgggaaacctcgacctgtctcccagttggttgcacagcaggttactcagcag

SEQ ID NO: 289279 - DNA, 101 bp, Homo sapiens
cggactccgctccccgccccgccgcggccatggaggacgagcggaaaaacggagcctacggttggtggcactaaggctggtgtagtccggtttcttgggga

SEQ ID NO: 289280 - DNA, 100 bp, Homo sapiens
cacaggctgacctggcctatcagcttcaggtggacgccctgcttcatctggcccgccagaatcgggctgtggcccgcacagcccagaatgaacggtcatc

SEQ ID NO: 289281 - DNA, 75 bp, Homo sapiens
cctcaagcacctgcgcatcgtcatcggctccccttccctgcgggcatatccgctcctctcggtgatcacccgcca

SEQ ID NO: 289282 - DNA, 75 bp, Homo sapiens
ccacgttcgtgctacagaagaagggcatcgtgcgtgccaagcggcgagggatcgcttacacctgagacgaactac

SEQ ID NO: 289283 - DNA, 100 bp, Homo sapiens
cccgccctctctgtttctccccaaaataaccattctccagatccaggtgctgtacttctttgcagtatacaaggactagcagttaatattgacccaatct

SEQ ID NO: 289284 - DNA, 50 bp, Homo sapiens
cagaaaccaaacttcatctcattttagctgaaccaataacgtttccatct

SEQ ID NO: 289285 - DNA, 100 bp, Homo sapiens
acccactatggttacagcactgggcagccctgtgtcttcatcaagatgaaccggacagagccgctaccctggaggaggggaacccaacagacgaggtccc

SEQ ID NO: 289286 - DNA, 90 bp, Homo sapiens
tcggtgccggctcaggagccgggggagcatgacttcggcaacttcacctatcattctgaaatgggaccccaaaagtttggaaatccggac

SEQ ID NO: 289287 - DNA, 83 bp, Homo sapiens
cgcgtgtctaggtgagtcgcggtgggtcctcgcttgcagttcagcgaccacgggctgaagaagatgcagagcagcctgaagct

SEQ ID NO: 289288 - DNA, 100 bp, Homo sapiens
gtactagtggccaacaatagtgatacactcaagctgttgaaaatgagcagctgtcctcatgtctctccagcagattatgaagcaattgtgaagctttcgg

SEQ ID NO: 289289 - DNA, 87 bp, Homo sapiens
gagagggtgctggctgccgcgcggccgaggcactcaaggagttgcccctggtcctgtaattggacttcaggcaccatctactggtct

SEQ ID NO: 289290 - DNA, 100 bp, Homo sapiens
gctgggccaagatccacggcccccaggggctgcacggacagaatgattacggacctgaagccaaagaacaagatgcgctagtggacagattgctgaccag

SEQ ID NO: 289291 - DNA, 100 bp, Homo sapiens
aaggagcagatttacaaactggccaagaagggccttactccttcacagatcgtttgcctatctggggcgcctggctcacgaggttggctggaagtaccag

SEQ ID NO: 289292 - DNA, 90 bp, Homo sapiens
caaaaggtggcctttccactggagttgcttcacttagctctacaatcaacccatgtgctcaactgagaagtcatttccttggagatcaac

SEQ ID NO: 289293 - DNA, 50 bp, Homo sapiens
tgagggagaaaggcgggcccgggaacagtgcctccggagccagcgtggtg

SEQ ID NO: 289294 - DNA, 100 bp, Homo sapiens
aacctgctcctccaaagccagagcccaagcctaaaaaggcccctgcaaagccgaatatgtgggagtccatgtcctgcagtgtggcctgatgtaatcaaac

SEQ ID NO: 289295 - DNA, 100 bp, Homo sapiens
gcaccaagaactaacacatcctggagctgcccggagttccgctcctgcgggcttagcaggaaagggtgcctaagctgcatatctatgtgagactgaattt

SEQ ID NO: 289296 - DNA, 100 bp, Homo sapiens
atgtggccaaaatggggattacagagtataacaatcagtgccgagcaattgtgatgagatattctgctgagtggaagatctttgtagaatttgatggctg

SEQ ID NO: 289297 - DNA, 98 bp, Homo sapiens
caaggagtatttttgaatatgaacctggcaagtcatcaattcttcagcatgaaagaccagtccggaccctatttgtcagtggccttcctctggatatc

SEQ ID NO: 289298 - DNA, 100 bp, Homo sapiens
cgagcggcggcggcggcagcgggtcttgggtcctccgagagcagcagcggtatgatctcgtgaaaccttgagagaaactgaatgacgaatgaaactattg

SEQ ID NO: 289299 - DNA, 100 bp, Homo sapiens
gtacacctgctctgtgcagacagacaatcatcccaaaacgtcccgggttcacctaatagtgcaagcttctcacctggggcgggtgggttctgcaccaccc

SEQ ID NO: 289300 - DNA, 99 bp, Homo sapiens
gccgcagaggctgctcggccccgctgcccgccaggtcgtgggctcccgctccgggcccggggccaccggctgtgagtacgagagggcctccaaagtgga

SEQ ID NO: 289301 - DNA, 73 bp, Homo sapiens
aacgggagtgtcctggacccagctgagcgggcggtcattcgcatcgcaggtgcaactgacatgggtgaacccc

SEQ ID NO: 289302 - DNA, 90 bp, Homo sapiens
gcttcgagggttacaagctctctcttgagccgctgccttgttaccagctggagcttgacgcagggttgtctcctcacagactatgagctc

SEQ ID NO: 289303 - DNA, 98 bp, Homo sapiens
ctctgggtgggatattacataaggtggaatccacggatgaaaccacaggatcaacactctgtggtaggccagaacacaggccccagtccaagtcctaa

SEQ ID NO: 289304 - DNA, 100 bp, Homo sapiens
ggcagctgatgttctctcagtttgcacaagggaggcgacagagacagcagcaggcagcagaagatgtcgttttcattggacctgacacacatgctattca

SEQ ID NO: 289305 - DNA, 82 bp, Homo sapiens
ggctgactgcgagaaggtggctgtggagttcgggaaccagctggagcaaattgtggctactaatttgccccctgaagatcaa

SEQ ID NO: 289306 - DNA, 100 bp, Homo sapiens
ggaaacaagaaaacatcaaagaggtctagcaaagcggatgtgatgctggtacaacccagagtagaatttattctgtctttcattgaccacattgctggag

SEQ ID NO: 289307 - DNA, 75 bp, Homo sapiens
gttcttagagatgtacctttctcaggaagtgggagtgatgctgcctctcttctgacctccgctaagaaacaggga

SEQ ID NO: 289308 - DNA, 75 bp, Homo sapiens
gtgtcaccgccggaacctggcgcaggtcgtggtgtctacgacagtcaatgtggatggccatgtcctggcagtctc

SEQ ID NO: 289309 - DNA, 100 bp, Homo sapiens
actggattggctgcattcacaaaactctatgaaagccttttaccctttgctactggagaacatggatctatggaggaacaggagtacagctgtgtagtaa

SEQ ID NO: 289310 - DNA, 100 bp, Homo sapiens
ttcggcgcaaggagcccaagagccaggatatctacctgaggctgttggtcaaggaggtggatgcgtctgagatccaggtgcaggtgtgtttgtacgcctt

SEQ ID NO: 289311 - DNA, 75 bp, Homo sapiens
gtcaaaagagcttctctccagagtagaaaggaagagagaagggcacagttacctaagtatcaacgtaatcttcct

SEQ ID NO: 289312 - DNA, 96 bp, Homo sapiens
atagcgcggctgtgcaagtacctgccagagaacgacctgaagctgtcaccactgactaaagaagagaaaactgcggcagagcaattcaaatttcac

SEQ ID NO: 289313 - DNA, 75 bp, Homo sapiens
gccaatgttcctgatagttttaatgaagcctgatctagttgaatctgaagatgtggacctgctgatgaagagggc

SEQ ID NO: 289314 - DNA, 78 bp, Homo sapiens
cggtgccggctcaggagccgggttactggggcttccggatgcagatgacgatgcgtttgaagagtacagtgctgacgt

SEQ ID NO: 289315 - DNA, 75 bp, Homo sapiens
gaggacaatggacctgcctgggcatagacttccttaaggccatgctggagtatctgccaacatgatgaagaagag

SEQ ID NO: 289316 - DNA, 74 bp, Homo sapiens
cgggggcagccgctgagacggtttttcacaagcttattcagctgattctgaatcatcttacactaccagacctg

SEQ ID NO: 289317 - DNA, 75 bp, Homo sapiens
ccaaagatccccgttcctggagattctgattgaggtgcccgtggttgacacgagctgtgtccccagctgttcccg

SEQ ID NO: 289318 - DNA, 75 bp, Homo sapiens
gccaggctggccccgagcggaactggagaaagctgagggctggcgcccatgcggctctacacgctctccaagcgc

SEQ ID NO: 289319 - DNA, 75 bp, Homo sapiens
gcagcttaacatatttactgctgttcttagtgcactaaaggttttcctttggaatatggataaatacaccatgat

SEQ ID NO: 289320 - DNA, 83 bp, Homo sapiens
gaagaactcaagaatgttactaacaatctgaaatctctggaggctgcatctgaaaagaacctcaagaaggcatgaagccagcc

SEQ ID NO: 289321 - DNA, 82 bp, Homo sapiens
gaagaatctagacagacaggcctttctagatggagtttcactcttgtctcccaggctggagtacaatggcatgatctcagct

SEQ ID NO: 289322 - DNA, 94 bp, Homo sapiens
cctctcagcttcggagaatggagtcttccatcaatcatatctcacaggatactgctggtcaagagaggtttagaacattaactcccagctatta

SEQ ID NO: 289323 - DNA, 75 bp, Homo sapiens
tggatttccaaggaagaatttcctctgaagcaccgttgagaagctgatgtctcctcgacttccaactggaacctt

SEQ ID NO: 289324 - DNA, 75 bp, Homo sapiens
acgcaccctccctgcctggccgcgcctctgcgaccagtttagacactctgcaatatcaccaaaaagttcgctgca

SEQ ID NO: 289325 - DNA, 101 bp, Homo sapiens
cataacccccgacagcgccatggcccagattctgccaattcgttttcaggagcatctccagaaaatatttacaccagcagctccagttcataccaataaag

SEQ ID NO: 289326 - DNA, 97 bp, Homo sapiens
tggtgactgagcggagcccggtgacaggatggatctaatgaacagggagaagaaaaacaaaatcccaagtatgcaagttgggttcatagatgccatc

SEQ ID NO: 289327 - DNA, 100 bp, Homo sapiens
gggactggtcctcctggaggagatgctcgccttggggaataatcactttattgcaaaatgcattgatcactacaccaaacaatgtgtggaaaatgcagat

SEQ ID NO: 289328 - DNA, 74 bp, Homo sapiens
gccagcgagccgatcctcagcgtcctgatgtggggggtgaaccacacgattttatcatgtgggcaacctgctgc

SEQ ID NO: 289329 - DNA, 80 bp, Homo sapiens
cctcagttggaagcagccgatccagcctgcggagcctgtggggcagaagacttgcactatctgccagatgctgcttccta

SEQ ID NO: 289330 - DNA, 75 bp, Homo sapiens
agcatttattgatgccaatgggatgaaaattctgtataatacttcgcaagagaaatgctctcatatggagacagg

SEQ ID NO: 289331 - DNA, 100 bp, Homo sapiens
tgggaagcatgtcgtctttatcgctcagtgctcatctctcagagatctagaacttgcctaccaagtacatggccttttaaaaaccggagacaactggaaa

SEQ ID NO: 289332 - DNA, 100 bp, Homo sapiens
gatcctggagaacatctcgctgtcggtgaagaagaaaaagcttgtggtgaaggggggcaaaaaaaagaagcaagttctgaagttcactcttgattgcacc

SEQ ID NO: 289333 - DNA, 83 bp, Homo sapiens
agaggccctaaataagaaagctatccagattattaacagggttcgagataagctcactgaaactaatctggattcactccctc

SEQ ID NO: 289334 - DNA, 87 bp, Homo sapiens
ccatccagatgaggatatatccctgatggaggagatgtataagaaagctcatgctgctatacgagagaatccagtctatgaaaagaa

SEQ ID NO: 289335 - DNA, 100 bp, Homo sapiens
attcgagatggaatgtgtagacagtctttcacgggacatgtctcagatatcaatgctgtcagtatgatgaggagtctgatgaggaagctgtgaagaaaac

SEQ ID NO: 289336 - DNA, 90 bp, Homo sapiens
ggttgaagttcaagagctcagaccctaaagcctcaggagtgcaagtagctgatgaagtatgtcgcattttttatgacatgaaagttcgta

SEQ ID NO: 289337 - DNA, 98 bp, Homo sapiens
ccgcttcctgggggactatgtggagaacctgaacaagtcccagctgaagctgggcatctggggcggatctaagcctttcccacgttatggttataaac

SEQ ID NO: 289338 - DNA, 82 bp, Homo sapiens
gcagcagggacatcagctggcaattgtaaataggtttccaggatcaaaactaacctttcagattgcaaaagttgagaagctc

SEQ ID NO: 289339 - DNA, 100 bp, Homo sapiens
ctacctgaccatcatcctgctcctgggtgccgtggcatgtcgatttgtccttcactacaggaaacttggctgtaacttcaaaagaagatttgattcttta

SEQ ID NO: 289340 - DNA, 75 bp, Homo sapiens
tctctatcgaacaaaagtagaggcacagttggtggatctgaaatctgaactgacagaaacccaagcagagaaagt

SEQ ID NO: 289341 - DNA, 75 bp, Homo sapiens
ggattcccagccatggcagattcctccgggcagcaggtcctattttgtaacggattatgatccaaccattgaaga

SEQ ID NO: 289342 - DNA, 100 bp, Homo sapiens
gagaaagccctaccacaagaagcggaagtatgagttggggcgcccagctgccaacaccaagatactccatcttctaaaccaacactcctagccaatggtg

SEQ ID NO: 289343 - DNA, 100 bp, Homo sapiens
ggagtatcatcctggtggagaagatgaactaatgagagcagcaggatcagatggtactgaactttttgatcaggtatggcatgaattgccttattcagtt

SEQ ID NO: 289344 - DNA, 101 bp, Homo sapiens
gtggccgccgtgcaggcggccgtcagcaacctcgtccggggacaatgactcattcttcccaggacactggttcttgtggcattcaggaagatggaaagctt

SEQ ID NO: 289345 - DNA, 100 bp, Homo sapiens
ttccgatttaaagctgagctgcgaggaaaatggcggcgggagatctgcgagtgaagagggacgagggaaaagaaacaaagccacagacgcaacttgagac

SEQ ID NO: 289346 - DNA, 97 bp, Homo sapiens
acctggacgaagtgtactgccttaacgactttgaagaagatgacacagtcctcctccgcctcctcctctctgcatgcgcgtcagagcccgtgccaag

SEQ ID NO: 289347 - DNA, 100 bp, Homo sapiens
aagagtcaacagcagtggcaacagcacttgcacctcctgcgccgccgccccccatccaaggatatgccttcaagcctccacctagacccgactttgggac

SEQ ID NO: 289348 - DNA, 73 bp, Homo sapiens
gagaccttcgagcaccccaacgtggtcagaaacattgctgaggctcttgtcagcaaaggtctagccacagtga

SEQ ID NO: 289349 - DNA, 75 bp, Homo sapiens
cttggataccacagtatcataaaattcctctaaatgcagtggccgtttgttgcatctgtttttttgttattcttc

SEQ ID NO: 289350 - DNA, 74 bp, Homo sapiens
gaagaatttcgatctccgccctggggtcattgtcaggaggagatgttaaagtaacccatcttgcaggacgacat

SEQ ID NO: 289351 - DNA, 75 bp, Homo sapiens
ttgcttgaagaaatccatgccatgaaggatgaacttactgctgtgaatgtaaagcaaggcttcaataatcagcca

SEQ ID NO: 289352 - DNA, 82 bp, Homo sapiens
actgaacttacagtgcaaacaaaattacttggggcacacagcaaaaaatgctgtgatcacagtcccagcttatttcaatgac

SEQ ID NO: 289353 - DNA, 142 bp, Homo sapiens
ccacaatggacttgagcacgtccactccacgagaagcagaggaggaacctctggtgcctgagatgtcccatgacacaggacacgcatgaaatttggtgccatgactcggatcaggggacctcccttgggagatcaatcccct

SEQ ID NO: 289354 - DNA, 100 bp, Homo sapiens
tgtctattctgaactcaacttctgaaatttacagaaacaaactacatctcagggtccccagtcccaagcggaagttggaagaaccagttctggagttcag

SEQ ID NO: 289355 - DNA, 51 bp, Homo sapiens
gaggtgttgactaatccagccaagcatgccaatgaagatgtggaaagaatg

SEQ ID NO: 289356 - DNA, 49 bp, Homo sapiens
agcctgttggagaaacacaaagagtctgggttctgcccgcacacattcc

SEQ ID NO: 289357 - DNA, 75 bp, Homo sapiens
ccgtcggacggggaggaggagcaggagctggaggaggagccgccgccgccagatggctgagagctagcaaggaaa

SEQ ID NO: 289358 - DNA, 74 bp, Homo sapiens
ggcagtgctggggccgcgccacttccgcaaacaggtgcagggggacctggacgatctaccatgccaaccccagg

SEQ ID NO: 289359 - DNA, 74 bp, Homo sapiens
gaacatgcagtccctgcttcctgccatcttcagtgtctattggatttttccaagagaaagtttgtaaaattcct

SEQ ID NO: 289360 - DNA, 75 bp, Homo sapiens
gcccgggccatggccgccgccgatgccgagaaatgagccgtcagactgctacagcattacctaccggtacctcga

SEQ ID NO: 289361 - DNA, 75 bp, Homo sapiens
ttaaaaatcaccagttactttaatgatattccatgtctgtcctcgtttagctcctcttggccctcttaacccttc

SEQ ID NO: 289362 - DNA, 83 bp, Homo sapiens
ggcatttcagtcactggtttgcagagtccaggttgttcctcaaagtcattcaagctgtactcgccgaaggagcccccgaacgg

SEQ ID NO: 289363 - DNA, 85 bp, Homo sapiens
cttccctgaccattttctactgtccctgcgcgaggtggacttacagtttctggctactactggtggaaaatgatgggctcagaca

SEQ ID NO: 289364 - DNA, 90 bp, Homo sapiens
cagacatcaacttttggatccaagctggagtgcctgttacagatgtagagctaaaacgactgaaggatgctttcaagaggacctgtggac

SEQ ID NO: 289365 - DNA, 100 bp, Homo sapiens
agcagtgctcctcctccaaagtgatcctttttttatgcccgaggcctaccccaattatttactgggcaaaggaagatggaatgctacccaaaaacaggac

SEQ ID NO: 289366 - DNA, 82 bp, Homo sapiens
ttggcagccacttcaaaatcagacctctgtggcagcattttttccagaacacaaaaggttccactctggtgcaccctttcag

SEQ ID NO: 289367 - DNA, 111 bp, Homo sapiens
ctcgaatatcaagaaatgcagtaaccagcatgtcaataaggggtcataggtggaaaagacatggatttaagaggggtgcagatcccggaatgcctgaaccaactgttttga

SEQ ID NO: 289368 - DNA, 98 bp, Homo sapiens
tggccagcgagagccagggctccaaagaactcgatgaaggtcaccgtgtccaaagggggcgaccgggacagtgacgacgacagcgtcctcgaagccac

SEQ ID NO: 289369 - DNA, 100 bp, Homo sapiens
ggaggaacgcagcggccactgcgccgtggtggacggaaacttcctctacgtgtgggggggctacgtgtgaataaccctataccttccaatttgaaatcag

SEQ ID NO: 289370 - DNA, 100 bp, Homo sapiens
caacaacggggaagtcacccagcccccaaggattctgggggaggcctcaggagatacaactcgtcaacgaatcaaattcagtgatgacagagtatgcaag

SEQ ID NO: 289371 - DNA, 95 bp, Homo sapiens
ttcaatgagaagaatgaacagacctagtgggcgttgcctttagacccaggtgaattatgtaacctcattacgctggatgtagctcacaatcaact

SEQ ID NO: 289372 - DNA, 100 bp, Homo sapiens
ggcgacggcgcagtgcgaagcgaaacaggattaacacagattcctcagatccagaagactgaaatttcctttcgtcctaatgatcccaagagctatgagg

SEQ ID NO: 289373 - DNA, 75 bp, Homo sapiens
ggaattccggtcagggtcaagtcgtgttctgatcactactgacttgttgctttgctgcaagataacatcgctgat

SEQ ID NO: 289374 - DNA, 83 bp, Homo sapiens
cgaaaacaccctgcaatctttcagacagaggctccagcgggagaagaagcccaataacttgaatgacaccatcaaggagctgt

SEQ ID NO: 289375 - DNA, 100 bp, Homo sapiens
ttttggattacaactgttcatcctcacctatgcaaagaaagggaagctattgctgggattttgaggagagatgcaaatagatccctggatatttttgatg

SEQ ID NO: 289376 - DNA, 82 bp, Homo sapiens
acccctcccactggggactctgtcccatcacaggaattacatgaatgacagtcttcgaaccaatgtgtttgttcgatttcaa

SEQ ID NO: 289377 - DNA, 87 bp, Homo sapiens
cagaccttcgcctcgccccgccggttcctcaccctcggggagcaacatgggagaagatggtataaactggtccatcagtgacaaaga

SEQ ID NO: 289378 - DNA, 111 bp, Homo sapiens
caaattttgctactgtcagatggattgactatggaaaagttgccaaattgcaattctgtggtgttcttggtcacacatttatggagtttctgaagggcagtggagattact

SEQ ID NO: 289379 - DNA, 105 bp, Homo sapiens
caacggcaaagttttgcagatcttcaacaagaggacccaggagaaattcgccctcaaaggggatatgagactttctactcggaatatcctgagtgttgcgtggat

SEQ ID NO: 289380 - DNA, 82 bp, Homo sapiens
tctcatcgaggcccaaaccgccaagacttgtactcggcacccacctcctgccagggccgctgctacgaagcctttgacaagc

SEQ ID NO: 289381 - DNA, 74 bp, Homo sapiens
caagcagctggctctggaggacgccaaagaaggctacagcatttacacagatgtggaagacatgaaagagcaag

SEQ ID NO: 289382 - DNA, 50 bp, Homo sapiens
aaaaatactagattacagttgctcccaggatcccattgaagataccacgc

SEQ ID NO: 289383 - DNA, 87 bp, Homo sapiens
ttggcagagcttgacccaggcactagaaacacttcaagttgaagaagatgatcgacctgagttaccatggtggaaatgcaagaagtg

SEQ ID NO: 289384 - DNA, 98 bp, Homo sapiens
cctgttttgtccaaagtccctggatatggcttacagcaacgaagtaaacgaggaggttggtccaaaggaagaaagaggaagaaacctcttcgagacag

SEQ ID NO: 289385 - DNA, 100 bp, Homo sapiens
tatggcagtataaatggagcaacaaggctgactataagaggggaagattcagaatggacagtttagaagaacctcagaaaaaagtctttaaggctcgaaa

SEQ ID NO: 289386 - DNA, 100 bp, Homo sapiens
acctccctcacggggaggacacatgggtacaggtttgcagattccgccagcagcacagcaagctctacagatgagtggctctttggcatttggtgctgtg

SEQ ID NO: 289387 - DNA, 82 bp, Homo sapiens
cacagacctgctgtgtgtgcttctgcgccccagacaatgcagatcttcgtgaagactctgactggtaagaccatcaccctcg

SEQ ID NO: 289388 - DNA, 98 bp, Homo sapiens
ctgagacaaagtacctgctacaaaggatgctttcattggatttggaggaaatgtgatcaggcaacaagtcaaggataacgccaaatggtatatcactg

SEQ ID NO: 289389 - DNA, 90 bp, Homo sapiens
tcaaatatgcagcaaagattacaccaagatctgtgctgaccacaggaattggatctactagtgcaggattcactccttctccagttgcac

SEQ ID NO: 289390 - DNA, 75 bp, Homo sapiens
ttggagtgtgcgtgcgcgccgagcgatatggatcagaaactttcgaagttggtagaagagctcacaacttcagga

SEQ ID NO: 289391 - DNA, 74 bp, Homo sapiens
agagcagagagctcaatgtcctcattgccggtaattttaaccaatcagatgacaacaaagattgatagaaatca

SEQ ID NO: 289392 - DNA, 96 bp, Homo sapiens
ggcgcggcggcggggcctgcgggctcggtccggcatgtagacgcccccgcaggcgcccgcggcagcgaacgtttgtgaagaaatatgggaaccttt

SEQ ID NO: 289393 - DNA, 112 bp, Homo sapiens
gatacagatccacgggttttagaaaaacaagaattacagcagccaacctatgttgccctgagttacataaataggtgtgcaactgaggaacatggctcaagaaactaatcac

SEQ ID NO: 289394 - DNA, 110 bp, Homo sapiens
caaggcatacaactgaccacccaatgcagtgcatattaacaagggtagattttgggtgagcagggcagcatttccttctcccactgctgctgagatggcagaaattagtc

SEQ ID NO: 289395 - DNA, 101 bp, Homo sapiens
ctggtgtccagggtctcagcgcgggggacgactcagtttggcaatgaggagcagcagctggcgtgggccaagcgggagagcgagaaggcggaacaggagag

SEQ ID NO: 289396 - DNA, 82 bp, Homo sapiens
ataaaataggctgagatatagtgactgtaagctgtgatctcagtatacaaagcaaactgccctatgatgtgacccctgagca

SEQ ID NO: 289397 - DNA, 90 bp, Homo sapiens
cgtcatgatgccttaaactgtcaggcattgccagtggacctgagcaacagtggtatcagaagtcatggaagtggcagttttcatggagca

SEQ ID NO: 289398 - DNA, 75 bp, Homo sapiens
ggaaaaaatgacatccagcgacaaggactttaggaaactgttaaggcagcaataatagaagagcagaaacgaagt

SEQ ID NO: 289399 - DNA, 75 bp, Homo sapiens
ccctcctttggatattcctcgtgtctccgattctgaggccaccctgcagttctgtgtggtgaagccactcatggc

SEQ ID NO: 289400 - DNA, 100 bp, Homo sapiens
cgtcgctctgtgacctgcgggtattggatgattggtagctaagactcccgaatacttcagaagtggggaaatggcgtcacaatgtagcagggaccccagg

SEQ ID NO: 289401 - DNA, 90 bp, Homo sapiens
gttttaggtttcccaatattctgaaagaaattaaacattttgatgcagacgcctaagatctggcaaacttggtgaacagtgtgaagcagt

SEQ ID NO: 289402 - DNA, 88 bp, Homo sapiens
ttcggagcatcggttaacagcctatgggtgaaatttggctttcattcatgaatgagtttaaggaagaaatctctaaacgttttaaatc

SEQ ID NO: 289403 - DNA, 74 bp, Homo sapiens
gttccccggcccacagtgggggtgtgcaaacccgagagaactgggattgtgtcacggtggagagaaactcaaaa

SEQ ID NO: 289404 - DNA, 80 bp, Homo sapiens
ctgaccacggcgactggacttacgaggagcagtttaagcaggtggaaatgagttctcaacagtttcctcggttaggagcc

SEQ ID NO: 289405 - DNA, 75 bp, Homo sapiens
ggcatagtgtcctgggatacattttcggtggcgttcattaagaagaactctttcatcaatctaccaacagccctt

SEQ ID NO: 289406 - DNA, 75 bp, Homo sapiens
ctttgatcgtcttcctcttcagccatccagccatccaggggtctttaaccagaagagagaggagagcctcaggag

SEQ ID NO: 289407 - DNA, 100 bp, Homo sapiens
tggggcagtatcaacggagtctccggggttgcccctctacctggcctccctcttcatcagccttgttttcctgttggtgaatttaacctgtgctgtgctg

SEQ ID NO: 289408 - DNA, 74 bp, Homo sapiens
gctcgggtcccactcatcccatggcccatcacctgcctgcagccatggtgttcgaaatccgcaccactgatgac

SEQ ID NO: 289409 - DNA, 100 bp, Homo sapiens
ccccccgaagaagactcccccacatctggtaagactttgaccccgacgcaggcttcagtgattgccgcggatcagaagcctgagcactttggctcgagac

SEQ ID NO: 289410 - DNA, 75 bp, Homo sapiens
ggggctgtaggggaaagtgctaaagccgctgagacacatcatctcagagttggagcacctgacgtttgtcaacac

SEQ ID NO: 289411 - DNA, 83 bp, Homo sapiens
gccagactgaagatgcagagcccatttcagaacctgagaaagtagagactgtttgctgacctctctgaggctgccaaccggaa

SEQ ID NO: 289412 - DNA, 98 bp, Homo sapiens
gctttcaaagataattcgcagtgatgtgaaactggcctcccaagccctgataatgtcgtgtgggagccaatgggagatgggaagaaaatcatttcctt

SEQ ID NO: 289413 - DNA, 51 bp, Homo sapiens
ggacgccgaccgtccgggacgagtatctccagatgaaatggccactgcttg

SEQ ID NO: 289414 - DNA, 90 bp, Homo sapiens
cctagctacaacacgaagacccagatcatccaggacttccttcggaaaggctcagcaggaggctgtaacagaagacaagtacgaaatact

SEQ ID NO: 289415 - DNA, 101 bp, Homo sapiens
ggcggcggctgcagcccgcagtccggggactggggggaccagtactctgccgagtgcggcggcagcgtctcctccctgggccccgagcatcccggcctgac

SEQ ID NO: 289416 - DNA, 100 bp, Homo sapiens
gggctcggccgggccgtcccggcctgcgcagcctgagaactgataaatttcaaacggaagagagtggcagcatttagaaagaatctaattgaaatgtctg

SEQ ID NO: 289417 - DNA, 100 bp, Homo sapiens
ggaaaatatataccatgatctacaggaacttggtagtagtcaatcagcaggggaagaaggagaaagggccaacccctgaagaagcaatacagaaactgaa

SEQ ID NO: 289418 - DNA, 100 bp, Homo sapiens
ggccctgcttgagatggctgaggaggattattacagtggtggctactatcctgcacaggacccggccctggtccccccccaggaaattgccccagatgcc

SEQ ID NO: 289419 - DNA, 82 bp, Homo sapiens
ttgtaatcttgaaggaatggacctcaaagtcttccgaccccgaactccaccggaggcaattgcactgtgtagccgtctgctg

SEQ ID NO: 289420 - DNA, 90 bp, Homo sapiens
aggaagtggatgagttccacctcattttagagtatcaagcagtgaaaattgccaccaaggccaacccttgggatggaaaatcactaaagc

SEQ ID NO: 289421 - DNA, 100 bp, Homo sapiens
cctttctcctcggcactgtattctttacctgcttcccaatcccactgatgaggatcagcccatggtcctgtgtgacagacatgtgtgaatgtccagtcca

SEQ ID NO: 289422 - DNA, 100 bp, Homo sapiens
cgggtgctgctggttagtgtgctctgagggagggtccgagccagccgctgttttgccggaggagcccctcaggccgggtcaccagtcgttggcacaccaa

SEQ ID NO: 289423 - DNA, 97 bp, Homo sapiens
agcctcaggcggctttctccaccacatggccaggcacggtggctcatgcctataattccagcactttggagggccaaggcaggcggatcatctgagg

SEQ ID NO: 289424 - DNA, 100 bp, Homo sapiens
gagatcaccattgaacacccacacacagatgtggtgaaatgtacccagttagtaagagccacagacccctttgcttctgtttttgggaatgaatcatttg

SEQ ID NO: 289425 - DNA, 82 bp, Homo sapiens
cccagaccctggagcctcagttggaagcagccgatccagcctgcggagcctgtggggcagggtttcccaaactctcgattgc

SEQ ID NO: 289426 - DNA, 75 bp, Homo sapiens
ccgtcagccggtagatctccttgaatatccagatatctttgaccagctggccaagtcattggccccaagtatcca

SEQ ID NO: 289427 - DNA, 75 bp, Homo sapiens
tgcacccagacacgacaccatgcatctcctcggcccctggctcctgctcctgggactcagaattcatgattgaag

SEQ ID NO: 289428 - DNA, 46 bp, Homo sapiens
cttcgtacccgtcttgattgagtgccatctgggattgacagctcag

SEQ ID NO: 289429 - DNA, 83 bp, Homo sapiens
gtagccagaagaagcagaataactaaaaatgtgcctaaacaaagctctcagcttgatgagtttacagacaaggatcagcagcc

SEQ ID NO: 289430 - DNA, 100 bp, Homo sapiens
gaacgcttcactggggcagtctctgcatatcatggggagatagacgctgctgcctaattctgcttggtcagaatcgtgatggcattgtgttcagcactga

SEQ ID NO: 289431 - DNA, 100 bp, Homo sapiens
gttgaacaacatggaactgatgattggactctaattgctagtcatcttcaagacaagcaggaggacatgaagactattttggagggcatagatccggcca

SEQ ID NO: 289432 - DNA, 95 bp, Homo sapiens
ccgtgccgcagatgcccaccggaatggagaaggaagaggagtcgattttgtggaagtataatactttgtcattatgagatgtcgtctctcggtgc

SEQ ID NO: 289433 - DNA, 100 bp, Homo sapiens
tctgagggagctgcctgacagtctgatcacctcagcgttgcagcctcgattcattcaactctttcaggctctttcgacgtgtagcagcagctttgccggg

SEQ ID NO: 289434 - DNA, 100 bp, Homo sapiens
actgttccttcaaaagccagcagtgtctgatgagaaaccgcaatcggaaggtggagccgccaccaaaatgcagattttcgtgaaaacccttacggggaag

SEQ ID NO: 289435 - DNA, 83 bp, Homo sapiens
gcgatcttcgccgttaccttcttgctggcgttggtgggagccgtgctctacctctatccgccttatgccagcctggaccatct

SEQ ID NO: 289436 - DNA, 100 bp, Homo sapiens
aaaacgctcaaatgtcatcacttaactggcctatgatctggatgtggatgatgcgcctggaaacagtcagcaggcaactccgaaggacaacgagataagc

SEQ ID NO: 289437 - DNA, 100 bp, Homo sapiens
tcttctgaaggaaaagacagtgtagtcctgcaaaacattttgaggaagtttatctcgacaatgctagttgcagtctgtgtgaccctgaccaagttatttt

SEQ ID NO: 289438 - DNA, 100 bp, Homo sapiens
ctttgtgcctgtctggttcgtgaagattaagatgttctacgaggagcatttgcacttggacgatgagatccgctacatcctggatggcagtgggtacttc

SEQ ID NO: 289439 - DNA, 83 bp, Homo sapiens
gagaaagctaggccatctgaataactttactaagctaataaggcagtggattttacaacagtcaaattcttgcttcaggattc

SEQ ID NO: 289440 - DNA, 75 bp, Homo sapiens
tttaattttagggtcctttatatagaagggagagtaggctgcaggccaacttcaccatccgggaagatgccaacc

SEQ ID NO: 289441 - DNA, 100 bp, Homo sapiens
gagacgtggtactcagcaagctcgagttaaagttggatgtgctggaacaggctgtattcatcaccaaagaaaaaacttacaccaatgcagaaatcggtta

SEQ ID NO: 289442 - DNA, 100 bp, Homo sapiens
agagcgcgaatatcgtcatcgttagaagggtggacccgaactccccggtgctcttggaggacccagtcctttgtgccttggcaaaaaagcacaagcgaac

SEQ ID NO: 289443 - DNA, 75 bp, Homo sapiens
tgcggagtcgtccggagccgctgcgcggaagagatgtcaggagaaagtgtggtgagctcagcggtgccagcggct

SEQ ID NO: 289444 - DNA, 76 bp, Homo sapiens
gtgcggcccggaggcggcggagggcaccccgggcgggcggcggctgcttgagcagcggttccatcgcagtgaacgc

SEQ ID NO: 289445 - DNA, 75 bp, Homo sapiens
aaagactgttccaaaaacagtggataattttgtggccttagctacaggagaggccctggccaacgtcaacattgg

SEQ ID NO: 289446 - DNA, 74 bp, Homo sapiens
ttcactattattgcccagagcagatgaaactggatgcttcttggacacttaatgattgttggcaagaaatgtgc

SEQ ID NO: 289447 - DNA, 51 bp, Homo sapiens
aaggccaacagagagaagatgactcaggtatccaaaccttgaaacctttgc

SEQ ID NO: 289448 - DNA, 83 bp, Homo sapiens
agcccccgcctgcccgcccgggagctgtcggccccggcccgactctatcacaagaagcccgtggaccgggagcccgtggaccg

SEQ ID NO: 289449 - DNA, 99 bp, Homo sapiens
cagacttccaaaaagatgatttcaaggggatgtttaatactgattggtttatcttggaagctaaagggcattgctcatcctgaagatcagctgaccatt

SEQ ID NO: 289450 - DNA, 100 bp, Homo sapiens
ccctggatggttgtaaggaaagaaacaagcagacggtatccagggctcaagcacctctgactgtatgtctaaaacacttgactcagccagcgcccacttt

SEQ ID NO: 289451 - DNA, 100 bp, Homo sapiens
ggtcgggaaccatccttggaaatcctgccgcggacttctctgcacagcatccctgtgacagtcgaaactggcttctatgtccaatgacttcaaatcggtt

SEQ ID NO: 289452 - DNA, 75 bp, Homo sapiens
ggggcggcggccacgccaaggacggatttcgggcagacaacttgaacaagctgaagaacctatgcagcaagacaa

SEQ ID NO: 289453 - DNA, 88 bp, Homo sapiens
aaggaggaaggcctggttcttcaagtgatggtggcctgcgttttggagaaatggaacgagattgtcagattgcccatggagcagccca

SEQ ID NO: 289454 - DNA, 101 bp, Homo sapiens
gagaaggcccagccaatgaagatgaagacataggagtttttcagaagaagtgaagtcaagatgaagaaccatttgcttttctggggagtcctggcggtttt

SEQ ID NO: 289455 - DNA, 100 bp, Homo sapiens
cttttccgttgccggtgccggcctagcgtcctggaattacttcaatcaaattcaagtcaatctgaaagtcccagccagccaagtgacgctgacattaagg

SEQ ID NO: 289456 - DNA, 50 bp, Homo sapiens
aaaggatcctgattcctcttcaaaggtctcggcgcggaagatggccggcg

SEQ ID NO: 289457 - DNA, 82 bp, Homo sapiens
ccaggtccgacccgcgaacccctctgggatccccgccgctctgtctacaacccgaggtgagcgagtgctgtgctttcatggg

SEQ ID NO: 289458 - DNA, 75 bp, Homo sapiens
tgacttatccaggccacttttcacttctgctgcactgctttcagcatgcaagattttctgccgtctcttggcaaa

SEQ ID NO: 289459 - DNA, 75 bp, Homo sapiens
ggcctgtggcacaggcctagtggctgccgagacctcttctcttctagccgctccatttttggctccatgctacct

SEQ ID NO: 289460 - DNA, 100 bp, Homo sapiens
aaggaaggagttttttgcgaaacttagagaattactgcttagttgttgagatcatgacctcttctggaatggtgttctcagaagtccttggacaatcagg

SEQ ID NO: 289461 - DNA, 75 bp, Homo sapiens
gggggatcattcacagtgaggacagacacaggtgaagatcttcgaggaggacttccagagggagcgcagtgatcg

SEQ ID NO: 289462 - DNA, 75 bp, Homo sapiens
tgcttgcttgcctgtgcgcgcgtgcgcggacatggcctcaaacgagtccgaaattgaagttcagaggaagaattg

SEQ ID NO: 289463 - DNA, 100 bp, Homo sapiens
agaactgagcccaggccacagtaccctattcacgctctgtgcttgtgccaaggaagagttgggctgtggaaggacatcttcaccgtctccatgaatgaga

SEQ ID NO: 289464 - DNA, 100 bp, Homo sapiens
gttacgtgccaccaaagtgacaaagggggcctttggtgacatgcctccgacagttagttaatatgtgcatcaacccagatccagagaagcgaccagacgt

SEQ ID NO: 289465 - DNA, 101 bp, Homo sapiens
tagattacatcttcttctcagctgagtcctgtgagaatgggaacagaactggcttggccttcgtgcctctgcagatctggtccaaagtcctggccatctca

SEQ ID NO: 289466 - DNA, 50 bp, Homo sapiens
cggaaccgcgattcggcgtgtcagctgcagaagaaagatcagcaactgga

SEQ ID NO: 289467 - DNA, 75 bp, Homo sapiens
atttgaccaaccaatgagtcgaaggtctcgtagagcttccttatgcttagatgagtacgaagatgatgaagcagg

SEQ ID NO: 289468 - DNA, 112 bp, Homo sapiens
cggcgtgccccaccatgtcagacgcagccgtagacaccagctccgaaatcaccaccaagatgaaggatttgggggcagagcacttggcaggtcatgaaggggtccaacttct

SEQ ID NO: 289469 - DNA, 75 bp, Homo sapiens
agttcaagagctcagaccctaaagtcatcatgcaccccttgaaaccccggatctcaatcacaaagggtgtcatct

SEQ ID NO: 289470 - DNA, 50 bp, Homo sapiens
gaagaagatggtggataagcccacccagaggtctgcggggtttccgagag

SEQ ID NO: 289471 - DNA, 50 bp, Homo sapiens
catctttactggcatcctaaagttttatcttcaagacactaaaagtagta

SEQ ID NO: 289472 - DNA, 50 bp, Homo sapiens
cacaatggaaagtcttgacttgactggtgtgccttgcacatacaaaaaag

SEQ ID NO: 289473 - DNA, 74 bp, Homo sapiens
cggcggagcttcgccaaggctggcgcagtcgtcattgaaattatgagactatcattcaaatggaagcattatag

SEQ ID NO: 289474 - DNA, 90 bp, Homo sapiens
aggctgagactcaccggaggaagcggcgcgagcgccccgccatcgtcccggaaattgaacttagctcattaagggaagctttgtctttcg

SEQ ID NO: 289475 - DNA, 51 bp, Homo sapiens
gagaaaacggaattctttaacaaggggccagcagcaattgaagaatgctgt

SEQ ID NO: 289476 - DNA, 100 bp, Homo sapiens
tgttcatgaccggaatgccaacagctatgtcatggttggaaccttcaatcttcctagacgggtttcaccatgttggcctggtttcaaacgagtttcgaac

SEQ ID NO: 289477 - DNA, 100 bp, Homo sapiens
ggaggttaaagatgcagaactggataaagaagattctctcgggcctagccgtccttggaacccgatattcgggctgggcggttccgcggcctgggcctag

SEQ ID NO: 289478 - DNA, 97 bp, Homo sapiens
aaaacacaggcagctctaagtgtacgacgagggaggtctcatcggcgcttatggaagaagaaccagtgtcagatttcgcagttcaggaatgacttta

SEQ ID NO: 289479 - DNA, 100 bp, Homo sapiens
cggcgaacgcggagagcacgccatgaaggcctcgggcacgagttgaagtattgataacaccaaggaactctatcacaatttgaaaagataagcaaaagtt

SEQ ID NO: 289480 - DNA, 83 bp, Homo sapiens
ctggctggagccctgcattcgcggcgtgtgcaggatgcctaaatcaaaggaacttgtttcttcaagctcttctggcagtgatt

SEQ ID NO: 289481 - DNA, 98 bp, Homo sapiens
ttcaagccccagccaagcaatgcaggaatatatcgcagtagttaaaaaactagatccaggttggaatcctcagaaaagtgaagaagggctcattatta

SEQ ID NO: 289482 - DNA, 82 bp, Homo sapiens
agaaccacacggaaggaagccggccccctgcctgcccgcgcctagaccccattcagttatggaggttttgatgactatggtg

SEQ ID NO: 289483 - DNA, 50 bp, Homo sapiens
acataagaagttacctttttcaggggaaaaaagttgttccatgtagacat

SEQ ID NO: 289484 - DNA, 75 bp, Homo sapiens
caaggacagggggacagggctctgtctcgcacttcccagaactgataaatttcaaacggaagagagtggcagcat

SEQ ID NO: 289485 - DNA, 75 bp, Homo sapiens
aacaacgccatgcgattcgcccactcttgggttacattgattacccacctagtacaacatcttacgggaagagca

SEQ ID NO: 289486 - DNA, 100 bp, Homo sapiens
tacttggagtagggagaatattcagccaatggagatcttcgtggatgatgagacgaagttgacgctgcatgggttgcagcagtactacgtgaaactgaag

SEQ ID NO: 289487 - DNA, 98 bp, Homo sapiens
ccatctgcttgctgtataagaacctggccaacaagattgtccccattgccatccagatggagtttcactcttgtctcccaggctggagtacaatggca

SEQ ID NO: 289488 - DNA, 82 bp, Homo sapiens
tggaaacagcggatgattctggaactgggagaagatggctttaaagaatacacttcaacgggtattcccctacatctcagcc

SEQ ID NO: 289489 - DNA, 100 bp, Homo sapiens
accttctggaatgtcctgatgagctcattgagagaaccatgatggtcaattgccatgcacacttctgggactgcaagatggaggaaggcgggaacctagg

SEQ ID NO: 289490 - DNA, 97 bp, Homo sapiens
ttctcttctgcagaaaaagaggctcttcctcctcctcccgcgacggtagatggcacaaaccttcagggttttactaatcagcaagcagtagaggtat

SEQ ID NO: 289491 - DNA, 101 bp, Homo sapiens
gacaagcacgagggcgcgctcgagacgctcctgagatacccaagctccagtggttccatactggcgcctgcctggtttaggcattatcatctacctgctga

SEQ ID NO: 289492 - DNA, 100 bp, Homo sapiens
aaaagactgggcttgtccttgctggtgcatgcgtcgtcggcctctgggcagcagcatttaaatcaaacggtattgagatggattgggttatgaaacataa

SEQ ID NO: 289493 - DNA, 83 bp, Homo sapiens
ccagttttgaaatcgacacacaaagaatagagttgagcctgtgggacacttcggatgatgataattccgaagaaggcttccac

SEQ ID NO: 289494 - DNA, 90 bp, Homo sapiens
tgcgggtgttcttttggggtagtgtctgggatccagtacgagttgaatcattgttcaaataagggacctccaagatgttcctcccttcaa

SEQ ID NO: 289495 - DNA, 102 bp, Homo sapiens
acagatgaacgaagttatggcagagttagctaaagaactccctcaagtttcatttgtgaaggtggatctccttacgtagcagccaaaataaatgaagcaaaa

SEQ ID NO: 289496 - DNA, 74 bp, Homo sapiens
acctcaaccagatgaggaagtacaactttgagtacaagatcttgctgcacggtttgtggtacgaactgtttgga

SEQ ID NO: 289497 - DNA, 82 bp, Homo sapiens
gaggcaaggagctaaagcagcgtgcgttcagccctgggggtgctgttggcccaaaggttgccctgaagccccccatccagag

SEQ ID NO: 289498 - DNA, 100 bp, Homo sapiens
tggactccacccacctgtcacatcttatcctccaacactagaattcaaggaagccttctccctatttgataaagatggcgatggcaccatcacaacaaag

SEQ ID NO: 289499 - DNA, 100 bp, Homo sapiens
cgggctctgcgggcctcatgctcgtcgagttcttcgccccctgttacagaatgtctgaaggggacagtgtgggagaatccgtccatgggaaaccttcggt

SEQ ID NO: 289500 - DNA, 75 bp, Homo sapiens
cattgacctcaccaagagggcgggagaactcactgaggatgaggtatatcaagttactgtgtatcaggcagggga

SEQ ID NO: 289501 - DNA, 75 bp, Homo sapiens
cgggagtcggggatagtgtcatcggttcgtgagacggtttaagcggaagcatcttactgccattgactgccagca

SEQ ID NO: 289502 - DNA, 75 bp, Homo sapiens
cgctgggcgccggagccgaggcgagcgccgcgcgcaccactggtttctaagcatgaattgaggaacagaagaagc

SEQ ID NO: 289503 - DNA, 76 bp, Homo sapiens
tcaacaagaggacccaggagaaattcgccctcaaactgtcgcctggttgggcccggaaatgggacgtcgcgctttc

SEQ ID NO: 289504 - DNA, 83 bp, Homo sapiens
ccaagatgtctgacatggaggatgatttcatgtgcgatgatgaggaggactacgacctggaagctttatcaaaagcagctgga

SEQ ID NO: 289505 - DNA, 75 bp, Homo sapiens
ccaccagccccgtgtccttcattgccacgtacagggagacattagagaagcaagtattttctctctggaggcaga

SEQ ID NO: 289506 - DNA, 100 bp, Homo sapiens
gataatggtaccacgctgacaccccagaaagatggagtctcccaggcgggaatgcaatggtgcgatctcgacttcactgcaatcttcacctcccgggttc

SEQ ID NO: 289507 - DNA, 73 bp, Homo sapiens
atgatcacgcagctggctggcttcagtggaccagtacaaactgttttgaagccagttcatcataaggaaggac

SEQ ID NO: 289508 - DNA, 100 bp, Homo sapiens
ttggtgttgcggcgcccaccttcgggaggatcaggttctaaatgagaagaaacttcaagaggttgatagtttatggaaagaatttgaaactccagagaaa

SEQ ID NO: 289509 - DNA, 101 bp, Homo sapiens
ggttttctgctcaaggaatgggactggggactccactgtgagaccacttacaccaaggatggattttggacatacattactcagattgccacgtgttcacc

SEQ ID NO: 289510 - DNA, 101 bp, Homo sapiens
ctccgggattggactgatccaggctggacccacgtctgtctggtgataccaggggcagagggaccactctgacagattatgatgcatcattatcacagaag

SEQ ID NO: 289511 - DNA, 82 bp, Homo sapiens
cttcgatgacaccattgcagaaggaataaccttcatcaagttttatgctccatgggtgaaacttcctacatccgagtttatc

SEQ ID NO: 289512 - DNA, 96 bp, Homo sapiens
tgtggaaagaagttgcaaaacactgggtcagtactcctgcatttgtaccaacgaaaactcacgtgctgcttcatcgaatgagtggaaaaggactag

SEQ ID NO: 289513 - DNA, 127 bp, Homo sapiens
caaagaagtagccttagtaataaccctcttttccagtataagtatttggctcttaatatgcattatgtagatttctctatgaatcatcatcaagaactctgggagaacttttgaattcataaccaag

SEQ ID NO: 289514 - DNA, 100 bp, Homo sapiens
tggaggccctgactaccctggaagtagcaggccgcatgcttggagctctcagacaccttgagttccttggtttggtccacgtcccatgaacatgcagcag

SEQ ID NO: 289515 - DNA, 75 bp, Homo sapiens
tgcagatgcagtgtggctctggatagcaccttatggacaggctaactcaggtgagatggagccgctatagtcctg

SEQ ID NO: 289516 - DNA, 98 bp, Homo sapiens
tcctgctcttccagttcgggatggcatgcggctaccaagggcatccttgtggctatggtctgtactttcttcgacgctttcaacgtcccggtgttctg

SEQ ID NO: 289517 - DNA, 100 bp, Homo sapiens
tctgctgtgcttgccttattggtgatgtgcattgtcttacgcccttcaagagatcattctcagcttcccaggcagacccactcagtgatcctgatcagat

SEQ ID NO: 289518 - DNA, 97 bp, Homo sapiens
tgggccgcagcgggaccccagttcctccgccaagcgcggccgccgcccccgcctcaggaatccagcactacgccctgccctctactgactggaggca

SEQ ID NO: 289519 - DNA, 100 bp, Homo sapiens
agagagagctggatgctcttttggaacagcaaaacaccattgaaagtaagatggtcactctccaccgaatgggcctctactcttcatggatcttttggat

SEQ ID NO: 289520 - DNA, 100 bp, Homo sapiens
tatcaatgaagtccgagtcatacccccaggagtaagagcccatagcagtctgccagacaatagagcatatggacgctctgctgttgcccgtattcaggag

SEQ ID NO: 289521 - DNA, 100 bp, Homo sapiens
acgtttttatccatggatgacttgcttgggtaagtaaggaggtctctgtaccatggctcgtacaaagcagactgcccgcaaatcgaccggtggtaaagca

SEQ ID NO: 289522 - DNA, 100 bp, Homo sapiens
cggggacgcgaggacccgggctgggctttcctcacccggtatgtccgtggttcagaccctgtattaaagcttttggacgacaatgggaacattgctgaag

SEQ ID NO: 289523 - DNA, 100 bp, Homo sapiens
tgaaccagatgatgggacgaaataactgaagtgaagtgatggactccgatttggagagtagtaagacgtgaaaggaatacacttgtgtttaagcaccatg

SEQ ID NO: 289524 - DNA, 75 bp, Homo sapiens
cagagaacgttcgagatctcgtgggtcgaaatcaagaaatatcttcccttccaacctggtgtcagcagcctttcg

SEQ ID NO: 289525 - DNA, 100 bp, Homo sapiens
gtcaaaggaaaactgtaatggaaaaatggcaaccctgtctgtaggaggaaaaactgtatcacgttttcgtgaaatttggtgagcggcctccacctaaacg

SEQ ID NO: 289526 - DNA, 74 bp, Homo sapiens
ctcattcacttctagacgacaaaatgcaaaaaaggaggccaaagactttaccaagttttacaggaaaactccag

SEQ ID NO: 289527 - DNA, 84 bp, Homo sapiens
aacaaagctgaggtccagatgaaagagaagtttctggtcactccccaggattatgcgcggctggagtgcaatggcgcaatctcg

SEQ ID NO: 289528 - DNA, 100 bp, Homo sapiens
ctcagccactggttgccttggtaggcaataaaagcagtttgaagagaacacatgaagaagaggatgattttggaaccatgcaagtggcgactgcacagaa

SEQ ID NO: 289529 - DNA, 117 bp, Homo sapiens
cggtggactccttcggcagtccacccaccgccgccgcctcccaggaggccccgtgtgggccgcggcccggccctcaccatggagtccatgttcgaggacgacatcagcatcctgacg

SEQ ID NO: 289530 - DNA, 100 bp, Homo sapiens
cggaggcagaggtggaggcgctttgaaagatggaacttgctaaggaagaaaagtgtgaatttctgccattcctgtccccacggaaggttatagtaaaagg

SEQ ID NO: 289531 - DNA, 90 bp, Homo sapiens
atcccaatgaaccttgggtgatttgttctgtatcagaagacaatatcatgcaagtgtggcaaatggatcccattgaagataccacgctgc

SEQ ID NO: 289532 - DNA, 75 bp, Homo sapiens
ttcatcaccccctacctcctggggcccgacaagaacttcacgcgggagcagctggtcagtgagaaggtcggaggg

SEQ ID NO: 289533 - DNA, 75 bp, Homo sapiens
gaaacacaaagccggctacgcgctgcgagggttcatagtggcgtcatgcacgcagactcctgcaagttcccctaa

SEQ ID NO: 289534 - DNA, 100 bp, Homo sapiens
ggcggcagcggggtccgggtccggagcgccacaagacagcctggagctgttgcccaaagaattggaagtcatttagttccaactgctactttatttctac

SEQ ID NO: 289535 - DNA, 90 bp, Homo sapiens
ggaaaaactatggatttgtatggaatactgtggtggcggatcacttcaagatatttaccatgctgtctgtgagatgtgtggtatcgtggg

SEQ ID NO: 289536 - DNA, 100 bp, Homo sapiens
ggtcacggtgacagcagaggcagtcagtcaagcatcatcacatccggagaactcggaggaagaggaggcaactttggctttggggattcacgtggtggcg

SEQ ID NO: 289537 - DNA, 100 bp, Homo sapiens
ctcgggggccctggccctgacccagacctgggcggagctaaagttgcagacaagatccagctcatcaataatatgctggacaaagtcaatgagatgatta

SEQ ID NO: 289538 - DNA, 83 bp, Homo sapiens
cagtaaaattttgtcaaacaaatactgatgatgaagtatcctgggacttggccctgtcaggttatggaaacaaaggacatgct

SEQ ID NO: 289539 - DNA, 90 bp, Homo sapiens
tcaaggatgatccagttggaccttttggacaggaaagtgtaacatcagttacagagtaagaccatgaattatggcatttcttaaatgaag

SEQ ID NO: 289540 - DNA, 88 bp, Homo sapiens
tacccaaaaacatgcattggtatagcccaccagaaaggacagaagcagtacaacatccacgtgggaactgctggatcaaaggacaaaa

SEQ ID NO: 289541 - DNA, 88 bp, Homo sapiens
tcatgctgggaacatcattgcaacacagcgccatttccgctggcacccaggtgcccataactggcatcaaatactcacaacatagctc

SEQ ID NO: 289542 - DNA, 100 bp, Homo sapiens
tgcaagtatggagctcaagttcttaattattcagaatgctgcggttttccaagaggtgaacaagaaggaggtggtggaggctgtgaccattgtagagaca

SEQ ID NO: 289543 - DNA, 50 bp, Homo sapiens
cagcctcccaagtagctgggactgcagaattccttcgacaatcctgagtg

SEQ ID NO: 289544 - DNA, 74 bp, Homo sapiens
ggtgattgcacacgacgtggatcccatcgagctgattgggcagaaagtggcccatgctctggcagagggactcg

SEQ ID NO: 289545 - DNA, 99 bp, Homo sapiens
ctggggccggccctgggcctgctgcaggcgcggcgctgccggaccagagcttcctgtggaacgttttccagaggaatggtctggaacacggacctggtg

SEQ ID NO: 289546 - DNA, 98 bp, Homo sapiens
cgcaggatgggatccggctcctccagctaccggcccaaggccatctacctggacatcgatggacgcattcagaaggttgaaatcacaaagattagaca

SEQ ID NO: 289547 - DNA, 75 bp, Homo sapiens
catggataaaaataatgtgaggcgacaagcaacaacaatcatagctgaccgatttgggatgttgcccctggatga

SEQ ID NO: 289548 - DNA, 100 bp, Homo sapiens
atttgtatatgtggcaccattggggctttggcaccatttggacttagctgcctgtggagctgtttggaactgagcttctgcagaaagccgtcattacacc

SEQ ID NO: 289549 - DNA, 100 bp, Homo sapiens
gtaaaaagaatgaatgcttgatttgtaaagctccttgtcgtacagttttgctttcaaagcatggaactctaatgatccaggacaaagaagttaccctgga

SEQ ID NO: 289550 - DNA, 101 bp, Homo sapiens
gtgacagcctcaagggcttcagcaccgcgcccatggcagagccagaccaaattcattgagtttgaagatgctctggaacaagagaagaaagagctgcaaat

SEQ ID NO: 289551 - DNA, 75 bp, Homo sapiens
ccaccacagagcccatcaagcccgagcaggcccagatagctaataaccgaacacctggaagatggacccagcggt

SEQ ID NO: 289552 - DNA, 101 bp, Homo sapiens
gctatgcatgctgcttttgatgtctgacaacgtggatcgttgttttgaaacgacactgcccatctctaagataagaacctggaaaggggactctgttggcc

SEQ ID NO: 289553 - DNA, 87 bp, Homo sapiens
aaactactatgcatgtaaacaaatgaagcagcgctttgaaaggaccgtataatagacgctggccccaaaggaaactactctcgattt

SEQ ID NO: 289554 - DNA, 139 bp, Homo sapiens
cgtcgatggcaggggccctgatggtggctttcgtcaagtcaaagaagctgtcatgcgttgtgaatgaggcctctggggatggggatggagaggatgccgttgtgatcctggagaagacgccatttcaggtggaacaggt

SEQ ID NO: 289555 - DNA, 74 bp, Homo sapiens
gtcgcgcggaggcggaggcttgggctacctctgaacagtgcagatgagatttatgagctacgtgtaaccggacg

SEQ ID NO: 289556 - DNA, 101 bp, Homo sapiens
tgggacctaccctgactacgggagttgggaggacccgggacaccgcacagccgggaaatgggactggtgattgcagctggaagtgcccatgaccgagctgg

SEQ ID NO: 289557 - DNA, 90 bp, Homo sapiens
ctaaaagcattgtttctagaacatgagaaacctctgtagaggagcaggatgcaaccgacaggctgtggccggacagctgctgcccagcac

SEQ ID NO: 289558 - DNA, 117 bp, Homo sapiens
gcggcgactatgacaacctcgaggggctcagttgggtggactacggggagcgcgccgagctggatgactcggacggtgctggagaatctggtaaaagcaccattgtgaagcagatga

SEQ ID NO: 289559 - DNA, 82 bp, Homo sapiens
tcagctccacattgagagcaaaatctacaagatgatgcagggaggagcgccatcatgaccgggtcctataacaacttcttca

SEQ ID NO: 289560 - DNA, 101 bp, Homo sapiens
acatgctagaattacctggaacttcatcatcatctacttcacaggaattgccatttacgctgaccggaaaggagattgagattgacattgaacctacagac

SEQ ID NO: 289561 - DNA, 96 bp, Homo sapiens
caggaggctgtgcgggccccgctccgcttcgaatggctcagaagagcccacagagaaggaacctccagggcagttacaggtgaaggcccagccgca

SEQ ID NO: 289562 - DNA, 74 bp, Homo sapiens
atcgccagctgcacactcttggggctctacctctttttcaaaatggagttttaacattgaatgcggagaacact

SEQ ID NO: 289563 - DNA, 100 bp, Homo sapiens
cctctcatcgggagaatgctcttcaggatagtatcttggccagggaactcaaacagcagatgcaggcaatggacctcatcatgaccgttgctgtacttac

SEQ ID NO: 289564 - DNA, 100 bp, Homo sapiens
accagaggacctggagtttcaggaaggggatataatcctggtgttatcaaaggagttttatggacgaggagccccctacaatgccttgacggggaaggac

SEQ ID NO: 289565 - DNA, 74 bp, Homo sapiens
ctccctcagcttccgccccaaaagttccagaaagctgagtctgatctggattacattcaatacaggctggaata

SEQ ID NO: 289566 - DNA, 133 bp, Homo sapiens
tcaggtaggctgcgttgaggatctttgctcttccatccgcctttgatcgtcttcctcttcagccatccagacatcgctattgcggttccgaggcagtgggaagagatgcggcccctggacatcgtcgagctgg

SEQ ID NO: 289567 - DNA, 100 bp, Homo sapiens
ggcggccatgtatgaggaggagatggaaagggaagcctgaactctttgcttccggaatccgggattgttgctgacatagaattagaaaacgtccttgatc

SEQ ID NO: 289568 - DNA, 100 bp, Homo sapiens
cggaggcgttggagcgcggaaatctggaaccgggatggcgacgtctacactgagtcggaggcgaaggttttgcgtgtgaagctgtgtggaaatgtgaaat

SEQ ID NO: 289569 - DNA, 100 bp, Homo sapiens
cgtctcttacgtctgcggaagtgcagctgcctcagttcttagcgcagagcgatcgtcttctgatcaaaggaggtaaaattgttaatgatgaccagtcgtt

SEQ ID NO: 289570 - DNA, 100 bp, Homo sapiens
ggaacaccctggaagccgagaaatgggcaagtgtccagagaatggctgggatgaaagtacacttgaactctttttacatgaacttgcaatcatggacagc

SEQ ID NO: 289571 - DNA, 50 bp, Homo sapiens
aaccatttgtctttagtcttggcaaaggaattgaatgatctggcacggga

SEQ ID NO: 289572 - DNA, 100 bp, Homo sapiens
cagattcaacccgtgtacgtgcctgtgcctaaaacttaattcagtgcacaaatgagatgaatgtgaacatcccacagttggcagacagtttatttgaaag

SEQ ID NO: 289573 - DNA, 50 bp, Homo sapiens
gaaaaaactacactgtctactgccaagatggcagaaacggtggacacaag

SEQ ID NO: 289574 - DNA, 82 bp, Homo sapiens
gcagctgcaatatttaattcagcctttggaagttttttggcctccttgtatcagtcctctatagacagaagcctggaaagac

SEQ ID NO: 289575 - DNA, 75 bp, Homo sapiens
gggcactgaagggggactacaggttcgagaattgaatacctgcttaagaagcttacagaagctatgggaggaggt

SEQ ID NO: 289576 - DNA, 100 bp, Homo sapiens
cagcgcctgggctggaggacagagaagccttttccgttgccggtgccggcctagcgtcctggaattacttcaatcaacgtttgcctcagcatggagggcg

SEQ ID NO: 289577 - DNA, 100 bp, Homo sapiens
ctggtgagccacgcgcctggggaggctctggcccgggctccgcgtacttcctgttcaggcatggtggttttctggaaccttcccactaactcacccctgc

SEQ ID NO: 289578 - DNA, 75 bp, Homo sapiens
gcagtacctgcagaaggtctctggagacatcttcagcaggtaccccctgtaccggctgggtggcccacaacttcg

SEQ ID NO: 289579 - DNA, 82 bp, Homo sapiens
tcaggagtactggcggaggggctggacgttccacgccaaagatgatatcatcaagttgaatcgaaaggaagggaagaagcag

SEQ ID NO: 289580 - DNA, 83 bp, Homo sapiens
atctcgaagtatctcaaaaagtcgctcccgacaatgcagatcttcgtgaagactctgactggtaagaccatcaccctcgaggt

SEQ ID NO: 289581 - DNA, 118 bp, Homo sapiens
ttatatttttatcacgttcagtgtgctgggatgaggttacgagtagccatgtgccatatgatttatcggaaggcgcctccttggcattataacaaaaaaagatatcctccggcatatg

SEQ ID NO: 289582 - DNA, 75 bp, Homo sapiens
ccaagcgccgatctgggcacccgccaccagcatggacgctcgccgcgtgccggacacaactcagatgggaagttc

SEQ ID NO: 289583 - DNA, 75 bp, Homo sapiens
cagggagtatcaaatatgagaaagctaggccatctgaataactttactaagggatcgcttacacctgagacgaac

SEQ ID NO: 289584 - DNA, 83 bp, Homo sapiens
ctggaaggcagaagccacgcagacttctagtcctggttccactgcttactcgttgtcctgggaccaagacaaattcgcctaag

SEQ ID NO: 289585 - DNA, 75 bp, Homo sapiens
gggaccggctgtatgattaggccacaatcttcaatgagtaaacatattcctgcacagcgtcaccttcgtcccctc

SEQ ID NO: 289586 - DNA, 83 bp, Homo sapiens
ttgattcatcagattttgcattggatattcgcatgcctggggttacacctaaacagagtccctgtgaagcaggaagagtgagg

SEQ ID NO: 289587 - DNA, 100 bp, Homo sapiens
cggaagtctctcaaggaccccaacaacagcctcaccctctgggtcatcgaccaagcggtttgctgtgtttcaaagaagggtgctgaccacagtagtgctc

SEQ ID NO: 289588 - DNA, 104 bp, Homo sapiens
gacgcctccattgtttgaccacaacaagggccggattctcacccagaaaccactcaagaaggttattattgaagaaactggtaatttgatacagactattgatg

SEQ ID NO: 289589 - DNA, 78 bp, Homo sapiens
tgcaaaatctcaaatggcagactatcatcatttaagtcgtgagatggagaataaagaaactctcaaagggttgcacaa

SEQ ID NO: 289590 - DNA, 75 bp, Homo sapiens
ggaagacgccctggtgctcaccaagcaaggttgtggcagcactgcctgaaggtatgagaccagattctaatcttt

SEQ ID NO: 289591 - DNA, 75 bp, Homo sapiens
cggggccgagcgcggccctgcaggcgatgtcgccgaaaccgggctgcaggcggtgccggtggtggtgtgcacatt

SEQ ID NO: 289592 - DNA, 75 bp, Homo sapiens
cttctgcaagatgcggctgctggacggcggcagcttcaccgccgagtcctccagctctcgtggcattatccttca

SEQ ID NO: 289593 - DNA, 51 bp, Homo sapiens
tggtgcatgctgatgacgaaaaactggtcatatgcattagaaaaacccaac

SEQ ID NO: 289594 - DNA, 80 bp, Homo sapiens
tggcggtggaagaggaagattcccaggctgaggattcagacaagatcgcagaggaaggtgggcggcgggagtgcccagcc

SEQ ID NO: 289595 - DNA, 100 bp, Homo sapiens
tggatcatggctgccgcgccgccgctacgggaccgcctgagctttctacaccggatgacagcctgggcttactggagctggaccagcggacccacttccc

SEQ ID NO: 289596 - DNA, 90 bp, Homo sapiens
agtggtggaataacctaagtgatggccagcggactgtgacagataatcacagctggcttatcaatattgctgtttgatgcgatcctgacc

SEQ ID NO: 289597 - DNA, 100 bp, Homo sapiens
cttggagcagaagaagcaggaccgcggggagctgaagctgctgcttttgggtgtcagcttcctctggtgcaaccagcaagtcttccagtatgaatcccac

SEQ ID NO: 289598 - DNA, 100 bp, Homo sapiens
agccgccgcatcgcgggggtggaggacatcgacatccaggcgaactcggcctatcgctaccctccgaagtccggctctgtcaacagactcaatagaaaga

SEQ ID NO: 289599 - DNA, 100 bp, Homo sapiens
gcccacatggtaatgggtacaacaaatcaattctccacaagaacacggcttgaagagtggtttgaagaaaagcagcagcaatttgagaatctggatcagc

SEQ ID NO: 289600 - DNA, 80 bp, Homo sapiens
aggagagctgcgccggcgagaagcggccgagccagcagcagatcggacagctggcttttaaaggaatgaagagactcaat

SEQ ID NO: 289601 - DNA, 108 bp, Homo sapiens
ttcctgctgctcttcctgctcgtgctcactgtcaccgagccgctgcggccagggtctgcggaagagggagctgctgaaggagctgctaccagtcatcgggcagaacct

SEQ ID NO: 289602 - DNA, 75 bp, Homo sapiens
gaagaatgaacattgtattgagaacaatatagatttgcaggggatcatggaagctgataaagatgacacacaaca

SEQ ID NO: 289603 - DNA, 100 bp, Homo sapiens
gcagatcgggagcgcaaggtcgccctcaaggccatgatcaaaacgtacgccatgaagtgcctggacaaaaagcgcatcaagatgaagcagggggagaccc

SEQ ID NO: 289604 - DNA, 90 bp, Homo sapiens
cgcacttaaaataattgggcagaagagaagcagtgaaggagtgcagaggcatcacctgaaaggctggatgacaccaaaatcctcccaggc

SEQ ID NO: 289605 - DNA, 75 bp, Homo sapiens
cctcaggtgatattgctactgtgtgtgattcagcttgccaattctgtaactccttgggatatcttgctgagctta

SEQ ID NO: 289606 - DNA, 73 bp, Homo sapiens
gtgcaaggaaagaaagaagcctgcggtgaaagtgacactgaggtgaaaatgggatggaggattgtgtcatggc

SEQ ID NO: 289607 - DNA, 88 bp, Homo sapiens
cattatgtggaaggatcaacagtcaattgtgtactagcattccaagctctgtcagattcagggagttttgtatcttctcgagcccggc

SEQ ID NO: 289608 - DNA, 100 bp, Homo sapiens
ttcggctttagagtgtggtgaagggtacttttcatggtgcatggaaggaaagccaatgcgcagggaaatccatggtgcaccttccaatttcagttccagc

SEQ ID NO: 289609 - DNA, 100 bp, Homo sapiens
atcgaatgtgtggatcccacagaaccccactggaacgacacagagccggcctgcaaaggaacaggagtacagctgtgtagtaaagatgccttctggtgaa

SEQ ID NO: 289610 - DNA, 100 bp, Homo sapiens
aattggcatccagggtcggactcccggggccatggccggaatgcagtaccctcagcagcaggatctttcgaagatggtttggctgccttggagatttgga

SEQ ID NO: 289611 - DNA, 100 bp, Homo sapiens
gaaaaatcgagcagaaagaatgtctttcagctcggtcaaggagtgtgatgactggcgagcagatggctgccttccatccatcgtccacccccaacccgct

SEQ ID NO: 289612 - DNA, 89 bp, Homo sapiens
attcgagtgaccgagaccgcggccgggaccgaggcaaaatgatgcttcaacacccaggccaggtctctgcctcggaagtgagtgcttct

SEQ ID NO: 289613 - DNA, 88 bp, Homo sapiens
tccaagaaggccccgaggtctggctcccggggtgggaggaaatctcggcgttactaccccacacgcctggccatcaatctctcatcag

SEQ ID NO: 289614 - DNA, 82 bp, Homo sapiens
agaatgtgtgcccttaatgaacaatgtgtattcctccatcatatgctgaccttggcaaagctgccagagatattttcaacaa

SEQ ID NO: 289615 - DNA, 100 bp, Homo sapiens
gaattgctgcacagcgctgtcgcaagagaaaacttgactgtatacagaatcttgaatcagaaattgagaagctgcccctgccgccttgtcatgactccga

SEQ ID NO: 289616 - DNA, 75 bp, Homo sapiens
atcatttgcaggtcatacctgcttgggctctttctggcaaaggtaatgacatacgcatctgtgccagcatcccaa

SEQ ID NO: 289617 - DNA, 97 bp, Homo sapiens
cctttttgctgcagtcttgacatcttaacgtggatagaaaaaggtgcgcccacctcgtccacatgttgttaagagaccaaagagcaacatcgcagtg

SEQ ID NO: 289618 - DNA, 75 bp, Homo sapiens
ctgcaagctaggtcgtcgactgtaggaaatcagtactactttaggaacaggctcttgtcaggatggtgaagctgt

SEQ ID NO: 289619 - DNA, 82 bp, Homo sapiens
tgggacagcgagcccttcaccctggtggagcgagacgcgcgagcccagcattgacctgctgcaggccttcgtggagcactgg

SEQ ID NO: 289620 - DNA, 82 bp, Homo sapiens
agactcgatcgttagggaatgggatcgcttacacctgagacgaactacagaacagcacgtaccagaggtggaagtccaagtc

SEQ ID NO: 289621 - DNA, 83 bp, Homo sapiens
agcaagttgtggaacttctacaggaacggccatatcagcgggaacaagattggctgggagaagacgggaagccactcagagcc

SEQ ID NO: 289622 - DNA, 100 bp, Homo sapiens
tgtcacactaattgccaacaacaatggagtcccgacctctacatgttgtgctgggaaatgaagcctgtgatttggactccacagtgtctgctcttgccct

SEQ ID NO: 289623 - DNA, 101 bp, Homo sapiens
ggacaccagatccctggaggctcgaattctgaatgacatcatctccaccatgttcaatagaaagtttatggaggaattattcaagcctcaagagctctact

SEQ ID NO: 289624 - DNA, 101 bp, Homo sapiens
gcgcgccccggatgtggcgcggctgcgcgaggagcaggaaaagctaaggagagagtgttgaaaaaaggagagcaccaaatacttgttgacgaaaaacctgt

SEQ ID NO: 289625 - DNA, 136 bp, Homo sapiens
agctggggatcagtgagaaagactccaacttccagaacccatttaaaatcgaccgcacagagtccttcagcctcaagtccaaagcctggtgacatcctcccaggtacagccggtcaccattcagcagcaggtgcag

SEQ ID NO: 289626 - DNA, 100 bp, Homo sapiens
gtcctgtctaccctgagcgggcgccccgtcaaaatccgaaagattcgggccagagacgacaacccgggcctccgaggccctcgggaccaaggatcacgtc

SEQ ID NO: 289627 - DNA, 100 bp, Homo sapiens
gccaagattacagtacccagggaaatgttgggaagatttctttagatcagattgatttgggcgacataccttctgttgaataccttttacaaaatggaag

SEQ ID NO: 289628 - DNA, 75 bp, Homo sapiens
ccatgagaaatgtcggttcagatacaaagaaacagccttggtataatagcacgttagcatcaagacgaaaacgac

SEQ ID NO: 289629 - DNA, 75 bp, Homo sapiens
tttttgataggtgcctatgcagtcaacaggacatactgctgtggcacctaccgagcaggtcctatgcggcagata

SEQ ID NO: 289630 - DNA, 100 bp, Homo sapiens
gatgaaggagcttcaaacccaaagaggaggctgtgacattcaaggatgtggctgtggtcttctccagggaggaactgcgactgctcgatcttacccagag

SEQ ID NO: 289631 - DNA, 90 bp, Homo sapiens
ttatgaaccagtgtatcccaagtatgggcactaggaaaagacttcttccatcaagcttaattgttttgttattcatttaatgactttccc

SEQ ID NO: 289632 - DNA, 101 bp, Homo sapiens
gatggatgttaaaaatcaacaccaggactacagtaaggctgaaatcattgaagtgcttggagtgcagaactgaaagaggttatgaagacagtatggagttt

SEQ ID NO: 289633 - DNA, 75 bp, Homo sapiens
cgctcagcaagctccacatccccgtgatggagaaggaggagacaacccgggagctgctgctgcccaactggcagg

SEQ ID NO: 289634 - DNA, 100 bp, Homo sapiens
gggacgctgccgtgcgcgccagagatcccagactgcgtggagcagacagaccccgtgcggctgacacagctgtatgagcaggcccggtgggacctgctgc

SEQ ID NO: 289635 - DNA, 100 bp, Homo sapiens
ctggactgctccctggagcacgagttcaggaaggctcaggaagaggagagcagcaagcggatatggaaaacgatccagcccagagacactgatttcagac

SEQ ID NO: 289636 - DNA, 75 bp, Homo sapiens
ccgggagcgagctgggagggagccgcgcgcctttgtgcgcgcgccgagcggggccttttccgaagtggttttagc

SEQ ID NO: 289637 - DNA, 90 bp, Homo sapiens
ccaatttatcagaggactgcagcctatggccactttggtgaggtccagagatatatccagagaggagtggaagggctcggagacctacag

SEQ ID NO: 289638 - DNA, 75 bp, Homo sapiens
tcaatttaagcctgatctaacccctagaaacagagttcttggagtctctgcggagtccctgggccagatctcaca

SEQ ID NO: 289639 - DNA, 50 bp, Homo sapiens
ccagggtctgcagacaaggcagggccgcatctacaagtgcttgtttactg

SEQ ID NO: 289640 - DNA, 101 bp, Homo sapiens
ctgactggaagccctggcagccctggtcctgatggcaaaactggcccccctcctggtccgacccccagtggcactaacgtgggatcctcagggcgctctcc

SEQ ID NO: 289641 - DNA, 51 bp, Homo sapiens
gccctgggctggaacgaccctggatcttcaagatgaagttcaaagggagaa

SEQ ID NO: 289642 - DNA, 101 bp, Homo sapiens
ctttgcctccagggtcatacgcatccttaggttttgctgttactgctcagtgtagtcacaccttgaataagaaatggaaaaccttgggatgttgataaagc

SEQ ID NO: 289643 - DNA, 75 bp, Homo sapiens
gtggttcacccgctgccgggcaccgaggaccagctcaatgacaggtgacagagctgaatgaacctctctccaatg

SEQ ID NO: 289644 - DNA, 100 bp, Homo sapiens
ggagcgagagcgccagagagagaagatcggggggctgaaatccatcttcatcctaccgctccgcccagtgtaccatggcttccagtaacactgtgttgat

SEQ ID NO: 289645 - DNA, 82 bp, Homo sapiens
ccagcatccctgtcacttttacaaaggccctggccaacgtcaacattgggagcctcatctgcaatgtaggggccggtggacc

SEQ ID NO: 289646 - DNA, 96 bp, Homo sapiens
gccaaacggaggaatacctcgtatgcaacctcaggcttcagccagtcctccacttcttccaccttggctacccctgagatagcaagaccaatcctt

SEQ ID NO: 289647 - DNA, 75 bp, Homo sapiens
ggcccgtagtctcggcgcccctgggagccgcccggtggaagctcctgcggcagatatattcgactttatgggaga

SEQ ID NO: 289648 - DNA, 71 bp, Homo sapiens
gggccagtattatcaggcatggagatgctactgatgtcagggctatttctgccgggcgctccgcgaagatg

SEQ ID NO: 289649 - DNA, 75 bp, Homo sapiens
gcctgtaccaaacgtggttgtacgagacgtggcctgtggcgctaaccacacgaaaaagcttgtggtgaagggggg

SEQ ID NO: 289650 - DNA, 100 bp, Homo sapiens
tgtctggctctggaattgctactgctgcctctgtcactcctggtgaccagcattcaaggtcaaaatgcagatcttcgtgaaaacccttaccggcaagacc

SEQ ID NO: 289651 - DNA, 90 bp, Homo sapiens
tgcagaaggaatctcactctcaggtggacccaagagccatatcagtgctagcaaaatggcagaattcatatagcatcaaagttgtcctgc

SEQ ID NO: 289652 - DNA, 82 bp, Homo sapiens
aaatgccctcaaacgcgccaacgcaaactcagtcgtggctttggagatcactttaagcttgtctccagctggcacactaagg

SEQ ID NO: 289653 - DNA, 50 bp, Homo sapiens
ttccagtgtacttgaaaaggttgaaagagtctcttccatctcccacacta

SEQ ID NO: 289654 - DNA, 100 bp, Homo sapiens
cacatgagatgatcacctcagcagaaaactgctgtagagggcttactagatgccacaagtggtgctgatgctgaccttctgctgcgctacagggaatgcc

SEQ ID NO: 289655 - DNA, 90 bp, Homo sapiens
ggaacagcagagagcacacgaggaattgtactctcagagatgttgagaaaagatacatgggtcttggaagataattactcaaaatatgca

SEQ ID NO: 289656 - DNA, 75 bp, Homo sapiens
gagacactggcattggaacttcctgttctgatagcgtggaagggttatgtggtccgaatcagtggtgggaacgac

SEQ ID NO: 289657 - DNA, 83 bp, Homo sapiens
cgacgctggagtggggagaagcatcatggttcaacggtggcccagttgaaatccttcccttcctctaccttggaagtgcctac

SEQ ID NO: 289658 - DNA, 90 bp, Homo sapiens
tttgtatgtattgatagaccggacagcggaggaaatcaagcaaggcaatgacaatgcaaagccttctagacaagctcagtggaatctgaa

SEQ ID NO: 289659 - DNA, 96 bp, Homo sapiens
cataaagacatcttaattgggcacgaaagagatcacaaaatttgtccaggatagacatagagctagaagaaacagacttcgtaaagatcaacttaa

SEQ ID NO: 289660 - DNA, 100 bp, Homo sapiens
ccttcatgtcatgaaggccatgcaggtggtacatggctggcagagtggctaccagcacaagcggatgccactgctggatgtcaagacgtgacctgacccc

SEQ ID NO: 289661 - DNA, 88 bp, Homo sapiens
ccgcgggcgccatggagggggtgctgtacaagtggaccaactatctgagcgagacaaagcatggaggacacaagaatgggaggaaagg

SEQ ID NO: 289662 - DNA, 75 bp, Homo sapiens
attctcctgcctcagccttccgagtagctgggattacagaatttactcactacgtgagccgcagacacccactaa

SEQ ID NO: 289663 - DNA, 101 bp, Homo sapiens
gctgatggagagagtgacccggctatacaaggatcagaaaggactccagcacctggagcaaacatgaacgttggagttgcccacagtgaagtgaatccaaa

SEQ ID NO: 289664 - DNA, 87 bp, Homo sapiens
aagggaaggcgcgagtgaggaaaggaggtactgtaggatggaaagaagaagtttgacaaagagagtgaaaaatattactctatcctt

SEQ ID NO: 289665 - DNA, 83 bp, Homo sapiens
gcctcggggtccggaaccagacgatgagacagagttgcgaccgcgcggcaggttcaaggtgtttgcagactatgaagcctaca

SEQ ID NO: 289666 - DNA, 98 bp, Homo sapiens
ggccggcagcgtcccggacgaggaggatgctccagaccttgtatgattacttctggtgggaacgtctgtggctgcctgtgaacttgacctgggccgat

SEQ ID NO: 289667 - DNA, 50 bp, Homo sapiens
gtacatctgaaagccgggaaatgctcttcagagaagtaagaataatgaag

SEQ ID NO: 289668 - DNA, 50 bp, Homo sapiens
atgagaagactgatcaatctggaaaatgtttataggaggccttagctggg

SEQ ID NO: 289669 - DNA, 120 bp, Homo sapiens
cttcgggtcgggcgtctccgccggctactgccgcttcagttctcccggtgtggccacgagtcggatgaaggatttgggggcagagcacttggcaggtcatgaaggggtccaacttctcgg

SEQ ID NO: 289670 - DNA, 100 bp, Homo sapiens
gtgcctttgaccttctgccatgattgtgaggcctccccagccacgtgaaactgcttgctatgggtgttctccaggatcaaagtgtgactgcagtggcata

SEQ ID NO: 289671 - DNA, 75 bp, Homo sapiens
caaagactaaactgccaaagttcaccatcctccaaacaagtgaagagatcatgaatcagacagataaaaatcaac

SEQ ID NO: 289672 - DNA, 59 bp, Homo sapiens
ccagctccatcaacctcacgctgcacctgggtatcgatatcctgaagcttgtagcagcc

SEQ ID NO: 289673 - DNA, 74 bp, Homo sapiens
ctgcagttgaatctgacaaagatcgaacagttgtgctcagggaggatgctgtcctggaatatctgaagattgct

SEQ ID NO: 289674 - DNA, 75 bp, Homo sapiens
cagtaagaaagcagctgatagcacatcacaggaagacagagatgtcaatgaccccatgcccaaccgaggcggcaa

SEQ ID NO: 289675 - DNA, 83 bp, Homo sapiens
tttagtttcaaaaagttgctggatcagtgcgagaaccaggagctcgaggttcggtgatgctgtgaaaggtaatttggtggtag

SEQ ID NO: 289676 - DNA, 80 bp, Homo sapiens
aatgagctttttgctctcaggccagctcctattcagggagaagatagcattcttcacaaggccaaggatcaacatacctc

SEQ ID NO: 289677 - DNA, 100 bp, Homo sapiens
cttctaccagttcctcggggtgcagcagttccttgtccagaaggaaaattctcgcgttctgggttaatgccctgtcacccatgtcctcgtgactattacc

SEQ ID NO: 289678 - DNA, 90 bp, Homo sapiens
gtcgagtttcaaaaggaggtggcgcaggttcgcaagcgcataacccaggtggactgtgcattgtcacttattcgacttgggatggagcgg

SEQ ID NO: 289679 - DNA, 83 bp, Homo sapiens
ctttaatatgctggatgagctgctgaagcccaccgaattaggtgaccctggcaaagatgagagtgcacatttcgtcctgcctg

SEQ ID NO: 289680 - DNA, 75 bp, Homo sapiens
ggatctggtgtaccaggcgaagctggccgagcaggctgagcgatacgacgggcctgaaggccaggaggagtcaac

SEQ ID NO: 289681 - DNA, 50 bp, Homo sapiens
ccgaagaagcttcgaggatctggattcagctgtggaaatggctatgtcaa

SEQ ID NO: 289682 - DNA, 80 bp, Homo sapiens
ggtccccacaggagacgtagaagaggagagacctcccagggacgtgcactcagaaagaagcaaggtctcgctgtgttacc

SEQ ID NO: 289683 - DNA, 100 bp, Homo sapiens
ccggtctgggagttgggggcaaggagaagatcctgatgggaaactcttgtctagtgatgtgactcattacgtgatcccagactggaaagttgttcaagat

SEQ ID NO: 289684 - DNA, 98 bp, Homo sapiens
ctgaccacaatggggaggacaacttcgcccgggacttcatggtgtaggagctgcacgatctgggaacctcacgtttatggtgggaggagttgaagatg

SEQ ID NO: 289685 - DNA, 100 bp, Homo sapiens
cgcaggcctcgtgccgttacggccatcacggcggccgcagtggcgtcctggagccctcctcagttgcagagtgggcaggatcttaagacccgataggtgc

SEQ ID NO: 289686 - DNA, 100 bp, Homo sapiens
ctcctgagtagctgggattgcagggaatctttaaccagtttcagtgtagtagtgaaaaagtgcttccatctgacactctccgcagtgctctggcaaagac

SEQ ID NO: 289687 - DNA, 75 bp, Homo sapiens
cagcatcccacattaagtcaacgaggctgataaaataccagtaatgcgtggacagtggtttattgacggcacttg

SEQ ID NO: 289688 - DNA, 100 bp, Homo sapiens
gagcacgggcaaggcggagagtgacggagtcggcgagcccccgcggcgacaggaatggcggcgctagatagtaaggcatcagggaagatgggaatgcgag

SEQ ID NO: 289689 - DNA, 101 bp, Homo sapiens
gcaagcgtctggtgacaggacagcattgtgaccagtgcctggcctatatgaacccaatagcaatggcgagatcaaggggtccaatccagtcttcagggcca

SEQ ID NO: 289690 - DNA, 88 bp, Homo sapiens
gtgagcaaggcatcaacgagtttctcagctgtcaccactgactaaagaagagaaaactgcggcagagcaattcaaatttcacatgcca

SEQ ID NO: 289691 - DNA, 90 bp, Homo sapiens
tgaggcgtgtcaccagtttatcacagggaaagtcctggaggtatatgactgatgggatgttacttcgtgaagctatgaatgatcccctcc

SEQ ID NO: 289692 - DNA, 98 bp, Homo sapiens
gatctgatcacctgtctggagcaaggaaaagatccctggaatatgaagagacacagtatggtagccacacccccagatcagggagcagagaaacatga

SEQ ID NO: 289693 - DNA, 100 bp, Homo sapiens
caagtggcctcggatgccaggctcaatcctttgaacttttcctgtgggctgtcaggacccatagaaggtctttgagcagacttatgcagagatggacccc

SEQ ID NO: 289694 - DNA, 98 bp, Homo sapiens
gccattatctgtctctcctgattactcagaaggtcaaataaacttagtttcagcttggtcttgtggaaggactaatggctgaaggataaatcaacatg

SEQ ID NO: 289695 - DNA, 82 bp, Homo sapiens
tagaattaagacggagttcctagtgcaaatgcaagtgggagctggtgaggtggccaacttcgctgcgtatgcgtttgcacca

SEQ ID NO: 289696 - DNA, 83 bp, Homo sapiens
cccggtgagacctgcctgaatggcgggaagtgtgaagcggccaatggcacggaggcctgcgtcaaaatgatgcttcaacaccc

SEQ ID NO: 289697 - DNA, 97 bp, Homo sapiens
tcggatttcaccacaagaagggctgccagtataaccccgttttcacacgaatggccccttcacatatttgaagactaccgtcgtgtccgtgctgacc

SEQ ID NO: 289698 - DNA, 97 bp, Homo sapiens
caatgttcatataaatggtggcagaaataccagaagcctcaagtactacagccttccagcagccttcccagacccacagatcacacccagggaaaac

SEQ ID NO: 289699 - DNA, 75 bp, Homo sapiens
cgccgaggcaccgaggcactcagaggagaaaaagcttgtggtgaaggggggcaaaaaaaagaagcaagttctgaa

SEQ ID NO: 289700 - DNA, 75 bp, Homo sapiens
gccgcggccgcggcggcgcagggcaaggaaggttctgtcatatgttgaagaatccatacaccattaagaaacagc

SEQ ID NO: 289701 - DNA, 100 bp, Homo sapiens
gaaagtgcgcagcctgcaagattgtggtgcacacgccctgcatcgagcagctggagaagggcacttcaggcaaccggggcctccagggggagaaaggcga

SEQ ID NO: 289702 - DNA, 82 bp, Homo sapiens
cgccctgttccccgcgctgcggcctggcggcttccaggcgcactaccgcggatattagaaatggctactccccagtcaattt

SEQ ID NO: 289703 - DNA, 101 bp, Homo sapiens
ggaccgaaacctagccccggacgagaagcgcagcaacgtgcggtgggaccacgagagcgatttccatttaaacagggttaatttggaagaatcttcaggag

SEQ ID NO: 289704 - DNA, 100 bp, Homo sapiens
cattcttctaatccaagcaataacccaagcaaaacttcagatgcagaattccagagacgctgtaacactctgatttcattgattgagaaagaaaatatgg

SEQ ID NO: 289705 - DNA, 88 bp, Homo sapiens
ggtgtggaggcaagctgggcttcctggccaaggagcccagcgaagtgccaacacctaagagacctcggggccgaccaaagggaagcaa

SEQ ID NO: 289706 - DNA, 75 bp, Homo sapiens
attcgcagtggtcgcttcttctccttggtacaccaggggttggaaaaaccacactaggcaaagaacttgcgtcaa

SEQ ID NO: 289707 - DNA, 144 bp, Homo sapiens
gatgaacatgtgcttggtgtcgtttttccttgagctgaacgtcttgcaacagtggccgcacgcataggtgtgatgaatgcagactctgctaccattttggctgtttggatcctcctttgaaaaagtctcctaaacagacaggct

SEQ ID NO: 289708 - DNA, 82 bp, Homo sapiens
ctgcaggctctggggagtcgccatgatgaagaactggtggatgtttctgcatctgtcttaccagaattgaaaagagaaacat

SEQ ID NO: 289709 - DNA, 74 bp, Homo sapiens
ctcaggctggaacttgccctgtctcctcgcagatgagctgcagaaccttggcctgaaaatgctacattatatca

SEQ ID NO: 289710 - DNA, 95 bp, Homo sapiens
cgcgtctctctgctgcggcgcggggaccgctgtgctctcgatggcccactgcgtgaccttggttcagctgtccatttcctgtgaccatctcattg

SEQ ID NO: 289711 - DNA, 100 bp, Homo sapiens
gtgaactaaggccccctgcccccttttcctggtgcatgtgaagttatcaaaaacagaggcgacaggaagaagggtattacagccgcctggaagccgagag

SEQ ID NO: 289712 - DNA, 75 bp, Homo sapiens
ccgagagtgggcatggcgacttggtctcagccggactcggaccattaaaaatctcaagtgacgactttgggaaac

SEQ ID NO: 289713 - DNA, 100 bp, Homo sapiens
aagaagagcggcgtctacgaaaggccctgctggagaagcatttgacaactttattggcttcctctgatatgcaagtggtgctggcagtcctcaatctcct

SEQ ID NO: 289714 - DNA, 100 bp, Homo sapiens
ccctgtaatttggccataccttctgaagtagattactgccaaatctgtcgaaagggagataatgaagaactgcttcttctttgtgatggctgtgacaaag

SEQ ID NO: 289715 - DNA, 75 bp, Homo sapiens
gacttaaatgccgtccatggagccatgcgtgtgctgacagattatttgcatgggtgcaaaagaaaatggtttgcc

SEQ ID NO: 289716 - DNA, 82 bp, Homo sapiens
aagatccagaagaagattaccccaaatttggacttttggatcagagacataacatgggctctcaactgatggtgaacttctt

SEQ ID NO: 289717 - DNA, 90 bp, Homo sapiens
caactcaggtcaaagactacagctttgtcactgaagaaggtggtggtgttgccatggggatgtataatcaagataagtcaattgaagatt

SEQ ID NO: 289718 - DNA, 100 bp, Homo sapiens
aaacagctggctaagctcatcattgttactggacattttctacattgaaaaccaaaaggaatatgaaaataaaaaagctgctaggaagaggagaacacaa

SEQ ID NO: 289719 - DNA, 83 bp, Homo sapiens
attcgccgtgcccgagaatagctccgtccagcagggaaatcctcattgacgattcaatttgttgaaggccaatttgtggactc

SEQ ID NO: 289720 - DNA, 100 bp, Homo sapiens
gcacgaaacactgaaattttggcagaggaagaagcccctccagatggtgctgttgccgaatacagaagagaaaagcaaaagtatgaagctttgaggaagc

SEQ ID NO: 289721 - DNA, 100 bp, Homo sapiens
ctgcatccttaactgagaatgagcccatgaaacccctgaaggccaccgccaccacctcccagcccgtgctcaccatccagcagatcgagaccatcttcta

SEQ ID NO: 289722 - DNA, 100 bp, Homo sapiens
cttagggcccgcggcccccgccgccgccaacagctcgggggacggcggggcggcgggcgacggcaccgatgcctgaggaagtgcaccatggagaggagga

SEQ ID NO: 289723 - DNA, 74 bp, Homo sapiens
tctcggcaggctcttcgggaaggtaatagaatctcatccagataatgcattagaggatctacgactagataagc

SEQ ID NO: 289724 - DNA, 90 bp, Homo sapiens
gtgctagtatcggacatgatcctcatcttttatacactcttagtgctgtccagaacctggagctggttgaaaaaggcttcagtaacttga

SEQ ID NO: 289725 - DNA, 101 bp, Homo sapiens
gctttcgcgacatggccttcaattttggggctccctcgggcacctccggtaccgctgcagccaccgcggcccccgcgggaccgtgtgtatgtacaacaaaa

SEQ ID NO: 289726 - DNA, 75 bp, Homo sapiens
ggagctggacggcgagcgcgagcggcgcgagaaagtggttggaggcaaagtaaagaagcccggtaaacgtggtcg

SEQ ID NO: 289727 - DNA, 95 bp, Homo sapiens
catgctaagaacaacagtcaggccaagccttctgcctgtgatggatcagggagcttccaaggcatttgatacctttttgatgggaagaagggctc

SEQ ID NO: 289728 - DNA, 75 bp, Homo sapiens
ggatccaggataacggaggctggattgacgcgtcatgccttacgtgggaaggacaacagttccaggggaaagctg

SEQ ID NO: 289729 - DNA, 100 bp, Homo sapiens
agcccgaagaaagaagctgctgaaaacagaagttcacctgcacatcttgttttccctaacatcaagaatggaagctgcacagtgggatgaagacgtacgg

SEQ ID NO: 289730 - DNA, 100 bp, Homo sapiens
gggccggctagaggaagaggcgttgcggcgaaaggaacggctgaaggccctacgggagaaaaccgggcgcaaggtgattggcgaggacaacgtggcagtc

SEQ ID NO: 289731 - DNA, 100 bp, Homo sapiens
tgggcagtcaccagcattgcctcgaccacactcacctctctctgctcatgcagagttttccgtctgatgaaggttggccatttgcaaagtatcttggagc

SEQ ID NO: 289732 - DNA, 100 bp, Homo sapiens
gttcctgtggaccccagtccaggatggctgctctttttctaaagaggttaacactacaaactgtaaagtctgaaaatagttgcattagatgttttggtaa

SEQ ID NO: 289733 - DNA, 75 bp, Homo sapiens
ctggagcagtcgcagtgagtttaaaaattctctctttccagacgtagtgaactgtatgcagactgacaatctgga

SEQ ID NO: 289734 - DNA, 50 bp, Homo sapiens
ccaaagtgcactggcaattttacagaaaatgatgcatcctgttgccagca

SEQ ID NO: 289735 - DNA, 82 bp, Homo sapiens
cgaggaggggaccatgacacagccagaagcggactcctagaagaggggagcagcaaggatggaatgacagccgtgggccgga

SEQ ID NO: 289736 - DNA, 83 bp, Homo sapiens
agaaccattagacacatcagtggagtccatgctacctgattgcccccgggtctcagcagacctggaatggccaaatatcaagg

SEQ ID NO: 289737 - DNA, 100 bp, Homo sapiens
gatctcagctcaccacagtcttgacttcctgggctcaagcaatcctctcacctcagcctcctgagtaggagactccatcctctgccaatggcccttcccg

SEQ ID NO: 289738 - DNA, 75 bp, Homo sapiens
cccttcactggtaatgtgtccattcgagggcggatcctctctggccctcgggaccaaggatcacgtcatgactcc

SEQ ID NO: 289739 - DNA, 87 bp, Homo sapiens
cttgccggtctccttgtcagaatttaggaatcccctggcccccgctgtgcaggaggtcctacgtgtggaggacgtaccatctgacct

SEQ ID NO: 289740 - DNA, 83 bp, Homo sapiens
cgaatgttaaatcagctggagaaggagaagtggagaagaaatcagtcagccgcagtgctggctgaagatgcaatcaaggccgc

SEQ ID NO: 289741 - DNA, 100 bp, Homo sapiens
gcaggacagaaggggtctcggccttcttcggcgtcactgtccaaggtcagaagccaatgacctggccctgaggctggctcgccactacacgggacaccag

SEQ ID NO: 289742 - DNA, 83 bp, Homo sapiens
gcattttgtcaaggatgagaaaactcgctttagtctggcactggagtgtggaaacattgagccttcgttcagaaaaacctggt

SEQ ID NO: 289743 - DNA, 75 bp, Homo sapiens
cagacggggtgagcctcttcttgtgtctggagattctgaagacaaggtctcaccatgttgcccagaatggacccg

SEQ ID NO: 289744 - DNA, 75 bp, Homo sapiens
ggacagtcaaagaagcagcccagtggaaccacaaaaaggccaatttcagatggaaagtggagaatgaggacatga

SEQ ID NO: 289745 - DNA, 75 bp, Homo sapiens
aaagacgaatatcagctctgcctgttgtggatgagtcagctttcaggcccaaagacactggagcggctccgaggc

SEQ ID NO: 289746 - DNA, 82 bp, Homo sapiens
gtcaagtacaccatgcacaaggtcttccagtttctgaacctagtatacgctcaacggcaagaaagtggaagttgccgtcaaa

SEQ ID NO: 289747 - DNA, 51 bp, Homo sapiens
aaggaaaccacataccaatggaggtatggagagtgcaatcacgctgtggca

SEQ ID NO: 289748 - DNA, 83 bp, Homo sapiens
cctgcagaggggtccatacggcgttgttctgggtcctaatgccccgagccaagttccactggttcttcttgaagatgtatcga

SEQ ID NO: 289749 - DNA, 100 bp, Homo sapiens
accaaacaagagagacatttctggctctgaaggcgaacgcttcgctggccatttaggagctctgctcaaagccagacgcgatgtgcattttgtaagcact

SEQ ID NO: 289750 - DNA, 97 bp, Homo sapiens
cattctcttcccagtgcctatcggacagtgcggcggtcgaggtgaccatgctttgggattttcatagtttgagtaattcctatgggctctaccaccc

SEQ ID NO: 289751 - DNA, 135 bp, Homo sapiens
ggaagaacgagcttgacaaatttattgtgttctggttccagtcaagcaaaattattcagcaccaaactacaggatctcatgcacatctcacgggcccggaagccagcgttcatcctgggctccatgagggacgag

SEQ ID NO: 289752 - DNA, 100 bp, Homo sapiens
gaaagtcagctcaagatgttcagaagttcatggatgctgtcaacaagaagagcagttcccaggatctgcataaagtggccaagttgaatgatgctgcccg

SEQ ID NO: 289753 - DNA, 99 bp, Homo sapiens
aaatcaccctgagtgggcaaaatgctgagctttttataccaccaaagatcaacagaagaacccagtggaagctgagcctgctagactgagtgactgcag

SEQ ID NO: 289754 - DNA, 100 bp, Homo sapiens
gcgcaccaaagagttggatcccagggtaattaaaaccatggaggcgatcagcgaggttctccaggaccttaggtttgatgcggaatctgccgagtgatgg

SEQ ID NO: 289755 - DNA, 90 bp, Homo sapiens
gccgcctgcagtcggtgaccgcgcgactcggcgcccgcccgcgctgcagatctgggacacggccggccaggagcggttccgcaccatcac

SEQ ID NO: 289756 - DNA, 100 bp, Homo sapiens
ggagtttctgcggaggtggagggagatcaggaaacggcttcttcctcacttcgccgcctgagctggagaaagagctttcccggaggcccaagaaggtctg

SEQ ID NO: 289757 - DNA, 96 bp, Homo sapiens
aaaaagtggtgctgatgtatgatgagatcttcatgcatggtggggagttatatttcagtgacgtctatacgagccttgaactgccagaagaaatca

SEQ ID NO: 289758 - DNA, 100 bp, Homo sapiens
atcaatatattgctggaagggaattcagacacaggccgttgctccagggagaactgcaaatatcttcatccacccccacatttaaaaacgcagttggaga

SEQ ID NO: 289759 - DNA, 76 bp, Homo sapiens
gcaacttttgttaccaaaggaatcaggatgatgatgctgaagctatccttgctgcagacttcgaaattggtcactt

SEQ ID NO: 289760 - DNA, 83 bp, Homo sapiens
cgcgagcaagaatcagcaggatgacggacccgaccgcatgtctgtcatggacctcgccaatacttgctccagctttcagtcgg

SEQ ID NO: 289761 - DNA, 75 bp, Homo sapiens
agccatctaacagagctgcaagagttctggattgggaaaatgaggtacgttagtgttcgcgattttaaaggcaaa

SEQ ID NO: 289762 - DNA, 75 bp, Homo sapiens
cggctggcctcaccgcccactggtttacagctactagtccagcagaagccagagactgggtggatcaaataagtt

SEQ ID NO: 289763 - DNA, 82 bp, Homo sapiens
cggccctgggagctggaggaaccgcggtttccctaggacttctgcatgcccatgccacacatatcctgtggcccccagagcg

SEQ ID NO: 289764 - DNA, 75 bp, Homo sapiens
ggaagaggtggccaaccgccccaggcagcacagtggggaggagccccagccccgcgacgaggaggaagcggagct

SEQ ID NO: 289765 - DNA, 100 bp, Homo sapiens
aggactctacacttatcatgcagttgttacgtgataatctgacactatggacttcagacatgcagggtgacggtggggaaagatcaagtgcagactgagc

SEQ ID NO: 289766 - DNA, 75 bp, Homo sapiens
tgtcatctctctggataagatggagcaagagagggactgctgagatgtcctctattcttgaagagcgtattcttg

SEQ ID NO: 289767 - DNA, 75 bp, Homo sapiens
aaaaaaacaaaagcagcccaatttttgcattccaggagatgggtatgctttttctcaagaagaacacggagctgt

SEQ ID NO: 289768 - DNA, 82 bp, Homo sapiens
ggggctgaggcggccgcggggcccgagcgcaggctcttgtcaggatggtgaagctgttcatcggaaacctgccccgggaggc

SEQ ID NO: 289769 - DNA, 83 bp, Homo sapiens
ctctttctggcctggaggctatccagccccagagcctgaccacctgcgaggtctgcggtgcctgctttgagacccgaaagggc

SEQ ID NO: 289770 - DNA, 82 bp, Homo sapiens
tctgcctggccctgggaagagaagcctagatatctgtttgtcctgaagaattatggagagaacccagaagcctacaatgaag

SEQ ID NO: 289771 - DNA, 75 bp, Homo sapiens
ctaaaggaaggcgtccgttggccttcgtacccgtcttgattgagatatggccgcgtggaaagtgtcaaaattctt

SEQ ID NO: 289772 - DNA, 96 bp, Homo sapiens
gcggagggaagacgccctggtgctcaccaagcaagaaactggcagacctttcacttcgtatccaacaaattgaaacaactctcaatattttagatg

SEQ ID NO: 289773 - DNA, 100 bp, Homo sapiens
ggaggtttggttctcccggcagcagcccgacgcaaaccaaggatctggggatcttcgcactatcccaagagttgcatgctgagaatttgaaaaatgaaga

SEQ ID NO: 289774 - DNA, 100 bp, Homo sapiens
acttaggggccacgtgagccacggccacggccgcatagtctccaaaaaaagttggtgatgacattgccaaggcaacgggtgactggaagggcctgaggat

SEQ ID NO: 289775 - DNA, 80 bp, Homo sapiens
aggctcccgggctggactcaggcttctcagattttgcaagaacgaggctcaaggatgtgagggacacagtattgacagct

SEQ ID NO: 289776 - DNA, 100 bp, Homo sapiens
cgaccttctgaacaaggccaacacctatgcaggtgaaggcttccataattaccatcacacctttccctttgactactctgcgagtgaatttggcttaaat

SEQ ID NO: 289777 - DNA, 83 bp, Homo sapiens
gcagggcctgcagcgggagctggacggcgagcgcgagcggcgcgagaaagaggcatacacggaatacctgaggagcatccact

SEQ ID NO: 289778 - DNA, 74 bp, Homo sapiens
ggcggcttcctggcctgggcgctccggtggcggcggaggtgcccgtggttgacacgagctgtgtccccagctgt

SEQ ID NO: 289779 - DNA, 90 bp, Homo sapiens
aggagtttttgctttagctggactaacagatttggttcgagcatacgggccaggtttggagaaatctggatgcattgtcaacaacctggc

SEQ ID NO: 289780 - DNA, 75 bp, Homo sapiens
tggactcgctcttctcctacttcgacgcaggggccgcaggggctggccctcgcacccccaggccacctgaggcct

SEQ ID NO: 289781 - DNA, 102 bp, Homo sapiens
cggtagcgaaggccgccgaacctgcctggctagccggcgacttgagtgacgagtgagaagccctaccactgcaactgggacggctgcggctggaagtttgcg

SEQ ID NO: 289782 - DNA, 83 bp, Homo sapiens
aagtaattcagctacagggtgaccaacgcaagaacatatgccagttcctcgtagagttgtgcggtctgaaagtagaagtggat

SEQ ID NO: 289783 - DNA, 75 bp, Homo sapiens
tgaaccctgaagtcggtgtctgctgcgttcacggcaggattcggttaggagtctgcactatggaaacaacctgtc

SEQ ID NO: 289784 - DNA, 75 bp, Homo sapiens
gaccacgcaggcactttcccggtccccagccgtgcttcctcaaagactgggaaatgcacgtccacttcaaagtcc

SEQ ID NO: 289785 - DNA, 75 bp, Homo sapiens
agttgctgtgacagatatgaaaagcgatttccaggcttgcttaaatgaaaagggggctagagagctgaaggagag

SEQ ID NO: 289786 - DNA, 75 bp, Homo sapiens
gataattgataacaccctgtaacagctgagtatagacacgtgtggccgtttacgctgtaggatcctcattcccac

SEQ ID NO: 289787 - DNA, 100 bp, Homo sapiens
gctccagcaggcgctggctcctgctcagatcttcataaacaatgaatggcatgattcagtgagtggcaagaaatttcctgtctttaatcctgcaactgag

SEQ ID NO: 289788 - DNA, 88 bp, Homo sapiens
gggactgggagtcgttagtgaggttgttcggaatcctataattgaaaaacagtaaagatggaaaaccagttattgaatatcaagagga

SEQ ID NO: 289789 - DNA, 83 bp, Homo sapiens
atctccgctacttcactcgcactatccttgatgctagccaagaccgaggataggtgtggccattggcgaccagatcctggacc

SEQ ID NO: 289790 - DNA, 83 bp, Homo sapiens
tttctgcctgctcagttccagttgtcacggatcaagtttgtggttctagcagatcctaggcaagctggaatagattctcttct

SEQ ID NO: 289791 - DNA, 83 bp, Homo sapiens
ggcggcgcccgcggacgcaggggcgttcaatgacaatgcagatcttcgtgaagactctgactggtaagaccatcaccctcgag

SEQ ID NO: 289792 - DNA, 116 bp, Homo sapiens
ggagcctgattagcagacaaatgatacagcaatacgagatgtacttcagggattcacaggtaagccgcgtagcagatacgctgccagcaacacgggcgaccatgctgatgagcagg

SEQ ID NO: 289793 - DNA, 100 bp, Homo sapiens
agcaggagcagcccgcggcgaccaagatcaggaacctgccctgaggggtctggttgctgcttacagtggtgacagtgacaatgaggaggagctggtggag

SEQ ID NO: 289794 - DNA, 90 bp, Homo sapiens
atgctttcagtggtggagaatggactggacccccaggctgccatcccgtcaaaagaccagccagattatgcaatgtattcccggatctcc

SEQ ID NO: 289795 - DNA, 100 bp, Homo sapiens
ctgaaagcatgggattttttaccaaggaagaatggttaaagggaatgacttcattacattacagatttatggtaatggaaagactaggaatagatttaca

SEQ ID NO: 289796 - DNA, 82 bp, Homo sapiens
ctgctgcagtccaggctgaagacagagggctctgatctgtgcgacagagtggcctcagccccgagtccaagaagatcctgac

SEQ ID NO: 289797 - DNA, 75 bp, Homo sapiens
caaattcagctaatacccaaggaaattcaacaccaaatcctcaggtgatttgaagatattaaagctagaaattgg

SEQ ID NO: 289798 - DNA, 74 bp, Homo sapiens
cgactccggagacagcccaaatatcctcggaagagcgctcccaggagaaacaaatatgagggaaggcaccattg

SEQ ID NO: 289799 - DNA, 82 bp, Homo sapiens
aggatcagagcatgaaggaagggatgaggacggggacttggttgccttttccagtgacgaggaattgacaatggccatgtcc

SEQ ID NO: 289800 - DNA, 96 bp, Homo sapiens
gcgaagtccacccagcgtttccgaggtgaaggcgccgcgccaggccgggcgggcgattgtcctaaagcagttggatgggaaaagaaccagaaagga

SEQ ID NO: 289801 - DNA, 100 bp, Homo sapiens
cagatggcggatgccctgcagtacctgcagaaggtctctggagacatcttcagcaggttatgggaagctggctggaagcagcggtactacaagaacaaat

SEQ ID NO: 289802 - DNA, 101 bp, Homo sapiens
ctcgaccacactcacctctctctgctcatgcaggggtttcacagaccagctgcgtaagatttctaaggatgcagggatgcccatccagggccagccatgct

SEQ ID NO: 289803 - DNA, 75 bp, Homo sapiens
cccggcggagcccgcagcttccctgccgtcaggatggctaaaggtgaccccaagaaaccaaagggcaagatgtcc

SEQ ID NO: 289804 - DNA, 94 bp, Homo sapiens
cttcttcactgctaagactacctttttcagaaatgcgcagagcaaacatctttcaaagagtgctgatggcagagattggtgaggatttggataa

SEQ ID NO: 289805 - DNA, 101 bp, Homo sapiens
acactacaaactgatgaagttaaaaatgtgccttgtggaacaagtggaaccagaggtcaagtatgtggggaacatgcacggcaacgaagcgttgggccgcg

SEQ ID NO: 289806 - DNA, 100 bp, Homo sapiens
ccagccgactggagcaggcagcagcccagcttcagctttagctgcagctgcctctgttcagccacttgcaacacaatgtttccaactctctaacatgttt

SEQ ID NO: 289807 - DNA, 100 bp, Homo sapiens
gaaggatgccgaggaaaaggatatcaggactggaatggctcttacagcaagatcctattaaaggtggaagaaggtccatatctttttctgtgggtgcttc

SEQ ID NO: 289808 - DNA, 90 bp, Homo sapiens
caagcccgggcgccaccgctgccacctccgcgaggtgctggagaatctggtaaaagcaccattgtgaagcagatgaggatcctgcatgtt

SEQ ID NO: 289809 - DNA, 100 bp, Homo sapiens
cacaggatccggagctggagcccccaggggccatctaccctgataacaccacagattttcaaagagcagatgacaaagtatatccaggagagcagtatac

SEQ ID NO: 289810 - DNA, 101 bp, Homo sapiens
ggcctcggcctcggcctccgacacgatctttaatctcatgaagtacgacagctacagccgcttcttaaagtctgacttgtttttaaaacacaagcgaaccg

SEQ ID NO: 289811 - DNA, 88 bp, Homo sapiens
cttggcagaaagtgaggaggaaaacacccccattgctgtgtgaggcattgtgtaatcagccaggctctttcccgaccattgttctcca

SEQ ID NO: 289812 - DNA, 83 bp, Homo sapiens
ccgcgaaatgatgggatagcgttgcaaatccttaaaagagtcttaacgtgttctaagaacggaagcatctgggctggatggaa

SEQ ID NO: 289813 - DNA, 90 bp, Homo sapiens
gtggacgcgaggagccgggcgcttagaacagaggcttgcacaggtggaggagctacagaaggcccaaaagaagaaatatatcaagaagaa

SEQ ID NO: 289814 - DNA, 90 bp, Homo sapiens
caacatggaggcggaggtcgataagctggaactgatggaacatgcttgccaactcagccagcgtgaggatcctcatcaagggaggcaagg

SEQ ID NO: 289815 - DNA, 90 bp, Homo sapiens
cagcatttcatccctcgtcgaaaggattggattggcatctttagacactatggagatgaccgccatggccacggaggacccccagagcgc

SEQ ID NO: 289816 - DNA, 82 bp, Homo sapiens
cggaggccatgggcacgccttggacaggtgccttggaatttgtgtcgctgagtcagcaagcctttcagatttgcccggtttt

SEQ ID NO: 289817 - DNA, 75 bp, Homo sapiens
gccctacgggagaaaaccgggcgcaagatcacccggaagttcaggctgaattctgaaggcaaacttgagcagacg

SEQ ID NO: 289818 - DNA, 100 bp, Homo sapiens
ccttggcatgggctacaaggaaaacggctgagtttgaatgcatccaccctgagaagcagcagaaaaagaaaagctacaagaactctggaactatccgtgt

SEQ ID NO: 289819 - DNA, 146 bp, Homo sapiens
cttgtggtgcggcctcaccatacaggaacagggcagacgttagcgtgagtgatcactctcaatcccgggcttgcattgatgacaatgttgatatggtgaagtttctggtagaaaatggagcaaatattaatcaacctgataatgaa

SEQ ID NO: 289820 - DNA, 90 bp, Homo sapiens
caacttaagagcttcttcaaagatggcagaagattttttcatttaatgtctggggtaaaattgcaactttttggaacaaggctttcctta

SEQ ID NO: 289821 - DNA, 83 bp, Homo sapiens
ggaaagtcaggaccgcgacggcagcagagcagctcacttgtgcatttttggcctgcaaagtagatgaattcaatgtatctagt

SEQ ID NO: 289822 - DNA, 74 bp, Homo sapiens
gagaagagcagagcggagggagccccagacacgtgaaggagaacgacctgctcagaatgagaagaggaaggaga

SEQ ID NO: 289823 - DNA, 83 bp, Homo sapiens
atctgatcgggtcttccttcatgtctctcagccagggtagtacaaatgcaacagtgctagatgttgctcagacaggtggtcat

SEQ ID NO: 289824 - DNA, 75 bp, Homo sapiens
atgctccaagaacaatagcttgccctcataaaattccacctgctcctacgaagcccgactttgatggtcctcgag

SEQ ID NO: 289825 - DNA, 103 bp, Homo sapiens
caagaatgaagccacggaccttcacgccatcataatgtgaagaagccgaagcagcctgtgaagaggcgctagtggaaaggaactcaggtgcccctgccctcag

SEQ ID NO: 289826 - DNA, 82 bp, Homo sapiens
ctgtgagcagcaagaatggcacggtctgcctcagtccaccctgtaccctggaccaaatgtgaggagtattggccctccaagc

SEQ ID NO: 289827 - DNA, 50 bp, Homo sapiens
ctcccaagtagctgggagtacagcgagttcctggggaaaaccccagggca

SEQ ID NO: 289828 - DNA, 74 bp, Homo sapiens
aagaaaccttatccagccgaagaagggaacacaacagtagatgagttaatgatgagactcatggctgcaatgga

SEQ ID NO: 289829 - DNA, 52 bp, Homo sapiens
ggggtccatacggcgttgttctggatggcccactgcgtgaccttggttcagc

SEQ ID NO: 289830 - DNA, 75 bp, Homo sapiens
aaaacttcaagccaaacatcaagcagaatgtgatttgcttgaagatatgagaactggaagccttgaagcagcgtt

SEQ ID NO: 289831 - DNA, 75 bp, Homo sapiens
gaaggcgctgcgcaagcacgctgaggaggaattgaatgatctggcacgggaccctccagcacagtgttcagcagg

SEQ ID NO: 289832 - DNA, 74 bp, Homo sapiens
ctttggagaactacatcaaccaatggcagtaatgtgtgtggctggcttattcttcatccctgtagctggcctca

SEQ ID NO: 289833 - DNA, 99 bp, Homo sapiens
ggctcagagctcacctgcatcatccactttcccagcaagaaggtccagcagcagctgtggctccagtatcagaaagaacttacgatttccaacggcccc

SEQ ID NO: 289834 - DNA, 74 bp, Homo sapiens
gcgccccttcgcgtcccctgcaccatgagctggggcaccgagctctggcaattctgtggtgttcttggtcacac

SEQ ID NO: 289835 - DNA, 114 bp, Homo sapiens
ctggttggggttgctctgatatagcagccctggtgtagtttcttcatttcaggaagactgattgctcgagactttaatcccaactggatgagtgctgtggaaatcttggatgat

SEQ ID NO: 289836 - DNA, 100 bp, Homo sapiens
ctccaaggtttgaaaagcagctggcctgcaagattattcttggagaaaccctgtctgtttactgtaaccttttgcactcaaattcctttatcaggaataa

SEQ ID NO: 289837 - DNA, 82 bp, Homo sapiens
cttgagcaggcagcttacaagttggatgcatattcaaaaaaactggatattaacctggctgcagagccaaaagtgaaccgag

SEQ ID NO: 289838 - DNA, 82 bp, Homo sapiens
aacgccatgtcctccctgtactcggctaaagtaaataatgccagcctgattggactgggttatactcagacccttcgaccag

SEQ ID NO: 289839 - DNA, 75 bp, Homo sapiens
acccctatcaaggatggcatcctctaccagcagcatgtcaagtttggcaagaggaggtcctgaccgggatccagg

SEQ ID NO: 289840 - DNA, 83 bp, Homo sapiens
cttgcgagctgaggccagacaggggggcgcctacggacgggcactcagaatggtccagcgtttgacataccgacgtaggcttt

SEQ ID NO: 289841 - DNA, 76 bp, Homo sapiens
agaatggaagaactctgatagcaccccaagttgaaaacaatcctcgaacaggaaatcttggtgcactaattaaggt

SEQ ID NO: 289842 - DNA, 100 bp, Homo sapiens
atattgaccaactggcatcccacagcctcctcttccagaatgcctttgcgcaggtgcagcggaactgctgcctgacgctctgcaacttcagcatccccga

SEQ ID NO: 289843 - DNA, 83 bp, Homo sapiens
caacgggaagggccggcccgcctccctggccggggcgcagttcggaggttcagttttccaagagataacttcaccaagatgtc

SEQ ID NO: 289844 - DNA, 100 bp, Homo sapiens
gtcggatgttgcagcagagccagcagctagcgcaggccacagccacctcttcttgctgcaaagctgagatctcctttctcactctcatctccaggagtgc

SEQ ID NO: 289845 - DNA, 100 bp, Homo sapiens
ctggcctgctgctggcccgcagggttacccatgcagttgttactgtaccagcctattttaatgatgcccaacgccaagcaaccaaagacgctggaactat

SEQ ID NO: 289846 - DNA, 82 bp, Homo sapiens
acatcgtgtccctgtacgcggagggctcggtcaacggcttcatcagcaccttgggcgtgagtgcatctccatccacgttggc

SEQ ID NO: 289847 - DNA, 88 bp, Homo sapiens
cccaggcccactccaccatcgtcagcgagaacccttaggagaaatcttgagagtggacagcaattgtgaagatcgccagagagttctg

SEQ ID NO: 289848 - DNA, 75 bp, Homo sapiens
cactgcagctagtaatttgccttctggattgtatgggcactaggaaaagacttcttccatcaagcttaattgttt

SEQ ID NO: 289849 - DNA, 83 bp, Homo sapiens
ccccaacgccagtgatggcctcgcccacagtctaccctgatgggagagtctgcatttccatcctccacgcgccaggcgatgac

SEQ ID NO: 289850 - DNA, 99 bp, Homo sapiens
gcttatttaaggctgagcactggaaccgctgccacaagctcatcatccgacacttagcttctgatccatatgtcaaacttctgcttgatgctatgaaac

SEQ ID NO: 289851 - DNA, 98 bp, Homo sapiens
aagccgtccggaaaatggccgccgccgccgccgccgcgccgagcggaggaggaggaggaggcgaggaggagagactatgagcagcagctgctcagggc

SEQ ID NO: 289852 - DNA, 82 bp, Homo sapiens
cctgcactttggggagcctaagtcctgctggagcagatccgcagggacatccgagacttccggtctagcgcggggctggaca

SEQ ID NO: 289853 - DNA, 90 bp, Homo sapiens
gcgggtcaagctgctgctgcaggcatcgttggcttcacagtatgactgatgatcctccaacaacaaaaccacttactgctcgtaaattca

SEQ ID NO: 289854 - DNA, 100 bp, Homo sapiens
atcagggacgtgctggccgtgatcaaacactgcaaggaccccctccggctcaagtgtgtcaagcaagatctgccgacaccccaggccatcgagccccagg

SEQ ID NO: 289855 - DNA, 96 bp, Homo sapiens
gaggaaatgcgcttcctgagggagtgggtggagaggtatgagttaatacagaaaggagtgactgaacttagaactgttgggaatgttccagatgtc

SEQ ID NO: 289856 - DNA, 75 bp, Homo sapiens
tattcaacatctgctagtctgtatattcgtcctacattcattggaactgaggccaaggagcgggagctggaactg

SEQ ID NO: 289857 - DNA, 100 bp, Homo sapiens
ccgatcctccgctcctgaggcccccacaatgaagcagtcggacgcgtctccccaagaaagcactctcgagtggaccctgaggagctcttcaccaagctcg

SEQ ID NO: 289858 - DNA, 74 bp, Homo sapiens
aagccaagggccatcgtggtggatcctgttcatgggttgcccccaagtttcctggcagtgtgtgatactgagga

SEQ ID NO: 289859 - DNA, 85 bp, Homo sapiens
gcttcgcagtctggaaagctttaggagttcacagttcaccaccaagtaagcgaagaaaattagagaaaccgagaaaacccataac

SEQ ID NO: 289860 - DNA, 100 bp, Homo sapiens
ggacgcgggagacgccagcgagctggtgattggagccctgcggagaggaaggcatcaaccacgagtgtaagctgtgcaaccagatgttcgactccccggc

SEQ ID NO: 289861 - DNA, 100 bp, Homo sapiens
aaaagatcactgaagttggatggtctgttagaagaaaattttcctgttttccagcacccaacataacttgtaaggattccagtggcaatgaaacacattt

SEQ ID NO: 289862 - DNA, 90 bp, Homo sapiens
caggaggcctgaggcagccaaagaggaagcagcttgggcttccagctcagcagggaaccctgcagccccagatcctgctctggagctccc

SEQ ID NO: 289863 - DNA, 116 bp, Homo sapiens
caaagaccaagccaacgatggtctttcctctgcattgctgatcttgtacttggattcagcaaggaaccttccggcctcacaccttaaacagcaccagcacctcaaagtcatttcag

SEQ ID NO: 289864 - DNA, 100 bp, Homo sapiens
cgaggacggcctgtacctcattcactggagcaccagccacccctaccgcctgatcctcacagtggcccagcgtagccagaggaaatctcggcgttactac

SEQ ID NO: 289865 - DNA, 87 bp, Homo sapiens
ctgctggtggtgttgtcgtggccggagcggcccgcgcctgggctgccggcacttcgcggcagactaatagggatgccaaaggaaaaa

SEQ ID NO: 289866 - DNA, 83 bp, Homo sapiens
tggagccccggagtggggtgtcggcgcctcattcgggtggagctgagccggagacaggctccccacaggtgcaggaagccgcc

SEQ ID NO: 289867 - DNA, 100 bp, Homo sapiens
gctacacgaagaactaagaatattattagcacaagagcaccatactttgagggccgtgtggctcgggctggccgaagtggcacagcctactccttggtgg

SEQ ID NO: 289868 - DNA, 87 bp, Homo sapiens
gggaggaggagttccccttcgagaggaggcagattcccctctacatagacgacaccctgacggtgctggagaatctggtaaaagcac

SEQ ID NO: 289869 - DNA, 100 bp, Homo sapiens
gtccgggggatgactgattctcctccgccagagacacctatggctgccgatgaaggctcagcagagaaacaggcaggagaggcccacatggctgcggacg

SEQ ID NO: 289870 - DNA, 83 bp, Homo sapiens
accgagagtcctggtgactttgaacatgctggtgccgctagccaagctgtcctgcctggaactcccccactggaaaggattct

SEQ ID NO: 289871 - DNA, 74 bp, Homo sapiens
gaagctggagatgatgctggagcagaagttagcgcttctctctcggatctgaccgcactggccaaagagcttcg

SEQ ID NO: 289872 - DNA, 75 bp, Homo sapiens
cgccgccgcctctccttgctgcagccatggagatcttagtaagagccctaagaccatgaaaaagctgctgcccaa

SEQ ID NO: 289873 - DNA, 100 bp, Homo sapiens
aattattgtttgcacacctggtcgaatgattgacatgttagccgctaacagtggctagacaaatggccgccgttctcctaagacgtctcttgtcctctgc

SEQ ID NO: 289874 - DNA, 82 bp, Homo sapiens
tcctgaggaggcagctgcggtggcagctgctgagttctcggtgaaggtacatgtcccagagcaagcacacggaggcccggga

SEQ ID NO: 289875 - DNA, 100 bp, Homo sapiens
cgaacagaagtttcacaatgggaaaaaccaaaagagtggcttgaaaggaggaattttgttgtcagagaataaaaggaggttgtccataattgactttaag

SEQ ID NO: 289876 - DNA, 82 bp, Homo sapiens
aagaccagtgtcttaagtaccagagtattgttacaatcacatttgacgtaccaggaaatgcaaaggaagaacatcttaatat

SEQ ID NO: 289877 - DNA, 97 bp, Homo sapiens
gcatttcacagcactctgggcgaaaattggatgtgaaaatgaagccagaccgagattgaagataaaactttccaagtccttggtaatctttacagcg

SEQ ID NO: 289878 - DNA, 95 bp, Homo sapiens
ctcgcccagactgagagcggacggagcctgatcatcaaccaccttgacctgaccaggtttgatgtggctagcatgatgtctgttacactcagttg

SEQ ID NO: 289879 - DNA, 50 bp, Homo sapiens
atgctcttgtgctcagtgacatcattcagcttttgtctggccctctgagc

SEQ ID NO: 289880 - DNA, 80 bp, Homo sapiens
cccacggaggaagagtgggagtttgccgcccgagggggcttgaaggctgagagcaatgatggctaccacatcatcctgaa

SEQ ID NO: 289881 - DNA, 74 bp, Homo sapiens
aaatgcccctggggagacacatgcacaagacaacaaatttacatgtattggagaccagaccagaagcccttctg

SEQ ID NO: 289882 - DNA, 90 bp, Homo sapiens
tcgcttggttaaaacctgacacttttaacagtgtggtttattgacaatcatttacaatgccgaagagtgctgtagtgagccagcacagtg

SEQ ID NO: 289883 - DNA, 132 bp, Homo sapiens
tggcttctgtcctgtgcttgtagattcgcccggaccaggaagcggatcgcgtggactggaagtcacactgcggcgagtctcactctgtccttcaggctgtgagtgcagtctcctgatcttggctcactgcaa

SEQ ID NO: 289884 - DNA, 73 bp, Homo sapiens
ccattaatttttactctttgaaacagtggggcaatgagctcaaatgctccagtggctttgaccgctatcgcca

SEQ ID NO: 289885 - DNA, 75 bp, Homo sapiens
aaaggtgatatttgggccacatttgaagtcattgaaaatgaagagctaggaaatgctgtctatgatttcttcatt

SEQ ID NO: 289886 - DNA, 101 bp, Homo sapiens
aaaggagaagacttggattctcagatggactagaggcttttaccagatttcttaaaactgaattcagtgaagaaaatattgaattttggatagcctgtgaa

SEQ ID NO: 289887 - DNA, 98 bp, Homo sapiens
agccatatttaataaattccagctctactcttctaccctgtagcccaagaagcagcaacgatgggttgaaactctggaaaaattagtggagctgacac

SEQ ID NO: 289888 - DNA, 83 bp, Homo sapiens
agcagccagagtactggtttgctgttcctcgggagaggtggactgggtggttatggatcaggagacagtgaagatgagaggag

SEQ ID NO: 289889 - DNA, 100 bp, Homo sapiens
cccagttcctccgccaagcgcggccgccgcccccgcctcaggctagcttgtcactttctgcaaaggtttccctcagggagcctcctgctgccaggcacca

SEQ ID NO: 289890 - DNA, 88 bp, Homo sapiens
tcaggtgaaaggagcagtagatgatgatgtagcagaagatcattatgtagaagttctggaatgcaaaatacagtgtgaagagaacctc

SEQ ID NO: 289891 - DNA, 97 bp, Homo sapiens
ccgccgagggctctgctggctcaggacatctgtaggaccagttccagctccagtgggcaccgccagcacgcccagagttactggaggtgaactgttt

SEQ ID NO: 289892 - DNA, 83 bp, Homo sapiens
gcgctggccgggggcgcgggcggcggcgccggcaggaaggcccccccaggatgcaatggcgcagcccccccggctgagccgct

SEQ ID NO: 289893 - DNA, 75 bp, Homo sapiens
gtaaatccagcaaggatatggagagccatgttttcctgaaggccaagacccggctgcaagctttcttcctggtgg

SEQ ID NO: 289894 - DNA, 89 bp, Homo sapiens
aagaggctgcccagaaagcagttaacagtgccaccggtgttccaactgtttaaacattaggtggtctcttcagtcagcctacacaagct

SEQ ID NO: 289895 - DNA, 59 bp, Homo sapiens
ggagatcatcacgtttgccgagtcagtcagaggctaactgttctgccatgtttggaaaa

SEQ ID NO: 289896 - DNA, 90 bp, Homo sapiens
ggaaacaaagggaggaactgtttgtagccctcgtccagacgccccaaacaaacacctatgtgtgataaccatgatgatggtgaaactgca

SEQ ID NO: 289897 - DNA, 96 bp, Homo sapiens
agttctggaaattccacttcttcctgaaaataatatgtcagccagaccccatatcatgtgaacctcctcctggctggctatgatgagcatgaaggg

SEQ ID NO: 289898 - DNA, 100 bp, Homo sapiens
gcttgggccgccgagctggacccggaccggttttggaacacagatatgtagaactcttcttgaattctacagcaggagcaagcggtggtgcttatggtag

SEQ ID NO: 289899 - DNA, 75 bp, Homo sapiens
tgacaacaccgttcccccagccgggctgtttggtgccctggttgtcagatgttggaaagcagtaggacggaacat

SEQ ID NO: 289900 - DNA, 82 bp, Homo sapiens
ctcggctgccgaacttcattgcacagttgaggtttttcacgactgaaaacaacatagcaaaataagccaagatgtctgtgga

SEQ ID NO: 289901 - DNA, 100 bp, Homo sapiens
aggaaggtgattctcagctgcggcattttcttctggtcggccgtcaccttctccagctccttcattccccagcagacggagtttcgctcttgatgcccag

SEQ ID NO: 289902 - DNA, 100 bp, Homo sapiens
tgcagtgtatctactaacagtgttataccatgagtcttgggtgtggttgacctgcctgaggaaaatcgggaagcagcttataatgccattactttacctg

SEQ ID NO: 289903 - DNA, 100 bp, Homo sapiens
ttcgcaatgaaaccaggcgggtaaacatggtggacagaaagtcagcctcttgtgctctagccggcccggtccttggactgaaagaatgcaccaggggctc

SEQ ID NO: 289904 - DNA, 90 bp, Homo sapiens
cctcctgagtggctgggactacaggaggactggaatgaaattgaccccattaaaaagaaagaccttcatcacagcaatggagaagagaaa

SEQ ID NO: 289905 - DNA, 112 bp, Homo sapiens
agttggataaaaggaggacctctcgccaagggccccaatgagtggcacacagtctactatcaccgacagattttggtttcagtaacctcttcactcctgggcagctgctgaa

SEQ ID NO: 289906 - DNA, 82 bp, Homo sapiens
cgcaggagggcggtcttccccggctcgccaactcggctgctctgggggattcgtgcgcgcggggtcgcggccgtcaggggca

SEQ ID NO: 289907 - DNA, 100 bp, Homo sapiens
tcggcatgaatcgctgctgggcgctcttcctgtctctctgctgctacctgcgtctggtcagcgccgaggtattgttgcagcatctggcagtgagactgag

SEQ ID NO: 289908 - DNA, 137 bp, Homo sapiens
cacaactctgcagtggaccacagcattcctgaaatacatccaggaaagacatggagattctcttaaaaagcacccagtttcatgtatttgaatcgacaagacagctccctcgattctccatgtatgcgctgaccagc

SEQ ID NO: 289909 - DNA, 75 bp, Homo sapiens
gaagagttcactgcagatgctgcagagatggaaaataatgtcctgcaagatgaggattgaacagttaaaacaaac

SEQ ID NO: 289910 - DNA, 102 bp, Homo sapiens
cagaggtccgtgcggcagcagctccagagctttgtcaaagaggtgaggacgcttgagcggaagttagaagcaaaaatgatcaaggaggaaagcgactaccac

SEQ ID NO: 289911 - DNA, 100 bp, Homo sapiens
atggggatctggtggtcgtgaaactgcttcccgaggagcattggaaggaagccattaatttgctagaaccaatgacaaacgaccccgtgaactacgtgag

SEQ ID NO: 289912 - DNA, 90 bp, Homo sapiens
gattcgcagtggtcgcttcttctccttggcatgtgatgtgaatcagctgacatcatcttgacgggagccctgtgaggcggacacttaact

SEQ ID NO: 289913 - DNA, 100 bp, Homo sapiens
gcgtcgaatgctccacttgccgagcctgatgatggggacgtgccgcccctttgcggttcgaagcattcagcaaacaatggcaaggcagagccaccagaaa

SEQ ID NO: 289914 - DNA, 73 bp, Homo sapiens
agatcctgccctgtttgcttctcctgttgctgctagtggacatgaggctctagaccaagatagaacagccctt

SEQ ID NO: 289915 - DNA, 73 bp, Homo sapiens
ttcttctggaagaccagccaacaggaaagatgaatgggagggctgattttcgagagccgaatgcagaggttcc

SEQ ID NO: 289916 - DNA, 75 bp, Homo sapiens
ggcggacggttttcgtacgggcggccgtgcgcgaggcgaggatgtacttgttaaagagttactctgccatgctag

SEQ ID NO: 289917 - DNA, 50 bp, Homo sapiens
tactctgcctcggggacgaaagcaggtggtgaactggctagaagggcctg

SEQ ID NO: 289918 - DNA, 98 bp, Homo sapiens
cactgaggatgtggagaaggccacagaagacccttttgaggacttctttgggaatcgaaggggtccccgaggaagcagaagccgagggacggggtcgt

SEQ ID NO: 289919 - DNA, 100 bp, Homo sapiens
agaccccgaaggaaaaggaggaattcgccgtgcccgagaatagctccgtccagcaggtgagaagccctaccactgcaactgggacggctgcggctggaag

SEQ ID NO: 289920 - DNA, 100 bp, Homo sapiens
gctactcttgagtgctagaatgatgaggatcttaaccaccattatcttaactgaggcacccaaaatgctcctgaaactctgatgagagccctggaacttt

SEQ ID NO: 289921 - DNA, 74 bp, Homo sapiens
ggcccgaagccttcctttatcgctttcaggctctagaccaagatagaacagcccttcagaaagtgaagaagtct

SEQ ID NO: 289922 - DNA, 75 bp, Homo sapiens
caaagaactccactgtcagcagctgcacacacacaatcatcctcttccagtggtagcgtgtttgggtctggaaac

SEQ ID NO: 289923 - DNA, 80 bp, Homo sapiens
gtttgcaaagtgctcagcaaagcaggctgtaggtttagttgagcaccggaaagaacatttggagcaagaggtggtggtgg

SEQ ID NO: 289924 - DNA, 82 bp, Homo sapiens
cgcgcactgaggaggcggcggccgacggtggcggcgggatgcaggacatgatccacatcgcggacaccaaggtcgccaggcg

SEQ ID NO: 289925 - DNA, 83 bp, Homo sapiens
cctgcacgagctcaaaggacactatgcaatcacccgaaagtttttgaaatcatgaatcctgtttatagtcctggatcttctgg

SEQ ID NO: 289926 - DNA, 75 bp, Homo sapiens
agaaacaaaatgtcaacaaattgatgggattttttatcaagcagaaatgcatcgaacaacgagaatcaagatcac

SEQ ID NO: 289927 - DNA, 95 bp, Homo sapiens
agaagcaggaggctaagaaagtggtgaatcccctgtttgagaaaaggcctaagaattttggcattgacaaggcgcctctgtcgaagagccttctg

SEQ ID NO: 289928 - DNA, 98 bp, Homo sapiens
tcgctgacttcggccttgcccgcatctatagtttccagatggctctaacctcagtggtgaatctggattgggaaagtcgacattaatcaactcattat

SEQ ID NO: 289929 - DNA, 100 bp, Homo sapiens
agatattccaggtagcccaagagctatcaggggaagatatgcatcagttccatcgagccattactacagtgttttaactcaaatgggtgatgaaaaggac

SEQ ID NO: 289930 - DNA, 100 bp, Homo sapiens
gaaaacagccaaaagaaaggccagcacctgaagaattgatgcaaatggttatgagccttagagtttctgaactccaagtactgttgggctacgccgggag

SEQ ID NO: 289931 - DNA, 100 bp, Homo sapiens
gcgggcgagctgcggctcggacgccagcggacacgcgggcgaggtaaaatagaactgcacgggaaacccatagaagttgagcactcggtcccaaaaaggc

SEQ ID NO: 289932 - DNA, 90 bp, Homo sapiens
ctggaagacatttatgaaagcccaaatcacctgtacttggtcatgcagcttgtacaagtccccagagtatgagtcccttggttttgagct

SEQ ID NO: 289933 - DNA, 97 bp, Homo sapiens
gtcaaagacttagcttttaaattaaaaaggaagctattcaccattgagaagccctacaggtggcaactactagcccaactgccaatactactggtac

SEQ ID NO: 289934 - DNA, 82 bp, Homo sapiens
cagtgtcagaattacaaggtgagatcagccgcccggccaagctatcttctcgctagcagcggagctggagtttgttcagatc

SEQ ID NO: 289935 - DNA, 100 bp, Homo sapiens
ctgagctgggtctctgactcacttctgactttaggttgaaatcacaaagattagacacctttttagataggtgttcttcagcaccactgacaacacggtt

SEQ ID NO: 289936 - DNA, 83 bp, Homo sapiens
actgtggctcccgcatctgcctccctgccccagcccatcctctctaaccaagccctaggcggcgtcgccgcagccgatcccgg

SEQ ID NO: 289937 - DNA, 100 bp, Homo sapiens
gctgcgggaaatcgggctgaagcgactgagtccgcgatggagatgaataatacggcagctagtccaatgtctactgcaacttcaagtagtggaaggagta

SEQ ID NO: 289938 - DNA, 80 bp, Homo sapiens
cctggctagccggcgacttgagtgacgaaccctacagcttggggcctgggctcctctgaccatcctcattgagaaaggaa

SEQ ID NO: 289939 - DNA, 100 bp, Homo sapiens
cggaatgcactacaacaggaaaatcatattatagatggagtaaagaaaagttgccagacggccagcattgccactgccagtgcatccgcccaggccagga

SEQ ID NO: 289940 - DNA, 100 bp, Homo sapiens
aaacacgtcatgaggaaggagcagcgcaagattcttgagtatcagaacaccaccttctttggtggaacctgtatatccatgattgattacctcctctggc

SEQ ID NO: 289941 - DNA, 74 bp, Homo sapiens
taagactccaggacacccctgaagccgagaaatgctctattaccaggttttaaacttcgccatgatcgtgtctt

SEQ ID NO: 289942 - DNA, 50 bp, Homo sapiens
tccaaagtagctgagactacagtgtttgccagctctgagcctgtgccagg

SEQ ID NO: 289943 - DNA, 100 bp, Homo sapiens
ggacatgaacaaccctcaggactttattgattgcttcctgatgaaaatggagaaggtacatgtcccagagcaagcacacggaggcccgggagctcatgta

SEQ ID NO: 289944 - DNA, 100 bp, Homo sapiens
cggagtacttcagaagttaatccacaaatgcttcaagacttgcaagctgctggatttgatgagatgggaaagggctccttcaagtatgcctgggtcttgg

SEQ ID NO: 289945 - DNA, 101 bp, Homo sapiens
agacgagggagaaatgttttgtttgactccagtgttaagagaagaaatgaggacatatcagtatcgtacctgccatcctggctggacttgaccccagggac

SEQ ID NO: 289946 - DNA, 98 bp, Homo sapiens
aaattggaaatggtcttgtcacctttcaacttcgaggactggaattccgagtagacccaaatgatttgtacattgtagaacccctcaagttttctcca

SEQ ID NO: 289947 - DNA, 90 bp, Homo sapiens
cccgctgcctgcaccatgtccgccagaggaacccgtttccccagtttgctgcttatgtgttcagaacctgctcctgcaagatgacgacgc

SEQ ID NO: 289948 - DNA, 95 bp, Homo sapiens
cagagcctatcagatcctcaacagctacaagccacaggcaaggtgagcatctgcctggagtgtaacagcagcaaactgcgcgggctgaagcggaa

SEQ ID NO: 289949 - DNA, 51 bp, Homo sapiens
tttccatcagtctcaacatagaagtgactctgacatcattagaagcatgcc

SEQ ID NO: 289950 - DNA, 98 bp, Homo sapiens
cagaagaaagacgttcaacgacttactggggagagaaagaaaaggaacgggagctgagagatattaaggctaagacatactgcatttgtaataccaaa

SEQ ID NO: 289951 - DNA, 118 bp, Homo sapiens
catttcttccacctcctccgactgtcagcactgctccacctctgattccaccaccggtgacaccacagccaaagccctatgggaagctttactgaacactaagcacaaagaggcagtg

SEQ ID NO: 289952 - DNA, 76 bp, Homo sapiens
ccggagacagcccaaatatcctcggaagagcgctcccaggagaaacaaagaatggatcttggagaatgtctgaaag

SEQ ID NO: 289953 - DNA, 74 bp, Homo sapiens
cccggcagcacgtgttcctggtttcaggggatggagaagtttatgtttgggatgtgaactcaaggaagtgcctt

SEQ ID NO: 289954 - DNA, 95 bp, Homo sapiens
agccccaaaggaatgatcccgctgaaagggagcactctgactagcccttgtcaagactttggcaaaaggatgttgctgctgacacgccgaccgcc

SEQ ID NO: 289955 - DNA, 98 bp, Homo sapiens
gccatcaagaaagtattgcaggacaagagatttaagaagtcatacatgtgaaattaaagatgacagtcaatgtggagaaacttttggccagattccag

SEQ ID NO: 289956 - DNA, 100 bp, Homo sapiens
tgtggccccaaatcgatgtgcatgcacttacggatttactggaccccagtgtgaaagaggggatggtttagacaacagtgtagcttcacctggtacaggt

SEQ ID NO: 289957 - DNA, 90 bp, Homo sapiens
ggccagagcgcagcgccgagcgcggcccgggcgccatcgagccttggcggcggacgtgcaggcccagaggcagagctacacaaccatgga

SEQ ID NO: 289958 - DNA, 101 bp, Homo sapiens
agaagccccagctgcactacgcggtcatggaaaatggaagatttgcaaaatacaaatattttacccatgtcatgatcaataagacagatatgctaatgata

SEQ ID NO: 289959 - DNA, 75 bp, Homo sapiens
aattttagaagttcatattgacaaagtacgttttgccaacctatgaaatggccgtgaaaatgcctgaaaaagaac

SEQ ID NO: 289960 - DNA, 90 bp, Homo sapiens
aggctagaaaaggatgactcaactgactttaaaaagatgttcattctggacagagtggaaggtgatacttgttcccttaatgagtttacc

SEQ ID NO: 289961 - DNA, 99 bp, Homo sapiens
aaaagttgtggcaatagaaacgaaacgccctcagaccctgtaatcattgacagtgccgtggaggtcccagcccccgctgcggttctcggaggtccggag

SEQ ID NO: 289962 - DNA, 100 bp, Homo sapiens
attcttctattcaccaatgaaacagcgtccgtctccctgaaggtttacacagtaaacaatgtgaatgtgatcaccaaaatacgcacagaacatctgaccg

SEQ ID NO: 289963 - DNA, 96 bp, Homo sapiens
catttatgaggaggtggcttatgaaagtgtgatgttcgcgtatttcttgacagactctaaaatagagctcaagcttgagaagagagaaccactaaa

SEQ ID NO: 289964 - DNA, 80 bp, Homo sapiens
ggaatcggtcgcctggaggaccagtatttcccatggagggtatggtttaggaatgatttattacaagcaagaaaaattca

SEQ ID NO: 289965 - DNA, 75 bp, Homo sapiens
acttcctccttgggccaaaacctcagaagaatttgttcacataaacagattgggaggcttgtggatcagaatctg

SEQ ID NO: 289966 - DNA, 83 bp, Homo sapiens
atatatcctggggaatttaagatgccaaagcagctcattcacatacagccagtacttctggaatagaaattctaaacattagc

SEQ ID NO: 289967 - DNA, 99 bp, Homo sapiens
ctaaactctactgatctcaaggatgttattaaaaagactgaatgtggatgtcagttcacgtcaaaactggaaggaatgtttagggatatgagcatctca

SEQ ID NO: 289968 - DNA, 50 bp, Homo sapiens
aatctgcgcaaccgctacgcgggcgaggagtctcgctctcagtcaaaatc

SEQ ID NO: 289969 - DNA, 90 bp, Homo sapiens
gtgagtgacgggcggtggcactctgtgcaggtgcagtactacaacaagtttcggagcaacatcccctgtcacctggttgatatctcttgc

SEQ ID NO: 289970 - DNA, 50 bp, Homo sapiens
gcggggaccgctgtgctctcgctttgcccgaagtttttacatacaaattc

SEQ ID NO: 289971 - DNA, 59 bp, Homo sapiens
tcacgcagctggctggcttcagtggaccactgtttgcagacaaggtcccaaagacagca

SEQ ID NO: 289972 - DNA, 95 bp, Homo sapiens
caacactggagtcatcaatgccccccagaagaaatcttcccaaggctgcagacaccgacggatttgctttgggagccagagtagctgccgccacc

SEQ ID NO: 289973 - DNA, 75 bp, Homo sapiens
aatcgctcctgtttgtcttctgctttggcccagattcgggaactggagcctctcctctgtcacagtgacaatcca

SEQ ID NO: 289974 - DNA, 100 bp, Homo sapiens
gtctagctggaggattgtaaatgcaccaatcagcatgctgtgtctagctcaaggtgcctggaatacttattaagaaacgatgcaaatccagggatccgtg

SEQ ID NO: 289975 - DNA, 89 bp, Homo sapiens
cccgggccctcctgaagaggcggcgctcagacaggtttgatgaaatcctggaggccagtgatgggatcatggtggctcgtggtgatcta

SEQ ID NO: 289976 - DNA, 100 bp, Homo sapiens
atctaagcaactgttcaatgggttaagtcactctgagaggagtgataccaatgaaaaaaggtcagttgattccagtgctaaaagggaaaaacctgtggtc

SEQ ID NO: 289977 - DNA, 100 bp, Homo sapiens
agaacccgagtgctgcttggcggcgaggtcgtttatacgcaatgcagactggaatgaagatcgatagtaaaactcctgaatgtcgcaaatttttatcaaa

SEQ ID NO: 289978 - DNA, 100 bp, Homo sapiens
ccaggacagaccaagagaataaggaccctgttgaaactgataaagccactgttggatttgagagcctggaggagtgttatatggcaaagatacttgttgc

SEQ ID NO: 289979 - DNA, 50 bp, Homo sapiens
gaaggaaattgtcccgaatccctgcagatatgtgtcacaaagatgtctac

SEQ ID NO: 289980 - DNA, 75 bp, Homo sapiens
cccggctcatcaaggaggccgtctgggttcgtgctggccgtgggcagcgccgtctttgatgccatgttcaacggg

SEQ ID NO: 289981 - DNA, 100 bp, Homo sapiens
aagtggagaagtttgacaggtcaaaactgaagaaaactaatactgaagaaaaaaatactcttccctcaaaggaaaatctatttaggtccacctgaggaaa

SEQ ID NO: 289982 - DNA, 100 bp, Homo sapiens
caccaaatgtgacttgactgtctatgcaattgacccccaaaccaacagagccatcgatagaaatgagctttttaatgtacatatgaagattgaagaaaag

SEQ ID NO: 289983 - DNA, 100 bp, Homo sapiens
tatcatatcatgttgcctttcattactacgttcagatctgtgcaggtgatgggcctacgccggcagcggaactatgctggccgctgggatgtcctgatcc

SEQ ID NO: 289984 - DNA, 102 bp, Homo sapiens
acgagccactcgcttggtgaagtcacaacagagtgcagatgttcatttggatttggaagaccgcctggcaaaatttatgaagacagaagaagccattatata

SEQ ID NO: 289985 - DNA, 82 bp, Homo sapiens
cttaaacttatgcctcaagactgttggaatcgaagcctcttaaaatggcagatgacttggacttcgagacaggagatgcagg

SEQ ID NO: 289986 - DNA, 82 bp, Homo sapiens
cgggtccgtgcgcccagcgtcccagggcccaggccgagcagatgaggacgatgtgcacagatgcggccgctgccaggcagag

SEQ ID NO: 289987 - DNA, 100 bp, Homo sapiens
gcagtagaaaaggtggcgtggctggcgattcgtgttcgtgagggccttttctggattctgaaaccttccttgtatccctcctgagacatctttgctgcaa

SEQ ID NO: 289988 - DNA, 82 bp, Homo sapiens
cggcagagcaaggggcttacgcagaaggacctggccacggagggtgtgaagacagagaatgaccacatcaacctgaaggtgg

SEQ ID NO: 289989 - DNA, 87 bp, Homo sapiens
atgctaaatattgcggcagttttatttcgatatctcaatgcctatactggaatagtgctacttcgatgcagaaaagaattctatcag

SEQ ID NO: 289990 - DNA, 98 bp, Homo sapiens
agaaaagatggaaactttggacttcaagaacttggattaaagaacttgacagccttatttagtgtctctgacaaaaccggccttgtggaatttgcaag

SEQ ID NO: 289991 - DNA, 100 bp, Homo sapiens
ttgcttattcccccaccatgggactctacctggggatatacatgcatgcaccaaaacgaggacaggtccagtggcattgcagagcacggatggttgcagg

SEQ ID NO: 289992 - DNA, 87 bp, Homo sapiens
gcggcggtggtatcggcggcagctgtgagggggttccgggaagatggtgctgatcaaggaattctcaagtgctgtggcttcaccaac

SEQ ID NO: 289993 - DNA, 75 bp, Homo sapiens
tttttaatggtggtattatggaaaattccaagtaaagaactgagggtcagattcccacagaacttaattgcccaa

SEQ ID NO: 289994 - DNA, 100 bp, Homo sapiens
gtgcaattggctgagaaactccttcctgcctttaacacacctactgggattccttgggcaatggtgaatttgaaaagaattcctagaggacctgtgcaac

SEQ ID NO: 289995 - DNA, 74 bp, Homo sapiens
tgaagctggcagccaaatgcatcctggcagcactgtaatggcgttgactggcgtcagaagctggactctcagcg

SEQ ID NO: 289996 - DNA, 80 bp, Homo sapiens
ttccagggctcccaggcagcagaatctgcccacagagttcgggtgctggagaatctggtaaaagcaccattgtgaagcag

SEQ ID NO: 289997 - DNA, 75 bp, Homo sapiens
aatgtgatcgtcatcacagtcaactatcgacttggagtactcgatcagcagttgtgtgatcctggtgaatttctt

SEQ ID NO: 289998 - DNA, 100 bp, Homo sapiens
tttttactgacattttatgttatttctcaagtatttgaaataaaaatggatgcaagtttaggaaatctatttggtatctcttccaaatgcacaatgaagg

SEQ ID NO: 289999 - DNA, 102 bp, Homo sapiens
cgtgaccgagagcgtgaccgagagcgcgaatatcgtcatcgttagaaggtttctgggtgtctctggggagcccctgggccagattttcctctagactccagc

SEQ ID NO: 290000 - DNA, 83 bp, Homo sapiens
gcaggctctgcgggaggtggagcacctgaagagatgccagcaggctgaaggtgatgtggccgccctcaaccgacgcatccagc

SEQ ID NO: 290001 - DNA, 74 bp, Homo sapiens
cagcggcgagcagaactacggcgagcggagcatcactttgggtcctcaggaatgacattacatgaacgctttac

SEQ ID NO: 290002 - DNA, 98 bp, Homo sapiens
aggaatcgccgtggcgtcttggtgttctccacgctggttcgcagtatccggagtgtgatgcagaagtaccttgcagagagaaatgaaataacctttga

SEQ ID NO: 290003 - DNA, 141 bp, Homo sapiens
ggtttcatgatggaaatggcttcatgggatggaggaatttctaggacagtgcaatttctagtaccacaggcctgctggaaatttccactgtggagcgaggcgtggtgagtctctttggagtgagaagtgccctcttcgttg

SEQ ID NO: 290004 - DNA, 75 bp, Homo sapiens
ctgcccgcgtccgaggctcgcgggcggcgggcccgggtggacgacatccttggagaaggcagcgacgacagcgac

SEQ ID NO: 290005 - DNA, 100 bp, Homo sapiens
ggaattttgccgatttcatgactaaccagtcctctacctggagtgatggtggctcagttcgtcctagttactggctggttcttcacaatctcaccccaca

SEQ ID NO: 290006 - DNA, 101 bp, Homo sapiens
cgggcgagctgcggctcggacgccagcggacacgcgggcgagggctattgagtggccagacttccccaacaaatgccaaattggagaaactggactctcag

SEQ ID NO: 290007 - DNA, 83 bp, Homo sapiens
cacaaatgaactgtctaattcttgcaagatcactttgggaagcagtgacatccaacctgtatcaagtcttctaatctgtgaac

SEQ ID NO: 290008 - DNA, 98 bp, Homo sapiens
ttgcttgtccctccttcccgtgactgaagcctcagaatgcagtcggctaatgttaccaggtgtggatagatgcagccgctcagatcttcttctctctt

SEQ ID NO: 290009 - DNA, 98 bp, Homo sapiens
accgtcccaaaatatggcaaagaaacctattctgagggtccatgccttcctagaacagtggggtcttattaactaccaggtggatgctgagagtcgac

SEQ ID NO: 290010 - DNA, 75 bp, Homo sapiens
caggaagtgtcacacagcagtcaagtatgtcccaaacgtcttgatgtcttggcattgcccattttcaagcaggaa

SEQ ID NO: 290011 - DNA, 100 bp, Homo sapiens
tcttctacctgacgctcgtcctcatcctggtcactagcggactcttcttcgccttcgagggacggcaaaacagaacagaaaggcggagataaaaagaggg

SEQ ID NO: 290012 - DNA, 76 bp, Homo sapiens
ctcaagacttctttgtggctttgctaaaggacaggcaaatcctgatcctaactgttgtcttggagtatttgggctg

SEQ ID NO: 290013 - DNA, 75 bp, Homo sapiens
ccaggcccgcgaccgtccgccagtcgtcccgagggcagctggtggaatttttgaagaaaatggaatctcgaggcc

SEQ ID NO: 290014 - DNA, 92 bp, Homo sapiens
tgaccacccgactctcatagaaaacgagagtatatgcgatgagtttgtgatgtgaaatttgaaagtaaagaacgaacagcatgtaaaggaaa

SEQ ID NO: 290015 - DNA, 75 bp, Homo sapiens
taaacctgctggtgacacgactcagacagaagcagaaagatgaaggtcttagaatcattgattggaatgatccag

SEQ ID NO: 290016 - DNA, 83 bp, Homo sapiens
ccgcgcgcagggcctgcagcgggagctggacggcgagcgcgagcggcgcgagaaagtccctggtgctgaaccgcctgcgtcca

SEQ ID NO: 290017 - DNA, 75 bp, Homo sapiens
caccactgtccaaattcagaagctcagaacgctggactctccctttgcagcttgaagagaacatttttattagtg

SEQ ID NO: 290018 - DNA, 100 bp, Homo sapiens
cgataacgcgcttttgctcctcctgaagtgtctttggtccaacgttgttccaggtgattgaaatctctgaatatcgaacccagctctatgaatatctaca

SEQ ID NO: 290019 - DNA, 75 bp, Homo sapiens
gggaggccgaggcaggcggatcacgaggctatggaaagggcaaatggaatggagctggatggtagaagaattcgg

SEQ ID NO: 290020 - DNA, 76 bp, Homo sapiens
aaaagccctacagatgcccctggtgtgactacaggttcggctttccagtttggcagcagcactacaaatttcaact

SEQ ID NO: 290021 - DNA, 100 bp, Homo sapiens
cgcaacctccgtgaggacggcgagaaggcggcgcgcgaggtcaagctgctgctgctcggttgtactcgtaaaacaaggatcatcgatgttgtctacaatg

SEQ ID NO: 290022 - DNA, 87 bp, Homo sapiens
cgcgggcgcctgaaggagttgttgtctcggcagcgcccgcggagacgtgaagagattactacaagggaagacataaattcaaagcag

SEQ ID NO: 290023 - DNA, 82 bp, Homo sapiens
ggagacggtcgtagctgcggtcgcgccgagaaagaactcttcatcttggcttatacctatactgcctgatatgctccgacac

SEQ ID NO: 290024 - DNA, 100 bp, Homo sapiens
gatccacagcagtgggggctgggagaactacgatgacccgcacaaaacccctgcctccccagttgtccacatcaggggcctgattgacggtgtggtggaa

SEQ ID NO: 290025 - DNA, 82 bp, Homo sapiens
gggctgccgggcgttctacctggaagattaccagttgaccagtgcagagctctcctccttaccagcctttagttcacctggg

SEQ ID NO: 290026 - DNA, 75 bp, Homo sapiens
atcagtggtcacctagacagcgacgatgatagggcggcgactggcggcgcgatggacctgaccgggctcctgctg

SEQ ID NO: 290027 - DNA, 100 bp, Homo sapiens
tctgaatttcctggacctacgcattggatcctcaaagaactggtcatcatcagatttgaaatatttaaagtggatacaaaactatttcagcaatgcagac

SEQ ID NO: 290028 - DNA, 100 bp, Homo sapiens
tggtgacttcacttttgagtgcaactgccttccaggacacagcattgttggttttgccatgtactattttacctatgacccgtggattggcaagttattg

SEQ ID NO: 290029 - DNA, 75 bp, Homo sapiens
gggacagaagatggccaagaagagaaagccccccagcatcaaggattgcttccaagtatgatcatcaggcagaag

SEQ ID NO: 290030 - DNA, 75 bp, Homo sapiens
gagtgatcactctcaatcccggtacaaggcgagtggataattccaacacaagactggcagtccaaattgaaagag

SEQ ID NO: 290031 - DNA, 74 bp, Homo sapiens
tcgttttcccgtccccgagagcaaggtcaaaatgcagatcttcgtgaaaacccttaccggcaagaccatcaccc

SEQ ID NO: 290032 - DNA, 50 bp, Homo sapiens
gtcactttagccactgctactacagactaagaaaaatggctttgtcagcc

SEQ ID NO: 290033 - DNA, 100 bp, Homo sapiens
ccaggagattccctgggcctgcaggaagcccttccgcggaccgaaagaaaacactcctcagctaccggtgtcagaggacggtgttgtttggggatggcat

SEQ ID NO: 290034 - DNA, 48 bp, Homo sapiens
aagaatgaagccgtggaccctcacggctttggtatcaggatgatgctg

SEQ ID NO: 290035 - DNA, 50 bp, Homo sapiens
tttacatggggatggggaatacaaggatcaagagaaatatggattattaa

SEQ ID NO: 290036 - DNA, 76 bp, Homo sapiens
cttcctggagttcacgactctgagtgctgaacaccaatcagggtcttcaggcctggaagattgaagacattccagc

SEQ ID NO: 290037 - DNA, 100 bp, Homo sapiens
tttctccttcctgggagcctgggcgcaggaggagcccccaccgagccgagtcccacgggccgtgcgcgtggccagtctgctgagcgagggagaggaactg

SEQ ID NO: 290038 - DNA, 100 bp, Homo sapiens
gctgcttgttgcattaatgtcagaacaccctaactctatgattcctgcttttgaccaaaggaatgggttacgccaaggacccttgtcatccattagagcg

SEQ ID NO: 290039 - DNA, 90 bp, Homo sapiens
ttattgatctaatccaaagtatcttataacttctggctggaattaagaaacacagtgctctgtgcctatacagtgtacggataaaacaga

SEQ ID NO: 290040 - DNA, 101 bp, Homo sapiens
gctggatttaagcactgctgcactttatgaggcctgcacagctgaccacagttgggaaacgttgctgtctttggattcaggatctttgcatggatctccag

SEQ ID NO: 290041 - DNA, 100 bp, Homo sapiens
ctcggaggatgcagcctttggactcaagaccacagagtattcagccatggcctcgctggctggtgggctggacgacatgaaggccaatctggccagcccc

SEQ ID NO: 290042 - DNA, 100 bp, Homo sapiens
tgctgcaaaccgagacaagttcaccccgaagtctgccgatgaggacggggacttggttgccttttccagtgacgaggaattgacaatggccatgtcctac

SEQ ID NO: 290043 - DNA, 75 bp, Homo sapiens
caggaattgggatcgtgtcgctgcgggtacagctctgccggggggggaaaaagtggtaccattttgggcgttctt

SEQ ID NO: 290044 - DNA, 100 bp, Homo sapiens
caaactacccattttcttttttggaactcatgagacactttcaaacctctggttgaaagaaatatacccagttcagtcactgcagtagaattccttgtag

SEQ ID NO: 290045 - DNA, 75 bp, Homo sapiens
aagagctctcctccttcttcctcaactatctcgctgacacgcaggagtctcagcagtccaattttggcactggag

SEQ ID NO: 290046 - DNA, 100 bp, Homo sapiens
aaccacctctgccatcctcgcctcagtcaaagaacagggggcagctggcattttatgctatgtgggagcctatgtcttcatcacttatgatgactatgac

SEQ ID NO: 290047 - DNA, 75 bp, Homo sapiens
cggctctcggagccggcgcgaatccggcccccgcagcgggacccgggttgcacactgggccacagaggatccagc

SEQ ID NO: 290048 - DNA, 101 bp, Homo sapiens
tcctagagttgttcagaatcctccaaaaccagtcatgaccactagacccacagctgttaaagcaacagagaaagaggcattattggagacttgacagcaaa

SEQ ID NO: 290049 - DNA, 87 bp, Homo sapiens
aaggcaaaaacttcgaaactcatgcaagacgccagcccccagcaggacagcatctttttctgagtccagggccgatgaggtggcgcc

SEQ ID NO: 290050 - DNA, 96 bp, Homo sapiens
ggaggaagcatttacaggccccaccgaaaaaccttaaagggctgagagcttgagggcaggggcactatggcagacaaagttaggaggcagaggccg

SEQ ID NO: 290051 - DNA, 83 bp, Homo sapiens
attaaactatgggattttcagggctttgaatgcatcagaaccatgcacggtagctacagcaagctgggtagcaggcagatcca

SEQ ID NO: 290052 - DNA, 111 bp, Homo sapiens
ctgagcccggcgcaggtgaccggcgcgcgggagcgctacggccccaacgggtgctttcttctgcgacctggtactcatctacctcatcaaaaagagagagttttaccgtga

SEQ ID NO: 290053 - DNA, 96 bp, Homo sapiens
tcggccgcacgtggaatgacccgtctgtgcagcaggacatcaagttcttgccgttcaaggtgtgtgacgaggccctcttctgcctccgggtgcagg

SEQ ID NO: 290054 - DNA, 90 bp, Homo sapiens
gaagaggaggaattaaattttaatgaagatattctgtgtccacatggtatctcacatgatgctattgctcaagagtctaaacgatattgg

SEQ ID NO: 290055 - DNA, 75 bp, Homo sapiens
aggtcttcacagagttcttccctgcctcctgacaaggtgatccgggcgggccccgcaggaattttatcccctcac

SEQ ID NO: 290056 - DNA, 58 bp, Homo sapiens
aaacaacataaagaacttaaatggactggatttctctctgatcaaacggacagttcag

SEQ ID NO: 290057 - DNA, 101 bp, Homo sapiens
cgggagtgtgggcgcggctgggctgcaggctcgcatcgcacaccgaattcaggaacttgaaaaccttcccgggtccctggccggggatttgcgaaccaaag

SEQ ID NO: 290058 - DNA, 90 bp, Homo sapiens
ctcagatcaagctaagtgtgttcacctccaacaagctcccattggatcttaagctatgttagatactaaagaaggcttccccacaaccca

SEQ ID NO: 290059 - DNA, 117 bp, Homo sapiens
aggagaaaatccagaagagcaaaggcgatgatgccacattacctaaaaccatgagctgttttccaagagcttcatctccatggaagtgcctgtcatggtagtaaatggcaaggatga

SEQ ID NO: 290060 - DNA, 100 bp, Homo sapiens
aagagacagcgattggacagaatttgtgaaggtgtcatggagaaactccagctgggcccagagattctgcagcgggaaaatccaaggcttatttatgcca

SEQ ID NO: 290061 - DNA, 97 bp, Homo sapiens
gatgactctgtggtgggtccctcagcccttctgagctctgtgctgaacaagaaaccccagttagtgaccgggggtgagagtttcagccgcttccttc

SEQ ID NO: 290062 - DNA, 100 bp, Homo sapiens
atacttgcttttgcttcagcgttctgtggttgtcaacaggttgtttttcaccattcagaacattgcctgaagcaggtccaccatgccgttagtaacgagg

SEQ ID NO: 290063 - DNA, 88 bp, Homo sapiens
cagcttacatcttgcatcctcaagcgatccatccttttacaatccctgctattattcgtccattcagcgtattgaactatgatccacc

SEQ ID NO: 290064 - DNA, 100 bp, Homo sapiens
cctgtgatggctgtgaaccagggcaggttagagcccaccttcgccttgataagaaagatgaatcttttgatagcaaaattactcagtgggaagacccaag

SEQ ID NO: 290065 - DNA, 89 bp, Homo sapiens
gagtgaccgagaccgcggccgggaccgaggaacccagtgacttgattgtaaaaatttacagagcggaatcatatgctggtctccaagag

SEQ ID NO: 290066 - DNA, 50 bp, Homo sapiens
tggctcaatatctaatcaatgtcagggcagtgggcaaaacgaaccagtcg

SEQ ID NO: 290067 - DNA, 75 bp, Homo sapiens
agaccattgcacttcgtgcccgaaacgccgaatataatcccaagggggtctgccacatgtagaaagatatcttcc

SEQ ID NO: 290068 - DNA, 100 bp, Homo sapiens
agactctgtcttggcggacacactcagttctcatgatgtaccaggatcaccgactgcctcactgcctcctaaaccaccaaaacctactactgtagccaac

SEQ ID NO: 290069 - DNA, 80 bp, Homo sapiens
tgttaaagctggtctgttctaactgaggcaaatgaagaggattcttccagttctctagtgaaggatcacctttttcagca

SEQ ID NO: 290070 - DNA, 100 bp, Homo sapiens
cctgtcctggcccccttcagcaaccctggttgggacaaacattcctatggttaccatggtgatgatgggcattcgttctgctcctcggggactggccagc

SEQ ID NO: 290071 - DNA, 98 bp, Homo sapiens
gaatttggtcctcagcaaccacctactctagtctatcatatgcaagtcacacggttggtttcacgccaccaacttcactgactagagctggaatgtct

SEQ ID NO: 290072 - DNA, 100 bp, Homo sapiens
ctcatccagcactcaggcgccaagaaggcctctgcctcagggcaggctcagagaagagagaagggcacagttacctaagtatcaacgtaatcttcctcgg

SEQ ID NO: 290073 - DNA, 88 bp, Homo sapiens
gctgtgctggccaatggtgtgatgaattccttgcagattgtctacaacctgttgtctctgcgcttcaactcacggatccgtgtgaaga

SEQ ID NO: 290074 - DNA, 110 bp, Homo sapiens
cgggagcatttaaaccctcaggcagcgtcaggaagcaccgaagccacctcaggaagcctgcaaccggccccacaaattctagcagtgccaagaagaaggataaaagagtt

SEQ ID NO: 290075 - DNA, 113 bp, Homo sapiens
gctggggcactgctgctcagcccccaacacctgagctcccagcactgctcagcacgcaggcatgtgaggaagctgggcttaaaggagactccagcaaatggagagacagacca

SEQ ID NO: 290076 - DNA, 96 bp, Homo sapiens
tatatggaaaatacagcgaccaactgattgtcgacatgcctactgataatcctggctttatcctgtggataaacgcagagtgaacgagtttgggga

SEQ ID NO: 290077 - DNA, 50 bp, Homo sapiens
cttatatctgtaagcactgcaggggacaactgtgggaaggctgggaaggt

SEQ ID NO: 290078 - DNA, 100 bp, Homo sapiens
ctcattgcgcgggactagggagccagatgacgtgtactactgtggaataaagtacatcaaagatgatgtcatcttaaatgagccctctgcagatgcccca

SEQ ID NO: 290079 - DNA, 100 bp, Homo sapiens
ctgtcacaggccatgctctggcaaaaacctcctgcccctcctaaagctgaagccaaagcgaaggctttaaaggccaagaaggcagtgttgaaaggtgtcc

SEQ ID NO: 290080 - DNA, 100 bp, Homo sapiens
cctctgatcagccatggtatcggcaaggatgtggagtcctgccatgatatggttgccaaggaaagtgtactgcagttttacccgaaagctaatatcgttg

SEQ ID NO: 290081 - DNA, 97 bp, Homo sapiens
tcatctcgctcggctgcgggaaatcgggctgaagcgactgagtccgcgatggaggcatttgcaagtaaaatcactggcatgttgttggaattatccc

SEQ ID NO: 290082 - DNA, 75 bp, Homo sapiens
ccacagtggagtccattatttcctctggcttcctcaaattcatattcacagatctttaagcaagcgacaatgaag

SEQ ID NO: 290083 - DNA, 75 bp, Homo sapiens
cacacgcttcctctccagagtgatcaagtgtgacccggcccgtgaaggtggagcggacccggaagcggtccgagg

SEQ ID NO: 290084 - DNA, 136 bp, Homo sapiens
agagcatcacgctgccccccgacgagatcttccgcaacctggagaacgccaagcgcttcgccatcgacatagccatcccaggcctcaggacctgagttctccgacgcccacatgacatggctgaactttgtccggc

SEQ ID NO: 290085 - DNA, 100 bp, Homo sapiens
agtggtcgtctagtcaaggccgcacaggaacaggagggtctgatgtcctccagtctgcagatctccaggggagcccaccagcctagtcaacatggcctcg

SEQ ID NO: 290086 - DNA, 82 bp, Homo sapiens
ttttctcagctgcctgctaacatagctgtttgcagttctaagttgtctggcgccgggagtgagaccctaaaacaaagaagaa

SEQ ID NO: 290087 - DNA, 75 bp, Homo sapiens
atccatctaaagcaccagtaaaatatggtgaactcattgtcttagggttaaacagtgcaccagttgagggatatt

SEQ ID NO: 290088 - DNA, 75 bp, Homo sapiens
ccatcaaaatcacagtggatgggccccgagaacctcgaaggtgctctcaagggacccccagctacagcagctccc

SEQ ID NO: 290089 - DNA, 100 bp, Homo sapiens
cgccgctggagaggggctcggcgcccggcggggactgcaggttgtactcagactatctctactttgcaagttcgaataaatccgcggacgacttccatga

SEQ ID NO: 290090 - DNA, 83 bp, Homo sapiens
ctggtgaagtggaaaggatggcccccaaatgctctggcgctgcttcagcaccgtggtcatctttctgttcctgctggacgagc

SEQ ID NO: 290091 - DNA, 74 bp, Homo sapiens
ggaggagccgcctgcgcatgctccatcgcctggatattgatgatgttaagaagttcaaaccgggttacctggaa

SEQ ID NO: 290092 - DNA, 88 bp, Homo sapiens
gaaggagggcgagcgaggaggatggcggagtcggggctcctgacgacggcaccgaaagcgaaggaagctcctgctcctcctaaagccg

SEQ ID NO: 290093 - DNA, 100 bp, Homo sapiens
ccaatactgggaggacaagtggtacacacgaaatgcttccagactgcacacttttacttagaggacagtacatcccctagagttatatccacacctccaa

SEQ ID NO: 290094 - DNA, 74 bp, Homo sapiens
aattgcctaaagaatgcgggaaacccacgtgacatgcggagattccagtcttcaggcagtgacagtggtgggag

SEQ ID NO: 290095 - DNA, 83 bp, Homo sapiens
ggaggaaggaacgaggcaaggagctaaagcagcgtgcgttcagccctggggtataatgggtctctcccaaatggcgatagagg

SEQ ID NO: 290096 - DNA, 75 bp, Homo sapiens
caactagagaagattggacagcaggtcgacaactctaaaatagagctcaagcttgagaagagagaaccactaaag

SEQ ID NO: 290097 - DNA, 156 bp, Homo sapiens
tgcggctcgcccgcctcgtctcccacgaccgcgtgggccgcctcagcccctgtgtgcctgcgaagccacctctcgcaggctctccacagatagagaacatccagccattctctgccaaagacctgtccattcgctcactgggggaccgaatccggg

SEQ ID NO: 290098 - DNA, 100 bp, Homo sapiens
acactttgttattggagaaacatgcagattatatcgcatcctatggctcaaagaaagatgattatgtgtacgatccatagcagaatttttggcaaagtct

SEQ ID NO: 290099 - DNA, 83 bp, Homo sapiens
agtatgggaaagatctaccttctggaagctactactacgtggtgcttggaaagataacgaaggaggcccaacttcattcaata

SEQ ID NO: 290100 - DNA, 95 bp, Homo sapiens
gggagtaacaccaactggaaaaccttgtatgaggtcaaatccgagaacctgggccaaggcgacaagagtaacagttacccctcaatgagcgaccc

SEQ ID NO: 290101 - DNA, 75 bp, Homo sapiens
aaagaaaatttctgtttcatgtgaagaattccgatttggtactttcagttctaagctggtctatgtccatcacct

SEQ ID NO: 290102 - DNA, 110 bp, Homo sapiens
catgagggacgtccgcgactacctggaagagaggctggaaatggtcagtaggacagaaggtaacattgatgactcgctcattggtggaaatgcctccgctgaaggccccg

SEQ ID NO: 290103 - DNA, 115 bp, Homo sapiens
tggcctctcggttccgcggcgcaccggagggcagcatgtcgcggcggcggcacagcgacgagaacgacgaatgcatacacagccacagctatcaacagcaccaacttctgcacct

SEQ ID NO: 290104 - DNA, 87 bp, Homo sapiens
tcttccaccaatatccaattccataccattcagaggccaggttaaagaggaattacggaggttgagctggtccggaatccctaagcc

SEQ ID NO: 290105 - DNA, 74 bp, Homo sapiens
ggacatggccggggacacccagtggtccaggctgaccccgcactacatctacccaccagccatcgtgcagccca

SEQ ID NO: 290106 - DNA, 87 bp, Homo sapiens
tcgaggacatgatgcccctgttttaagtctttcctttgatcctaaggacatctttctgggtttttaatgaccacaacaagcaagcat

SEQ ID NO: 290107 - DNA, 95 bp, Homo sapiens
gcgtctcacctctgtctccagctccgttgactttgaccaaagggacaatgcgggtggtcctgggctccaggaaccactgcaacttggggagttgg

SEQ ID NO: 290108 - DNA, 100 bp, Homo sapiens
agtgcagggaagcaactgcagagaggagaggagacgccgtgagcgggacgaccagatgtaccgagagcggctgcgcaccttgctggtcatcgcggttgtc

SEQ ID NO: 290109 - DNA, 50 bp, Homo sapiens
gtccagcaagtggaactcatttgtgctgcctgctgaagatgaagtcttac

SEQ ID NO: 290110 - DNA, 111 bp, Homo sapiens
ggtcggggctgtgatagaccaagggctgatcacgcggcaccacctcaagaagcgggcgctttctgtctctggtcgtgatgagaacagtgtggagttaaccatggctgaggg

SEQ ID NO: 290111 - DNA, 75 bp, Homo sapiens
gatttgctgtcgctttcacagagtcaatgaaggaaatggcacaagcgcagtgggggtgagtcaggtgctgggaag

SEQ ID NO: 290112 - DNA, 83 bp, Homo sapiens
gtctctgtcctggaagcagaaggagtctttgaaaaaggatgtacagttacccagcacgtgtacctcctcctcctcctattgct

SEQ ID NO: 290113 - DNA, 51 bp, Homo sapiens
tcttcaaatgggcattcacaaggctcccagccaacctctgataaaccctcc

SEQ ID NO: 290114 - DNA, 100 bp, Homo sapiens
tgacatacatcagtctgttacacaggtaacttactacttccagtcaatatgccgaccttagatgctccagaagagaggcggagaaaatttaagtaccgag

SEQ ID NO: 290115 - DNA, 100 bp, Homo sapiens
cggggaggtggcgggaccttggcggcgcccggagccggcgtggcgctcatcgagggacgcccggcccaagtggtatctccctgggataaaaaagaagaag

SEQ ID NO: 290116 - DNA, 75 bp, Homo sapiens
atcgtcttatagttgagaatttatcctcaagagtcagctggcagatggatttaaatctgaaagaacaggttgtca

SEQ ID NO: 290117 - DNA, 75 bp, Homo sapiens
ccagccaagaagcatgtgcgactgcaggagagttgcaaccagtgtggcagagagtctaagcttttgtcaaaattt

SEQ ID NO: 290118 - DNA, 50 bp, Homo sapiens
gacggcgttctggatctcaaagcggaatcccgttctgcttccagaagtgg

SEQ ID NO: 290119 - DNA, 100 bp, Homo sapiens
cttctgagggaggaggacaacaagtactgcgccgactgcgaggccaaagatcggacagctggcttttaaaggaatgaagagactcaatagaatccagtca

SEQ ID NO: 290120 - DNA, 87 bp, Homo sapiens
tggctgaagccaaggaatatgtcataaaggatttggtatcagcactaaattgtgggattactgtttccacaccctcactccagagaa

SEQ ID NO: 290121 - DNA, 75 bp, Homo sapiens
gggacctggagcttttccggaaaaaggtgctgtgactatctaagaaaacacatgtgccataccgggacagcaaga

SEQ ID NO: 290122 - DNA, 82 bp, Homo sapiens
gccgccgcgcgcccgcgccctccgcgcgacgccaggctcttgtcaggatggtgaagctgttcatcggaaacctgccccggga

SEQ ID NO: 290123 - DNA, 111 bp, Homo sapiens
ggggcccctcctgggtccgcttcgtgttcctcgctcgccccacaggtcttagaaaaataccccaatacacccatgagtcataaagaaattcttcaagttatccagagagaa

SEQ ID NO: 290124 - DNA, 83 bp, Homo sapiens
caccgtgtaccgcatgcagcagtacgacctgcagggccagccctacggagaactgcgctatcctcaaggagctggtgacgctg

SEQ ID NO: 290125 - DNA, 75 bp, Homo sapiens
ggtcagacatgtcatcaactcagctgatttgtccagtcattgtgccacaacattcaaagaagatggattatggac

SEQ ID NO: 290126 - DNA, 90 bp, Homo sapiens
gcagggaggatgtcgggacaccccggaagctgggaaatgttacagatgtagagctaaaacgactgaaggatgctttcaagaggacctgtg

SEQ ID NO: 290127 - DNA, 71 bp, Homo sapiens
gtacacagacgagcatggggaagatacagtggaaggtcttgatgcccaggttgtaaatggttacatgattc

SEQ ID NO: 290128 - DNA, 150 bp, Homo sapiens
caacatcataaatctggctttaatgacaacagtgttaaatatcagcaaagaaaacatgaccctcacagaaaatgttgtgtgatagctgagctttttacagaaggtgtaccattatttgatctctctcaacttttggcttatagaaatgga

SEQ ID NO: 290129 - DNA, 99 bp, Homo sapiens
cgacctgtgtatcctgatctgctggcaggctgtggaccccctgcgaaggacagtggagaagtacagcatggagctggtcctatagtacccctcctcagg

SEQ ID NO: 290130 - DNA, 96 bp, Homo sapiens
cgaacatcccggtgctaggggtgcaggaggaggacggcagcaaccgcagcagcagccttcaggtccttatgtcgtcagaagatcgagaagctcagg

SEQ ID NO: 290131 - DNA, 75 bp, Homo sapiens
atccccatggctgatgcagcaggcatcatccgctatgcaattggggacggcgggacccggaggctggagaaggcc

SEQ ID NO: 290132 - DNA, 51 bp, Homo sapiens
gctagcaatgagctcccaaagccatccagccttcaaatgtttatctggtgt

SEQ ID NO: 290133 - DNA, 100 bp, Homo sapiens
gttgtgtgctgccacgtccccagccgtgaagctgcatgaagagacgctgacctacctcaaccaaggcttttaaaaccaaggatggctatattgtagttgg

SEQ ID NO: 290134 - DNA, 101 bp, Homo sapiens
aatggcacaaagttctctcgatcagggcatacatctttcttcgacaaagggcaagaggcgcagatgttccagagattcctggagatcttactcttaagacg

SEQ ID NO: 290135 - DNA, 100 bp, Homo sapiens
taagcgaccaagtacttgtggcagttgtggtcagtttcgctttgattgctaccctggtatatgcacttttcagaattggtagggtgcccccctttttcac

SEQ ID NO: 290136 - DNA, 96 bp, Homo sapiens
cacctcatttgtctacaccatcaaggaggaaggcctggttcttcaagttctctcagctactggaagagaaaaacaccctttccattcagctctgcg

SEQ ID NO: 290137 - DNA, 90 bp, Homo sapiens
acaagagagaaagagtggatttcagcctgcacggatggtcttgaaacacaaatggtttttgattgtagaaggcatgaaacaaaaaatgtg

SEQ ID NO: 290138 - DNA, 50 bp, Homo sapiens
taccacaggatggagactacgagttttcctcctccgcctcctcctctctg

SEQ ID NO: 290139 - DNA, 75 bp, Homo sapiens
ctggtggacgtgcacccagaggaccaggcggcggtgtcccgacccaggctaagcttgagcatggctgagcaggag

SEQ ID NO: 290140 - DNA, 100 bp, Homo sapiens
gcacaggcgcctctgccctgcacgtggctgctgccaagggctacattgaggtgatgaggctggagtgcagtggcgagatctcgactcactgcaggctccg

SEQ ID NO: 290141 - DNA, 97 bp, Homo sapiens
ctgtggactcagcagcagcaactgtgggactttttgactacaattctcaacaacaggtggctgcgctggagcggcagatctttgacttcctgggcta

SEQ ID NO: 290142 - DNA, 72 bp, Homo sapiens
ccttcatcctcaacgccctcacctgacactgaccactactttctgcgctatgctgtgctgccgcgggaggtg

SEQ ID NO: 290143 - DNA, 83 bp, Homo sapiens
ggaaacgcttgtagggtttcaccagaacaaaatccagtctcatagcagaggagaatataatgtttacagcaccttccagagcc

SEQ ID NO: 290144 - DNA, 95 bp, Homo sapiens
acaccagcaagccgtgagagagaataccagcatccaggggcgtgaactgtcagatgaagaagtggggccattgacgtttagggatgtggccatag

SEQ ID NO: 290145 - DNA, 75 bp, Homo sapiens
ccgaggcgaggaggagcgctggcgagtgttcacgagcccacaggcccaagtgagagttatttgcaactggaggag

SEQ ID NO: 290146 - DNA, 97 bp, Homo sapiens
ccttcaacgcccgctacaagctgctcatccacatgcgagtgcactcgggcgagaagcccaacaagtgcatgaattccatacgacataatctgtcatt

SEQ ID NO: 290147 - DNA, 100 bp, Homo sapiens
ctgcaacctacggggtgtacttgggaacgaggggtgaagcggcccaggtgaggacaaatttacatgtattggagaccagaccagaagcccttctgaatta

SEQ ID NO: 290148 - DNA, 98 bp, Homo sapiens
aaagaaacgttctaaaacaccaccaaaaagttacagcacagccagacgttctagaagtgcaagcaggagccagggagtaacgaagagatcaaagagtt

SEQ ID NO: 290149 - DNA, 82 bp, Homo sapiens
cagggaaccctggtcaccgtctcctcagggtgctttcttctgcgacctggtactcatctacctcatcaaaaagagagagttt

SEQ ID NO: 290150 - DNA, 100 bp, Homo sapiens
accggcccaagagacctgccaaccagtttgtgcccaggtggccaaagtggagaagttcaaacacactcagagcaccaaggacagcctgcacgccaagtac

SEQ ID NO: 290151 - DNA, 75 bp, Homo sapiens
aaagactcaggacggacaagcacagtcttcggaaggcatttattgaaatggcaaccacagaggatgctcaggccg

SEQ ID NO: 290152 - DNA, 101 bp, Homo sapiens
actaccccttctggagaggtgcgctatgctgctgtaacacagtttgagctctacattaatcatactcctccaccactgtccaagagtaaggagagagaaat

SEQ ID NO: 290153 - DNA, 76 bp, Homo sapiens
ggagatcgccttctatgggggccatgagatgggaaagggctccttcaagtatgcctgggtcttggataaactgaaa

SEQ ID NO: 290154 - DNA, 100 bp, Homo sapiens
aagacttcttgctcatttctgagtattgtctttatatcctgacactatgaatgctacttggatgcctcttaagactgtcccaggtgccctccggctcttt

SEQ ID NO: 290155 - DNA, 100 bp, Homo sapiens
ggagctcctgacttgggaccatggtgattcttcagcaggcctcattgctacgatttcagagtaccctggtaatagctgagcatgcaaatgattccctagc

SEQ ID NO: 290156 - DNA, 138 bp, Homo sapiens
ccgagaccttcaaggtaacccaattgcgaatgccaccatctccgtggaaggaatagaccacgatgttacatccgcagaatcatgagacagactttgccttgtatctacttttgggggggccttttgccctttgggatg

SEQ ID NO: 290157 - DNA, 101 bp, Homo sapiens
agccccacgctggccggacagggccgcctgtcgccgggtctggagaaaatgatgtggaatataacaacatggaattagaagagggagaactcatggaagat

SEQ ID NO: 290158 - DNA, 88 bp, Homo sapiens
ccactatgcaaaatgtaacccatacatggattctccacaatcaataggctgctttgctggctctgcaagaaaatggactagacgcaac

SEQ ID NO: 290159 - DNA, 100 bp, Homo sapiens
acgccatggcccccagcatgggctcctctgtcaatgacgctttaaagagagataaagatgccatttatgggacatgtcatccagtgacagtgactcggac

SEQ ID NO: 290160 - DNA, 97 bp, Homo sapiens
ctgaagttaatttttttttttttccaaacacaagaatcaaagaatcttcaggatggcagcaagtgtttacgagcccatatttggattggactatcga

SEQ ID NO: 290161 - DNA, 50 bp, Homo sapiens
gttactatggaaactgccgttctctcctgattgactggggcgactttggg

SEQ ID NO: 290162 - DNA, 75 bp, Homo sapiens
gatccaacagatcattaccatgcgcagcctttagaggtgaaatgacaatggatgctctgttggctcgattgaaac

SEQ ID NO: 290163 - DNA, 100 bp, Homo sapiens
ttccagtagaaaactctctctgcaagtccttaactttgttcactcattccagaacccagtgacttgattgtaaaaatttacagagcggaatcatatgctg

SEQ ID NO: 290164 - DNA, 90 bp, Homo sapiens
actgattttatgggaaaattaagcagatgctccagtttgagaaacctggatctgcgatctgtttgtgatgaaagaaatgacctgccgtga

SEQ ID NO: 290165 - DNA, 75 bp, Homo sapiens
ggaagagttttatagtaaggcattagcaagctatagtcagcagactggacctcaacaacctcagcagttccaggg

SEQ ID NO: 290166 - DNA, 80 bp, Homo sapiens
agatatctggccgcctctgccgcagctggagcagcctcccgcgacgatgcccctcaacgttagcttcaccaacaggaact

SEQ ID NO: 290167 - DNA, 98 bp, Homo sapiens
gaccataagggcttaactcatatatttaacccccctccaaaaactcctgccctccactgactccagagagggagatccccagtacttgactccatcac

SEQ ID NO: 290168 - DNA, 100 bp, Homo sapiens
ggtgacagttctacactaacaaagcaagaacttaaattcataggctttgaagacaagattcccaaaaggagattctctgagatgcaaaatgaaagacgag

SEQ ID NO: 290169 - DNA, 75 bp, Homo sapiens
tttggcccctgcctactcggaatggaacaaaggcctcaggagtgcaagtagctgatgaagtatgtcgcatttttt

SEQ ID NO: 290170 - DNA, 83 bp, Homo sapiens
tgtttgtggatcgctgtgatcgtcacttggcagaggtggaggagacactgaagcgactgcagagccagaagggagtgcaggga

SEQ ID NO: 290171 - DNA, 100 bp, Homo sapiens
atgaagctctcgaggctgctaagagactaaacagtctccattctggagcagcggttgacactgacagaagacaagctgaagcagtgtctggagaaccagc

SEQ ID NO: 290172 - DNA, 82 bp, Homo sapiens
aaggcgtgggcgacccggtgtgtggcgcgcccagagccccgcgtttcagccctagggaagccgccaccggcacggccaggcc

SEQ ID NO: 290173 - DNA, 114 bp, Homo sapiens
gcaaagaaatggcattggagagcccggacatctgctttatatttctctcagaccattcccatcagtgagcattacagatagagaacgtcacttttcaccatgaagggttcttct

SEQ ID NO: 290174 - DNA, 74 bp, Homo sapiens
gtttgtgaaacagagaaagataggcggccatggtccaaccttgaagatccagtccttctgtggaacttctgaac

SEQ ID NO: 290175 - DNA, 75 bp, Homo sapiens
caacattcttggcattacgcaggccagcaactcccagctcaatgcaatgctgagatctgtatctgtggacctgaa

SEQ ID NO: 290176 - DNA, 100 bp, Homo sapiens
tgctgagcccgtccgtccgccgccaccacccactccggacacagggtaacaagatgctcaactatagtgctcccagtgcagggggttgcctgctggacag

SEQ ID NO: 290177 - DNA, 100 bp, Homo sapiens
aatccaaatactgcatatcagaaacaacagagccggtgccatctgtgggggctttgggccaggggtctccggacagcatgagcgtgggcttcatcggcgc

SEQ ID NO: 290178 - DNA, 100 bp, Homo sapiens
agctggcagcagcatctcagcccaagagaagattgactttgaagatgtgattgcagaaccagaagggacacacagttttgacggcatttggaaggccagc

SEQ ID NO: 290179 - DNA, 76 bp, Homo sapiens
ggaaggatatctcacgaatttgctttgtctcatataatggcagcaaaggctgtagcaaatacaatgagaacatcac

SEQ ID NO: 290180 - DNA, 75 bp, Homo sapiens
ctttggtgaattcgtttcctgaaagtttatcgcatacttgtactgggttagatttgcatctgctggtgatgatgg

SEQ ID NO: 290181 - DNA, 100 bp, Homo sapiens
aaggagcagctggaggagcagctgcgcccgctgccagcacacgactacttcgagttcttcgccgccgacctgaggtctacttccccagcaggacagcatc

SEQ ID NO: 290182 - DNA, 98 bp, Homo sapiens
gaggaagtgagagcagcggcagccggcggtgcagcagccggccgacccagagtgctggagcattggatttgctaaaggagcttaagaatattcctatg

SEQ ID NO: 290183 - DNA, 50 bp, Homo sapiens
ggaaaatgtgatgcatgtctcagtggtacaggtttgcagattccgccagc

SEQ ID NO: 290184 - DNA, 87 bp, Homo sapiens
aagggaaggcgcgagtgaggaaaggaggtactgtaggttgggctggtgtacatgtttaacctcatcgtgggcacgggcgcactcacc

SEQ ID NO: 290185 - DNA, 100 bp, Homo sapiens
tagaccgctgctattctgtctactgcaaaaagatccatgcccagtggcagaaagagcaaatcatggaggaagataaaaaacatggtgcactggtctccct

SEQ ID NO: 290186 - DNA, 100 bp, Homo sapiens
caatgagcacatgaccagcttagcttctgtcctaaagggcccagtctatggcatgaataggcttccaccccaacagcatatttatgcctatccgcaacag

SEQ ID NO: 290187 - DNA, 75 bp, Homo sapiens
actgtctcctggtgaccgagcacccgcctccgggcatcttcaactatgaacacaatgacgtacagaagaaaacct

SEQ ID NO: 290188 - DNA, 80 bp, Homo sapiens
cggcgggaggagcctgttcccctgagagtgatcagcagctggactgtgccttggacctaatgaggcgcctgcctccccag

SEQ ID NO: 290189 - DNA, 98 bp, Homo sapiens
taaccacgaccatcaaatccgtgtcggagtccttacagatattacaccaccatattgcctcagtagagaaacttgctttgactacttctggatgcccc

SEQ ID NO: 290190 - DNA, 98 bp, Homo sapiens
gggagaggaattacgggaacagaaagaaaagtccgaaagagctgaattcaaagaagctttttcactatttgacaaagatggtgatggaactataacaa

SEQ ID NO: 290191 - DNA, 98 bp, Homo sapiens
cggctgctcctcccctccccgccgactgtacagtggaagcctggtgcacggactatgccagcaactgctagcatcgacctctgtagaaagtctcctga

SEQ ID NO: 290192 - DNA, 98 bp, Homo sapiens
agccaagctgcacgatgtggagcgttatgaagacagtatggagtttccagaccatagtagacatttgctacagtgtctgagcgagcagagacaccagg

SEQ ID NO: 290193 - DNA, 76 bp, Homo sapiens
cggagcccggctcccgcaccatggaggaggacgacagctacgtccctgaaaaacagctgaatgatattgaagattg

SEQ ID NO: 290194 - DNA, 82 bp, Homo sapiens
ccatctgcttgctgtataagaacctggccaacaagattgtccccattgccatccagtacttggaccatgagactgtttcagc

SEQ ID NO: 290195 - DNA, 75 bp, Homo sapiens
tctgcccctgccatgaccactgtggagaacaaatccaagattagcacagtgaagctggtggtaactcgagcgttg

SEQ ID NO: 290196 - DNA, 75 bp, Homo sapiens
aggagcatctacccatggacagacatgtcttcccatggaggtctgctcaccaggtggccagataccgcccacgtg

SEQ ID NO: 290197 - DNA, 73 bp, Homo sapiens
aggggagcaaattttactttctgacaatgcagcttctcttgcagtgcaggttttcatctctgtgaactgctta

SEQ ID NO: 290198 - DNA, 75 bp, Homo sapiens
aacgtggacaaagctgttgtctcagggagcacagaagtctatgttaacaatgaatgggcaaccagtgttggggaa

SEQ ID NO: 290199 - DNA, 75 bp, Homo sapiens
gggagattggacaagtatgctgcaagtgagaacatatttaacagaggccagctccaccagggcaagggtttttcc

SEQ ID NO: 290200 - DNA, 97 bp, Homo sapiens
gttgccgatgactatatccacaccgcagcctgcttacatagcctggctttagaagagcccacagtcatcaaaaagagcaggtgccgagaggttgccc

SEQ ID NO: 290201 - DNA, 100 bp, Homo sapiens
cggaagtcccccgagagcgttgctttgatctgggagcgcgatgagcctggaacggaagtgaggatcacctacagcctgctggagtatgatactgtgacca

SEQ ID NO: 290202 - DNA, 100 bp, Homo sapiens
tgcttcccgtccgtgtcgcggccctgcggttggcggcctcctcgtggagcggagcaaggaattaaacaaccaccatgtcgagcaaaaaggcaaagaccaa

SEQ ID NO: 290203 - DNA, 95 bp, Homo sapiens
cagtgacgggtctggagtgcgtgggggaccggctgttggcggtgcctccggagccagcgtggtggccatagacaacaagatcgaacaggccatgg

SEQ ID NO: 290204 - DNA, 100 bp, Homo sapiens
aaatcctgctctggccggattccagactcgtgggggaaaggctgggattcatccaaccatcatttctgagtcattccagaaggccctggaaaagggcatt

SEQ ID NO: 290205 - DNA, 100 bp, Homo sapiens
ttggcagacaacctagtagaagaaagccaatgggggaccaacaaggcaccatggcgcagaagggccaactcagtgacgatgagaagttcctctttgtgga

SEQ ID NO: 290206 - DNA, 82 bp, Homo sapiens
tgaagatatctgtgaagactctgatatagatggtgattatagagtggcaccgttcctgccttgggcgctcatgggcttctcg

SEQ ID NO: 290207 - DNA, 83 bp, Homo sapiens
cgttttgaaaatttcatcacctgaggtggtataagttgaaatccaaaccaggaaagaaggacaaggagcgaggagaaattgag

SEQ ID NO: 290208 - DNA, 51 bp, Homo sapiens
atcagagattgcgccctcagcgaacagtaaaaacaaccgtcctctccgtac

SEQ ID NO: 290209 - DNA, 75 bp, Homo sapiens
tggctctggaattgctactgctgcctctgtcactcctggtgaccagcattcaagcttcaattagtggagacacag

SEQ ID NO: 290210 - DNA, 100 bp, Homo sapiens
tgcctcctccctgctttgttccaataattttgtgctcggtacatgagaagctggggtcagagctgccaggcctggagccagccctgcaggtggacctggt

SEQ ID NO: 290211 - DNA, 49 bp, Homo sapiens
cctggctcggagcagcagcctctgagccccccgaatccaagcccaactt

SEQ ID NO: 290212 - DNA, 100 bp, Homo sapiens
aaggtggcagagaaggaaggatggcctctggacatccgagtgggtttatggtaaaacaggcagagaacatctgcaggcaagccacaatccagccaagaga

SEQ ID NO: 290213 - DNA, 100 bp, Homo sapiens
acgcagctggatgtaccgcatgtgatcactctgggactcgtggggctgcagcaccgagacgagttgtactgctgtcacaggaaatggacgctggattaca

SEQ ID NO: 290214 - DNA, 99 bp, Homo sapiens
cgccgccatcatgagggaaatcgtgcacttgcaggccgggcagtgcggcaaccaaatcggcgccaagcacgacattgaacaggaggacccccgcgggcg

SEQ ID NO: 290215 - DNA, 74 bp, Homo sapiens
gaagaagagaccatccatatttccaggaatggaagttggatacactttgtgacttgtacgagacactgaccatt

SEQ ID NO: 290216 - DNA, 50 bp, Homo sapiens
gttctcagcagagaactcaaccgctccgggaattctgaagttctgggcct

SEQ ID NO: 290217 - DNA, 78 bp, Homo sapiens
gccgaggcggtgctgcaagagaaggcactcaagtttatggaaatgggtcctgatgaatatgaagagatggaagaagag

SEQ ID NO: 290218 - DNA, 80 bp, Homo sapiens
cggggaccagcagctgtcgccgccgctctcaggcattgatcaatatgacagagatagcatcataaatgactttaagaatg

SEQ ID NO: 290219 - DNA, 79 bp, Homo sapiens
cgggtcttgggtcctccgagagcagcagcgatggctgctcctgtcccgtgggcctgctgtgctgtgcttgccgccgccg

SEQ ID NO: 290220 - DNA, 100 bp, Homo sapiens
cgacaagaaggtcaaagccaaggacgtcgatgagtacaaactgaaagaccactatctggagtttgagctttcggaaaatgtgattgatcgaatgaaggaa

SEQ ID NO: 290221 - DNA, 102 bp, Homo sapiens
gataaagatgatgatatccttctcaaccttgtgggatgtgaaaactctgttactgaagaacaagaaactcctttacgagaagatgaagggaggagagagacg

SEQ ID NO: 290222 - DNA, 78 bp, Homo sapiens
gaagcacctggtcaccatgaccttggactatgggatggaccagaaaaatggctacaaacttcctagcacatgagaaga

SEQ ID NO: 290223 - DNA, 82 bp, Homo sapiens
atcatcctgctgggcttcgtccagatcgggaagggttaatttggagtggcccctggagtcagtttcctacaccatccgaggc

SEQ ID NO: 290224 - DNA, 100 bp, Homo sapiens
gggaacctaccatggtatgacactgaaatctgtaacgaatgacagcccatatcaaggcggtgtattctttttgacaattcattttcctacagactacccc

SEQ ID NO: 290225 - DNA, 83 bp, Homo sapiens
gtaaagtcgagtatctggtgaagtggaaaggatggcccccaaacccatggcgaattgtggatgattgcggtggagccttcact

SEQ ID NO: 290226 - DNA, 51 bp, Homo sapiens
ctacgcagagctcatcgtccttgaaggccagggatgtaccgcctacgacgt

SEQ ID NO: 290227 - DNA, 100 bp, Homo sapiens
gtgatgaaggggataacttctatgtgattgatcaaggagagacggataattatatccagatcgagagacagaagattctgaaagggttcaatgaaatgag

SEQ ID NO: 290228 - DNA, 85 bp, Homo sapiens
gcactgaagagctgaggaaccctgacttccagaaaaccagtctgggtaaaatcacagctgacagtgaagatagtactgtgtccat

SEQ ID NO: 290229 - DNA, 80 bp, Homo sapiens
tttatatcctgacactatgaatgctacttggatgcctcttaagatgagattgtggggaacctgggtgaaggcacctttgg

SEQ ID NO: 290230 - DNA, 82 bp, Homo sapiens
ccttacgtcagttgtaaattacagagaacctaagtctgtttgcaaagcacctgaactgcctgataggcagacactgatgtgg

SEQ ID NO: 290231 - DNA, 97 bp, Homo sapiens
cagaggaacgagctgagctggcagagtcctacaaaagaccccacagctgtagagagagcaaacttgttaaacatggctaaactgagtatcaaaggac

SEQ ID NO: 290232 - DNA, 75 bp, Homo sapiens
ggagcgtcgcgcagtcgggaggtccgggaaagtttctttggaggtcccacgacagtgatgtccgagggcgcccgg

SEQ ID NO: 290233 - DNA, 100 bp, Homo sapiens
gggaagggtccaacagtcctggtcattcagactgcagttccccaggccaagtcctgtatctgccatgtctgtggcgtccacctcaacaggctgcattcct

SEQ ID NO: 290234 - DNA, 100 bp, Homo sapiens
cgagtccgacctctacaactgggaggtggccatcttcggaccccccaacaccctctacgaaggcggctacttcaaggacttcatagacctcacgttgtcg

SEQ ID NO: 290235 - DNA, 100 bp, Homo sapiens
ggccgtccagcagatggcggatgccctgcagtacctgcagaaggtctctggagacatcttcagcaggactgcatcaaaacatgtaaacaaggacctcggt

SEQ ID NO: 290236 - DNA, 98 bp, Homo sapiens
gaaagcctgcagcggcgtgtagaagacgaagtcaacagtggagtgggccagctgccactgcagagccccgccatggaagacacgccgttggtgatatc

SEQ ID NO: 290237 - DNA, 83 bp, Homo sapiens
gccgtcccttcgcctccttcaccgccgcagaccccttcaagttctagtcatgttgcagatctgatctcttctgaacacctcat

SEQ ID NO: 290238 - DNA, 97 bp, Homo sapiens
agtctgtgccgacaagatggcggacggggagctgaacgtggacagcctcatcacccggctgctggagggtgtcatggagaaactccagctgggccca

SEQ ID NO: 290239 - DNA, 50 bp, Homo sapiens
gagccgccgcccgggctggactgcgttttcggctttgtgagaaaccttac

SEQ ID NO: 290240 - DNA, 87 bp, Homo sapiens
catggatacacatttgccaatctaggagagcatgagtttgtagatttgtcccgctggctggaagcctggcagtgacacgattaagcc

SEQ ID NO: 290241 - DNA, 98 bp, Homo sapiens
tctgtaatccagacagcctgcaaacatataagatctggagacccaatcttcctgcctgacacagctcacttcaagaagtgcacaatgtcagaacgtgg

SEQ ID NO: 290242 - DNA, 90 bp, Homo sapiens
ggagtgtcctggacccagctgagcgggcggtcattcgcatcgcagctcctgacccctgaggattaccagcgatttctagacctgggcatc

SEQ ID NO: 290243 - DNA, 100 bp, Homo sapiens
ttccggtgaaccatggcgccagttcagaggacaccctgctgaagcaagtaactggcagaagttttggtgataaagattttcggacaggtttagaaaatgg

SEQ ID NO: 290244 - DNA, 50 bp, Homo sapiens
gatatggcgcaactgcggcgcaaacgttcctggatccgaacactgccccc

SEQ ID NO: 290245 - DNA, 82 bp, Homo sapiens
tgggattcgcgctgctgggcacccacggagcctccggggctgatcatgatgctgccgccaccgccgccaccacggagcgaga

SEQ ID NO: 290246 - DNA, 100 bp, Homo sapiens
cacctccaggatcaggatgcagaggaaggaggagacagttactgtctatcccgcagacgtggtgctctttgaagggatcctggccttctactcccaggag

SEQ ID NO: 290247 - DNA, 71 bp, Homo sapiens
cagccaaagagctggctcagagaggtgactccccggacagctcaacaccaaagctttcgcgggcacagcgg

SEQ ID NO: 290248 - DNA, 101 bp, Homo sapiens
atcctggctgagaacctcaacaacccacatgacattgtcatcttccatgagctgaagcagccaagagggaagacactgatcaaggtggcagaagctgaaaa

SEQ ID NO: 290249 - DNA, 74 bp, Homo sapiens
cctgtttctcacatttgtttcattgaagaaatagttaagaagcaaagggagatattaccacacagaagaggaga

SEQ ID NO: 290250 - DNA, 90 bp, Homo sapiens
aggtagttatggaggaggtgatggtggatataatggatttggaggtgatggaggagatgttaaagtaacccatcttgcaggacgacattg

SEQ ID NO: 290251 - DNA, 100 bp, Homo sapiens
gccatgtggatgaaataaaggaatttcttcactttttaacggaccagttcagacgaagggaacgtcatcgtttggaaagcgtcgcaataagacgcacacg

SEQ ID NO: 290252 - DNA, 75 bp, Homo sapiens
gagagaaacaataggacggaaacgccgaggaacccggctgaggcggcaggtggagccgccaccaaaatgcagatt

SEQ ID NO: 290253 - DNA, 88 bp, Homo sapiens
gatgcagacactgttgaactctgtggtgcgcttaaggcgtcctgcctctgcggctctgccccctgcatcctgtgcagctgctgccccg

SEQ ID NO: 290254 - DNA, 75 bp, Homo sapiens
tgcctcagcctcctgagtagctgttctgtggctcctgatggatctgagaagatggacgtggaggatgaaaatctg

SEQ ID NO: 290255 - DNA, 83 bp, Homo sapiens
tggcaatggcacaaagttctctcgatcagggcatacatctttcttcgacaaaggcttgatggaccagacaaataggatgatgg

SEQ ID NO: 290256 - DNA, 100 bp, Homo sapiens
attggtggaacttgttggaaatggaacatacgggcaagtttataaggtttatttcaatctacagaggacccagccacacctacaaggtccagagactgac

SEQ ID NO: 290257 - DNA, 90 bp, Homo sapiens
cgcggcgcaggcaccggcccggggagaggcaccatgagcggtcttcgatgccaagaacatgatggctgcctgtgacccccgccacggccg

SEQ ID NO: 290258 - DNA, 97 bp, Homo sapiens
ccaccatctttcgggctgccgagggtgttcttgacgattaatcaacaggtcaccgaggaggagcccagctccaaccacacggtcatgatccaggaga

SEQ ID NO: 290259 - DNA, 90 bp, Homo sapiens
agtctgaccctccgccaggcaaaaggaaggtgttacagttcgagtgcctcaaacaaccacatatgttgtaaacaatggactaaccctggg

SEQ ID NO: 290260 - DNA, 75 bp, Homo sapiens
catcccccaatcctctcatcttgtcctacctgaagtatgccattagttcccagcaccttgcagagtgaagtcaag

SEQ ID NO: 290261 - DNA, 100 bp, Homo sapiens
cggcgctttccccgcaagatggacggtttcgccggcagtctcggttgaccagtatctctaccacatgcgcctctctgatgagaccctcttggagatctct

SEQ ID NO: 290262 - DNA, 83 bp, Homo sapiens
ctttgtccttactcaagttctcagaagactcatctaactagacatatgcgtactcattcagccatggacctggctcaggcagg

SEQ ID NO: 290263 - DNA, 83 bp, Homo sapiens
ttcaaaggcaagagcctcaaactcaacactgcagaagatggtccagggagtcggtagtaagggatggcgggacgtcaccacct

SEQ ID NO: 290264 - DNA, 98 bp, Homo sapiens
gaagacactccccagggcagaaatagcgaccatggcgaggctcttgtcaggatggtgaagctgttcatcggaaacctgccccgggaggctacagagca

SEQ ID NO: 290265 - DNA, 82 bp, Homo sapiens
tctgaactgactgccccgcatcaccggagcgtcccagctgcgaggagcggagcgggcactggacacaatgaactttgagatg

SEQ ID NO: 290266 - DNA, 88 bp, Homo sapiens
tcgggtacgcctgcattacacctggcgggagctctggtcaggtaccgaagtgagaaggtgacaatcagttacgcagagtatattgctt

SEQ ID NO: 290267 - DNA, 73 bp, Homo sapiens
cagtggatttgccagcagtctgaggagaaggcagagcccccccaggctatgaatgccctgatgcggttgaacc

SEQ ID NO: 290268 - DNA, 75 bp, Homo sapiens
acgtccctcaaaccttgcttctaggagataaaaagtaagactttgaccccgacgcaggcttcagtgattgccgcg

SEQ ID NO: 290269 - DNA, 90 bp, Homo sapiens
caaccccggtagcaaactgatgacttttccgtgctgatttctttcaacctcggacaacgtctgacatgagccgagtgttctgctcacact

SEQ ID NO: 290270 - DNA, 74 bp, Homo sapiens
gaagactcgatccgcctgcctgcgcacctgcaactatcgtaccatggaaagtattcagacagtgccttcatgag

SEQ ID NO: 290271 - DNA, 95 bp, Homo sapiens
actctttccgccctaatggaggtctccagtttcgtattctaccttgtaaatactgttatttgtatatactgtaaatgatgacatcggtgggcact

SEQ ID NO: 290272 - DNA, 75 bp, Homo sapiens
gatctcttcagggtggaatacgtcattggctttcatgagaaggacaagaagccatattgccgaaaggatttctta

SEQ ID NO: 290273 - DNA, 83 bp, Homo sapiens
ctaagaactacctgagctacctgacagccccggattattctgcctttgaaaatccacattcatctcaatggaaggatcctgcc

SEQ ID NO: 290274 - DNA, 50 bp, Homo sapiens
gccttgccccttttggaacagaaacagaaatcttcccaaggctgcagaca

SEQ ID NO: 290275 - DNA, 76 bp, Homo sapiens
gagtcaagattgcggggactaatgccgaggtcatgcctgcccagggatttttgcacgagaacatggatcaaataag

SEQ ID NO: 290276 - DNA, 75 bp, Homo sapiens
gctgaaaccagtgggtagatgtcgttctgaaacgcagcaacatggccaacgccctggccagcgccacttgcgagc

SEQ ID NO: 290277 - DNA, 75 bp, Homo sapiens
cctgtggatgccgtcaagctgaacctccctctcagcctgggcggcacagccagatgcgagatgcgtctctgctga

SEQ ID NO: 290278 - DNA, 98 bp, Homo sapiens
cggcgggtactgcgttagtgattagagtttcttccctgccggaggtgggatacacggtagcatcatggtcgagattcatcatggaaggctgcagtaca

SEQ ID NO: 290279 - DNA, 83 bp, Homo sapiens
tgtaggaaggaacttggttccccctccctcagcttccgccccaaaagcaattctgtggtgttcttggtcacacatttatggag

SEQ ID NO: 290280 - DNA, 100 bp, Homo sapiens
ctgggcgggaccctggtctccgcgtacggtgtactaatggtcacttgatgtgcgctggctgttttatccacctactagcagatgcccggctgaaggagga

SEQ ID NO: 290281 - DNA, 90 bp, Homo sapiens
gcccggaacactggcatcatctgtaccattgcaacacagtcactcctggcggcaaaccaaacaaaaccagagtcatctggggaaaagtaa

SEQ ID NO: 290282 - DNA, 83 bp, Homo sapiens
tctttgaaattctacaaggaacttcaggcacatggtgctgatgaggatgctgaaatttctggaaaagacaatggaaatcaggg

SEQ ID NO: 290283 - DNA, 74 bp, Homo sapiens
ctgtgatgaatatgcccaaaagagaatggatcttggagaatgtctgaaagtccatgacctggctttaagagcgg

SEQ ID NO: 290284 - DNA, 100 bp, Homo sapiens
tccatccccaccctgcagcagctcccccagtccctcagggcatcgccgaatggaggctgtgcgactgcgaaaagagaaccagatctacagtgctgatgag

SEQ ID NO: 290285 - DNA, 75 bp, Homo sapiens
ctgccgtctttcacacactgatagttctttatagctccaagctctacagattcttcaaatatattgagaataggg

SEQ ID NO: 290286 - DNA, 75 bp, Homo sapiens
ctactctctctttctggcctggaggctatccagcttttcggctttgtgagaaaccttaccatcaaacacgatggc

SEQ ID NO: 290287 - DNA, 76 bp, Homo sapiens
caggaataaggaagcgacctgcaaccgacgtgaggaagggaaactgtctacctctcaagatgctgcttgtaaagac

SEQ ID NO: 290288 - DNA, 100 bp, Homo sapiens
ggaaaggcttcaatgaagggctgtgggagatccagaacaacccccacgccagctacagcgcccctccggaaccaggtgcagatgggtctcttccttcctg

SEQ ID NO: 290289 - DNA, 76 bp, Homo sapiens
gagcaatcttttctacagaaggttaaaagcatcttgactcctgaagatggaatatcgaaagacgtcttaaagaaaa

SEQ ID NO: 290290 - DNA, 75 bp, Homo sapiens
ttccgccctaatggaggtctccagtttcgtcaggatggctaaaggtgaccccaagaaaccaaagggcaagatgtc

SEQ ID NO: 290291 - DNA, 82 bp, Homo sapiens
tgtcctgaccaagaggaccagactttgttaatgaaggctcacttcagcagctctgttggaaataaactgaaagaggggcaag

SEQ ID NO: 290292 - DNA, 74 bp, Homo sapiens
ggacctgctggtgttcgcccacgaccatgggtgtcaaattgagaaccaggtagatccccaccacctacagtaaa

SEQ ID NO: 290293 - DNA, 75 bp, Homo sapiens
ctccagagctttgtcaaagagttcctcgtctatggccgctactgcagccaggtggagtcagccagcaaacacctg

SEQ ID NO: 290294 - DNA, 75 bp, Homo sapiens
ttggtggtcagcttgcctgaggaggttttgaggttttgctgaagatattcctgaagaatcatcccaggtgccaca

SEQ ID NO: 290295 - DNA, 75 bp, Homo sapiens
agccggtgatatgatctgtcctgaatgtggcttggttgtaggtaagaatgattgatgttggctgatattggagtg

SEQ ID NO: 290296 - DNA, 50 bp, Homo sapiens
cgcttgagttggtataaactcctgaaggtgagcgagatggaagtgaacgg

SEQ ID NO: 290297 - DNA, 100 bp, Homo sapiens
acactgtgggggtgtcctggtgcacccccagtgggtgctcacagctgcccattgcctaaagaagccaaggcagaggcttcctcaggagaccatcccactg

SEQ ID NO: 290298 - DNA, 75 bp, Homo sapiens
gacctcattttctgctggaactgatcttagcaaagcaatgtctcaagatggtgcttctcagttccaagaagtcat

SEQ ID NO: 290299 - DNA, 98 bp, Homo sapiens
tttaatttcagtgactgaattaaaaggtgtcaagaagctcagaatggtgtttaaaattatccaactgccatagagctaaattcttttttggaaaattg

SEQ ID NO: 290300 - DNA, 90 bp, Homo sapiens
attccagaaggctatgtcccagaacactgggaatattataagatcagaatcaagctttgcgactctgtctgggtagcactagtgttggag

SEQ ID NO: 290301 - DNA, 100 bp, Homo sapiens
agcgcgaggtggagggtggaacgcgggcgcctgaaggagttgttgtctcggcagcgcccgcggagacgtgaagagacggggttcagaaagtgtcagcaac

SEQ ID NO: 290302 - DNA, 50 bp, Homo sapiens
tgattcgtttacagatggagcaaatgcagatggagtcttgctctgtcgcc

SEQ ID NO: 290303 - DNA, 75 bp, Homo sapiens
gctggcttggtgacgctcacagtgctgggaaggaatctatccaaggtctataatgacggatctatactacctcag

SEQ ID NO: 290304 - DNA, 82 bp, Homo sapiens
accgagaccgcggccgggaccgagggttggtggttctgtcagatgaaagcaaagcgaggctggatcccagcgtccttcctcg

SEQ ID NO: 290305 - DNA, 75 bp, Homo sapiens
cttcaactggttgatcttccaacaggttccttcaatggtgccttagctgctgttcctgtccaggacctgggctcc

SEQ ID NO: 290306 - DNA, 51 bp, Homo sapiens
tgcatttcctcgtcgagcgcaacccaagggctttctctacgtgctgttgtc

SEQ ID NO: 290307 - DNA, 111 bp, Homo sapiens
gccctcagctgcactgtggcaaggcttttgcttccaaatacaagctgtatagtttctcaagtcaaagaaggccctgtcctagcaactagttcaggagctggtgtttttaag

SEQ ID NO: 290308 - DNA, 100 bp, Homo sapiens
ttttactactgtgccttgcttatgtttgttaggaccaaacctcaaagcatggctaagagtgttcagtagaaatgggcagtagcagaatcccatggtagcc

SEQ ID NO: 290309 - DNA, 101 bp, Homo sapiens
cagcgggccagcaacaaagtgcaagcctggctttctccggaccccctgtttctggaacagaggagggtcagagaagcaaagaccgaagaggacggccctgc

SEQ ID NO: 290310 - DNA, 99 bp, Homo sapiens
cggcactgcgggtcccgattgctgcagccgcttgtcagtgtgatgaagattggcacccagggagcatcgagtacagctgtccggcctccaacgagtgtg

SEQ ID NO: 290311 - DNA, 100 bp, Homo sapiens
ggaaagcaccatgacgtccatccatttcgtggttcacccgctgccgggcaccgaggaccagctcaatgacagattgggctaatggatactacagacaaca

SEQ ID NO: 290312 - DNA, 100 bp, Homo sapiens
tcacagctgaggaagccaaaaaggagtggcagaagctcaactatgatatccataccctgcggcaggttcgaagggaagtaagaaacagatggaagtgcat

SEQ ID NO: 290313 - DNA, 96 bp, Homo sapiens
gcaccttcggcatctgcccctgccatgaccactgtggagaacaaatccaagattagcacagcttcacctgaacctaaaatggtgagcgagagtcac

SEQ ID NO: 290314 - DNA, 74 bp, Homo sapiens
cgacctcgtaacgccacaaggaataatggatgatgataattccgaagaaggcttccacactattcattcaggaa

SEQ ID NO: 290315 - DNA, 50 bp, Homo sapiens
agtacttcgacgaacactacgagtaccgttgtatcacggactgattcacc

SEQ ID NO: 290316 - DNA, 75 bp, Homo sapiens
acgagcacaacaggagctacgaggagttgcccgagaccgaggacgagaagaagcgctttgaggaaggcaaagggc

SEQ ID NO: 290317 - DNA, 101 bp, Homo sapiens
cggagggacaaaaagcaatgcaagagtcgctttgttacacctttcaagtgtctcgatgtctcgaagtcggagtccttctccaataagatgtggattgccaa

SEQ ID NO: 290318 - DNA, 75 bp, Homo sapiens
ataaaacgcttccatctttatccagagtttgcagtcctgatgtggctcctgacctacgttggcgctctcttcaat

SEQ ID NO: 290319 - DNA, 100 bp, Homo sapiens
atccctggagcgacgacggccgctgcctaagctggaaaggcctcggcttcacaggatggggctgccagtgtcctgggcccctcctgccctctgggttcta

SEQ ID NO: 290320 - DNA, 90 bp, Homo sapiens
cgagcagagcgctttcaaggcccaagtggtctttggagaacacacactgctggtgacggtgtcaggacagagggtgtttgtggtgaagag

SEQ ID NO: 290321 - DNA, 106 bp, Homo sapiens
gaaaggccagcacctgaagaattgatgagattcagaggagcttattggaaggaggtggacaagatggtcgactatatgcagccaggcggaacacctgccaccgagg

SEQ ID NO: 290322 - DNA, 100 bp, Homo sapiens
gaaaagggaagggagagaaaaaggagagcctctgagctcaacggaggattgtgcctgagaagaacccacagagtagtattattgattccacagaatacag

SEQ ID NO: 290323 - DNA, 75 bp, Homo sapiens
tgagaacaaagcctacagtaaaggaaaaggggattttgctcgcaaggtggatgagcttttagaaaagtacatgga

SEQ ID NO: 290324 - DNA, 83 bp, Homo sapiens
aaccccaggttaattcgtgttgctacgattgtagatgttgatgaccaaagagtaaagtgaaacaaagagtcctcttcgtggaa

SEQ ID NO: 290325 - DNA, 90 bp, Homo sapiens
ctactgaagagggtgcttaacccattacttcgattcttacagaagcagagattgatgctcaccttgttgctctagcagagagagactaaa

SEQ ID NO: 290326 - DNA, 75 bp, Homo sapiens
agaagaagacgaagaagcagaagcgtctgctcaggttgcagcaggagagaggattgtcagtggcttcgccccgag

SEQ ID NO: 290327 - DNA, 100 bp, Homo sapiens
gtaccaggccaagccttttgctcacatacagcgggtccatatggaatatttgctggtagggatgcctccagaggactggccacattttgcctagataaag

SEQ ID NO: 290328 - DNA, 83 bp, Homo sapiens
tcaatattggaagcgctttgatttacagcagctgcagagcctggagacacaggccccatccttcccaatggggacacttcagg

SEQ ID NO: 290329 - DNA, 90 bp, Homo sapiens
gacaagagacgatcattctgcaagcaggcaacctgaatacagtcttattgttacaggtatcgctgtgctgctcggagccagaacacacct

SEQ ID NO: 290330 - DNA, 75 bp, Homo sapiens
aaccgactgacctggatagtagttgttcttcaggccttagaaaatttacgtgtatacctgtgtgagaaaatcata

SEQ ID NO: 290331 - DNA, 100 bp, Homo sapiens
ggcggcttgtccctgtttcgccacagttcctaccttatgagctcggttttcttatgcttataagagtggaacaggtgtgaatgacagaggtggtgccatc

SEQ ID NO: 290332 - DNA, 100 bp, Homo sapiens
gtccgccgctcaccccgcggccgcaccttcccgccttctcaggttcctgtagcccactgcttcggcccccgggggctccacaagcgcaagttctgtgctg

SEQ ID NO: 290333 - DNA, 75 bp, Homo sapiens
caggtggtggccgtgttcgtggtcaccttcgacccccgctcggatgaggtggaaagtgagaaatggtacctgtct

SEQ ID NO: 290334 - DNA, 83 bp, Homo sapiens
ggcgggctggagacatggaccgcggcgagcaagttgatcatggccttgccaggttggtgacagtatattgtgagcatggtcat

SEQ ID NO: 290335 - DNA, 89 bp, Homo sapiens
ctctgcgccgatctatgcacgcagatgctggagaagtccccttatgaccagcttatggaaaagtatttctagttcgtaaaataagtggc

SEQ ID NO: 290336 - DNA, 140 bp, Homo sapiens
ggaagtggctttttatcagttgcaacaggactgtgacctgagctgtcagatcaccattcccaaaggtggagaggccaggaaggtctacgatgatgcccacaatatgctgaacacactgattagtcaaaagaaactccggg

SEQ ID NO: 290337 - DNA, 100 bp, Homo sapiens
ctgtagctgcagtaaaatgggtgatgtcaaagagaactatcttgaaacatttatttccagtccaaaaccatcttgattcaaaacatctatcgtaatcccc

SEQ ID NO: 290338 - DNA, 80 bp, Homo sapiens
tgatcaactaattgaaggacatcagtggctggaaaataatatagtctagagcatgtttggaaaggattcaagaattagag

SEQ ID NO: 290339 - DNA, 50 bp, Homo sapiens
gctttggagcggctaaaaacctgctggacaaatcaggacgcaaaccctcg

SEQ ID NO: 290340 - DNA, 116 bp, Homo sapiens
agaaagcagctccataggggaggagagccacgcaggatctcacagctgcagtctaatagtaacacagagtcttgactcgtctgctgaacaaatcctctgacctcaggccggctgtg

SEQ ID NO: 290341 - DNA, 100 bp, Homo sapiens
gtttgatcttcctctgacttggtactattctctctcccagattggagacccacagttggtgatctgtatggactgctcggcagacaccatgaccaaccgc

SEQ ID NO: 290342 - DNA, 75 bp, Homo sapiens
ctcccaagtagctgggactgcagctgatgaccaaacacccaggcaaacgtctgggttgtggacctgaaggcgaac

SEQ ID NO: 290343 - DNA, 100 bp, Homo sapiens
cggatcagccgcctgacccggcgggtggaggagatcaagcgatgcggtttcactatggtgtccaggctggtctgcaactcccgggctcaagcgatcctcc

SEQ ID NO: 290344 - DNA, 100 bp, Homo sapiens
atggtgtctggagtgtacaagtccgcggagcagggggaggtggttgtggcagcactgcctgaaggtatgagaccagattctaatctttatggttttccat

SEQ ID NO: 290345 - DNA, 75 bp, Homo sapiens
gccggcgccggagacgatgccgttctatcatggtgaacttacttcagattgtgcgggaccactgggttcatgttc

SEQ ID NO: 290346 - DNA, 90 bp, Homo sapiens
gaggcaagcaggggcgccgtgggtgccagagaggcggaagaggaggcctgatggggacaatgccgtcttctgtctcgtggggcatcctcc

SEQ ID NO: 290347 - DNA, 95 bp, Homo sapiens
ggcgaggccggtgaggacgcggcgggcgagcgagaggccgagggcatctccttggaaacaatgccatctttgaatgtgagagataaacctagttt

SEQ ID NO: 290348 - DNA, 98 bp, Homo sapiens
agagtacgagtctgaggcggagggagtaatggtcagatggcaaaaatcaagcaaacccttctagacagccggggagtgttcctcgacatgtttctcca

SEQ ID NO: 290349 - DNA, 109 bp, Homo sapiens
caatatctgtcttcggtggactccttcggcagtccacccaccgccgccgcctcccagatgatatcatcaagttgaatcgaaaggaagggaagaagcagaattttccaag

SEQ ID NO: 290350 - DNA, 75 bp, Homo sapiens
acagaggcgctcatccacagagccacatctgttagggctgatcccttatccaacatggttctaaccttcagtact

SEQ ID NO: 290351 - DNA, 83 bp, Homo sapiens
gcggagtatctggcctccatcttcggcaccgagaaagacaagtgcatggctgcctcctaatcccatagtccagaggaggcatc

SEQ ID NO: 290352 - DNA, 82 bp, Homo sapiens
ctctctgctgcggcgcggggaccgctgtgctctcggagcatcagatccatgctgctgctgactcggagccccacagcttggc

SEQ ID NO: 290353 - DNA, 82 bp, Homo sapiens
ccagtcgcctccaggccaagagggatccttcacccgtgtctgctcaccatggatgatgatatcgccgcgctcgtcgtcgaca

SEQ ID NO: 290354 - DNA, 50 bp, Homo sapiens
cggggagcccgactcggaccgcggagcttgagaatgccagactgtcatca

SEQ ID NO: 290355 - DNA, 89 bp, Homo sapiens
atgacttgctcgggcaaaagttgtgcattggcccgatcaagcctgacttctagccaagatatctaacagtgatacgccttcaccaccac

SEQ ID NO: 290356 - DNA, 90 bp, Homo sapiens
cacgttattgaagacatcaagggaaaatggggtgaggaagattttgaagacaatcgtcacttatacagttacagaatgtctgaaggggac

SEQ ID NO: 290357 - DNA, 82 bp, Homo sapiens
gcttggacgactcggagagccggttacgggcaggacttgagtggcttcggacagggcttctcagaccccagccagcagcctc

SEQ ID NO: 290358 - DNA, 75 bp, Homo sapiens
gggaacagatgagaaacccggcaatgaaaagttgctgggagcctgagcacctttcgtttttcggctcagagaaag

SEQ ID NO: 290359 - DNA, 75 bp, Homo sapiens
attttgaaaaacagtattccaaagaactcggagatgcctggaatacagtaagtttgaaattggcacaatggaaga

SEQ ID NO: 290360 - DNA, 97 bp, Homo sapiens
acagtgtgccagataccattgatgaaggaaatgctaaagcgattccaagcggaagatggagaaccgtgattaccgggatgcacaggagtttgctgct

SEQ ID NO: 290361 - DNA, 90 bp, Homo sapiens
gacaaagcagcgcccgtctgcttcgggcctctggaatttagcgctcgcccagctagccgcagattgtcactgctgttccaagggcacacg

SEQ ID NO: 290362 - DNA, 100 bp, Homo sapiens
gttttcccttttcgaacattatgatgacagctcggcaagaagtgaccagatgttaaaacaagtggctgttgagtcagcagatactggagttatttgaaac

SEQ ID NO: 290363 - DNA, 100 bp, Homo sapiens
taaaactgaagattgtcatgattgtttatcctaatcccaatgctgaagtaagattgtcttggaaatactaagttggctcagatcgtctgatagaagagac

SEQ ID NO: 290364 - DNA, 100 bp, Homo sapiens
tctgatccagaccaggactttgacaaagaggtccccagtcccaagcggaagttggaagaaccagttctggagttcaggcctccccgaggagcaatcactc

SEQ ID NO: 290365 - DNA, 73 bp, Homo sapiens
ccagacggctcacctgtgcgggatggaacaaaagatggaggacggccataccctcttcgactacgaggtccgc

SEQ ID NO: 290366 - DNA, 74 bp, Homo sapiens
cggctctgcgctggccgggggcgcgggcggcggcgccggcaggaagagtgatcagcagctggactgtgccttgg

SEQ ID NO: 290367 - DNA, 100 bp, Homo sapiens
cgcagtggtcgcttcttctccttggaaaaatcagccgtagaattgttgattagtcttgcagaaggctatagttctcgctgtcatccggtttttcagctta

SEQ ID NO: 290368 - DNA, 100 bp, Homo sapiens
cgaatatcgtcatcgttagaagagtaaaggagtttggaattagtccatcagacattcccttctcacagggtagtggcagtcgccctgatctctctccttc

SEQ ID NO: 290369 - DNA, 100 bp, Homo sapiens
tctctctgtctgtcatgctcgtcctcatctgggttctcactggccattggcttctcatggatggttgcttagccagacaatgaaggatcatctagtaaga

SEQ ID NO: 290370 - DNA, 74 bp, Homo sapiens
aaaaacattcaagaatgagagcgagaacacctgtcaagaacctagaagtcggaatccggaagaagatcgaacat

SEQ ID NO: 290371 - DNA, 75 bp, Homo sapiens
ctggagacagtggtggtgactggactcattaccagagaagctggctgtgcatgagaagaatgtccgcgagtttga

SEQ ID NO: 290372 - DNA, 87 bp, Homo sapiens
gatgatgactatgagaactcaacacctccctacaaggaccttcctcccaagccagatgcctttgaagatgagaaacccccaaagaag

SEQ ID NO: 290373 - DNA, 75 bp, Homo sapiens
gcttccaccctggacgaagccacccccaccctcaccaatgccggtggtggtgtgcacattgagccccggtataga

SEQ ID NO: 290374 - DNA, 101 bp, Homo sapiens
ccagaaattctgcttggtgatgagtatgatgcacctgcagtagatgccagtatggacagaatagcttatgatgcttatccccacccaccacttccgaaaca

SEQ ID NO: 290375 - DNA, 90 bp, Homo sapiens
caccatgttcctgggcaccggggagccggccttggacacggaagatgagaatgtgcctactgctcctgatcctccaagtcaacatttacg

SEQ ID NO: 290376 - DNA, 100 bp, Homo sapiens
ctcaatcactgaagaaatcctggaactgctgaatcagcgaggccttcgagatccagggcctcctgctcttcatggatgaagcagacgccttccttcggaa

SEQ ID NO: 290377 - DNA, 82 bp, Homo sapiens
agaaaatgcaactcatgaagaagtggaatttcttcacatggctcctggagaagtgaccatcacagttcgcctcatccgttcc

SEQ ID NO: 290378 - DNA, 90 bp, Homo sapiens
ggataacgggaggtgaatttccatgtcaacatagtcctggcttgtctgagacgacaggaatatagaagagacccaaatgagaagaaacgc

SEQ ID NO: 290379 - DNA, 75 bp, Homo sapiens
ggggatacaaggcccccaaggtccacctggaaaagagggtcagaggatgcaaccttaaaatcagtgacaagaaac

SEQ ID NO: 290380 - DNA, 101 bp, Homo sapiens
gaacatctccttctgcggctgccatccccgcaacagctgtgcatctgaactatcgccagaagggcgtgattgacgtcttcctgcatgcatggaaaggatac

SEQ ID NO: 290381 - DNA, 75 bp, Homo sapiens
gtggacggtgtggggcggtcccggccccgcagactgattcttgctattccaaatcctcttccacgttgacagccc

SEQ ID NO: 290382 - DNA, 83 bp, Homo sapiens
cccgcgcctgtcgggctgaactgagcggagctggagtttgttcagatcatcatcatcgtggtggtgatgatggtgatggtggt

SEQ ID NO: 290383 - DNA, 100 bp, Homo sapiens
tccgccagatcatcggtcaggccaagaagcatccgagctggatcgcagctccaagaggaggcaggtgaagcctttggcagcttctctgctggaagctctt

SEQ ID NO: 290384 - DNA, 83 bp, Homo sapiens
cccagcgtgaccagtggccacctctgcagtgtcttccacaacctgggagtctgtgaccttcgaggatgtggctgtgacattta

SEQ ID NO: 290385 - DNA, 100 bp, Homo sapiens
gtcggcggggcagccctggcatgggtgtgcatgtgggtgcagccctgggagcactgtggttctgcctcacaggtaattaatgatcctatccatggccaca

SEQ ID NO: 290386 - DNA, 98 bp, Homo sapiens
aacgtggtatactcgcagacaacccaaccggtatacaatgctgtgcggtcagagaagaaacgccttaggaagccaagcaagtggcttttggaatatac

SEQ ID NO: 290387 - DNA, 101 bp, Homo sapiens
ggcggcggcggcggcggcggctgctgctgctgctgcccgcgtccgaggctcgcgggcggcgggcccggatgctattaactgagtacttggatatgaaaaat

SEQ ID NO: 290388 - DNA, 101 bp, Homo sapiens
atttacgtggagatcaagcgcagcgatgtttgtttcgacgccggaccgcgtaagagacgatgatgttgggcacggaaggtggagagggattcgtggtgaag

SEQ ID NO: 290389 - DNA, 100 bp, Homo sapiens
ccttgggctgcctttcctgcagattgttgtaggagataaagttgttttgatgcctgtgaatgcagggcagccactacatgccagcaacatagagcttctt

SEQ ID NO: 290390 - DNA, 100 bp, Homo sapiens
ctcaagtcctggctcagcaagactctcgagcccatcgatggcaagccggcaggtggatattgcaactcagggctggttcattggtctgatgtgtgctgtt

SEQ ID NO: 290391 - DNA, 51 bp, Homo sapiens
tgggatatcatggcatctatctggcactctacacccccaagtgcatatggg

SEQ ID NO: 290392 - DNA, 75 bp, Homo sapiens
tccccggaatcgtgtgctgggctggtcccccttggaatatgatgaaccaatcttgaaacacctgcaggatattaa

SEQ ID NO: 290393 - DNA, 100 bp, Homo sapiens
catgatgtaggagatccaagcactactaatttataccttggaaacattaatccacagtttacagatgatccaactcttgcaatttgcaacgacagcggag

SEQ ID NO: 290394 - DNA, 82 bp, Homo sapiens
ggatgtgatcacaaggcctaaggtcagcccaaggccaaccccactgtcactctgttcccgccctcctctgaggagctccaag

SEQ ID NO: 290395 - DNA, 100 bp, Homo sapiens
gcgagtttagcctcagggggaaggagctccgggagaacgggatcaatagtcgtcctccagaggagcgtcccccggggcttcccctgcctcccccacctcc

SEQ ID NO: 290396 - DNA, 74 bp, Homo sapiens
ctggttctggaatcctcagttcaagcttttcctccgcaaccatgtctgacaaacccgatatggctgagatcgag

SEQ ID NO: 290397 - DNA, 82 bp, Homo sapiens
actaagaacgcattgccgccggtcctgaccaccgtgaacggacagtcccccccagtttggtgccctggttgtcagatgttgg

SEQ ID NO: 290398 - DNA, 78 bp, Homo sapiens
agaaaggccccacccctgccattctagaatctctcatcagctgacaacatagaaggacccatagccttgaagttctca

SEQ ID NO: 290399 - DNA, 101 bp, Homo sapiens
tggagacatccaggtctgcaccatgattgtcctaaagcagttggatgggaaaagaaccagaaaggaggcatgggaccaaggatggtgaacctcagtgaatg

SEQ ID NO: 290400 - DNA, 80 bp, Homo sapiens
gcaaatctggaagcggatcgcgtggagtgacggtcacaccgcggcggtgaaaggtgtagcagtcactcggcctacaccca

SEQ ID NO: 290401 - DNA, 75 bp, Homo sapiens
aatgaccgtggaggagtaccgcatcgcccagctgtacatgatacagacagacctcggctgcccgacaactacacg

SEQ ID NO: 290402 - DNA, 82 bp, Homo sapiens
cagcctatgggcagcagccagcagccactgcacctacaagatgtacaggtggatcatctgaatctcctgaaacagtttgaac

SEQ ID NO: 290403 - DNA, 75 bp, Homo sapiens
gctaacagaactggaccttttcgactttgaaatactcgtgggatatgaagtggaggtgcctagagggttgaagat

SEQ ID NO: 290404 - DNA, 90 bp, Homo sapiens
caggagaagcagcaattatcgtccgagcagttatataagtttggagagacagtttctattgttttttggacagacacttggagaccagaa

SEQ ID NO: 290405 - DNA, 74 bp, Homo sapiens
gcccggagcaagcggagctcccccaagagccggaaagccgccgccatgatcctgctggaggtgaacaaccgcat

SEQ ID NO: 290406 - DNA, 100 bp, Homo sapiens
cctcggacactgcccccgccgccgccggagctctgcagcacggaatgctgtctctgcaatttgagaggaggtgctcttaagcaaacgaagaacaataagt

SEQ ID NO: 290407 - DNA, 85 bp, Homo sapiens
acaactgcaggatagcacacctggacctaaagcctgagacagctgcctgtgtgggactgagatgcaggatttcttcacacctctc

SEQ ID NO: 290408 - DNA, 100 bp, Homo sapiens
ccagatcggcttcatgctgtgcagcaagaacccggtccagtgcacgtgccaacattacactgtcagggaagaagcgcagaaaactcctccagcagatccg

SEQ ID NO: 290409 - DNA, 74 bp, Homo sapiens
ggtgtcttctccctcgccagctggatgtggtgaagctgtagagaaaaacaagcgtctcatcacggcagaccaga

SEQ ID NO: 290410 - DNA, 75 bp, Homo sapiens
gctcaggaggccttcaccctctgctctggtgaagccatgtccctggagggagatgaatgggaactgagtaaagaa

SEQ ID NO: 290411 - DNA, 83 bp, Homo sapiens
ggctgaagaagaggaggaggaggaggattccgaggtgcagggggagcagcccaagtttgcaggacagatggcggctctgtgtt

SEQ ID NO: 290412 - DNA, 75 bp, Homo sapiens
gggggccaaggcttcctccggggcaggcattccagaccctccaaacatgtcagcagaattaatccaattgaaagc

SEQ ID NO: 290413 - DNA, 73 bp, Homo sapiens
ttgaccacatgcagcagcattcagaggagaaggcagagcccccccaggctatgaatgccctgatgcggttgaa

SEQ ID NO: 290414 - DNA, 76 bp, Homo sapiens
gctccacgggggatgcaccgtgcctggggagtgcaggtcctggactcggagcaggaccctgcggagcacatccccg

SEQ ID NO: 290415 - DNA, 101 bp, Homo sapiens
acctgaactccaagctcttcctgaacgaagtggccaagaaggagaagcagctgcggaaaatgctagaaggtgacggtgacgttgtaaataatatgtatgag

SEQ ID NO: 290416 - DNA, 87 bp, Homo sapiens
ggcagtggcagaagattttaattaggaattactctgcttaatgtaagcaagctgaacattttgaagcttgctcctggtgggcatgtg

SEQ ID NO: 290417 - DNA, 75 bp, Homo sapiens
tttacgtccagatggcgagtccaaaggagcggcgtcttcgacatcttcggaacattgctgcccggaacattgtta

SEQ ID NO: 290418 - DNA, 75 bp, Homo sapiens
tcggtggccgcctccttctttgcacggtatggcgtcatcattgtgggcaacccgaaggcactatcaaagcagccg

SEQ ID NO: 290419 - DNA, 97 bp, Homo sapiens
gcgacacaaatgaacacgccttctcagccccgccagttccacagaggacgtcccccacaggcccaaaaaacatgcagacctctggccggctgagcaa

SEQ ID NO: 290420 - DNA, 83 bp, Homo sapiens
gctgtcattggtggtggcttggaggaagttaacatccctaataggagggttctggttactggtgccactgggcttcttggcag

SEQ ID NO: 290421 - DNA, 100 bp, Homo sapiens
tgaagctttatgtgaaaccttgttgcccagatattgatatttttgttgatggaaaacgttttaaagctcacagatctctcgtggaagaggaagaccaaca

SEQ ID NO: 290422 - DNA, 82 bp, Homo sapiens
tggagggtatggatatggatatggacgttccagagactataatggcagcttaccctgaaagaagcagatcccagttcaaaag

SEQ ID NO: 290423 - DNA, 73 bp, Homo sapiens
ctctcatcgtcaacactatgggatgggtttcaggtgctggatagtttactagtccagtatggagtggtggaga

SEQ ID NO: 290424 - DNA, 96 bp, Homo sapiens
acctgaaaacagctcttcagcatctacgggaggcaaacttgtaaaacctggaacagcagcatcattgtcaaaggacgccaggaaagcatgtgcaga

SEQ ID NO: 290425 - DNA, 100 bp, Homo sapiens
gtggagctctccttgcagatcggtgacacagttcacatcctggagatgtacgagggtggtataagttgaaatccaaaccaggaaagaaggacaaggagcg

SEQ ID NO: 290426 - DNA, 141 bp, Homo sapiens
cacagaaggcctcattgagaatggaggggaatcaagcaagaaaagaaagagaacaaatactccttcaggtccctccagctacaaggtgggcaccatggcggagaagtttgactgccactactgcagggatcccttgcaggg

SEQ ID NO: 290427 - DNA, 100 bp, Homo sapiens
tggcgtattccacatagcaaacaggagccaaaaacctgtatatcatctccgtgaaggggatcaagggacggctgaacagacttcccgctgctggtgtggg

SEQ ID NO: 290428 - DNA, 74 bp, Homo sapiens
cctggacacacacagccctggagactggaggttgccgatatagaatctggcagacagattcagctgatcaaccg

SEQ ID NO: 290429 - DNA, 100 bp, Homo sapiens
gtgcagacagggcaaagaaaatgggactggttgaccaactggtggaacccctgggtgctggagaatctggtaaaagcaccattgtgaagcagatgaggat

SEQ ID NO: 290430 - DNA, 101 bp, Homo sapiens
agcctgaaaagtcgcagcgagctggagccgccggaggtgattcgcaaggggtggctcaccatcagcaacattggcatcatgaaaggcggctcgaagggata

SEQ ID NO: 290431 - DNA, 50 bp, Homo sapiens
ggacagtcatcgctgaccaagaaggtgtcttgctgcaggtaactaatgaa

SEQ ID NO: 290432 - DNA, 75 bp, Homo sapiens
gaccaccaaggaaatatttatgtttttgacttacatggaaacagtgaagaaaatatttggaagctctgtgaatac

SEQ ID NO: 290433 - DNA, 80 bp, Homo sapiens
ctgtgagaatgacacaaccatttcctacacagtttgcaccccagcatatttccttcacaaacagaaaatgaatgaaaata

SEQ ID NO: 290434 - DNA, 100 bp, Homo sapiens
aaacaataggacggaaacgccgaggaacccggctgaggcggcagacaaatcttcctattttcaagctgaaagaatctactgttagaagaagatacagtga

SEQ ID NO: 290435 - DNA, 87 bp, Homo sapiens
agcaccggctccagtgggctctgcagcagaagatgtcgttttcattggacctgacacacatgctattcaagccatgggcgacaagat

SEQ ID NO: 290436 - DNA, 114 bp, Homo sapiens
gactagacattcctgaagtcgactggattgttcagtatgaccctccggatgaccctaaggtaaaggaagcacctgatgaggctgaagtggtgttcacggcacattgcaaagcaa

SEQ ID NO: 290437 - DNA, 130 bp, Homo sapiens
ttccacgtctgacgtgtgatctcgagagacctgcgtacattcggggtgccagaaggaaagcataggtcaaaatgcagatcttcgtgaaaacccttaccggcaagaccatcacccttgaggtggagcccag

SEQ ID NO: 290438 - DNA, 83 bp, Homo sapiens
ggcccttttcagggcccccaaactgtcacagaaagagctgttaacacttcctagataacggtaagaagacatgttggataaca

SEQ ID NO: 290439 - DNA, 75 bp, Homo sapiens
ggccccgccagcagcactgtggaggccgtcctcgccatccgggtgacctgcataggttcctgcggggtctccaac

SEQ ID NO: 290440 - DNA, 100 bp, Homo sapiens
atgaccctagccagactcagggatcaaagagcaaacagattcagtggcctgcattggaaatgtggctttagataatctacagataaaagaaaatgccctg

SEQ ID NO: 290441 - DNA, 75 bp, Homo sapiens
gagacggcggcggctgtagcggcgtgacaggttggatggcaagcatgtggtgtttggcaaagtgaaagaaggcat

SEQ ID NO: 290442 - DNA, 99 bp, Homo sapiens
agcggcttcagctgtcaggaggacgatttcctggggggcatggagtgcaccctggggcagcagaaatgatggaagaattgcatagcctggacccacgac

SEQ ID NO: 290443 - DNA, 100 bp, Homo sapiens
gatttgtctcaatgaaggttgatttcatcagactaaaaagttacaggggtaaccaggagccgacaacaactcctgacgcaatggttcagccttttactac

SEQ ID NO: 290444 - DNA, 82 bp, Homo sapiens
cttggacacgtcccagctctctctgggcatctggaaaggttcgagaacttgtcttggacaattgcaaatcaaatgatggaaa

SEQ ID NO: 290445 - DNA, 100 bp, Homo sapiens
tctcactgagttctagaatgaagctgcagaccctcgcagtgagtgttacagctcttaagccacctgtctgtccagccacccttccacagactgaggcttg

SEQ ID NO: 290446 - DNA, 75 bp, Homo sapiens
gatcccggcgacatactacctctggccccgagatcagaatgccggtttggtgcacctcgatttggaggaagtagg

SEQ ID NO: 290447 - DNA, 88 bp, Homo sapiens
gggatgaacctcgagttgctggaattcctagaggacctgtgcaacaacctcttgaggatcgaatcttcactcccgctgtctcagcagt

SEQ ID NO: 290448 - DNA, 100 bp, Homo sapiens
gttagaaaggagacccgactgcaactgctggattgctgcaaggctgagggacgagaacgagatgctgtctttgcatttcaactacgcaacccagtgcaca

SEQ ID NO: 290449 - DNA, 51 bp, Homo sapiens
tatgttttcatcacttctctccagaaggtcaagtctggcaccatctttgac

SEQ ID NO: 290450 - DNA, 50 bp, Homo sapiens
ctcagctccgagtccagggcgaggagccagggagtaacgaagagatcaaa

SEQ ID NO: 290451 - DNA, 100 bp, Homo sapiens
cctgggtgaactttcacggacaacctcagaggacaacgaagtgttcggtgttggataaatacaaccctccagaccacttcctccctgagtcctacacctg

SEQ ID NO: 290452 - DNA, 100 bp, Homo sapiens
ggagctcctgttcgacttgtagctcctgccccagtcatcattagttcctcagctgcacaagcagggggcaagcgcgatgaagagctggttctgcccatca

SEQ ID NO: 290453 - DNA, 83 bp, Homo sapiens
gatctacggggctgacatcagcggctctttgtatgatgacgtgctggagaatctggtaaaagcaccattgtgaagcagatgag

SEQ ID NO: 290454 - DNA, 100 bp, Homo sapiens
ccggagctgaaaaaggatcctgactgaaagctagaggcattgaggagcctgaagattctcagagagtcccacgaactggctgggtatacagaaatgtcca

SEQ ID NO: 290455 - DNA, 131 bp, Homo sapiens
agacagcaaaagttcaaatggcctgtttcaagtttctgatataaaacgatgacattttcaggaaaatcctggtatcagaatggcaaagcaacttaaccttccagaaaatacagatgattggacaaaagagg

SEQ ID NO: 290456 - DNA, 100 bp, Homo sapiens
tcaaaaatgacaagttcgataaaagtgtgcagaccaagatccagaatataagaagtttttagaaacctactgtgtggaggaagagaagaccagtgccaac

SEQ ID NO: 290457 - DNA, 75 bp, Homo sapiens
gcatgattattgggccaccaaggtacgctggggaggaggaggaggaagggagcggcagcagtgaaggatttgacc

SEQ ID NO: 290458 - DNA, 75 bp, Homo sapiens
tgtttgagtccttcaatgttccaggcttgtacattgctgtgcagggatctgttccaaataaattttatgttcaca

SEQ ID NO: 290459 - DNA, 100 bp, Homo sapiens
cctggacacagcaatatctctgggctttcacaggaaatgttgggtgaactcttcactcctgtagaaacacctgaagcaccaaacaggggattctttaaag

SEQ ID NO: 290460 - DNA, 90 bp, Homo sapiens
ctcggtttggctgactggggagtcggcaggcggcagagcagccagcggcggacaatccttgaaatgctcctgggtttcttgaagctgcag

SEQ ID NO: 290461 - DNA, 97 bp, Homo sapiens
ggcttgcgacgggcttctcccaccccctcacgcagagtgcagtcatgggccaccgcagctgcctgtggaggaaccgattgtgtccacagatgaggtc

SEQ ID NO: 290462 - DNA, 100 bp, Homo sapiens
ggaaaaaggaacgaacttcaaccaggggacaagggcctgtccgacacgccctacgacagcagcgccagctacgagaaggagaacgaaatgatgaagtccc

SEQ ID NO: 290463 - DNA, 50 bp, Homo sapiens
cttgttactccctagcagtgtggtaagtttccgttactatggcaatgacg

SEQ ID NO: 290464 - DNA, 96 bp, Homo sapiens
cagggaggatgacggagctgcagtcggcactgctactgcgaagacagctggcagctccttgctcggattgaacgtatggaaaggcggatgcagctg

SEQ ID NO: 290465 - DNA, 75 bp, Homo sapiens
aagagtgttcagtagaaatggatgttcacatgtatcttcctacgaagttatttcaggcttcccggccttcattca

SEQ ID NO: 290466 - DNA, 83 bp, Homo sapiens
ccaggactgcctgagacaagccacaagctggcagatcgggagcggtgccgagaaaaatttccttactagatgacatttcatcg

SEQ ID NO: 290467 - DNA, 97 bp, Homo sapiens
tcctgaggagattcgcaagaccttcaatatcaaaaatgactttactgaagaggaggaagcccaggagcaggaaaattcagattcgaaacatccctcc

SEQ ID NO: 290468 - DNA, 74 bp, Homo sapiens
aagaggacccaccgtgggctccacgttcttacttggaaaagggtctctaattaacagaagatggcaaagcccag

SEQ ID NO: 290469 - DNA, 75 bp, Homo sapiens
taacaaatatttgcggtttcagcctcaacccagaggaatcgttactctttcagactgcaaaattcaaaatggggc

SEQ ID NO: 290470 - DNA, 100 bp, Homo sapiens
agaccatcatcactttcattgtctcggacgtgcggggcctgggcctcccggtccgcaagcaggctaaagaacgtgccaatggaatggagcttgatgggcg

SEQ ID NO: 290471 - DNA, 83 bp, Homo sapiens
cagagctggaacctgaggagagaggtagtgtacactgataaaggtagggcgcggtggactctgcccctgtaaccgttccggag

SEQ ID NO: 290472 - DNA, 111 bp, Homo sapiens
tgagggactgcagtacttggagagactctatatgaaaaggaactccctgacatccttggaattgcattttgtgaaaaaagaacaagaattttctgcaaggatcatatctaa

SEQ ID NO: 290473 - DNA, 98 bp, Homo sapiens
cagacttggcatatggaacttatacaggaagctgtggtcatgtaatgcacgcagtgtgctggcagaagcccgggtcctttttgtgctgattgtgctga

SEQ ID NO: 290474 - DNA, 84 bp, Homo sapiens
cctgctccaggaaggccctcacctggaggaagtggatttttggtgttgagccagacttgaccagggaaggcggcagtattcccg

SEQ ID NO: 290475 - DNA, 98 bp, Homo sapiens
ccgagtcctagcgcctggcctgcgcgccgctgcccgcgccacaggactcgctcagcagcagcctgaaaacttgctacaagtatctcaatcagaccagt

SEQ ID NO: 290476 - DNA, 97 bp, Homo sapiens
gcagtggtcgcttcttctccttgtcacgtcaccagcaggaggcagccacgactcagctggagcagctacatcaggaggcaaagcgacaggaagaagt

SEQ ID NO: 290477 - DNA, 100 bp, Homo sapiens
cgggtctcgggggccgctctgggatcccggccaccagcaattgtccggattaaagagccaacgctggaaatgtttctgtctagaatcttagcatcctgga

SEQ ID NO: 290478 - DNA, 100 bp, Homo sapiens
gtgatgaaaaacacccacctgaaaatatcattgatgggccatggcagggccgggcccaggcccgggggacccggacgagcagtacgatttcctgttcaag

SEQ ID NO: 290479 - DNA, 75 bp, Homo sapiens
gggaaaaccagctgaggtgtccgtaaagattccagagaagcctgtgaacaaagtcaaagctcagattcacagttg

SEQ ID NO: 290480 - DNA, 50 bp, Homo sapiens
gggagcggagccatggcctccgtttggagtttgagaatcagaagactcgc

SEQ ID NO: 290481 - DNA, 90 bp, Homo sapiens
cggaaatgtgtcatcgaaagccaggatgagagagacctagagaaagatgatgaactggaactgaaaagaagtcttttatgtagagactct

SEQ ID NO: 290482 - DNA, 82 bp, Homo sapiens
aagggaccacggtcaccgtctcctcagccgaggaggagctggtggaggctgacgaggcgggcagtgtgtatgcaggcatcct

SEQ ID NO: 290483 - DNA, 94 bp, Homo sapiens
tttacctggcactcctggacaggatggattgccagggcttcctggcccgaaaggagagccttctcccatcaaaggacgtgcacagccttatgat

SEQ ID NO: 290484 - DNA, 100 bp, Homo sapiens
ggagaagaggaaacacaagaagaaacgcctggtgcagagccccaattcctacttcatggatgtgaaatgcccaggatgcttggatattaattcatctgtg

SEQ ID NO: 290485 - DNA, 95 bp, Homo sapiens
ctgaaaaggaagttttctggaatggctcccctcccacccggtcactccgtccagcaagcacgcagacagcaagcccgcgccgctgacgcccgcct

SEQ ID NO: 290486 - DNA, 113 bp, Homo sapiens
gctccagtcgtgggctcttctggaggggtgtatgctctcgtctctgcccatctggccaacattgtcatggcagtgtcatcattaggctgtctttgtgccttaacagtattgat

SEQ ID NO: 290487 - DNA, 87 bp, Homo sapiens
tgcctatgccatctgcaaatacgcctttctcatatccactgccaaagggaccaaattactgggagatgtactcaaagatcggcccca

SEQ ID NO: 290488 - DNA, 96 bp, Homo sapiens
attctttcacatcatctccaaaggaacaccatatatttggatcatcaggtgagaagcaccagagggacaggacttctagaagttagaataatatga

SEQ ID NO: 290489 - DNA, 75 bp, Homo sapiens
tcttccagttggaattgaagaatattcccaagtccttcacccgggtcacttatacatctcaagaggatctggtgg

SEQ ID NO: 290490 - DNA, 74 bp, Homo sapiens
cggggccgccctactctggggcttcctgctccagctggaaagaagcacttgtaaggaaatatagcatccattgt

SEQ ID NO: 290491 - DNA, 100 bp, Homo sapiens
ctgcgcctacgaggtgacccaggccaacggaaagtgggaggtgctgatagtcggtaacctctattgaagaacgaacaaggccaaatctctccaaaacatt

SEQ ID NO: 290492 - DNA, 100 bp, Homo sapiens
ctttttcacttactgcaggattttcagcttcagcaagcagcattcaacagaaggtgtcaaattgacagctctcaatgacagcagcctcgacttgtctatg

SEQ ID NO: 290493 - DNA, 96 bp, Homo sapiens
ccaatatccaagaagcagtagagggtgccatgcacattcaggatgctcacaactgtattcctgagctggacagtgagacagccatgttttctgtct

SEQ ID NO: 290494 - DNA, 75 bp, Homo sapiens
tatgccattaagaacatccatggagtcaggagggtgtgaagacagagaatgaccacatcaacctgaaggtggccg

SEQ ID NO: 290495 - DNA, 100 bp, Homo sapiens
cctatgcaaatgccaaaggaattggttatccagcggaagatccatccaaaagctatgtgaaattacgagactttgtgcttgtgaagctttgtcaagattt

SEQ ID NO: 290496 - DNA, 98 bp, Homo sapiens
gcccctgaagctgatttcaccatgcccatattccctttcctcaggattgttaaaatgagtcttcggaagcaaacccctagtgacttcttaaagcaaat

SEQ ID NO: 290497 - DNA, 101 bp, Homo sapiens
gaagaagcgaccaaagcgcctgaggaccggcaacatggtgcggtcggggaataagtgtaaacaggaacatcgataagtagtgtaaaaacttgcacaatgaa

SEQ ID NO: 290498 - DNA, 75 bp, Homo sapiens
aaccggcacctgcacacctggatccaggataacggaggctgggacagaactgtaccgctctctttttggccagct

SEQ ID NO: 290499 - DNA, 75 bp, Homo sapiens
gcagcggaaaatgatccagtcacagtctgcgctcctcagaccaccggcaggtgaacagcctgatgcagaccgagg

SEQ ID NO: 290500 - DNA, 75 bp, Homo sapiens
ctgggagccacattcctcattgcatttccaggagtctggagtcagttctgtccctcggtcctcgtcccacagggg

SEQ ID NO: 290501 - DNA, 100 bp, Homo sapiens
gtgtgtggggccggaggagtcagctgtgtgtccagaacgtgccatggagacgcttaacgtgtttgggaaatgggaagtaatgacagctggcacctgaact

SEQ ID NO: 290502 - DNA, 90 bp, Homo sapiens
ctcagcgcagccctgcaggccaagcgcagcctccaccagatgcagagagaacttgtttatgcaagaggagatggccctggggcccctcgc

SEQ ID NO: 290503 - DNA, 74 bp, Homo sapiens
tcatcagagggaagatctttttcctcaattgttattcaagcggagaaatgttgctacagcagaagaagaaacag

SEQ ID NO: 290504 - DNA, 75 bp, Homo sapiens
cgtggttgtagagttccgtgactcccaggtcagaagttgagtagcaggggcctaggagggctcgaagccttcaca

SEQ ID NO: 290505 - DNA, 90 bp, Homo sapiens
gtctgatattgaagaggaagaactgaccagagctgatcccgagcagcgtcatgtacccctgttgcacttcccccagctggccctgaggcg

SEQ ID NO: 290506 - DNA, 74 bp, Homo sapiens
ctgaggtgcgagaggctccatcaggcacacatgcagtgacaaaggagagcatgcttccagctggagctgagtcc

SEQ ID NO: 290507 - DNA, 75 bp, Homo sapiens
ttgatattgaagaaggcatcaaaaaggaacaagctctccagagtacatgaaccacctgaccgtgcacaacaggga

SEQ ID NO: 290508 - DNA, 75 bp, Homo sapiens
cgagaattaaatgccgagaaggccagtacgatgacattaaagtatcagtaaatgattttatcatcaaggcagcag

SEQ ID NO: 290509 - DNA, 100 bp, Homo sapiens
ccaggggcatgttggaaagaactgagagaaagagcaacaaagcggcgagtggtgtgagagggcagcacgcgctgtggtttttcagaagaagtgaagtcaa

SEQ ID NO: 290510 - DNA, 76 bp, Homo sapiens
actttttgccaaaatgacagcagataaactgataggtccaaaggtacatcaggaacgtctctatcaagaatacaat

SEQ ID NO: 290511 - DNA, 98 bp, Homo sapiens
gtaaaggcaaagaggggagtgcactgagccatgtacgcaaaataactatttaatcagcaggcagatcaacaggccaaaatttccaccataactgcaaa

SEQ ID NO: 290512 - DNA, 100 bp, Homo sapiens
cggatatcctctgttgggggagaaggtgtgataaagcggaattgggaatatatatgtagccatgataaagaaaaaacgaagatcctaggagacaaaaatg

SEQ ID NO: 290513 - DNA, 101 bp, Homo sapiens
cccacgcggcgccagttctccggcgggaaggaaaaccgcgcagagagtatgactatgaatatgatgaaaatggtgacagagtcgttttaggaaaaggcact

SEQ ID NO: 290514 - DNA, 75 bp, Homo sapiens
cccgactgcaactgctggattgctgcaaggctgagggacgagaacgaggcaagaaaactgatcagtgattttgcc

SEQ ID NO: 290515 - DNA, 74 bp, Homo sapiens
ctcggccgatgaagtgcagaggtttttttctgccgagcccaggaagtgcgtcccctccgtggtcgtgggcgtcg

SEQ ID NO: 290516 - DNA, 98 bp, Homo sapiens
ggcagctagggcctgggccgcggttcggccgcgccggccggaaaaccagtagattcccagacatcgcgaagtgaatctgaaattgtgccaaaagttgc

SEQ ID NO: 290517 - DNA, 100 bp, Homo sapiens
cttcactgctctgctgtctcctgcaagaactggctcaagaaatttgcctcgaaaaccaagaccttaaaggctttgatccaggagagaaatactttcataa

SEQ ID NO: 290518 - DNA, 100 bp, Homo sapiens
cacgtgcgatttttccagcgctgcctccaggttttgccggagcgctattcttcactcgagacaagcagtgaggaggacatgtaccgtgctgcagatgaaa

SEQ ID NO: 290519 - DNA, 100 bp, Homo sapiens
tgttttgcctgaatacatgatttaaacaagagatttccacagaagggcataattggaatatcatttggagaaagtgtcatggaagttctgcgtccacagc

SEQ ID NO: 290520 - DNA, 98 bp, Homo sapiens
actacacagagttcaggatcacgagcttccttgccaaaagcttgcagatgggtcaagggttgtggagagtggtcagaaaccagcagctgcaacaagaa

SEQ ID NO: 290521 - DNA, 97 bp, Homo sapiens
aggacttcctgctcacagcccgacgaaaggatgccaaatgagatgacctggcttccaccactttctgctattcaagcacctggcaaagtggaaccaa

SEQ ID NO: 290522 - DNA, 74 bp, Homo sapiens
gaacctggtgttttagaggataccttggtcccagagtcatcatgaagatttcctttgacctcgctgagtacact

SEQ ID NO: 290523 - DNA, 100 bp, Homo sapiens
gtcttccgctgcatccccatcttcggcatgtccttcgcctgccagtcgatccctggccgcctgaacgacaggaggacgcccctgggtgaactgaactgga

SEQ ID NO: 290524 - DNA, 75 bp, Homo sapiens
acctctggttcctacatctggattgtagccataagtggacttgaattggcagcaatgaaacagattctcgttaag

SEQ ID NO: 290525 - DNA, 90 bp, Homo sapiens
ttcgatattacgcaggctgggctgataaaattcatgggatgaccattcctgtagtggtgaaagtggtgctggaaaaacagtggctgccaa

SEQ ID NO: 290526 - DNA, 99 bp, Homo sapiens
tccttggcctctcctgggatcggcccaaggccagttctccgcaggtatatagaaggtacacagaatcagaaaagattataaaagaaagcaagatttttg

SEQ ID NO: 290527 - DNA, 50 bp, Homo sapiens
cggcggtggaggagccggagcataatgtcttaaaatccttgcacgtttga

SEQ ID NO: 290528 - DNA, 51 bp, Homo sapiens
tgcaattactgagagacaacttgacagggctaacaatggacacccagaagg

SEQ ID NO: 290529 - DNA, 75 bp, Homo sapiens
gttttctttctgtggaagaaggaaaggagatacagatccacgggttttagaaaaacaagaattacagcagccaac

SEQ ID NO: 290530 - DNA, 100 bp, Homo sapiens
gagtacgatactcaggtcaaagtgactctgacagttggcagtgtgaacctagagatccacaatggcttcatcctcgggaagattcagctacccaggccca

SEQ ID NO: 290531 - DNA, 82 bp, Homo sapiens
ggggctgctggtgggccgcgtcgaagacatggaccagggctacggagggggatatgagactttctactcggaatatcctgag

SEQ ID NO: 290532 - DNA, 82 bp, Homo sapiens
ctccttgctggtcctcctggctgtgggaagactctgctggcgaagtatttgattttcatcaagcagctgatggtatccagga

SEQ ID NO: 290533 - DNA, 73 bp, Homo sapiens
gccatcacaactggattgtagctgcatatgcccattttgctgtgtgttacagtatcttaaatagtgaagatgg

SEQ ID NO: 290534 - DNA, 95 bp, Homo sapiens
ctctctcgtcctcgctgctgtacttcgtctatgtggcgcccggcatagaaactatgttccaacttcctgtcaacaatcttggcagtttaagaaaa

SEQ ID NO: 290535 - DNA, 101 bp, Homo sapiens
tgaaggaatcctctccatctggttcgaagtctcagcggtattctggtgcttatggtgcctcaggatctaaacgctcttcccacagcaatgcttatttttat

SEQ ID NO: 290536 - DNA, 75 bp, Homo sapiens
aaaggattttcatttgattcaggctaataaaatgctgaaattttcttctaaggagaaatatcccttatttacttt

SEQ ID NO: 290537 - DNA, 75 bp, Homo sapiens
gaaaatacagccaagatcttggcaaagcttctccctcagtatttagaccagacttcccaagtaagaagcggaaga

SEQ ID NO: 290538 - DNA, 87 bp, Homo sapiens
aattttgaagtacaccgtggtgacattgtatcattggtgcctcggcaagacgcgcaggaagaccagcgcgcgggatgcgtcccccac

SEQ ID NO: 290539 - DNA, 95 bp, Homo sapiens
accaagagacaccaatggagatctgcctcaatggaacccctgctctggcctacctggcggaatggaagttggatacactttgtgacttgtacgag

SEQ ID NO: 290540 - DNA, 74 bp, Homo sapiens
tttgttaaggattccaagtaactcttatttggaaatcatcgagttccccatcctaaagctaaatggccggacca

SEQ ID NO: 290541 - DNA, 101 bp, Homo sapiens
accgagccccagaggccagtaaaggaggaagagcccaagattccaggggacctggaccaggaaccgatattctaaagggaaggactgagaccctgaagcca

SEQ ID NO: 290542 - DNA, 80 bp, Homo sapiens
cctgcgtggtgcactacaccggatttaagtgccctgtatgctcaaaatttgtatcctcagatgaaatggatttgcatctt

SEQ ID NO: 290543 - DNA, 83 bp, Homo sapiens
gaagactagaaggaagttcctggccattcagggggatatgagactttctactcggaatatcctgagtgttgcgtggatgtaaa

SEQ ID NO: 290544 - DNA, 75 bp, Homo sapiens
tcctttatatagaagggagagtaggaatccccatctctaatgtaagcttggagatccgggcccccgggggacagg

SEQ ID NO: 290545 - DNA, 100 bp, Homo sapiens
ccgagaaccgtcagtttgagccagatgaaagcaaggagatggccaccaaggagaagctgcagtgtctgaaagatttccacaaggacatcctgaagccctc

SEQ ID NO: 290546 - DNA, 112 bp, Homo sapiens
ggaagatgcttcatctgcccctgcccagatccggaagaacggtgaatttcccccgcagggaaatcctcattgacgattcaatttgttgaaggccaatttgtggactcctacg

SEQ ID NO: 290547 - DNA, 83 bp, Homo sapiens
gatgaaggagagtggagtggcccaccacctgaatgcagagaagttgattcaagtcagttgagacgccagttgtgtggaggaag

SEQ ID NO: 290548 - DNA, 98 bp, Homo sapiens
tttccttcaaaacctgtctcaagagaagaccaatgttcatataaatggtggcagaaataccagaaggctgattcgtcatttgcaaagatctgggaagc

SEQ ID NO: 290549 - DNA, 98 bp, Homo sapiens
cacgagaagctccgccagcgcttgaaagaggagaagttggagatgctgcagtggaaggataaggatgctaaattccgtctgattctaatagagagccg

SEQ ID NO: 290550 - DNA, 88 bp, Homo sapiens
gaaatgcaggaagttcagagttctaggagtggaagaggaggcccagagcaagagaggcatcctcaccctgaagtaccccatcgagcac

SEQ ID NO: 290551 - DNA, 82 bp, Homo sapiens
ggatcctgcgcggagggaaactgctcaggtccggcctctttggcctacccccgttggctccgctgccccaggtcgatgagtc

SEQ ID NO: 290552 - DNA, 73 bp, Homo sapiens
tcgtatctatgccccagaagctccatatacttcccatgataaacttaaggtagttgatgtcacttggcgatat

SEQ ID NO: 290553 - DNA, 98 bp, Homo sapiens
gacgatcgggcctacagcagcttcggcggcggcagaggctcattcttggaatcccagaacaggccttaagtcttctccacatggccatcgagcccatc

SEQ ID NO: 290554 - DNA, 75 bp, Homo sapiens
gacagcctcatgccagaggaggagttcctgcgcagaaacaagtttaaactcatatcccaggcatatgaagtgctt

SEQ ID NO: 290555 - DNA, 83 bp, Homo sapiens
acggcgagcgcgagcggcgcgagaaagagaccctgccctggttcaccaaaggccagcgccaccctccacagtaacgacggcag

SEQ ID NO: 290556 - DNA, 88 bp, Homo sapiens
gtccagtgtaagcccagggacagccaggcagatattaataaggcagcggaaagaagaaatatgaatacggctccatcaagacccagcc

SEQ ID NO: 290557 - DNA, 90 bp, Homo sapiens
gtggagccaccagcctctccttggtcttaagcacaagaaatgaaaataagctgcttcctaaacatcctcatttagtgcggcaaaagcgcg

SEQ ID NO: 290558 - DNA, 51 bp, Homo sapiens
agcaggcggggaagatgaaaggcacacggaccctgactactcggctgccta

SEQ ID NO: 290559 - DNA, 82 bp, Homo sapiens
ctggggccagggaaccctggtcaccgtctcctcaggtggccaaggtggaatacgtcaggaagaagccaaaattaaaagaagt

SEQ ID NO: 290560 - DNA, 100 bp, Homo sapiens
cccagcagcggcctgatctgggttccgctgattcctttcgtaaccgcaccacacccgagcaggagcgagaacccgagcagcgccatgagcaacactaccg

SEQ ID NO: 290561 - DNA, 90 bp, Homo sapiens
gcccggggactacagcacgacccccggcggcacgctcttcagcaccaccccgggagggaagaaggagaaagggccaacccctgaagaagc

SEQ ID NO: 290562 - DNA, 103 bp, Homo sapiens
gacagttcgctacacagcaatgcatcgagaacctaaaggcagacccagaagagctttttacaaaactagagaaaattgggaagggctcctttggagaggtgtt

SEQ ID NO: 290563 - DNA, 90 bp, Homo sapiens
ggtcatggtcctcactactctcattctcatattagtgtgtgcttggcactggagaaacaggagcatgtatcccgtttggaaatcttttct

SEQ ID NO: 290564 - DNA, 100 bp, Homo sapiens
gggactggaacaagacttcaggtcacgctcggaagaactcttggatataaaagaactcccccattccaaacagaggccttcatgcctttctgaaaaatat

SEQ ID NO: 290565 - DNA, 75 bp, Homo sapiens
tggaagaagtgttcagactacaacaagcactgtctggcattgctaccatttatgttcgttataagcaagttcatg

SEQ ID NO: 290566 - DNA, 75 bp, Homo sapiens
tgaggagctcctggtcgatgaagaggatgatgtttttggtgaagatcgagttttggttcgggttagagacttgac

SEQ ID NO: 290567 - DNA, 100 bp, Homo sapiens
cacagatgtccaagctgccaatttggaggcaaactggttacgtttgagaatgtcagaatgccttctcatcagggagctgagcagcagcagcagcagcacc

SEQ ID NO: 290568 - DNA, 107 bp, Homo sapiens
tcggttgggcttcctcctgaatctggactctaaactaacccagcagggacatgctcagcacagctcccaccgcaaggttgaatgagcaagaagaaactgggaggatc

SEQ ID NO: 290569 - DNA, 75 bp, Homo sapiens
cttgttggaaatggaacatacgggcaagtttataaggatgtgaaatggtctgacttcgggtttcctggaagaaat

SEQ ID NO: 290570 - DNA, 101 bp, Homo sapiens
cagctgcaacaggaagacccaatggatagatacaaggtggtggacataatgcgagttaacgtggacaaggttctggaaagagaccagaagctctctgagtt

SEQ ID NO: 290571 - DNA, 98 bp, Homo sapiens
cttgtatcgacatacacactgggtacgctgtgccaacaatcatttggggaagaatctacagttgctgatggacagagtggatgaaatgagccaagata

SEQ ID NO: 290572 - DNA, 99 bp, Homo sapiens
taatctccaggaacggaggaaatacctgaaacacaggctcattgtggtctctaataggtgccttatgcccgctcagaggcccacctcacagagctgctg

SEQ ID NO: 290573 - DNA, 74 bp, Homo sapiens
aagcattggtatctacggcctggacttctatgtggtccccagtctatgtgaggatctcctgtcttctgttgacc

SEQ ID NO: 290574 - DNA, 80 bp, Homo sapiens
atttctccgcctcagcccaacggggaggaatggtcctcgtccgaagtgagaatgggcagttgttaatgattcctcagcag

SEQ ID NO: 290575 - DNA, 75 bp, Homo sapiens
ctgagtacggtctcacagacaacgttgagttggttgaatctggcgatgtggaacccatggatatggagggctgac

SEQ ID NO: 290576 - DNA, 100 bp, Homo sapiens
gagcgcgcggcggacgcgcccgggacgcgcggcggcaccgggaggccgggccgagcgtgctcatcttcaaactctatcagcgggcaaagcatgtgtacag

SEQ ID NO: 290577 - DNA, 100 bp, Homo sapiens
gaagatcctaatgaggacattgtggagagaaacatccgaattataatgcagtaatagtggccttgtcttcaaaatcatgggatgtagagactgcaacaga

SEQ ID NO: 290578 - DNA, 75 bp, Homo sapiens
cagacattccagaaatgctgttagaagagaaccatggagtctggcagtaccgccgccagtgaggaggcacgcagc

SEQ ID NO: 290579 - DNA, 82 bp, Homo sapiens
agagccaccagccaatgatcttttcaatgctgcgaaagctgccaaaagtgacatgcagccatcactggtgcaagctatattt

SEQ ID NO: 290580 - DNA, 105 bp, Homo sapiens
acccccccctcggctcggcgccttctgcgtctcccggctggtggggaagcctctgcgccgccggcaccatgaggtaagaatgattgatgttggctgatattggag

SEQ ID NO: 290581 - DNA, 96 bp, Homo sapiens
cggcgccgaagtttgcctcggactcgccgggcgctgcggtggctccctgggccgagtacttcctcgcgtattgctaaaggaggagttgaccacacc

SEQ ID NO: 290582 - DNA, 74 bp, Homo sapiens
caaaatctacaagatgatgcagggaggaggagtaaaagtccctcgcaatttccgactgttggaagaactcgaag

SEQ ID NO: 290583 - DNA, 83 bp, Homo sapiens
gaaaaatcaatgctgtccaaacttaaacatgaggtatcctgggcaagtcatacttaaatcaaccagattacgactagctcatg

SEQ ID NO: 290584 - DNA, 152 bp, Homo sapiens
tggctgaaccgcagctaccgccgcagcatcagcagcactgtgcagcggcagctggagagcttcgacagccaccgggtctcgctctgtcgcccaggctggagtgcagtggcgagtcactacagcctcgacctctccggctcaagccatcctcc

SEQ ID NO: 290585 - DNA, 75 bp, Homo sapiens
cccgcgtcctactgcgccaagctctgcgagccgcaggatctgtgccagttcagaagcaggcgagcctcttccctg

SEQ ID NO: 290586 - DNA, 83 bp, Homo sapiens
cccacaccaccgcactgtcgctgcccgcctgccctgaggagtccccgctgcttgttcaaatctgaacatcaatgatgtactag

SEQ ID NO: 290587 - DNA, 102 bp, Homo sapiens
tgatattaagccatcaaatgtggaacctatggaaaagtgctactatatcggggccacagatgatgcagccaccaaaatcatcaatgaggtatcaaagcctct

SEQ ID NO: 290588 - DNA, 73 bp, Homo sapiens
ctgcctttgccgccaccatgcccaaaacgggaacgagagcagccacccagatttgcacagcctggctcctttg

SEQ ID NO: 290589 - DNA, 101 bp, Homo sapiens
gaagcaagaaggccctggacacagcaatatctctgggctttcacagtaaaactggcaatttgggaagcatcactggataaatttattgaatctattcagtc

SEQ ID NO: 290590 - DNA, 100 bp, Homo sapiens
ccagatctttattacgagtactacccgcacgtgtaccctgggcgcaggggtgaggctttccccgtctcggagcaccaccagcactcagacctcactgctc

SEQ ID NO: 290591 - DNA, 86 bp, Homo sapiens
ggacccaggccctggatgggactgtctatgatgtcatgtttgtcagcacagacaatgcagatcttcgtgaagactctgactggtaa

SEQ ID NO: 290592 - DNA, 100 bp, Homo sapiens
cacggaaatggaggaggagacagagttccttgagctcggaaccaggatatcaagaccaaatggataccatgctgtgaagtccaggccacatggaggtgtc

SEQ ID NO: 290593 - DNA, 101 bp, Homo sapiens
aggcgaactcggcctatcgctaccctccgaagtccggtactccaaagattcaggtttactcacgtcatccagcagagaatggaaagtcaaatttcctgaat

SEQ ID NO: 290594 - DNA, 51 bp, Homo sapiens
cagttctgcgtttgaaaggaaacccggtacctgtctgaccttcatgcgtct

SEQ ID NO: 290595 - DNA, 115 bp, Homo sapiens
taacatgttgttactaatcaatgtcattctgaccttgtgggtttcctgtgctaatggacaagaaacatgttccaaatcaagtatagatattgagaatgggtttatttctgaatct

SEQ ID NO: 290596 - DNA, 50 bp, Homo sapiens
tcgccgttgcatcggtgcagggcaaggtgctcgagtttggcttttcattg

SEQ ID NO: 290597 - DNA, 80 bp, Homo sapiens
gggatccttctgtcatagaaactcacatgagacaaatgcgctcagcttcaattggctttatcctgtggataaacgcagag

SEQ ID NO: 290598 - DNA, 100 bp, Homo sapiens
cgctgctgttctacgttgtcttttcgcttctctggggaggagtgatctgcctggagatttgaaaaagagaattgaatctctgatagacagagactatatg

SEQ ID NO: 290599 - DNA, 100 bp, Homo sapiens
ggctgagagagctaagggagggagctgaatgtgaattgagtagacgtcagtatgcagaacaggaattggaacaggcagaagtcaattcatctggaaagac

SEQ ID NO: 290600 - DNA, 98 bp, Homo sapiens
tgactgtggagatggcggctcagaagataaacgaggggctggaacacctcgccaaagcagagaaatagtcggccacacacccggagcaccgtcatcac

SEQ ID NO: 290601 - DNA, 89 bp, Homo sapiens
gcagtggagagcacagaccaccccggaccacatcctctacacgctgctcaactgtcgggagttgatccctgaattttattatctccctg

SEQ ID NO: 290602 - DNA, 51 bp, Homo sapiens
cagaaggccgacaccctgcacctgcttttttcaaggagcaaacctccaagg

SEQ ID NO: 290603 - DNA, 83 bp, Homo sapiens
gaccagacaaatcaaattagtggttttgactgttggtagagaaaatctttgctcagtatcttgtcccccacaacctggaaaca

SEQ ID NO: 290604 - DNA, 98 bp, Homo sapiens
atcggttcgtggagtttctgaagaggaatgagaattgtacattacaggtttggaattacaagcttcggcgctgtcttttcacattgcttgggcactta

SEQ ID NO: 290605 - DNA, 117 bp, Homo sapiens
ccgtcatctgcaactccccaagcagcatccccgtcacaccgccaggccagggtcttttagataaccctgaacttcgtgtggtccttgtctttggttataattgctgtaaggtgggag

SEQ ID NO: 290606 - DNA, 100 bp, Homo sapiens
cgataaatcagacagaacagttaatcctcaatttaagcctgatctaacccctagaaacagcaaaacccttgaagatcgtttgaaaattgaagcaaaaaat

SEQ ID NO: 290607 - DNA, 100 bp, Homo sapiens
atgacctagatggaacacatgctctgatgaccattcccggagtaataaatccagttggagcagcagtgatgagaagaggggatcgacacgttccgatcac

SEQ ID NO: 290608 - DNA, 73 bp, Homo sapiens
ggcctcggagcaacgagcgcagcgccggccctgggcagtgacggggttcgggtgaccatggagagtgcgctca

SEQ ID NO: 290609 - DNA, 90 bp, Homo sapiens
atcccatcagaggcaccccagacacagtaggagcagtgaggagaatgaataccttccaagaccagagtggcagctccagtaatagagaac

SEQ ID NO: 290610 - DNA, 97 bp, Homo sapiens
tgtcagtgttatatcctccaggaatactggccagggtgtgggccgaagatatgctcatgtggtgttgaggaaagcagacattgacctcaccaagagg

SEQ ID NO: 290611 - DNA, 100 bp, Homo sapiens
agggctggccaacttctgctacagacgactcaggtgtggatgaatggaacatagctcgcctcaatacagtcttggatgtggttgaagaagagtgtggcat

SEQ ID NO: 290612 - DNA, 100 bp, Homo sapiens
ctgactggggttctgagactccctgtcccggaccgcagacaatggcgatgaccactcagaaggaggcctggtggagaaccacgtggacagcaccatgaac

SEQ ID NO: 290613 - DNA, 75 bp, Homo sapiens
cgccccccgggacccccacgccgccgccaggtgccaagtcctgccctgccaacttcttggcagctgccgacgaca

SEQ ID NO: 290614 - DNA, 83 bp, Homo sapiens
cctgcagccgcccgaagagccaagagtcagtattccggccagcttcacgaagtcagagaggttctggggctgctggtatggac

SEQ ID NO: 290615 - DNA, 75 bp, Homo sapiens
ctccgaggcctactccccccagcaggtgaatggagattacacatgctgtgacttggttgtaaaaataaaggaatg

SEQ ID NO: 290616 - DNA, 100 bp, Homo sapiens
tcgctaaggaattcccggcccctcagggccacggctttagcggtgtcttttgcgagctctcagcatggcggctcctctacgtcacttgcgtccaccaaag

SEQ ID NO: 290617 - DNA, 50 bp, Homo sapiens
aggtggcctggtgtgagctgcagagctccaaacgagaatggaagccgctg

SEQ ID NO: 290618 - DNA, 125 bp, Homo sapiens
agccgctcagccaccggggcctgccgcgcctgtcctggatcgacaccctctacagcagtttggtgcacctcgatttggaggaagtagggcagggcccttatctggaaagaagtttggaaaccctg

SEQ ID NO: 290619 - DNA, 75 bp, Homo sapiens
cgtcagggacacggggtgctgcgctgcgccgacggctccacctacaagtctctagtgatccctgaaaagttccag

SEQ ID NO: 290620 - DNA, 100 bp, Homo sapiens
tgctttaactcaagaagaatcttcagcccagttatcaaatgaagaggaaagctatttttgatacaccagatgaggatccaaattacaatccactacctga

SEQ ID NO: 290621 - DNA, 100 bp, Homo sapiens
ggacaagaagtcgtagggggtgagggtggaagctgggaaacccacaggaggcaaccacactagtttagacattcactactttcactgcctaagaatcctg

SEQ ID NO: 290622 - DNA, 144 bp, Homo sapiens
ttaatgaacatccttcccgaagaatcactgatgagttcatcgagaagagtgtctctgaggccctggcatcttttaattttcccgaggtacctagtgtctgagcggcacagacgagatctcgatcgaaggcgagatggcggacgt

SEQ ID NO: 290623 - DNA, 73 bp, Homo sapiens
gaattcagaaggagctggcggacatcactttagaccctccacctaattgcagtactaaggctcgtacgtctgc

SEQ ID NO: 290624 - DNA, 101 bp, Homo sapiens
cagaaccatggcccaatttgtccgtaaccttgtggagaagaccccggcgctggtgaacggtagacatagctgacattgagaatgaagagaaccgctactgt

SEQ ID NO: 290625 - DNA, 50 bp, Homo sapiens
cagaatgagctggagagactgaaagaggacactggggttgggaaatcaag

SEQ ID NO: 290626 - DNA, 83 bp, Homo sapiens
ctggagcctcagttggaagcagccgatccagcctgcggagcctgtggggcaggacacaatgtttgcacgaggactgaagagga

SEQ ID NO: 290627 - DNA, 74 bp, Homo sapiens
gatgttgtttgaagttgttaaaatgggcaagagtgctatgcagcctctgcgacttgatatcaaaagaaagctaa

SEQ ID NO: 290628 - DNA, 75 bp, Homo sapiens
aggctgaccacgagcttttcctccaggcctttgagacacacggcggcgggagacgaaggcggtggccaatcactg

SEQ ID NO: 290629 - DNA, 102 bp, Homo sapiens
gccgaggccagatcctctggttccggggcctgaaccgtatccagactcaggctggaaatggaacatttaacagggcaaaactgttgaacgttggggtgcgag

SEQ ID NO: 290630 - DNA, 100 bp, Homo sapiens
ggcagatcttcaccatccgcaggtgcccctccacggacccagatgacgtccggttgtttgccttcgtgcgcttcaccaccggggatgccatgagcaagag

SEQ ID NO: 290631 - DNA, 83 bp, Homo sapiens
caagcggaaggtgatgcccaagatggaccagacctgcctagagctggaacgttacctccagagcgagccctgctatgtttcag

SEQ ID NO: 290632 - DNA, 98 bp, Homo sapiens
gcaggctctgtcccggcagccggccgagatggcggccgagctgggcatgaggggccccaagaagggcagcggcatcctgtcggctcacaagataatag

SEQ ID NO: 290633 - DNA, 88 bp, Homo sapiens
aaaacgagccagtgatttacaatagagcaaggtacttacaagccgatatagaagcctttgacatcagagaactaacacccaaatttga

SEQ ID NO: 290634 - DNA, 90 bp, Homo sapiens
agcaagaggaccgggctgggcgcgcccggccgcgacgcccgggacccagattgcgggttcaggtactccaaagattcaggtttactcacg

SEQ ID NO: 290635 - DNA, 83 bp, Homo sapiens
gccgggccggcccgaccccaccggccatacggtaagtaaggaggtctctgtaccatggctcgtacaaagcagactgcccgcaa

SEQ ID NO: 290636 - DNA, 97 bp, Homo sapiens
ctacctggtcctcgatcttgctctgctgtttctgatggggattctagaagcagttcggttatacctgggtgtcctgtttgccggtactgtcaaacgc

SEQ ID NO: 290637 - DNA, 101 bp, Homo sapiens
cccttccagcggtggccacacgtcacacagtggggacaacagcagtgagcaaggagatacaactcgtcaacgaatcaaattcagtgatgacagagtatgca

SEQ ID NO: 290638 - DNA, 100 bp, Homo sapiens
ctgaagatgtgcacctagggggcggctaccccgtggggatctttcgaagatggtttggctgccttggagatttggagatctgatgccacgatgaggactc

SEQ ID NO: 290639 - DNA, 83 bp, Homo sapiens
ataaccctcccagtgggaaatatagcagcaatttgggcaactttaattatgggttttctagtcttgaactactggctacgtgg

SEQ ID NO: 290640 - DNA, 75 bp, Homo sapiens
gctgggctatgtggcaacaaaaattgcaggtgctgcagtgtctgaaatttccgggcctttctcaacagaggatgt

SEQ ID NO: 290641 - DNA, 98 bp, Homo sapiens
ctgagcatgttcgggaaatactagaacctcatctaaataccagaaagctgtatgtgatggcttctgtgtttgtctgtctactcctttctggattggct

SEQ ID NO: 290642 - DNA, 75 bp, Homo sapiens
gtgactttgacaacgactgtggagacatgagcgatgagagaaactgccgagaagtgccagaaagcccggaagcaa

SEQ ID NO: 290643 - DNA, 80 bp, Homo sapiens
tcggaagcctgcgtaactttctcccttgatccgggagtctttccactggctacgagttccagggagctctgtcctggtga

SEQ ID NO: 290644 - DNA, 100 bp, Homo sapiens
aaaaaactaaaaagatatttgatattgatgaagctgaagaaggtgtaaagggaactctaatgatccaggacaaagaagttaccctggagtatgtatcaag

SEQ ID NO: 290645 - DNA, 83 bp, Homo sapiens
aaacatagagaattctgggcttccacacaactccagtgctaactcaacaggtcctgatgaagttgtagggccagaaggaatgg

SEQ ID NO: 290646 - DNA, 50 bp, Homo sapiens
atgcttgacagagatgagtttgcagttaaaaggcgacggcggattgacag

SEQ ID NO: 290647 - DNA, 75 bp, Homo sapiens
attcgagtgaccgagaccgcggccgggaccgaggataatcgcttatcagccgtatggaaaatctgtggactggtg

SEQ ID NO: 290648 - DNA, 100 bp, Homo sapiens
ccagaactgtggggccagcaccatccgtctacttacctcccttcggaagtggtccaaaggcaaagttcgggacaagctcaataacttagtcttgtttgac

SEQ ID NO: 290649 - DNA, 75 bp, Homo sapiens
attatcaaatctactactgttcatggcaggagtaattcattacagaataccaatatcccacattcagcatttatt

SEQ ID NO: 290650 - DNA, 90 bp, Homo sapiens
ataaaaatgccagcagttctgacattttgccttctgattctaactgcaaaggagaaccagcagaaatccaccaatgtagtctatcaggcc

SEQ ID NO: 290651 - DNA, 100 bp, Homo sapiens
tttgaagattactgtttgaaacgggagttactgatgggaatttttgaaatgggctgggaaaagccatctcctattcagttctacagcgagtcgggcatgc

SEQ ID NO: 290652 - DNA, 75 bp, Homo sapiens
cttccatccgcctttgatcgtcttcctcttcagccatccaggctcgtttctggcgctggagacatcaaacttact

SEQ ID NO: 290653 - DNA, 100 bp, Homo sapiens
caggatccggctgccgaaggtcctcgccaggttttgctgttactgctcagtgtagtcacaccttgaataagaaatggaaaaccttgggatgttgataaag

SEQ ID NO: 290654 - DNA, 75 bp, Homo sapiens
cgctcacctgcgctgtgatgcctgcagagctgtggcttaccaggcgctgagatgcgtctggagagccagagggcc

SEQ ID NO: 290655 - DNA, 90 bp, Homo sapiens
gaccattcagatgggatctttccggatcaatccagatggcagccagtcagtggtggagatcccttcattaacaggagaaatgcaaatacc

SEQ ID NO: 290656 - DNA, 100 bp, Homo sapiens
aagacgatcatctagggtcagacagttatgatggttaacggtgatcacaggataggtatttttgccaagagagccatccagactggcgaagagctgtttt

SEQ ID NO: 290657 - DNA, 100 bp, Homo sapiens
agcacgctactacctggtgcagggcctgattgaggactgccagctggcgctgcaggtgaatggaagagaatccgaagaagaaaatctcaataaatctgaa

SEQ ID NO: 290658 - DNA, 82 bp, Homo sapiens
ggcgccgccgccggacgtcggcaacggagaagaggcggccttagcaacatgctgttccagtgctccctacctgacaccacag

SEQ ID NO: 290659 - DNA, 88 bp, Homo sapiens
cacagcggcatctttggcttcagcgtgtcccagatagaatctcactatgttgaccaggctggtcttgaactcttggcacccaagcgat

SEQ ID NO: 290660 - DNA, 83 bp, Homo sapiens
gcttgaaagacttggtaatggcgacgggtttggaagatgttaccgagtacttcagtgaattccttagtgcaggggaacggagt

SEQ ID NO: 290661 - DNA, 96 bp, Homo sapiens
tggtgatatgcatcaacatgaaggacatattcctaatgctgtggattcctgtctccaaaagatccaaaatacggagctggcatatacttcaccaag

SEQ ID NO: 290662 - DNA, 90 bp, Homo sapiens
ctcagcgagtggcagcagctgcctcaagaggagcagacatgtcatgctgcccaaggacatagccaagctggtccctaaaacccatctgat

SEQ ID NO: 290663 - DNA, 82 bp, Homo sapiens
agcgatgatgccaatgtcctggtgtggcacgctctcctcctacccgaatttgctgacacaatatcttccgcctggtgctggg

SEQ ID NO: 290664 - DNA, 140 bp, Homo sapiens
cacgcactactggcccctgatccggttcttggtgcccctgggcatcaccaacatagccatcgacttcggggagcagtgaggaggacatgtaccgtgctgcagatgaaatagaaaaggagaaagaattgcttatacatgaa

SEQ ID NO: 290665 - DNA, 80 bp, Homo sapiens
tggggatccctgctcttcgctctcttcctggctgcgtccctagacttaattcagtgcacaaatgagatgaatgtgaacat

SEQ ID NO: 290666 - DNA, 128 bp, Homo sapiens
cctgctcagagggacctctatagagatgtgatgctggagaattacgggaatgtgttctcactgggatcttcagaggcagactggaaaactggacacccaagccatgttcaacagctcagacctccact

SEQ ID NO: 290667 - DNA, 100 bp, Homo sapiens
gtggctggaagacatggccactccagtcggtgttgagcacggcgagcagtctcaggcctttagtgatgatgatggcccactgcgtgaccttggttcagct

SEQ ID NO: 290668 - DNA, 98 bp, Homo sapiens
cgaaaacatgaccgctgagcccatgaggctcagtttatgaacctcttaaaagcattaatcttccaagacctgataatgaaactctctgggataagttg

SEQ ID NO: 290669 - DNA, 73 bp, Homo sapiens
ccgggggaagctggccttgggatcagcattgttgatattgccaacaagaggagctcttctgctgaggaaagtg

SEQ ID NO: 290670 - DNA, 75 bp, Homo sapiens
tccgccagtcaataggaagtacgagtgtgagtttttcgttggaatatacgttgcacatttatggcgattctgagt

SEQ ID NO: 290671 - DNA, 100 bp, Homo sapiens
agatcaacaagatgacggataagctcaaaacccatggtggtcgttctcgttaccggaccacttcttcagccaacaatcccaatctgatgtatcaggatga

SEQ ID NO: 290672 - DNA, 75 bp, Homo sapiens
acttctcacccccaggatgtcatcgagggttactgaagctaaaggagatgtttaactccaagtttggatctattc

SEQ ID NO: 290673 - DNA, 74 bp, Homo sapiens
aaagaacctgaggatagacaacaggcttccaaaagcccttacaatgggagccctctggcacaaatggaagaaga

SEQ ID NO: 290674 - DNA, 50 bp, Homo sapiens
atccaatcccttgtccttaaaagggaaatcctcattgacgattcaatttg

SEQ ID NO: 290675 - DNA, 83 bp, Homo sapiens
ttcgagttcttcgtgctgctcaagagagaagcaagcagaaggcccggaggagaacaagatccagctcctcctcctcttcttcc

SEQ ID NO: 290676 - DNA, 75 bp, Homo sapiens
ctcattgaagcttggaattacatagctggaaaggatcttacagatctctgatgtatggtttaatagaagatagct

SEQ ID NO: 290677 - DNA, 100 bp, Homo sapiens
aactggcggctgctggtagttccatgctgtctgttcagacttcagcttggtgcccgccatgttcatagaggataaagcagtagacaccctggcttacctc

SEQ ID NO: 290678 - DNA, 98 bp, Homo sapiens
tcctcgctgtggggcaatccgggcttgcagacgagatctctggaaacatggctacagaacatgttaatggaaatggtactgaagagcccatggatact

SEQ ID NO: 290679 - DNA, 98 bp, Homo sapiens
gaaaagactcatatcaacattgtcgtcattggacacgtagattcgggagcccagcgaagtgccaacacctaagagacctcggggccgaccaaagggaa

SEQ ID NO: 290680 - DNA, 82 bp, Homo sapiens
tcgcgccggcaagagcagcgggagcggcgcggggaagggggcggtgtccgcagagcagatcggcttcagctccccaggaata

SEQ ID NO: 290681 - DNA, 99 bp, Homo sapiens
aaggccgagaagctctacccactgccctcggcccgcgtgtggtgtaaaggaattcattagccatggatgtattcatgaaaggactttcaaaggccaagg

SEQ ID NO: 290682 - DNA, 82 bp, Homo sapiens
agagagagcgatcaacacgctgaacggcttgaggctccagtcaaaaaccattaaggtctggccgtgggcctgggcttcgggg

SEQ ID NO: 290683 - DNA, 83 bp, Homo sapiens
cgggtctccggccggcggcggcggcggcggcggcggcggcgcagctccccgcagccaccgccacccattggaatggccaacag

SEQ ID NO: 290684 - DNA, 96 bp, Homo sapiens
atccaggttgatgaagctaatttattgacttggcaagggcttattgttcctaaaaggaagaccagtgtctcatgcctgaagcctggaatgtggacc

SEQ ID NO: 290685 - DNA, 118 bp, Homo sapiens
aggaactgcgcagcctcttcgagcgccgcggacgcgtcatcgagtgtgacgtggtgaaagacaatgcagatcttcgtgaagactctgactggtaagaccatcaccctcgaggttgagc

SEQ ID NO: 290686 - DNA, 75 bp, Homo sapiens
cccggaggagagggacatgtggaccttcatgaaggagaacaagaattcttcaaagtgacgcctcccccaggaagc

SEQ ID NO: 290687 - DNA, 51 bp, Homo sapiens
aaatgtgtaaagatgctcttagcattccaaaatatgcccggtgctatccgc

SEQ ID NO: 290688 - DNA, 75 bp, Homo sapiens
cttggaattacatagctggaaaggatcttacaggttctaagctggtctatgtccatcaccttcttggagaaggag

SEQ ID NO: 290689 - DNA, 83 bp, Homo sapiens
gcaccccgaacgggttgcttcccccgctgcgaggcatctccttggaaacaatgccatctttgaatgtgagagataaacctagt

SEQ ID NO: 290690 - DNA, 98 bp, Homo sapiens
cagggacccgaaccggtgcccatccagtccggtgccatctgaagcccccttcccagggcagagcggcttgggtaaatccaccttaatcaacaccctct

SEQ ID NO: 290691 - DNA, 51 bp, Homo sapiens
gcggcgttggaggccaccgtttccagatttggaggccaatcactgccacct

SEQ ID NO: 290692 - DNA, 82 bp, Homo sapiens
cgccgcagcaccatggcgaccaccgtcagcactcagcgcgggccgtgtactaatggtcacttgatgtgcgctggctgtttta

SEQ ID NO: 290693 - DNA, 75 bp, Homo sapiens
acgaattctcaacccctacaacttattcctgtccggagacagcctaaggttgatccacctgaagaattaggagct

SEQ ID NO: 290694 - DNA, 75 bp, Homo sapiens
tgaaaaaaacaggcgtattctggtaatttcgaggaggcatttggctttatgtcccgagttgccctacaagcagag

SEQ ID NO: 290695 - DNA, 137 bp, Homo sapiens
tcgtaagaagaggtcccaatcccccactctttccgccctaatggaggtctccagtttcggaaatccttttgtactattgctcattcatacttgttcatcaaagcctggagtccttaaggacagaatttacctctaaa

SEQ ID NO: 290696 - DNA, 50 bp, Homo sapiens
cggggccccccagcctccgccaacccagcaactccgaagtcaagcccgca

SEQ ID NO: 290697 - DNA, 83 bp, Homo sapiens
ggtacctgcggccaattcggtggaacgaggacgcggactgcgaaggcaggtcgggaaagaggttaaagaagacacgcaagtat

SEQ ID NO: 290698 - DNA, 75 bp, Homo sapiens
atgtggagctttacctcgtggctgattatttagagcttcttggacacttaatgattgttggcaagaaatgtgctg

SEQ ID NO: 290699 - DNA, 83 bp, Homo sapiens
cgcttcctggatgagaagagcggcagtttcgtgagcgacctcagcagacaatgcagatcttcgtgaagactctgactggtaag

SEQ ID NO: 290700 - DNA, 101 bp, Homo sapiens
ctatcgccaagcagtgagaccattgcctgtcactgtgcggcgagacaattgcttatcgccaagcaatatttggtttccaggcaggactgacgtctttggat

SEQ ID NO: 290701 - DNA, 100 bp, Homo sapiens
ctcagccactagctgcgatgcatgtgatcaagcgagacagcaactctggaaagtggcttctaactcggcgcattttcttagtggatgcagtaagtggacg

SEQ ID NO: 290702 - DNA, 96 bp, Homo sapiens
gagaagagcacagaatgtaccagagagctttatcttcaagccaggatgaagggagactgggcaagactcttacgccccacactgcaatttggtctt

SEQ ID NO: 290703 - DNA, 74 bp, Homo sapiens
cggcaagaagatcggctgcggcaacttcggggagctccgcctaggtggtgaagctgctgctgcggtacggaggg

SEQ ID NO: 290704 - DNA, 74 bp, Homo sapiens
agaagtttcctgaaagaacaactgttactgaattacctcaggagcagacgcctccgcctagacctgaagcctac

SEQ ID NO: 290705 - DNA, 105 bp, Homo sapiens
gggcgcaggagggcagcaccagaggccagtggcactcccagctcggaaccaggctggagaatgcttacagagcttttgtgcctctcctcaagaatccggagcctt

SEQ ID NO: 290706 - DNA, 83 bp, Homo sapiens
cccagatgctcataaggattgtcctctttctacaaaaggtctcagctgagtctgctctgatcacccaacaagacctagctccc

SEQ ID NO: 290707 - DNA, 99 bp, Homo sapiens
ctcccctcgctgcccgggcccggagcgcagcgcggccgcacagtatgctcaggcttcagaagaggctcgcctctagtgtcctccgctgtggcaagaaga

SEQ ID NO: 290708 - DNA, 74 bp, Homo sapiens
gactgtcaacgaccggccagtcacaggttcccgtgtggccggtggttagggaagggcatggatgatggaagcct

SEQ ID NO: 290709 - DNA, 101 bp, Homo sapiens
gagacggcggcagcagcggcattcaggacacattcagctaacgtattttagcaggtggagtgaggttgaagattcctgtgacagcgatgccatagagagaa

SEQ ID NO: 290710 - DNA, 75 bp, Homo sapiens
aacagtctgcccacctgtggacaccagagatgaggtctcactctgtcacacaagttggagtgcagtggtatgatc

SEQ ID NO: 290711 - DNA, 76 bp, Homo sapiens
ggccagggaactcaaacagcagatgcaggtcactctgtgagactgctgggtcagaaaaaggataatggaaggcggc

SEQ ID NO: 290712 - DNA, 102 bp, Homo sapiens
tgatcgacttcctcacccgcgcctgcgacctcggtacatgtcccagagcaagcacacggaggcccgggagctcatgtactcgggagccctgctcttcttcag

SEQ ID NO: 290713 - DNA, 50 bp, Homo sapiens
caggacctgcctaattaccttcaaacctgacggcactgagccctcccaca

SEQ ID NO: 290714 - DNA, 119 bp, Homo sapiens
ggcctatgtcgttatggtgggaggattgactgctgctggggctgggctcgccagtcttggggacagtgtcagcagaatgtaactggtcactacatttccccctttcatgatattcctct

SEQ ID NO: 290715 - DNA, 90 bp, Homo sapiens
ggagatcggcctcagcccccgcaaggatggcctttcctaccaggtttttagaacttcagccataaaaatgggcagaattttccttgatca

SEQ ID NO: 290716 - DNA, 100 bp, Homo sapiens
cgcggagcccagacctacccgggcgaagcgggcgagcggtggtttggacgccggcggagacgcgggcgagacattaccagaaacatctttaccaaattat

SEQ ID NO: 290717 - DNA, 95 bp, Homo sapiens
tcgggtggaagaagtggggccatacacctacagtgatgtcttggcattgcccattttcaagcaggaagattccagccttccattggatggtgaaa

SEQ ID NO: 290718 - DNA, 76 bp, Homo sapiens
ctggggtcccttttgcctcagatactattttgaaggacgaccctgtcaccaacctgaacaatgccttcgaagtggc

SEQ ID NO: 290719 - DNA, 98 bp, Homo sapiens
atgttaatggggaggccaaagagacacagcccatttttttaggaggaagaacgtgcaaaacgtgaggagctagagcgaatactggaagagaataaccg

SEQ ID NO: 290720 - DNA, 100 bp, Homo sapiens
tcatcaccattggcaatgagcggttccggtgtccggaggcgctgttccagccttccttcctgggaaccatggactctcagatcaagatctgggacttgaa

SEQ ID NO: 290721 - DNA, 132 bp, Homo sapiens
ggagaagctgcggcgagtcctgagcggccaggacgacgaggagcagggcctgactgcgcagcaattctgtggtgttcttggtcacacatttatggagtttctgaagggcagtggagattactgccaggcaca

SEQ ID NO: 290722 - DNA, 97 bp, Homo sapiens
ccgccggacgtcggcaacggagaagcgttgggccggagcactagcctcacggagaaggatctgaaagaagccaaggcgcggagccagcagattgcag

SEQ ID NO: 290723 - DNA, 74 bp, Homo sapiens
tcggatgtctggtggggcggagcagacacagactatgcagatgggagcaattaccagctctggctgggtcgcca

SEQ ID NO: 290724 - DNA, 75 bp, Homo sapiens
ggagtggaccaggcaggagagggaggtgctgatcggattgaattatgttctggtttatcagaggggggaactaca

SEQ ID NO: 290725 - DNA, 75 bp, Homo sapiens
ggccaagaggcaaaggggaggttacgcagcaaaccatccagaaggaggaggaagccaagaatctggtgagcgaag

SEQ ID NO: 290726 - DNA, 100 bp, Homo sapiens
tcaggctaaagaacaatacgagcagatccttgcatttgtccaagggcttcgtgggacacatatgcaacatgcctatgatttttacaagcctgatatgcta

SEQ ID NO: 290727 - DNA, 75 bp, Homo sapiens
caagactccagatctgcacctgagccaaagaaacctgaggaaaatccagcttccatcaaacgcctactccaacta

SEQ ID NO: 290728 - DNA, 74 bp, Homo sapiens
gaaccagcggagaaaagaaaaagcaacgtttaattctagaaggacatttctactgcctccagcacctgccccag

SEQ ID NO: 290729 - DNA, 75 bp, Homo sapiens
caacttccggctggattccaagtccgtcgtggaggttctccagcatttggctcaaggccccaagggcacatgtga

SEQ ID NO: 290730 - DNA, 117 bp, Homo sapiens
tgtgcctgcgggctgcgaacaagctccgggaggggccccaaaggaaggcttcggtgactcaggtactccaaagattcaggtttactcacgtcatccagcagagaatggaaagtcaaa

SEQ ID NO: 290731 - DNA, 96 bp, Homo sapiens
gatgatagtaaagatcaaaagaattcgaagggagttggtaaacgctgcactgctccgtgtggagatggcgccctctttgacaagtcctgcagcgac

SEQ ID NO: 290732 - DNA, 50 bp, Homo sapiens
caggatccgaacccgcctccccaggacaaggtggagcagacacctcgcag

SEQ ID NO: 290733 - DNA, 98 bp, Homo sapiens
tctggggaaaaggcaaaaatcccatctaccgcaactctcagttcgagagtaaaggtgagccgtctcctgattttgggaggggccaacgtgaactacag

SEQ ID NO: 290734 - DNA, 100 bp, Homo sapiens
ctgtgttcacgagggcatatatgaagaaggcatttctattttagaaagcagttcggaatggaagttggatacactttgtgacttgtacgagacactgacc

SEQ ID NO: 290735 - DNA, 75 bp, Homo sapiens
gcatctgcagatggtttagtttatgaaccaataacaacgaacttgatgcaagtgataggtttgccaaggtcagac

SEQ ID NO: 290736 - DNA, 87 bp, Homo sapiens
cgtggtgggaagggcgcgtcgcctcggacgtccactgcaccctgcgcgagaagatcatggaagggaagtggttgctgtgtatgttac

SEQ ID NO: 290737 - DNA, 82 bp, Homo sapiens
ccgccggcagcgaagacgcggagaaaaaagttctcgtgcctccggagccagcgtggtggccatagacaacaagatcgaacag

SEQ ID NO: 290738 - DNA, 50 bp, Homo sapiens
ccggcccgtagtgtggaagcagcttcagaactttcacgatggccgtaaag

SEQ ID NO: 290739 - DNA, 75 bp, Homo sapiens
cttcatgggaaatcaagttctaaaggtctttgcagcaagagatgatgagacctcttcctgtgccaaaactgccac

SEQ ID NO: 290740 - DNA, 100 bp, Homo sapiens
ctcgtgcaattgttgccattgaaaaccctgctgatgtcagtgttatatcctccaggaatactggccaggatgtaggctatccggaattcctcaacatacg

SEQ ID NO: 290741 - DNA, 83 bp, Homo sapiens
cctttttcagaaatgcgcagagcaaacatctttcaaaggttgcatcccagcgcattagctcagtggacctctcgtgttgtagc

SEQ ID NO: 290742 - DNA, 82 bp, Homo sapiens
ctattccggcgcctccactccgtcccccgcgggtctgctctgtgtgccatggacgggctttatcctgtggataaacgcagag

SEQ ID NO: 290743 - DNA, 73 bp, Homo sapiens
ttgcctcctgtgtcccaaccggcctgagtcaaagcatgaataatctttcatttagtgagctatgttgcctctt

SEQ ID NO: 290744 - DNA, 100 bp, Homo sapiens
agggctaggcctgggggaccagaagcaagagaagttgtggtatttgagaagaacactgagtcaccattgccacagactctgatatcggtactgctggtag

SEQ ID NO: 290745 - DNA, 75 bp, Homo sapiens
ggctggacgttccacgccaaagcaaattgtggctactaatttgccccctgaagatcaagatggctctggggatga

SEQ ID NO: 290746 - DNA, 83 bp, Homo sapiens
gccaaaattatcaacaccaaaaagctttctgctagggtctaaagtagggggaaccaagcctgctggtggtgattttggagaag

SEQ ID NO: 290747 - DNA, 83 bp, Homo sapiens
cctccattggatttaaaagacagtcctcgtcagcactgactttcagctatggaatcggctgaccaactgactgaagagcagat

SEQ ID NO: 290748 - DNA, 108 bp, Homo sapiens
ggcatgccgctctccaccatccgcgaggtggcggtgctgaggcacctggagaccttcgagcaccccaacgtggtcagggcagctgcaatgactctccgcacggtatta

SEQ ID NO: 290749 - DNA, 100 bp, Homo sapiens
ttggagtgcagaactgaaagagattcgcttcaagctcagcttatcaatatgggtgttattcctaccttagtgaaattactgggcatccactgccaaaatg

SEQ ID NO: 290750 - DNA, 51 bp, Homo sapiens
atgtctgcctcctggtgaaaaaggggtttgttaaagttgttaagaataagg

SEQ ID NO: 290751 - DNA, 98 bp, Homo sapiens
gagagacaccgggatagagaacgggaccggcaccactgagaaagaagctaaaccagccccagaaatatttgaaaatgaagtcatggccctgctgagag

SEQ ID NO: 290752 - DNA, 75 bp, Homo sapiens
gggtaccctctatgaaaaacagaatggaaaagagtcttctgcccagaaaaattatatggcatttctggactctca

SEQ ID NO: 290753 - DNA, 132 bp, Homo sapiens
gagaaatggttgttcaactactagatgactttaaaatatcaggagttaatggaacacctatgaagagcgagctctgtatctcgaagcaataattcagaaccaccgcgaagtaatgacattcgaggatttcgc

SEQ ID NO: 290754 - DNA, 100 bp, Homo sapiens
gggatatccacagttcgatcaaggaaacatggtagaatggtgcttacctcaagatattgaccttgaaggtgttgagttcaagtctatggccagtgggtcc

SEQ ID NO: 290755 - DNA, 101 bp, Homo sapiens
cgctgtcgaggcgatgctggctgcggcaagcattggtgccatctggagctccacgtccccggacttcggtgtgaatcattcgcaacgacaggcgcctcctc

SEQ ID NO: 290756 - DNA, 75 bp, Homo sapiens
gcttcttcaagcagcccaccttctgcagccactgcaccgacttcatctggcccatcttgacgattccaagaccac

SEQ ID NO: 290757 - DNA, 50 bp, Homo sapiens
ccatccccgaccgccctcttctgtcttgacaagttggatggcttgaggac

SEQ ID NO: 290758 - DNA, 98 bp, Homo sapiens
gtttagattgctaatggctagcaaaaaagatgatccgggtataataatgaagttaaaagagcagcactccaagatatttgaatggtggtacttccata

SEQ ID NO: 290759 - DNA, 80 bp, Homo sapiens
aaagaggttgattacagcggcctcagggttcaggcaatgcaaataagaatccacattcatctcaatggaaggatcctgcc

SEQ ID NO: 290760 - DNA, 75 bp, Homo sapiens
cctgggacctctgaagtgaacactgcagggccatttggtggaggaaggagaggccagtctaccctcccctgccat

SEQ ID NO: 290761 - DNA, 100 bp, Homo sapiens
cctgatgttgctaaatgtagacaatggttagagaagaattttccaaatgaatttgcaaaacttactgtaggtgaaatacatatgggaggtcaagaacatt

SEQ ID NO: 290762 - DNA, 83 bp, Homo sapiens
cgggaacatcctcctggactcaatcatggcttgtgtacaatgactcttcttgcttttcacctaagttgaataagcaccctgtg

SEQ ID NO: 290763 - DNA, 100 bp, Homo sapiens
tagcttttttaacaacattggaaagtgctccacagtcccttccagaaccagtggcatcagcacattccagcagtgcagagtcagaaagcaccagtgactc

SEQ ID NO: 290764 - DNA, 100 bp, Homo sapiens
ggaagcgagactcatacgcaacctcaatgatgaaggtcaccgtgtccaaagggggcgaccgggacagtgacgacgacagcgtcctcgaagccaccagctc

SEQ ID NO: 290765 - DNA, 97 bp, Homo sapiens
tgcggggtgcgccggcagaggatccagtgttcaccatcctggccccggaaggtgctccttgtcttctgagatgttgggcccctcttgggatggagat

SEQ ID NO: 290766 - DNA, 90 bp, Homo sapiens
gcaaggccaaagacagggagaagaaatctcctgcaaagaagctgagccatgcaattagtaaatctttggggtgtgtacccacgagagaac

SEQ ID NO: 290767 - DNA, 98 bp, Homo sapiens
gcggttccatcctacacttgggtgttgctctcttgccattcgtggatgagcgaaggctacgagctgccctagaagaggtatacccagacctcactcca

SEQ ID NO: 290768 - DNA, 101 bp, Homo sapiens
atacaccacttagtaaactaatgaaagcctattgtgaacgacaggaatgaatctgaagtctgctgcagtaaaacacagaaggctttaaaatgttttcttgc

SEQ ID NO: 290769 - DNA, 73 bp, Homo sapiens
gctaaagcagcgtgcgttcagccctggggaatcactagatttgatctacttggcgactttggaaggtttaatt

SEQ ID NO: 290770 - DNA, 75 bp, Homo sapiens
tatgagttcaagatcacatggtgaatctgatgttccagcagaaatccaggtgttaaaagaacccctacaacagcc

SEQ ID NO: 290771 - DNA, 98 bp, Homo sapiens
actttgacagctttcaaaccgcaatttctgagaacagaataatcggagccatggccatattttttcaaatgcagagtttgcggggtggtacagaagcg

SEQ ID NO: 290772 - DNA, 100 bp, Homo sapiens
tgtgcaggagctgaagcagcagaaccccaggctggtgtacgatgaacgacaatctccttgagagctggagcgacctcgacgagctgaagggagccaggag

SEQ ID NO: 290773 - DNA, 78 bp, Homo sapiens
tgaatctataatgctggagatgaaaggtgccttcaggacaacaactgggactacaccagatctgcccaggccttcact

SEQ ID NO: 290774 - DNA, 100 bp, Homo sapiens
tcctcggcttgcatttgtttctgctgaccgcgggccctgccctgggctggaacgaccctggcggctatgagaggttttcctccgagtacccagaattctg

SEQ ID NO: 290775 - DNA, 52 bp, Homo sapiens
cctctggtatatggacaacccccaggtcagctgttgccagcaaaccgcaata

SEQ ID NO: 290776 - DNA, 97 bp, Homo sapiens
gctggttgttccgttgcgagctgcagctgcgatctctgtggtaggcccagcaccaaatcagatgaaagccaaggaagggaggaatgtgtacagttct

SEQ ID NO: 290777 - DNA, 75 bp, Homo sapiens
ctgactttcagctatggaatcgggtatttgtggtgcagcagattcccaacagtaacctcctcctcctggtgacag

SEQ ID NO: 290778 - DNA, 100 bp, Homo sapiens
aagagtcaataactgaagacttaagatgacaagattctgcagatcattacggaattgataaaaacagagaataactgaaactgaaattcatggtcaactg

SEQ ID NO: 290779 - DNA, 75 bp, Homo sapiens
aaaccagacaaccttcttttggacagcaaggcagtagacagcagggactccctggccatggctctgtatgcgtgc

SEQ ID NO: 290780 - DNA, 82 bp, Homo sapiens
cagacatgcgccagcacgcctgagtgatgatgcgggtgtgctggttggtgagacaggacagccggcaccagcgaatcagact

SEQ ID NO: 290781 - DNA, 135 bp, Homo sapiens
cacaggattacatctcctcctgcggcaagaagacgctccacgaagtcctggaaaaagtcttcaagtctttcagacctaacccattaaaagagccagtaaatcctgtggaaaatggccttcagtgatcttacatcg

SEQ ID NO: 290782 - DNA, 75 bp, Homo sapiens
atctgcgccgggtcgccacatactgggaggctgtgctgcccaagcttcacctggatgaggactacccatgctcac

SEQ ID NO: 290783 - DNA, 80 bp, Homo sapiens
agatgtcaaagacttagcttttaaattaaaaaggaagctattcaccattgaggatgattcaaagccgccttactcctacg

SEQ ID NO: 290784 - DNA, 90 bp, Homo sapiens
tacgcagaacccgggagtaggagactcagaatcgaatctcttctccctccccttcttggacttggaccactctataggaactcagtatag

SEQ ID NO: 290785 - DNA, 100 bp, Homo sapiens
acgtgccaccaaagtgacaaagggggcctttggtgacatgcgtaccaaccaagaagctgaagaaatatgagaaagaatatcagacaatgcgagagagtca

SEQ ID NO: 290786 - DNA, 75 bp, Homo sapiens
cgccgtggcagcctgaacggagtgtgcgacggattgggagactgaggctgatgtgaatccaaaggcctatcccct

SEQ ID NO: 290787 - DNA, 106 bp, Homo sapiens
gtgtatccaacagcctctaatatggagtatatgatgttctcagtgcagctgagtcttggtgagcagacatgggaatccgaaggcagcagtataaagaaggctcagc

SEQ ID NO: 290788 - DNA, 74 bp, Homo sapiens
agaggggacttgatgttaacaaatgtgagattgccagattactgacagccctgtcctaggagcacaacgtccga

SEQ ID NO: 290789 - DNA, 76 bp, Homo sapiens
tcggtgaaatcctgtcctgaagactgtaagattctccgggcccaaagccgaagtgcaagtggaaggaagatctctg

SEQ ID NO: 290790 - DNA, 60 bp, Homo sapiens
ttcatcaaaaatagtgatagctttgataagctacatatcgaaatcgaattgtgagccaaa

SEQ ID NO: 290791 - DNA, 100 bp, Homo sapiens
tggaagatggcgctggccggatggaaatcctaatgacagtctccaaattcgcctccatctgtaccatgggaatgaaggatggcagcatgccgtgcattaa

SEQ ID NO: 290792 - DNA, 101 bp, Homo sapiens
atgtcggcgaagccgcgggcgaggaggatcccttttcccccagaaattactcaatgctgaaacctctcaaagtggtattagagacgctgaaagcaccatgg

SEQ ID NO: 290793 - DNA, 118 bp, Homo sapiens
ccgagagccagagagatgtcggatttcgacagtaacccgtttgccgacccggatctcaacaatcccttcaaggtggcatttttctgaagttgttcattaagacttcccagcattccta

SEQ ID NO: 290794 - DNA, 75 bp, Homo sapiens
gaatcaggggaggcatgcttcagttgagacatttgggaaatgatgaagtgcacattgtttggtcagagcatacta

SEQ ID NO: 290795 - DNA, 100 bp, Homo sapiens
gacagcggtccggacgccgcccgaacatggactccgccggccaaggctggtgcagtggtgtcatcttggctcagtgcagcctcgacttcctgggatccag

SEQ ID NO: 290796 - DNA, 118 bp, Homo sapiens
cagaagtcgcgtgtctaggtgagtcgcggtgggtcctcgcttgcagttcagcgaccacgacctgcctagagctggaacgttacctccagagcgagccctgctatgtttcagcctcaga

SEQ ID NO: 290797 - DNA, 101 bp, Homo sapiens
gccgccatggagcccgactcggtgattgaggacaagaccatcgagctcatgctattgacctgaaaagtggttctggaaaagtgtaccaaggccctgcaaaa

SEQ ID NO: 290798 - DNA, 75 bp, Homo sapiens
atttacagcaaaattcagggcttcaaatataatgccatcttcaaggttcagaggacagttttggagaaggagatg

SEQ ID NO: 290799 - DNA, 100 bp, Homo sapiens
ctggaggacggcagaccctgcaaagtggtactccaaagattcaggtttactcacgtcatccagcagagaatggaaagtcaaatttcctgaattgctatgt

SEQ ID NO: 290800 - DNA, 158 bp, Homo sapiens
caacgtcccggccttcctgaccaagctgtggaccctcgtgagcgacccggacaccgacgcgctcatctgctggagcccgcatttttgaaacgttggggttgttggagtggttggattttccctggaattgagtgagaaattcagaagactgaagccca

SEQ ID NO: 290801 - DNA, 122 bp, Homo sapiens
aaccttccccagccatggcttccctggggcagatcctcttctggagcttgtggcccaggtccttgaacataaagctataggctttgtgatggtggatgccaagaaagaagccaagcttgcca

SEQ ID NO: 290802 - DNA, 90 bp, Homo sapiens
ctgaaaggaattcctagatctaaacaccaggtgactgaaaactcctgaggcatttcctggactagaatgggtagtgaagacccatgtcag

SEQ ID NO: 290803 - DNA, 100 bp, Homo sapiens
gggaacattcctcataaagcgagtcgtcaaggagttgcagtatctcggaagatggtacgaaattgagaagatcccaacaacctttgagaatggacgctgc

SEQ ID NO: 290804 - DNA, 83 bp, Homo sapiens
gagaaaggcccacctgtgtcctggttgagggtctccagggttctttggggcccgagatgcagtttcacatacagctgggtact

SEQ ID NO: 290805 - DNA, 50 bp, Homo sapiens
tttgtcaccaaatgtgcctttcagacgaaggggaggaccaggctggcgat

SEQ ID NO: 290806 - DNA, 83 bp, Homo sapiens
tgaagatctggaagacgcgctcctgcgccgcagcaatgcagagtccctggacaggctcctgccacctgtgggcactgggcgct

SEQ ID NO: 290807 - DNA, 98 bp, Homo sapiens
tgcggagaccactgttcaaggccacagatgaggaaactgagacccagaaaggtggaagcacttgtctaaggtcacgcctccaggaagcagtgtgtcca

SEQ ID NO: 290808 - DNA, 100 bp, Homo sapiens
ccaggaagcccaagtccatcttcaaagcggagagcgggaggagccacggagaaagtcagtggtccatgctgtggacggcaccgccgagaacgggatccac

SEQ ID NO: 290809 - DNA, 75 bp, Homo sapiens
aaaccagccgaacttcagggtttccaccgttcgttcaaggaggatacgaagcgttttcggcttcctgcccggagc

SEQ ID NO: 290810 - DNA, 50 bp, Homo sapiens
gagccccgcgtttcagccctagggaagggaacctcagaacctgttctgga

SEQ ID NO: 290811 - DNA, 74 bp, Homo sapiens
tataccctcatgagcatggtggccaacctcttgtatgagaaacggtcctggacccaagccagaagcctctgcaa

SEQ ID NO: 290812 - DNA, 74 bp, Homo sapiens
ggacagcggcccggaggacctgcctctcgtcagctgtggatttctttaaccagatcaacatgttatatggaact

SEQ ID NO: 290813 - DNA, 83 bp, Homo sapiens
atcacattggaccctcctcccaactgtaggtgccagaaccctgtggagcatcatgaactgggaagagtagctgagccccagag

SEQ ID NO: 290814 - DNA, 74 bp, Homo sapiens
catcttcgaacttagacttccggaaggactttggcgagggtcaaaatgcagatcttcgtgaaaacccttaccgg

SEQ ID NO: 290815 - DNA, 82 bp, Homo sapiens
aaagacgggccattttccagacctcatccaggtgtggacactgccagcggctgcagccgacttggaatgacctgggagacaa

SEQ ID NO: 290816 - DNA, 98 bp, Homo sapiens
cctggggccggggccgggcggcaccgcggtgcgcaagcgcaaccgtcggtgggtcggggatcggtcgcctgagaggtcccgagggctgtaacctgttt

SEQ ID NO: 290817 - DNA, 100 bp, Homo sapiens
ggcgctatggaggagctcgatggcgagccaacagtcacttttgctaatccagactttacacaacctatctcagaagttgtagatgaagtaattcagaatt

SEQ ID NO: 290818 - DNA, 100 bp, Homo sapiens
aagaagcagtagagggtgccatgcacattcaggtgttctgggactcagtgttagaagctgtctgtctgtaagaatcttgctgtctctgcctcatgaaaac

SEQ ID NO: 290819 - DNA, 90 bp, Homo sapiens
gattaaaagagcgaataaagtttatcacgccgggagttttccgtctgatgaaggttggccatttgcaaagtatcttggagcttgtggaag

SEQ ID NO: 290820 - DNA, 100 bp, Homo sapiens
ctgggcatcatagccgacgctaccgtccgctccctgggcatctgggtcacaggccccagttccaccccctgaagcacggatttgatgagtggtttggatc

SEQ ID NO: 290821 - DNA, 90 bp, Homo sapiens
gcccacaccttctggagggaaagttgcggagcccgttacagaatgtctgaaggggacagtgtgggagaatccgtccatgggaaaccttcg

SEQ ID NO: 290822 - DNA, 83 bp, Homo sapiens
cttccctatcgtcgcccccttcaccttggatcatgttcaagaagtgtccctggccagtgtccttccacctgtccacaagcatg

SEQ ID NO: 290823 - DNA, 90 bp, Homo sapiens
aaatggcagccggcttcaagcagatgacttcctccaggactatactttattgatcaacatccttcatagttcgatcctttggtacagaag

SEQ ID NO: 290824 - DNA, 80 bp, Homo sapiens
agatcaacgtcctccgggaccggagtcagaaccctccgcagagtaaaggtgaggcggaaccaaccctcctggccatggga

SEQ ID NO: 290825 - DNA, 75 bp, Homo sapiens
aaatgggctagatatttccagaggctgcaatctggaggcgtttggaggtgttctccagcatttggctcaaggccc

SEQ ID NO: 290826 - DNA, 75 bp, Homo sapiens
tggtgcttcctcatgtattgaagaattccaatcccagttcatttttggcgtcttactactgcaggcactaacaag

SEQ ID NO: 290827 - DNA, 97 bp, Homo sapiens
aggactcgccatcgtggccttggctgtctgtgcggccctacatgcctcagaaggggattttggactggcaaccaaagtcgaatatgacggggagagg

SEQ ID NO: 290828 - DNA, 84 bp, Homo sapiens
gcaaggaaataggatttaaccgctctctgcctcccaggaactgtggctgcaccatctgtcttcatcttcccgccatctgatgag

SEQ ID NO: 290829 - DNA, 83 bp, Homo sapiens
tctaacgctgcctttgctttaaaacagtattacttgcgggctgaagtgcagtagtggagtagcgcaatcatggctcactgtag

SEQ ID NO: 290830 - DNA, 100 bp, Homo sapiens
cagcgatgctgaggatcgaggaacgttgtctgtactatactggcaattgctggagaagattttgcaattgttgcttctgatactcgattgagtgaagggt

SEQ ID NO: 290831 - DNA, 99 bp, Homo sapiens
cttgatggcctctatgacccctgctttctccttcagctcttcagtgagctgaccaggccagttggtgtggatgactacagctcagagtctgatgtgatt

SEQ ID NO: 290832 - DNA, 75 bp, Homo sapiens
cagcgccatggagacggtacagctgaggaacccgccgcgccgtattaattttaaagacccacagtttgctgaaga

SEQ ID NO: 290833 - DNA, 100 bp, Homo sapiens
ggcggccatggtccaaccttgaaggaacatttatcctatttccactttgttggacgaataatgggaatggctgtgtttcatggacattatattgatggtg

SEQ ID NO: 290834 - DNA, 100 bp, Homo sapiens
gctgcgggccaggggtactcggaaggcgcgggcaggagcctggcgaggatgcaccttcccctgccttggaaaggttctccagcatttggctcaaggcccc

SEQ ID NO: 290835 - DNA, 100 bp, Homo sapiens
tcccagctctactccaggccccgtccgcccgggggcgccgcccaccgcgcctcgctcgagcatcccgagggccccgtcttcggacgaggagtgcttcttt

SEQ ID NO: 290836 - DNA, 96 bp, Homo sapiens
gcagacagctgtgactatgaaggggaactttgcccgtgtgaagatgcaggtcaccatgtctctctcgtccctggtggggacgacgcagaacttcag

SEQ ID NO: 290837 - DNA, 105 bp, Homo sapiens
ttgggtcgcagttcttgtttgtggatcgctgtgatcgtcacttggtgagaagccctaccactgcaactgggacggctgcggctggaagtttgcgcgctcagacga

SEQ ID NO: 290838 - DNA, 120 bp, Homo sapiens
gattcgatggacatggacatgagccccctgaggccccagaactatcttttcgttgatattcactgatggactccaaagaatcattaactcctggtagagaagaaaaccccagcagtgtgc

SEQ ID NO: 290839 - DNA, 96 bp, Homo sapiens
aaaagacaaagaatatgctgaaattattaggtatgaaaatgaaagtcttcagaatggaaggaagtcaactgaatttccaagaaaaatacgtgaaca

SEQ ID NO: 290840 - DNA, 83 bp, Homo sapiens
cacaactgcaggaacaccgtcacgctgctggaggagggagggaagatccctgtgagatggacagctccagaggccatcgccta

SEQ ID NO: 290841 - DNA, 96 bp, Homo sapiens
tgctgcaactgccttctccagacctcttgccaggtggctgggaaggctctgcttcctacaagttgactttcacggcagggggcgccattgagttcg

SEQ ID NO: 290842 - DNA, 100 bp, Homo sapiens
ccgctgctgctgaggagaggagcgtcaacagcagcaccatgggatgacgtagctttgccaaagacttagaagctaagcagaaaatgagcttaacatcctg

SEQ ID NO: 290843 - DNA, 100 bp, Homo sapiens
gcgaagctggatgagaactcggccttccttcagttcaactggaaggcggacgtggtggagtcctggatcgcatgtcggtgcctcaggccatggagtggct

SEQ ID NO: 290844 - DNA, 100 bp, Homo sapiens
cacatccgcacccacacgggcgagaagccctacgagtgcaacatctgcaaggtccgcttcaccaggaatcttgtcgattggcctggctgctgcctactac

SEQ ID NO: 290845 - DNA, 100 bp, Homo sapiens
aatacattgccagaacttggaatactctactggacaaacatttcctccaagaaactccccaacttttaaatcatttgaagaaaaggtcgaaaacttaaag

SEQ ID NO: 290846 - DNA, 75 bp, Homo sapiens
gtcatcggggatgtggacgaaggggccgacctcctagagtaacagttacccctcaatgagcgacccctacctgtc

SEQ ID NO: 290847 - DNA, 101 bp, Homo sapiens
gacccttttgattccgcctcacagttgatggagccaggtaaacgctgcatttctacaacagccacctgtgcaggccctgcatgctctgtaacctggggatt

SEQ ID NO: 290848 - DNA, 50 bp, Homo sapiens
ggaagacccgggatccacgggaggcggcgacttacagccagctggcccac

SEQ ID NO: 290849 - DNA, 98 bp, Homo sapiens
agcgggattggaccaaaccagagggacagagtcttctgggtctctctgcctgaggccctggagggagagaaggttgaaatcacaaagattagacacct

SEQ ID NO: 290850 - DNA, 75 bp, Homo sapiens
agccaacaacagtgacggaatgcctccatacatataacaacgaacttgatgcaagtgataggtttgccaaggtca

SEQ ID NO: 290851 - DNA, 90 bp, Homo sapiens
acgggatcgctttctcccatcgaaccttctagttgcttattgcagacaatgcagatcttcgtgaagactctgactggtaagaccatcacc

SEQ ID NO: 290852 - DNA, 74 bp, Homo sapiens
gacagcggcgagcagaactacggcgagcggtgatgctattgctgagattagagccatttgtattgaagaaattg

SEQ ID NO: 290853 - DNA, 51 bp, Homo sapiens
tgttgactatgaggaagttctaggattcactccttctccagttgcacagcc

SEQ ID NO: 290854 - DNA, 98 bp, Homo sapiens
aggaagcaaagcaaatggagaatggcatgctggtgacggacagtgcagggaagcaactgcagagggatctggacaactctcctctgtccccaccttca

SEQ ID NO: 290855 - DNA, 75 bp, Homo sapiens
caccggacagtcatcgctgaccaagttaatttggagtggcccctggagtcagtttcctacaccatccgaggcccc

SEQ ID NO: 290856 - DNA, 74 bp, Homo sapiens
tatgatgaagaaggtgaagaagcggatgaggtgccactgattaatgaacttgaatcagcaatacatcagctgta

SEQ ID NO: 290857 - DNA, 75 bp, Homo sapiens
tcgatctggagcttttcccctccccgggtgctggagaatctggtaaaagcaccattgtgaagcagatgaggatcc

SEQ ID NO: 290858 - DNA, 90 bp, Homo sapiens
gactctctttgtggccgatgcatacaagggactatttgaagtaaatccctggaaaccttcagctttagctgcagctgcctctgttcagcc

SEQ ID NO: 290859 - DNA, 90 bp, Homo sapiens
aggatatcgacgtcgtgatccagaagtccagagctgaggactgcctgtttgcagggatacccacccaccatcccagggtctacaacatcc

SEQ ID NO: 290860 - DNA, 83 bp, Homo sapiens
tcctgtacagcctgcagaactacaatgcagatcttcgtgaagactctgactggtaagaccatcaccctcgaggttgagcccag

SEQ ID NO: 290861 - DNA, 100 bp, Homo sapiens
cacccgatggaagattcgatggacatggacatgagccccctgaggccccagaactatcttttcggtgtgtgcagtggcctcagggatccggaaagtctag

SEQ ID NO: 290862 - DNA, 83 bp, Homo sapiens
cggcgctgctgctcgggctgctcttggaggaaaatgtttataggaggccttagctgggacactacaaagaaagatctgaagga

SEQ ID NO: 290863 - DNA, 82 bp, Homo sapiens
gagatgatgaattatacattctcactaatgttggagaacctacagaatttaagtggaactgggcaaactattaaaatgcaaa

SEQ ID NO: 290864 - DNA, 75 bp, Homo sapiens
cgtgacatccgaggtgcctttctccaaaagggaaaccgtgatgaaagcacaaacgtggacatgtcactcgcccag

SEQ ID NO: 290865 - DNA, 50 bp, Homo sapiens
tgatttgaaccgacttgattctgtggtaattgagggttttctgagcaaag

SEQ ID NO: 290866 - DNA, 100 bp, Homo sapiens
ggaagatggcggccggcgaaaggagctggtgcctgtgcaagttgttgaggctggattctagtgacatttataacgaattgaaagaaacatatcctaatta

SEQ ID NO: 290867 - DNA, 100 bp, Homo sapiens
ctggacttcgcctttcccgagccctggaggtggggagaaaaggagcaggaaaggacaaggagtccccgaagctgacactgagttcatggggttgagctga

SEQ ID NO: 290868 - DNA, 100 bp, Homo sapiens
tatcaggagacacagtatagcttctgacagtggagacactggcattggaacttcctgttctgatagcgtggaaggtgacagtggatagtggaaacaggag

SEQ ID NO: 290869 - DNA, 100 bp, Homo sapiens
cctcgctgcagatgcagtacagtattatcagttcctgcttgctggcccctggggactcctcgggatggaaaggccttccggatctttgctgtcaggcagt

SEQ ID NO: 290870 - DNA, 100 bp, Homo sapiens
atacctcctggtcagaggcattccattgtttcccgtgacagacatcacacctccagtgcaatccctgttcctaagagacaaagctccatatttgggggtg

SEQ ID NO: 290871 - DNA, 98 bp, Homo sapiens
tggctggctccctggctggtgccacagcccaaaccatcatttaccctatggaggaagaacagttagaagctatattgtcagcagcaattcagactagt

SEQ ID NO: 290872 - DNA, 73 bp, Homo sapiens
ctcatcagagggaagatctttttcctcaattggatagaccactggaacaatgagaaggagagaattctactgg

SEQ ID NO: 290873 - DNA, 100 bp, Homo sapiens
cacagcagaatttatataggaatgtgatgttagagaactacagaaacctggtcttcctgggtattgctgtctctaagccagacctgatcacctgtctgga

SEQ ID NO: 290874 - DNA, 89 bp, Homo sapiens
caaaaccgaacctagtcccaaagctttcatggcagaccagcaactcccctactggcactgctgaagctgtactacaggaaatggacaac

SEQ ID NO: 290875 - DNA, 100 bp, Homo sapiens
agacactcaggatttgtactgcctgaatgaaagcagcaagaatattcccctggcaaacctgcagatacccaattgtgtggcctggtttgctttcgaccct

SEQ ID NO: 290876 - DNA, 80 bp, Homo sapiens
tctgtctctatgaatgtgactaccctggttacctcatattttttcagaagaagtgaagtcaagatgaagaaccatttgct

SEQ ID NO: 290877 - DNA, 83 bp, Homo sapiens
gttcaggaaccaccagtgacagatgtacatatgaagattgaagaaaagataacattaacctgtggacgagacggaggattaca

SEQ ID NO: 290878 - DNA, 97 bp, Homo sapiens
gggcattcagggagactggaataactgatgaggaacaagccattagcagacatatctgaagagatggattaagaatgctttggattaaggattgtgg

SEQ ID NO: 290879 - DNA, 100 bp, Homo sapiens
aatgccatccagagctgtgcctcccagcaccacagtccttctgcagtccctcgtccagccacccccagatcctgataacttaagtgactctctcttttcc

SEQ ID NO: 290880 - DNA, 82 bp, Homo sapiens
gtgcgcgctggcgctgagcctgcagccggccctgccggtttacccaaggtccagcctagcccctaggcaccatgtcggacag

SEQ ID NO: 290881 - DNA, 100 bp, Homo sapiens
ttggatgtcttggttggcttgtcagatgaactggctaaactggatgcatttgtagaaggccctaccacttatgtcttggatgaagatgaacctcgattcc

SEQ ID NO: 290882 - DNA, 100 bp, Homo sapiens
aaatctcaaagatctcgtacaagatccttctttgccatggtaggggaggagtgtgtaggtgccatcgtttgcaagttggatatgcacaaaaagatgttcc

SEQ ID NO: 290883 - DNA, 101 bp, Homo sapiens
ggacaacggagaccagacctactgcagccacgcgggcgagcggctgtgtggatgtcggcgaagccgcgggcgagttcatagccctgatgaagcaagttact

SEQ ID NO: 290884 - DNA, 100 bp, Homo sapiens
cttgaggctcttctactgacagcctctgaaagtgccaaacccaagtctgaaatccacgtgtctatggccactccggtcactgtgtccatggagactgtat

SEQ ID NO: 290885 - DNA, 82 bp, Homo sapiens
ctaaagtctgcgaggaggaagtcgcctctgtgctcgtgagtccagggatctaaggcgccttggtgctgaattggggaagtct

SEQ ID NO: 290886 - DNA, 101 bp, Homo sapiens
cgttcaggaggaaccccaggcccttccagcggtggccacacgtcacacagtggggacaacagcagtgagcaaggaaacttggatttaactggccagaagca

SEQ ID NO: 290887 - DNA, 100 bp, Homo sapiens
ccacccaccgcgccggcgctcccttgtcacgcctcgggaagcgcgcacctgccaagcagactccattaataatatacctctttcatttcctaattgacta

SEQ ID NO: 290888 - DNA, 83 bp, Homo sapiens
gtccagccataacccaggagtaacatcagctcctttagcggcagagttttccgagtgaccttcttgatgctggctgtttctct

SEQ ID NO: 290889 - DNA, 97 bp, Homo sapiens
cgcgcgcctcccgggcggattccagccccgagcgggacagcgcggcggggagcgacgagctctgacgcccgctctgcggcttcggtgtttgaacagg

SEQ ID NO: 290890 - DNA, 83 bp, Homo sapiens
ggggactatgtggtggacttggacacgtcccagctctctctgggcatctggaaagaaatcccttccctgcgacatatgcaaag

SEQ ID NO: 290891 - DNA, 90 bp, Homo sapiens
ctgagatgcgcaaattcactccccagtacaaaggctgacggggtacgggatccaccactgctttgccaggagcatgatgggccacgaggt

SEQ ID NO: 290892 - DNA, 75 bp, Homo sapiens
ccggcgcgcacctggcagtcccgggctcgagccccgccctgccgccagccaggatctcattttgcccaacggtgg

SEQ ID NO: 290893 - DNA, 99 bp, Homo sapiens
aattcgaccccacacaaggaggatctaagcagcaaggtgattgaaatctctgaatatcgaacccagctctatgaatatctacaaaatcgaatgatggcc

SEQ ID NO: 290894 - DNA, 75 bp, Homo sapiens
ctctcggctcaaggaccgggaggtcacggtctagatcacattctcgatccagaggaaggcgatactctcgctcac

SEQ ID NO: 290895 - DNA, 100 bp, Homo sapiens
gcggcccaaactgaacccgaagaaagcccgtgcctacgggccagaggctgtggccaggccagctgggctcggggagcgccagcctgagaggagcgcgtga

SEQ ID NO: 290896 - DNA, 74 bp, Homo sapiens
ccaaatctcctgtgattgtagacagatggagtttcactcttgtctcccaggctggagtacaatggcatgatctc

SEQ ID NO: 290897 - DNA, 101 bp, Homo sapiens
ccaagggccgcggccgcggaggcctgcagcagcagaagcagcagaaaggccgcggcatgggcggcgctggccgagattcttcgttgtcaagccgccaaagt

SEQ ID NO: 290898 - DNA, 100 bp, Homo sapiens
ttcatgtcgacgtccctggaaacggccacacggatgccatggttacttttgccacgaattactgggagatgtactcaaagatcggccccaggaagcagat

SEQ ID NO: 290899 - DNA, 90 bp, Homo sapiens
cgattgcagggaggagcatctgaggtggtcacggggtttgcccagctcacaccaactgcagttgtggacatcggatacccaaggagacga

SEQ ID NO: 290900 - DNA, 75 bp, Homo sapiens
caccactgaagtgaccgaatgagggtcagtatagaccttctgatttgctgtgccctgagacatatgtttgggtac

SEQ ID NO: 290901 - DNA, 100 bp, Homo sapiens
gctggaccagttgatgggcacctcccgggacggaaggcgatgcactgggcgccatggagaagctgtgccggcagctgacataccacctcagcccccactc

SEQ ID NO: 290902 - DNA, 75 bp, Homo sapiens
agagaaactcagcgctggggaagaagagtgttgccagggacggcagtatctctttgtgtgaccctggcggcttat

SEQ ID NO: 290903 - DNA, 100 bp, Homo sapiens
tgacacgtacacagcaggactgagtgaagaagaacagctcgagagagcattacaagccagcctctgggaccgaggtattgctattaaggagtcagcaaaa

SEQ ID NO: 290904 - DNA, 100 bp, Homo sapiens
agatgtgatgccatctgttaagggggcccaggttcctggtagagttacacagttgtgccgccagtatagcgacatgcctcctttgacgttagagggcatc

SEQ ID NO: 290905 - DNA, 121 bp, Homo sapiens
ggcccagtttatggcttccagtggaggcattttggggcagaatacagagatatggaatcagctgtggggccatccatccagacattgcccacatggagcggctcctgcagcaggccatggc

SEQ ID NO: 290906 - DNA, 100 bp, Homo sapiens
ctgcagcagctgccagtggagccgcctggtatgaaagtgccagtatgtctagcacatgtgaaccttgcaaaagtaggaacagacattcagcccagactga

SEQ ID NO: 290907 - DNA, 96 bp, Homo sapiens
gctctgtaggaaggaacttggttccccctccctcagcttccgccccaaaagtttgttttgacaccgattgaagttgccattgaagacatgaagaag

SEQ ID NO: 290908 - DNA, 105 bp, Homo sapiens
tgaaagtgaactttgtcgcttatggactgaaagtttattgcattccaacagctcattttatgttgcttccttcaaaatgtctactgttcacgaaatcctgtgcaa

SEQ ID NO: 290909 - DNA, 75 bp, Homo sapiens
cattgacacccctacccagaacaacatctttaaggtggacatcttcaataaggagctactgctaatccccatcca

SEQ ID NO: 290910 - DNA, 82 bp, Homo sapiens
cgcgggacaagaaaattcatgcgttgtcgagatgtccacagaaggaggatttggtggtactagcagcagtgatgcccagcaa

SEQ ID NO: 290911 - DNA, 98 bp, Homo sapiens
acaaggatcccaccaacatccaggggcggcctgtggtaatttgtgataaggaggatactgagaccattaagaacacaaaaagaacgatcaaggtgccc

SEQ ID NO: 290912 - DNA, 76 bp, Homo sapiens
ctagaagtctactaatggacagttagtcacccacctacatgttgaggaagctgtagagaaatatgaagaagtgcta

SEQ ID NO: 290913 - DNA, 100 bp, Homo sapiens
gattcagggaataggagctggggagcccttctgcgccacaggcataatcaccagcaacacccgggacaataatacgggggccacctacccccacctgaac

SEQ ID NO: 290914 - DNA, 75 bp, Homo sapiens
gaggtacaagagcttcaggctgcaggagaccggcttttggatggtctcctgatcctggctgataagctccagggc

SEQ ID NO: 290915 - DNA, 100 bp, Homo sapiens
gagtcatctacttctgtctgcaggagatggctcaagagaaaggtgtgttgaggctcctggaacacggggaggagtacgtattcaccctgcctagtgccta

SEQ ID NO: 290916 - DNA, 90 bp, Homo sapiens
tgacaagtgtgggaaccagcgcttctccaccaggatcacgtttgagtgtgctcagatatcggcatgcccaagagaatcgtaaatgcaaaa

SEQ ID NO: 290917 - DNA, 74 bp, Homo sapiens
ccagctgatgcccttcttcgttgacaatgtcagtgcctactgcctgcatattgctgaggatgatggggaggtgg

SEQ ID NO: 290918 - DNA, 75 bp, Homo sapiens
cttgaaacatttatttccagtccaaagcaccatactggacataccttttatgtgcactgggactttttatttacc

SEQ ID NO: 290919 - DNA, 96 bp, Homo sapiens
gggactctggccgcggctactacctggagatgctgatcgggacccccccgcagaagatgacaacggcaacacgacaagaagtccttggcctctacc

SEQ ID NO: 290920 - DNA, 97 bp, Homo sapiens
aggaggagcgggcgagaagctgccgccgaacgacaggacgttggggcggcctggctccctcagaatggccaacatgcagggactggtggaaagactg

SEQ ID NO: 290921 - DNA, 95 bp, Homo sapiens
tcaacaaggcgctgctgaccacctacgggtgagaaataagaaaggctgctgactttaccatctgaggccacacatctgctgaaatggagataatt

SEQ ID NO: 290922 - DNA, 75 bp, Homo sapiens
atcttttgaaagcccttgaaacgtcaaagagagaaaaggaacagttccgtaagctctttattggtggcttaagct

SEQ ID NO: 290923 - DNA, 100 bp, Homo sapiens
aaaattgctgcctctggtggggaagtggaaggtaagactgtgccaaaatcccaaacttcagttgaaaaatagcccaccatatatacttgatattttgcct

SEQ ID NO: 290924 - DNA, 51 bp, Homo sapiens
cgaaaccccttggctccagtgcaccatggctcctcgcacctaccccagcaa

SEQ ID NO: 290925 - DNA, 76 bp, Homo sapiens
cattatttctgatctagagatgcttagagcatgaaagttttctgccgtctttggaatcttgtttgcaaacagctca

SEQ ID NO: 290926 - DNA, 90 bp, Homo sapiens
ggttggtataccacaggggggccacctgacccctcggacatccacgtccataagcaggacatattttggcatcgtgttcaacagatggta

SEQ ID NO: 290927 - DNA, 100 bp, Homo sapiens
aagaaaaagaagcgtatggactactatgactctgaacatctgatcatcggatatcatggagtctggcaagacggcttctcccaagagcatgccgaaagat

SEQ ID NO: 290928 - DNA, 75 bp, Homo sapiens
gaagccggggcggagcacgcgagctatggcgtcctgcctctgcggctctgccccctgcatcctgtgcagctgctg

SEQ ID NO: 290929 - DNA, 87 bp, Homo sapiens
cgtctgcggctctccgccgtccccagccctgcctctccctgggctctgccgcggcgagtcctttgcacatgttggcaacacacgcat

SEQ ID NO: 290930 - DNA, 87 bp, Homo sapiens
gggggtggaggtggtgcctctggcagtgacgaggacgaagtgtccgagaaaagttgccagacggccagcattgccactgccagtgca

SEQ ID NO: 290931 - DNA, 100 bp, Homo sapiens
ctctgccgtgccacctgctgcacccacgaatctgcccacccctcctgtaacccagcctgtttcacttcttggaaagatgaatgggagggctgattttcga

SEQ ID NO: 290932 - DNA, 59 bp, Homo sapiens
aggaaatcaagcacttcagattggcccacagggaagtgatgccgacatggtggataaga

SEQ ID NO: 290933 - DNA, 75 bp, Homo sapiens
aagctccggacagggaagacccgcaccaggaagcaggtctccagctggggtggacgtgcccaccagctgccgaag

SEQ ID NO: 290934 - DNA, 75 bp, Homo sapiens
atcctgatggtgaacatgccaggagagcaatgcaaaagatcctaagtgtgaacgtgaagtccccagccctgctgc

SEQ ID NO: 290935 - DNA, 100 bp, Homo sapiens
tattctcctccgaaccccttcatgcccaaatcccggaaactccagcgtgtctccagccgtggacttgaaagaggagattgatattcgactctccagggtt

SEQ ID NO: 290936 - DNA, 75 bp, Homo sapiens
gttctattgcccagctgctgtggagacaggcagcccacaacaagggtaacctggatgaggacatcattgcagaag

SEQ ID NO: 290937 - DNA, 75 bp, Homo sapiens
gggaaagctctctggggcagggtggtcgtgtgatggtaacagatgctgacaggtcaatactatctccaggtggaa

SEQ ID NO: 290938 - DNA, 74 bp, Homo sapiens
tgaagctgctggactagagagagagcggaagatgctggaaaaggaattctcaagaaatttgaggaagaagattt

SEQ ID NO: 290939 - DNA, 100 bp, Homo sapiens
tatgatggaatcccatttgttaatgcagagattcgtcagcgaactgcagctcaaagaaacctttctccaacaccagcaagccctaaccagggccctcctc

SEQ ID NO: 290940 - DNA, 50 bp, Homo sapiens
tcaaactgactttgcagccacggagagactccccacctggtgaacctgaa

SEQ ID NO: 290941 - DNA, 50 bp, Homo sapiens
ggatattcctcatgacattgctgtctggttggtttgacttccacaaatgc

SEQ ID NO: 290942 - DNA, 82 bp, Homo sapiens
actgcctgagctgaagggctgcctgggtgttagcaaagaaggtactccaaagattcaggtttactcacgtcatccagcagag

SEQ ID NO: 290943 - DNA, 75 bp, Homo sapiens
gggaagatggcgaaggtctcagagctttacgatgtcacttgggaagagagacaagagagacacctccaacttcga

SEQ ID NO: 290944 - DNA, 76 bp, Homo sapiens
gcctcccgaagtgctgggattacagtgatgcagtttggcaaagggaagtcgtgttgctaccggtttctgaccaaag

SEQ ID NO: 290945 - DNA, 76 bp, Homo sapiens
tcgcctgccaccgagccgggcccacctccccaccaaggaaggtactccaaagattcaggtttactcacgtcatcca

SEQ ID NO: 290946 - DNA, 100 bp, Homo sapiens
aattcctggaaaaagaagtccaagaagcaaaaaagggactgctaagaagataccaccagggcctgggatacaacagtgatgagataaggcctcggacttt

SEQ ID NO: 290947 - DNA, 100 bp, Homo sapiens
cagttaggcagcagcagccgcggagcagtagccgccgtgggagggagccatgaagcattacgagatgaagatctccttcaacgacaaaagcctgcagacc

SEQ ID NO: 290948 - DNA, 75 bp, Homo sapiens
gaatagagttgagcctgtgggacacttcggtgtccttgaatccgacccctactttgggtttgaagaagcaaagag

SEQ ID NO: 290949 - DNA, 100 bp, Homo sapiens
ccacgtgtgccatagctgttcactgaagagttccaggaatggatggaggtgctttaactgatacaagtctcacagattcctattttagcaccagctttat

SEQ ID NO: 290950 - DNA, 101 bp, Homo sapiens
agcctctctagtagctgggactacagatctttaatctcatgaagtacgacagctacagccgcttcttaaagtctgacttgtttttaaaacacaagcgaacc

SEQ ID NO: 290951 - DNA, 75 bp, Homo sapiens
cctggtgtcacctatcagtaaaaggctgctgagaactagccctagacctctgcgtgagggttcttctgccgaaga

SEQ ID NO: 290952 - DNA, 100 bp, Homo sapiens
tcggcatggctctgtccgggcccctgaccactgccgtgcgcctgccaggtctctaattaacagaagatggcaaagcccagccacagcagctatgtccttc

SEQ ID NO: 290953 - DNA, 96 bp, Homo sapiens
ccagcattggtgacatggaaaaggagccaggaattcccagtttgacaccacaggctgagctccctgaaccagtgcatttgcccagtataacatgga

SEQ ID NO: 290954 - DNA, 75 bp, Homo sapiens
tctgtgtgttcgagtggacaaaatggcgaagatcgccaagactcacgaagacctgcctagagctggaacgttacc

SEQ ID NO: 290955 - DNA, 50 bp, Homo sapiens
cctgcctggacccctactattgcaacaagaaaaattggaagctccaccac

SEQ ID NO: 290956 - DNA, 137 bp, Homo sapiens
tgggagcagaagcaggtgcagatcaagaccctggagggcgagttctcggtcaccatgtggtcctcaggagacgcaggtcagaatggaaatgggctgcagaccgggcagctattgtcagccgctggaactggcttcag

SEQ ID NO: 290957 - DNA, 80 bp, Homo sapiens
ggtaatcacagagctgctgattctcaaaacagtgcggtttgctgtgtttcaaagaagggtgctgaccacagtagtgctcc

SEQ ID NO: 290958 - DNA, 50 bp, Homo sapiens
ccgtggtgacattgtatcattggtataattctgaaataatcagcagaaac

SEQ ID NO: 290959 - DNA, 75 bp, Homo sapiens
gggaggcagcgcgggatcccagcctcaggcgtgcgcggacggtgtgcgggggcaattccaaaagtcttcagattt

SEQ ID NO: 290960 - DNA, 96 bp, Homo sapiens
ggagacgggtgaggtacaggctcagtctgcggccaagactccgtcctgcaagaattaaacaaccaccatgtcgagcaaaaaggcaaagaccaagac

SEQ ID NO: 290961 - DNA, 113 bp, Homo sapiens
aaccagtaccggctgacctcgctgtacgccgagcacccaggcgactgcctcatcttcaagcctgacatttaccccggtaactgctgggcatttaaaggctcccaggggtacct

SEQ ID NO: 290962 - DNA, 90 bp, Homo sapiens
aattaattaaaaggatttacggtatatcttatgactctacaggagccttgggatatagcacccctgctggatgcatgctgctggcacaac

SEQ ID NO: 290963 - DNA, 100 bp, Homo sapiens
cttgggactgggctcgatttgaggtactacgacgtccccatcgccaccctggacttctcctcgctgtacccgtccatcatgatggcccacaacctgtgtt

SEQ ID NO: 290964 - DNA, 90 bp, Homo sapiens
gtggggaggccttcgactggctgcttggggagattgagtccaagttcaaccaagccattggaatttatcgtgtgtgtggaaacaaaataa

SEQ ID NO: 290965 - DNA, 147 bp, Homo sapiens
ccgcctgggaggagcgcctggactcgcgggcggcggcgagcgcctttacaatggccctgaccctgtttgcatcaccaaatgccccaaaacttggacccatggagctggccatcattattactgtgcctgtttgcctcctgtccatag

SEQ ID NO: 290966 - DNA, 98 bp, Homo sapiens
gttagaatctgggactttcttcgttgccatgaggaaagaattctccgagaataatccagaatggctactctgatctatgttgataaggaaaatggaga

SEQ ID NO: 290967 - DNA, 121 bp, Homo sapiens
aagatccgcagctccacgcagcaagacccgcgccgccgggacccccaggacgacgtgtacctggacatcaccggtatcgagaaccttccctgcgaacttcagaggaacttccagctgatgc

SEQ ID NO: 290968 - DNA, 90 bp, Homo sapiens
gtgcaggatctgcagctactgctgcatcagaagaaatgaagcgtaaaagatgtgttgttttcaatcaaggtgaattggatgctatggaat

SEQ ID NO: 290969 - DNA, 100 bp, Homo sapiens
aagaaggatggaaagaagttgtaagaagggctcgatccatatacgagcgtgctttagatgtagactaccgaaatattacactctggctgaaatacgcaga

SEQ ID NO: 290970 - DNA, 101 bp, Homo sapiens
cagcgccggcctcctcagtgcgaagaagctgcagccgcacctggccaagggcagcctggcatcctcgctacaacctcattgttgtgggccgatacccagat

SEQ ID NO: 290971 - DNA, 50 bp, Homo sapiens
gccaaattgaattgactgggaaaaggcatgtggagaccccaaggcaaaac

SEQ ID NO: 290972 - DNA, 96 bp, Homo sapiens
ccggtccccaacgcatcatgccagggagccaagcgtcctgcccggccgcttgttagcagtggcacaagatcttacagaggatgaagaaacagtaga

SEQ ID NO: 290973 - DNA, 75 bp, Homo sapiens
cgtgccgcccgccgcccggatgggaccaccagagtgctacggtcctaaaatctctacacttgccaaaaaacaaca

SEQ ID NO: 290974 - DNA, 50 bp, Homo sapiens
gtaagattgtcttggaaatactaagttggacatatctgaagagatggatt

SEQ ID NO: 290975 - DNA, 80 bp, Homo sapiens
aagcgtcgggattaggtgaaagaggatacgaagcgttttcggcttcctgcccggagctgtgcagcaaacagtcgaccccc

SEQ ID NO: 290976 - DNA, 100 bp, Homo sapiens
cttgaatttcttaatgcatccaaagccttctggcaaatcaaataaagtgcccgtggtgcagccatcccatgcggtccatcctctcacccccctcatcact

SEQ ID NO: 290977 - DNA, 100 bp, Homo sapiens
catgatgtcttcagccagtataaaaacacagctcgacagtacgcctacttctataaagtcatccaggtgggaactttgaggctcagagacagagcagaag

SEQ ID NO: 290978 - DNA, 100 bp, Homo sapiens
catgaagagcttgaaagcgaagttcaggaagagtgacctctttcaccatgcctggatcacttcctttgaatgcagaagcttgctggccaaaagatgtggg

SEQ ID NO: 290979 - DNA, 100 bp, Homo sapiens
agtaagatgctgccgagtccgggcgaaaagcaacgcatgctgttggacaggatacgagcttgaaacctattcaggcctgttctgtgtggtcatcaatcct

SEQ ID NO: 290980 - DNA, 100 bp, Homo sapiens
gtcgagattatcgtagacggcacagccacagccattctcccatgtctactcgcaggcgtcatgttgggaatcggatatgtgcagcgggggctacagcgag

SEQ ID NO: 290981 - DNA, 97 bp, Homo sapiens
tgtgggggtgtcctggtgcacccccagtgggtgctcacagctgcccattgcctaaagaagtgcaccccagacatggatgtcatcctcaacattcctg

SEQ ID NO: 290982 - DNA, 75 bp, Homo sapiens
ggctgctcgggctgaccccacctgaggtggagcagttctggaggttttatagccacatggtacgtcctggggacc

SEQ ID NO: 290983 - DNA, 100 bp, Homo sapiens
ggtggcctggtgatggaaggacatctcttcaaacgggccagcaacgcatttaagacctggagcagatacaaactggactctcaggacaaaacgacaccag

SEQ ID NO: 290984 - DNA, 98 bp, Homo sapiens
tggaaactgcctgctgtctggggacaggccttgaaaagatcttttgaggtcgaggaggtcgagacacccaactccaccccaccccggagggtccagac

SEQ ID NO: 290985 - DNA, 82 bp, Homo sapiens
acccctatccccagtggagccggagtgcgggcgcgccccaccaccgccctcaccatggccgagacgcatccagagctttcgt

SEQ ID NO: 290986 - DNA, 90 bp, Homo sapiens
cgcatgcgggagatcgtgtggtaccgggccagaagcacttgtgtgtcaccagcctcctgatctgccagggtctgctctgggtgggcactg

SEQ ID NO: 290987 - DNA, 73 bp, Homo sapiens
ctcagccgcttggggcccgcacggaccctctacttcagtcagtttaggggctggtgcaaaggatgagttgcac

SEQ ID NO: 290988 - DNA, 100 bp, Homo sapiens
ggaggaggcggaggtccaagcggaaagcccttagagatttgtttgattccatggataaaacttcttccagtattccacctattattctactgcagttttt

SEQ ID NO: 290989 - DNA, 59 bp, Homo sapiens
caccacagtacttcacatcgtcgttcacatgggtatgacaacattttgatggaagaggc

SEQ ID NO: 290990 - DNA, 90 bp, Homo sapiens
aacttgtgattgagcagtttgaagacttgctagttaggattttattactggcagcatgtatatcttttcttcaatatccgtacattcccc

SEQ ID NO: 290991 - DNA, 101 bp, Homo sapiens
cgagactttaccatctttcgcagcctagggcaacgtccaagtctccgaacagagccacacgactcccgctggctcaatgctgacacttcctccatggccca

SEQ ID NO: 290992 - DNA, 82 bp, Homo sapiens
ggagaatgacaagagcttccgcggtgtcattctgacctcgcgtgagtgcatctccatccacgttggccaggctggtgtccag

SEQ ID NO: 290993 - DNA, 100 bp, Homo sapiens
aaatgtgacaggatcatgaatgtcaaaggcaaaagagagccagtgaagatacaacttcaggttcaccacccaagaaatcttcagcaggaccaaaaagaga

SEQ ID NO: 290994 - DNA, 75 bp, Homo sapiens
gagcgcccctccgagctggggttggacgctgccagtttgcacagcagcagtccaaaagaaactcttccttcaaaa

SEQ ID NO: 290995 - DNA, 75 bp, Homo sapiens
gcggcctctctggcagcagacatcagccacgcatctgaccttgttggccactcttcacctccaccatgagcctgg

SEQ ID NO: 290996 - DNA, 83 bp, Homo sapiens
cgatgagtggtctcggcaggctcttcgggaaggatccaattctggtacagcagttgcgccggacatacaaatatttcaaagat

SEQ ID NO: 290997 - DNA, 100 bp, Homo sapiens
tggtgatcaaggcactcctggaagtggttctgccatgtggacgatgacaactatgtgaacccaagggcgctgctgcagcttctgagagccttcccgctgg

SEQ ID NO: 290998 - DNA, 83 bp, Homo sapiens
gctcatcgggcagattagcgacatccgagtgcagaacctgcaaggcataagggccatgtgttctgaaattattttgaggcaag

SEQ ID NO: 290999 - DNA, 82 bp, Homo sapiens
gaaggcaccgacgtcatcatgctgaccaccaatcagatccgtaaggcagaaaatctatttcaggaacttcaggaacattttc

SEQ ID NO: 291000 - DNA, 90 bp, Homo sapiens
gtgtgcagagtgctgagaccgaaaaagcttgtggtgaaggggggcaaaaaaaagaagcaagttctgaagttcactcttgattgcacccac

SEQ ID NO: 291001 - DNA, 143 bp, Homo sapiens
agccactgctcaacctcaaactggaccgggtcatgcaggacatcgtgtataagctggtgcctggcttgcaagacagtggtgttcccactgatgaagagcaggcgactgggttggagagggagatcatgctggctgcaaagaag

SEQ ID NO: 291002 - DNA, 100 bp, Homo sapiens
gttcgtctcttacgtctgcggaagtgcagctgcctcagttcttagcgcaggtgagcagtaggtcatccagtcccagtgtcagaatgattactacctcagg

SEQ ID NO: 291003 - DNA, 75 bp, Homo sapiens
gcgcggacttccaagacctgcggccggacgcttgcggaccgcttcaaggggcctcttggatgcggcccacttctg

SEQ ID NO: 291004 - DNA, 100 bp, Homo sapiens
gaatcacttaaaggagtggacattgctagcaatgagctcccaaagccatccaggggctaagtgatggatcttgtactccgtgttgcagattactattttt

SEQ ID NO: 291005 - DNA, 90 bp, Homo sapiens
ccgcgacctcggtacctcggaccagctctgtaaaagccccgcctctgccttcggataggtacttcctggactctacctcggaaacttcat

SEQ ID NO: 291006 - DNA, 100 bp, Homo sapiens
gcagcttcagcacaatgacattgacaaacgggtcactactgtttttaatgaagccacatcatctttcgatttaaatcctcaagtgttacaacagttagat

SEQ ID NO: 291007 - DNA, 100 bp, Homo sapiens
cggggccatgtgcaggaccctaacgacaggcgcctccggcccatttacggaaggtgaaattgttgaagtggatgaagaaacagcagctatcttgaagaat

SEQ ID NO: 291008 - DNA, 50 bp, Homo sapiens
gatggtcccaccattgttcatgatgacagtgattccagcagtagttcaag

SEQ ID NO: 291009 - DNA, 100 bp, Homo sapiens
ccctggtgtcgtgtggtgcgaccactggagagggagtttctcgccctcgtcgcgcctgccgcgcggagagataagtgctgcttttgacacaaaaacgggg

SEQ ID NO: 291010 - DNA, 75 bp, Homo sapiens
cgacagcggcgagcagaactacggcgagcggaattcagaaggagctggcggacatcactttagaccctccaccta

SEQ ID NO: 291011 - DNA, 82 bp, Homo sapiens
attggaagtgaaacttctttgattatccatcgaggaggtgaatctggattgggaaagtcgacattaatcaactcattattcc

SEQ ID NO: 291012 - DNA, 75 bp, Homo sapiens
tcatcgtggtgtatgacgtcactgaccaggccatggagaagtgtaaagatgcaggattggccaagtccatcgggg

SEQ ID NO: 291013 - DNA, 88 bp, Homo sapiens
ccaactcagccatctgcggaggtcaagtgaacagcagagaatttcaaaggaccttgctaatatctgtaagacggcagctacagcaggc

SEQ ID NO: 291014 - DNA, 100 bp, Homo sapiens
gggaagggctccctacacggagacaagcctctcaccattaacaggattttcaaagcattgggaatggtaccacctcccgaaaatgtcagaatgaattctg

SEQ ID NO: 291015 - DNA, 75 bp, Homo sapiens
cgacgatctccatatttcattgcaagtaccttggccatgtagaagttgatgaatcaagaggaatgcacatctgtg

SEQ ID NO: 291016 - DNA, 76 bp, Homo sapiens
gcgggacgcgggcgccaggaccggccgaacgcagagtaccgtcatagtggccctccttatgttgggcccccccaac

SEQ ID NO: 291017 - DNA, 75 bp, Homo sapiens
caaagatgaaagaacaacctgtcttggagcgcttgcagtgagttcttcatgcctgggctggttgatacacacatc

SEQ ID NO: 291018 - DNA, 74 bp, Homo sapiens
ccaacgcatcatgccagggagccaagcgtcctgcccggccttgactatattgtggagtatgactatgatgctgt

SEQ ID NO: 291019 - DNA, 100 bp, Homo sapiens
gggcagtgtccttgctgaagcaggctgcagactcaggcttgagagagagaaattaatggacttacgaaatgaatacctgcaagcggatgaggctaataaa

SEQ ID NO: 291020 - DNA, 101 bp, Homo sapiens
ctgcagcaaagagacaagtcctaaatgccgactcagtggaacaatcttttgttggattgaaacagctaatcaacagctttgctgagccatcaaggtctaat

SEQ ID NO: 291021 - DNA, 100 bp, Homo sapiens
gtcgttgtcaccatcgtctccgccttccagttcggagaggtggttattaacttggtgatgcttttggctgaaatgaaaatacaggaccgcgctgttccat

SEQ ID NO: 291022 - DNA, 74 bp, Homo sapiens
acctgctgtacaccctcaacaaacaccagcgctttggatatccgccaggcatcgtgggtgtggctccaggagga

SEQ ID NO: 291023 - DNA, 51 bp, Homo sapiens
cttcatataccacgattaacagagagctctcaacgaaatgtggaagtgtca

SEQ ID NO: 291024 - DNA, 81 bp, Homo sapiens
taacatctttcgcttcacccaggctggttcagaggttgatctttgccggaaaacagctggaagatggtcgtaccctgtctg

SEQ ID NO: 291025 - DNA, 100 bp, Homo sapiens
ggggaagctgctaacccgacccggattggcgctgaggtggcccgtggggcagatgtcaagccctccaacatcctagtcaactcccgtggggagatcaagc

SEQ ID NO: 291026 - DNA, 81 bp, Homo sapiens
agatggaacccacctttccccagggttcagccgtctgtatatctccccagatacctgaaactgaccacctgagtacgtttt

SEQ ID NO: 291027 - DNA, 74 bp, Homo sapiens
cggcctcctcagtgcgaagaagctgcagccgcacctggccaaggaacttcagtgaagatttcatacattggcct

SEQ ID NO: 291028 - DNA, 85 bp, Homo sapiens
ttcccttacccgtcaaagtctgcttcacgtgtaacaggctgaccggttccctgatgtgttacctgcttctgctactgatccaaac

SEQ ID NO: 291029 - DNA, 100 bp, Homo sapiens
ctcctgggcctcggcgggtcactcttgccggccggcttcgctgcgggtttgcactgcccggcggtcttgcgagtggctggttccctgcagaagagcacag

SEQ ID NO: 291030 - DNA, 83 bp, Homo sapiens
ccaagctcctggccctggccctgatcatcctgctgggcttcgtccagatcgggaaggtgtggacgaatgtggaacctcgctct

SEQ ID NO: 291031 - DNA, 75 bp, Homo sapiens
tagaaggtgaccgcggatcccagcttcctgcagccaggtggtcctgccatcatggctgtcctctgcaaaggtctc

SEQ ID NO: 291032 - DNA, 83 bp, Homo sapiens
tccaggcttccgacggcctggtcctgtggggtctgccacatgtagaaagatatcttccaaaacgaaatcctccagcatcattg

SEQ ID NO: 291033 - DNA, 101 bp, Homo sapiens
ggacgctgccgtgcgcgccagagatcccagactgcgtggagcaggaatacaggagtttccagaaaatataaaaaattgtaaagttttgacaattgtggagg

SEQ ID NO: 291034 - DNA, 100 bp, Homo sapiens
ctatgtgggggcccccagcctggggtgcagggcccctgtcagagaaaccccgttcaccaaggccatggaagtggaggctgcagaggcccggtccccagcc

SEQ ID NO: 291035 - DNA, 99 bp, Homo sapiens
ggctgtctgttccctctcacacctccagcaactcgaaccgtaccagtcacaggaagccttatcagttgtgagtgaggaccagtcgttgtttgagtgtgc

SEQ ID NO: 291036 - DNA, 82 bp, Homo sapiens
cttgataaaaagagatgtggggggattctcgacctgctaacagaactggaccttttcgcacttttccagccattaactccag

SEQ ID NO: 291037 - DNA, 51 bp, Homo sapiens
caggtatccagcaatgaggacctgagaatgtaactggtcactacatttccc

SEQ ID NO: 291038 - DNA, 88 bp, Homo sapiens
cggccggggcctgcgggcgcccagagccgcgccgtccgcgccgcccgttctggcccccgacagctgctctcgggagccgcctcccgac

SEQ ID NO: 291039 - DNA, 83 bp, Homo sapiens
gctcaacgagctgctggaggacgagggccagctgacggagatggtgcagaagatggaggagcctgacatttaccccggtaact

SEQ ID NO: 291040 - DNA, 74 bp, Homo sapiens
atcatcctgctgggcttcgtccagatcgggaagggtgaccaaaagccagccccactgtgagttgaactctttcg

SEQ ID NO: 291041 - DNA, 98 bp, Homo sapiens
ggcggagaccgagggggagccccgcgcgcggcgtcggtctgccatcatggatgttctcgcagaagcaaatggcacctttgccttaaaccttttgaaaa

SEQ ID NO: 291042 - DNA, 82 bp, Homo sapiens
caggatcctggtatccgctaacagctatgaaacccacgtagtcgaacaccgtgatgcttctcctgcagggcgtgtgatgagg

SEQ ID NO: 291043 - DNA, 98 bp, Homo sapiens
accaccctgccgctgctgatcccaccgcggatttccatcaccagggccgagaacgacagggccaattcctgtccccccagcagcatggcatcgtgtgc

SEQ ID NO: 291044 - DNA, 100 bp, Homo sapiens
gcagggccccgagccggcccgggtcgagattgagctaagagaacgagagatagaacgactgtcagttgctttggatggtggtcggtcccctgatgtcctt

SEQ ID NO: 291045 - DNA, 100 bp, Homo sapiens
ctcgctcccccatcaacgtggagagcttgctggtctggtgagctgtaccttctttctggcagtgaatggtctgtattcctctagtgatgatgtgatcgaa

SEQ ID NO: 291046 - DNA, 100 bp, Homo sapiens
caagaaccagttaactgtacaaactacacagctcatgattcaagatggaaaaggtgatgtaaccattacaaatgatggtgctaccattctgaaacaaatg

SEQ ID NO: 291047 - DNA, 100 bp, Homo sapiens
gcaccatgacgtccatccatttcgtggttcacccgctgccgggcaccgaggaccagctcaatgacaggtgatgcttttccttggacgatcagcttgcata

SEQ ID NO: 291048 - DNA, 90 bp, Homo sapiens
cgggagcagcacttccacagccaagtgcgggagtccacgagcagtgtcgggcactccagatccaaggggtgaaagagaatatggaccaga

SEQ ID NO: 291049 - DNA, 51 bp, Homo sapiens
cagactacatggcatctaccatagggatgaagatgacgccaacagactcgg

SEQ ID NO: 291050 - DNA, 82 bp, Homo sapiens
gccaagatgcatggacccagctcagcgggacgcgccgctggagaatgaagttgagaagctgatgtctcctcgacttccaact

SEQ ID NO: 291051 - DNA, 50 bp, Homo sapiens
atgccgtgatcaagtacaaggacagtgtactaatggtcacttgatgtgcg

SEQ ID NO: 291052 - DNA, 75 bp, Homo sapiens
agtccctctcagaagcctcagtggctgttgacagatttaagtgagaaagatcagtctaaagaaaaggagaagaaa

SEQ ID NO: 291053 - DNA, 110 bp, Homo sapiens
ttcgagctatgatagaagaatttgacaaagatggtgatggagaaagtgctccaagtgaccagagcagtggcacctcctctcctctctgtgacagtggcttacatctcaac

SEQ ID NO: 291054 - DNA, 97 bp, Homo sapiens
gcgctgcgcagttttgttctgctccagctgttcgaaggtgatccaggttcacctttccttgccagtgaagatggcgtgcttggcggagtgattgtcc

SEQ ID NO: 291055 - DNA, 100 bp, Homo sapiens
ccgcatgtgatcactctgggactcgtggggctgcagcaccgggcgcaacctatatcctggtgatggtggatccagatgcccctagcagagcagaacccag

SEQ ID NO: 291056 - DNA, 71 bp, Homo sapiens
ggacagaggcaccaaggacctccaagacaggcaatccaccttccaaagaggtgcctgctgggaagtaccca

SEQ ID NO: 291057 - DNA, 75 bp, Homo sapiens
ggaagaggctcagatgtcaaagaactttgtcagcgagcaagaacaatgccaggaggtctggagaaaacgtgtcat

SEQ ID NO: 291058 - DNA, 75 bp, Homo sapiens
gtcaccgccgcccccccagacaagatggacaccgcggaggaagccactgaggcggctcccagctgcgttggcgac

SEQ ID NO: 291059 - DNA, 101 bp, Homo sapiens
gtgccggcgcccatccaagacctggaggccctgcgcgcgctcacggcgctcttcaaagagcagcggaaccgagagtattatgagggaggccgaggacttca

SEQ ID NO: 291060 - DNA, 50 bp, Homo sapiens
ccaggacactgagatttggagagtgccctgcaggagtcattaaatcaaaa

SEQ ID NO: 291061 - DNA, 100 bp, Homo sapiens
caaggagctggacctctacctggcctacttcgtgcgtgagcgagtgcccatgacgcttccggagacaaccctggaaacactgaagcataaaatcaacccc

SEQ ID NO: 291062 - DNA, 75 bp, Homo sapiens
cgcagcgatgggcaacacggtgcaccggaccctgccagattggagcctccctctttgctagtaacattggaagtg

SEQ ID NO: 291063 - DNA, 88 bp, Homo sapiens
tgcagtggcgcctaaagtctgagagagggaagtcgcctctgtgctcgtgagtgcatggggtataaggtgcactttacaggtccccgat

SEQ ID NO: 291064 - DNA, 100 bp, Homo sapiens
ttcagatgggatctttccggatcaatccagatggcagccagtcagtggtggaggaaaaagaggagcggtaccttatgttattttcaaatgtcctgataat

SEQ ID NO: 291065 - DNA, 75 bp, Homo sapiens
gcaacatcctgtcacaggccatgctctggcaaaaacatatggaatgtgcagatgtcccactattaactccaagca

SEQ ID NO: 291066 - DNA, 75 bp, Homo sapiens
ttttccggagggattccatcatagccgcggcgagtcctttgcacatgttggcaacacacgcatccgcatcggcct

SEQ ID NO: 291067 - DNA, 97 bp, Homo sapiens
ggaaaaggataggctgcagtttttgaagtttgaatctgagaagctgcagattgaaaaggaacgcttacaggctaaagccaattttgaaaaagaagaa

SEQ ID NO: 291068 - DNA, 82 bp, Homo sapiens
ttagatgactctgtggtgggtccctcagcccttctgagctctgtgctgaacaagtaccacaaagcctgctccacacctggat

SEQ ID NO: 291069 - DNA, 83 bp, Homo sapiens
cgaggttcgagtgttgcagagcctgcggggcaagatctgtgcgcgcggagccatggttatcatgtcggagttcagcgcggacc

SEQ ID NO: 291070 - DNA, 83 bp, Homo sapiens
ggccgtcagggtggtcattgcaatattaaggtctcaccaacggctttgggggtgcgaggagcgagcaggagccgggcggcggc

SEQ ID NO: 291071 - DNA, 99 bp, Homo sapiens
gaagttcttcgatgtatctaaacttggcaccaagtatgggaagaaggagaaagggccaacccctgaagaagcaatacagaaactgaaggagacagagaa

SEQ ID NO: 291072 - DNA, 80 bp, Homo sapiens
gggcgccaggaccggccgaacgcagaggtggaacacctgcagcaggagactgctgctctgaaaaagcaaatgcaaaaaat

SEQ ID NO: 291073 - DNA, 97 bp, Homo sapiens
gatgtcccgtgtccgggctacctgtttgaagagattgctattcttcagattattaaggaatcccagcagcagcatggtttacggcatggagattttc

SEQ ID NO: 291074 - DNA, 76 bp, Homo sapiens
ccggcctgcctgagccactgcgtgaggctagcactcatccgcttccgggtcaaggcaaccacacctccaaatcaag

SEQ ID NO: 291075 - DNA, 82 bp, Homo sapiens
gacgccatcaggctcaacgaggaactcaaagtggatgaggaaaggcttgtcaatgaggcagatcagattcaggttcgacggg

SEQ ID NO: 291076 - DNA, 82 bp, Homo sapiens
cgagacctcacctgcatggacttccactatgaggtcgcaatggaagaagagatcgccgcgctggtcattgacaatggctccg

SEQ ID NO: 291077 - DNA, 82 bp, Homo sapiens
ttcggctggaaggaaccgctctcgcttcgtcctacacttgcgcaaatgtctccgagaccttttaatcaaagtgaagtttggg

SEQ ID NO: 291078 - DNA, 48 bp, Homo sapiens
gactgctcagggtgccagacctcatcgcctcctgatcacttgccacgt

SEQ ID NO: 291079 - DNA, 100 bp, Homo sapiens
agatgcagatctgaagacctattttactgataagaaaacacatctttacacactaaattatgaaaaggggggtattttaaaagttgaagattttgaaaga

SEQ ID NO: 291080 - DNA, 75 bp, Homo sapiens
caaaaatcttgtacctgatgccgatattcaacgctttcgactatgaagaaatcgggagtgcactttttgactgta

SEQ ID NO: 291081 - DNA, 83 bp, Homo sapiens
caccctcgctccctctgctcttcctcccttcgctcgcaccatgacgaagttatacggaagcgtctcctcattgatggagatgg

SEQ ID NO: 291082 - DNA, 75 bp, Homo sapiens
tcacccagcatttcatccctcgtcgaaaggattggattggcatctttagaaacctgtctccagagaagattttcc

SEQ ID NO: 291083 - DNA, 50 bp, Homo sapiens
agcctccagagtagctgggattacagctgctgctggacacccactcgctg

SEQ ID NO: 291084 - DNA, 83 bp, Homo sapiens
cctgtacagcctgcagaactgcctccaccatggacagaggccaggccctgcccctcccaggcagcctggctccttctgctggg

SEQ ID NO: 291085 - DNA, 49 bp, Homo sapiens
cctcccaaagtgctgggactacagctgataccccaatgtccttctttga

SEQ ID NO: 291086 - DNA, 100 bp, Homo sapiens
gaatgagcattgaactacaatcagtttctaatccagttcacagaaaggaacttggatttttccaaaggtcaccagggtattacaggggacaaagaaggcc

SEQ ID NO: 291087 - DNA, 90 bp, Homo sapiens
gccccggcaactccagggtgtctggtccacgacctatcctaggcgccatgggccctcatctttgtgtcccatggagccggagagcacagt

SEQ ID NO: 291088 - DNA, 100 bp, Homo sapiens
gatgccgggggagcggggccttccacaccccctccgtgggtgtgtgatgacacccccaaccatggttgtgaagatgctagcgacacatcgctgttgggag

SEQ ID NO: 291089 - DNA, 115 bp, Homo sapiens
ggaaaatggagatgtctatacatttggttatgggcagcatgggcagctaggacatggagatgtcaactccagtatgtcattgaaagtgcccgacagagacctcctaaaaggaaat

SEQ ID NO: 291090 - DNA, 100 bp, Homo sapiens
ccaggttatccctcgaactcctagctcatttcgacagccttgtgagcattggcagcccagagaagatggagcccatcaccaaggtgtcacacattcccag

SEQ ID NO: 291091 - DNA, 73 bp, Homo sapiens
gacgttcatcgccgtgttatccttgagtaaaggtggaggtcctgattgccataagcagcctcacgtctccgct

SEQ ID NO: 291092 - DNA, 82 bp, Homo sapiens
cggcgagtttccgatttaaagctgagctgcgaggaaaatggcggcgggaggtcacagccaagactgcctttctatttatttt

SEQ ID NO: 291093 - DNA, 75 bp, Homo sapiens
cctcgccagcagccgtccggagccagccaacgagcgatctgcgatttccttctggttggctgtcctgcgtgggtg

SEQ ID NO: 291094 - DNA, 75 bp, Homo sapiens
ggcaaagtacttcagaacttttattccttccagaagcagctgacacttcctccatggcccatctatcgccggcat

SEQ ID NO: 291095 - DNA, 140 bp, Homo sapiens
tgtttacaacggactccttcctccctatgcttcttgccacttgacggaattgtactttgagaaggggatgacgacctcaggcgcgctctttccaagcctggtgccaggctctcggggcgcctccaacaagtacttggtgg

SEQ ID NO: 291096 - DNA, 98 bp, Homo sapiens
cggctgcgcttccgacggggcggccgggggctcagagatccaagtgcgcgccctggcgggtccggaccaagttgatgcggatgaaattaaaaggctag

SEQ ID NO: 291097 - DNA, 88 bp, Homo sapiens
aaagcagctcttggtctacaagattcagatgatgaggatgctgcagttgatcacagcacccagagactcagctagatttgcagaagcc

SEQ ID NO: 291098 - DNA, 100 bp, Homo sapiens
ccgaggcccctatggcagatttgaaaattcacccttgtagagtcattcctgcctttgagcggactcccttttaagccttatgtttgatcatcggccaagg

SEQ ID NO: 291099 - DNA, 101 bp, Homo sapiens
ctcagcgcggacctagacctggaatcgcccaagtccctctactcgcgaggcaccgcctagaatccttcgatctcgcttcaggaagaaaagtacctcatcct

SEQ ID NO: 291100 - DNA, 99 bp, Homo sapiens
aaagaggaggaaggggaaagacaggagccagggtcaaatcaccccggacagttgcagaatgaagaagagtctggagaacctgaacaggctgcaggtgat

SEQ ID NO: 291101 - DNA, 75 bp, Homo sapiens
agaagatgaagaaaccagcttgatatgttggaaactaaatatattttgccaactttggaaaaagaattattcttg

SEQ ID NO: 291102 - DNA, 97 bp, Homo sapiens
cccccgcccggcgcgagccccaggtcctggcagcaggtgagtggcggtcgccatcagacccgcgaagacatatctgaagagatggattaagaatgct

SEQ ID NO: 291103 - DNA, 80 bp, Homo sapiens
tgtcctcccccgcatgacccccttggtgcaatggatgagcttcatagtctggatccaagaaggcaagagttattggaagc

SEQ ID NO: 291104 - DNA, 80 bp, Homo sapiens
cctggagcctcagttggaagcagccgatccagcctgcggagcctgtggggcaggtctatcagccacagtctctgcaagtt

SEQ ID NO: 291105 - DNA, 75 bp, Homo sapiens
atcagattttgaccaagcattttgtaagcggatgtgatgctggtacaacccagagtagaatttattctgtctttc

SEQ ID NO: 291106 - DNA, 83 bp, Homo sapiens
cgctccctctgctcttcctcccttcgctcgcaccatgggtgcggggggcaatggcactgcagctctgggccctgaccctgctg

SEQ ID NO: 291107 - DNA, 75 bp, Homo sapiens
gctagttcctctccagctcagccgccaattctgtggtgttcttggtcacacatttatggagtttctgaagggcag

SEQ ID NO: 291108 - DNA, 98 bp, Homo sapiens
acgccatcgttgctgccttcttcgtcaagaatacctcctctgaaaaatggcagaagcagttttccatgccccaaagaggaaaagaagagtgtatgaga

SEQ ID NO: 291109 - DNA, 104 bp, Homo sapiens
cctgcacgacctgctcctacagccggcgatccactcccggctgttcccccggagtgacgagtagcacagcccctctatggtttagatggcagtgctgcaaagga

SEQ ID NO: 291110 - DNA, 75 bp, Homo sapiens
gccctggctgcgcgcgcggcccctcctccccggcgcctcccagtgtccatgaaactgggaggcgaccgtgttagc

SEQ ID NO: 291111 - DNA, 80 bp, Homo sapiens
gggctgcggccggagcgggcggctgagacaaaggcgacggtgactctcctattccatctgtttcttcgggatcatcttca

SEQ ID NO: 291112 - DNA, 86 bp, Homo sapiens
cactagaagaacgcttagcccaggctatggagtcaagtccatcatctccagaaccagctagtcttcctgcagaagatattagtgca

SEQ ID NO: 291113 - DNA, 100 bp, Homo sapiens
ccgagggggtcagcagcccagcccctacccaagacacccacatggaaacggacctgctcagcagcctagtgcaaggatgtgaacaaggtcgcctactgcc

SEQ ID NO: 291114 - DNA, 100 bp, Homo sapiens
aaaaatggagggcaaaggagatgtgatgtccactgcctgtggaactccaggctatgtcgtttcagaggcggagcacagagagctgcggctgggacaagga

SEQ ID NO: 291115 - DNA, 75 bp, Homo sapiens
agaacagttaatcctcaatttaagcctgatctaacccctagaaacagctccagtgatccacaagctcagaaatac

SEQ ID NO: 291116 - DNA, 50 bp, Homo sapiens
gccagaaggaagacaatgctgttgtctgagggaagtcaaaagcatgcaag

SEQ ID NO: 291117 - DNA, 83 bp, Homo sapiens
cgcacgggatccagagcgccgcgcacttcgtcatgttcttcgcgccctgggccgcctgggcagaatgtcacgatggacgaggg

SEQ ID NO: 291118 - DNA, 75 bp, Homo sapiens
tggaggcctacttgcagcatattacctatcaggagaggagatcagtcgcatcgaatacattcattcaaagaactt

SEQ ID NO: 291119 - DNA, 101 bp, Homo sapiens
cggcctgtgtgtcaacgacctggcggtggggctgcggcgcctgggactgcaccgcaccgagggcgagctccagctatgaaacccacgtagtcgaacaccgt

SEQ ID NO: 291120 - DNA, 75 bp, Homo sapiens
ggcagaattaaatcctgagctagatgctttactaggccatgctttacaaggagatacaactcgtcaacgaatcaa

SEQ ID NO: 291121 - DNA, 124 bp, Homo sapiens
acgaatttaggagacataagaccgttggttctgacgaggcacagcgtttcttgcaagaatgggagagccatgggggtgttgatgtccaagcggcagacagtggagcaggtgcagaaggtgagtc

SEQ ID NO: 291122 - DNA, 90 bp, Homo sapiens
aggccccagacatgctgcatagactgacatcaatttgccctatcttacaatggattcttctggacccaagcatttgaatatgaagttgac

SEQ ID NO: 291123 - DNA, 100 bp, Homo sapiens
gctgatggccatgaggcgcctgggtctagcgggagaatttctgcttctgggcaggatcaaaaccattcaagtgcaagatatgccattttgcaacagctca

SEQ ID NO: 291124 - DNA, 75 bp, Homo sapiens
tcatggatttaatattgaaaccccgctctggaggtaactataactacccaatattgcagccatggagtccatgct

SEQ ID NO: 291125 - DNA, 83 bp, Homo sapiens
cgcggctgcgcgaggagcaggaaaagatcctgaggaggatgaaggggctggccctggaggccgagagtgagctggagagacaa

SEQ ID NO: 291126 - DNA, 96 bp, Homo sapiens
tataatcctctttgggcacagctggataccatggagtagtttgaaacaggaacaaaatcttctgaaagctcggagcagaagcctttttggtcaaca

SEQ ID NO: 291127 - DNA, 100 bp, Homo sapiens
tatgcttacggttttgagaagccttccgctattcagcagagagctattattccctgtattaaagcatcatggcagaacaggatgtggaaaacgatctttt

SEQ ID NO: 291128 - DNA, 100 bp, Homo sapiens
gcccgcgggggagccccgggagccgcacggtctgccatcatggatgttctcgcagaagcaaatggcacctttgccttaaaccttttgaaaacgctgggta

SEQ ID NO: 291129 - DNA, 82 bp, Homo sapiens
ttcccagagctttcacgaaggcaccgacgtcatcatgctgaccaccaatcagatccgtaagcgtgagtgcatctccatccac

SEQ ID NO: 291130 - DNA, 82 bp, Homo sapiens
atagagctggaatcgccagctcccggcactgctacctctgacccaaagcagtgggacacagcaggccaggaaagatttcgaa

SEQ ID NO: 291131 - DNA, 99 bp, Homo sapiens
ggtggcccttgcatgcttcagttcatgatgttggagactatttccccacccttgcggaaaaacatgatcacggaagccttggcccaaggtgggatgcac

SEQ ID NO: 291132 - DNA, 75 bp, Homo sapiens
gtgcagcacaagaagcagcgtgtgaagacagccacaaccaaagtcccggagatccgtgatgtaacaaggattgag

SEQ ID NO: 291133 - DNA, 100 bp, Homo sapiens
ctgaaggctcggtgcagcagccctgcaaaggaaacctgtaggaagtgtcagggactctggaaagaacataatggcctcacctgtgaagagctggctgaaa

SEQ ID NO: 291134 - DNA, 83 bp, Homo sapiens
cgacagcaacagctctgccggctggaagggtttgaaagtattcttgaagggctgtttggacctgcattattaaaagatctcag

SEQ ID NO: 291135 - DNA, 100 bp, Homo sapiens
gaagtgctctaccagagttgcggtctcttgccctgtgcagcttcctgcagactggacttgcaaagtccagcctgtatggctggagttcccatgcctgcca

SEQ ID NO: 291136 - DNA, 83 bp, Homo sapiens
cctgcaggtattgggagatccacagctaagactccaggaccctctggaagcctagaaatgacatcttcatttgattgtacacc

SEQ ID NO: 291137 - DNA, 100 bp, Homo sapiens
ggaactcagcgccgaatacctccgcgagaagctgcagcgggacctggaggcggagcatgtgcctctactcttcatggatcttttggatgaaagaacactc

SEQ ID NO: 291138 - DNA, 78 bp, Homo sapiens
tttaaaacctccgtgtctctggctgtctctaggctaagcagagctgtagtacatgagcgagctagagaaatcaccacc

SEQ ID NO: 291139 - DNA, 76 bp, Homo sapiens
tggacgaagagctctcctccttcttcctcaactatctcgctgacacgcagacaaatttacatgtattggagaccag

SEQ ID NO: 291140 - DNA, 75 bp, Homo sapiens
ggacaacagcagccctggcccaggttctgaggcccgtggtatcaatggagataagtacatgcagatgaatcacgc

SEQ ID NO: 291141 - DNA, 90 bp, Homo sapiens
gtggccggtggtgccagactgcacgctccattctagggaaggggcttcgtgggacacatatgcaacatgcctatgatttttacaagcctg

SEQ ID NO: 291142 - DNA, 100 bp, Homo sapiens
gactgtgatatgaacaatgctgtaaagggggcgctgatggccaacttcctcacacaaggccagaacattcagaagattctcggccttgccccttcacgag

SEQ ID NO: 291143 - DNA, 100 bp, Homo sapiens
gcagaagaagctgaggatgaagaagatgctattcctctacacagccgactagttatgatcagagcagttactctcagcagaacacctatgggcaaccgag

SEQ ID NO: 291144 - DNA, 75 bp, Homo sapiens
aaatcatctccatattctcaggcacagagaaaggtgttggagagcacaatggctgaacaagtccttcctcaggct

SEQ ID NO: 291145 - DNA, 75 bp, Homo sapiens
aagcaaggccaaagacagggagaaggaatgtctgatcacagatacggggatggtggctctactttccagagcaca

SEQ ID NO: 291146 - DNA, 75 bp, Homo sapiens
catggatgtaaggatgcccaaatgcagttcgaacattaagcaatgccgaggactatctcgatgatgaagactcag

SEQ ID NO: 291147 - DNA, 100 bp, Homo sapiens
cacccggccaggttcccaggaagcacatttcagttggactgcgatgcagttcttcagctcttcattgaaacgctgctccacaacacaaatgccggccaag

SEQ ID NO: 291148 - DNA, 100 bp, Homo sapiens
tttggcttgtggagacagtggttccctgatgaaaaactgccatgatataacgaaggaggcccaacttcattcaataaggagcctgacggatttatcccag

SEQ ID NO: 291149 - DNA, 96 bp, Homo sapiens
gcgcttccccacgtcgcttgggggccacggcgcggacgccatgtactttgaagatgtcatcccattgtcttctgacctctataattgccactgaga

SEQ ID NO: 291150 - DNA, 144 bp, Homo sapiens
caagatgaaaattttggtaatactacaccaagaaaccaggttatccctcgaactcctagctcatttcgacagccttatatgagggaaggcaccattggagatatggctatcctgggtataacagaaagttttcaagtgaagcga

SEQ ID NO: 291151 - DNA, 74 bp, Homo sapiens
acgaggtgtcggcgcgggagcagcacttccacagccaagtgcgggagtccacgaattaaatatgggtgatgttg

SEQ ID NO: 291152 - DNA, 100 bp, Homo sapiens
aaagtgttggcggcggcgcgggaggcggtggcggcggctgcccggggccaacatgaccagagccgagactgtctgaagctgggcccacctgctgagggag

SEQ ID NO: 291153 - DNA, 100 bp, Homo sapiens
cagctgcacaacttccccatggacgaacactcctgcccgctgattttctccagctttcctacaacagcagccagtacccctgatgccgttgacaagtatc

SEQ ID NO: 291154 - DNA, 141 bp, Homo sapiens
ttgctggggggtcactcactgatgtggtaacagaaacgtgcatggatgaagcacagattgctgctgtatgcagagagcaacacagtcactcctggcggcaaaccaaacaaaaccagagtcatctggggaaaagtaactcgg

SEQ ID NO: 291155 - DNA, 100 bp, Homo sapiens
taactatggccggcctgcggaacgaaagtgaacaggagccgctcttaggcgacacacctggaagcagacaatgcagatcttcgtgaagactctgactggt

SEQ ID NO: 291156 - DNA, 100 bp, Homo sapiens
gtgcatcgcccactccagaagtagcatggaaatggagggcatcttcaaccacaaaggtagtaagcattaataatgtctttcatctttgagtggatctaca

SEQ ID NO: 291157 - DNA, 100 bp, Homo sapiens
cacaaagaagacacattcgatgtgttccgacagaggatgatgcagatgtacagacacaagcgggccaacaaatagatatgaagaagctgaagtccggaaa

SEQ ID NO: 291158 - DNA, 98 bp, Homo sapiens
ccatcctggagacagtcactgctgtggctgcgggaaagcctctctcttgcccaaaccacgatgggaatcagatttctgctcatggcagatcttcttcc

SEQ ID NO: 291159 - DNA, 75 bp, Homo sapiens
ataataacataaatgcagctacagctgtggctctacaggaacttgtaatagctggcatcgttgagaatgaatgga

SEQ ID NO: 291160 - DNA, 83 bp, Homo sapiens
cggacctttgctcaggaatctaccagcattaaacctttgagctagaaactaatctggattcactccctctggttgatacccac

SEQ ID NO: 291161 - DNA, 97 bp, Homo sapiens
gtcaactttactgagaattttccacctcctgacacaacaccactcagagtacttgattcttcagaaaacctccaaagtagatgtggactcaagtgga

SEQ ID NO: 291162 - DNA, 102 bp, Homo sapiens
gaaccaacgcattgggaagacagagtgcagaaataagcatgaaggaatagctgataaacttttgttgccgatatggagctgctgagccacataccattgctg

SEQ ID NO: 291163 - DNA, 100 bp, Homo sapiens
aagaagaagaggaagtagccaaagagcaactaactgatgctgacaccaaaggacatccataaaaattcatcagagagcattttactactgagctgcaaag

SEQ ID NO: 291164 - DNA, 82 bp, Homo sapiens
ttggactgagtcctgcaggacacagccattttgcagactctgatcacagtgaaacgttccatgggaacttgggccatgagaa

SEQ ID NO: 291165 - DNA, 83 bp, Homo sapiens
cggcccgcgatgtcaccattgttcagctgggtggccaagcctgtggacatctctacagcaatgagtgaacgggcacttgctca

SEQ ID NO: 291166 - DNA, 75 bp, Homo sapiens
tttggcattgacatttaattttagggtcctttatatagaagggagagtaggaacagttgggaccctaggaggcag

SEQ ID NO: 291167 - DNA, 121 bp, Homo sapiens
ggaaaccaagatagatgtgtcctatgaataccgcttcctggagttcacgactctgagtgctgggaggctgccgccaggctctgagcactgcagcggcatccgggtaaaggccgaggcccag

SEQ ID NO: 291168 - DNA, 105 bp, Homo sapiens
gacgaggcacagcgtttcttgcaagaatgggaggagtgacactctttgtggccctttatgactatgaagcacggacagaagatgacctgagttttcacaaaggag

SEQ ID NO: 291169 - DNA, 100 bp, Homo sapiens
actgcacagcagaagctctgaatcgtgttcctgaatgaaagaagtcagaaccaaccatcatcacagttgatccacctgcatgtggggagttatcaaactg

SEQ ID NO: 291170 - DNA, 74 bp, Homo sapiens
gaaaagttgagcacattgccaaccggagttccccaaggtgatgagacaaaccatgcttctgccacatcaacaca

SEQ ID NO: 291171 - DNA, 96 bp, Homo sapiens
cggtgattgaggacaagaccatcgagctcatggtcaccgacgatgagggcgcacctgctgtcctggagcttccgatctctgttcggggaccctgtg

SEQ ID NO: 291172 - DNA, 76 bp, Homo sapiens
atgcttgaaatcttggatactgcaggaacgggtctaaaattcccaggactccacagctttgcaccagataagcctg

SEQ ID NO: 291173 - DNA, 100 bp, Homo sapiens
agaatcagaggtgcagccgcaagaaagcacatgcagatgacaatccaggctctccaggatgaattgcggatccagagggacctgaatcagctgtttcagc

SEQ ID NO: 291174 - DNA, 82 bp, Homo sapiens
cccgcacctccactccatcctgaaggctaccaactacaatgttaatgaaattatcaggaaggagttttcaggacctcctgcc

SEQ ID NO: 291175 - DNA, 75 bp, Homo sapiens
atcttcacttggcaaactcaacaagggctgctggctcgtgtcacgttcaccaccagaccccacatcaggagtccc

SEQ ID NO: 291176 - DNA, 108 bp, Homo sapiens
cgaggagcgcgtcgtgcgcctgggggtgcgcgcctgcgacctgcccgcctggacaatgcagatcttcgtgaagactctgactggtaagaccatcaccctcgaggttga

SEQ ID NO: 291177 - DNA, 83 bp, Homo sapiens
gcagggcctgcagcgggagctggacggcgagcgcgagcggcgcgagaaaggacttaagtcacaacagattatctttcatcaag

SEQ ID NO: 291178 - DNA, 75 bp, Homo sapiens
ggccaggtccctgctgaatcacacgccgccatccgggaggcccagggaagattgttgtgtccactgtatcctggc

SEQ ID NO: 291179 - DNA, 100 bp, Homo sapiens
cagggcccggcagccgagcagcctggcaacggcggtggcgcccggagcccgaggtccaacatctggaaatcaccttactacacaagattctcaaatagta

SEQ ID NO: 291180 - DNA, 105 bp, Homo sapiens
cggcgcgggagcagcacttccacagccaagtgcgggagtccacgcctgcctagggtagttaaaagacgagtgaatgctctcaaaaacctgcaagttaaatgtgca

SEQ ID NO: 291181 - DNA, 100 bp, Homo sapiens
tctttctggcctggaggctatccagcgagtcgtaagaaagcagtgggagttgaagtcattgtcaagtgcttgcgatcttttacaagaaaatctcactgaa

SEQ ID NO: 291182 - DNA, 74 bp, Homo sapiens
gagaaggaggcccagcaagtgtatggtgggaaggaggccaggacttaagtgggcagaccaacatccacctcagc

SEQ ID NO: 291183 - DNA, 83 bp, Homo sapiens
cttcaaggaacgggtcggctacagggagggacccaccgtagagactaagatgtgtgcaacagcaccgatcttccggaagtcga

SEQ ID NO: 291184 - DNA, 90 bp, Homo sapiens
ggcacctgcgcgaagctggccaaagcctgcccagacggctcacctgtgcgggatggaacaaaagggagaaggtggtgcaggatgccgccc

SEQ ID NO: 291185 - DNA, 75 bp, Homo sapiens
gttgtcctgtgctggggctgacaggagtcagaaataccatcagaggaggggtactgtgactttaatagtaggcca

SEQ ID NO: 291186 - DNA, 90 bp, Homo sapiens
cccccccagacaagatggacaccgcggaggaagatatcagttttagagaatgtggcgtggagaaattctcaaggaaagagtaaaatgctg

SEQ ID NO: 291187 - DNA, 100 bp, Homo sapiens
gcgtctcgctcaagtgatctttgataagaatgattcagattttgaagctaaagttaagcaggttctaaatggcttctaagaagttgggtgcagattttca

SEQ ID NO: 291188 - DNA, 100 bp, Homo sapiens
gggggtgtcctggtgcacccccagtgggtgctcacagctgcccattgcctaaagaagagcagtagagaactgtggactattctgcttggaaggtcagctc

SEQ ID NO: 291189 - DNA, 50 bp, Homo sapiens
gtgcaggctgccaaggccagcggcccctccaggaacggtcccctttgctg

SEQ ID NO: 291190 - DNA, 75 bp, Homo sapiens
ctgatgcttacctacaaatcttgattgaacaattaaaggtagatgacattaatgctgataagaatatctcttctg

SEQ ID NO: 291191 - DNA, 73 bp, Homo sapiens
ttcaaccggagttacctgagcccagaaggcctaaatgtgcacagcatgctcaagcaccagacgctggtcctga

SEQ ID NO: 291192 - DNA, 100 bp, Homo sapiens
gcctgcccatcgcggccatagtggacgaaaagatcttctgctgccacggaggcatcttatgttaacctacctaccattgcgctgtgtaacacagattctc

SEQ ID NO: 291193 - DNA, 98 bp, Homo sapiens
aagaccacttctactacatccacgtggacaaggtcctcaaaatgagcacatgaagaggttgctgtgaaactttaagtggccctactgcgcagaagcat

SEQ ID NO: 291194 - DNA, 100 bp, Homo sapiens
ccttgggtttgaagatgatgttgtgattgagtttatattcaaccagctggaagtgaagattggccgcgtaatccaggttgctgctgggagcagcaacctc

SEQ ID NO: 291195 - DNA, 75 bp, Homo sapiens
gggtcccgcagtcgcccgcaaccggggcgaatcatggcggccgccaagaataatcatgggccagactgggaagaa

SEQ ID NO: 291196 - DNA, 95 bp, Homo sapiens
ccttcgagatctccctctggatccttctggcctgcctcatgaagataggactttccttatcccagttgattgtgcagaatacactgcctgtcgct

SEQ ID NO: 291197 - DNA, 83 bp, Homo sapiens
cgcgggtgaccgaaaggatcatgaactagtgacctggaaagatgtcatgtggcctgtgttttggaccgtggttcgtacctatg

SEQ ID NO: 291198 - DNA, 50 bp, Homo sapiens
agcaaggtcacctcaggatccatggccagacgggtgcagggaacaactgg

SEQ ID NO: 291199 - DNA, 100 bp, Homo sapiens
gccaagaagtgccaggtggagcggcaggaaggccactcacagggcttcaacaagctagctgagattcatgatgttgctatcaaaagttgagaaattgtca

SEQ ID NO: 291200 - DNA, 88 bp, Homo sapiens
ggggattcgcagggaggatgtcgggacaccccggaagctgggaaatggctctacagattctcccctgcccctggagaaggaggagcag

SEQ ID NO: 291201 - DNA, 80 bp, Homo sapiens
accctgtggtggcttattactttgacggactggacaaagcttctatagcaaactcagatggccccacagcaggttcccaa

SEQ ID NO: 291202 - DNA, 100 bp, Homo sapiens
gtttgatggcttcgaggtgaactggaccgagcagcagcagatgaatgtgacagtgatgataacatgggtgccaaaaatacttcaataggagaagaattta

SEQ ID NO: 291203 - DNA, 101 bp, Homo sapiens
gaaaacacgatgaaaacagaaccgacttctccccttgtggaattacaagagatttcgactgtggaaggattgacttggcctctacttcttgttaaggaaat

SEQ ID NO: 291204 - DNA, 100 bp, Homo sapiens
attcagaaggaacttgcagaaatcacattggaccctcctcccaactgtagttgagtggtgattttatgcaatggcttcaagccacagttcttcaccagtg

SEQ ID NO: 291205 - DNA, 100 bp, Homo sapiens
gtcttaaatatctacccatggaataaagagctgtatttgatcaggtgcttacactccagagcccctcagcagtttccggtgggctcttctctcaactggc

SEQ ID NO: 291206 - DNA, 83 bp, Homo sapiens
attcagactgcattaccgtgtcctccatgtcaagttcctattcctatgcaacttggcattaagaacggaatgttttttgggca

SEQ ID NO: 291207 - DNA, 88 bp, Homo sapiens
tgatttcaaagggacacccactaggcgctacagatgatgaacaacatgggtggtgatgaggatgtagatttaccagaagtagatggag

SEQ ID NO: 291208 - DNA, 83 bp, Homo sapiens
atgtgggcaaagacaaccctcagggcagctttgactgcatccagcaaacattctccagggagatgcacttatttacatggaac

SEQ ID NO: 291209 - DNA, 100 bp, Homo sapiens
ggcgcctaaagtctgagagagggaagtcgcctctgtgctcgtgagtgcatggggtataagattgtgaataagtggaatacagctctcattggccttatga

SEQ ID NO: 291210 - DNA, 100 bp, Homo sapiens
agaagactgatatagaagggaccttattcgtatatcgaagatagccacccgcaaggcctacgggcaggcactggccaagctgggccatgccagtgaccgc

SEQ ID NO: 291211 - DNA, 96 bp, Homo sapiens
ccgggtcatcagccactacgccgggcaggatgccacgttgcctgaggcaaaatcttcaacttggcagttcggcttcctttgtcttttcccttggag

SEQ ID NO: 291212 - DNA, 100 bp, Homo sapiens
tgctgagggtggcggccggataggctctggaagaggatctgaaccagaagaagcgggagcaggagatgttcttcaagctgagcgaggaggcggagtgccc

SEQ ID NO: 291213 - DNA, 100 bp, Homo sapiens
atggatctacattataccaataacgaggtagacatagctgacattgagaatgaagagaaccgctactgtctattcatggaactcctggaatctagtcacc

SEQ ID NO: 291214 - DNA, 111 bp, Homo sapiens
gatgccagcgtagctgaatccagtaccaaaaacgtcaacaacagttttacgggacaaaagtggctctcaatccagcacatgcacattgaagcaagttaaaggatttaatat

SEQ ID NO: 291215 - DNA, 98 bp, Homo sapiens
agaatgcatacttggaatgaatccttctagagacgtccacgggggatatgagactttctactcggaatatcctgagtgttgcgtggatgtaaaaccca

SEQ ID NO: 291216 - DNA, 90 bp, Homo sapiens
ccgggtcttccagagcgtgaagatcaagatcgctccagaacctgggtatcaacccagcaaacattggcttcagtaccctgactatggagt

SEQ ID NO: 291217 - DNA, 100 bp, Homo sapiens
tgggtcaccaagagaggctgagagaccaggcaaatactctatctggatcttctctcagtcaggcaccatctcatatgtatggcaatagatcaaattcatc

SEQ ID NO: 291218 - DNA, 100 bp, Homo sapiens
tccgtgctcccacgtgcttccccttctccactggctgggatcccccgggctcggggcgcagagggtgctcgagaggaagacctcgatgctgtggaagcgc

SEQ ID NO: 291219 - DNA, 51 bp, Homo sapiens
gtctatgattacctgatgtatgtagcttgtgagaagaatgagttgatgaca

SEQ ID NO: 291220 - DNA, 51 bp, Homo sapiens
gctggccgggagcggagcccctgtggtgaactttgaggcgctgatcatcac

SEQ ID NO: 291221 - DNA, 75 bp, Homo sapiens
cgagttcggctcaaaggatttgagaagtatcgagcacagcttgataccaaaatttgcctgagaatacagatcaac

SEQ ID NO: 291222 - DNA, 75 bp, Homo sapiens
agacctttatgatgatccattcccacttactgaataccttgcatcccagggatgaagcccacttgatcatggtgg

SEQ ID NO: 291223 - DNA, 100 bp, Homo sapiens
tgattcagtccttcacacagttccctggaaatacctggaatggccaaatatcaaggtgaagttcaaagtttgaaactggatgatgattcagttatagaag

SEQ ID NO: 291224 - DNA, 83 bp, Homo sapiens
gcagcaacagaggggactagcagcgaatatggaccttgctgcaagaaactgcctggtaggtgaaaataatgttctgaaaatca

SEQ ID NO: 291225 - DNA, 98 bp, Homo sapiens
cagagacaccagcttcagtggcctgtcgttggaagagtacaagctgatcctgtccacaggactatctgctgccaaactcttgactgaatatggcgtta

SEQ ID NO: 291226 - DNA, 75 bp, Homo sapiens
agcgctgctggcgggcgttaggtggaccccgaaggatgactgggctgccctgaagctacatgggaagtgtgatga

SEQ ID NO: 291227 - DNA, 50 bp, Homo sapiens
cagggcgtgacgtcgggaggagggcaggagattgaccccagcctgggcgt

SEQ ID NO: 291228 - DNA, 90 bp, Homo sapiens
gccgccatcttgtgggagcaaaaccaacgcctggctcggagcagcagcctctgaggctccaggaacactcggaggtgtctggcttccttc

SEQ ID NO: 291229 - DNA, 100 bp, Homo sapiens
ggggccttgaagatgatgaagatatgacacttacaaggtggacaggcatgattattgggccaccaagggtggctgtgaaaaacaatatcgatgtcttcta

SEQ ID NO: 291230 - DNA, 89 bp, Homo sapiens
cgccgcggagacaaagatggctgcgagagggccccacggtgggtaccacagccattaccatgatgagggctacgggccccccccacctc

SEQ ID NO: 291231 - DNA, 98 bp, Homo sapiens
gccatcaggtaggctgcgttgaggatctttgctcttccatccgcctttgatcgtcttcctcttcagccatccagattctgaaagtcaagaagacatca

SEQ ID NO: 291232 - DNA, 73 bp, Homo sapiens
aggaaagcaaaggagtcagggatggctcttcctcagcttttgcgagaattgaagcaccctaatgtgattgcat

SEQ ID NO: 291233 - DNA, 75 bp, Homo sapiens
ctgacttgagcctgcagtgtgctgtgagagatctaccactaggtgaaaggtgtagcagtcactcggcctacaccc

SEQ ID NO: 291234 - DNA, 87 bp, Homo sapiens
cgcagtccatctgactcctgcttcccgggtgttgctcgtgtggctggagatgctcatggtctatccccggaccaacaagcagaatca

SEQ ID NO: 291235 - DNA, 98 bp, Homo sapiens
cgaaggggacgtggtagcggcggcgggggcacagccagggttaaagtattgcacaatcagctggtccttttccacaatgccattgccgcttactttgc

SEQ ID NO: 291236 - DNA, 100 bp, Homo sapiens
tttcacatccttgtctgtgaagctaaactcaatgctgctgtgtgggaagaagatttgtaaagaaaactcttaggagtggcaaaattctattcagaagaat

SEQ ID NO: 291237 - DNA, 83 bp, Homo sapiens
agcgaacgaccaagagggtgttcgactgctagagccgagcgaagcggtggcccagttgaaatccttcccttcctctaccttgg

SEQ ID NO: 291238 - DNA, 50 bp, Homo sapiens
tgcgcaacgccaacctcaggcgagatggttttggtatcagaatgatgctg

SEQ ID NO: 291239 - DNA, 99 bp, Homo sapiens
ggacttcccagcttggccagtggctccgcaggctgccggctccacccctcaggttgcttctagaactgctggagttactgtttgacaagtttaatgctg

SEQ ID NO: 291240 - DNA, 100 bp, Homo sapiens
ataggattaaatctgcctgcagggagacgtaaagctgccaacgttaccctgctcacatcactagtagaggacctggagtggaagatcatttatgttggct

SEQ ID NO: 291241 - DNA, 83 bp, Homo sapiens
tgttcgggagtccttggaactgtggtccatggtaaagttttacagctgttaaacgtttaatgaaagaagcggcagaattgaaa

SEQ ID NO: 291242 - DNA, 82 bp, Homo sapiens
agatggcatgacagaacttggatgagctacttttacctcatatgaaaaaaatagatggcatgctaaatgataaccgaaagag

SEQ ID NO: 291243 - DNA, 100 bp, Homo sapiens
caagccgagggcaactttggaggccccctggaaggctttaggatccagtgtaccacatgaaggaagatggttgggtgaaagtagaaagtacagatgtcag

SEQ ID NO: 291244 - DNA, 75 bp, Homo sapiens
ccgttctgatgtgactgagagagaaggttttgaacgaagaatgtgatcagaactggtacaaggcagagcttaatg

SEQ ID NO: 291245 - DNA, 83 bp, Homo sapiens
cagagaagccttttccgttgccggtgccggcctagcgtcctggaattacttcaatcaagatcaaaatacttgctggatggtgg

SEQ ID NO: 291246 - DNA, 75 bp, Homo sapiens
ctgaattacatctgacccccaaagctcagcagtttaaggaagaaatctctaaacgttttaaatcacatactgacc

SEQ ID NO: 291247 - DNA, 51 bp, Homo sapiens
actgctcaggaagtaaaatcgacttcattagaggggtggtagactcggagg

SEQ ID NO: 291248 - DNA, 50 bp, Homo sapiens
cgccagtactgccggccgcggaccagggagccgatatgtggatttactcc

SEQ ID NO: 291249 - DNA, 100 bp, Homo sapiens
ctggaggattgtaaatgcaccaatcagcatgctgtgtctagctcaagtctccacaaaccggaggactacccccagactgcagtaagtgttgtcatggaga

SEQ ID NO: 291250 - DNA, 75 bp, Homo sapiens
gccggccggcgcgtcgtccccacaggtatggcctcacaagtcttggtctacccaccatatgtttatcaaactcag

SEQ ID NO: 291251 - DNA, 88 bp, Homo sapiens
aggagaagaaatccgcagaagcttattaaagttaagatacctcaagaagaacatgctgctaatggtccagaacttctgaggaaaaaac

SEQ ID NO: 291252 - DNA, 82 bp, Homo sapiens
ctaccacctgccagtctgaagcaccgagatgatgagattgtggggaacctgggtgaaggcacctttggcaaggtggtggagt

SEQ ID NO: 291253 - DNA, 98 bp, Homo sapiens
acgagggccagctgacggagatggtgcagaagatggaggaggtcctcagccagcagagccacgttccttatgagcaccgtgggtttatttcattttcc

SEQ ID NO: 291254 - DNA, 90 bp, Homo sapiens
gtccgtgcggcagcagctccagagctttgtcaaagaatgagaacgggattcccagtagtccccagaaagtagctctgaccctggatcttg

SEQ ID NO: 291255 - DNA, 75 bp, Homo sapiens
tatacaagaaggagatacattaaatgcaatagcccttcagtactgttgtacgcctgctgttcatgtacaaggtca

SEQ ID NO: 291256 - DNA, 100 bp, Homo sapiens
gagtctgacgagcaaggggaaggtagccaaggatggagtgaaatacaggggacagtggccttagagctattgagaatttgatgcaaaagaaggggaaatt

SEQ ID NO: 291257 - DNA, 96 bp, Homo sapiens
gggaagacatacaccatgggggaggccagtgtggagtgcttgtgcacagagctcgaaaactagctcaacaatactatcttgtgtaccaagaaccca

SEQ ID NO: 291258 - DNA, 96 bp, Homo sapiens
gccggttatctctgtgaatctcagatgatggagtttcttcagttaatgagcaaatttaaggagatgggctttgagctgaaagacattaaggaagtt

SEQ ID NO: 291259 - DNA, 101 bp, Homo sapiens
aaagaaagagaagctggagtatactccaggagagcatgaatatggattatttccagcgcccattcatgttgattggctctaccagtgcacctggacaggga

SEQ ID NO: 291260 - DNA, 74 bp, Homo sapiens
gggtgcgccggcagaggatccagtgttcaccatcctggccccggaaggtggctatggaccgccccctgcaggaa

SEQ ID NO: 291261 - DNA, 75 bp, Homo sapiens
aaggtcgcctacgtgcagctgatgaaggatttgggggcagagcacttggcaggtcatgaaggggtccaacttctc

SEQ ID NO: 291262 - DNA, 50 bp, Homo sapiens
tcctactgtcccacggccaccgaagaggcctacatacagatcacttttgt

SEQ ID NO: 291263 - DNA, 100 bp, Homo sapiens
gagaagcatgatgcagtcactaagccagaatcctgaccttgctgcacagaatgtgaaagatgttgcagaagtgttccagaagtggctgaagatagaagga

SEQ ID NO: 291264 - DNA, 83 bp, Homo sapiens
gtcccttctccctctccgagtgctgctcctgtcattgtggccatggacgtcaccttcaggccattcagaggaggaaagagagg

SEQ ID NO: 291265 - DNA, 82 bp, Homo sapiens
cttgtatctcaacaccctgagtgcggatttctgctatgatgacaggagatcatgaatcagacagataaaaatcaacaagaaa

SEQ ID NO: 291266 - DNA, 75 bp, Homo sapiens
gtatagccctcagaattctgattatcttttagctctcagcactgaagtgagacactttgacagcccctacctgtt

SEQ ID NO: 291267 - DNA, 100 bp, Homo sapiens
actatctatgttgttacccccacctatgccaggcagagaaaatcctgaaggagcaagagcggctggcctacataaaccccgacctggctttggaggagaa

SEQ ID NO: 291268 - DNA, 50 bp, Homo sapiens
ctacagacccagtctctgccaagtatctccctgggataaaaaagaagaag

SEQ ID NO: 291269 - DNA, 100 bp, Homo sapiens
cgcgggctggctgcgttgcccggggacctgccctcctggacgcggagcctgtcagttgctccgattaaaaatgtttcgagaagatcatgggtcgtggatg

SEQ ID NO: 291270 - DNA, 90 bp, Homo sapiens
gtcagtattttggattttcaccattctaataggataaaagaatcagagtgtctcaacccttgacaagaggaccaagtgcctttattccag

SEQ ID NO: 291271 - DNA, 124 bp, Homo sapiens
cgcagggatggaccgccgaggcggcggccggggcggcggaggcggaggcggccggcccgggcataaacttggaggaggcagtggagagagcatcctggtatcacagcttcagcatggactgacg

SEQ ID NO: 291272 - DNA, 100 bp, Homo sapiens
tagagatgtgatgctggagaattacgggaatgtgttctcactggcttttgaagagggagaacagcagattgctcagttacatgggtctggattttaattc

SEQ ID NO: 291273 - DNA, 78 bp, Homo sapiens
aaaatgcccccagcaaggaggtgctcgattcgttcctggatcttgcgaggccctgggaggagcggggacactgaggac

SEQ ID NO: 291274 - DNA, 101 bp, Homo sapiens
ctacaacgaaggtgaagccacggaagataagtctgaccagtgcacaggacttcagggcttcctggtgttccacagctttggtgggggcactggctctggct

SEQ ID NO: 291275 - DNA, 100 bp, Homo sapiens
tttattgaagctcacctttgtctaaataaaatggcatttacatgttcattttgtaaatttcgaacatttgaagaaaaagatattgaactgcatctggaaa

SEQ ID NO: 291276 - DNA, 89 bp, Homo sapiens
atctatattttttgactgctctgctcctctatgctggacatcaaatttccagctgagtccacctcaggacgaggccagtgcctgaaacg

SEQ ID NO: 291277 - DNA, 75 bp, Homo sapiens
caagaacgtgctgatcaacaaggacatccgttgcaaggaaggcctgcatgtgctggaaggcctggcagcttcagg

SEQ ID NO: 291278 - DNA, 88 bp, Homo sapiens
ggcctgcgggcgatcgggccgaggggtcaccagtcgttggcacaccaagaagctgccccgcaagacccaccgaggcctgcgcaaggtg

SEQ ID NO: 291279 - DNA, 75 bp, Homo sapiens
ggtggctgcacagtttctctggaatgcactttatcgctaccgagttgaaggagaagagccaggcgtgcggaggga

SEQ ID NO: 291280 - DNA, 74 bp, Homo sapiens
cgctgagatggagaagaagatccgcgaccaggacaggaacacgaggcggaccgagacagtgcagaagctgtgcc

SEQ ID NO: 291281 - DNA, 100 bp, Homo sapiens
ttgagacccatgaggccgcacagcaggccatcaacaccatgaatgggatgctgctgaatgaccgcaaagtgcataaacttggaggaggcagtggagagag

SEQ ID NO: 291282 - DNA, 90 bp, Homo sapiens
aactgaggagcaccaggagacgcaactcatcgggagtagatcccataatagatcacgttcaagacagaaagacagacgtagatctaagag

SEQ ID NO: 291283 - DNA, 75 bp, Homo sapiens
cagatgtagcctcccgtgggctagggggtaaaggaagtggtatctttgacgaatcaacccccgtgcagactcgac

SEQ ID NO: 291284 - DNA, 50 bp, Homo sapiens
cccgactcagctctcggcctgctgatgttgtgttcgatatatacagagac

SEQ ID NO: 291285 - DNA, 123 bp, Homo sapiens
aacgtgatcgtggccttggcccgagatagcctggcattggcgaggcccaagagcagtgatgcagaagctcctcctggggtagagacagatcttattgatgttggattcacagatgatgtgaag

SEQ ID NO: 291286 - DNA, 51 bp, Homo sapiens
actgtccttcggacaagttttaggtctccgtgaggccgggtgacgctccag

SEQ ID NO: 291287 - DNA, 100 bp, Homo sapiens
tggcactgttgcctatcagaagtcaattcaaaggacctgcccccagagagagcggtaaatgactcgtgctaccagaatgatgattctgtcctaaaatccc

SEQ ID NO: 291288 - DNA, 75 bp, Homo sapiens
catggagcagccgccggcgcctaagaggctggagagagaggaattgaaaagaaaggcagaggaggaaaggcttcg

SEQ ID NO: 291289 - DNA, 100 bp, Homo sapiens
cgacatggtcatgagcttcgtcaacctcgctgcctgccttgtgcttggctgtatgattttccctgatggctgggactcagatgaagtaaaacggatgtgt

SEQ ID NO: 291290 - DNA, 100 bp, Homo sapiens
cggcaggctgaggagaaagcggcgcgcggagacaatgcagatcttcgtgaagactctgactggtaagaccatcaccctcgaggttgagcccagtgacacc

SEQ ID NO: 291291 - DNA, 75 bp, Homo sapiens
agacatttcctctcctcccctctggatttctcagagggtatgagtattatagaacaattagaccctgtatctttt

SEQ ID NO: 291292 - DNA, 100 bp, Homo sapiens
cccaggtggaccccaagaagaccattcagatgggatctttccggatcaatccagatggcagccagtcagtggtggaggttgacttccccagaaatctggc

SEQ ID NO: 291293 - DNA, 100 bp, Homo sapiens
gaaggactcctggaatgccacaaatgcaaatacttgtgcactgggagaggaagaggatcacctagcccgggtagaagaggcaatcacccgtatgcttgtg

SEQ ID NO: 291294 - DNA, 93 bp, Homo sapiens
tgtcgggttattcgagtgaccgagaccgcggccgggaccgaggagacgaggtcttgctacattgtccaggatggagaagtaggaattcttaag

SEQ ID NO: 291295 - DNA, 82 bp, Homo sapiens
gacgacaagcacacactatggcgctgaaacggattaataagacttcccaagtaagaagcggaagaggagccgctggaaccaa

SEQ ID NO: 291296 - DNA, 98 bp, Homo sapiens
atcagtttaaccttatggccagtgatttgattgcccttaatagaagtctgccagatgtaagattagaagggtttttgtcatccattggagggacactg

SEQ ID NO: 291297 - DNA, 82 bp, Homo sapiens
gccatgtcgggttattcgagtgaccgagaccgcggccgggaccgaggttcctgggcttcccgatggactcgagtttttacta

SEQ ID NO: 291298 - DNA, 100 bp, Homo sapiens
cagcaggagacggaggaccagaactacggcattgctacctgggcgatgccttccgctgtgccagctgcccctaccttgggatgccagccttcaaacctgg

SEQ ID NO: 291299 - DNA, 104 bp, Homo sapiens
cagtgaaatagcatggatttcatccattatgctggctgttatgtacgcaggaggtacctagtcgatagtcgctggttcaaacagtggaaaaaatatgttggctt

SEQ ID NO: 291300 - DNA, 50 bp, Homo sapiens
ccccagcccatcctctctaaccaagcgaaaccccaaagagtcaggtaggg

SEQ ID NO: 291301 - DNA, 90 bp, Homo sapiens
gatttgttagaaaggagacccgactgcaactgctggattgctgcaaggctgagggacgagaacgagcgggctgacgcacgaggcacacag

SEQ ID NO: 291302 - DNA, 100 bp, Homo sapiens
agatgcttgcattgggcaatcaagttggcaaactttatgtttgggatttagaagtagaagatcctcataaagccaagccggattcagaagccagccagag

SEQ ID NO: 291303 - DNA, 100 bp, Homo sapiens
gttgggactaacagctggagagaacagttcattgaagctatcactgtcagtgctggtcgttcttccctctttccaatagatgatggcttgcttgatgatg

SEQ ID NO: 291304 - DNA, 82 bp, Homo sapiens
gggggctgtggctccgggactgcgtaccatggggcgcaagttggaccctacgaaggagaagcgggggccaggccgaaaggcc

SEQ ID NO: 291305 - DNA, 73 bp, Homo sapiens
gacgtggccagacatggcattctgcaggtggcagttatcaggaactgttgccgttattacatcagatgggaga

SEQ ID NO: 291306 - DNA, 100 bp, Homo sapiens
ggctatgaattctgcatttcaactctagaggaaaaaattgaaagagaaaaggaattagcagaagacattatgtcagtgggcaagttacggaagcaatggc

SEQ ID NO: 291307 - DNA, 98 bp, Homo sapiens
cattcactgtcttctcaggctgcccaggttaactccgttgactgccaaaatagcatccccaacgtgcagccctccgcatctatcagcaggttgccccg

SEQ ID NO: 291308 - DNA, 113 bp, Homo sapiens
ttcacacatggagagatgcaagaccagtccatttggggaaatccttcggatggtgaactcattagaaaaatgggacgtcggtcatcagatactgaagaagaaagcagaagcaa

SEQ ID NO: 291309 - DNA, 74 bp, Homo sapiens
tacgaggtggcgttccgcgggatcttgcagaggagaggccgctacctgtctgaggaacccgagccctacctggc

SEQ ID NO: 291310 - DNA, 99 bp, Homo sapiens
cggagaccccgcgccgacggctgctcaaacatcagggtacggacattgctgcaggagaagaggttgccatcaagcttgaatgtgtcaaaaccaaacacc

SEQ ID NO: 291311 - DNA, 99 bp, Homo sapiens
gggttggctatcagtatgttatcactggccggaaccgctccttggaaggtcgctgggaggtggcattcaaagtctctcatcacttttgtgaacaagcac

SEQ ID NO: 291312 - DNA, 100 bp, Homo sapiens
cgctataatgctctgctggccgtgcagaagctcatggtgcacaactgattgaagatggatacgtgacaatcccagggaccgctgcactgacttcatttcc

SEQ ID NO: 291313 - DNA, 98 bp, Homo sapiens
gtctcaagcttcagctgttacaggaagtaaccggttttgtgaggattggatgcaagcttttttaaatggtgccaaaggaggtaacccttttcttttcc

SEQ ID NO: 291314 - DNA, 100 bp, Homo sapiens
aaataaccaccgaggccagatgagtggaaataccctggttagttggcctgagtcacatggcactattgatgggacaggcatccgtgtacaagatttgcag

SEQ ID NO: 291315 - DNA, 100 bp, Homo sapiens
agaaagcttcatcacccctctggtgctctattgtgtgctggctgccaccccaactgctatttttgtatacaagaacactttacctgagatataggccaaa

SEQ ID NO: 291316 - DNA, 116 bp, Homo sapiens
gccgtccccagaacgcagatcagaggtagtcggacctttcccgctggcgcgcagcctcagctaggcccttccatactttgaccggctagactatgtgtccatgatgtgtaacgaac

SEQ ID NO: 291317 - DNA, 97 bp, Homo sapiens
cgagaagtgatctccaaaatgaagccccctgtgattcccttcgtgcctctgatcctcaaagagccgaaaggaagcagtggtggctatggctctggag

SEQ ID NO: 291318 - DNA, 82 bp, Homo sapiens
caaacacttcctcgagcagattctggtcaccctgctgattgccttcatctgtgtgcggagctccctgtggaccaactacagc

SEQ ID NO: 291319 - DNA, 88 bp, Homo sapiens
atccgatagctatgttctgctggagcattctgtgaagaaggcagtacattttgggttaccgttattagaggaagtaacacaaggggat

SEQ ID NO: 291320 - DNA, 74 bp, Homo sapiens
tttgttaaggattccaagtaactcttatttgattaagatgttctacgaggagcatttgcacttggacgatgaga

SEQ ID NO: 291321 - DNA, 76 bp, Homo sapiens
attttagcaacgcagaagcccggcgccgggaagcctcagctcgcctgaagggaatttgaagtactgccttgtaatt

SEQ ID NO: 291322 - DNA, 90 bp, Homo sapiens
ggcggtggtcaatatcctgtcgagctcatcaccacagcggaaactaaagttacagagtggagaggtaacaaaagaagagaggcagcctgc

SEQ ID NO: 291323 - DNA, 98 bp, Homo sapiens
gtggcgagaggtgcggcgaaggaggcagaggcacttatgcttgtcagaatctacctgttactcgtattttggacaatcttatggagatgaagtcaaac

SEQ ID NO: 291324 - DNA, 100 bp, Homo sapiens
ctttgaccgcgctaagatggcgactcccatgcatcggctaatagcccggagacaagcggaggtgttgtagcaggaaatgtggctcatattctggactcaa

SEQ ID NO: 291325 - DNA, 75 bp, Homo sapiens
tggagattgaggccaaactggacaaggaacacctcatcaaaatgcagaagcagaaactgcagatgcccccgcagc

SEQ ID NO: 291326 - DNA, 100 bp, Homo sapiens
gtcctttcctcttgcctcagaaatgagaatggtgcctggcacataaaacccgggatggacgtggccgacgcctacgtgactttcgtccgccattctcagg

SEQ ID NO: 291327 - DNA, 82 bp, Homo sapiens
gggagatttttgaacttcgaggaacctttatgaaattccagctgtgtcctcatcatccttttttgaagagtttggcaaactg

SEQ ID NO: 291328 - DNA, 73 bp, Homo sapiens
ggttccccctccctcagcttccgccccaaaagctggagaatgctggaggagaccttaaggatggccaccacca

SEQ ID NO: 291329 - DNA, 100 bp, Homo sapiens
cttggagagcactgagtttagtaataggtgactgccggaaaaaagggaactttgaatattgtcaaggcccacggatgacagtaaccagcccccgggccgg

SEQ ID NO: 291330 - DNA, 100 bp, Homo sapiens
ccttctctgatttgctgtcagccatgaacggatggatgtgatgcctgctagccaaaaggaaaacatagctctgctggcagaaacagctctgagattcctg

SEQ ID NO: 291331 - DNA, 87 bp, Homo sapiens
aaaaccttcaggcggcccatggtggtattggaaggaactggccctgggcctctggaggcagcagtattctggcagaatttggaaccc

SEQ ID NO: 291332 - DNA, 100 bp, Homo sapiens
gatcctgggagctcagcctcagttgatcttccagcctcaccggattcccccactctttcctcagaagcagtcacactggtgctacgaggttcaagccgag

SEQ ID NO: 291333 - DNA, 83 bp, Homo sapiens
gtgaaaagtcagaccgctcatcacgaacatcatcgtctgatgaagaagaggatatggactccaattgccttgacagtgttttt

SEQ ID NO: 291334 - DNA, 75 bp, Homo sapiens
ttttcctccctcaaccacattgtggagaaacgggtcttggctgagaaagatcagtctaaagaaaaggagaagaaa

SEQ ID NO: 291335 - DNA, 82 bp, Homo sapiens
ggggcgcagggaaggagggcgtccgagtcaacaaccgcttcgagctggcattcccatcaagagcaccatggacaaccccacc

SEQ ID NO: 291336 - DNA, 75 bp, Homo sapiens
tcacagagttagagagagggatggtgggagtaactattcccagtcagaggcgctatgtgtattattatagctacc

SEQ ID NO: 291337 - DNA, 74 bp, Homo sapiens
cttgggatgtggacacaatttgtaaggtaaaagctgctgaaacatgtcaagagccgaaggaattcagattgccg

SEQ ID NO: 291338 - DNA, 100 bp, Homo sapiens
ctgacatggcagtcccgaacacaggatgaacatccgaagacaatgttctccaaagataaggctgcctctaagaatcaaacttcactcttgggagaaccac

SEQ ID NO: 291339 - DNA, 83 bp, Homo sapiens
tcaacagctaaaaccttcctcaccgtgtacttgcaccaattccagctggacatcactgtgaaaatgggacgggataaagtccg

SEQ ID NO: 291340 - DNA, 74 bp, Homo sapiens
caaggcactgctttttcatgacgcttccttcaaaatgtctactgttcacgaaatcctgtgcaagctcagcttgg

SEQ ID NO: 291341 - DNA, 75 bp, Homo sapiens
taaaactttacacattgtgctattcactctgctttacaaggagacctccgagcttgcacatattgtagaaaaata

SEQ ID NO: 291342 - DNA, 75 bp, Homo sapiens
cggtgtcccagctggattcggtgcgggtctggctgggcaagcactacaagaagagccatgggaccacaccaccac

SEQ ID NO: 291343 - DNA, 96 bp, Homo sapiens
ggctgaaggccgggccccgcgagtgccatggcggccgccctgggagcgagcggaggagcaggcgccggaggtttctaagcatgaattgaggaacag

SEQ ID NO: 291344 - DNA, 100 bp, Homo sapiens
tctcgcttcgtcctacacttgcgcaaatgtctccggtatgtcgagagtaccaacgtggcaattgcaaccgaggagaaaatgattgtcggtttgctcatcc

SEQ ID NO: 291345 - DNA, 100 bp, Homo sapiens
tgctgggaacacctggagtctccgcgggcagtgtgaagcctcagtttaggtcatctggtggttcagaacactcaacagagggctctgtatccttggggga

SEQ ID NO: 291346 - DNA, 97 bp, Homo sapiens
atttagattcatcagcaactcctataaacacagtggacgtcaataatgaaagctcttcagaggaggctggcaggatgtacagtttttatcacaggtg

SEQ ID NO: 291347 - DNA, 100 bp, Homo sapiens
aagaagggcgctatttgtacttctaaatactccagtccttttccatgcactggaggagaggagatcatgaatcagacagataaaaatcaacaagaaatcc

SEQ ID NO: 291348 - DNA, 82 bp, Homo sapiens
gccgcccacccggacgccgacgaaagccagcgagctcctcagcctcaggccaaatagttgcatcacatgtatctaatccgag

SEQ ID NO: 291349 - DNA, 82 bp, Homo sapiens
caacaatcaaaaagaaagctgctgttatcatcatggctgtagagagttcgaaatttgagcaacccagccaagaagttcaaga

SEQ ID NO: 291350 - DNA, 100 bp, Homo sapiens
caaggcccctttggaacctaaggagccctgccgaggagctgaaggccttcagagtccttggggtgattgacaagaaagaagattggcccatgcacaagct

SEQ ID NO: 291351 - DNA, 51 bp, Homo sapiens
cgggaaccagcgcaagcgccgcaagaaaggccgagggggacggcaagatgc

SEQ ID NO: 291352 - DNA, 82 bp, Homo sapiens
acatgtgtcgtctgcaccagcagcacccgctcaccctcaagtgggtggacagcgaaggtctcctctgagcctccggcctcca

SEQ ID NO: 291353 - DNA, 100 bp, Homo sapiens
aaggcatccctgcccacgggcgaaggcagcatcagccatgaggagcagaagtcagtccggctggtgaaaaaccatttcgctgtgatgaatgtggtatgag

SEQ ID NO: 291354 - DNA, 74 bp, Homo sapiens
gcaggctcgcctcctccagctgttgttgctgctgatctccagatcacactaagtttgtgggaagcttcaaaacc

SEQ ID NO: 291355 - DNA, 98 bp, Homo sapiens
tgttattgggctatatgaagaggccattaaaaatggggcaacaaccatttcagagatgtcttccagaagtaccaaagatttaattaaaagtaagtggg

SEQ ID NO: 291356 - DNA, 82 bp, Homo sapiens
agctgaggactgcctgtttgcaggaatgggtaccacagaccatgtcatcgtcctggcgtccacgaaccgagctgacattttg

SEQ ID NO: 291357 - DNA, 100 bp, Homo sapiens
caagaagcagctccacgaaaggcagccgcggatcgccgcgctcagcgacaaacaaggatttaatgtgcaaaatggcgattataccagactggcttaggtc

SEQ ID NO: 291358 - DNA, 83 bp, Homo sapiens
cgagatggagcccaactcactccagggggatatgagactttctactcggaatatcctgagtgttgcgtggatgtaaaacccat

SEQ ID NO: 291359 - DNA, 74 bp, Homo sapiens
caaaagacaactctgcttttccagaaactgtgccaggatcacgggccgcgatgggcctcttggaacattggtgt

SEQ ID NO: 291360 - DNA, 75 bp, Homo sapiens
gaaaactccaccgtagcccttgccaaagactcagcccacctgcacccaggtgaaataaacagctttattgctcac

SEQ ID NO: 291361 - DNA, 82 bp, Homo sapiens
ttcggcagtccacccaccgccgccgcctcccagacctccgggagagcctggaggagatccttcccaagctgcaggctgagaa

SEQ ID NO: 291362 - DNA, 83 bp, Homo sapiens
gtttctgtaacctaacagctatgtttgcaatagagacatttggactgattcccagtattggatgaacgaatatacctcatcca

SEQ ID NO: 291363 - DNA, 100 bp, Homo sapiens
atcccctgaagatttgcctgccctcagtggttaacttttttgctgcaatcacaaactgccactgcagagccccgccatggaagacacgccgttggtgata

SEQ ID NO: 291364 - DNA, 99 bp, Homo sapiens
cttcccgcccgccttccgccgtctcttcgagttcttcgtgctgctcaagagcagccatggaggaggtggtgattgccggcatgtccgggaagctgccag

SEQ ID NO: 291365 - DNA, 100 bp, Homo sapiens
tgtctgggcttcatagcattcgcctactccgtgaagctttgtgtccctggtgatgttggaacattaatgatggaacatggccaaacttcagtcatgatcc

SEQ ID NO: 291366 - DNA, 98 bp, Homo sapiens
gcttcttcctacatgtcctaatatgttgatggcattccagaatatctcagatgagcaggggagctgaatatgtatctgcaagagagtggatgaggatt

SEQ ID NO: 291367 - DNA, 75 bp, Homo sapiens
attgcatctgatgagaattataaagacccaaccaacttgcaggtcatggaaaatggaagatttgcaaaatacaaa

SEQ ID NO: 291368 - DNA, 75 bp, Homo sapiens
aggatgtgccaccagaacccaagaagattccgataagaaacacgagttatgcccagccaagtcttcagtatatcc

SEQ ID NO: 291369 - DNA, 100 bp, Homo sapiens
ccgaatcgcagggagtcgccgctggagaggggctcggcgcccggcggggactgcagggctgaaatctctttaatgatggagggaagcaggcagacgcgag

SEQ ID NO: 291370 - DNA, 85 bp, Homo sapiens
ttcacccacatcttgttatccacaaagtcctcagagaataactcactaaatccagaggcatccggtcttgggatgtcgatcctgg

SEQ ID NO: 291371 - DNA, 83 bp, Homo sapiens
ggtgggagtgacccgattttccagtgctgggcctaaaggagataacatttatgaatggagatcaactatacttggtccaccgg

SEQ ID NO: 291372 - DNA, 50 bp, Homo sapiens
ggacacagaagtatttgtgacagatatttggagttcttacaacatggcag

SEQ ID NO: 291373 - DNA, 49 bp, Homo sapiens
gcaagctacaataatggggccattatcaggaactgttgccgttattaca

SEQ ID NO: 291374 - DNA, 82 bp, Homo sapiens
gaacctctatgccgacatcgacgccgcctggcaggccctgcgcaccagtctgcccagtcaagcccgtccaactccagctcca

SEQ ID NO: 291375 - DNA, 82 bp, Homo sapiens
gcacgccctgcgcctggtgaaccaaggcagccagataagctggtggtggtatggacccgtcggaaccgacgcatctgctcca

SEQ ID NO: 291376 - DNA, 83 bp, Homo sapiens
cttgtcgcaatattgtcttcttcgctttagacaaattaacgtcttcaaggacccagttgctgatcccaacaaaaggtccaaaa

SEQ ID NO: 291377 - DNA, 96 bp, Homo sapiens
cggctccgcctcaccagcaagcgcattcccaggaccttctaccgctttgaggctgtgtgggatagctctctgcataactcccttcttctgaaccga

SEQ ID NO: 291378 - DNA, 100 bp, Homo sapiens
ctgggaggccggccggtgccagcacctttcggcttctgagacggcggcagcagcggcattcaggcaccccctgtaatggcctatcctgctactacaccaa

SEQ ID NO: 291379 - DNA, 100 bp, Homo sapiens
ggctgctgcagtgacccagaccctctcctttccctttgagaccgtgaagagaaagatgcagggcaagtgtccagagaatggctgggatgaaagtacactt

SEQ ID NO: 291380 - DNA, 75 bp, Homo sapiens
gctggtgaagcactggtaccaccagaaattccaacagaatgggtttcctgaaacggatttgcaggaattcctgaa

SEQ ID NO: 291381 - DNA, 82 bp, Homo sapiens
cagaattagctgatgttcaggcataaggttgtttacagacacgttggtcgtcattgcctccgagcccactttagccctcagc

SEQ ID NO: 291382 - DNA, 50 bp, Homo sapiens
ccgagaccgcggccgggaccgaggatgatgattattctccaccgtctaag

SEQ ID NO: 291383 - DNA, 100 bp, Homo sapiens
cgggactcccgccgctgctaaatatatccgtaggaatggagagggaccggatctcaggcctgtcccctcagttcccaggtgccatgaggaagcctcgtcg

SEQ ID NO: 291384 - DNA, 100 bp, Homo sapiens
aaggcatctcctagtattgcatcctacagatgtgctgtaaacatcaaaagaagacggtgggatcaggagatggtggaacaatccaaagttttaatcaaag

SEQ ID NO: 291385 - DNA, 98 bp, Homo sapiens
gaaaaggagaaaatgaatgccaaatgggacacgctgcgttcctttgcctgcaacaggggtcaagatgagttttgcctgacttctttgatgtcctgaac

SEQ ID NO: 291386 - DNA, 98 bp, Homo sapiens
acgatcagcacttcagtcggaaagttggaacctctgacaagaccaagtactaccttcaaggtctatcagccacagtctctgcaagtttccaagagcag

SEQ ID NO: 291387 - DNA, 100 bp, Homo sapiens
cgcaacactcgcttggttggggagatcggcgcttggccgacacatcatctcagagttggagcacctgacgtttgtcaacacggatgtgggccgctgccgg

SEQ ID NO: 291388 - DNA, 82 bp, Homo sapiens
cccgcctcgagccagcccgccagcatgccccagtccaaagaactgcatgaacttgcccccagacaaggtccagctgctgagc

SEQ ID NO: 291389 - DNA, 80 bp, Homo sapiens
gagtgggcgcggaggcgaccgccatggcgttcctcaaactccgtgaccagggagttgaccacatttggccatttcccaga

SEQ ID NO: 291390 - DNA, 100 bp, Homo sapiens
caagaaggcttcagcacagccctcacaatgagacgagttgtactgctgtcacaggaaatggacgctggattacaagcatggcagctcaggcagcagaagt

SEQ ID NO: 291391 - DNA, 83 bp, Homo sapiens
tgaactgccaatccaaactttctgacatgcctttaaaaagttttgcacagtaataagttgactcacacagacttaaagcctga

SEQ ID NO: 291392 - DNA, 80 bp, Homo sapiens
ccaacatcctgggaggctgcatccaggtcagcccaaggctgccccctcggtcactctgttcccgccctcctctgaggagc

SEQ ID NO: 291393 - DNA, 100 bp, Homo sapiens
aattgctactgctgcctctgtcactcctggtgaccagcattcaagctctattaccaggttttaaacttcgccatgatcgtgtcttctgcactcatgatat

SEQ ID NO: 291394 - DNA, 75 bp, Homo sapiens
ggagaagcggaatgcatcattcaccctttaaagagatcaccatctacttgagctccctgtgctgtcaggaatcta

SEQ ID NO: 291395 - DNA, 100 bp, Homo sapiens
gttaaaaaagaaatctccatttctattattgggaagttacatagcaaacttctggagacagagcgccaactaggggaagctcatggtaggctgaaggaac

SEQ ID NO: 291396 - DNA, 82 bp, Homo sapiens
gggccacgcacctcgtcaccaaggccaagagttgtctgctggttctcagcttgaagaagattctgcagtccttattgatcct

SEQ ID NO: 291397 - DNA, 101 bp, Homo sapiens
ggactctcagaataaaggaaagacctcagagtgttctcatgcaatgcgtgttttactatctaaattaccaagaccatggattgtggatgagaagaaagatg

SEQ ID NO: 291398 - DNA, 90 bp, Homo sapiens
gcttaaactcttggcatttggctttgcctttctggacacagaagtatttgtgacaggcgtggtgtccctcgtggccgttcacccctccac

SEQ ID NO: 291399 - DNA, 100 bp, Homo sapiens
cgggttttagaaaaacaagaattacagcagccaacctatgttgccctgagttacataaatagggtgttttgaatgctgtatcaaatgcctggggggcatt

SEQ ID NO: 291400 - DNA, 100 bp, Homo sapiens
ccgaggctgaaggaagatggcggacggcgtggaccacatagacatttacgcggatgtcggcgaagagttcaaccagtttggaaattttagcattcaggtg

SEQ ID NO: 291401 - DNA, 100 bp, Homo sapiens
catctgattcccaggagattaaaattcagcagccttcgaaactccatgatgcgttatctgggtctggaaacccaaaccctcaaggatggcctggcgcatg

SEQ ID NO: 291402 - DNA, 83 bp, Homo sapiens
agtgacaccgaggtgctcctagccgtctgcaccagcgacttcggtatcgagaaccttccctgcgaacttcagaggaacttcca

SEQ ID NO: 291403 - DNA, 90 bp, Homo sapiens
cctctctctaccacgagcagcgccctgggagccctcacgagtcccgttcctcataaccagaggaagcctgaatcaactcatctgttagaa

SEQ ID NO: 291404 - DNA, 75 bp, Homo sapiens
gggagaatatttaatggaaaatcgcttggttaaaacctgacacttttaacagttcttggccaggctgactgagag

SEQ ID NO: 291405 - DNA, 50 bp, Homo sapiens
gcggagtagcgagtcggcaacccggagaattcaattcgtcataatctgtc

SEQ ID NO: 291406 - DNA, 100 bp, Homo sapiens
cctaggatttgtcacgaatgggaagccaagtgccatcttcaaaatttcaggtcttaaatctgattgcagcaattctccggaaacggaaattagactatta

SEQ ID NO: 291407 - DNA, 100 bp, Homo sapiens
ggtgccaccccacgtgtacgcagtgaccgagggggcctatcggagcatgctgcaggagggaccttgtgccagtgtgggcgcccccggaccgcccaccccg

SEQ ID NO: 291408 - DNA, 100 bp, Homo sapiens
ggccgggacccggttccccggcccacagtgggggtgtgcaaacccgagagaactgggggaggagccccagccccgcgacgaggaggaagcggagctggag

SEQ ID NO: 291409 - DNA, 100 bp, Homo sapiens
cggtgactgtctctccagatggatccctctgtgcttctggaggcaagcttgagccgagaacgaggcgagaaagctggagaccgaggagaccgcctagagc

SEQ ID NO: 291410 - DNA, 98 bp, Homo sapiens
aggatgggatccggctcctccagctaccggcccaaggccatctacctggacatcgatggacgcattcagaaggattttttatcaagcagaaatgcatc

SEQ ID NO: 291411 - DNA, 90 bp, Homo sapiens
gccatgattaaccctgctaattcagatacagcacaacagcaacgccatgaaagagacttggccctcttgaaactaaaggctgaacaagag

SEQ ID NO: 291412 - DNA, 83 bp, Homo sapiens
ctgcgggaaatcgggctgaagcgactgagtccgcgatggaggttggcaaggccacaggcttcctcaagaactttctgatcgag

SEQ ID NO: 291413 - DNA, 97 bp, Homo sapiens
gacctcctcggccacttcggctgtgtcaatgccattgaattctccaacaatggaggccagtggctggtctcaggccgaggaggcgggcgcgcccggc

SEQ ID NO: 291414 - DNA, 100 bp, Homo sapiens
aaaatgtcgctttctaacaagctgacgctggacaagctggacgttaaagggaagcgggtcgttatgagtaggatatatctgcatcttgaaaggaagataa

SEQ ID NO: 291415 - DNA, 50 bp, Homo sapiens
cgccgccatccgggaggcccagggaagttttccaagagataacttcacca

SEQ ID NO: 291416 - DNA, 100 bp, Homo sapiens
cagagtcagcatcagagcagcaggagggaaaatgaagaaggaacgatctcgtaagaaggattcaagaattcagcctcagcccccagatgaagatggggat

SEQ ID NO: 291417 - DNA, 100 bp, Homo sapiens
cttgcagatgcttcgggagaacctggaggaggaggccatcatcatgaaggacgtgcccgactggaagggtcttgttctgtcacccagactggagtgcagt

SEQ ID NO: 291418 - DNA, 90 bp, Homo sapiens
ctatcagaatggagggccagttataacagtgcaggattgaaagaaggtggcaagaggaagaagcagaagcagagagaggagtcgaagaag

SEQ ID NO: 291419 - DNA, 75 bp, Homo sapiens
atcaaagactgtttgttcaacatatctacaatctcggtactacaggtacatctccgttcatggatgcattaacag

SEQ ID NO: 291420 - DNA, 125 bp, Homo sapiens
atcaactttaaattctacaacacagacaccaaataaaatagccatctcacctttgaaatcgccaaataagatactagctcagtcatgtactgaaatcctagaattgcagccctcaagtgtctgtg

SEQ ID NO: 291421 - DNA, 100 bp, Homo sapiens
cggggcaaccccgaaccaagctttagccgccgaggccgcgtgtcccaaaggccagagacggggtctgactgtgttacccaggctggtcttcaactcttgg

SEQ ID NO: 291422 - DNA, 75 bp, Homo sapiens
agcatcaacgcgctgctgatcatcggtggattcgagaaacctgtgcccagcagctctggtggagatgcccacgtt

SEQ ID NO: 291423 - DNA, 100 bp, Homo sapiens
gcgcctcgcctcacagcgaaacgccgcgcactcggagccggcacggctcggcggttgccatgtcaaatcttagcgaggctgtgcaggatgcagacctgct

SEQ ID NO: 291424 - DNA, 100 bp, Homo sapiens
ccgcgggggccgatccggcggagagcagagcccgaggcgaggcgaggcgcggcgccgctgcacacacgcacacggaacgtggctgaagagcggtctgggt

SEQ ID NO: 291425 - DNA, 51 bp, Homo sapiens
gaccagtgtggatcttcaagaatcattatgctgggctcttgcactgtttgg

SEQ ID NO: 291426 - DNA, 86 bp, Homo sapiens
attctctcccaggccacaagacatttcctgctcggaaccttgtttactaatttaaaatgtttattggaggcttgagctgggataca

SEQ ID NO: 291427 - DNA, 100 bp, Homo sapiens
tccctgctcagtcggccaagaagccctgcccaggttaatttggagtggcccctggagtcagtttcctacaccatccgaggccccacccagcacgagctac

SEQ ID NO: 291428 - DNA, 100 bp, Homo sapiens
cctccctgggagctccgcacggtaagactttgaccccgacgcaggcttcagtgattgccgcggatcagaagcctgagcactttggctcgagacaattaag

SEQ ID NO: 291429 - DNA, 78 bp, Homo sapiens
cggcctgtgtggtggactgtggcacgggatgaatgatttcggaatcaagaatatggaccaggtagcccctgtggctaa

SEQ ID NO: 291430 - DNA, 116 bp, Homo sapiens
caggtgatggataggagcaaccctgtaaaaccagccttagactatttttcaaacaatgttggatgtttacagtctaatttcttttgacaatccagatggtggagtttggaagcaag

SEQ ID NO: 291431 - DNA, 100 bp, Homo sapiens
tcaactcctctctgttaatggagtggtggacactcactgacctgtcacaaggttgccccacaaaactttggggtccatgtctgaatggattgccagagcc

SEQ ID NO: 291432 - DNA, 101 bp, Homo sapiens
cggggccgctccggcccgctccgagtgctgggcctaaaggagataacatttatgaatggagatcaactatacttggtccaccgggttctgtatatgaaggt

SEQ ID NO: 291433 - DNA, 100 bp, Homo sapiens
agaaaagcaacgtgatcgtggccttggcccgagatagcctggcattggcgaggcccaagagcagtgatgatattaatgcacacgcctgtgttactggtaa

SEQ ID NO: 291434 - DNA, 73 bp, Homo sapiens
ctgggacgattgtatcaagtacaactgcacgaggtggtgcggagctcctgtttgacggtattaagaaacatcg

SEQ ID NO: 291435 - DNA, 75 bp, Homo sapiens
ggacagtggcacacagataccgtttattaaaagagctgtggctaaaggaagctgttgaagttattgaagtacctg

SEQ ID NO: 291436 - DNA, 90 bp, Homo sapiens
ggactgtgcaggggactctgtcacagtggggtggaagacaacccgtgagtattacaccttcatgtgggttactttgcccattgacctaaa

SEQ ID NO: 291437 - DNA, 89 bp, Homo sapiens
gatggacgaggtcctgtacagcatcgccgagaaggtgaagtgggcaatgcagccaagatgatgctgatcgtgaacatggtccaagggag

SEQ ID NO: 291438 - DNA, 101 bp, Homo sapiens
cctaaacgtagtgtccacggcactcaacgacacggtagagttctaccgctggacctggtccatcgcaggcaacggacagccaagacgtagatccatccaag

SEQ ID NO: 291439 - DNA, 100 bp, Homo sapiens
ctggcggcgattactacacttcgcccagctcgcccacgagtagcagccgcaactggacggaggacatggaaggaggtttggctcagaagaaggcggcccc

SEQ ID NO: 291440 - DNA, 76 bp, Homo sapiens
gactctatacagggacgtgatgctggagaattataggaacctggtctccctggctgctctgttaaaagcgaaaatg

SEQ ID NO: 291441 - DNA, 98 bp, Homo sapiens
ccgagagcgcgaatatcgtcatcgttagaaggtggtcacttctttcatcgaaactccttgtcccctcggagtctggtgtatgaaagtgaattctccac

SEQ ID NO: 291442 - DNA, 90 bp, Homo sapiens
gtgatgacgcaggccttaaggagaaagtttcagagacaatggacctcagatagcctatgttcgggacttcaaagcaaaggttcagtattt

SEQ ID NO: 291443 - DNA, 50 bp, Homo sapiens
ctggcttcaggatgtagagggcctgcagtacatagtggaatgtcatggga

SEQ ID NO: 291444 - DNA, 75 bp, Homo sapiens
gtcgctgtctgtcttccatgcccagctttgtgtccctggtgatgttggaacattaatgatggaacatggccaaac

SEQ ID NO: 291445 - DNA, 98 bp, Homo sapiens
ctcgggagagagatcggagaaggagccgctcgcgatccccgcaccgaagacgctcccgtgtgttaacagggcacaaccattatgtgatgtgtgctcag

SEQ ID NO: 291446 - DNA, 82 bp, Homo sapiens
agatcgccacattgagggcggtgttgaaagccaacaagcagaaatacactttcgggaaatggcctctaaatcctggctgaat

SEQ ID NO: 291447 - DNA, 101 bp, Homo sapiens
ggttggggctgtgggacttcgaaggagggctctcctgtctgccaccatcctgggttgacaattctacacaaggaggagagagccaggagctgcctgacata

SEQ ID NO: 291448 - DNA, 98 bp, Homo sapiens
cggagaaggactccaaggcggagcaggccaaagtgaagaaggttcatgtgtgcccagctccctaatcaggtcctggagagcatcagcatcatcgacac

SEQ ID NO: 291449 - DNA, 101 bp, Homo sapiens
gatgcagatgcccctcctccaccagaggactgggaggagcatgtcaacaggtagatttcgggcagacaacttgaacaagctgaagaacctatgcagcaaga

SEQ ID NO: 291450 - DNA, 100 bp, Homo sapiens
aaagttgacagcagaggcagagcattatctcagctacttaaacaacctccgtgtccaagatgttttcagttcaacacacagtctcctccattattttgat

SEQ ID NO: 291451 - DNA, 90 bp, Homo sapiens
gcagttaatagatctccggcataagctcaatcttcggtgcccaccagaagtatgtccgacaagcctggcagaaggcagacatcaatacaa

SEQ ID NO: 291452 - DNA, 82 bp, Homo sapiens
accagccaccctgcccccaagaaggaagtcatcatgggccggcctggaacagggtttccaggcctgaggtgcccgccctggc

SEQ ID NO: 291453 - DNA, 83 bp, Homo sapiens
gggagctggacggcgagcgcgagcggcgcgagaaagtgcgctcgctggaggcccacatgtacccggaaaagctcaaggtgatt

SEQ ID NO: 291454 - DNA, 100 bp, Homo sapiens
cgcggtgaccgaggcctgggccccggcttctcttttaaaaggactaaaacatgctaacatagtgctacttcatgacatcatccataccaaggagacgctg

SEQ ID NO: 291455 - DNA, 100 bp, Homo sapiens
ctttacctacactgactctgatagatacaccaatttggaggagctgtcaccactgactaaagaagagaaaactgcggcagagcaattcaaatttcacatg

SEQ ID NO: 291456 - DNA, 98 bp, Homo sapiens
gaagacatgccattcttgaggtggcaggtggtcagctgcgaatcaaaccggaaagttcacatccttggctccttccaaaatatcaagatggcaagaac

SEQ ID NO: 291457 - DNA, 75 bp, Homo sapiens
ctgtgcacatgtgtagatttgcagcacccagtcagcttgaagagtttcaaatggaccctaccactgagaaatcaa

SEQ ID NO: 291458 - DNA, 88 bp, Homo sapiens
agcttttgtagaggaacctagtaaaaagggagcacttaaggaagagttcccgaaggaaaagtagtcgttctcaatttccgattcatag

SEQ ID NO: 291459 - DNA, 51 bp, Homo sapiens
aaggattccaagtaactcttatttgaaactaattctgaagcaagcccttat

SEQ ID NO: 291460 - DNA, 75 bp, Homo sapiens
gaccacagtgctcaccacccaccaccactggttgagaacttgttgcttagtaaccaagggaccattaagctgtgt

SEQ ID NO: 291461 - DNA, 75 bp, Homo sapiens
atagtgctcatggatacgttggagcagacttgaaagtcttgtgtaatgaagcagaccattcctcaagaattttgt

SEQ ID NO: 291462 - DNA, 75 bp, Homo sapiens
cccactgctggggtggtggttccaatgagacagggcacaccaaactccatctggatttggagttccatggagtga

SEQ ID NO: 291463 - DNA, 75 bp, Homo sapiens
gctcctcctcctcctcgccagcctgaccagtggctctgttttcccacaacaggacatggatttgattgacatact

SEQ ID NO: 291464 - DNA, 75 bp, Homo sapiens
ttgttcgggctcagcggccgcgaggccgcagctcccgaattatatccagatcgagagacagaagattctgaaagg

SEQ ID NO: 291465 - DNA, 80 bp, Homo sapiens
cctactattacccccagtatctgcaagccaaggcttcagggatgacttcttagggggcaggggaggtagtcgcccaggcg

SEQ ID NO: 291466 - DNA, 100 bp, Homo sapiens
acgaaaagagccctggaatgtgaagagacaggaggcagcagacggacatccaggtatggcctcacaagtcttggtctacccaccatatgtttatcaaact

SEQ ID NO: 291467 - DNA, 98 bp, Homo sapiens
catgatgtgcgatgtgcggaagggcacctccacccggagagccatcaggacttccggagcatcaaagcaaagttccaggcctctcagccggagcccag

SEQ ID NO: 291468 - DNA, 73 bp, Homo sapiens
tccggaatcgcccgaccgcacacgttgccaccctgaggttaacgtccctaaaacccgccggactttctgtaag

SEQ ID NO: 291469 - DNA, 100 bp, Homo sapiens
cctgctcctccaggcgctgcccagccccttgtcagccagggctgaacccccgcagggctgaagaagatgcagagcagcctgaagctggtggactgtatca

SEQ ID NO: 291470 - DNA, 90 bp, Homo sapiens
ctgcgggcttgcttgctgactcctctcaaagccccacaccagtgagaagcatcagcaccgtgaacttgtctgagaatagcagtgttgtca

SEQ ID NO: 291471 - DNA, 83 bp, Homo sapiens
ttcagttatcaagctttagagcctggctactcacagttgaagcctgattgcagaatcaaatggctatagcatgtggatctcga

SEQ ID NO: 291472 - DNA, 100 bp, Homo sapiens
tgctggccacggacgccgacatcatcagccgctgccagtaagactttgaccccgacgcaggcttcagtgattgccgcggatcagaagcctgagcactttg

SEQ ID NO: 291473 - DNA, 87 bp, Homo sapiens
gcaaagggaccaagctgaagaaggtgaccaacattaatgatcggagtgctcccatcctcgagagttctgggttgacaaatatcaaga

SEQ ID NO: 291474 - DNA, 50 bp, Homo sapiens
caaggacggcgttctggatctcaaagcgaaagtttcctacactactgagg

SEQ ID NO: 291475 - DNA, 96 bp, Homo sapiens
gcctgagcagtcagaaggcaaagaacagaagatcctccttggcacagttggcgggcagctcccaggtctccatgagtacggcgccgtcgggggctc

SEQ ID NO: 291476 - DNA, 50 bp, Homo sapiens
cggactcttcaccctctgcgaggggccagtgtcattcaaagatgtggctg

SEQ ID NO: 291477 - DNA, 100 bp, Homo sapiens
cggtctcccccttagatccgcgctatcgtgaggtccactatgtcctgctggatccttcctgcagtggctcgggtgagactgtggagatgagaaggtggtg

SEQ ID NO: 291478 - DNA, 76 bp, Homo sapiens
caaagattacgtgagcatcttcgtctgcagtgattggcagctcctgcggatctacaagtactactccctgctggcc

SEQ ID NO: 291479 - DNA, 128 bp, Homo sapiens
tcctgcagcttccagacatcgccctggatgtcttcgcgctctggctggtctcccctctgctgggcctcagcaatctggcccctcgaaccctagccctgagggagcgcctcaaatcgtgtttaaccgcc

SEQ ID NO: 291480 - DNA, 97 bp, Homo sapiens
atggatagcttatttgacaagctgttatctaagatgatagtatttctgctgcaagtacttctgatgttcaagatcgcctgtcagctcttgagtcacg

SEQ ID NO: 291481 - DNA, 75 bp, Homo sapiens
agaccagtgaggcagaatatgtatcggggatatagaccacgattccgcaggggccaatctcaaagtcatcagcac

SEQ ID NO: 291482 - DNA, 100 bp, Homo sapiens
aatatggaatgttcttaacccagaagtagctgaatgtgttactccattgctgaggagtggaatcctatgaggatggttgtgaggattatcctactctatc

SEQ ID NO: 291483 - DNA, 83 bp, Homo sapiens
agacggagttcctagtgcaaatgcaagttgctctatatgcaatcagtgctgtctactttgctggagtgatggtgcgactgatg

SEQ ID NO: 291484 - DNA, 90 bp, Homo sapiens
ttttgcattacagcctccctgctttgcccgcctgctgctggaagcttagcagtgccctaaagtacatgccccacgcagtcctcaaactcc

SEQ ID NO: 291485 - DNA, 75 bp, Homo sapiens
aaacagagtccgatgaaaggaatgggtctgggaccttaacagggagccatggttcattccgacaggaccacccca

SEQ ID NO: 291486 - DNA, 89 bp, Homo sapiens
cgccgacccgctggccctttgcaagcagccacgctccatgggggtgccagggggagacacagcaatggaagagttaatagttgaacttc

SEQ ID NO: 291487 - DNA, 83 bp, Homo sapiens
ggaaacaagacagttctgtctgcagaagcccattatggctgtaactggagatgacacaggatgtacagttacccagcacgtgt

SEQ ID NO: 291488 - DNA, 100 bp, Homo sapiens
ggcggtcaactcggagggccagaacctcactcgctctcccgcaggtgctggagaatctggtaaaagcaccattgtgaagcagatgaggatcctgcatgtt

SEQ ID NO: 291489 - DNA, 75 bp, Homo sapiens
cgctgggatgactccgtcacctacatcttccaccagcttctggacaatgcagatcttcgtgaagactctgactgg

SEQ ID NO: 291490 - DNA, 100 bp, Homo sapiens
acggagaaccagtaccggctgacctcgctgtacgccgagcacccaggcgactgcctcatcttcaagagccatcacattggagaatcagctggtgatcctc

SEQ ID NO: 291491 - DNA, 74 bp, Homo sapiens
ggagcgtccggagctagctggatcctctaggcagccggaagtcggtgcagcccacctcagaggagcgcatcccc

SEQ ID NO: 291492 - DNA, 83 bp, Homo sapiens
agaatatgtgcaagcaccaaggaggcctgttcataaaagatatcgaggatttagccggaaggctcttgtcaggatggtgaagc

SEQ ID NO: 291493 - DNA, 76 bp, Homo sapiens
tcatatcaacattgtcgtcattggacacgtagattcggaaagccaagatgacagattttgatcgttttaaagttat

SEQ ID NO: 291494 - DNA, 100 bp, Homo sapiens
gaggaggaggaagaggaggaagaaaaatctgaggttatcaatgacgagagtattgggaaagggtcgttgtggtgcatagacccagagtatagacaaaatc

SEQ ID NO: 291495 - DNA, 96 bp, Homo sapiens
tttggggcagaatacagagatatggaatcagaaaattcatttgcaaattgcccgacaaaggtaaaaagatctttgactcttttgccaaactgaaag

SEQ ID NO: 291496 - DNA, 98 bp, Homo sapiens
ttcctggaggccagaaaattgatgctgtggcatggaacacaaccccctaccaactagcccggcagatcaggcaatttgaatcaacccatagaagtgac

SEQ ID NO: 291497 - DNA, 100 bp, Homo sapiens
ccgcgccgcctcctgctcagatacctgttcccggccctcctgcttcacggctttccttaaagtttcccatgtctcaatggactcctgaatataacgagct

SEQ ID NO: 291498 - DNA, 100 bp, Homo sapiens
cgggctcggcgggggagcgactcatggagctgccgtaagagatccgtgctcagctcacagagcagatgaaatgcctggaccagcagtgtgagcttcgggt

SEQ ID NO: 291499 - DNA, 75 bp, Homo sapiens
cgccatggcggaagcagaggagcaggcatgctggaagatggactgccctccaatggtgtgccccgatctacagcc

SEQ ID NO: 291500 - DNA, 90 bp, Homo sapiens
cgcagctccacgcagcaagacccgcgccgccgggacccccaggacgacgtgtacctggacatcaccggcatgtgaaactattgaaccttc

SEQ ID NO: 291501 - DNA, 75 bp, Homo sapiens
gaaaacctggaccaggcacgggaagatgcccaggaagctgatcagtatctcctttggggacctgaaccctttccc

SEQ ID NO: 291502 - DNA, 90 bp, Homo sapiens
aagatggcggacagtgcggaactaaaggtgtcatcaataaacagagttcttcgcaacctggctagcgaaaagcaacagatgggcgcagac

SEQ ID NO: 291503 - DNA, 75 bp, Homo sapiens
agcattgcttcaaagcatggggctaactccagaatcccccattgagccaatcatcacggagggatcccctgaatt

SEQ ID NO: 291504 - DNA, 101 bp, Homo sapiens
tgctgctgctccacccacttcggccgaaaagatcctcccacttcagcctcccgagtagctggaaccacagtattcccacgagcattctgctgagatgaaca

SEQ ID NO: 291505 - DNA, 87 bp, Homo sapiens
gcggctgccggctggatgggaagttaatgtttacggcgaagtctactcaacgtttccaagcaaaatgatgcttcaacacccaggcca

SEQ ID NO: 291506 - DNA, 96 bp, Homo sapiens
gagcggggccgtggaccgcgtgttgcaagtggagtgtgaacatggctacgcctcttcattcccgtccatgccgagcccccgactgcagcattcaaa

SEQ ID NO: 291507 - DNA, 50 bp, Homo sapiens
aagaaccctcaattgatgaaagggaacaagctaccctctgagtcagcact

SEQ ID NO: 291508 - DNA, 83 bp, Homo sapiens
agttcttatggcctcgaagcatgctttcttggcattatgtgagcagaatggcaacaggaatcctggtggattgcagattggtg

SEQ ID NO: 291509 - DNA, 140 bp, Homo sapiens
gtcggtcgagtgtggcctgtgtggactcgcatcttgcccgaagccgggcggaggagagctcaagctaagagccaagaaaatgatgagctaagagatgcccatgaaaaacgcaaggaacggctacagatgttacagaccaa

SEQ ID NO: 291510 - DNA, 100 bp, Homo sapiens
ccgtcatgatcaacaaggccacgccctacaactacccagccgctgcctactacctgccccgacacctggcccccaaccccacctacccgcacctgtaccc

SEQ ID NO: 291511 - DNA, 82 bp, Homo sapiens
gatccagcctgcggagcctgtggggcaggtggaacggccgccttctccattctccatggccccacaagcttcccttcccccg

SEQ ID NO: 291512 - DNA, 100 bp, Homo sapiens
cgccatcagctcggcagtcgcgaagcagcaaccatggctgtgagctctccggccacacccgctccttcacctttaaggtagaggaagaggatgatgcgga

SEQ ID NO: 291513 - DNA, 78 bp, Homo sapiens
cggcgagcagaactacggcgagcgggagtcttttagtcctgctatacagctgcaccttgtacatcaagctccatgtaa

SEQ ID NO: 291514 - DNA, 126 bp, Homo sapiens
tatggtgtgaaggttggcctgacaaattatgctgcagcatattgtactggcctgctgctggcccgcaggtgtagagactgaagttggtgattacatgttctgctttgacaatacattcagcaccat

SEQ ID NO: 291515 - DNA, 100 bp, Homo sapiens
ctcgacgacagcgctggaatcctataatacgatctctccagcgaacactgaatgagttaaaagagtatcaaaagcagcatgaccactacctgagacagca

SEQ ID NO: 291516 - DNA, 74 bp, Homo sapiens
ggcgattcgtgttcgtgagggccttttctgggggcagctggcattttatgctatgtgggagcctatgtcttcat

SEQ ID NO: 291517 - DNA, 100 bp, Homo sapiens
tcttctcaagtatacagaatataatgaacctcatgaaagcagaaccaactcggatattgttgaggaactttatattgctgttggaatatctggagccatc

SEQ ID NO: 291518 - DNA, 100 bp, Homo sapiens
cttggtgcccctgggcatcaccaacatagccatcgacttcggggagcagtggtgtgctgagctccattgggaagattttcaaagaggaagggctgctggg

SEQ ID NO: 291519 - DNA, 82 bp, Homo sapiens
caagaaggcaatgtctgttcaaagccatccagtccaatggatcagatgggcaagatgagacctcagccatatggcgggacta

SEQ ID NO: 291520 - DNA, 101 bp, Homo sapiens
ttgagatgaaggtcaaagaaaaagttcaaaaactgaaggactctgaagctgaggacagtgccttggtaatgaccagggctccaggaagagatgtccttgtg

SEQ ID NO: 291521 - DNA, 80 bp, Homo sapiens
ctcagaatggcaaacagtatatcatttcagaggaggcattgatctggagaacattgtgtactacaaggacgacacccact

SEQ ID NO: 291522 - DNA, 83 bp, Homo sapiens
gtcaatggagctggaaaacatcgtggccaacacggtcttgctgaaagccagggaaggtttacccaaggtccagcctagcccct

SEQ ID NO: 291523 - DNA, 50 bp, Homo sapiens
ggcgtgagttctgcttatatgaggtccacaaggcgattacaatttccagt

SEQ ID NO: 291524 - DNA, 82 bp, Homo sapiens
cttcgcgtcccctgcaccatgagctggggcaccgagctctgggtgcccgtggttgacacgagctgtgtccccagctgttccc

SEQ ID NO: 291525 - DNA, 90 bp, Homo sapiens
caggagcagcccgcggcgaccaagatcaggaacctgccctgagaatggcatcatttcctggtggtcaacatgaagggcaatgacatcagc

SEQ ID NO: 291526 - DNA, 101 bp, Homo sapiens
aaagagacatgaagaattggtatttcaaatgaccaccatgttgcaaaagttcctggtccagaactttacacagaaaaggtgctcaaaggatatttgtttaa

SEQ ID NO: 291527 - DNA, 100 bp, Homo sapiens
acaagtttggatcctgtgttccccgcctggagtggtgtgtctaagggactggctgagagtctgcagccagactacagtgaacgactctgcctcgtcagtg

SEQ ID NO: 291528 - DNA, 100 bp, Homo sapiens
gatttgttaaggattccaagtaactcttatttgacctcttcttgggtgaatttggtattgtggtgtgtggtcttggtgctccaggtcgtgcagtggaagt

SEQ ID NO: 291529 - DNA, 100 bp, Homo sapiens
cccagccttccaccatgcccaatggtagatgtggacggggaagatcagtctattggaggggaccactctaggaaggatttgttaaggattccaagtaact

SEQ ID NO: 291530 - DNA, 100 bp, Homo sapiens
cgttcccgggtcccgcgcgagctttcccgggataagtagctttagcgatcgggagacagccgggcgctgcaagccccagctcttctccttcaagcccagc

SEQ ID NO: 291531 - DNA, 80 bp, Homo sapiens
cggagctatcggcgccgcggcaagagccaggtgctcctggagctgttggtgggaatatacccctcaggggttattggact

SEQ ID NO: 291532 - DNA, 51 bp, Homo sapiens
cgaggatgccagtttttagggccaggcaagggcaaatggattaaaatcatg

SEQ ID NO: 291533 - DNA, 50 bp, Homo sapiens
ggagagaacacgagcccatcagggctgaaatctctttaatgatggaggga

SEQ ID NO: 291534 - DNA, 90 bp, Homo sapiens
ctataatgaggataatggtatcatcaaggccttcagaaacatccctgctgtcatcatgactccaactcgagaactggctttacagattac

SEQ ID NO: 291535 - DNA, 75 bp, Homo sapiens
ggacttcggaccctggcctcttgggatgcaaagacttcccaagtaagaagcggaagaggagccgctggaaccaag

SEQ ID NO: 291536 - DNA, 90 bp, Homo sapiens
tcagtccttagggacaccgagtgacacgcaggagcttcgggacagcctgtgaagagcgattatatgttagagatagctgatcaagtggac

SEQ ID NO: 291537 - DNA, 75 bp, Homo sapiens
aaaaactatattaaaaggaactggagaattgaacaggagtacagctgtgtagtaaagatgccttctggtgaattt

SEQ ID NO: 291538 - DNA, 137 bp, Homo sapiens
ggcgctgcggagggcttgaggctcgcgagcctccttcgccgcgccccacttgctcgtgcactttacacacatgagtaagagatgctaaaaaccttgtacctatggaccccaatggcctgtcagatccctacgtaaaa

SEQ ID NO: 291539 - DNA, 90 bp, Homo sapiens
ctgagctttgtaccaaagacctgggaaaaggggaggcccccgctgagatgggggcgctgctgctggagaaggaaaccagaggagccaccg

SEQ ID NO: 291540 - DNA, 90 bp, Homo sapiens
ggagaggtcatctcagttccacacaagatcatcacccaccttcgaaaagaggactggacctacagagacatctgggattttctgcgtcag

SEQ ID NO: 291541 - DNA, 100 bp, Homo sapiens
ctatgcaaagaaagggaagctattgctgggattttgaggagtgcacaaaacaacttgcagcagcttttcatgaggaatttgttgtgagagaagatttaat

SEQ ID NO: 291542 - DNA, 50 bp, Homo sapiens
tcatcagcaagcgactcaagagcagcaggccgcccctcacctgaaagcgg

SEQ ID NO: 291543 - DNA, 90 bp, Homo sapiens
ctggtggggggagtcctcatcatcatcgcctcctgcgtcatcaacttaggcggacctgaacaagaagcagacccagaaggacttggagtg

SEQ ID NO: 291544 - DNA, 100 bp, Homo sapiens
tgccactgtctttgcctatggtcagacgggctcagggaagacatacaccatgggggaggccagtgtgggacgactgggtttggattcagaagaggattat

SEQ ID NO: 291545 - DNA, 100 bp, Homo sapiens
cctcccgagtggctgggattacagcctcataaggagaatggctcagagcgtggtggaagtcatggaggactcaaaggggaaggtccaggagcacctcctg

SEQ ID NO: 291546 - DNA, 100 bp, Homo sapiens
gcgcagcatggcggtggaggacgaggggctccgggtcttccagagcgtgaagatcaagatcggatgcagcagtctcggccctggctgctctatgcagtga

SEQ ID NO: 291547 - DNA, 116 bp, Homo sapiens
aaccacttaacctctcagaactgaacaaagacaacattgttcctggaacgccctctttttaaaaaaggtgctggagaatctggtaaaagcaccattgtgaagcagatgaggatcct

SEQ ID NO: 291548 - DNA, 50 bp, Homo sapiens
gacagatggcacagaaaccgctgcgcctatgcctgaagagccaaagctga

SEQ ID NO: 291549 - DNA, 85 bp, Homo sapiens
ggaatagactccatctatccatatgagattgctagcattgctcgttctccagtgtcaggctgcgcactaaggacataaactcgcg

SEQ ID NO: 291550 - DNA, 100 bp, Homo sapiens
tctgttccccgggcagaagaggaggatctcccacctttccaagcaaggccaggagagacgagttgtactgctgtcacaggaaatggacgctggattacaa

SEQ ID NO: 291551 - DNA, 75 bp, Homo sapiens
cagaagaccaagtacctgcagatcctgacctctctgatgagatggatcgatgaggacggggacttggttgccttt

SEQ ID NO: 291552 - DNA, 102 bp, Homo sapiens
cttcaaaggaccggacccagagaagaggaaaactctaccggtgcaggtggatgaaagccaaactggagaacccggctggcttggaggagaattaaaaggaaa

SEQ ID NO: 291553 - DNA, 98 bp, Homo sapiens
aaaggatcgtgatgagttcccaatgattttaattggtaataaagcagatctggatcatcaaagacaggctgaccaactgactgaagagcagattgcag

SEQ ID NO: 291554 - DNA, 90 bp, Homo sapiens
tcgagggtgaagctcctcgacaccatggtggacacttttcttcagaagctggtcgccgccggcaggtactatcgtggtgcagtgggggcc

SEQ ID NO: 291555 - DNA, 74 bp, Homo sapiens
ggagccgtgtggaccaggaggagcgctgtgctggagaatctggtaaaagcaccattgtgaagcagatgaggatc

SEQ ID NO: 291556 - DNA, 100 bp, Homo sapiens
tgccctggcactgagcggccgcggccatggcgtacgcctatctcttcaagtacatcataatcggcgacacaggtttaccgacaagactgtgaaactttcg

SEQ ID NO: 291557 - DNA, 100 bp, Homo sapiens
cagcagtcagaaggggaacggatctgtgtgcccacagctcctggagccccacaggttgaaatcaaggaagcaggtggtactactacaagtaataatccgg

SEQ ID NO: 291558 - DNA, 100 bp, Homo sapiens
tgttgcagcgggactttattaccgctttaccagataggggagtgtatacatcaccacaccagctgtccaggaattaggaggaagtgcccttgaatgaagc

SEQ ID NO: 291559 - DNA, 100 bp, Homo sapiens
gaccctggacaagcggcggcggctggaggaggaggccaagaacaaggccgccatggcatcagatgaaggcaaactttttgttggagggctgagttttgac

SEQ ID NO: 291560 - DNA, 90 bp, Homo sapiens
catggggacttctgcaaatacagagactcggattaaagaggagaaggcagagcccccccaggctatgaatgccctgatgcggttgaacca

SEQ ID NO: 291561 - DNA, 100 bp, Homo sapiens
ctgacccgtctgacttcccgtccgtgccgagcccactcgagccgcagccatgtctggggacgaggtatccagctcacatagaagacattgactacgagga

SEQ ID NO: 291562 - DNA, 80 bp, Homo sapiens
tggctctcaacttattcccttcaattcaagtaacaggttgctcgtgggggccccgcgggcagaagcgcttccactgcaga

SEQ ID NO: 291563 - DNA, 100 bp, Homo sapiens
ttccacacgaacaagcgcgtgtgcgaggagatcgccattatccccagcaaaaagctccgcaacaagatagcaggaaaactgttatccagtgacagaaatc

SEQ ID NO: 291564 - DNA, 100 bp, Homo sapiens
cagcagagttatggagcttttcttcacacgggtcacagaaagtcgagagagccaaatgacgattgaggagaggaagcagctcatcactgtgagagaggag

SEQ ID NO: 291565 - DNA, 110 bp, Homo sapiens
tgtcagtgttaaaggaacctctacaacgaaggtgaagccacggaagataagggccacgcctggctgaaagatgacgaagcgacacactgtaggcagtgtgagaaggagtt

SEQ ID NO: 291566 - DNA, 82 bp, Homo sapiens
ggagaaggccgccgggcccgggcatggtggtctggggcaacgcggaagacaatgcagatcttcgtgaagactctgactggta

SEQ ID NO: 291567 - DNA, 86 bp, Homo sapiens
gaggtgttcgagaacgaccccgagacggatgccggctccaggagcagcagtggaggtcgggaacgcctcattgtggagcccccgct

SEQ ID NO: 291568 - DNA, 80 bp, Homo sapiens
ctggaaaggaatgaggagttacagagggccgagaaggacaggatcaggcgatcagtgggtgaccgcggctgcgagggact

SEQ ID NO: 291569 - DNA, 75 bp, Homo sapiens
tggcaccttgaactcatttgttaagggatctaccaaatctattcaaagcgatctgctgaggatatttataaaata

SEQ ID NO: 291570 - DNA, 101 bp, Homo sapiens
gttccgctgaacaggcttaagatgatgtttgagaaaggtgaaccaactcaaactaaggcagatcgggagcggtgccgagaaaaatttccttactagatgac

SEQ ID NO: 291571 - DNA, 90 bp, Homo sapiens
ccaagacaagctcagccgaggtcaccatccaggctgaaggtgatgtggccgccctcaaccgacgcatccagctcgttgaggaggagttgg

SEQ ID NO: 291572 - DNA, 82 bp, Homo sapiens
cgtgccctacttcaaggataagggcgacagcaacagctctgccggctggaagaactgataaatttcaaacggaagagagtgg

SEQ ID NO: 291573 - DNA, 100 bp, Homo sapiens
atttaagtgggttcctgtgacagacagcaaggagtttgaaggaggagtttcctgcctggtatgagaagcttgttctggaaatggttcaccataacacagc

SEQ ID NO: 291574 - DNA, 100 bp, Homo sapiens
ctatgatctcttctttgccttcctacaaacaggaaattacaaagaggccaagaagatcattgaggtagcaaaccatgtgatttcttctgactctatttcc

SEQ ID NO: 291575 - DNA, 51 bp, Homo sapiens
gcctcagttttcttatcactaaaacagcagcttatgcaagcaaagatctgg

SEQ ID NO: 291576 - DNA, 75 bp, Homo sapiens
aaacaacatccaacttcagtgggaagctttcaggatgccaacccgcccctgaaggttattccccaacacttcaat

SEQ ID NO: 291577 - DNA, 100 bp, Homo sapiens
taaagagacccgttcagagtcctacagtggcagttcaaaaggtgatgacctatcaacagccattctcaaacagaagaaccgtcccaatcggttaattgtt

SEQ ID NO: 291578 - DNA, 83 bp, Homo sapiens
tggtgcatgcagaggacggcaccacctccaaatactttgatcttcatctccgtggtgcttgtctgcctggtgttggccttcgg

SEQ ID NO: 291579 - DNA, 101 bp, Homo sapiens
gtttggtcttcatcttccaatttgtaatctcttgctcatgtctggctattaaccgaagcaaacagggtttcttgaattcctctgagctttctggacttcca

SEQ ID NO: 291580 - DNA, 101 bp, Homo sapiens
agagtgcagagccgcctttccagcatgcaggggctgctcagtgaatccctgttgttactatccatgccagcaccagggcatctgtgtccgcttcggccttg

SEQ ID NO: 291581 - DNA, 50 bp, Homo sapiens
ctgacacgtgggtgaagcacagttttctggatatgccgcagaaggatccg

SEQ ID NO: 291582 - DNA, 82 bp, Homo sapiens
gtgggcgagaacgtccactgcgggccggcgaaagctgggatgcccgctgtctgtagccccggcatggtgcccgtggccctgc

SEQ ID NO: 291583 - DNA, 82 bp, Homo sapiens
gtccaatctgagcgtgctgcggacggcgctgcggtacatccaggtgccgaggtaaacagagcatccacggaaggggaaagcc

SEQ ID NO: 291584 - DNA, 75 bp, Homo sapiens
gagcactcgctgtcgaagccctaccaggttgatgcggatgaaattaaaaggctaggaaagagatttaagaagctt

SEQ ID NO: 291585 - DNA, 98 bp, Homo sapiens
ggcaatagaagcctggatcaactttaataaagaggaaagagaggcttttgcagagtcactcaggacaagcttgaagatgcatcaccctatacagatga

SEQ ID NO: 291586 - DNA, 95 bp, Homo sapiens
cgggcgcctatcagtacacaataaggggcgggacgatcattggcagtgcgcggtgccaggccttccgcacgcgggaaggccgcctgaaggctgct

SEQ ID NO: 291587 - DNA, 97 bp, Homo sapiens
attctattcatgttgctttttgatggccatggcataaggaactctatcccaggaatacagctttgcattagggattagaaaatgagtatcaggaaga

SEQ ID NO: 291588 - DNA, 83 bp, Homo sapiens
agaacatcctggaccccaggctgctgatcgccttccagaacaggctttatcctgtggataaacgcagagtgaacgagtttggg

SEQ ID NO: 291589 - DNA, 87 bp, Homo sapiens
agactcacggagacatcctgcagtgggacttccacgactccttcttcaacctcacgctcaagcagatggagtttcactcttgtctcc

SEQ ID NO: 291590 - DNA, 83 bp, Homo sapiens
cctactccaccatcatcaacaaaggttcctaaagagaaagatgaaatggtagagcaagagtttaaccggttgctagaagctac

SEQ ID NO: 291591 - DNA, 50 bp, Homo sapiens
tggcgggtcccgcgggccaggccgtggagcgatgaaatctacattgctcc

SEQ ID NO: 291592 - DNA, 74 bp, Homo sapiens
gatgtagcaatacttactgcactgctaaaaggaccacctgtagagctgcgccaaagaaaaaagccaaagtcttc

SEQ ID NO: 291593 - DNA, 76 bp, Homo sapiens
aagaggcaaagagaatcggttggccaccctggagaaatgtgccacgtgctcccagcccatcctggaccggatcctg

SEQ ID NO: 291594 - DNA, 100 bp, Homo sapiens
tcaacttcttggtatatagatacttgcaagagtcagatgcacagtttgaaaatgatgaacgaattacacccttggaatcagccctgatgatttggggttc

SEQ ID NO: 291595 - DNA, 75 bp, Homo sapiens
acctccaacaacatccgcgagatcgaggagtcttttagtcctgctatacagctgcaccttgtacatcaagctcca

SEQ ID NO: 291596 - DNA, 76 bp, Homo sapiens
ggattcctcagctacgaggaggcgctgaggagaggggaccctcacaatgatcccaatgctcagggggatgccttca

SEQ ID NO: 291597 - DNA, 100 bp, Homo sapiens
agaaatgaccgtgcacctcctcagtaaactcatttctgtctccaaacatacattggtggatccttcccaattgtcagaataactgaagtgaagtgatgga

SEQ ID NO: 291598 - DNA, 97 bp, Homo sapiens
actatttggcaagaagcagatgcgcattttgatggactgctcactagaagctcagcccaaatatgttagaggtgggaagcgttacggacgaaggtcc

SEQ ID NO: 291599 - DNA, 90 bp, Homo sapiens
tggagatcatcatgaaagagaccgtggatgctgaaggtatactgcaacatccagatggcacagttttgaaacagttacaaccacctccaa

SEQ ID NO: 291600 - DNA, 100 bp, Homo sapiens
ggggccacgtgagccacggccacggccgcataggaattcgaatttagagtttaatttctcagagcattctctccaggaagaatttttacagtatctcaaa

SEQ ID NO: 291601 - DNA, 90 bp, Homo sapiens
cagttgcaccctgttttgcaaaaaccatcagtgtttgggaatgattctgatgatgatgatgaggttacctgtgcatgacagatgagtggt

SEQ ID NO: 291602 - DNA, 88 bp, Homo sapiens
gctcggtttggctgactggggagtcggcaggcggcagggaacagtgttgataaagactgctgaagaattgatgaattttagtaaggga

SEQ ID NO: 291603 - DNA, 75 bp, Homo sapiens
cgcggagccggcaccggatggtgggcgggggccagccgtgcgggcccagccgcagccccagccccagccccagcc

SEQ ID NO: 291604 - DNA, 106 bp, Homo sapiens
ctatggatgatcgagaggatctggtgtaccaggcgaagctggccgagcaggctgagcgatacgacgccaaaacagagtggagtacgagaaaagggtccgagcacaa

SEQ ID NO: 291605 - DNA, 100 bp, Homo sapiens
cagaaggatatcgacgtcgtgatccagaagtccagagctgaggactgcctgtttgcaggatctgtctggctccattgatgacctccccacgggaacggaa

SEQ ID NO: 291606 - DNA, 75 bp, Homo sapiens
ccaccgaggctgtggttgcactctgccaggtgatttatgccctgaacacccgccaggatgaggctgaggccagca

SEQ ID NO: 291607 - DNA, 82 bp, Homo sapiens
gatcgcgcaggatttcaaaaccgacctgaggtttcagagcgcagccatcggtgcgctgcagttcacagtacagagccagttg

SEQ ID NO: 291608 - DNA, 50 bp, Homo sapiens
ctatgaccggactttttcttgaaagagtgatcagcagctggactgtgcct

SEQ ID NO: 291609 - DNA, 90 bp, Homo sapiens
ctcagagagggaagagattcagccagcacactcctcgcgagcaagggtgagcagggcagcatttccttctcccactgctgctgagatggc

SEQ ID NO: 291610 - DNA, 88 bp, Homo sapiens
gcctgctgctcctcggctgcggatacctcgcccatgttctggccgagacatcctgcagtactacctggcctgctcgccccgcgccgcc

SEQ ID NO: 291611 - DNA, 75 bp, Homo sapiens
cttgtcagtgcaacaggaagcaccttgtatacccaatacaggtatttctttaaatccagaacaatggagccagct

SEQ ID NO: 291612 - DNA, 75 bp, Homo sapiens
ccgcgggtctacttcctcaaagccatggccatgcagaaaatctttgcccgggaaatcttggactccaggggcaac

SEQ ID NO: 291613 - DNA, 75 bp, Homo sapiens
atggcaagttggagggagagatgcaaataccaggaagtcctgagttgaggcttgcgggatcctttccggagaaag

SEQ ID NO: 291614 - DNA, 90 bp, Homo sapiens
cccggtgcctggccctctagccccgctaccggactacatgtcggaggagaagctgcaggagaaagacatgatcccagagaacgctctaga

SEQ ID NO: 291615 - DNA, 85 bp, Homo sapiens
atgtggaaaggagattgacagtcacaattttgtaataagcttaaagcttttcaagccaggccaagaagctgtgaagtaccagggt

SEQ ID NO: 291616 - DNA, 108 bp, Homo sapiens
atcatgtgtgaaatcctaagtggattgcagttgggagactttctcattaaggtgaatgaaaactttgccattgatttgatagcagagcagcccgtgagcgaggtggag

SEQ ID NO: 291617 - DNA, 50 bp, Homo sapiens
cttatacaacatccagtaccagttccacaagacacctgtgcatagcagat

SEQ ID NO: 291618 - DNA, 100 bp, Homo sapiens
cgaggaggatggcggagtcggggctcctgacgggtcagtatagaccttctgatttgctgtgccctgagacatatgtttgggtacccattgagcaatgcct

SEQ ID NO: 291619 - DNA, 101 bp, Homo sapiens
cccagatttttgctcattaacagaaaagaagaggagaatgctaagcagagcatctgtgggaaaactagaattgcagaagttggaggtgtgccttacttatt

SEQ ID NO: 291620 - DNA, 101 bp, Homo sapiens
actcttgctggtttctttgctggagcacttgagccacgtgcatgaaccaaacccacttcgttcaagacaggtgtttaagcatcatcgaaggtaacatgaag

SEQ ID NO: 291621 - DNA, 88 bp, Homo sapiens
caacatctagcagaaacaggcagcaacatgaatgatcttaaggagttgctggagaaatctttacatctcaaccatataccctcagatt

SEQ ID NO: 291622 - DNA, 75 bp, Homo sapiens
ctggtttatagcctggttaatcaacagtcttttcaggtgtaattattgaaacagatataattggttcagaccttt

SEQ ID NO: 291623 - DNA, 75 bp, Homo sapiens
ttcattggaggtatcaactgtaagaagaggaaagacttgtctcaggatccttgtgaggatatttctcgtatccag

SEQ ID NO: 291624 - DNA, 100 bp, Homo sapiens
acctggttctgccttctggacaatctttccgatcagtggaccatcccctgcccggatcctctctctccacagactatggcagctggcagatggtaacggg

SEQ ID NO: 291625 - DNA, 73 bp, Homo sapiens
ttgctcggccgatgaagtgcagaggtttttttctggcgggtggtcctgggctccaggaaccactgcaacttgg

SEQ ID NO: 291626 - DNA, 75 bp, Homo sapiens
accagacggcgtgtgagcagctgggacagggtgtgaaggaagccggtgagaagcctcggggagcacagatggtgg

SEQ ID NO: 291627 - DNA, 75 bp, Homo sapiens
acacattctgggatgtggatggaagcatggtgcctcctgaatgagaccatgaaacgtatggtgcaatagccctac

SEQ ID NO: 291628 - DNA, 98 bp, Homo sapiens
tcgcctgtttcaagaaaactctgttctcagttcactccccctcaattctctgagtaggaacaatgaatgttgaacagtcatcggatctacaggaccag

SEQ ID NO: 291629 - DNA, 98 bp, Homo sapiens
tcctggggacgaatcctgagcttgccagagacgggcggcgcaagatacttgccagaactaatacagctgatgaaatacctgaccttttctgctccagg

SEQ ID NO: 291630 - DNA, 75 bp, Homo sapiens
agtacgttgtgtgaagagtatcattcgacagacatatctgaagagatggattaagaatgctttggattaaggatt

SEQ ID NO: 291631 - DNA, 100 bp, Homo sapiens
ggagcctggaagggggagacggcccgagcgggagcgggagcggacgcggcctcagtcctgcgcgggagaacacaaagttatacctcaatttacttgaaat

SEQ ID NO: 291632 - DNA, 100 bp, Homo sapiens
cagcggcaaggtctccaagtcccagctcaagattacgtgtgaaaatgaacttgtgcaaacccaaccccatgctgataatccatctaatactgtcacttca

SEQ ID NO: 291633 - DNA, 129 bp, Homo sapiens
tattttaacacctcaaggttgaagcagaagaataaggagaaggataagtcgaaggggaaggcgcctgaagaggacgaagtctctgctggatgaaccgaatcctaacagtccagccaatagccaggcagc

SEQ ID NO: 291634 - DNA, 80 bp, Homo sapiens
aagttttccttcttacagagatgtgactctgtttgaggaattgaatgatctggcacgggaccctccagcacagtgttcag

SEQ ID NO: 291635 - DNA, 90 bp, Homo sapiens
agctttctggatccagttcagaggattcagagaaggtaattggtatgtgaaaaagtgtctaaacgacgttggaatttgcaagaagaagtg

SEQ ID NO: 291636 - DNA, 83 bp, Homo sapiens
tcaacacaaggcagccacaggccaaaatcattgtattggaaacccttttccaaagagaaatgaagaagaaaactgtatgtacc

SEQ ID NO: 291637 - DNA, 100 bp, Homo sapiens
gcaagcgctgttcaaacccatgaaggtggatgtgaacactgaccggaagatcagtgccaaggagatgcagcgctggatcatggagaagacggccgagcac

SEQ ID NO: 291638 - DNA, 100 bp, Homo sapiens
ttctgtcatgagaagtggcgatcaaaattgatattctgcctccatggtggcctctctccatccatagacacactggatcatataagagccctggatcgtt

SEQ ID NO: 291639 - DNA, 100 bp, Homo sapiens
ccggccgctaccgctcaggtgctgcaggcacagcccgagaaaccgcagcactacacgtggaagcagggaaaggcctggagatgaggaagctggttctctc

SEQ ID NO: 291640 - DNA, 118 bp, Homo sapiens
tcgggacatgaacgaggccaagcggagggtgcgcgagctctaccgcgcctggtatcgggaggtgccgaacactgtctctcatcacttttgtgaacaagcacctgaacaagctgaattt

SEQ ID NO: 291641 - DNA, 100 bp, Homo sapiens
gaaggaaaaacccttctactcggactctgagggggagtcaggccccacggagtccgcagacagtgtgggtcccacattgagaactggcattcgatcctgc

SEQ ID NO: 291642 - DNA, 75 bp, Homo sapiens
ctatggcatcgcaacacctaaaggatcctcattaagactacaagataaagttcgagaaactattgaagcattgag

SEQ ID NO: 291643 - DNA, 100 bp, Homo sapiens
cgcctatcaggaccgcgacaagccagcccagatccgcttcagcaacatttccgccgccaaagatgggagacctttaactctgaaggacatatgggaagga

SEQ ID NO: 291644 - DNA, 100 bp, Homo sapiens
aatttaatcaaaagagagcaaaatttaaggagttatatttggctaaagaggttggaactgataatgggagagaagcaattgaaagtggggctgcatttct

SEQ ID NO: 291645 - DNA, 100 bp, Homo sapiens
ttcacgcagaagttggcaggagcatgggcttcggaggcctatagcccgcagagttacatccatatgggagaatagtctccagatcactacaatttctagc

SEQ ID NO: 291646 - DNA, 80 bp, Homo sapiens
tgataacaccctgtaacagctgaacaggtgctctagttcacagctataggggaacaggtggaatatttgaagtttgctgg

SEQ ID NO: 291647 - DNA, 110 bp, Homo sapiens
atatcttcaaggaaagagaatcatttgatggccgaaatattttaaagcagcccatgacccatcgagaaactgcacctgtttcccagcctgaaaacaaaccagaaagtaag

SEQ ID NO: 291648 - DNA, 99 bp, Homo sapiens
acatggaggaggaagaaatgaatgatggctcacagatggtgagatctcagctgagtcagtgctgattctctcaaatagagcttgaaggataaatcttca

SEQ ID NO: 291649 - DNA, 98 bp, Homo sapiens
tactgggtcgtcttctcggcgacaactgccctgctcttcatcccagaagtcaaattttctactactctactgggatgactgtgggaattgtggcctct

SEQ ID NO: 291650 - DNA, 103 bp, Homo sapiens
ctactaggcaagcatggagttggcaccccaaaagaaagcttatgttcctgaggaagaattgaaggcagcagaaatagatgaagagcacgtggaggatgacggg

SEQ ID NO: 291651 - DNA, 100 bp, Homo sapiens
gtcagcttcccttacctgcattatgatactgcaaaattcaaaatggggctcaaggtattcgtttcatctacaccagagaaggcagaccaagtggcgaggc

SEQ ID NO: 291652 - DNA, 100 bp, Homo sapiens
ttttgttcaagataaagtgattttttgcctttgttgattaactggacaaattcagatccaggtccagagagcatcgcagacatcgatctcgctccatgtc

SEQ ID NO: 291653 - DNA, 100 bp, Homo sapiens
gctcaacttcctgatagatgtacactgaaaactggacattataacattaatgatttagaatctagaagagaagtaaaaaaagaagaaggtgaagcttttg

SEQ ID NO: 291654 - DNA, 100 bp, Homo sapiens
caaccatttcagtctgcaggtcattagggacctggtggccttagtctttcaggtggaacggtgtgcgacatgggaaagaaaaccaagcggacagctgaca

SEQ ID NO: 291655 - DNA, 74 bp, Homo sapiens
ctatgctgctgcctcagggatgaaagcctgtgtagagtacttgattctaaagctcgaaaggcctgctatagttc

SEQ ID NO: 291656 - DNA, 74 bp, Homo sapiens
ggaaccaaagactctgggactcttggtgccaacagagttactctctctaactgaggaactggattctataacca

SEQ ID NO: 291657 - DNA, 99 bp, Homo sapiens
gaagcagtggtcgaatccagtagaaaactggtcaaggaagctgagaatacttctgctgtggtgacccaaagaagcctcacactccgtgcgtcccaaacc

SEQ ID NO: 291658 - DNA, 100 bp, Homo sapiens
caatggaattgaagcctgctattgcaacatgggattttcaggaaatggtgtcacaatttgtgaaggctagacagcaacaagcagaattggcccaacagga

SEQ ID NO: 291659 - DNA, 80 bp, Homo sapiens
agaaactgtccgagaagcccaaatgacaaagcataaatcatggacaccagagaataaggtggacctcaggaatccggaaa

SEQ ID NO: 291660 - DNA, 100 bp, Homo sapiens
agcggcgagcagaactacggcgagcggagctccactggttcaacagcctctcctccagtttcgaccccagtcacaggacacaagagaatggtcatcccga

SEQ ID NO: 291661 - DNA, 100 bp, Homo sapiens
gtggccttagctgtgctcgcgctactctctctttctggcctggaggctatccagctttctccttggaccaagatgactgatggaaaactctccacctcta

SEQ ID NO: 291662 - DNA, 100 bp, Homo sapiens
gcccgcatgctgatcgcgcaagaggggctgctgtgcgaaaaatggctacaaacttcctagcacatgagaagatctggttcgacaagttcaaatatgacga

SEQ ID NO: 291663 - DNA, 49 bp, Homo sapiens
tctgtctgtgggaattgtaagcaagtttgaaggatgacctctaggaaga

SEQ ID NO: 291664 - DNA, 75 bp, Homo sapiens
aggccctgagcacgctgctgtgtgagcagcaggtacactgaggaggggacggctccgtcttcacattgtgcacag

SEQ ID NO: 291665 - DNA, 74 bp, Homo sapiens
ctcctctttacttgctgtcagctgcggagacaatgcagatcttcgtgaagactctgactggtaagaccatcacc

SEQ ID NO: 291666 - DNA, 100 bp, Homo sapiens
taatggatgaaaggaaccgacaggcagggaacgtggtgacaggagaaatggtagaagagcttattctttccggagcagatatcatcaaagtgggagttgg

SEQ ID NO: 291667 - DNA, 80 bp, Homo sapiens
gaagtcgcgtgtctaggtgagtcgcggtgggtcctcgcttgcagttcagcgaccacggtacaatgactcttcttgctttt

SEQ ID NO: 291668 - DNA, 82 bp, Homo sapiens
ctcagctcttgccaaacagacccgagacccatgtcagccccactggatgccatgaagtgggaagccccttgcagacaggtgg

SEQ ID NO: 291669 - DNA, 126 bp, Homo sapiens
gtcacctgccggacccccagaaggggtccctgaggaggctcagcccccacggctgggccaagagagagctcataggtctctgaatcaagagaagccacatctggacctgatatagaagagactatt

SEQ ID NO: 291670 - DNA, 100 bp, Homo sapiens
caacaggatgctacagctcagcaggatttctccagtgatgattctaagttagaatataacgtagatgctgcaaatggcatagttatggaaggatatctgt

SEQ ID NO: 291671 - DNA, 95 bp, Homo sapiens
catgaggccaaaggcagttgtattgatggaggtgacacgagcagtgatgaggataaagaagaacatgaaactcctgtggaagtagaactcatgac

SEQ ID NO: 291672 - DNA, 101 bp, Homo sapiens
atgacagttcacataagaagttcttcgatgtatctaaacttggcaccaagtatggtaagaatgattgatgttggctgatattggagtgctcattcacatga

SEQ ID NO: 291673 - DNA, 50 bp, Homo sapiens
cagcacccacccaccgtggtacagcatcaagatggtgctcatgtggacca

SEQ ID NO: 291674 - DNA, 90 bp, Homo sapiens
cagcctcctgagcagctgggactacaggtgcatgccaccacacccagctaattaaaaaaattttttgtgtggagtctatgttgcccaggc

SEQ ID NO: 291675 - DNA, 100 bp, Homo sapiens
tataaatcacctggtggagagaggagactatgacatagcagcacgagtggttggtgatggtggaagtatttccaagggaaaaatatgttctttaaaagca

SEQ ID NO: 291676 - DNA, 73 bp, Homo sapiens
gaagaactccaggcgcaagcgggatcttgtactctctgcctctactacgtggacagtgaagggaaccggattt

SEQ ID NO: 291677 - DNA, 59 bp, Homo sapiens
tttgcggattttgaatataggatattgcggtggtggagatgagcgatgccttccggcag

SEQ ID NO: 291678 - DNA, 80 bp, Homo sapiens
aggctggagggactgtgaggtaaacagctgagggggaggagacggtggagatgacctgatcagagccatcaagaaactaa

SEQ ID NO: 291679 - DNA, 100 bp, Homo sapiens
agaagcaaataagaatgcgagtattcttttaaaggaacttgatctggaaaagctggaggaaagcaggaatgttcagaggcaaatgaagattctgcagaat

SEQ ID NO: 291680 - DNA, 90 bp, Homo sapiens
aggagcaatgatgtagccacctcctaaccttcccttcttgaacccccaggtggtcttcaagctgacagagaagctgacggaacagaagga

SEQ ID NO: 291681 - DNA, 82 bp, Homo sapiens
atgaggagggctctgatccccccctgccggggagggcccagcgcatccgacaggtcatgatgatgggcagcgcccgagtggc

SEQ ID NO: 291682 - DNA, 87 bp, Homo sapiens
gcagtggagcccaaagacccctggagacatgtgtggacaacagtgagtatatgcggaatggagacttcttacccaccaggctgcagg

SEQ ID NO: 291683 - DNA, 100 bp, Homo sapiens
atggggattatattactgtaaaagttgcacttaattcaaatgaagaatataacctggaccaagagactcagattgatggacaacttttcttaattaagca

SEQ ID NO: 291684 - DNA, 83 bp, Homo sapiens
ggaaattgaagctcaagaaggtgaagatgatacctttctaacagcccaaaaattggagatattgctggtgttgctgatgttac

SEQ ID NO: 291685 - DNA, 100 bp, Homo sapiens
ttcctccaggagaagttagcttcagagttctttgtggatggacttgattctgatgagagcaccgacagtaaatggttcacggccgacatcatgtccatag

SEQ ID NO: 291686 - DNA, 75 bp, Homo sapiens
cagaatttctgtgagcaggtgaacactgaccccaatggggaggcatgcatctccccatgtgctatgatgctggct

SEQ ID NO: 291687 - DNA, 73 bp, Homo sapiens
tctaccctgctggaggcgcccaggacaggctgctcttagtaaacacttgccatcgtcagatagtatgtctcta

SEQ ID NO: 291688 - DNA, 100 bp, Homo sapiens
ggaatgtcgacgaggagctgagctcggggagtacagacagtgaggaaagtacagactctgaagaagaagatggagcaaagcaagacttgtttgaacccag

SEQ ID NO: 291689 - DNA, 82 bp, Homo sapiens
ggcgcgctcccgcggagccggagccgcagaggctcccgggctggactcaggcttctcaggttttaaaatcaaagatgggaaa

SEQ ID NO: 291690 - DNA, 100 bp, Homo sapiens
ccaccaggtcaccctggaagagtcgctggccgaagatcatgtatcagttggaggacttggagacagcttctatgagtatttgctgaaggcctggttaatg

SEQ ID NO: 291691 - DNA, 101 bp, Homo sapiens
tacccagcttaaagagctccacattcaggggaaccgcctcaccgttctgcccccagaactagataaccatgatgactacacagacttctactatgacattt

SEQ ID NO: 291692 - DNA, 100 bp, Homo sapiens
cagggaaggagggcgtccgagtcaacaaccgcttcgagctgctgcatcttcctcccgtgaggctggccgagctccacgctgatctgaagatacaggagag

SEQ ID NO: 291693 - DNA, 102 bp, Homo sapiens
ccacccgaggcgaagcgtggaagcagcagtcagaaggggaacggatctgtgtgcccacagctcctggagccccacagcagacaactaaactggtaggtggca

SEQ ID NO: 291694 - DNA, 98 bp, Homo sapiens
tcttaatcagcctttggacaactattttcgtcatctttggaacaaagccttcacagttgttgatcacatagcatggtcatccactcacagcttaaaaa

SEQ ID NO: 291695 - DNA, 110 bp, Homo sapiens
gccttagctgtgctcgcgctactctctctttctggcctggaggctatccagcaattggctgtgaaaggactgaggcagccatctgggggtagcgggcactcttatcagag

SEQ ID NO: 291696 - DNA, 75 bp, Homo sapiens
ccgcgagcagagccgcccagccctgccagctgcgccgggacggtttacccaaggtccagcctagcccctaggcac

SEQ ID NO: 291697 - DNA, 75 bp, Homo sapiens
gtactgggggattcgcagggaggatgtcgggacaccccggaagctgggaaatgggcagctgcaatgactctccgc

SEQ ID NO: 291698 - DNA, 113 bp, Homo sapiens
gtttttgcggactggcgctttctgatttcagagactctccgcaacagaaccatctcaagtgagaagccctaccactgcaactgggacggctgcggctggaagtttgcgcgctc

SEQ ID NO: 291699 - DNA, 85 bp, Homo sapiens
ccggccgtgcagctggacacgcagcacatgggtatgtgaaagcaagaacagagctaacatgggattatggctatgaagctgggac

SEQ ID NO: 291700 - DNA, 75 bp, Homo sapiens
aggacggatgatgaagtagtacagagatgtgtcatgaagctttgtcacatatctgggtaccaggtttgacctcaa

SEQ ID NO: 291701 - DNA, 76 bp, Homo sapiens
cagcctctcagtcaacatctccttcgcagccgcgcaaaaaaagttggatggcaagcatgtggtgtttggcaaagtg

SEQ ID NO: 291702 - DNA, 75 bp, Homo sapiens
ggtcctttatatagaagggagagtaggctccaccgaggacaccgcgtccagcttgtgtggcgaggaggacacaga

SEQ ID NO: 291703 - DNA, 100 bp, Homo sapiens
cagccgggagatggccgaggccttcgccggggagatccctaaggtcctcgtagccgggtgtacatcggtgagctcccgcaggacttcctccgcatcacgc

SEQ ID NO: 291704 - DNA, 73 bp, Homo sapiens
gaattctgtggaagagtggacaacagaagactggactgaagatgaccctgatgctcccataagacagaaaatg

SEQ ID NO: 291705 - DNA, 74 bp, Homo sapiens
ggcaagtattgctgtgggtgctgggacttcccgtccgcggcgtggagggtgtctttcaggttgcagaaaagatg

SEQ ID NO: 291706 - DNA, 95 bp, Homo sapiens
atgcccgggccgtggctctagcaggctccactaactggggctacgactctgatgggcaggtgggtttggaggatttgggacaacatctacaactg

SEQ ID NO: 291707 - DNA, 75 bp, Homo sapiens
agaggtacctctccttttccctctccctttccctaagggacccagacatggagctgcgggaagaagcctggtctc

SEQ ID NO: 291708 - DNA, 100 bp, Homo sapiens
ggaagagagaccttagaaaggatcaggactggcggatggtaaaagatgactatgaggacgattcccatgttttccggaaacccgccaatgacatcacatc

SEQ ID NO: 291709 - DNA, 100 bp, Homo sapiens
ccggagtttgtaatcaaagtcatcgagcagggcctggaggacctggtcttcactgacgcctctccccagggtgtggcagtagctctgtggacccagtttc

SEQ ID NO: 291710 - DNA, 90 bp, Homo sapiens
gtgggactcttacataatccccaatggctttgatctagaagggctgccccgcccactgcccctgctggtccagcccaacctcccctttgg

SEQ ID NO: 291711 - DNA, 51 bp, Homo sapiens
cagcatattacctatcaggagaggagagcctgagaaattggtgcatcatat

SEQ ID NO: 291712 - DNA, 73 bp, Homo sapiens
aaactcagccactggttgccttggtaggcaataaaaggcggatctttgccaatactccagattcgggctgtgt

SEQ ID NO: 291713 - DNA, 101 bp, Homo sapiens
tgttcagcactgatgactattttcaccatcaagatgggtacaggccaggagtggtggctcacacctgtaatcccagctctgggaggccaaggccagtggat

SEQ ID NO: 291714 - DNA, 50 bp, Homo sapiens
cgtcatcgagtgtgacgtggtgaaaggtgttggggatgtcctttgcactg

SEQ ID NO: 291715 - DNA, 82 bp, Homo sapiens
ctttgtactgataagtgcaaaaggcctgaaataaccaactgggacactgcccatctctaagataagaacctggaaaggggac

SEQ ID NO: 291716 - DNA, 101 bp, Homo sapiens
agcgtttccgaggtgaaggcgccgcgccaggccgggcgggcgatggtcagtaggacagaaggtaacattgatgactcgctcattggtggaaatgcctccgc

SEQ ID NO: 291717 - DNA, 98 bp, Homo sapiens
ccgccgctgccgcttccaccacagtgtctttggtgcaacactaacaaggcttgtctggactacccagttacaagcgtcttgccaccggcttccctttg

SEQ ID NO: 291718 - DNA, 75 bp, Homo sapiens
cggcgatatggaagaggagggcaagaagggcaagaaggcgtggtgtccctcgtggccgttcacccctccaccgtc

SEQ ID NO: 291719 - DNA, 100 bp, Homo sapiens
agtgttacagcttttttaaatgaccttcttgaaagaatggatattggtcctaaacagacacagattgatgaacataggatatgtgtgtgtgtaagaaaac

SEQ ID NO: 291720 - DNA, 82 bp, Homo sapiens
tggcacccaccactgtactgtctgtctctgcggattggaatgcacttctccagcgacctaaagatgggatttcgccatgttg

SEQ ID NO: 291721 - DNA, 83 bp, Homo sapiens
acgtggaacaacactggccactttgaaccagatgatgggacgattttaagacaattatctcctatattgatgagcaatttgag

SEQ ID NO: 291722 - DNA, 75 bp, Homo sapiens
cccacataaaaatactagattacagttgctcccaggtattgtcttctaagaactctgaagcaatgtcagacattg

SEQ ID NO: 291723 - DNA, 75 bp, Homo sapiens
agcggatcccacacctccggaccgagggacgcgggtgaattatgtaacctcattacgctggatgtagctcacaat

SEQ ID NO: 291724 - DNA, 100 bp, Homo sapiens
cgtccacctctgcatctccaagcccgaacgccccatgaagttcctccgggagcacttcgagaagctggagaaggactcggtggcttttgaggatgtagat

SEQ ID NO: 291725 - DNA, 74 bp, Homo sapiens
gcttcagaatggcagaagatgatccatatttgggaaggcctgaacaaaatgacagcccatatcaaggcggtgta

SEQ ID NO: 291726 - DNA, 88 bp, Homo sapiens
agaacattttgtggaattcgtgaaacttgtccgtgccaaatttcctgaacacaccattatgggctcattgtcatccccaagccaggcc

SEQ ID NO: 291727 - DNA, 100 bp, Homo sapiens
cgggagttcaaggaggtgctgaagagcgaggagggaaataggggatcagtggcatttggcaattcaagaagcaattttagaaaaatgcagtgataatgat

SEQ ID NO: 291728 - DNA, 100 bp, Homo sapiens
cagtgtggagcagcccagccaagcactgtcagggggcagaggcctggcctccaggggtttgtcttaaatatgtcgggggagaccaatttggacatgtgaa

SEQ ID NO: 291729 - DNA, 74 bp, Homo sapiens
actatatctccattgaatcagaagaattcaaagaagctttttcactatttgacaaagatggtgatggaactata

SEQ ID NO: 291730 - DNA, 83 bp, Homo sapiens
ctctcagcgccgctcccagccacagcctcccgcgcctcgctcagctccaacatgagaagctgatcgtcgaagggcatctaacc

SEQ ID NO: 291731 - DNA, 80 bp, Homo sapiens
agctgaaaccacagacatgactgagtcctccatgaagaatcatggaagggaagtggttgctgtgtatgttactggtgctt

SEQ ID NO: 291732 - DNA, 100 bp, Homo sapiens
ctagtttggatgtggaggggaatagactccatctatccatatgagatgcaaatactgtgacagatcatttagcatatcttctaacttgcaaaggcatgtt

SEQ ID NO: 291733 - DNA, 75 bp, Homo sapiens
agatttagataaagtcatcagtttgaaagaagctaatgtgaaggtcatgtaatgtttgcagaaataaaaatggag

SEQ ID NO: 291734 - DNA, 90 bp, Homo sapiens
caaagccgtctgtagaggatcctttccccattgaagacagagatgtcaatgaccccatgcccaaccgaggcggcaatggactagctcctg

SEQ ID NO: 291735 - DNA, 100 bp, Homo sapiens
gaactggagggcaagaagtggagagtggcacgtgggaaaaagcgccagataggctggttcccagctaattatgtaaagcttctaagccctgggacgagca

SEQ ID NO: 291736 - DNA, 75 bp, Homo sapiens
tttatcccttcatctgtggatgggcaggtttgtggaatcttgcttcccttttttccaacctttgtttatttgtat

SEQ ID NO: 291737 - DNA, 98 bp, Homo sapiens
ttaaggattccaagtaactcttatttgattcatgcccaagcacaaaacaacccatttaaagaagatgctcggccttaaaggaaatggcggtgcggttc

SEQ ID NO: 291738 - DNA, 83 bp, Homo sapiens
gagacatctttggtttctaatatcttccatgtcaacacggatgatcacagggattgaaagaaggtggcaagaggaagaagcag

SEQ ID NO: 291739 - DNA, 90 bp, Homo sapiens
ggcgagagtgattgccatttggctgaagtgtggtgtggctctggaactctattttaagaacctctcaaaacgaaacaagcaaatcatgga

SEQ ID NO: 291740 - DNA, 78 bp, Homo sapiens
ggcatagttgaaaagaagtccagaatattccctgtgagcgaagcaggtgttcacagaccccatgttggtggaattcat

SEQ ID NO: 291741 - DNA, 100 bp, Homo sapiens
gaacatatgggattcagaggagtatgcatcagtcttgcagctgctgaggacactaaaggagactcagccatggtcctctcccaaaggttctgaaggatac

SEQ ID NO: 291742 - DNA, 51 bp, Homo sapiens
agacgatgaagccccctctgatggccccttcacagatgtagtcactacaaa

SEQ ID NO: 291743 - DNA, 100 bp, Homo sapiens
cgggagcttccgggagggcggctcgcagtaatctatgccagcaattatgacaatgttagcagaccatgcagctcgtcagctgcttgatttcagccaaaaa

SEQ ID NO: 291744 - DNA, 90 bp, Homo sapiens
ttctaaacagagcagcagcagcagagatgataacatgtttcaggcgcgggcggtgatgaactttgtggttcgctaccggccagacgagca

SEQ ID NO: 291745 - DNA, 100 bp, Homo sapiens
ggtcccagaaacgtcactatcaagaaggtgttggaggtacttctgaaaatgatgacccttccaaaatggttatggttctggcagctactaattttccctg

SEQ ID NO: 291746 - DNA, 95 bp, Homo sapiens
ttatggatttacttttgggatacactcatcattccagaggagggtaaaaggctgagaagcttaagcattcccaccaatgacgtcctcaaagccaa

SEQ ID NO: 291747 - DNA, 100 bp, Homo sapiens
ttaaagataccagatcatgtcagagagagagcttggttaacttgggagaaagtttcatctgtggatggagtattgtcttgctggaggtttgttaaattta

SEQ ID NO: 291748 - DNA, 101 bp, Homo sapiens
agaggatctggtgtaccaggcgaagctggccgagcaggctgagcgatacgacgagcgtttcccaaagtgtattctgcggaactagcacctactgtgttctc

SEQ ID NO: 291749 - DNA, 119 bp, Homo sapiens
cgcgcagcgccggcgcccgggagacccaggaggagcccgcagatttataatcgcttagatacaaattgctgtggattcagacctcgcaaggaagatgcctgtgtacagaatggattgag

SEQ ID NO: 291750 - DNA, 90 bp, Homo sapiens
ggagactggagtcgaaggccgtgagagttacatccatatgggagaatagtctccagatcactacaatttctagctttgtaggagcatggc

SEQ ID NO: 291751 - DNA, 78 bp, Homo sapiens
ttggattgactgagatgccaagaggaaaatttatctgcaatgaatgtcgcacaggcataatcaccagcaacacccggg

SEQ ID NO: 291752 - DNA, 95 bp, Homo sapiens
gaagagggccgtggagagacaagctattcaagatctctggcagtggaggaagtctctttaagaaaatagtttaaacaatttgttaaaaaattttc

SEQ ID NO: 291753 - DNA, 98 bp, Homo sapiens
cgacgtggggctcgcttcctgggactgggtttatctaaatgatctggatagaatatcccagtctaactacattccaactcagcaagatgttcttcgga

SEQ ID NO: 291754 - DNA, 83 bp, Homo sapiens
ctcaggactccagattatctacaacactgatgaggacttaaccaccaccatgtcgagcaaaagaacaaagaccaagaccaaga

SEQ ID NO: 291755 - DNA, 101 bp, Homo sapiens
agcgcggatggccgtaaccccgaaggaaattccagaaagccatgttcctgtttccttgagttatcatctgagtgatatgtttcttgacctgttaaacttcg

SEQ ID NO: 291756 - DNA, 113 bp, Homo sapiens
ggaactgcggagttgctgggtccaccgacccttaccctcagcgagagaagtaaccgaccagcattagcagtacagggcccagccatgtttacagagccagcaaatgataccag

SEQ ID NO: 291757 - DNA, 83 bp, Homo sapiens
gcagatcgggagcgcaaggtcgccctcaaggccatgatcaaaacttcctctgctggtctgggttctaattcggcgcctcccat

SEQ ID NO: 291758 - DNA, 96 bp, Homo sapiens
aaacggcgatccaaaaattcagtggaagttactccacaggatccgctgaacataggatgttgccacaaaatctacctcgtgtatttttctctttca

SEQ ID NO: 291759 - DNA, 74 bp, Homo sapiens
cggcgttggaggccaccgtttccaggttgacatcatggacatatgtgagtccatcctggagaggaagcggcatg

SEQ ID NO: 291760 - DNA, 75 bp, Homo sapiens
gagctggctgaagatggctactctggagttgaggacccagccgccgcctccatctctgacggagactgtgacgcc

SEQ ID NO: 291761 - DNA, 100 bp, Homo sapiens
cttggctagtgcaagccttgtttattttcctcaccactgaatctacagaatatcctccgaatcctaaatctagagctccaaggatgctggtcattaagaa

SEQ ID NO: 291762 - DNA, 75 bp, Homo sapiens
cgcggctctaacggggctttctacaagcttggatttacactgggcaacgtggttggaatgtatctggctcagaac

SEQ ID NO: 291763 - DNA, 71 bp, Homo sapiens
cctcttctaccgggcgccccacgggccgaagccggtatccctcgtacttggcccctgaggtaattgcacag

SEQ ID NO: 291764 - DNA, 111 bp, Homo sapiens
agaaaattgcccttcgggaaatccgaatgctcaagggtgcagaagctgccaatgtgactggcccggatggagttcctgtggaagggagtcgttacgctgcagatcggcgcc

SEQ ID NO: 291765 - DNA, 80 bp, Homo sapiens
ccccggcaacccggagaaggtctacagagcggcctgcgccagcgactgctccctgcatgaggaggacacccagagacatg

SEQ ID NO: 291766 - DNA, 100 bp, Homo sapiens
ggagagaagacgatctgcacttcgcattttggcattgacatttaattttagggtcctttatatagaagggagagtaggtccaagctgaagatggaagata

SEQ ID NO: 291767 - DNA, 77 bp, Homo sapiens
cttacgtctgcggaagtgcagctgcctcagttcttagcgcagctcagaccatgaccgacttcataccttggtaactg

SEQ ID NO: 291768 - DNA, 80 bp, Homo sapiens
agctgtgcagccgcgaggaggcgcgggaggtgttcgagaacgaccccgagacggagggtgaggacaaaatcttcttaatc

SEQ ID NO: 291769 - DNA, 89 bp, Homo sapiens
ttcgcgattacaatgatgcagacatggcgcgtcttctggagcaatgggaggagctcatgaaagacttcttagagaagagagacaagggg

SEQ ID NO: 291770 - DNA, 100 bp, Homo sapiens
cagggtctcagcgcgggggacgactcaggtattaatctctggagaagacacatccacagttagcactttcttcagatgctgacgctcggtgaacagttgc

SEQ ID NO: 291771 - DNA, 76 bp, Homo sapiens
tcaagtaagcatatgcttctgagacattcttttacttcagtgctactatatcggggccacagatgatgcagccacc

SEQ ID NO: 291772 - DNA, 100 bp, Homo sapiens
gaggaagctggttctctcggggttcttggccagcgaagagatctacattaaccagctggaagccctgttgctggttggactcttcacagaaattgggccc

SEQ ID NO: 291773 - DNA, 74 bp, Homo sapiens
ctgaggagactccggcgctcgccatggccgacgaaaagcccaaggaagctcttcgtgggcggtcttgactggag

SEQ ID NO: 291774 - DNA, 83 bp, Homo sapiens
gatgactatgagtatgagctattatagaaaccatgatatgcctcttcatgttcgacgcagtagtgacccagctctaattggcc

SEQ ID NO: 291775 - DNA, 76 bp, Homo sapiens
gaagctttacctcgctgaccctatgaagaagcctaaagaaactgttccaactcttgctccaaaaactctttcagta

SEQ ID NO: 291776 - DNA, 96 bp, Homo sapiens
ctggatggaggggattttgtcagcttgtcgtcaagtgaataaccctataccttccaatttgaaatcagaagcaaaaaaggctgccaaaatattaag

SEQ ID NO: 291777 - DNA, 75 bp, Homo sapiens
aaggacaaaagccaagaggaggacagttcgctacacagcaatgcatcgagataattcagcattggcgtatttgct

SEQ ID NO: 291778 - DNA, 100 bp, Homo sapiens
ctgcctacaagttggccaggaacaaaagcatacctaccttcccctagaggccttcccttcttcttggtggtgttcttgagtaagataatctggactggcc

SEQ ID NO: 291779 - DNA, 100 bp, Homo sapiens
cagcagcagcttctacagcaacaacacaaaatcaatttgctccagcaacagatccaggattgcagtaacggatgctccgcagagtgtaccggagaaggag

SEQ ID NO: 291780 - DNA, 100 bp, Homo sapiens
cttccgggagggcggctcgcagcagcgtccgtctccaagagagtatgaagagagtgcgtctgtagggcagggaagatggcggacaagcgcaaactccaag

SEQ ID NO: 291781 - DNA, 50 bp, Homo sapiens
gtcggaatggacctgtgccacccagactttggacaaagtttaccaaatga

SEQ ID NO: 291782 - DNA, 97 bp, Homo sapiens
agaaagaaagtacggttgcaacggctggctcgcatgcatgccgacatgatggaggtgctgggtctgccgccagccggcttcattcagacagcctcca

SEQ ID NO: 291783 - DNA, 50 bp, Homo sapiens
gttcaccatcctccaaacaagtgaacaggtattaatctctggagaagaca

SEQ ID NO: 291784 - DNA, 80 bp, Homo sapiens
gggtgttttgctaccgtgaccgtttagacaatgcagatcttcgtgaagactctgactggtaagaccatcaccctcgaggt

SEQ ID NO: 291785 - DNA, 100 bp, Homo sapiens
caaatccaagatggcggccagcaggaggctgatgaaggtggtactctcaatgtgtcatccagaaaacaggagaagagcttgtgaaagagctggagatctg

SEQ ID NO: 291786 - DNA, 99 bp, Homo sapiens
cccatgactaaagtgcaggccgaactagatgagaccaaaatcattctggtcaatgtgacggtggactacattagaccagccagcccagccacagagaca

SEQ ID NO: 291787 - DNA, 97 bp, Homo sapiens
gccgagtatgaaagtcaagtcaaaggcctggaagaaacgctggtttatcctgcggagtggccggatgagcggtgacccagatgttctggaatactac

SEQ ID NO: 291788 - DNA, 82 bp, Homo sapiens
agcgagaaggagcagcgccggcggctggagactttgtgcccattgacctagacgagtggtgggcgcagcagttcctggcgag

SEQ ID NO: 291789 - DNA, 100 bp, Homo sapiens
ggtgattcacgtgtgcccaggccctgaggtgggccggacctgggagtggcagtactataaccaagagtggacattgtgggatcgctttgaggtacaaggg

SEQ ID NO: 291790 - DNA, 75 bp, Homo sapiens
caggcctttggggacttctctcccacagatgtgcataaacagcaaggatggaacattactgtggacctggtcatt

SEQ ID NO: 291791 - DNA, 100 bp, Homo sapiens
tttggagacccccttgtgcaaaaatggttttcttctggatggcttccctcggactgtgaggcaggcagaaatggtttatgtctcattggatcaacctgtg

SEQ ID NO: 291792 - DNA, 98 bp, Homo sapiens
agctggggttcttttgacctgagggctgctattgtatatcacactaaaggtttccgccagctgtggatgcctttgacattatgaccgcagaggattcc

SEQ ID NO: 291793 - DNA, 90 bp, Homo sapiens
gccacctcccgggacgctgcccacggcgtccccggtcgcgctccctcgtgaaagatgcttctgttcctctgattgatgttacaaacctcc

SEQ ID NO: 291794 - DNA, 75 bp, Homo sapiens
gtatttttattggaagaggatctaggagaaagtattgaaatagaagagttacagaatgaggaagaagaactaagt

SEQ ID NO: 291795 - DNA, 75 bp, Homo sapiens
caacagacctctgtttggggagacgtccgccaagaattttgattctgacattagcagtgtgggaatagatggctg

SEQ ID NO: 291796 - DNA, 72 bp, Homo sapiens
ttcagcctggggagccgagctcagaaaaaaccgggaagatcctgacggagttcctccagttctatgaagacc

SEQ ID NO: 291797 - DNA, 100 bp, Homo sapiens
cgcggctctgtgttttgagagtgcaagtatgatctcgtgaaatcttgagagaaactgaatgacgaatgaaactattgttcctgtttcacacagaagaaaa

SEQ ID NO: 291798 - DNA, 90 bp, Homo sapiens
cgcacgggaacgcgtcccgctgcttgggtcaggttcgccggtcgcgggagccccgccgtgcagtcggagttaccttatcccatatcacac

SEQ ID NO: 291799 - DNA, 90 bp, Homo sapiens
tggcaagacactccaagtttggcatgaaaggcatgtcagagcgggagcgacaggtgatgaagaagctgaaggaggtggtggacaaacaac

SEQ ID NO: 291800 - DNA, 88 bp, Homo sapiens
agattcgcagtggtcgcttcttctccttgggttcatagtggcgtcatgcacgcagactcctgcaagttcccctaagttcttagaggac

SEQ ID NO: 291801 - DNA, 90 bp, Homo sapiens
cgcctgatgggtcgaggcggacgcgcggctgcgtcagcccgtggaagccaccgatgatgccttttgggaccagttctgggcagacacagc

SEQ ID NO: 291802 - DNA, 100 bp, Homo sapiens
aggaatgcccacagtttaaaggctcttcagattcagaatggacagtttagaagaacctcagaaaaaagtctttaaggctcgaaaaacgatgagagtgagt

SEQ ID NO: 291803 - DNA, 103 bp, Homo sapiens
aagctgctagcagaaaatcaaaacgctgattaaaagaagcacgatgatgccaccagtccccatttctcaacacgtcatgaagggtccttccaagttcctgtcc

SEQ ID NO: 291804 - DNA, 97 bp, Homo sapiens
agcaagcggctgggctgtcacggaggcggattgttgtgtccactgtatcctggcttgcttgttctgcgaattcctgaccctttgcaacattgtcctg

SEQ ID NO: 291805 - DNA, 83 bp, Homo sapiens
gctgtcatcaagccctttgccaccattccttcaaatgagtgtggattctttaaacgctctaggtacgatgacagtgttccccg

SEQ ID NO: 291806 - DNA, 98 bp, Homo sapiens
cggcttggaagtgctctaccagagttgcggtggcattggtagggtggtcaacggagccttcatggtgctgaaagggcatcgatctattgttaaccaag

SEQ ID NO: 291807 - DNA, 80 bp, Homo sapiens
agccctgctactgctggattagcgccaggatctgtggttgtggttccggagaatctggttgtgctgtgtgtggatgttgc

SEQ ID NO: 291808 - DNA, 99 bp, Homo sapiens
ctgacctggccaattctgacgccctcaaggtcgccaaggaggtggacccccagggtcatcgtggccataataagcttcctggagacgatgcttctcatc

SEQ ID NO: 291809 - DNA, 100 bp, Homo sapiens
ctggagaactgggacgagcagtggatcctggatctaccgagaactgggaataggaaggcttccggtagtgcttgcccagaatgtatgacaacatgtccac

SEQ ID NO: 291810 - DNA, 88 bp, Homo sapiens
caggaacctgggcgagcagcggcgggggcccgagggggtggcccagttgaaatccttcccttcctctaccttggaagtgcctaccatg

SEQ ID NO: 291811 - DNA, 98 bp, Homo sapiens
cagaatcaacgacgggctccccggctcggctctcgctgcggcagacgggctcccccgggatgatctacagtgtaaacaggaacatcgataagtagtgt

SEQ ID NO: 291812 - DNA, 100 bp, Homo sapiens
tcgcagtgataaaggaggcatttgacagcactagcagtaaaatgattaacctttcagttcctgataccattgatgaaagagcaatcaacaagaagaaact

SEQ ID NO: 291813 - DNA, 83 bp, Homo sapiens
cagaaattctggaacacctatatggtttttagaacttcagccataaaaatgggcagaattttccttgatcatatcggtggtac

SEQ ID NO: 291814 - DNA, 74 bp, Homo sapiens
cgacctcagttacttcatcgtctccatcctctacctcaagtatgagccaggtacatgtcccagagcaagcacac

SEQ ID NO: 291815 - DNA, 50 bp, Homo sapiens
aactgtgtgccttagaaaccagacagagtttcgctgttgttgcccaggct

SEQ ID NO: 291816 - DNA, 75 bp, Homo sapiens
gagcacgctgctgtgtgagcagcaggttgcaaaggagtttggcttccaaaataatggcttctcggtttacatcaa

SEQ ID NO: 291817 - DNA, 100 bp, Homo sapiens
tcctgctcctgctgctcgaggacgctggagcccagcaagctttatgctgaaaaggtggccactagaggtctgtgtgccattgcccaggcagagtctctgc

SEQ ID NO: 291818 - DNA, 83 bp, Homo sapiens
aaaactggagagcttcatcaaaaatagtgatagctttgataaaccaagatcactccatggatgaaatgacagctgtggtgaaa

SEQ ID NO: 291819 - DNA, 51 bp, Homo sapiens
gaagattcttccaaggaaccagtgcgaagggcatacatcacagaaggaagc

SEQ ID NO: 291820 - DNA, 101 bp, Homo sapiens
ctaaaggatcaacgtaacgtgagcatgaggttttccaatcagaaactgaggcttcttgaagagcttgaagacacttggctcccttatctgacccccaaaga

SEQ ID NO: 291821 - DNA, 74 bp, Homo sapiens
ggatgggtcccgactgctctgttgaataatccagaatggctactctgatctatgttgataaggaaaatggagaa

SEQ ID NO: 291822 - DNA, 101 bp, Homo sapiens
acaaaccaggccctttgctacccggggacagtgccttcagggggtgaatctctacattaagaacttggatgacactattgatgatgagaaattaaggaaag

SEQ ID NO: 291823 - DNA, 75 bp, Homo sapiens
cagaaagagtcaacagcagtggcaacaggaagaaatctttcctgttttctgctctgtatgctgcctttatattcg

SEQ ID NO: 291824 - DNA, 100 bp, Homo sapiens
aaatcaaacagaagcgccaagctaaatttataatgaacagctgggctcaaaatgcagagaactcaaagatattcatttcggccagtgttacaagatctca

SEQ ID NO: 291825 - DNA, 90 bp, Homo sapiens
catggggcttaagatgtcctgcctgaaaggctcagtttatgaacctcttaaaagcattaatcttccaagacctgataatgaaactctctg

SEQ ID NO: 291826 - DNA, 111 bp, Homo sapiens
cgctccgagcggccgcgagcagagccgcccagccctgccagctgcgccgggacggtcaagaaagatcttaagactggtcattcaaaggggtttggctttgttcgttttacg

SEQ ID NO: 291827 - DNA, 76 bp, Homo sapiens
catgtttggatttcttacaagaagtcacaaagttgcatgctgagaatttgaaaaatgaagatgatgtagacactgg

SEQ ID NO: 291828 - DNA, 100 bp, Homo sapiens
agtcttcgccctggtgatcgcgctcgttcccgtcggccgggaactttacagactagcatggcaaagcttctctccgatcttagtgtggacagtgctcgct

SEQ ID NO: 291829 - DNA, 99 bp, Homo sapiens
gactccaggtcttcagcacccacccaccgtggtacagcctccggcctctcctcctctccgtcaacacccacccaagtgaccaagcagcacacgtttccc

SEQ ID NO: 291830 - DNA, 82 bp, Homo sapiens
ctggaaggagaactaaatgggagaagaggaatgttccctgacaatttcgttaagttactccacaggatccgctgaacatagg

SEQ ID NO: 291831 - DNA, 88 bp, Homo sapiens
cagtcataaactatgatctcttatatgccatctccaagctggggccagggcaacaggagtagttcactccgcgagaggccgtccacga

SEQ ID NO: 291832 - DNA, 82 bp, Homo sapiens
gttcatgaggatagcaaaagcttatgctgcataatcttgtgccgtggaaatcagaagggcaaaacgaagcagtcatgatgag

SEQ ID NO: 291833 - DNA, 100 bp, Homo sapiens
cggcatccagtggggggcgagcctctcagccggccgggatggctaccacggccgagctcttcgaggccacggcgtatgcctccgaggacggggtcctgac

SEQ ID NO: 291834 - DNA, 100 bp, Homo sapiens
aggtgatggagggccgggtcacctttggaaacagagtgaccagctcattgggagacatccctgtctccagaggcgaggcggctttgcacaaggtggacat

SEQ ID NO: 291835 - DNA, 110 bp, Homo sapiens
tggaagttcaacagaaggcaaatacgaagacgaggcaaagcacccagctttcttcactcttccggaccccaaattacgtgaacttttggatgtggggaacatcgggcgcc

SEQ ID NO: 291836 - DNA, 100 bp, Homo sapiens
gaagacggagctggctgcccagcccaaaggcccatgaggggatgcagttatgggctctgtcgccgtgggccctcgggaccaaggatcacgtcatgactcc

SEQ ID NO: 291837 - DNA, 88 bp, Homo sapiens
agagtactgatgaggaaagtgaaaaccaaactgatctctctgggttggcttcaggttgcagagaacacatcttagaagatgaaaaacc

SEQ ID NO: 291838 - DNA, 90 bp, Homo sapiens
ctcagctccacattgagagcaaaatctacaagatgatgcagggaggaggatacattaattgtttggtcagaagcagagaactatgatttg

SEQ ID NO: 291839 - DNA, 75 bp, Homo sapiens
cgccgccgcatgatgatgcagtcagggcgcaaaggaatctatgcagatggtagtatatgtctggacatacttcag

SEQ ID NO: 291840 - DNA, 95 bp, Homo sapiens
ctgaaggtgtacgggggtgacgaccgtatcggggccctgactcacaagatcactcacctgtccacactgcagattttgcaagaacgaggctcaag

SEQ ID NO: 291841 - DNA, 98 bp, Homo sapiens
tgaagctttgataaatgaaatcttcctaagtataggtctatagtgagcgagagctgctactttttacttgggcattcattcaaagtgttgaagaataa

SEQ ID NO: 291842 - DNA, 100 bp, Homo sapiens
gtggtgattccctgcggtgtgcaagtccgactggaacagttatacatgggaagctgttgataccaaaaataatgtactttataaaatcaacatctgtgga

SEQ ID NO: 291843 - DNA, 74 bp, Homo sapiens
gtccatgaaggagaaggggcgcatcgcggcacagctgcagggcattgaggatgatgactttgagttcactggca

SEQ ID NO: 291844 - DNA, 90 bp, Homo sapiens
gtggagcccaaagacccctggagacatgcgagacggtcatctgttccagccgggccactgtgatgctttatgatgatggcaacaagcgat

SEQ ID NO: 291845 - DNA, 100 bp, Homo sapiens
cgctggatattaaaccatttcttccctttcctcttgacactgcagctgcagtcaacctcttccccaatttcaatgcggcttatgcaagcaaagatctgga

SEQ ID NO: 291846 - DNA, 100 bp, Homo sapiens
aacttcaaccaggattgtcttttcttaacctgggaagtggaaccggatatttaagtacaatggtgggcttaattttaggaatgaatctgaagtctgctgc

SEQ ID NO: 291847 - DNA, 100 bp, Homo sapiens
gtgaagaacttccagatcatccatggcaatgaccgaccgccgggagagcctgcccacctccccaccctggacgccgggcgcgtcccggccccccagcagc

SEQ ID NO: 291848 - DNA, 89 bp, Homo sapiens
cgggagttcaaggaggtgctgaagagcgaggaggtgaaatgacaatggatgctctgttggctcgattgaaacttctgaatccagatgac

SEQ ID NO: 291849 - DNA, 50 bp, Homo sapiens
cgggcgagcggctcctctgccagaggtactaggttttgacaagcttgcat

SEQ ID NO: 291850 - DNA, 96 bp, Homo sapiens
aaagaagtggacattgaaggcactactgttatagaagtcggccttgatcctagcaacaacatgacactggccatacctccagataatctctctatt

SEQ ID NO: 291851 - DNA, 98 bp, Homo sapiens
cgggactaaactggcgggctccgtggaagcgtggccggcagcgtcccggacgaggaggagctatgaagacatgattggtgaggaggtgccatcggatc

SEQ ID NO: 291852 - DNA, 99 bp, Homo sapiens
cacgaggcggtgcgggccgtgcagagcagcacctccatcaggtacaacctcgaggagctctaccagaacacaccacagccatcagcactggaatgcaaa

SEQ ID NO: 291853 - DNA, 98 bp, Homo sapiens
agcaagttccacagcaccatgcattatgatgggcatgtccgcttcgaccttcccccacaaggaggagaacatctgcctgcactgggcctccttcacgg

SEQ ID NO: 291854 - DNA, 82 bp, Homo sapiens
cagaagtcgcgtgtctaggtgagtcgcggtgggtcctcgcttgcagttcagcgaccacggaaagaccacagcaagattcttt

SEQ ID NO: 291855 - DNA, 100 bp, Homo sapiens
atgatggacagacatctggaccagttattaatgtgtgccatttatgtgatggcaaagcttttctccatggaatccttctgtacatgatgaagccagagaa

SEQ ID NO: 291856 - DNA, 97 bp, Homo sapiens
tggagagagcgagctgagtggttgtgtggtcgcgtctcggaaaccggtagcgcttgcagcatggtgaaagaagaacgtccagaaaaaataccagatt

SEQ ID NO: 291857 - DNA, 100 bp, Homo sapiens
cataacaattgttgatatatccagaaaaattaaccagcttccagaagcagaaaggaaggtgaagcagatgcaccttaacttcatggatgaaaaggatcgg

SEQ ID NO: 291858 - DNA, 90 bp, Homo sapiens
cgtggagagcgcggtcccagcccggccactgcggatccctgaaaccaagcaggcagtatgacacctaagtcgccctccactgacatcttt

SEQ ID NO: 291859 - DNA, 100 bp, Homo sapiens
agcaacgaaaggaacgcaagaacagaatgaagaaagtcagggggactgcaaaggccaatgttggtgctggcaaaaagttgtggtcagaaatgagaagaca

SEQ ID NO: 291860 - DNA, 90 bp, Homo sapiens
catggctgtgctggaggaaattcaacaggagctgatcaaccaagctccgggaagcagtttgttcgctatataaacatgttgataaacgac

SEQ ID NO: 291861 - DNA, 102 bp, Homo sapiens
ctggagcctcagttggaagcagccgatccagcctgcggagcctgtggggcaggtgggctggatgacactttgcacacaattattgattatgcctgtgagcag

SEQ ID NO: 291862 - DNA, 83 bp, Homo sapiens
ctttatcctggtcatcttctatttccaaagtatgttgcacccaggaacaagatcactcaaggtgaaggataatctactaatac

SEQ ID NO: 291863 - DNA, 95 bp, Homo sapiens
tacagagatgtgactctgtttgaggctagagatgaagatggacatgctgaaaattttccccagcagcactatgctaaggaaactccaaggcttgc

SEQ ID NO: 291864 - DNA, 90 bp, Homo sapiens
attctcttcctattgacttgctgcctcaacagatctgcaaaggacaaccagccagatgcagacagacatgctgaactatctggaagtcca

SEQ ID NO: 291865 - DNA, 74 bp, Homo sapiens
tcccaggttgccttggaaaatgccaacgccgtgtctgaagatcccgcccaatgacccccgcatcaagaaccaag

SEQ ID NO: 291866 - DNA, 75 bp, Homo sapiens
tctcagctctcggcgcacggcccagaacactctgctccagccaaggtggtgagggcagctgttcctaaacagcgc

SEQ ID NO: 291867 - DNA, 97 bp, Homo sapiens
catggtccagcagtacggcaaacggagaaagcagccagagtactggtttgctgttcctcgggagagtagagacggggtttcaccgcgttagccagga

SEQ ID NO: 291868 - DNA, 100 bp, Homo sapiens
ctgcactaacgcaggatccggctgccgaaggtcctcgccagggttcatagtggcgtcatgcacgcagactcctgcaagttcccctaagttcttagaggac

SEQ ID NO: 291869 - DNA, 98 bp, Homo sapiens
atcgagattggaaccacagaaggtggtatggtcaggaaaaagactacaatgtactagtcatggatcttctgggacctagcctcgaagacctcttcaat

SEQ ID NO: 291870 - DNA, 50 bp, Homo sapiens
gcgtgccctccctggaggagctggatgaggaacataccactgaacacacg

SEQ ID NO: 291871 - DNA, 95 bp, Homo sapiens
gtccaagatgcagcaggtcggaggaaacagccagaccgagagcagcctgccggggcggaggcagctgcattcagcctcagcggaggacacgcctg

SEQ ID NO: 291872 - DNA, 95 bp, Homo sapiens
gaaaattaagcagatgctccagtttgagaaacctggatctgcgatctgtttgtgctcgtttgatcccttccaactgataccttgtaattttttta

SEQ ID NO: 291873 - DNA, 100 bp, Homo sapiens
cgacgcggacagcatcagcctcgagctgcgcaagcccgacggcaccctcgtctccttcaccgccgacttcaagaagcccaataggggcacaaaacgtccc

SEQ ID NO: 291874 - DNA, 74 bp, Homo sapiens
caagggcttcctggccctctaccaaaccgtgggtacaggtgaacaaaggcagagtaaactgtcaccccagatgc

SEQ ID NO: 291875 - DNA, 100 bp, Homo sapiens
gcacattgagaggtccaagatgcagcaggtcggaggaaacagccagaccgagagcagcctgccggggcggagcaatgcagagtccctggacaggctcctg

SEQ ID NO: 291876 - DNA, 82 bp, Homo sapiens
tcatcttgggagtgatttgcgccatcatcctcatcatcatcataggagttcaaagaaggacgcagagccagccacacagccc

SEQ ID NO: 291877 - DNA, 50 bp, Homo sapiens
agtgatcataggagaaaaccatttcagatgcacacttgactgaaggagga

SEQ ID NO: 291878 - DNA, 100 bp, Homo sapiens
agatttcagcagcacaatcaacgcaaccacagaaacaagtggtacagctatttgtcgtagatgtccagacaagccagatcaccaagatccccattctgaa

SEQ ID NO: 291879 - DNA, 100 bp, Homo sapiens
cttcaaacgcggtgtcagaggccctgatccgagaggtggccaacaaagtcaaggtccccctgcagctactctgacctacgacactctccggtttgctgag

SEQ ID NO: 291880 - DNA, 98 bp, Homo sapiens
cccagacctgcagggttcgtggataataaactcaagcagcgagtcatccaggctcctctgaggagaggcaggtcatggatcatgccttcctccttctc

SEQ ID NO: 291881 - DNA, 100 bp, Homo sapiens
ttgctctcggtgttcctaatcctcggacttccaatgaagttcagtatgaccaaaggctcttcaaccaatccaaggaacaggagtacagctgtgtagtaaa

SEQ ID NO: 291882 - DNA, 100 bp, Homo sapiens
agcctgtctactcaccccctggcagccccccacctggggacccccgaatctttcagcttccaccaacactttcttccaaatatcctgaagatgacccaga

SEQ ID NO: 291883 - DNA, 76 bp, Homo sapiens
agttatagtcaacatggttgacgttgcaaaggcgcttaatcggcctccaacgtttacagatgaggacacagtaaag

SEQ ID NO: 291884 - DNA, 97 bp, Homo sapiens
aaaagcaccattgtgaagcagatgaagctgaaggtgatgtggccgccctcaaccgacgcatccagctcgttgaggaggagttggacagggctcagga

SEQ ID NO: 291885 - DNA, 82 bp, Homo sapiens
aaaagaggcaaagcaagcgagaagtcgcgggcccagcccacagcagggtgtcgtgaaaactacccctaaaagccaaaatggg

SEQ ID NO: 291886 - DNA, 96 bp, Homo sapiens
gttgaccgcacactggatgaatggaagcgcagcacgctggctcttctcctgaacttcctcgcctgcctggccagcttctgtgtggaaaccaacaat

SEQ ID NO: 291887 - DNA, 83 bp, Homo sapiens
ggaccacaggccctcgttgcccagataatatatacagccctgctctgggacacacctccattggatttaaaagacagtcctcg

SEQ ID NO: 291888 - DNA, 100 bp, Homo sapiens
gtccctttgtggctctatgtggaccctgcggaatccaccggcgcagtttcatctagcgactgtgctgctgcagcacggagctgacccaaacattcggaac

SEQ ID NO: 291889 - DNA, 75 bp, Homo sapiens
gaggatgatgttgacttggggatccaaaggcacagaaaatgtcactgaaattcacaaatgcaaaacggattgaag

SEQ ID NO: 291890 - DNA, 75 bp, Homo sapiens
tcatgctggaagtgtagattctatagctgttgatggctcaggaactaaaaatgagtccctggaacgccagatgcg

SEQ ID NO: 291891 - DNA, 100 bp, Homo sapiens
ggagaaggagcgggagaaggagaaggggaagcccaagccccgctccccgcagccgccaagtccagttacaacacagggatcacaacaaacacaaccgcca

SEQ ID NO: 291892 - DNA, 96 bp, Homo sapiens
agagaagtttgaaatccttagtgttgaggtggccacagggcagccccatgagggctccagctactcttcgaggaaggactgtcagatggctctgaa

SEQ ID NO: 291893 - DNA, 84 bp, Homo sapiens
ccgccggccaagctccgccgcgcccgcggcccgcggccgccgtctcctccgggctggggctgagcaagccctcggagtgaccgt

SEQ ID NO: 291894 - DNA, 75 bp, Homo sapiens
cggagcccaaacccggggcaggcgggcagctgtgcccgggcggcacggccaggccaagcttcccaatttgaagga

SEQ ID NO: 291895 - DNA, 75 bp, Homo sapiens
aaaagctgccctgagacggtgtcccgccgaaagattggtttatcttggaagctaaagggcattgctcatcctgaa

SEQ ID NO: 291896 - DNA, 75 bp, Homo sapiens
ggtcagtccgccgctcaccccgcggccgcaccttcccgccttctcaggcccagctgagagccagcctggaggtta

SEQ ID NO: 291897 - DNA, 101 bp, Homo sapiens
aagaggatgaagatgtggatctggcccaggtactggcctatctcctccgcaggtcacgaacgagatcacgccggtgctgtcgtactcctacctggccgtgc

SEQ ID NO: 291898 - DNA, 100 bp, Homo sapiens
aggaggaggaggggctccggctggtctgtggtgagcatggaggagcaggacttggagcgaaggttcgagctgctgagccgcgagctgcgggccatgctgg

SEQ ID NO: 291899 - DNA, 100 bp, Homo sapiens
ggccgccggctggaggcggtgctggcgagccgcagtgaggccaacgccgtgttcgacatcctggccgtgctgcaggagtttgtggggttcatgtggcggc

SEQ ID NO: 291900 - DNA, 83 bp, Homo sapiens
cggcagaagccgagttcaacatcctcctggccaccgactcctacaaggtttattcagtcaccatgaagctgctgctgctgcac

SEQ ID NO: 291901 - DNA, 75 bp, Homo sapiens
ccccctgctatgacccttgcgaggacattgacaaggtagatgaactgatgactgacatcacggaacaacaggagg

SEQ ID NO: 291902 - DNA, 73 bp, Homo sapiens
aagaaaacacttgatcctgatcctgccatccgacgtccagtggaagagaaagccaatacccacctcctcttgg

SEQ ID NO: 291903 - DNA, 100 bp, Homo sapiens
gctgtggataacgggaggtgaatttccatgtcaacatagtcctgacaattccaagctcgagtgtctcggcaaactctgttggcacttgagaaagaagaag

SEQ ID NO: 291904 - DNA, 74 bp, Homo sapiens
ccgacttcgatgatcgtgtgtcggatgaggagaagctgccactgcagagccccgccatggaagacacgccgttg

SEQ ID NO: 291905 - DNA, 83 bp, Homo sapiens
cagaagtccagagctgaggactgcctgtttgcaggaatcccagtcagaagttccagcctgccactgttctctgatgccatgcc

SEQ ID NO: 291906 - DNA, 100 bp, Homo sapiens
ctagacaaggaattttcagatattttccgacgagcatttgcttcccgagtatttcctccagagattgtggagcagatggaatgcctaccgcaggaatggg

SEQ ID NO: 291907 - DNA, 75 bp, Homo sapiens
cttgtcttaatcggatccaatcacaggtgcccaaggaccaagtccttgacactgtctacctgttccatatgcccc

SEQ ID NO: 291908 - DNA, 74 bp, Homo sapiens
cttgtccccagcgacgccttgctaacaaaggttcaagccaaatgttaccagcttctcctctcagtcttccagca

SEQ ID NO: 291909 - DNA, 101 bp, Homo sapiens
ccgccgccgggcccggccacagcctgcagcggagcccacgagaggcagcgccatggcggagcagacctactcgtgccctttggagtgaatcaacctggacc

SEQ ID NO: 291910 - DNA, 83 bp, Homo sapiens
ggggatggcgtgcagcgcaaccacgagacggccttccaagacagcccacctgaggatattgaccataaggactcatatctcat

SEQ ID NO: 291911 - DNA, 87 bp, Homo sapiens
acatgcgagacctatctccctggccccctgtgctgtttgaggcgtgaaactcacctcaggaaatgtatctgatccattagcgtggat

SEQ ID NO: 291912 - DNA, 73 bp, Homo sapiens
agagtgcggcgcagcgcagctcctgaggactggaatgtcacgtggaataccagcaaccccgacttcaccaagt

SEQ ID NO: 291913 - DNA, 90 bp, Homo sapiens
gcgacaaggagacatctggaacaaactgccattttgcagactctgatcacagtgaaacgttccatgggaacttgggccatgagaaacatc

SEQ ID NO: 291914 - DNA, 100 bp, Homo sapiens
tgaagtcggcgtgggcgtttgaggaagctgggctccaccgaggacaccgcgtccagcttgtgtggcgaggaggacacagaggacgaggagctggaagccg

SEQ ID NO: 291915 - DNA, 80 bp, Homo sapiens
cagtaccagagacagaagcagatggattcgtccttttagtacctggagtagaacagaaaaattattatgtctgtgttccc

SEQ ID NO: 291916 - DNA, 89 bp, Homo sapiens
gcgacggcccagtgcagggcatcatcaatttcgagcagaaggggggacacagcgattgccacgcgccattggaatgtccctggccaagg

SEQ ID NO: 291917 - DNA, 97 bp, Homo sapiens
gtataagcacagcaggacaccaggacctggcctgaagacatttcctctcctcccctctggatttctcagaggccaaacttccagatctgcaaccatt

SEQ ID NO: 291918 - DNA, 50 bp, Homo sapiens
gccttccagctgtttgaccgaacaggactcagaattcatgattgaagaaa

SEQ ID NO: 291919 - DNA, 100 bp, Homo sapiens
ggggcttggaagaattctgtggaagagtggacaacagaagactggactgaagatcgtggtaccatgcgacgacgctatgaagatgatggcatttcagatg

SEQ ID NO: 291920 - DNA, 100 bp, Homo sapiens
cgagaagaagtcagaaatctacagttactcacacaaggagatgatggtgaaaaaggagatccaggagaagagggaaagcatggcaaagtgggacgcatgg

SEQ ID NO: 291921 - DNA, 75 bp, Homo sapiens
agtgacagccggcggcggagcggccggtccacggaggaggtaatgctggaggatggaagaagcaaagggtttggc

SEQ ID NO: 291922 - DNA, 121 bp, Homo sapiens
gatcttctgccgcaccaggctcatcctgtccatcgtgtgcctgatgatcacgcagctggctggcttcagtggaccactggttatattctgggcactaaatgaaggcgtttctaggcaattt

SEQ ID NO: 291923 - DNA, 83 bp, Homo sapiens
accgggcggcacgcacgcggtgcagggtaacatggcggatgcggaagagaccccaagtttgtggagcgaacactgcggctggc

SEQ ID NO: 291924 - DNA, 51 bp, Homo sapiens
caccgcaggagaatcagatatgaagctgctggatacaattttcatggcaat

SEQ ID NO: 291925 - DNA, 90 bp, Homo sapiens
atcctatctgttcaattcttatagccattcttatagttgtaagatcggtcgcttggttatcggacagaatggaatcctctccacccctgc

SEQ ID NO: 291926 - DNA, 100 bp, Homo sapiens
catttccatttctaccttgtatgcctcaatttgctggatttaagcactgctgcactttatgaggctcagctggaagctcagaaagccacgcaggacttcc

SEQ ID NO: 291927 - DNA, 88 bp, Homo sapiens
caacatttagaatttctacttattctgagaagctggcatctgacccgcggtgtaaaggaatgcccctctccagcttcctgctgaaacc

SEQ ID NO: 291928 - DNA, 90 bp, Homo sapiens
ggaaaacctaaccatgaagacttgaacttaatacagcaagaaagaccatcaagtttaccactatctcacgtgagagggcagtggaactcc

SEQ ID NO: 291929 - DNA, 96 bp, Homo sapiens
aacgcggagtggagctcagccaggggcagccggctctggtgctcccagaagaggtcatacagcatatttgacaataatcgccaggatcccacaggg

SEQ ID NO: 291930 - DNA, 99 bp, Homo sapiens
aggatcacagccacaggaaatgatgttctggacagagttttagctcggctttagccacagttcgttcccacatgcagggcagcacaaggagaatgggcg

SEQ ID NO: 291931 - DNA, 90 bp, Homo sapiens
cgctcgtcagactccagcagccaagatggtgaagcagatcgagagcaaggatcataagtttttactgccagtattgagaaattcgtggaa

SEQ ID NO: 291932 - DNA, 50 bp, Homo sapiens
actcattcaaggttacccagttggtgatgcagaagatggggaagaatatg

SEQ ID NO: 291933 - DNA, 80 bp, Homo sapiens
tctggtccacgacctatcctaggcgccatgagcctggagaaagttcttgtggaattcagtcacaaggagttgtttgattt

SEQ ID NO: 291934 - DNA, 75 bp, Homo sapiens
ccagaacatcgttctcaatggcaagctgtgttccagatcatctccctggtaatttaccccgtgaagtacacccag

SEQ ID NO: 291935 - DNA, 96 bp, Homo sapiens
aagtcccggaagatcgcgatcctgggctaccggtctgtgggtctcctaaaaacccagaacagaagatcattaagagagtgattgctcttgaaggag

SEQ ID NO: 291936 - DNA, 51 bp, Homo sapiens
acagatgcccctggtgtgactacagttacatgctatgggaaaacttcctgg

SEQ ID NO: 291937 - DNA, 75 bp, Homo sapiens
tggaccccccaggcctacgacccactggacgtgctggcgaacctcttcccggccgctctggtgcacttgggagcc

SEQ ID NO: 291938 - DNA, 100 bp, Homo sapiens
cgaagccttgaaaaagctgccctgagacggtgtcccgccgaaaggtattggtggtaatttggtggccattcaggctagcaggatttctacctacctccat

SEQ ID NO: 291939 - DNA, 95 bp, Homo sapiens
gggcgccccgcagccccccaacatcctgctcctgctcatggacgaccacatgattaagtaccggtacatcccgttcacacatgggaagagaaggt

SEQ ID NO: 291940 - DNA, 75 bp, Homo sapiens
ctgaaactcatctgtacctcacttagaaagggaagtcgagacaacatgagtgtgattttgatctgttttccaaat

SEQ ID NO: 291941 - DNA, 50 bp, Homo sapiens
cgcgaggcgggcagccggggcgtccaggtttggtgcacctcgatttggag

SEQ ID NO: 291942 - DNA, 76 bp, Homo sapiens
ttgggatgaacatgaggcctcgtcggacttcatcagtcagcctgggccgagccagtggcccccagaggatgagaag

SEQ ID NO: 291943 - DNA, 100 bp, Homo sapiens
tacaggaggggcacaccgtccttttgtctctgcctttgaggttggcgggaactgaaactggcttgggaacaatgggccgaggcattgtcatttcttttgc

SEQ ID NO: 291944 - DNA, 82 bp, Homo sapiens
agctgaggactgcctgtttgcagctcattgctatggacagtgctatcaccctgtggcagttccttcttcagctcctgcagaa

SEQ ID NO: 291945 - DNA, 115 bp, Homo sapiens
cgcagcctcttcgagcgccgcggacgcgtcatcgagtgtgacgtggtgaaagatgatatcatcaagttgaatcgaaaggaagggaagaagcagaattttccaagactaaatagaa

SEQ ID NO: 291946 - DNA, 75 bp, Homo sapiens
ggtgatttctgcatttccatctgagctggtcctgctgatgatgaagcccctgatgctgaaaccactgctgctgca

SEQ ID NO: 291947 - DNA, 75 bp, Homo sapiens
tgtggttaaaaactttatgattcagggtggggacttcagtgaagagctaaatctgcttcgtaatgttgatgctaa

SEQ ID NO: 291948 - DNA, 76 bp, Homo sapiens
cgaagcgctgcgctcgcgcccggatccctcagtgcaccgtccaggtgaggttagagctggggcatcgcgcccaact

SEQ ID NO: 291949 - DNA, 100 bp, Homo sapiens
aacggtttgccagctgaacagggatctccacgggaaagaccacagcaagattctttcattcgtctcctcctagcctgggggaccaggctcgaactgaccc

SEQ ID NO: 291950 - DNA, 75 bp, Homo sapiens
ggatcgacgcggacagcgggctggagcctgacgagctggcgggaccatggccaacctggagcgcaccttcatcgc

SEQ ID NO: 291951 - DNA, 75 bp, Homo sapiens
tgggaactctttccagcttgtgtctgtggtagcaactgcccttgctaatcaccgtaacctcggctgagaaagaag

SEQ ID NO: 291952 - DNA, 75 bp, Homo sapiens
gaaaaaagcgtccgcttccagctttgcgcaggaacaagcacatcatgattgacttggggactggcaacaacaaca

SEQ ID NO: 291953 - DNA, 75 bp, Homo sapiens
aagacggacgtcatcctgatcttggaactgccccaggcatggaagagctgatatgggaacagtacactgtgaccc

SEQ ID NO: 291954 - DNA, 100 bp, Homo sapiens
caagaaggccctggacacagcaatatctctgggctttcacaggtgtactagccctctcttggtacccacctgatgtaaatgatgaaaatggagaacctac

SEQ ID NO: 291955 - DNA, 80 bp, Homo sapiens
ggtagttgctccaaaacctaagtacaacccatacaaacaacctggaggtgaggaaacatgattcccgtgacagaattccg

SEQ ID NO: 291956 - DNA, 100 bp, Homo sapiens
cctgggggctgaggatgacaaaaaagccttcatagactggggcagcacctactccgtgtcagtggtggagaccgactacgaccagtacgcgctgctgtac

SEQ ID NO: 291957 - DNA, 75 bp, Homo sapiens
ttgggacaacattcagacccatttccagtcatgacacctgttcttcccggagcctatcagcaaagccattcccaa

SEQ ID NO: 291958 - DNA, 117 bp, Homo sapiens
tatcgctcctccatcaatgacaaaatcatcgaattgaaagacctggtcatggggacagacgccaagaggagacacaccttgaagaaacaacagagagccaacagaatggtgaagaag

SEQ ID NO: 291959 - DNA, 82 bp, Homo sapiens
ggaaaacctaaccatgaagacttgaacttaatacagcaagaaagaccatcaagtttaccaaacagaggaagagttcctagat

SEQ ID NO: 291960 - DNA, 75 bp, Homo sapiens
gttcttcttcgagtatttgtagaagggctgctgcagagaagttggtgcaagccttaatggaaagaaattcagaat

SEQ ID NO: 291961 - DNA, 98 bp, Homo sapiens
cggaagaccgcgcgcagggcctgcagcgggagctggacggcgagcgcgagcggcgcgagaaacagaaaaatatggctcaggagactaaccagaccccg

SEQ ID NO: 291962 - DNA, 99 bp, Homo sapiens
cttccatctggggatggacaacctgcattggacccagctattgctgcagcatttgccaaggagacatccctcttaggtgtccaaagacaggaggtggtc

SEQ ID NO: 291963 - DNA, 100 bp, Homo sapiens
gcacatcggattctggaaggcctggggccccaggtggagctgagcactgcagtttcctcctgaaggctggctccggctctccctcaataatggcagcatc

SEQ ID NO: 291964 - DNA, 80 bp, Homo sapiens
aagtcggtgtctgctgcgttcacggcaggattcggttagcctacaacacagcagtcccctcaggatgagcaggaaaagct

SEQ ID NO: 291965 - DNA, 110 bp, Homo sapiens
tccaaagtcacagatgctatagtctggtatcaaaagaaggagcttgatcctggatagtgtttgtatgatgtgcacacgtctctgcaaatgcttgtttgaagattggctgt

SEQ ID NO: 291966 - DNA, 51 bp, Homo sapiens
cgtaggcattcaccccagcaagcaacacagtcactcctggcggcaaaccaa

SEQ ID NO: 291967 - DNA, 75 bp, Homo sapiens
taggatttaaccgctctctgcctcccagatttatgtgatcagtttggctgaaccccgtctgcccctgcagctgga

SEQ ID NO: 291968 - DNA, 75 bp, Homo sapiens
ctttaatatgctggatgagctgctgaagcccaccgaattagccggcccaggcctttgtggtgaagcggggcgtcc

SEQ ID NO: 291969 - DNA, 98 bp, Homo sapiens
ctcagtttgtgcaggacaccgacatggaacagggactcactggggtatatgactctcaacccttctactaagaggaagaatactggatccccagacag

SEQ ID NO: 291970 - DNA, 90 bp, Homo sapiens
aaaaagaaggagccatattgtaggggtcatgaaatggctgtgaatttgtccaaagcaggtattgagacaactgtcatgactgatgctgcc

SEQ ID NO: 291971 - DNA, 75 bp, Homo sapiens
ccaaagcctcctggaccgtccaagaaggtggcattgtgtgtcccagagtgccggagcgagtcccagaagagaggc

SEQ ID NO: 291972 - DNA, 75 bp, Homo sapiens
tgaggcctggaatttgattaactcattcaaggttacccagttgagagttggaaactcaactattggaacaatgta

SEQ ID NO: 291973 - DNA, 97 bp, Homo sapiens
gacaagcttttgtccccaaaccagaggcggagtacgtccagcttgttactgaacttcgaatgacaagagccattcagcctcagatcaatgctttttt

SEQ ID NO: 291974 - DNA, 83 bp, Homo sapiens
ggagctcttaacccagtttgaaacgtaactggttccctgaccaggtcgtgcacacacacaagccgcacttcatggccttgcac

SEQ ID NO: 291975 - DNA, 87 bp, Homo sapiens
agggtgaagctcctcgacaccatggtggacacttttcttcagaagctggtcgccgccggcagtgcaaggatgatgctgaaaggaata

SEQ ID NO: 291976 - DNA, 118 bp, Homo sapiens
atccattacctccatgcaaattgggtgcttcacagagacttgatctgagtgggacatacttttgaaggatgtgcaatgttcaatcataagtgtgacaaaaactgacaagcaggaagct

SEQ ID NO: 291977 - DNA, 80 bp, Homo sapiens
cagagaatacaagaggattatcttagaattttaagatacttcaggtggatgaaaatactaggaaaagtttatttaagtta

SEQ ID NO: 291978 - DNA, 90 bp, Homo sapiens
gacctgatacgccactgtaacgggaagctgggcagctacaaaatcaatggccggacgaaaagatgtggtgcaattgctgaacaaaccccg

SEQ ID NO: 291979 - DNA, 74 bp, Homo sapiens
caagaaggagaagcagctgcggaaaatgctagaagctacccgtacagtgaggacgcccgccagggtgagcagta

SEQ ID NO: 291980 - DNA, 50 bp, Homo sapiens
cccctttgaattaattatggctcaggatggcccaatggaatcagctacag

SEQ ID NO: 291981 - DNA, 90 bp, Homo sapiens
gacctagacaaagggagagggtgaccgacatcccaactaggttaatttggagtggcccctggagtcagtttcctacaccatccgaggccc

SEQ ID NO: 291982 - DNA, 80 bp, Homo sapiens
cagacaagaggtttcagccagtgcatgaccttactattggcctctaattgtggcattgtagaaagtatcctgaactgggt

SEQ ID NO: 291983 - DNA, 100 bp, Homo sapiens
ctgttttgcaaaaaccatcagtgtttgggaatgattctgatgatgatgatgagatattccgagtggtgtgcatctgtttgggtaatccaccagagacatt

SEQ ID NO: 291984 - DNA, 51 bp, Homo sapiens
cagctaggttcctggtgctttggggtggacagaggactgcagaaaatcaac

SEQ ID NO: 291985 - DNA, 82 bp, Homo sapiens
tctggctggagccctgcattcgcggcgtgtgcaggcatctgcatctgggaccgacctcctgggctggctgatcaaagaggaa

SEQ ID NO: 291986 - DNA, 87 bp, Homo sapiens
actctaccatgtgctagagacagccaacaaaatattcatggttcttgagggattttacacggtgtatcgtaatgtttttgaaatgat

SEQ ID NO: 291987 - DNA, 100 bp, Homo sapiens
tgcacagtccccctggacagcattcttgtagacaatgttgcactacaattttttatggagtaaagccaatcccagctgaaggaatcaagtcaaatccttc

SEQ ID NO: 291988 - DNA, 75 bp, Homo sapiens
ctaccatggtctacaagactctcttcgctctttgcatcttaactgcaggattgtcagtggcttcgccccgaggag

SEQ ID NO: 291989 - DNA, 83 bp, Homo sapiens
gatgactgcacagtagatggccacctctacctccacagaggcaaagtcagcctcgtggtttgcctgcaatgagatttcattct

SEQ ID NO: 291990 - DNA, 75 bp, Homo sapiens
tgacagctctgcggctcgggccctgagattcaaccctatgaaaagataaaggccaggggcttgcctgataatata

SEQ ID NO: 291991 - DNA, 97 bp, Homo sapiens
aggccgtcggggagacgctgtggtgtgactggggcaggaccatcagaccctacagcttggggcctgggctcctctgaccatcctcattgagaaagga

SEQ ID NO: 291992 - DNA, 98 bp, Homo sapiens
ggcgaggctcggcacggagatggcggcgcgctcggcgcaggagcctcacagtctactcagagaaaaataaaagaaggcaaaatgagtcctccccattt

SEQ ID NO: 291993 - DNA, 100 bp, Homo sapiens
aaaccagctgaggtgtccgtaaagattccagagaagcctgtgaacaaagtggatcttatatgggaggatgcactgttcatgtttgagtattttaagccca

SEQ ID NO: 291994 - DNA, 88 bp, Homo sapiens
acctgtggctctttctgctgggcctgcccttcaccctctacatggaaagtatgtgatggtgatgggagtggttcaggcctgcagccct

SEQ ID NO: 291995 - DNA, 112 bp, Homo sapiens
caaatccgctgctaaattacattggagctgggctatcagtagtaagtactatactggcaattgctggagaagattttgcaattgttgcttctgatactcgattgagtgaagg

SEQ ID NO: 291996 - DNA, 101 bp, Homo sapiens
aaggatgcaggtgatggtgttcgatacttgctcagttattaaatagagcatctgttgagggactcttttaaaaccacagccatgaacagacgttggggcta

SEQ ID NO: 291997 - DNA, 101 bp, Homo sapiens
tgggagcctcttggggacctgggagccccctccgagttacacctccagagccaaaagtaagttgccggccttctgatgcttccgctaccagatctcgacct

SEQ ID NO: 291998 - DNA, 97 bp, Homo sapiens
attggaaactctgtttacgttattatcaacacaggaccagcgttctcccggggaagtacttggaagagatcgccacacagatgcgcacgcacagcat

SEQ ID NO: 291999 - DNA, 95 bp, Homo sapiens
ctgaaagaactcctgaatcgtttgtgttagcaagtgaacataggaaatcctcattgacgattcaatttgttgaaggccaatttgtggactcctac

SEQ ID NO: 292000 - DNA, 75 bp, Homo sapiens
accagtggtagaaagcacagaaactgaggggacataatcatcactcagtaggtttactcctggcttgggggcatt

SEQ ID NO: 292001 - DNA, 83 bp, Homo sapiens
gagtttactgcatcagtgatggaggacagagtgcgacgagctcatctgcgcctttgtttagaacgcttaaaagttctgattcc

SEQ ID NO: 292002 - DNA, 98 bp, Homo sapiens
caggaggtcatctgtccttgtgccagctcgccagaggccctcactgtggccatccggaggtaccagcaactaaggtttcagagctgaaccctaatgca

SEQ ID NO: 292003 - DNA, 83 bp, Homo sapiens
gtctctgtcagaggaagatcccttgatccacattgtttgaagttattgtgagtgcctcgaggaccaaggaaccgttgaaattt

SEQ ID NO: 292004 - DNA, 90 bp, Homo sapiens
tggagagcaacttgttcctgagctgtgcaaccaatcagagtccagtggagaaggaggctattacttgacaagcgcatatggagcactttc

SEQ ID NO: 292005 - DNA, 100 bp, Homo sapiens
agggctacccctaataaagcgactcattgagcagaaggccaatgatgaggccaatcagagtgatacaagtgtctccttgtcagaacccaagagcaaaagc

SEQ ID NO: 292006 - DNA, 100 bp, Homo sapiens
aatggctggtctcctactcccagatgcatccgtgtcagtggaatgcaagctttaggacttcacctgacagatccaagtcaacgtcttgttcagaactgtc

SEQ ID NO: 292007 - DNA, 83 bp, Homo sapiens
gaggagaaacgggtttttcaggagcaggtgtctgctttttcaacgtgggagaaggagttgcacaagatagtttttgatccccg

SEQ ID NO: 292008 - DNA, 90 bp, Homo sapiens
acagagatggacatggaatcgagggcagaagatctgggtttgagtccagcagtgctttaggatgctttcattggatttggaggaaatgtg

SEQ ID NO: 292009 - DNA, 51 bp, Homo sapiens
tggaatcttcaatcaatcatatttcacaactgcagaaccttggcctgaaaa

SEQ ID NO: 292010 - DNA, 74 bp, Homo sapiens
agcgcgggatcccagcctcaggcgtgcgcggacggtgtgcggccctcttggaacagagatcatgatgacacggc

SEQ ID NO: 292011 - DNA, 100 bp, Homo sapiens
gccgcgggcgtccgcggagcagcttccccccgcgcctctcttcgcctcgcctcgggacccgcggtccccgctcttgctgcaataagagctaactgccatc

SEQ ID NO: 292012 - DNA, 50 bp, Homo sapiens
ccttttaacattcaaggattagccctataagcagtacaacatgctgaacg

SEQ ID NO: 292013 - DNA, 75 bp, Homo sapiens
ggtgggtcctcgcttgcagttcagcgaccacgatcaggatcctcatgaccagccaaagagaagaagaattaggaa

SEQ ID NO: 292014 - DNA, 100 bp, Homo sapiens
tggatgactgcagttggtctttcagagatggcagcagaagctgcatatcaaactgttaaacacagtgggaatatcacttttgatgagattgtcaacattg

SEQ ID NO: 292015 - DNA, 100 bp, Homo sapiens
gtctgtcagtgtacaccatcccttccattgaagaacagcttgtgaaaactagaaaaggtggaattcaaacacaactcccttttcaaagacgacgacccac

SEQ ID NO: 292016 - DNA, 74 bp, Homo sapiens
ttgatctgccgtgatcaatatcaggaaaggccccatcttcccttcacacctgatttgtccaatatgtgcagcgt

SEQ ID NO: 292017 - DNA, 90 bp, Homo sapiens
ggcttgtccatctgtaacttcattaagataagtgccatagagttcatttccatttgccgtatcgatggcaattcttggatagaggcaaat

SEQ ID NO: 292018 - DNA, 92 bp, Homo sapiens
tgaggctcgcgagcctccttcgccgcgccccacttgctcgtgcactttacacacatgaggtttgcagtaagcattggctactggcatgaccc

SEQ ID NO: 292019 - DNA, 100 bp, Homo sapiens
cgcgaaccctgctgggcctccagtcaccctcgtcttgcattttcccgcgtgcgtgtgtgagtggatgaccaagatgctagacctgctagaggatttcttg

SEQ ID NO: 292020 - DNA, 100 bp, Homo sapiens
gtgacttcagagacactgccaagcagccttagccctagtgtagaggtctgtaaacagatttggctaggattatttgatgatagatcttcagcaattccag

SEQ ID NO: 292021 - DNA, 100 bp, Homo sapiens
tcatcccagaggggcacctgccagatgccagccggagctctcctctatgagggccgttgctccagggagaactgcaaatatcttcatccacccccacatt

SEQ ID NO: 292022 - DNA, 96 bp, Homo sapiens
tttggcatcaacaactcagtacagccgtgctgtatttgatgatgccatgaagtacaccattgtggtgtcggctacggcctcggatgctgccccact

SEQ ID NO: 292023 - DNA, 83 bp, Homo sapiens
gagtctctcaaatctcaggaatttgttgaaacggggctttgctatgatactcgggtgagccaatggtggcagcagaagtaggc

SEQ ID NO: 292024 - DNA, 75 bp, Homo sapiens
ccccactccggcggcgcgtcccccgagcttggtatcgagaaccttccctgcgaacttcagaggaacttccagctg

SEQ ID NO: 292025 - DNA, 74 bp, Homo sapiens
atatggactcctgacgaccaacaggttgatgataattagaagcatgctttccactgaacttcccgacaacattt

SEQ ID NO: 292026 - DNA, 75 bp, Homo sapiens
aacaaggttctggacaagatgaagtctttctgccaggtggaacaggaggattttgtaatggaagggcatggcaag

SEQ ID NO: 292027 - DNA, 75 bp, Homo sapiens
ctgcgagctcctcaagaatctcgtgctcaccggtttctcccacatcgacctgagctacttcctcagccgagccca

SEQ ID NO: 292028 - DNA, 109 bp, Homo sapiens
cccagtgagatgttcttgtcagaaaccgacaaatactccaagtttgatgaaaatgaagtagctgatctctgcaggaaactgctgttacctggcctcagctgaatttttg

SEQ ID NO: 292029 - DNA, 89 bp, Homo sapiens
cgccaccgtctgaactaggatgtcccgacatgaaggtatacaaaactaggatatgctggaaatacagaaccacagtttatcatcccttc

SEQ ID NO: 292030 - DNA, 98 bp, Homo sapiens
cgaaactcttggatctaaagaaacagttggctgtagctgaggggaaaccccctgaagcccctaaagcggaagatggagaaccgtgattaccgggatgc

SEQ ID NO: 292031 - DNA, 80 bp, Homo sapiens
cagagcccaggtccccaggacagtgcagggggcagtacccaaaggaaacgctacgaaagaatacatggagagcttgcagc

SEQ ID NO: 292032 - DNA, 100 bp, Homo sapiens
tgggaaggtggagccaccagcctctccttgtacaaaattggacagctgtacatgatcagcaaacacagccatgaacagagtgaccggggagaaggggtgg

SEQ ID NO: 292033 - DNA, 100 bp, Homo sapiens
ccgaaacttctgtggctgaaagagagaacctcatctacaatcaatttgtcaccaggagaagtggaagaagaggatgatgatgaaaatacgtgtgggccat

SEQ ID NO: 292034 - DNA, 82 bp, Homo sapiens
agcccccggggcaagagcaggagcccggcaccccccgccgacaaggagggccctgggaggagcggggacactgaggacctct

SEQ ID NO: 292035 - DNA, 83 bp, Homo sapiens
agctggcggagctggagctggagctctcggaggaacccagcttagactagaaagtctagaagacacacacataatgaaggggg

SEQ ID NO: 292036 - DNA, 75 bp, Homo sapiens
gaaagaagttcttcgtcggcgcctagcgacgcccaacacctgtccaaacaattcttacaaccagtacagaaaata

SEQ ID NO: 292037 - DNA, 100 bp, Homo sapiens
gacaaaggtcttttatattggcctgagaggagagtggactgagttatccaagcattaggtgaacatcttaaattaagacaacaagttattgccactgcta

SEQ ID NO: 292038 - DNA, 75 bp, Homo sapiens
gcagtactcgggcaagaccaccttcgtcaatgtcatcgcggttgctccgactgtgtgttccaggagtggtggctc

SEQ ID NO: 292039 - DNA, 50 bp, Homo sapiens
cttcgagtcctttattgtggagctgctgcacaggttctggaacctctggc

SEQ ID NO: 292040 - DNA, 75 bp, Homo sapiens
tatgaagagacacagtatggtagccacacccccagggcagctcagttctggcaccaaaccaaatccccaggtcta

SEQ ID NO: 292041 - DNA, 75 bp, Homo sapiens
ttcttccctgggctggtgaagtacatgaactcagggccggttgtggccatgcttcagcgcctgctcctggtcatc

SEQ ID NO: 292042 - DNA, 100 bp, Homo sapiens
atttcttccctttcctcttgacactgcagctgcagtcaacctcttccccaatttcaatgcggtgtgcaactgaggaacatggctcaagaaactaatcaca

SEQ ID NO: 292043 - DNA, 50 bp, Homo sapiens
cgccgccgctgtccggagccccacagcatcccagccatcactcttccacc

SEQ ID NO: 292044 - DNA, 76 bp, Homo sapiens
tatttgcataggaatcagaggagttaatcttgttttgactggatcatctcgtcaaagttattcacctggctatcag

SEQ ID NO: 292045 - DNA, 83 bp, Homo sapiens
gctgcgccgcaacgccgagcgcaccgacatctgcctgctcaaaggggagttgctgagtcagcccagaccggaaggagtggcag

SEQ ID NO: 292046 - DNA, 100 bp, Homo sapiens
tgaccgagagcgcgaatatcgtcatcgttagaagatggtggcgctagtaattttggactgaatttcttgaccttcatcatccttttcaacaatctcattc

SEQ ID NO: 292047 - DNA, 104 bp, Homo sapiens
aattcttggccttgtaaaagcaaggaggagtggaatgaaatacggcaccagattggaaacacactgatccgtgagaaagatcagtctaaagaaaaggagaagaa

SEQ ID NO: 292048 - DNA, 51 bp, Homo sapiens
gggatcctctgtacgcccgttcactgggatctgaaacttgcccacccttcg

SEQ ID NO: 292049 - DNA, 102 bp, Homo sapiens
atggcaatggcacaaagttctctcgatcagggcatacatctttcttcgacaaagggaaccttcagaagtttagtctttttggagacataagtgttctacaac

SEQ ID NO: 292050 - DNA, 97 bp, Homo sapiens
aaggagctgacagacaagctcgaggtgcagcggaactgctgcctgacgctctgcaacttcagcatccccgaggagctggaattccagtaccgccggg

SEQ ID NO: 292051 - DNA, 83 bp, Homo sapiens
ctcagctgcaagcctttcaaatggtaccttgaaaatgtctatccagagttaagattgacgagatgcctgaggctgccgtgaaa

SEQ ID NO: 292052 - DNA, 83 bp, Homo sapiens
cgccaccaagatgagcagggcccttgcggagttccgcgtccgaggtgtgaagggactttgaacatgtcggggatcgccctcag

SEQ ID NO: 292053 - DNA, 82 bp, Homo sapiens
ttgcacacagattgtcaacagtggttgatgcagatgaaatcattgtcttggatcagcttgttgatggtcactttgataccaa

SEQ ID NO: 292054 - DNA, 75 bp, Homo sapiens
agattcaatcctgtcctgtaccccaaggcctccccagtcccagtgtgcgagccccacttggacacaagtgttcag

SEQ ID NO: 292055 - DNA, 100 bp, Homo sapiens
gctcttccaaccaggggctgagcttctgcgctgtggagaagccaggatgacgacagatatgagcaggcgagtgacgtccgggcacagctcaagttttttg

SEQ ID NO: 292056 - DNA, 83 bp, Homo sapiens
aagaatttcaagaacaaaggccgcgacttggagaggacaagaattttgggcagatttgaatgccatgaacgtgtatgaaacaa

SEQ ID NO: 292057 - DNA, 118 bp, Homo sapiens
gagaaggaagcagagactggagggatgcccacaccaaggacaccaggagcccccaaggagttggaagaggagtgcctgacctttgaggatgtgccagagaataaggcgtggcctgcac

SEQ ID NO: 292058 - DNA, 100 bp, Homo sapiens
cagctgctgatttgtcccatgctaagtttggtgcgaacgccattctgggggtgtcccttgccgtctgcaaagctggtgccgttgagaagggggtccccct

SEQ ID NO: 292059 - DNA, 51 bp, Homo sapiens
gggacagcgcggcggggagcgacgactatggcattgctggttctaccaacg

SEQ ID NO: 292060 - DNA, 100 bp, Homo sapiens
ctgcggacgctcggtcccgcgctgcgcatccccgcggacgccacagcgctgagagaagatgactgaggaggaggtggagaccgttctggcaggacacgag

SEQ ID NO: 292061 - DNA, 101 bp, Homo sapiens
gccggtcaggctcgccgccgagctgccacacccactcgcccgggtctatggccacggtcggagagtggtcctgtgtgcgctgcaccttcctgaacccggcc

SEQ ID NO: 292062 - DNA, 117 bp, Homo sapiens
tgtacggcaaaggcaagagtaacagcagcgccgtcccgtccgacagccaggcccgggagaactgagaaacatgctggagtttcctgcgttacagcctcagtggatgacatacagttt

SEQ ID NO: 292063 - DNA, 99 bp, Homo sapiens
ttctgctttcatggagttcacagaagagtcgaggaggtcctaatctacccatggctacagttgatataaaaaatccagaaatcacaacaaatagatttt

SEQ ID NO: 292064 - DNA, 90 bp, Homo sapiens
aggcaccagtcagagcaatcaaatggaatcatctcctggtgaagttacccagtgtgcaacttgctttggtgtttgctgttttattgccac

SEQ ID NO: 292065 - DNA, 98 bp, Homo sapiens
gtgctaggctgagggaattccacactgaattttacaagcgggatggatttctctaagttagtaacaggagtatgggaaggcaaatacaacttcttctg

SEQ ID NO: 292066 - DNA, 100 bp, Homo sapiens
aatggagctggaagcagtccagtggggtcaacatatttcactggcacctattcacaagcttgaagaagctctgtatgaataccagccactgcagatagag

SEQ ID NO: 292067 - DNA, 98 bp, Homo sapiens
tggctgttgagtgaagaaaaagagcaggaagtcattacatggtggagctgatcagaataatgttcagcatcaaccccctggagaacctgaaggtgtac

SEQ ID NO: 292068 - DNA, 95 bp, Homo sapiens
cagatacattggtgaagtaggagacatcgtagtgggacgaatcacagaggcacctattcagtgggaggagcggaacgtcactgccattcaaggac

SEQ ID NO: 292069 - DNA, 95 bp, Homo sapiens
aagatgagccatgatgcatttactgtcatcaagaactgtaatacttctggaatccagacagaatggaggagatgttaaagtaacccatcttgcag

SEQ ID NO: 292070 - DNA, 100 bp, Homo sapiens
atggcagctccagcctctgcctcccagaaactcagacggagtcttactctctctcccggtctggagtgcagtggcgtgatctcggctcaatgtaacctcc

SEQ ID NO: 292071 - DNA, 97 bp, Homo sapiens
gtgtagaagcatttttttatgaaccttaccaggctcatgcacaattagttcgagaagttgatgtggagaaggtgtctgcttttgagaatccatatgt

SEQ ID NO: 292072 - DNA, 75 bp, Homo sapiens
catgtgaacactcaagtgaagcaaaagccttccatgattactgctgacggggcccttggtgtgagtatcagtgcg

SEQ ID NO: 292073 - DNA, 82 bp, Homo sapiens
gctatccccaacaagaggaaagacacacctaccaagaagccagtcaagcggccagaaagaagcttccggttctgaggtcctg

SEQ ID NO: 292074 - DNA, 100 bp, Homo sapiens
ctcgaggcggtgtcccacctgccgcccttcttcggccgagcatgtcgggactccacctggtgaagaggggacgggaacacaagaagctggacctgcacag

SEQ ID NO: 292075 - DNA, 74 bp, Homo sapiens
aactcatctcctgtgccgactgtggcaacagtgattgataggcagcagtttgaagaaacagttcgaactctaaa

SEQ ID NO: 292076 - DNA, 82 bp, Homo sapiens
cttggattcgtgaacagaccacagtggaccacttctgggatccccgtcgaggtcaagatcaagatccaggtctatttcacga

SEQ ID NO: 292077 - DNA, 50 bp, Homo sapiens
agaaggggaaaagctacttcaagaaaagcctgccattgctccgcccgtct

SEQ ID NO: 292078 - DNA, 100 bp, Homo sapiens
ggaagagtcttcccagcccgaaggtcaacaggacatactgctgtggcacctaccgagcaggtcctatgcggcagataagtctcgttggagcagtagatga

SEQ ID NO: 292079 - DNA, 100 bp, Homo sapiens
aacaaggattggtggtggggccagatcgacgatgaggagggatggtttcctgccagctttgtgagggtagattggggtcaactggactacttagttgtag

SEQ ID NO: 292080 - DNA, 100 bp, Homo sapiens
agctggagatcacaggcgtgtcttgtcgggacgtctatgcgaagcattagtgatgatgaaccaggttatgaccttgatttattttgcatacctaatcatt

SEQ ID NO: 292081 - DNA, 101 bp, Homo sapiens
gcagtacctgcagaaggtctctggagacatcttcagcaggctccccacaggtgcaggaagccgccgcccagccatggacggggaggagcagcagccaccgc

SEQ ID NO: 292082 - DNA, 100 bp, Homo sapiens
aaaagcacaaggattctcgctgtgacagagacaacaccgagtatgagaacttcacctggctctgcggacacgtgcaccggaacatcctctccaagttcac

SEQ ID NO: 292083 - DNA, 100 bp, Homo sapiens
cgagcctggatctccaagtgaccccctcagcaactcctgatgaacaggttgcttcattccagcctcgcagtcacctctgtgccctgctggttgtcttccc

SEQ ID NO: 292084 - DNA, 100 bp, Homo sapiens
ctcgagtcctgccgcctcccgggagtgccgtgcgccgcagcccgggcccaggccccggcagcgcctgggacaaggagaagatggtataaactggtccatc

SEQ ID NO: 292085 - DNA, 74 bp, Homo sapiens
tgcataccatgctccagaggaaggtgggagccgtggctgaggtgacggtctcaaagtggaagagcttactgtca

SEQ ID NO: 292086 - DNA, 110 bp, Homo sapiens
ctcctgcgggcttagcaggaaagggtgcctaagagttttgccgaattgacaagcccctgtgtcacagtgaggatgagaaactcagcttcgaggcagtccgtaacatccac

SEQ ID NO: 292087 - DNA, 82 bp, Homo sapiens
gccgctgtgtggttgcaacggagataaattcccggaaccgcgattcggcgtgtcaggttcctcatgagagtgctggactcct

SEQ ID NO: 292088 - DNA, 80 bp, Homo sapiens
ggttaaaacctgacacttttaacagtcttatgatgtaatcagcgcgatttcacttcctgaatttcgatgaattctaagac

SEQ ID NO: 292089 - DNA, 83 bp, Homo sapiens
cttcagtcggaaagttggaacctctgacaagaccaagtactaccttcaaggccagaagcggactcctagaagaggggagcagc

SEQ ID NO: 292090 - DNA, 100 bp, Homo sapiens
tttaagaggagattcagacatagacaagaatgattacccaggtttgatctgtggatgaaatgaatcatgattttcaagctcttgcattagaatctcgggg

SEQ ID NO: 292091 - DNA, 90 bp, Homo sapiens
cgttcctgggcaagctgggcggcaccctggccaggaagcggagggcgcgcgaggggcttcctgaagaatgagaaggacaatgccctgctg

SEQ ID NO: 292092 - DNA, 82 bp, Homo sapiens
acctgaccaagtccagccccagcatggcaatgtgtatccgccttctatccagccggcaccctatgctctacagcttccagac

SEQ ID NO: 292093 - DNA, 88 bp, Homo sapiens
tggtgaccaacttgctgcggtttttgttcctggggctgagtgccctcgggagaagcagaatttgcccgcatcatgagcattgtggacc

SEQ ID NO: 292094 - DNA, 98 bp, Homo sapiens
gtaatgtcaactttactgagaattttccacctcctgacacaacaccactcaagaaaatgctgctgtgaagacccaattaaagctttcacataaatgaa

SEQ ID NO: 292095 - DNA, 100 bp, Homo sapiens
ctcaagtgatcctcccaccttagcctcctaagtagctgggaccacaggtctagcacataccgctccaagggctttgacgtcacagtgaagtacacacaag

SEQ ID NO: 292096 - DNA, 82 bp, Homo sapiens
gccataatgtcgacctgccggagtcgaggattccagggtcgaacactcgaggctgggaggcggcagaatgcagccagaggag

SEQ ID NO: 292097 - DNA, 75 bp, Homo sapiens
cgcctcttcttagttgatgatttagttgattctctgaagattctggatgaaattgaagaacataacatcaaaatc

SEQ ID NO: 292098 - DNA, 100 bp, Homo sapiens
taacttggataagctgaaggaaagagctcaaagatttggtttgaatgtctcttcaatctccagaaagatcgagatagacaatggggatgagttgactgca

SEQ ID NO: 292099 - DNA, 76 bp, Homo sapiens
agaaaagaaactgacaaaaacatttctgaggtgtgatccctcacatccacaaatctctgattggaaagaagggaca

SEQ ID NO: 292100 - DNA, 101 bp, Homo sapiens
gccatgccacatccaggctgtagaccccagtggccctgcagccgcagcaggaatgaagatcaatgtccgagttaccaccatggatgcagagctggagtttg

SEQ ID NO: 292101 - DNA, 82 bp, Homo sapiens
gaagcccaagtctcttcgcaccacagcacccagtcatgccaagttccgttccactgcggaagatggagaaccgtgattaccg

SEQ ID NO: 292102 - DNA, 83 bp, Homo sapiens
gtctccgccatcagctcggcagtcgcgaagcagcaaccatgataccatgtttgtgtggaagtgccccgtgtttgctatgccga

SEQ ID NO: 292103 - DNA, 78 bp, Homo sapiens
cagctgagcgggcggtcattcgcatcgcaggagcatcagatccatgctgctgctgactcggagccccacagcttggca

SEQ ID NO: 292104 - DNA, 75 bp, Homo sapiens
ccctatcaggacatggagtatgaaagacgccgactccacgggaacccactccctctacacgatgtaccaggacta

SEQ ID NO: 292105 - DNA, 101 bp, Homo sapiens
agtgcgtgccgccacccgatggaagattcgatggacatggacatgagccccctgaggccccagaactatcttttcgcacaggaagtcctggagaacctgaa

SEQ ID NO: 292106 - DNA, 100 bp, Homo sapiens
tgctggtggtctgcatcaccaccggatcaacttcgacaaataaccggccagaatttagcttcacttgagagagatctggaatggtcgccatgattgaaac

SEQ ID NO: 292107 - DNA, 51 bp, Homo sapiens
cccatctttactggcatcctaaaggttatggaggttttgatgactatggtg

SEQ ID NO: 292108 - DNA, 97 bp, Homo sapiens
gaaatccaaaggtgaatcttttggttggtgattttgatgatagccacaaagcaagcagggtatccctggattactgactccttgctactctgggtct

SEQ ID NO: 292109 - DNA, 75 bp, Homo sapiens
gaagccacacagtgtccagatacgaggacaagccatctatgatgcatttgaccgcttcctccataaatacgctaa

SEQ ID NO: 292110 - DNA, 84 bp, Homo sapiens
caaagacagggaaaggggaaatgagttcaccagaaaccaacaggcagcacaggaggatctggtgaagaatcatctgatgtatgc

SEQ ID NO: 292111 - DNA, 82 bp, Homo sapiens
cgggagatcccaggcggtgacagagtggagccatggctagaggtttttagaacttcagccataaaaatgggcagaattttcc

SEQ ID NO: 292112 - DNA, 118 bp, Homo sapiens
ggagctgcgtccggcaggagacgaagagcccgggcggcgctcgtacttctggccactgggcgagcgtctggcagaattaaagctatagagagtcccaacaaagaagatgatacccagt

SEQ ID NO: 292113 - DNA, 82 bp, Homo sapiens
cctggatgtgtcggtgaccatctcgcaggatgccggcagggttcgggggtgattaaagctggctttgcaggagaccagattc

SEQ ID NO: 292114 - DNA, 90 bp, Homo sapiens
ccaagtcgagggccaagacgaagacattcatggcctcccacgggaacgacgccgcgagagccaggtttgagtccaaagtaccctccttct

SEQ ID NO: 292115 - DNA, 75 bp, Homo sapiens
gaaagtattgtcggccagagagccaggagcatcctgaagctgacccaggtaaggccagctccaccagggcaaggg

SEQ ID NO: 292116 - DNA, 100 bp, Homo sapiens
gaagaagaagaaacgggccgcgaaccgcagtatcatgctggccaagaagatcatcattaaggacggaggcacggtgagaagaaatttgtttgtccagaat

SEQ ID NO: 292117 - DNA, 100 bp, Homo sapiens
tctgtggctacggatcccaggaccctcttcgcgggcgattcgcgtagcctcaggaaacatgccctgaactgtcacagaatgaaaccagcgctcttcagcg

SEQ ID NO: 292118 - DNA, 75 bp, Homo sapiens
agtggtcctacctggggatattatcaaatctactactgttcatggcaggtaatggggccacctgcttgacacatt

SEQ ID NO: 292119 - DNA, 90 bp, Homo sapiens
aggagggtggacgaagctctctccagaaagacatcctgagaggacttggcaggacatttgtgtactcactgctcaatcgagggaggcctt

SEQ ID NO: 292120 - DNA, 82 bp, Homo sapiens
cgcaggacagcgccttcctcaacgacgcggacatggtcatgagctttgtgaacctgggcctgttacatgaacagaatatggc

SEQ ID NO: 292121 - DNA, 100 bp, Homo sapiens
gatcatgtctgcgagccaggattcccggagagagcaagccacatcagtgctcctggcagatccctgcttccagctacgctcaatatgctatctcctggga

SEQ ID NO: 292122 - DNA, 75 bp, Homo sapiens
gacatccagtctcgaataggacactgcatgttattccactcagtcaatgtgacggtggactacattagaccagcc

SEQ ID NO: 292123 - DNA, 96 bp, Homo sapiens
aagagtcaagggcacctttggagagattatgggatcatagacggtatttctatgtaaacgaacagtcgggcgagtctcagtgggagtttccagatg

SEQ ID NO: 292124 - DNA, 100 bp, Homo sapiens
cctcaagtgctgtgacaccgataaactcatctttggaaaaggaacccgtgtgactgtggaaccaaggggtgaagccagccagttttgacaaagtagcaat

SEQ ID NO: 292125 - DNA, 82 bp, Homo sapiens
tcagcaaaacaagaaatttcaaaacttgatcaaggaactagaggctgctatccagccagatactagcctggtgtcagtcatg

SEQ ID NO: 292126 - DNA, 82 bp, Homo sapiens
tgaagatcaactactcctgcgaggaaaagtctcacaccattttgctggtacagcctaccaagaggccagaaggcagaactta

SEQ ID NO: 292127 - DNA, 100 bp, Homo sapiens
tttgtcaggaagctctggatataagtttggtgttcttgctaagattgtgaattacatgaaggattggattcagcatcaaaatacatctactcatattgag

SEQ ID NO: 292128 - DNA, 100 bp, Homo sapiens
ctgccagagggatggcgcgaaagaggccagggatgccggcgacggttgtgtcgcagcttgctgagcgagagcgagaagcggcccttcgtggaggaggcag

SEQ ID NO: 292129 - DNA, 90 bp, Homo sapiens
acacaaggtgatagacttcgggccttgaaaagcagaagacaatccaaaacaaacgctattcctctcacatattcaagattaaagcagtgc

SEQ ID NO: 292130 - DNA, 100 bp, Homo sapiens
ggaacgatgccggccgtgagcctcccgcccaaggagaatgcgctcttcaagcggatcttgtgggagattttgataagatctggcgagaacactgtgagga

SEQ ID NO: 292131 - DNA, 75 bp, Homo sapiens
tgaatttactaaaaagagaagcaaactagtacttcctgcccctcagaatcctcactatggatgggctcattgagg

SEQ ID NO: 292132 - DNA, 80 bp, Homo sapiens
caatgggcctttccagcccgtggtccttctccatattcgagatgcctgaggaaacccagacccaagaccaaccgatggag

SEQ ID NO: 292133 - DNA, 100 bp, Homo sapiens
tcaccgagtatcaggccagtgcgtttgggaatgtcaagctggtggtccacgactgtcccgtctggggaaacttcgtggcttgcatgacagctattttacg

SEQ ID NO: 292134 - DNA, 71 bp, Homo sapiens
ggaagaaaatacaaatcacacgcataatggatgaaaggaaccgacagaatgattacggacctgaagccaaa

SEQ ID NO: 292135 - DNA, 74 bp, Homo sapiens
cgagtcaacaaccgcttcgagctggtacaccaggggttggaaaaaccacactaggcaaagaacttgcgtcaaaa

SEQ ID NO: 292136 - DNA, 90 bp, Homo sapiens
ggaaacaaaaaatttcaggagaaagattacacaggagctgcagtgctgtactctaaggtttccgagacactaaagcgttttgcagggaag

SEQ ID NO: 292137 - DNA, 82 bp, Homo sapiens
ggagaagttgatgactctcgtgaacatagctttaataggggtgtaccagtgatggcaataagaaacaaaatgatatcagaag

SEQ ID NO: 292138 - DNA, 100 bp, Homo sapiens
cgagtcctgccgcctcccgggagtgccgtgcgccgcagcccgggcccaggccccggcagcgcctgggacaagactatggcagctggcagatggtaacggg

SEQ ID NO: 292139 - DNA, 97 bp, Homo sapiens
tccgcgggatgcaccgtggtagccgagggcggaggcgacactctcagggttacacatcattttggaatgactgtatatcatctggattacgtggctg

SEQ ID NO: 292140 - DNA, 100 bp, Homo sapiens
gaccctaatcaaaggccttcagagactggagtacagaggatatgattctgctgtatcaccttttgccatgatagcatttctttcattggacagttcctta

SEQ ID NO: 292141 - DNA, 80 bp, Homo sapiens
aggcacggagtcgccgcggagcgcagatttgataatgggctgcattaaaagtaaagaaaacaaaagtccagccattaaat

SEQ ID NO: 292142 - DNA, 98 bp, Homo sapiens
gcagaagcagcgcctgatcgagtccctccggaactcacactccaggagagtgggcgctccctttctcttcctggaagatcagtcccaccccccatttc

SEQ ID NO: 292143 - DNA, 50 bp, Homo sapiens
aactcaggattctacagatatatgcaacatcctaatgtcctatgatcacg

SEQ ID NO: 292144 - DNA, 73 bp, Homo sapiens
cagagtcggcacctgaaggacatggagatggacttgccagtttcaaaagtttcctgaagtctgaattcagtga

SEQ ID NO: 292145 - DNA, 98 bp, Homo sapiens
tgaccgagagcgcgaatatcgtcatcgttagaaggtcggattgtttgtgctgaacgaactgtcctcttgcttcagaagccccttttgagtgtggtctc

SEQ ID NO: 292146 - DNA, 60 bp, Homo sapiens
gaccaaacatccagatctggagtgccggcacagaaatatgttggtgaagtctttaacatc

SEQ ID NO: 292147 - DNA, 100 bp, Homo sapiens
tcaaggccatggtgctcaacttcttgaaacagttcatagatactacactgaatttcctacagttcttgatattacagttgcaggacgaggagcggaggcg

SEQ ID NO: 292148 - DNA, 75 bp, Homo sapiens
tgcagattatatcgcatcctatggctcaaagaaagatgattatgcttttatcttgagaacatggtgtctggagtt

SEQ ID NO: 292149 - DNA, 100 bp, Homo sapiens
tcagactgtgcttcttgtgcaagtaatcagtctttgacaagtgatgagaagctgtcggagcttcccaaggtgactgtggggatcatgttgttataatgaa

SEQ ID NO: 292150 - DNA, 75 bp, Homo sapiens
ctctggacgtgccagggtcagatctcgcctccgaggaaggctctgtgtgctccgggatggagcaggtgtgcagag

SEQ ID NO: 292151 - DNA, 100 bp, Homo sapiens
tccatttttgtttcctttatatggccaaggagaactcccccagtgtttctgcaggacatagctcgccttttgcaagaaaaggagttacaggaagagaaaa

SEQ ID NO: 292152 - DNA, 98 bp, Homo sapiens
gttcgcggctctaacggggctttctacaagggccgttgctccagggagaactgcaaatatcttcatccacccccacatttaaaaacgcagttggagat

SEQ ID NO: 292153 - DNA, 82 bp, Homo sapiens
ctcaaggaaacctttccaacacagatgtccaagctgccaacggaaattctagaattggccggcaatgccgcgagggacaaca

SEQ ID NO: 292154 - DNA, 98 bp, Homo sapiens
tgctgtacatgacgtgcttaatgaaagatcctgtgttgccataagcccttggcccacatttaagtgggaatgcagctagcttggatgtctgaaacttt

SEQ ID NO: 292155 - DNA, 75 bp, Homo sapiens
ctctgggagagcatggatcctgaggtcccaggaaatcatcgagttccccatcctaaagctaaatggccggaccat

SEQ ID NO: 292156 - DNA, 134 bp, Homo sapiens
gttttccacctgcttgtgacagtacacttggtccagcatactacaaacctcaatttatggcagaaacggtggacacaagcgaaatggtcaacggcgctacagaacaaaggacgagctctaaagagtccagcccc

SEQ ID NO: 292157 - DNA, 74 bp, Homo sapiens
ggggatcactgtcctctctcggcagcagctgctagcagaagaaagtcttcccacaaccccattttatttcatat

SEQ ID NO: 292158 - DNA, 80 bp, Homo sapiens
atttcagcataccgtatcccctacccaaacaagcttcttggacacttaatgattgttggcaagaaatgtgctgctgatct

SEQ ID NO: 292159 - DNA, 100 bp, Homo sapiens
caacgagaatgaagccatccaatggatgcaggaaaactgatttgcctgaagacctggataatctccatttttgtcatggactgttaaaacgtttgaagtt

SEQ ID NO: 292160 - DNA, 98 bp, Homo sapiens
cccgcccgcaccgcgtcggggcgccctctccactgcgcgcgggagactgccagactcgggaggaggcagtggcgctcggcgtgggtctgtgcaacaat

SEQ ID NO: 292161 - DNA, 98 bp, Homo sapiens
ggtgatctggacaaaggaacaggtatctcagggaagtttaattagcattgacagcacctgtacagagatgggcaattttgacaatgctaatgtcactg

SEQ ID NO: 292162 - DNA, 60 bp, Homo sapiens
atggctataatgggtatggaggaggacctggagaaactgttcaggttccattatcaaaac

SEQ ID NO: 292163 - DNA, 95 bp, Homo sapiens
cgaggacggctgggagaacttcatgtgtgagaggctgggtgaggtgaagcagatcctccgcaagcgccagatccgtccacactggatgttcgttc

SEQ ID NO: 292164 - DNA, 74 bp, Homo sapiens
atcagctctattatttcaaagatgaagatgaaaccaagcccttggaaaatgtttataggaggccttagctggga

SEQ ID NO: 292165 - DNA, 89 bp, Homo sapiens
tcaggcagacgaggatgaaagagcccaggagagtcagaaatcagagcctcattcccttagtagtgaagcattgatgaggagagcagtgt

SEQ ID NO: 292166 - DNA, 100 bp, Homo sapiens
ggggacctgcatgtgtgtgcgcgcgaaggagcggaagaatggcagtgctcaaactcaccgaccagcgagtaaccagctcataaatcacatcgaacagttt

SEQ ID NO: 292167 - DNA, 100 bp, Homo sapiens
agttttggacaagcctccccaaatgtggcaggtacccactgatggtaatgctggcctgctggctgaaccccagattgccatgttctgtggcagactgaac

SEQ ID NO: 292168 - DNA, 50 bp, Homo sapiens
ggtaacatggcggatgcggaagccatgtacatcttcatgtgatcagccag

SEQ ID NO: 292169 - DNA, 90 bp, Homo sapiens
tccttcacccatctgaagggaggaaatagtggcaggtgacagtctgcatgtgcagttttcagggaacagctgccaccaacaatatatcag

SEQ ID NO: 292170 - DNA, 46 bp, Homo sapiens
ctgaacttagtggtggtcagagagacaactgaagaattggatgtat

SEQ ID NO: 292171 - DNA, 100 bp, Homo sapiens
gctgtgctcccaaagtactttgtgcagtaggagggaaatctggactctttgcctgtttggatagggtttgaaagtattcttgaagggctgtttggacctg

SEQ ID NO: 292172 - DNA, 100 bp, Homo sapiens
ccagatccgcttcagcaacatttccgccgccaaagtaccacatgcggatccacaaggaggaacggaagtacctgtgccctgagtgtggctacaagtgcaa

SEQ ID NO: 292173 - DNA, 74 bp, Homo sapiens
gcgttcatctaccacgctttcgtgttacttcctcagaatgttggcctcctgtatgttggaggttatgaaagacc

SEQ ID NO: 292174 - DNA, 83 bp, Homo sapiens
aaaatgagcagatactgaatgtaaaccctgcaggcctgtctccactaactctggaccctaaaacagctcacccaaatctggtg

SEQ ID NO: 292175 - DNA, 74 bp, Homo sapiens
tcaccaactactaccagtcatttgtggatgtcatggaatttcgggctttcctcggagacgggtggcatggggag

SEQ ID NO: 292176 - DNA, 108 bp, Homo sapiens
gatgagagcattcgaagtgacctcagcagggcatccaggcattggaggtgatccttttaatggaacagattttattgactgcctcgaaatctttttgaacgattctgc

SEQ ID NO: 292177 - DNA, 100 bp, Homo sapiens
caacgagaatgaagccatccaatggatgcaggaaaactgaaactcatcgcatacgggcacatcactggcaacgcccctgacagtggagcccctgggaagc

SEQ ID NO: 292178 - DNA, 90 bp, Homo sapiens
ggatgccctgcagtacctgcagaaggtctctggagacatcttcagcaggggacaccgtggtgtttaaggatggccagtactggatccgag

SEQ ID NO: 292179 - DNA, 82 bp, Homo sapiens
ctgctgacgctgctgctgcccggcctcggggaattctgtggccacactgcgaggagatcggttctgggtcggaggctacagg

SEQ ID NO: 292180 - DNA, 83 bp, Homo sapiens
tgcctcccaggtcctctgggacagcccctgccttctaccaggccaaacgtaccaagaaagtcgggatcgtcggtaaatacggg

SEQ ID NO: 292181 - DNA, 74 bp, Homo sapiens
tggaagcagccgatccagcctgcggagcctgtggggcagaggcggccttagcaacatgctgttccagtgctccc

SEQ ID NO: 292182 - DNA, 87 bp, Homo sapiens
ctgggccgcgcgctatggcaccttcgcctggcccaccactcccagagcccctggcgaagcggtgctgcctccagcccagagatgccg

SEQ ID NO: 292183 - DNA, 100 bp, Homo sapiens
ccatatccgtggacctccatatgctcataagaacccacacaatggacaagtgtctccagagaatacagagggcaaagatggatccaaagtaactaaacag

SEQ ID NO: 292184 - DNA, 90 bp, Homo sapiens
agatgtaggcagaatacctttacagaggttaaaattgatacccagaaagcggtactctagaaatgaatgtcaaggatcttagaccacgag

SEQ ID NO: 292185 - DNA, 100 bp, Homo sapiens
aggatgaagttgaagagtggcagcacagggtccacgcggtgtgtcctgcaggggcatgacctgctgttgcgctcagccctccggaggctggcactccgcg

SEQ ID NO: 292186 - DNA, 100 bp, Homo sapiens
ctgcagagggagtagtgcgatcctgcgcgcgggggaactagctggagggcaaggcgggaacacgcaacgtgttggaccttccggagcttctcagaagaca

SEQ ID NO: 292187 - DNA, 74 bp, Homo sapiens
gagagggagccgcagctgatgtcagcctcgtcacgtgttcaatatgctaaagaagtatgtccgcgcagaacaga

SEQ ID NO: 292188 - DNA, 101 bp, Homo sapiens
cccgggtccgagctgtcagcctctccaaagcctgcgcgagaggagccgggacacgcctagcgcgggctccagggaggttcccctgaaggatgctaaggaat

SEQ ID NO: 292189 - DNA, 82 bp, Homo sapiens
cgcggaaacactccctggaggttctgacccactccctctcagcctccgcctggtctctggttcgagaacttgtcttggacaa

SEQ ID NO: 292190 - DNA, 98 bp, Homo sapiens
tttggtatcctactcacagcgccaaaactgcaggggccaagggtgtacaactatgagcctttgacacagctcaagaatgtcagagcaaattactatgg

SEQ ID NO: 292191 - DNA, 87 bp, Homo sapiens
cagatgtatgggtgaagatccaagatgttctacaggtgttggagcgggccggagagaagtagagtgggctgcgaggagaaggaaaca

SEQ ID NO: 292192 - DNA, 104 bp, Homo sapiens
ggacccaggccctggatgggactgtctatgatgtcatgtttgtcagcacagataacgaaggaggcccaacttcattcaataaggagcctgacggatttatccca

SEQ ID NO: 292193 - DNA, 97 bp, Homo sapiens
cggcaggagggaagtgagaagcccaactaaagccccacatttgcagctcattgaaggaaagttgaatctggtatcaagtgtcactctctccaagtcc

SEQ ID NO: 292194 - DNA, 100 bp, Homo sapiens
tctgttggtacattgttagccaaaatgaagacctgtgttgatacctataccaaccgtttaaggtcaaaggttccgttacagttactatgatgaatcccag

SEQ ID NO: 292195 - DNA, 100 bp, Homo sapiens
gagaaggaagaggtgtttgaaaagatggcgttcaggaagtggcttatattcactcaaaccagaatgtaattggatcgagcaaagctgaaaatcacatgag

SEQ ID NO: 292196 - DNA, 75 bp, Homo sapiens
gccaggccaccaccggccgcctcagccatggacgcgtccctggagaagaaagcgtggatacccatcaacgaagtt

SEQ ID NO: 292197 - DNA, 101 bp, Homo sapiens
cctgcatcatccactttcccagcaagaaggtccagcagcagctgtggctccagtatcagaaaggacccgtgcatctcttccgactctcgggcaagtgcttc

SEQ ID NO: 292198 - DNA, 75 bp, Homo sapiens
agtccctccctcccgaaatgaaggagttcacccctgaatacaaagatgtctttggtggacttgggaaagaggttg

SEQ ID NO: 292199 - DNA, 100 bp, Homo sapiens
gtgaaaattactgatggctctccttccaaacccatttttcagtgaagaattttactttgagattccaagaactttccagtatttgtctttctatgtttat

SEQ ID NO: 292200 - DNA, 100 bp, Homo sapiens
tgagatttacctgtgagatgtttcatcccaacagaatacctcaatagcattctccagcatgccaaggatttcaaggaatatcacagatccgtcacaggca

SEQ ID NO: 292201 - DNA, 99 bp, Homo sapiens
atctcattaaattactgatgtcagaagattattttacacaagcaatggaagtgaaagcattgtatattgagatcttcagaagtagcaggagtgaaatca

SEQ ID NO: 292202 - DNA, 83 bp, Homo sapiens
cggagagaagccgcaaccagagccgccgccacggtcgggaaagaggttaaagaagacacgcaagtatgatatcatcaccactc

SEQ ID NO: 292203 - DNA, 95 bp, Homo sapiens
gcgagagttcctggccgagttcatgagcacatatgtcatgatgttgtatcacggactgattcaccgagcccaaccgtactcaactcacatatttc

SEQ ID NO: 292204 - DNA, 100 bp, Homo sapiens
cgtcctctcagaaataatgcattcttttgcaaaggtgtgatgttagctgttgatgctgtaattgctgaacttaaaaagcagtctaaacctgtgaccaccc

SEQ ID NO: 292205 - DNA, 78 bp, Homo sapiens
aactggttctacacgcgagctgaactcctgtgggcctctgctgctcagccatcccccggaagcctcgcccttgtcctg

SEQ ID NO: 292206 - DNA, 82 bp, Homo sapiens
gctgggattacaggcatgagccactgcatctggccatgaaattgaattttaggttttaaaatcaaagatgggaaaatcggag

SEQ ID NO: 292207 - DNA, 89 bp, Homo sapiens
gagttcttacaacatggcagacattgacaacctatgtgcttcccaagctgtatgtgaagctacattactgtgtgagttgtgcaattcac

SEQ ID NO: 292208 - DNA, 100 bp, Homo sapiens
gggaagcatgtcgtctttatcgctcagcaagacactaagggcgactaccagaaagcgctgctgtacctgtgtggtggagatgactgaagcccgacacggc

SEQ ID NO: 292209 - DNA, 74 bp, Homo sapiens
cttagctgtgctcgcgctactctctctttctggcctggaggctatccagcatttggtcgtattgggcgcctggt

SEQ ID NO: 292210 - DNA, 75 bp, Homo sapiens
caaggcttttgaagactggctgaatgatgacctcggctcctatcaaggtgtcaacagcatctccaccctggagcc

SEQ ID NO: 292211 - DNA, 75 bp, Homo sapiens
ggggaccagtgccatgggctgcatccctttatcgtgcagacctccttaactacgtgttttgctcaagaaactttt

SEQ ID NO: 292212 - DNA, 100 bp, Homo sapiens
attctaaaacacctccaccagggcaagcaggaaaaagcgtcccaggatacaatgctacaatcaacctaaattcagccaatgatagctggtttggcagctt

SEQ ID NO: 292213 - DNA, 90 bp, Homo sapiens
ctcagaagacagagggttttcttttgagtctctagtgatccctgaaaagttccagcatattttgcgagtactcaacaccaacatcgatgg

SEQ ID NO: 292214 - DNA, 90 bp, Homo sapiens
aggggataggcacggacgcaacacttttggaacttagacgctacccgtggaccgggagcccgtggaccgggagccggtggtgtgccaccc

SEQ ID NO: 292215 - DNA, 50 bp, Homo sapiens
attctccctctcctagaggcggtggaacggcacatgtgtgatggggacat

SEQ ID NO: 292216 - DNA, 75 bp, Homo sapiens
gacctctggagtgcccccagcccagagcccgtgttagaaattgattttgcggagctcaccttggaagagattatt

SEQ ID NO: 292217 - DNA, 75 bp, Homo sapiens
catatcgagcctgtgtggaaagaagtcattcaagaactggaagaattgggtctgctgagaacagacccagtccct

SEQ ID NO: 292218 - DNA, 100 bp, Homo sapiens
gcagttgtctgatgaagagaagggaaagcacaggttgcatgtagacactggaatggagggtgattggtgtggccttattcctgttggacagccttgtatg

SEQ ID NO: 292219 - DNA, 90 bp, Homo sapiens
cgactgtgtggagaaggaatatcccaaccgggtgtttgtaaaatgtatgaagaacatctgaaaagaatgaatcccaacagtccctctatc

SEQ ID NO: 292220 - DNA, 98 bp, Homo sapiens
ttcagtccctgatcagatcagaggagggaacctcgagtggttggataagagcaagtccagcttcctgatcatgtggcggaggccagaagaatggggga

SEQ ID NO: 292221 - DNA, 100 bp, Homo sapiens
ctacaagggtcctgaagtcagttgttgcatcaaatacttcatatttggcttcaatgtcatattttgggtgtacacttaaagcgttctgggaatatgaatc

SEQ ID NO: 292222 - DNA, 73 bp, Homo sapiens
ggagcccgagtggatcggggacggagagaacacgagcccatcaggtgtcgtgaaaactacccctaaaagccaa

SEQ ID NO: 292223 - DNA, 82 bp, Homo sapiens
ccaaacttgctggtcactgggaggtttacccaaggtccagcctagcccctaggcaccatgtcggacagtgatctaggtgagg

SEQ ID NO: 292224 - DNA, 75 bp, Homo sapiens
tccttcctccgagggctgtttggactggccttatgggtttctagaaggaaaatcacagaggtaaagcatcatttc

SEQ ID NO: 292225 - DNA, 82 bp, Homo sapiens
ttggctctcccacccaatggagatggctctaatggtgaaatgtatagatgttgttcaggcttatatcaacagaatcaaggac

SEQ ID NO: 292226 - DNA, 75 bp, Homo sapiens
cgagccggcggcccggagtggggcggcgggttcttctgagctatgaaggggcccagatttaagggctatttttga

SEQ ID NO: 292227 - DNA, 100 bp, Homo sapiens
tgcagagcaggctggagcccaagccccagccccctgtggctgaggctacaccccggagccaggaggggtcctcactgagcagcgagtcgtcccccgtgtc

SEQ ID NO: 292228 - DNA, 100 bp, Homo sapiens
cccagttccctgcatcctaagactcgaaggcagcacaggacctggaaaaattacatagcaatacttcaagtcagctgcaatgaccctaaacgagcggttc

SEQ ID NO: 292229 - DNA, 89 bp, Homo sapiens
agtggtggctatgaacccagaggtcgtggaggtggccgtggaggcagaggtggcatgggctgagtcagtgctgattctctcaaatagag

SEQ ID NO: 292230 - DNA, 96 bp, Homo sapiens
ggatccctatggcatcttctgcctcgtcctgacacccaccagggctgtgggacagatgatgtctaccatgttctacccactggtcacctttgtcct

SEQ ID NO: 292231 - DNA, 98 bp, Homo sapiens
gaaggtgcatactactcgctgccaagctctgggggtcatcacagagaaggagacccaggtggggaggaagccgcagcccaaggaggtcgtcacttgcc

SEQ ID NO: 292232 - DNA, 98 bp, Homo sapiens
gcggcctagaggtccgggcttggagttcgcctcagacgcggtggagccgccggagtctgagaagcgtcgtctcggagatgcagccaagaaagccatca

SEQ ID NO: 292233 - DNA, 100 bp, Homo sapiens
cttgctcatttctgagtattgtctttatatcctgacactatgaatgctacttggatgcctcttaagatgagacaaaaggacccagtgaaaggaatgacag

SEQ ID NO: 292234 - DNA, 75 bp, Homo sapiens
cccccacccccacattggaacaggctcattaagaactccatccggcacaacctgtcactgcatagtcgattcatg

SEQ ID NO: 292235 - DNA, 100 bp, Homo sapiens
cttcgcgggaagacgcggcggcggcggcggaggatgagcctgcagagcgcgcagtacctccgatcactgtgtccactactatgatcttcgtaacactaaa

SEQ ID NO: 292236 - DNA, 100 bp, Homo sapiens
aaagaatcaagttgcaatgaaccccaccaacacagtttttgccgaaggagtaaaggtgctgcaatgatgttagctgtggccactgtggatttttcgcaag

SEQ ID NO: 292237 - DNA, 99 bp, Homo sapiens
tatccactgtcttctctcatgtatacaggtgtgtcacggggtcccagccctgtcagccttggaaatcaggataccttacctgtggcagttgcccttaca

SEQ ID NO: 292238 - DNA, 75 bp, Homo sapiens
ctgcctggactgcattgtcgaatggtccaagtctggtaggacggcccttcagatcggggacagcctgaacaccga

SEQ ID NO: 292239 - DNA, 101 bp, Homo sapiens
tcaggaccaggcaccttctgtggaaggcttgcagatgggtcaagggttgtggagagtggtcagaaaccagcagctgcaacaagaaggctacagtgagcaag

SEQ ID NO: 292240 - DNA, 73 bp, Homo sapiens
attcaggcacttatggccatttcagccacggatgtgatgctggtacaacccagagtagaatttattctgtctt

SEQ ID NO: 292241 - DNA, 74 bp, Homo sapiens
caaagtgaaggagtttggaattgaccctcaaaacatgttcgagttctgggattctccttaaccaaaactgccaa

SEQ ID NO: 292242 - DNA, 139 bp, Homo sapiens
tttcttaaatggcccacatcaggacagctgttccttggccatcccaaagctattctgggggcaacagagatatctcttccaaacgcatgatgaaggaggtcttgtcaacagggcaaggcaatacagaagtgatccacac

SEQ ID NO: 292243 - DNA, 50 bp, Homo sapiens
cgatcaagcctgacttctagccaagggccttgggtgtctccgtgactgac

SEQ ID NO: 292244 - DNA, 82 bp, Homo sapiens
agcctgcaggacggcgcggcagagtccccgtacgcctacagtaacgcttgctgagcgagagcgagaagcggcccttcgtgga

SEQ ID NO: 292245 - DNA, 99 bp, Homo sapiens
ggacaacattgagacagccaacagttttgctgtaacaaacgcctacaacagcagttctgtagagagtttaaatatgaaggaatggcaggacgggctaag

SEQ ID NO: 292246 - DNA, 73 bp, Homo sapiens
ggaactatagtcacacgccaccacacccggctgaggttgatgctatgaaactgggagtaaaggaaatgaagaa

SEQ ID NO: 292247 - DNA, 113 bp, Homo sapiens
cagcgccagcggccgagcgggcggcttcctggcctgggcgctccggtggcggcggagaagctggcagggcggagatgctggaccacgccgtcctgcttcaggtgatcaaagaa

SEQ ID NO: 292248 - DNA, 75 bp, Homo sapiens
ggagtttgacagctattaaaaccagggctccacagttaggaggacagtcattttgtttactcattcagccctgtt

SEQ ID NO: 292249 - DNA, 100 bp, Homo sapiens
gagagccccttgcagaagacgccgtacgagatccctttcagctccctgcaaaaacagaaccaataaaagaacgagcagttcaaccagcacccaccaggaa

SEQ ID NO: 292250 - DNA, 100 bp, Homo sapiens
tttggagccagttgtttccatgattcaaccctatgaaaagataaaggccaggggcttgcctgataatatatcttccgtgttgaacaaactagtggtggtg

SEQ ID NO: 292251 - DNA, 98 bp, Homo sapiens
tcttccttttgggctctgtgcaactgcagctacagtggaaaaaagcaaactgctcttgatcccagacccaacatgagtgaagtttcctgcaagaaacg

SEQ ID NO: 292252 - DNA, 83 bp, Homo sapiens
ggcgccgggttgcagcagttactgagctggaagtcgagtgtgctactcaactcaggagatttggagacaaactgaacttccgg

SEQ ID NO: 292253 - DNA, 100 bp, Homo sapiens
taggccatgaggcagccggcatcgtggagagtgttggagaaggggtgactacagtcaaaccaggtacactggctttctcaaaggactattgcaagtcttt

SEQ ID NO: 292254 - DNA, 97 bp, Homo sapiens
tctctcatcgaggcccaaaccgccaagatagctgatcagcttccttgggttttgctgatgacacaagagagctttgcctgaagatggaaacactgga

SEQ ID NO: 292255 - DNA, 100 bp, Homo sapiens
atttacctatgtacttcaagattggcagcagtatttttggcctcagcaacctccaggtggaagtgctgcatcagtaaatgctaattttgctcattttgat

SEQ ID NO: 292256 - DNA, 75 bp, Homo sapiens
gtatgtgcatgcatatacactctacagtgctgttagaccttttggctgcaggggctatttttggagcattacaag

SEQ ID NO: 292257 - DNA, 101 bp, Homo sapiens
ggagaagaaccagcccgaggtggacatgagtgaccggggcatctccaacatgctggatgtcaacggcctctaaaaggcgacggcggattgacagaagtatg

SEQ ID NO: 292258 - DNA, 107 bp, Homo sapiens
cgtctgcagccctctgcccaagctctcatctacttccgggattccagcttcctcagctaaagctccatggaatagagattcctgaaaggacagattatgaaatggac

SEQ ID NO: 292259 - DNA, 101 bp, Homo sapiens
cgataatattattgacctcttcctttatcagccacatggcacccatgggtacatggctcccgaggtgctgcagaaggggacggcctatgacagcagtgccg

SEQ ID NO: 292260 - DNA, 97 bp, Homo sapiens
ctgctcgctgccatatgctacggaatccaaagaatgcaggaaagaccacagcaagattctttcattcgtctcctcctagcctgggggaccaggctcg

SEQ ID NO: 292261 - DNA, 75 bp, Homo sapiens
ggcaaagatgtcggagcgaaaagtattaaactgtgaagcctcagtttaggtcatctggtggttcagaacactcaa

SEQ ID NO: 292262 - DNA, 87 bp, Homo sapiens
gacaatggacttctggctttggccactttacttcctgccaggtcagcttttgccaactgttttcaaatcacatgcatgggggatctt

SEQ ID NO: 292263 - DNA, 100 bp, Homo sapiens
tcccgaattgatgagttatttcaaaagagaagcagtgttctcactcagctcaaaaagtttccaagaagacaggaccccggtgttccacagctattgccac

SEQ ID NO: 292264 - DNA, 98 bp, Homo sapiens
cgccgccgccgccgttttcgcctgcagctgctcaccggtcatttgaaccaattctccgcctccttccccagggaatctctcctgtcagccagcactgg

SEQ ID NO: 292265 - DNA, 76 bp, Homo sapiens
tgggggtgtgcaaacccgagagaactgggtggctgtacttttgatgatggtccaggggcctgtgattaccaccagg

SEQ ID NO: 292266 - DNA, 101 bp, Homo sapiens
gtggctcggaagaacggctacccattgcctgagggcctccctccaactctgcagccagaatacctgcaggcaggtgctcatgtgactatcacggatcgaaa

SEQ ID NO: 292267 - DNA, 75 bp, Homo sapiens
agagcccatagcagtctgccagacaatagagcatatgggagacacatcaaggatgtttaggagaacaaagagcta

SEQ ID NO: 292268 - DNA, 50 bp, Homo sapiens
ccgggagctgggcggccatttaccagggagaaaatccccttcaacattcc

SEQ ID NO: 292269 - DNA, 74 bp, Homo sapiens
ttaggaataacccaagtcgctatatatctggtacgttggaggtcatcgaacaagtaagattatgaggtttgttg

SEQ ID NO: 292270 - DNA, 85 bp, Homo sapiens
agataagggtgctctacagaggctcatcgtaggataagcatgcactactggatgtgactccgaaagctgtggacctgttgaatta

SEQ ID NO: 292271 - DNA, 76 bp, Homo sapiens
tttgcctttgttgattaactggacaaattcagcactattcctgatcagagaactccagttgcttcaacacacagta

SEQ ID NO: 292272 - DNA, 90 bp, Homo sapiens
agggtcctttatatagaagggagagtagatcctacatggctttccaccaacctgggcatcctgacctgcatcgagtgttccggaatccac

SEQ ID NO: 292273 - DNA, 83 bp, Homo sapiens
cattttggcattgacatttaattttagggtcctttatatagaagggagagtaggaccagctttatccagggactctaccattc

SEQ ID NO: 292274 - DNA, 104 bp, Homo sapiens
taaaaacacagctcgacagtacgcctacttctataaagtcatccagtgaacagagtatctgccaagcccgggcttccgtgatggtctacgatgacaccagtaag

SEQ ID NO: 292275 - DNA, 117 bp, Homo sapiens
gtcctgtctggccacaacttcctgcaggactccaaggtcattttcgtggagaaagccccagcaggttacgggcaggacttgagtggcttcggacagggcttctcagaccccagccag

SEQ ID NO: 292276 - DNA, 100 bp, Homo sapiens
ttaacccaaggaagtgactcaaactgtgagaacttcagatgatcgttgccagcccaacagaaaatggacaggtacttcgtgtaattccacctacccagac

SEQ ID NO: 292277 - DNA, 82 bp, Homo sapiens
agtcatcaagctagtggacatcacggacatccagaagacaacagtgattgactacgtgaagccctcggatctcaagaaggac

SEQ ID NO: 292278 - DNA, 100 bp, Homo sapiens
agcactagtgtctagaaggcactaagggctcttgatggaaatgtgtatgatcatctcaaggattatttaatagccttcagccggactgagctagaaacat

SEQ ID NO: 292279 - DNA, 100 bp, Homo sapiens
catcaccatcacagagagcgatgttctgctccagacgagcccttaccacgttgactcactcctgcagctcagcgatgcctgccgctttcaagaggatcag

SEQ ID NO: 292280 - DNA, 75 bp, Homo sapiens
gagtccccgccgaagaacccgaggtccttccaaccctcctgctaccatgaagattgcagtgattggacagagcct

SEQ ID NO: 292281 - DNA, 76 bp, Homo sapiens
tcaactactattacaaatattccaatgaaggttgttggcaaggattctgcagaaaaattatccctacattgcaaag

SEQ ID NO: 292282 - DNA, 100 bp, Homo sapiens
cctcgaactaaacaaattcatcccagaaatctaagaggcactagttttcaggcctcaggatacaatttcaacacctatgactggaggagtccaaaacaga

SEQ ID NO: 292283 - DNA, 75 bp, Homo sapiens
ccaacatttgccccccggaggaaagaactggaaccagctgcctgtggaggaaccgattgtgtccacagatgaggt

SEQ ID NO: 292284 - DNA, 98 bp, Homo sapiens
tgttggagtgctggtgaatcatttcaagaggtcgtccctgatggcccctggaggcgaagctcatcacaggatgaggaaaggacagaggcacagagaac

SEQ ID NO: 292285 - DNA, 135 bp, Homo sapiens
ataaaactccagcgagatccgggccgtgaacgaaagcagtgacggaggagcttgtaccaccggaaaaccaattctgtgtcctcggaggaccacagcccagttgggccccaggcgaaacccagcctggagcttgca

SEQ ID NO: 292286 - DNA, 75 bp, Homo sapiens
tgtcccgggtgggaagaggaacagcctatgtgggcttccacggagggaagacccttcgcacagtggagccgctgg

SEQ ID NO: 292287 - DNA, 113 bp, Homo sapiens
tgggagtctccgcgtcccgctcgctgggagagaggtacctctccttttccctctccctttccctaaggtaagaatgattgatgttggctgatattggagtgctcattcacatg

SEQ ID NO: 292288 - DNA, 100 bp, Homo sapiens
cctgaaggaaacaaaaccaaaggccgaagtacaagatctaaggctcttgtctggtcctctcagggtgcgccatcattgtccgaggtcagcctcgtggtgg

SEQ ID NO: 292289 - DNA, 100 bp, Homo sapiens
gccgactgctgcctggtctgcaaagaagtcctttcaagtctctaggactggactcttcctaagcaagtccggtatgtagcaccatcagcaccaggccgcc

SEQ ID NO: 292290 - DNA, 51 bp, Homo sapiens
acgcagcgtccggatgaagcgggaatcagagatcattgatttcttcctggg

SEQ ID NO: 292291 - DNA, 83 bp, Homo sapiens
cctggttccagctgcagcacgtggacgctgactcggaagtgcaggtttggtgcacctcgatttggaggaagtagggcagggcc

SEQ ID NO: 292292 - DNA, 74 bp, Homo sapiens
aggattccaagtaactcttatttggtgttgatggagtggatcaatgccactcttctccccgagcacattgtggt

SEQ ID NO: 292293 - DNA, 82 bp, Homo sapiens
tcagggtgacctcactccgcttctctcccactggtctctgagcggcccctgatgttcctgttggacactcctggcgtgctgg

SEQ ID NO: 292294 - DNA, 100 bp, Homo sapiens
gcgacgtctttacgtgtccaaaggcttcaacaagaacgatgcccccctccacgagatcaacgctgatttagaagaaagttttaatgaacatgaactggag

SEQ ID NO: 292295 - DNA, 100 bp, Homo sapiens
gacactgacacagccccagcttcattccctgctcctggagacgaggtcttgctacgttgcccaggtcggtcacgaactcctggcctcaagtgatcctccc

SEQ ID NO: 292296 - DNA, 119 bp, Homo sapiens
gtggcttcagtagtttcaaaaggtggcctttccactggagttgcttcacttagctctacaatcaacccatgtgtctacatcagcatcagcatctgcgtcaccatttcaatctgcatggt

SEQ ID NO: 292297 - DNA, 51 bp, Homo sapiens
ccagtggaagatgatcacatcccagaggcatgggcataagaatgacagaac

SEQ ID NO: 292298 - DNA, 100 bp, Homo sapiens
aatctttagatgacgtgatggattatcttgttaacaacacgcccctcaactggctgcctgatgaaaacaaaggcgatatgcattatgatgctgagattat

SEQ ID NO: 292299 - DNA, 90 bp, Homo sapiens
tgggcggcagcgactccgagaagtgctcctactctcagttatgtgtctcggtaccacgtgaaagactcctcacgccacgtcatcctaggc

SEQ ID NO: 292300 - DNA, 100 bp, Homo sapiens
caacatggggcacccggagccagcctcggggctggcagccctggccaagagctcgtccgcatggtgctgaatggctgaggaccttcccagtctccccaga

SEQ ID NO: 292301 - DNA, 50 bp, Homo sapiens
ctcaaatggagaaagtgaagtacagcaggccttagaaaatttacgtgtat

SEQ ID NO: 292302 - DNA, 87 bp, Homo sapiens
gcagccgcaggaagcagctcaccttccaccgatgaaggatttgggggcagagcacttggcaggtcatgaaggggtccaacttctcgg

SEQ ID NO: 292303 - DNA, 98 bp, Homo sapiens
agtctttccgcttcttgaatttctctctgtaaaggaggttgaactcccaccacctgatcttggaccaagttctgcactaaatcagacactcatgttgc

SEQ ID NO: 292304 - DNA, 51 bp, Homo sapiens
ccagtgggaaggggtaccggcaagagatttccagagatgaatgatatgctg

SEQ ID NO: 292305 - DNA, 100 bp, Homo sapiens
ggcagcatcttcagctcttgggtttagcaaaagttcatctccttctgcatccttaactgagaatgaggaagaccagggaatttatcagagcaaagttcgg

SEQ ID NO: 292306 - DNA, 97 bp, Homo sapiens
catgatgttgacacgggctgggcgcccccagaagcccgggaacaaacatgagttctggttctccgatgggtccttatcagataagtccaagtgcgca

SEQ ID NO: 292307 - DNA, 50 bp, Homo sapiens
cgggagcttccgggagggcggctcgcagggtgctttcttctgcgacctgg

SEQ ID NO: 292308 - DNA, 75 bp, Homo sapiens
aggaatatatcctgactgattctcaccatggatgatgatatcgccgcgctcgtcgtcgacaacggctccggcatg

SEQ ID NO: 292309 - DNA, 98 bp, Homo sapiens
ccttgggtgatttgttctgtatcagaagacaatatcatgcaagtgtggcaaatggtactttttgatcatatgggatgtctgaagaaatatgaaactgt

SEQ ID NO: 292310 - DNA, 100 bp, Homo sapiens
ctggcaggagcagattccaaaggcacaggaagaagcttgcaggtcatgcttcaccccttcctccatctgctgcacctaccactgattctacagattccat

SEQ ID NO: 292311 - DNA, 100 bp, Homo sapiens
agatcgccacttaccgcaagctgctggagggcgaggaatgcagacagtggccaagaacaaggaccagggcacctatgaggattatgtcgaaggacttcgg

SEQ ID NO: 292312 - DNA, 97 bp, Homo sapiens
tttgggagagcaggcgtgggcaagtcaggaaggatatggagtaatagtactaaatcccaatgaaaactatattgaagtagaaaagccgaagatacac

SEQ ID NO: 292313 - DNA, 130 bp, Homo sapiens
cggcgccgccgagctgcgcccgctgccttcacaccccggacatccgcgccacacgcggaaggtgctctaccagcgtgcacccaggaatatccaccgccatgtgatcctctctgagatcaaggaagccgtc

SEQ ID NO: 292314 - DNA, 95 bp, Homo sapiens
aggagcctggggttcggcgctatggaggagctcgatggcgagccaacagtcactgatggctgcaggccaggtttggggggcctcaaccctctcct

SEQ ID NO: 292315 - DNA, 98 bp, Homo sapiens
gacatcatgagggccgttaccattacgatccatctccgattcctccattgcatatggggaaatttgcagtggtgagaaaatgtataaagaaagattct

SEQ ID NO: 292316 - DNA, 74 bp, Homo sapiens
acatgcctcaccctcatctatatcctttggcagctcacagcctactggatcgcacaccaagcagtgaaaatagt

SEQ ID NO: 292317 - DNA, 100 bp, Homo sapiens
aaagcacaagaggtacattcaactggaataaacaggccaaagagaactgggtccttagcactattttacagaaaggaatcccagtcagaagttccagcct

SEQ ID NO: 292318 - DNA, 82 bp, Homo sapiens
aggaacccgcgccgcgagggctccttccctcagaacaccttccaccatgaccacctcagcaagttcccacttaaataaaggc

SEQ ID NO: 292319 - DNA, 75 bp, Homo sapiens
ggaaattgcgctggaccgtcgccttgctcctcgccgcggcggggactgcaggtgagccaccagctgggcagcatc

SEQ ID NO: 292320 - DNA, 90 bp, Homo sapiens
gtgcaatcctcacattcaagctgataggctgcgctaccggaatgtcatccagcgagtgattaggagcttttgatgggaggccagcagact

SEQ ID NO: 292321 - DNA, 75 bp, Homo sapiens
ggagatatggcgcaactgcggcgcgattgacttctaaggactcttggtacatgaggaagaaacccggaaggggaa

SEQ ID NO: 292322 - DNA, 100 bp, Homo sapiens
gttggtctgatttacccatatgttatgcaccctccacccctgtgatccgcgctgaggactgtactgtgtgttggaacacagccactatccgatggcggcc

SEQ ID NO: 292323 - DNA, 100 bp, Homo sapiens
agcgtcgtgcccgagaagctaaacaaccagctcctgagcctcccaaaccttacaggatcccttggttccagtaccccattatctatgacattcgggccag

SEQ ID NO: 292324 - DNA, 74 bp, Homo sapiens
ttatgacgtctggaacacttaaaacgtgcaggtatttggactgtattctggagaagaatttcacgagacttttg

SEQ ID NO: 292325 - DNA, 83 bp, Homo sapiens
ctcaatgaccatggcaagaactggcgtcacgtttacaagggatcgcttacacctgagacgaactacagaacagcacgtaccag

SEQ ID NO: 292326 - DNA, 75 bp, Homo sapiens
atctgttccttttcaggacagctgtgatccacggaagatcagttttcctgccatccaggctgctccctccttcag

SEQ ID NO: 292327 - DNA, 89 bp, Homo sapiens
tgatgcaatcttcaggaaagtaagagggatttggtgctatggagaaatttttggtagaatataagagtgcagtggagaagaaactggca

SEQ ID NO: 292328 - DNA, 100 bp, Homo sapiens
gcgaccgggacagtgacgacgacagcgtcctcgaagccaccagctcccgggacccgctcagcgatatctcacattcttgaaggtggcattgaagagcact

SEQ ID NO: 292329 - DNA, 100 bp, Homo sapiens
gtcatggacacagtccctgaaaaggcggcttacagggagaacacagttggcctccaccgtttctgccccacagaaaacgtagcaaagatcaaccgagagg

SEQ ID NO: 292330 - DNA, 99 bp, Homo sapiens
cccggattatagtctctcgccacagcggcctcggcctccccttggattcagacgccgattcgcccaggtgctgactgggttacttttttaaacactagg

SEQ ID NO: 292331 - DNA, 101 bp, Homo sapiens
tggcctgggtcatcgtgttcctctgtatcctcaagggtgtgaagtcttcgggcaagggatcctgaaactccgccacatctggaacctgaagttgatgcgtt

SEQ ID NO: 292332 - DNA, 75 bp, Homo sapiens
ccagagcacggaacatgaaggactttgaaaatcggggatctgatgagcttctttcttctggcatcattaacggac

SEQ ID NO: 292333 - DNA, 82 bp, Homo sapiens
gatatttgcttggaaaaacgtgtgggtacgaccttgaggctgggaggcggcagaatgcagccagaggagggcacaggctggc

SEQ ID NO: 292334 - DNA, 100 bp, Homo sapiens
cccagaggatcggaatgacagatgttttaaaatcaaagatgggaaaatcggagaaaattgcccttccccatggccagcttgttcatggtatacacttgta

SEQ ID NO: 292335 - DNA, 75 bp, Homo sapiens
cttgaattgttccttcaagtgtagctatgttgtaactaatggccttggggtgaataaggaatgtgtccgaggtct

SEQ ID NO: 292336 - DNA, 73 bp, Homo sapiens
gcgggatacagtggagctacaacttctgaaggatgattaccacatgctgagggcacctgacacagagcccggt

SEQ ID NO: 292337 - DNA, 100 bp, Homo sapiens
caacaaggccattttctcaaacgagagtcagcctttaacgcttgccgggattgctgtccttgccattggactatggctccgattcgactctcagaccaag

SEQ ID NO: 292338 - DNA, 90 bp, Homo sapiens
agaagaccagaccttcgctaccagctcggtttcagcgtccagaatggaattgggtgacccagtctattaaagaaagaaaaatgctgaatg

SEQ ID NO: 292339 - DNA, 75 bp, Homo sapiens
aaaggttgcagcaaccaaaagccaggtgtagaagacatcgtggccataatgattcctgagccaaaagggaaggag

SEQ ID NO: 292340 - DNA, 100 bp, Homo sapiens
ctgactgttgtcgtaagcttctttcctcagcctccacaaatgggaagtgttcctgtaatgacgcaaccaaccttaatatacagccagcctgtcatgagac

SEQ ID NO: 292341 - DNA, 48 bp, Homo sapiens
tcgcgctgagggactcggctcagggtcctgatgaagaagctgttgtgg

SEQ ID NO: 292342 - DNA, 101 bp, Homo sapiens
agagttctacagagtcaccactgaacaatatcagaaagctgctgaagaggtggaagcaaagttcaagtatggcatttcaaatatagatacaaccattgaag

SEQ ID NO: 292343 - DNA, 82 bp, Homo sapiens
tccacccaaacttgctggtcactgggagccgccaccggcacggccaggccagcatggtggaccacttacttccagtggacga

SEQ ID NO: 292344 - DNA, 82 bp, Homo sapiens
gtgcctgctggagtacccccgggggaagaggaagaagggctccaccatggagcgctggctacgactggcaaagatgagggag

SEQ ID NO: 292345 - DNA, 100 bp, Homo sapiens
caacttcatcataggcttcctgttcccatccatccagcctgctgagggatgcccaagaagttccagggtgagaacaccaagtcggcagcggcccgggcac

SEQ ID NO: 292346 - DNA, 82 bp, Homo sapiens
catccccgaccacttgcggcctgagtatgggccgagaactactggtggcgtggccagaacacacggacgctgtgtgtggggc

SEQ ID NO: 292347 - DNA, 85 bp, Homo sapiens
cctggggttcggcgctatggaggagctcgatggcgagccaacagtcactggtggcattgtgtgtcccagagtgccggagcgagtc

SEQ ID NO: 292348 - DNA, 98 bp, Homo sapiens
ctctcggtcctggccgcgattttctgcaggccccacgagtgggaggtgctgagccgctcaggccgctgcgcggccctgcgcatgctgctggcagatca

SEQ ID NO: 292349 - DNA, 74 bp, Homo sapiens
cgcgatggagcagcgaaaacgtggttgtagagttccgtgactcccagagagaaaaggaacagttccgtaagctc

SEQ ID NO: 292350 - DNA, 75 bp, Homo sapiens
agccgatgcaccgagtccagcccaggaaaatggagagtcaagcatcaaaacttggagagcagatggcagatttgc

SEQ ID NO: 292351 - DNA, 78 bp, Homo sapiens
ggaccgcgtggcggcggcgcacgggtacctcaacttgggccaggttggatttggtctagggagtcccagaaagaagta

SEQ ID NO: 292352 - DNA, 116 bp, Homo sapiens
gcccgcctgggaggagcgcctggactcgcgggcggcggcgagcgcctttacaatggccctgaccctgtttggtggttcatataaaaatggtaacacctagaggtataatagaaaaa

SEQ ID NO: 292353 - DNA, 78 bp, Homo sapiens
tccagataccatttggctttcggctgtgcagccttgcaaaataccctactaaataaatcattttagacatggagtgca

SEQ ID NO: 292354 - DNA, 87 bp, Homo sapiens
ggctgctcctggcagccttgatcagcgtcagcctctctgggaccttggccactgaggcggctcccagctgcgttggcgacatggccg

SEQ ID NO: 292355 - DNA, 96 bp, Homo sapiens
cagtgtctcgaagaaagtgcgcagcctgcaagattgtggtgcacacgccctgcatcgagcagctggagaaggctaagtcctatcagccatggaaac

SEQ ID NO: 292356 - DNA, 82 bp, Homo sapiens
aggcagccaagctcgtagcctgccactccgtgcaacgggctcatgtcggggctgatgcagatgctgctgctgaaggtgtctg

SEQ ID NO: 292357 - DNA, 100 bp, Homo sapiens
cggctgactgcgactcgggagctccgggagcggcccgcgcagggagaactaatgccgacgtgatgaccgccctgtcccagggctacaggatgccccgtgt

SEQ ID NO: 292358 - DNA, 90 bp, Homo sapiens
gaggagatgcaccggctcacggaaaatgtctataaggtggaagatggatgcctgaagtgtagactgctgctagctgaataccatctggga

SEQ ID NO: 292359 - DNA, 100 bp, Homo sapiens
tgatctccggcgcgggcactgctttccactcggctcctgtcgtccgttctctcaggctcccgttcaggctggcgcccatgcggctctacacgctctccaa

SEQ ID NO: 292360 - DNA, 87 bp, Homo sapiens
ggtccgggccggagtacgtcgttcccgctgcgctaggggaagcgggcagctgccgggccgcaagtacagccctgggtacaacaccga

SEQ ID NO: 292361 - DNA, 71 bp, Homo sapiens
aacctggggcccaaagggaccataaagatggtatttctcaagctgccagatacgtttaccaacgactcatc

SEQ ID NO: 292362 - DNA, 140 bp, Homo sapiens
cttgctggctcggcgtctctctcggcagtcaccggagtgcccgagggggaagcacgatttacggaaggctcggggaccagttctacaaggaagccattgagcactgccggagttacaactcacggctgtgtgcagagcgc

SEQ ID NO: 292363 - DNA, 82 bp, Homo sapiens
ggacctgctgctggacccggcctgggagaagcagcagcgcaagacctgctgcggatgttctttgacgcactgtatgacgagg

SEQ ID NO: 292364 - DNA, 98 bp, Homo sapiens
caaaggagcagggaagaaggaatcatcgaggcatgggggtccacactgcaatgtttttgtggaacatggtgcgcccacctcgtccacatgttgttaag

SEQ ID NO: 292365 - DNA, 91 bp, Homo sapiens
tggtctggagaccatggagaccctcacggagctgggcgacgagctgaccctgggagacatcgacgaactctctgcagtgtctgagctcctg

SEQ ID NO: 292366 - DNA, 78 bp, Homo sapiens
ggggacgagcagcagcggctcctcaacacccctcgaaggaccgcctggcccggtgcaccatgcattgcaacgacaaag

SEQ ID NO: 292367 - DNA, 75 bp, Homo sapiens
cctattggatatggagcctttggtgttgtctggtaggcgaaaaccaagagtacatcggcctcgttctcctatatt

SEQ ID NO: 292368 - DNA, 75 bp, Homo sapiens
gctcctatgttaccgccacctaaaaacaaagaggattttgagaaggtggtgaagcagtattttccaatttgaaga

SEQ ID NO: 292369 - DNA, 83 bp, Homo sapiens
ttcatctttacagaggaatagtctacaaaggaagacttgtaacctggagaagaggctactaataaaattgccagaactaaact

SEQ ID NO: 292370 - DNA, 74 bp, Homo sapiens
gcagtgcgggggcaccactcggatattctctgtcaccaatggtggccagggcttccgttacaagatgaggtctg

SEQ ID NO: 292371 - DNA, 74 bp, Homo sapiens
ggaaagccgtggccccgagggcggatccgagttacgccccatggtgtccatcctgccagcagactgattcagaa

SEQ ID NO: 292372 - DNA, 85 bp, Homo sapiens
gactctgtatctggaactggtggcgtcggcccaggtcggcgggaaccccctgaaccggatgtattcatcgagatttagcagccag

SEQ ID NO: 292373 - DNA, 50 bp, Homo sapiens
ggagctggccaggctacggagagaactgatgattgcccgccacctccggc

SEQ ID NO: 292374 - DNA, 75 bp, Homo sapiens
gtacctgcgctatgaagacacgcttcttctggaagaccagccaacaggtaaatgacccagatgcagaggtgtggg

SEQ ID NO: 292375 - DNA, 83 bp, Homo sapiens
gttccttggtgtcatccagccttagcaaaccagagggcaatgtgtatgtgaagtgcccatcaattgctgcagctattgctgct

SEQ ID NO: 292376 - DNA, 90 bp, Homo sapiens
ccggtattggatgattcgtatctaagactctgggacactcctgaagtcgggaaatggtaaaaaagagtgtcaagtggacatgcaaagctt

SEQ ID NO: 292377 - DNA, 98 bp, Homo sapiens
ttctctcgatgaggataacatccctccagaagatggaagagtctaacctgtctctgcaagctcttgagtcccgccaagatgatattttaaaacgtctg

SEQ ID NO: 292378 - DNA, 99 bp, Homo sapiens
gctgctcttccaagcaaggaagtcgacagtgattcgcctttgccagtctcatctcgtgtctgctttgttaagttccatgatccagactcagcagttgtg

SEQ ID NO: 292379 - DNA, 101 bp, Homo sapiens
cagaaatgttcggtgatccgggactcactgctgcaggatggggaatttagcatggatcttcgtaccaagagcaccggagatggggaagaagatgaaggtga

SEQ ID NO: 292380 - DNA, 75 bp, Homo sapiens
aaaaccatgtccaaaccaggaaatggacaggagaggcgggagatttttgagcagcacctgaagagcctgaagctg

SEQ ID NO: 292381 - DNA, 96 bp, Homo sapiens
ggaagcggccgcggcggcagcagtctcaaatatctatcagtgtagaagagtgggaagacaccaaagactccaaagaacaagggcaccaccgcagca

SEQ ID NO: 292382 - DNA, 100 bp, Homo sapiens
gatgttcctgtggaccccagtccaggtgtaattgaaaagtgatcctctcttcagagatgtcaaaaacaaacaaatccaagtctggatctcgctcttctcg

SEQ ID NO: 292383 - DNA, 101 bp, Homo sapiens
cggggcccgcgagctggctgcgctctactcgccaggcattcccatcaagagcaccatggacaaccccaccaccacccagtatgccagcctcatgcacagct

SEQ ID NO: 292384 - DNA, 97 bp, Homo sapiens
attgcgtccatgctgtattcccgcatgaacatcaagtgctcggaccctggcccagagctcagaggacgaggacgagggagtggagctgctgggagtg

SEQ ID NO: 292385 - DNA, 97 bp, Homo sapiens
caccagtatgtgggcagacctctgcaagaatggccaggtactaggttttgacaagcttgcatcatgcgtgagtataagctagtcgttcttggctcag

SEQ ID NO: 292386 - DNA, 75 bp, Homo sapiens
aacgcggtgcgcgaccgggagctggacctccgggactggattatggacagaacttggaaatattgagaataattt

SEQ ID NO: 292387 - DNA, 82 bp, Homo sapiens
tgggcggcccaccgggactcgccgttggactcctagaagtaccccaccccacccctgctccttggaggacaacgtgatcact

SEQ ID NO: 292388 - DNA, 100 bp, Homo sapiens
cttatcgaacagagccgggagttcaagaagaacactccagagagagaagaagaaggaggttcctgctgtgccagaaacccttaagaaaaagcgaaggaat

SEQ ID NO: 292389 - DNA, 100 bp, Homo sapiens
cgccatgatggctgtgggcggtaaacgcggttagtgcaagcatctgggccatcttcaatgggagcatgtaacttcaaggtttaaaaacgaggtggagagg

SEQ ID NO: 292390 - DNA, 98 bp, Homo sapiens
gaaggctcaagatggcgtgcttgttggagaccccaatccgcatgagcgtcctttcggacgatgtatctcctaggctacattcctaaagacaacaggct

SEQ ID NO: 292391 - DNA, 76 bp, Homo sapiens
ccaagtcggcccattccccgtttgcctcggaagtgagcagctactcttacaggggggccctcagcctcttggcctt

SEQ ID NO: 292392 - DNA, 74 bp, Homo sapiens
gaggctgcagcagcggaagaccccagtccaggatcatccagcagctcgtcaacggcatcatcacgcccgccacc

SEQ ID NO: 292393 - DNA, 74 bp, Homo sapiens
gcttaacacgctggcccattacaaggtgctgcagaaattggggaaagctgtagaaaccaaagatgaacgatttg

SEQ ID NO: 292394 - DNA, 50 bp, Homo sapiens
gtggatattgttcaagggaatagagttatgccaccacgggctgttccctg

SEQ ID NO: 292395 - DNA, 82 bp, Homo sapiens
ggaaaatgtcctcagtgcaagagcaacacgtttccacaggttatcaatactctggctgaccatcatcatcgtgggactgact

SEQ ID NO: 292396 - DNA, 98 bp, Homo sapiens
acgatctgcacttcgcattttggcattgacatttaattttagggtcctttatatagaagggagagtagtttggtggtaatccatttgcttccttggtg

SEQ ID NO: 292397 - DNA, 101 bp, Homo sapiens
atacactcattatctgatacttgtaatcagaaagtgactgagaccgaagatgatagtgatagtgacagcgatgatgatgaagatgatgttcatgtcactat

SEQ ID NO: 292398 - DNA, 100 bp, Homo sapiens
tacgagctggctttaatcctgaaagccatgcagcggacaccaatgggaatcccaatggggaagtcgatgctggtgcttctcaccttcttggccttcgcct

SEQ ID NO: 292399 - DNA, 95 bp, Homo sapiens
gagagtagcatcatcttgtggagtgttcaggatgggggaagtggaagtgaaattggatttggaaacatctcaccacgcacagaaggcggcaaaat

SEQ ID NO: 292400 - DNA, 75 bp, Homo sapiens
cagctgactgcacttcttttttgagaaaggaaggaatatatcctgactgattgtgtctcaatgcttgtacctact

SEQ ID NO: 292401 - DNA, 75 bp, Homo sapiens
cctcaacagagaggttgagcaatttaattcccgtaaaccaattacacctgagcattctacttttatcacctctcc

SEQ ID NO: 292402 - DNA, 85 bp, Homo sapiens
ctgatgctcctgtagaaacattttgggagattagaggagacacaccttgaagaaacaacagagagccaacagaatggtgaagaag

SEQ ID NO: 292403 - DNA, 100 bp, Homo sapiens
gctgcagatacgagtggacaactcacaggtgcagtgcggtcttcagcgcgcttgaaagcacgaagttgttcggcagccaggttggcctctgcccaggaag

SEQ ID NO: 292404 - DNA, 98 bp, Homo sapiens
ggtgacgtgtattcgcttcaccgggactaagttcctcctgcgcggtctatggcgggtatggacctgtctgccaatcaggacgaggagaccgaccagga

SEQ ID NO: 292405 - DNA, 100 bp, Homo sapiens
ccccattaacccaaagggcctggagatattagttgccgctttgacattctttcttgggaaagatgaagatgaaaaacaggacagtgactccgaatctgag

SEQ ID NO: 292406 - DNA, 82 bp, Homo sapiens
cgggctcagcttggctgcctgcctccttctcatcagaagagctaacaattgctggaatgacctttacaacttttgatcttgg

SEQ ID NO: 292407 - DNA, 75 bp, Homo sapiens
gatgagatcgcacttcctgcagtgggcattagccacgtccagatttggggatattccctgcccaaaaaattcctg

SEQ ID NO: 292408 - DNA, 82 bp, Homo sapiens
tcggagcttatactcctcccagtgacgggtctggagtgcgtgggggaccggctgttggcggcgggctgacgcacgaggcaca

SEQ ID NO: 292409 - DNA, 76 bp, Homo sapiens
cagtatcatgctggccaagaagatcatcattaaggacggaggcacgccgcttacaaacacgcagatggcaagaaga

SEQ ID NO: 292410 - DNA, 88 bp, Homo sapiens
cccgcccggtgcgctggaggtcgaagcttccaggtagcggcccgcagagcctgacccagggcccaggaagtacacgagaagctccgag

SEQ ID NO: 292411 - DNA, 74 bp, Homo sapiens
gctcctagccgtctgcaccagcgacttcgtaagactttgaccccgacgcaggcttcagtgattgccgcggatca

SEQ ID NO: 292412 - DNA, 80 bp, Homo sapiens
tggctactctgcctcggggacgaaagcaggtaaagtcatgaagctgagccccaaagcagaggaagtagctacgttctttg

SEQ ID NO: 292413 - DNA, 101 bp, Homo sapiens
gggctccgggtcttccagagcgtgaagatcaagatcggtattgctattgattgacattcaagtctcttacatcaacaccaaccatgaagacttcattggct

SEQ ID NO: 292414 - DNA, 100 bp, Homo sapiens
cagggagcggagtaccagcacttcatccagcagtgcacaggtgagggtggcctgcagagcctgctgggaaacatgagccacagccagctcatgcagctca

SEQ ID NO: 292415 - DNA, 100 bp, Homo sapiens
acgctggttcatacactccaaggtgtgatgaatgcagactctgctaccattttggctgtttggatcctcctttgaaaaagtctcctaaacagacaggcta

SEQ ID NO: 292416 - DNA, 88 bp, Homo sapiens
ggcggcagcagcaccaggctctgcagcggcaacccccagcggcttaagccatggcgaaccctaaggactctgcaatatgaataattcc

SEQ ID NO: 292417 - DNA, 98 bp, Homo sapiens
cgggacgcgggcgccaggaccggccgaacgcagagcttcctgcctgacacagctcacttcaagaagtgcacaatgtcagaacgtggaattaagtgggc

SEQ ID NO: 292418 - DNA, 105 bp, Homo sapiens
caagaatatgaattcgaaaagcagttcaacgagaatgaagccatccaatggatgcaggaaaactggtaagaatgattgatgttggctgatattggagtgctcatt

SEQ ID NO: 292419 - DNA, 100 bp, Homo sapiens
atgccatccagagctgtgcctcccagcaccacagtccttctgcagtccctcgtccagccacccccaggcccaaccgcttgcttatcctccacggcttcct

SEQ ID NO: 292420 - DNA, 100 bp, Homo sapiens
cttagcccgccgctgccgcctccgagcagcccgccaggttccatgcctctgcagcggtgcctcatgtttgctgtgtagttgctgtcctaacagtaagaat

SEQ ID NO: 292421 - DNA, 75 bp, Homo sapiens
gccgcctctgccgcagctggagtgagaaagatcagtctaaagaaaaggagaagaaagtgaaaaaaacaattcctt

SEQ ID NO: 292422 - DNA, 100 bp, Homo sapiens
cctcaagctggccgccgcgggcttgtcatttacgtgctgaagcatattgacttgaggaaaacgccttccttggagtttggcatgatgatcatttttgctt

SEQ ID NO: 292423 - DNA, 96 bp, Homo sapiens
aagacccgcagcaaccctgagaacaacgtgggccttatcacactggctaaagcccacaggcggttttgtgagctgcttccccaggagcagcggagc

SEQ ID NO: 292424 - DNA, 96 bp, Homo sapiens
gcattatccaacggctgctggaaggctcttgtcaggatggtgaagctgttcatcggaaacctgccccgggaggctacagagcaggagattcgctca

SEQ ID NO: 292425 - DNA, 83 bp, Homo sapiens
tggagtccgagctgagatccatctgcaccacggtgctggacattcaccatggcaatggcacccagcaggcgttctacaatgac

SEQ ID NO: 292426 - DNA, 99 bp, Homo sapiens
ccgacttcctcatgaagagactccagaaagggttacacccccagattaccagcctcccggttttaaggatggtgattgtgaaggagttatatttgaagg

SEQ ID NO: 292427 - DNA, 100 bp, Homo sapiens
ggggacttgaaccagctgagcgctgccatcccggccacgcgggtggaggtgtccgtgtcctgcagcttttcctccgcaaccatgtctgacaaacccgata

SEQ ID NO: 292428 - DNA, 100 bp, Homo sapiens
cgcccggcggcggcgggagcccaggagcctgccccgccctggggacgaagagctgcagctcctcctgtgcggtggacgtgactctggacccagacacggc

SEQ ID NO: 292429 - DNA, 98 bp, Homo sapiens
ggcgttggaggccaccgtttccaggaaaatcctgccttgcttcgttgggcctatgcaagaacaataaatgtctatcctaatttcagacccactcctaa

SEQ ID NO: 292430 - DNA, 50 bp, Homo sapiens
gccgacatcatcagccgctgccaggccgccatggcatcagatgaaggcaa

SEQ ID NO: 292431 - DNA, 75 bp, Homo sapiens
taaactcaaccccttctcttccaaaagaagtaaaagattatgagcctccatttggttccaaggtgcgggagcacc

SEQ ID NO: 292432 - DNA, 119 bp, Homo sapiens
ccgctctccctgcgctctccgcaccgcggcttaaatgatgtattttgtgatcgcagcgatgaaagatgtgaatttcttcggagtaagaaatcctcagaggaaattacccagtatattca

SEQ ID NO: 292433 - DNA, 83 bp, Homo sapiens
ggttattcgagtgaccgagaccgcggccgggaccgagggtcctagaccagaaggagcacaggctggatggccgtgtcattgac

SEQ ID NO: 292434 - DNA, 90 bp, Homo sapiens
ctgggtttgctgtgtggcccttgggtcatgtaggtacaacagcaaccaagaagatcgatgtctacctccctctgcactcgagccaggaca

SEQ ID NO: 292435 - DNA, 100 bp, Homo sapiens
ctggaaccatggagggtgtagagtactggaagttggaccctgctcaggtctatgctagcgggcccaacgcatgggacacggctgtgcacgacgcctctga

SEQ ID NO: 292436 - DNA, 83 bp, Homo sapiens
tgcagcgggagctggacggcgagcgcgagcggcgcgagaaaggttaatgcctcttggaagtcaggagtcttcagacagtctag

SEQ ID NO: 292437 - DNA, 83 bp, Homo sapiens
aagtaatgcaatggtctcaatctctggaaaaacttcttgccaaccaaaaatatcctccgaatcctaaatctagagctccaagg

SEQ ID NO: 292438 - DNA, 80 bp, Homo sapiens
ggatacagggtcaaaggagagcacaaccatcgcagttggaagcccatggggcagggaggagatgaagtggcggcagtggg

SEQ ID NO: 292439 - DNA, 98 bp, Homo sapiens
agcagatggccagtcacgagaacccagggcggcgactggcggcgcgatggacctgaccgggctcctgctggacgaagaaggcaccttctccctcgccg

SEQ ID NO: 292440 - DNA, 138 bp, Homo sapiens
tgtggtggtccactctgactgcaagcacccctttcttgaaccgaacagagtcaagtggaatcaaaggaccttgtaaagtcaaaaatgtcagaaacttccaggaccgcctttggaggcagaagagcagttccacccaat

SEQ ID NO: 292441 - DNA, 51 bp, Homo sapiens
ctatgtcttctacccctgttccattagggctgatcccttatccaacatggt

SEQ ID NO: 292442 - DNA, 100 bp, Homo sapiens
ccttaacgtggagctctccaaggttaagaatagacccaccagcatttcgtgggatggtcttgattcagggaagctctacaccttggtcctgacagacccg

SEQ ID NO: 292443 - DNA, 80 bp, Homo sapiens
agcaggagaaaatgaccaagtttcagggtcttgctgtctcacccaggctggagtgcagtggcacgatcacagctcactgc

SEQ ID NO: 292444 - DNA, 83 bp, Homo sapiens
cctgtgaccacccctgaagaaattgcacaggtcttgcagatacttgacttatatgctcaggtatatgaagaactcctggcaat

SEQ ID NO: 292445 - DNA, 75 bp, Homo sapiens
cgttctgcgacttataaaggaccagacaaatcaaattagtggttttggcagtaagctcctacaggacattttaaa

SEQ ID NO: 292446 - DNA, 100 bp, Homo sapiens
cagcagcacccgagcaaaccccagcaagatgcggaggctgcctcggcggagcagaggaaccacacgctgatcatgcctcccgcgacgatgcccctcaacg

SEQ ID NO: 292447 - DNA, 83 bp, Homo sapiens
gcctgcaggacggcgcggcagagtccccgtacgcctacagtaacgctgtgagccgtgagctttgaggcggtgggatgtgtcag

SEQ ID NO: 292448 - DNA, 102 bp, Homo sapiens
gcagccctgaagttgcctcttctggtgtcaaagcttttggacattcctggggtcgccatgggctactcacactccttggtgatagcaagagatgaaagtgag

SEQ ID NO: 292449 - DNA, 51 bp, Homo sapiens
cagagggaagatctttttcctcaattgtgagaaagatcagtctaaagaaaa

SEQ ID NO: 292450 - DNA, 75 bp, Homo sapiens
ctgttcgaaagcatcttgagaggaacagaaagtcctattttgtaacggattatgatccaaccattgaagattctt

SEQ ID NO: 292451 - DNA, 100 bp, Homo sapiens
cagatatggaggaggaagagggcccgctggcgtcttggctgcccacaagataatggctagctccccagacatggacctggccacagtttctgctctcagg

SEQ ID NO: 292452 - DNA, 73 bp, Homo sapiens
ctgatgggccagatacatcagctcagatccgaattacaggactcgctgattcttgagaagagtcaaaactgga

SEQ ID NO: 292453 - DNA, 75 bp, Homo sapiens
tagcgctggccgcgaccccggcgagaacgccagatcaagtgtcccaagtgtgataagctgttcttgagaacaaat

SEQ ID NO: 292454 - DNA, 100 bp, Homo sapiens
gcggccgccgtgccattcttaaaggcgcccgagtgtaggcgacaggccgctgacggccggaaggaaaatgtatatttgccttccctccatgatctccaac

SEQ ID NO: 292455 - DNA, 83 bp, Homo sapiens
gggacggagagaacacgagcccatcaggacttgatcatcttccctgacgactgtgagttcaagcgggtgccgcagtgccccag

SEQ ID NO: 292456 - DNA, 75 bp, Homo sapiens
gagtgaagtcccagggatattctgtgctggtcagggaagtcaaagatgcatccctgagttcttcctagcaggcaa

SEQ ID NO: 292457 - DNA, 74 bp, Homo sapiens
tggagtaggaggcaggtctccgcgtgcaagcagctaatgactcagtctgtagactccaacagagggaacaggaa

SEQ ID NO: 292458 - DNA, 83 bp, Homo sapiens
atctgccctgttgttcagcagtgatgaggagatggatggagtggaaccctggcttccccttgagcatcgatgccaaatgccac

SEQ ID NO: 292459 - DNA, 75 bp, Homo sapiens
ggctgtgtcttaaatgtggccatcagctgaaacattaacaaacgtgctggatttcaaaagggatgctggtctgtg

SEQ ID NO: 292460 - DNA, 74 bp, Homo sapiens
agacaccgcctacaggagtatgatgcaagaaggtcagtgcaccagatattctgaaacctctcaatcaagaggat

SEQ ID NO: 292461 - DNA, 82 bp, Homo sapiens
ctgaatggcaatggcacaaagttctctcgatcagggcatacatctttcttcgacaaagggatgataatgaagataattcaaa

SEQ ID NO: 292462 - DNA, 75 bp, Homo sapiens
caatatattcatcatttagaggcagaagttaagttctgcaaggtgcattgacatacaacagagcaacgaggtaga

SEQ ID NO: 292463 - DNA, 100 bp, Homo sapiens
ccctgtcaccatttctttcacaaaccttgtgtctcaatttggctacaaaaggtgtcagcttcctctggtgcaaccagcaagtcttccagtatgaatccca

SEQ ID NO: 292464 - DNA, 97 bp, Homo sapiens
catcggagcgcttgaaagtgcattcaaggaaatggcccctggatcctcctggaatccccgatccctcttgctccctggcagagttttctagtccctc

SEQ ID NO: 292465 - DNA, 75 bp, Homo sapiens
gcggttttcctcgcagaacgcctttatgcagaaggttaaatgggccagggaaaactatcaccataacattggctc

SEQ ID NO: 292466 - DNA, 88 bp, Homo sapiens
ggccagagagatgacgatcttagatggatatctgagagccagcgaactttctttacctcctagtatcatttcatgaaaattagtagca

SEQ ID NO: 292467 - DNA, 100 bp, Homo sapiens
cactgttcacttacacagtatttaaatggcccaggtccagaggtgtccttctaaagctggtagaggtttcacgagtcatcagggacccagaacccttctc

SEQ ID NO: 292468 - DNA, 100 bp, Homo sapiens
tggagggaaatgggaatgtacacgataattaaagagtaaagttgtgctcaacggtgagaattatgaagatgatgacctagtaaattctgatgaggttatg

SEQ ID NO: 292469 - DNA, 88 bp, Homo sapiens
agactggaaactattcttagctccgtcactgactccaagttcatcccctctgtctttcagtttgggacattcatcttcaaagaaatct

SEQ ID NO: 292470 - DNA, 80 bp, Homo sapiens
gccggatggaaatcctaatgacagtctccaaattcgcctccatctgtaccatgtggatgaggatcgcagtacggaacctg

SEQ ID NO: 292471 - DNA, 94 bp, Homo sapiens
ccccggcccacagtgggggtgtgcaaacccgagagaactgggattccagacagcattggaaaagacatagaaaaggcttgccaatctatttatc

SEQ ID NO: 292472 - DNA, 75 bp, Homo sapiens
gaggacatgaggaaaatgtccttccagcgctgcgcccggacagacaagattcaaccctatgaaaagataaaggcc

SEQ ID NO: 292473 - DNA, 100 bp, Homo sapiens
agcttctgcgctgtggagaagccaggaaacatgccctgaactgtcacagaatgaaaccagcgctcttcagcgtcctgtgtgagatcaaagagaaaacagg

SEQ ID NO: 292474 - DNA, 96 bp, Homo sapiens
cagggttcgtggataataaactcaagcagcgagtcatccaggatgtctttcagtgacttcctgaggcactattcccgcctggagatctgtaacctg

SEQ ID NO: 292475 - DNA, 100 bp, Homo sapiens
cccgggagtaggagactcagaatcgaatctcttctccctccccttcttggaccgccgggagagcctgcccacctccccaccctggacgccgggcgcgtcc

SEQ ID NO: 292476 - DNA, 50 bp, Homo sapiens
tggtaggctatgaccacgagaagccaggtccaagacaactttgacaagat

SEQ ID NO: 292477 - DNA, 121 bp, Homo sapiens
caacaagaggaaagacacacctaccaagaagccagtcaagcggccaggttttaaaatcaaagatgggaaaatcggagaaaattgcccttccccatggccagcttgttcatggtatacactt

SEQ ID NO: 292478 - DNA, 80 bp, Homo sapiens
cgaagaagcatcgttaaagtctctcttcaccctgccgtcatgtctaagtcagaggtgtacgtgaacggagagtgggtgac

SEQ ID NO: 292479 - DNA, 74 bp, Homo sapiens
gctgacttccggtggtgccaaagccgtttccgtggaatcaggccggctggctgctcccggcagatcggcttctc

SEQ ID NO: 292480 - DNA, 100 bp, Homo sapiens
taacaccagcaacaacacggaggaggagtgaaataaacagcgttgttgctcacacaaagcctgtttggtagtctcttcacatggacgcgtgtgacatttg

SEQ ID NO: 292481 - DNA, 90 bp, Homo sapiens
ctctgcctcagcaacactggtccctgttgccccaccaatatgccagatgtatggtctgctggctgtgtgttggctgagctgttactagga

SEQ ID NO: 292482 - DNA, 100 bp, Homo sapiens
agaaaaaaaaggctgttctggatgagcatggaggagcaggacttggagcgaaggttcgagctgctgagccgcgagctgcgggccatgctggccatcgaag

SEQ ID NO: 292483 - DNA, 73 bp, Homo sapiens
acataataaagtgccctattacatcaagccgagtacagatgctgccccaggcggtgtgcctgctgcatgcgct

SEQ ID NO: 292484 - DNA, 83 bp, Homo sapiens
gaattattttcatgcagacagcttgtcaagctgtgcagcatcaaagaggcaggagtgtatgtggtagaagaccaaagaagaga

SEQ ID NO: 292485 - DNA, 83 bp, Homo sapiens
gtcggaggagccgcgggcggcgcggcccagctcgttccaggctgctctttggcgtaaattgcaatcgattagggatcgtttct

SEQ ID NO: 292486 - DNA, 74 bp, Homo sapiens
atcattgaataagtgttttaagaaagtggacaaagagaggagtcagactataggcaataatggagaccagtccc

SEQ ID NO: 292487 - DNA, 50 bp, Homo sapiens
cagagtccgactctcccacctgctaaggtgaaagaaaagatgttgtcccg

SEQ ID NO: 292488 - DNA, 96 bp, Homo sapiens
ttctgatctgtctgaatgtttaattaatcaggaatgtgaagaaattctacagaataactgaagtgaagtgatggactccgatttggagagtagtaa

SEQ ID NO: 292489 - DNA, 100 bp, Homo sapiens
agaaaggcgccttagtaccccacagcgagggaagagacaggatgcgtcctcaaaagcgggtggagaagggctatgaggagtggttgctgaatgagatccg

SEQ ID NO: 292490 - DNA, 75 bp, Homo sapiens
atccaaccttgcgctgcatccgctcgacctcgtgaagatccgcttcgccggtcctcacaagcttgaggaagggga

SEQ ID NO: 292491 - DNA, 98 bp, Homo sapiens
ccagtaggagcagcagggcgtcggcttgtgaggtggccccaatgtcagtgtatgcttgtctgggcaatgatgcggctgccattcgtgatgccttcctg

SEQ ID NO: 292492 - DNA, 75 bp, Homo sapiens
aatctacaagatgatgcagggaggaggcctctgtgtcctttgtcccaatagtaacaactccctcctggcctttcc

SEQ ID NO: 292493 - DNA, 100 bp, Homo sapiens
tccacctcgacctctggttctacttcacactgcagaactgggttctggactttgggcgtcccattgccatggcattatattgtacttctagcaagtgcac

SEQ ID NO: 292494 - DNA, 100 bp, Homo sapiens
agaccctggagcctcagttggaagcagccgatccagcctgcggagcctgtggggcaggagtctcaggagcaggggctgcggcagaggctgctggacgagc

SEQ ID NO: 292495 - DNA, 100 bp, Homo sapiens
cctcgcactccgcctcccccggctcagcccccggccgcggcgggacccgagggcctattccactagaagcaagatggctgaactcaatactcatgtgaat

SEQ ID NO: 292496 - DNA, 75 bp, Homo sapiens
cggctaagaggcgcagagcgaggagtcgggatttggtcgcgagcggcgacgctccaaagacaacaggccctccct

SEQ ID NO: 292497 - DNA, 82 bp, Homo sapiens
cgcccaacatctgcctagatcggctagaaaactgatttaaattccaggttgtcatcaatggccgagagtttcccccagctga

SEQ ID NO: 292498 - DNA, 100 bp, Homo sapiens
cgagctgagtggttgtgtggtcgcgtctcggaaaccggtagcgcttgcagcatggatccctgctgccttggtgatcccgggctgacagccagagagcaca

SEQ ID NO: 292499 - DNA, 115 bp, Homo sapiens
ttatatttttatcacgttcagtgtgctgggatgaggttacgagtagccatgtgccatatgatttatcggaaggagtggagtcaacatatcaatggagcaagtcacagtcgtcgat

SEQ ID NO: 292500 - DNA, 100 bp, Homo sapiens
gcgcgtgtcgcgctggtacttcggggggctggcctcctgcggggccgcctgctgcacgcacccgctggacctgctcaagatagtggaggagcgccggact

SEQ ID NO: 292501 - DNA, 80 bp, Homo sapiens
cttcaaacatgcaagttggaatggtttgctggtgaggcccatgacccgctagttgaagcactagttacagaagcatggag

SEQ ID NO: 292502 - DNA, 100 bp, Homo sapiens
aaggatcttggaccaggctctccgcaaactcaaggcatcatctggaagcggcccacgcatttcagcaggaacttgatgcaaggcatgacaaatatgagag

SEQ ID NO: 292503 - DNA, 100 bp, Homo sapiens
tctaccagtcatgaaataaacccaaggaaagtttttgaacttatgggaagcattgtcactgagattgcttgtggacgtttcttaaacaattaggtctaca

SEQ ID NO: 292504 - DNA, 75 bp, Homo sapiens
agaaaaacactatctcttctatgacggagaatccgtttcaggaaaggttcgggatgagtatcggcaggactacga

SEQ ID NO: 292505 - DNA, 96 bp, Homo sapiens
gacttctaggagcctggggttcggcgctatggaggagctcgatggcgagccaacagtcactaaacacctggattcttatctagctgactgctacga

SEQ ID NO: 292506 - DNA, 82 bp, Homo sapiens
cctcgggcaccatgagcgacgtggctattgtgaaggagggttggctgcacaaacgaggtgatgtgtccaatctagatcccaa

SEQ ID NO: 292507 - DNA, 96 bp, Homo sapiens
ggttccagaccctgccttctcttctgaaagcctctgaagagccaatccattcaggatgggaaaccacgcaggcaaacgagaattaaatgccgagaa

SEQ ID NO: 292508 - DNA, 83 bp, Homo sapiens
tcgcggggcgccgacctggcagggtgagaagccctaccactgcaactgggacggctgcggctggaagtttgcgcgctcagacg

SEQ ID NO: 292509 - DNA, 82 bp, Homo sapiens
gtcgtgatccagaagtccagagctgaggactgcctgtttgcagatcaccgaagtggccttggagtacaacaactgtcatggg

SEQ ID NO: 292510 - DNA, 100 bp, Homo sapiens
accagttcagcctattccttgttagccagaggccaagaagagtaagacggccgcaaagaaaaatgacaaagaggcagcaggagagggcccagccctgtat

SEQ ID NO: 292511 - DNA, 90 bp, Homo sapiens
cctagctcctgctaccagttacgatggcaaaacagcagtgaccgagatcgtcaacaggatcatccagcagctcgtcaacggcatcatcac

SEQ ID NO: 292512 - DNA, 97 bp, Homo sapiens
cacaaatgctccttctcctggagacgcaactcaagacactcttgcactcctgtaatgagcctggcactgtgatgaaacacttttcccgtgtcgtttg

SEQ ID NO: 292513 - DNA, 74 bp, Homo sapiens
gccaagtatccgccagtcaataggaagtacgagtggtttggattcaggatttgttcctagtgtccaagattttg

SEQ ID NO: 292514 - DNA, 97 bp, Homo sapiens
aacaaggacaacaatgagatcgtggacaagatcatgggcaaaggacagatccagaaatggtggagtcaatgaagaaagtagcagggatggatgtgga

SEQ ID NO: 292515 - DNA, 100 bp, Homo sapiens
gtctcggaaaccggtagcgcttgcagcatgttggaatcgaagcctcttaaaatggcagatgacttggacttcgagacaggagatgcaggggcctcagcca

SEQ ID NO: 292516 - DNA, 96 bp, Homo sapiens
ctctagactttttggacgatgtgcggcggatgaacaagcggcaggttttggcttggtttgaagaaggtgaagaaacaattacagcctttgtagaac

SEQ ID NO: 292517 - DNA, 96 bp, Homo sapiens
cccaggtgtaagcgcagaaagcaggcgaacccgcggcgcaataacgattgttctctggggccggactgagaaatgcctgaaggagacgacggagga

SEQ ID NO: 292518 - DNA, 73 bp, Homo sapiens
aattttaaagactgttgtgaacagggatgtacctaatgtcctaaacatgcagctttcggatggaggacaagga

SEQ ID NO: 292519 - DNA, 100 bp, Homo sapiens
gaagagaaagccagttatccacggactggaagatcaaaagagggatcctcagtcttccacaatgaaccctgtttacagccccgtgcagcctggggctcct

SEQ ID NO: 292520 - DNA, 80 bp, Homo sapiens
acacccaagtccgctcatcaccctggagactcaggtacttcgtactggatttcgaggctggcatcctgcagtattttgtg

SEQ ID NO: 292521 - DNA, 75 bp, Homo sapiens
tgacatttaattttagggtcctttatatagaagggagagtaggttttgcagacattgggtacagaaacttaccgg

SEQ ID NO: 292522 - DNA, 97 bp, Homo sapiens
cggcgcctgaggagcgggatctaacccaggagcagacagagaagctgctgcagtttcaggagtccttcaataatgttaaacagtggctgcaggaaat

SEQ ID NO: 292523 - DNA, 83 bp, Homo sapiens
ccacccccggagcgcagtccccgaagtttccaacatggctagatccatcagaaactgaagccgtggagaacgctctcggggcc

SEQ ID NO: 292524 - DNA, 90 bp, Homo sapiens
gctctggtgatggaatgataaaagtgaagaatcagctccgcttccttgcagcggagattctggagctggctggcaatgcagcgagagaca

SEQ ID NO: 292525 - DNA, 50 bp, Homo sapiens
gcagccagggttgcaaccccacataaagtttctacgataaagacagttca

SEQ ID NO: 292526 - DNA, 98 bp, Homo sapiens
aagtaggccgtctcgctctgggtctccaggcccgcgaccgtccgccagtcgtcccgaggtttacccaaggtccagcctagcccctaggcaccatgtcg

SEQ ID NO: 292527 - DNA, 73 bp, Homo sapiens
ttccctaaggcccaaccaaacagaagagaaatcgtggatgggaatgtgaagatgaccctgggcatgatctgga

SEQ ID NO: 292528 - DNA, 100 bp, Homo sapiens
cgaacgcttcgctggccatttaggagctctgctcaaagccagacggtacatgtcccagagcaagcacacggaggcccgggagctcatgtactcgggagcc

SEQ ID NO: 292529 - DNA, 100 bp, Homo sapiens
tttgattgttaataaccagctgggttacaccactccagctgaaagaggaaggtcttctttatactgcagtgatattggttgggtttcagtaacacctaat

SEQ ID NO: 292530 - DNA, 83 bp, Homo sapiens
gctcgcgctactctctctttctggcctggaggctatccagccgtctgttcctcacacaccccgcccaaggacgtgcctggcag

SEQ ID NO: 292531 - DNA, 100 bp, Homo sapiens
ctgaaagaccggcatgccctattctgtgggcttccgcgaaggagcctgcacacatgatcctgaccgtcggaaacaaggcagatggagtcctggtgggaac

SEQ ID NO: 292532 - DNA, 100 bp, Homo sapiens
gcggggaggtaacaagaaataccgtgccctgaggttggacgtggggaatttctcctggggctcagagtaaatttggagacagacaacttgtcacgcatac

SEQ ID NO: 292533 - DNA, 100 bp, Homo sapiens
gtcggtgagcgcgtttcccgcctgagcgcaactagcggcgggtcgtgggcacctccaggtaaggagtgccaatggacggatgcctgcctgtctcatccct

SEQ ID NO: 292534 - DNA, 82 bp, Homo sapiens
atgatggacctaggactgctggaaatattctgctgtacgtagagatggctctttccattatgtccacagtactccctttggc

SEQ ID NO: 292535 - DNA, 90 bp, Homo sapiens
atgccccgctacgagctggctttaatcctgaaagccatgcagcgggcggcttatgacccctacgcttatcccagcgactatgatatgcac

SEQ ID NO: 292536 - DNA, 100 bp, Homo sapiens
gcagaatacagagatatggaatcagattgacttggacaaggctactgcagcattcattttggaagaaagcttttgctggagcagatcaggaatcaagcgt

SEQ ID NO: 292537 - DNA, 80 bp, Homo sapiens
ctgcatagccttcacagagagtccagttgccaagggctgaagaagatgcagagcagcctgaagctggtggactgtatcat

SEQ ID NO: 292538 - DNA, 100 bp, Homo sapiens
tcttcccgcgtccgccgattcctcctccttggtcgccgcgtccttggctggcgtctcggcaagatgtcggtgaaggagggcgcacagcgcaagtgggcag

SEQ ID NO: 292539 - DNA, 74 bp, Homo sapiens
ttctttgcagcaagcgatggcatagtaaatgaaaacttggagccaaggcaaagagggaccactgtgctcatgga

SEQ ID NO: 292540 - DNA, 51 bp, Homo sapiens
cggggaggtcacctgacgaggaggctacgtgtgccgcctggccattcaaac

SEQ ID NO: 292541 - DNA, 100 bp, Homo sapiens
caaagccagcctggcatactttgaagatcgtcatgggtgaacacctacctcttcatgatgcaagcccaaggcattctgatccgggacaacgtgagaacaa

SEQ ID NO: 292542 - DNA, 75 bp, Homo sapiens
cgaagaggctggactcggattcgttgcctgagatttggaatggagagaaatggaaggagatgattgcgagttccg

SEQ ID NO: 292543 - DNA, 100 bp, Homo sapiens
tggagcaaataaaagagccctgcaatttgaagatacatgagacagcagccaaacccccaggacttggatgttgtgggtgatggtatgcagtgtcctcctt

SEQ ID NO: 292544 - DNA, 100 bp, Homo sapiens
cctgctccctctcagcacctgggcggacggccagtacagatgacggctttgtatataatttggatgcacgttcagataagccaatttttacacttaatgc

SEQ ID NO: 292545 - DNA, 90 bp, Homo sapiens
ccgggatcgtgaccgagaccgtgaccgagagcgtgaccgagagcgcgaatatcgtcatcgttagaaggaaaaatatattcagggggaaga

SEQ ID NO: 292546 - DNA, 100 bp, Homo sapiens
gcaccccaaaaacagtgtcgagaagaggtgctcaaccatccagtccaatggatcagatgggcaagatgagacctcagccatatggcgggactaacccata

SEQ ID NO: 292547 - DNA, 75 bp, Homo sapiens
cagagggctctgatctgtgcgacagatcaggatggctaaaggtgaccccaagaaaccaaagggcaagatgtccgc

SEQ ID NO: 292548 - DNA, 115 bp, Homo sapiens
cgaaggtcctgggagcaggagctggaggaagataatgcatcctttcaggatgttgtgactgtgacagactcactggggtttgtacatgctggggaggagccttcctttcaggggt

SEQ ID NO: 292549 - DNA, 90 bp, Homo sapiens
acgtttttatccatggatgacttgcttgggtaccaggttgaattggaaaacctaaaagatgaatatgtaagaacacttgaagagacgagg

SEQ ID NO: 292550 - DNA, 75 bp, Homo sapiens
cttccgtttgttggtggaggaggtggcaggcctcggcgatggcccactgcgtgaccttggttcagctgtccattt

SEQ ID NO: 292551 - DNA, 51 bp, Homo sapiens
acgtgatcttcctagagctcctggcccgtgacctgaccaacggtgcagatg

SEQ ID NO: 292552 - DNA, 51 bp, Homo sapiens
aaacaaggcttccagtgccaagaaatcgagctatagcagattatcttcgtt

SEQ ID NO: 292553 - DNA, 80 bp, Homo sapiens
agtaggagagcctacatattcttgcaggctttccttaaagtttcccatgtctcaatggactcctgaatataacgagctct

SEQ ID NO: 292554 - DNA, 50 bp, Homo sapiens
gaacagacaagcaggttgtcttggccaagctataacatcagaaatggtga

SEQ ID NO: 292555 - DNA, 82 bp, Homo sapiens
gagtgcagagccgcctttccagcatgcaggggctgctcaggcagcaatgaatgtggatcacgaggttaacctcttagtggag

SEQ ID NO: 292556 - DNA, 97 bp, Homo sapiens
atttggagttcttacaacatggcagacattgacaagagactacctaggtggagaagcgtactgggccggcggcctgcacctctacaccccattacct

SEQ ID NO: 292557 - DNA, 100 bp, Homo sapiens
catgttcaagaaactgaagcaaaagatcagcgaggagcagcagcagctccagcaggcgctggctcctgctcagaatccagcaagctaaagtgcaaattct

SEQ ID NO: 292558 - DNA, 100 bp, Homo sapiens
ctcaagcccctgctaatgctcatctgaaggacttggatgaagaaatctttgatgatgatgacttttaccaccaggtcctcgggcgggaagtgtacacctc

SEQ ID NO: 292559 - DNA, 100 bp, Homo sapiens
ctggtctcggggtgtccacggtgggctcctcgtgctgggatccgccaacgtggatgagaggtgaccaaaagccagccccactgtgagttgaactctttcg

SEQ ID NO: 292560 - DNA, 100 bp, Homo sapiens
cggccggccgacccttcctgtcgctgacggcgactgcgggaggccaggccagtacagatgacggctttgtatataatttggatgcacgttcagataagcc

SEQ ID NO: 292561 - DNA, 50 bp, Homo sapiens
cggcgttctggatctcaaagcgactgattcttgctattccaaatcctctt

SEQ ID NO: 292562 - DNA, 90 bp, Homo sapiens
ttcgacctggagaacgcagtgctcttcgaagtggcctgggaggtggctaacaaggcttactgcagagtgggtctgggcatctgctacgac

SEQ ID NO: 292563 - DNA, 101 bp, Homo sapiens
gatgaaagtgagcagtccagaaagcggcttatcgaacagagccgggagttcaagaagaacactccagaggtgaggcatgaaattcaagatggaaccataca

SEQ ID NO: 292564 - DNA, 100 bp, Homo sapiens
gaggagaacgaacatcttctggacctttgtccaggactggacctacagagacatctgggattttctgcgtcagctgtttgtcccatactgtatcctgtat

SEQ ID NO: 292565 - DNA, 100 bp, Homo sapiens
aactcatgaaaaaaattatccttgaattcaaagaaaaatgtaaagacaagaagaatcctttagaattacagaggatcatgtgattcagcatgggctggta

SEQ ID NO: 292566 - DNA, 100 bp, Homo sapiens
aacgtgctttttctcaagtatgaagacatgcatcggatcccccttagcacctctggtactgtaccgtaccttgcctttctgtccaggtttggtggaattg

SEQ ID NO: 292567 - DNA, 100 bp, Homo sapiens
cttccccacattcctgtagcagtaagagtgggctgtttgcagctgtgggtgagcgtggaggatgctcagatgcacaccgtcaccatctggctcacagtgc

SEQ ID NO: 292568 - DNA, 90 bp, Homo sapiens
atgatgaaatttctgtaaatgatttattcaggagattgagcatgctctgggtcttggcccagccaaacagtgtcctcttcgagagtttct

SEQ ID NO: 292569 - DNA, 98 bp, Homo sapiens
ttactgctccgtggtctcagcccaggacctccaggggaacaatgaggcctacgcagagctcatcgtccttgtgtggcccagagttgctcagaattgga

SEQ ID NO: 292570 - DNA, 100 bp, Homo sapiens
gaagccctacgagattcacaccgtcttcggtctcctggggtcggcgccgagtgggaggatggcggaagtgctggcctggtttgaggaaggtgaagagacc

SEQ ID NO: 292571 - DNA, 80 bp, Homo sapiens
tcagttggaagcagccgatccagcctgcggagcctgtggggcagtggtgcctgtggagaggtaaagctggctttcgagag

SEQ ID NO: 292572 - DNA, 51 bp, Homo sapiens
ctctccatcccttccgaggcccgacttcgacaccctgacgtggaataagcc

SEQ ID NO: 292573 - DNA, 90 bp, Homo sapiens
gaggctggctacttgcctgtggtcatcgataacttccataatgccttccgtggaagaaacagccctcttgggtcccccaggaagggtccc

SEQ ID NO: 292574 - DNA, 80 bp, Homo sapiens
tatcgacgtcgtgatccagaagtccagagctgaggactgcctgtttgcagcatactggagcatagtgaaagagtctattt

SEQ ID NO: 292575 - DNA, 75 bp, Homo sapiens
atgatgaagagaaaggcccggagacttactgtcccactgaccaggctgctgcaggcacagatgctgagcatgtgc

SEQ ID NO: 292576 - DNA, 82 bp, Homo sapiens
aagacgcctccgaggagcccgaggagaaagacgccaaccaggactggtgattgcagctggaagtgcccatgaccgagctggc

SEQ ID NO: 292577 - DNA, 100 bp, Homo sapiens
gtgaccgagagcgcgaatatcgtcatcgttagaaggaatagccaggtctggctgggtcggcacaacctgtttgagcctgaagacacaggccagagggtcc

SEQ ID NO: 292578 - DNA, 88 bp, Homo sapiens
aacagcgaggctttcagttctttggaattccattcttttccttattcttctgatgtggatccagacatatctgaagagatggattaag

SEQ ID NO: 292579 - DNA, 75 bp, Homo sapiens
ccgtccgccttctctgtcagctctttccccgtcagcatcccagccgtgctcacgctagctgacgtggtggacagt

SEQ ID NO: 292580 - DNA, 100 bp, Homo sapiens
cacgagcagatcctggtcctcgatccgcccacagacctcaaattcaaagatctttgatgatgcgtacaaatcccagctcagttgtgtggttgtggatgac

SEQ ID NO: 292581 - DNA, 75 bp, Homo sapiens
gacttttaagcttcccttaacgccagtctttgaagggcttgccttcaatgagaaagatcagtctaaagaaaagga

SEQ ID NO: 292582 - DNA, 90 bp, Homo sapiens
tgaactttgagaacatgagcaacgatgacgctgtgcgggtgctgagggacattgtgcacaagcctggaatggttatgctcctgttgaatt

SEQ ID NO: 292583 - DNA, 83 bp, Homo sapiens
ctcccagcaaagcagtggccgcccgggcggcgggatccactgtccggcagagtcacagtggagaggatacaagcagaagaagg

SEQ ID NO: 292584 - DNA, 82 bp, Homo sapiens
gtaccggctgggccggaagatcggcagcggctccttcggagacatctatctcgtagagatggggtttcgccgtgttagccag

SEQ ID NO: 292585 - DNA, 100 bp, Homo sapiens
tgagaatgcttattgttgagaagatgcttgaagtctttcatgctattaaatctgtcaaagatgcttcctgggaattagaggaaaacgcttatcaagagct

SEQ ID NO: 292586 - DNA, 82 bp, Homo sapiens
aattgagcctcaaaatgaagatggcacatggcccaggcagaccttgcagtcaaagtggagaacgaccaggagcggttcctga

SEQ ID NO: 292587 - DNA, 90 bp, Homo sapiens
aagtggttggttgcagttgtgtagtagttaagagcattggggagtcagcaatgtccgttgtgttaaatcagctgctgcccatgattaagc

SEQ ID NO: 292588 - DNA, 75 bp, Homo sapiens
ggagccggccgtacgcggtgctgcgagggcagaacctggatgcagacagacatgctgaactatctggaagtccac

SEQ ID NO: 292589 - DNA, 99 bp, Homo sapiens
cagaacccggcccggaccgtgtcgccgacgccaaaggggacagcgagtcggaggaggacgaggacttggaaggtatctcattcagttgctaaacttata

SEQ ID NO: 292590 - DNA, 100 bp, Homo sapiens
gtcactgcagcactggtggaacttgaggaacaaactctagccctcaggaaagaagggattggagttgttttggattctgaactgcctcatttgattggca

SEQ ID NO: 292591 - DNA, 74 bp, Homo sapiens
cgaaatgagactccctcagatccagtgataattgacagctacaagtggaccttctagtgcagttgttcctaata

SEQ ID NO: 292592 - DNA, 75 bp, Homo sapiens
ccctaatacgtacctcattgtgggagctgtcggaaaaggtaacagaagatggaactcgaaatcccaatgaaaaac

SEQ ID NO: 292593 - DNA, 100 bp, Homo sapiens
agatttcatattttgttgcggagttcataatgaataacacaggagaatggataaggcaaaacggaggctggtataaccccgttttcacacgaatggcccc

SEQ ID NO: 292594 - DNA, 83 bp, Homo sapiens
cacaaacaagcaagaggcagagatcccaggtgcaaacctcaatgtggaggtggtataagttgaaatccaaaccaggaaagaag

SEQ ID NO: 292595 - DNA, 74 bp, Homo sapiens
atttgaccaaatttctggaagagtggccacagatgtctttaattccaaaaacctggccgttcaggcacaaaaga

SEQ ID NO: 292596 - DNA, 74 bp, Homo sapiens
gcatcatccacgagttcgacccgtgtgatatcagtatcaagataaaagtttggaatgggagaaaaattctcaaa

SEQ ID NO: 292597 - DNA, 100 bp, Homo sapiens
cggcgcagctgccctgggaggacggcagagcaaggtccgtggtcctgtcagtggaagcccggatagcatgaatgcctctcgacttagccagcctgggcag

SEQ ID NO: 292598 - DNA, 94 bp, Homo sapiens
aagccacttttgaaagtcagatgtctgtgatgaggggtcagttgtcaggagctagacttgctgcccgagaagctcataaccgaagatgtcagcc

SEQ ID NO: 292599 - DNA, 88 bp, Homo sapiens
aaggacatgcgcaaagttctgagaacattacagcagatcaagaaatccagctcaagttgtctttgaagcttggtgatgctggaaaccc

SEQ ID NO: 292600 - DNA, 76 bp, Homo sapiens
ggcggaagcggagagcaacagcgcgccgccctttctaaggcacaaaatgatgtgatggaaatgaagatgcagtcag

SEQ ID NO: 292601 - DNA, 82 bp, Homo sapiens
ctggcgtacatgctggtgtgcatgcagtgggcgtgcctccggagccagcgtggtggccatagacaacaagatcgaacaggcc

SEQ ID NO: 292602 - DNA, 98 bp, Homo sapiens
tgctgcgtacctgcacatcccaccccctcagctctcccctgcccttcactcatggaagtcttcaggtcttgttcagcgttgcgtaatcatccagaaag

SEQ ID NO: 292603 - DNA, 75 bp, Homo sapiens
gaaattttaaagactgttgtgaacagggatgtacctaatgccatcatgcagaagggggatacaaacataaagccc

SEQ ID NO: 292604 - DNA, 90 bp, Homo sapiens
tgtttgtgcaactacaggccaaggagacccccctgacaacatgaaggccaaggcagaggcttcctcaggagaccatcccactgacacaga

SEQ ID NO: 292605 - DNA, 50 bp, Homo sapiens
ttgccatgtgatactccaggacaagggcatgccagaggaacagagagaag

SEQ ID NO: 292606 - DNA, 98 bp, Homo sapiens
ttgaaccgagagtcaccaacagataagaagcagaaagttgagcgcattgcatcacatgattttgaccccacaggtatgcctggactgttgcccagtgt

SEQ ID NO: 292607 - DNA, 100 bp, Homo sapiens
cacgcgtactcggtcaccggagccgaggagcctcatctagttgaatctgaagatgtggacctgctgatgaagagggctgattgtatctaacttagggtct

SEQ ID NO: 292608 - DNA, 83 bp, Homo sapiens
agcacttgtacaccttcacaggacaccgggatgcagtgtcggcggcttacagggagaacacagttggcctccaccgtttctgc

SEQ ID NO: 292609 - DNA, 100 bp, Homo sapiens
gaagccttgaaaaagctgccctgagacggtgtcccgccgaaaggtgctgtgattctcttgggaagaaccaatatgtttcgctttaaccatccaaaggaag

SEQ ID NO: 292610 - DNA, 89 bp, Homo sapiens
ccccaggtcaccgccagcacgcgcctgcttcccgtctgcgcgagtccacgcagctccccagcattccttctgcagcacttgatttattg

SEQ ID NO: 292611 - DNA, 101 bp, Homo sapiens
agcagcacaatcaacgcaaccacagaaacaagtggtacaggccaagatcaaggctcgagatcttcgcgggaagaagaaggaggagctgctgaaacagctgg

SEQ ID NO: 292612 - DNA, 82 bp, Homo sapiens
cacgcgggtctgtcatcatgtcgcgttacgggcggtacggaggaggcatctgcatctgggaccgacctcctgggctggctga

SEQ ID NO: 292613 - DNA, 83 bp, Homo sapiens
cgcagccttgggcctcgcgccggctatggccgtgccctggggctgagccctcagtgcctccggagccagcgtggtggccatag

SEQ ID NO: 292614 - DNA, 82 bp, Homo sapiens
ctaaagcagcgtgcgttcagccctggggtccgcgggagagctgtggggcttggtgagtgtttcgtggcctctcgggttggtc

SEQ ID NO: 292615 - DNA, 82 bp, Homo sapiens
ctctcgtcttctgcggctctcggtgccctctccttttcgtttccggaaacatgcagggtttccaggcctgaggtgcccgccc

SEQ ID NO: 292616 - DNA, 100 bp, Homo sapiens
cctggcttctgatcgcccggaagactaagaggatggatgacatccagctctgcaaggacatcatggacttgaagcaggagctgcagaacttggtcgccat

SEQ ID NO: 292617 - DNA, 100 bp, Homo sapiens
ccgcggccagtgcgggtggctggctttgccattagcgggggcctttcctgaggacggcgtacggagtgtgggtcccgagggctgtaacctgtttatctac

SEQ ID NO: 292618 - DNA, 101 bp, Homo sapiens
gcagtatgccggaagctggttttcaggccacaaatgctttcacaggtagtcgatagtgacaggccagaaaggtccaagttccggctcactggaaagggagt

SEQ ID NO: 292619 - DNA, 100 bp, Homo sapiens
gcagtcccagtcctactgcacagacacagagtgtcttcaggaatgaagagagaagggcacagttacctaagtatcaacgtaatcttcctcggccaggaca

SEQ ID NO: 292620 - DNA, 100 bp, Homo sapiens
ttcagacttgcagaaaaccagtgaagggtgtctcaatgagatcttggagtcagcagatgcacccttagaagtcactgaaggattcattcagtcaatttcc

SEQ ID NO: 292621 - DNA, 75 bp, Homo sapiens
tggtgcctctagtgaaaagaacaagaagtcttaccctcaggtcaaagttgctgcttttgctcagaggacatccat

SEQ ID NO: 292622 - DNA, 100 bp, Homo sapiens
gaaaggaagaggagagattatggttcttgatatggccagaaccatatttatttagagtcagaatggagcgatttgtagtaacagcaccacctgctcgaaa

SEQ ID NO: 292623 - DNA, 83 bp, Homo sapiens
tattcacgcctcttcccaaacgcatctcagcacatgtgtttcccattaaacactaccaggacaaaatcaggccttacatccag

SEQ ID NO: 292624 - DNA, 82 bp, Homo sapiens
gccatgaggcgccagcctgcgaaggtggcggcgctgctgctcgggctgctcttggagtgccctctggtggtcagaagatgct

SEQ ID NO: 292625 - DNA, 83 bp, Homo sapiens
tcaaatgtctctggcaaagatattcagccgttaataaagcagtgggtacgtcaacagtaatgaaggcaagcagaaaaagcgag

SEQ ID NO: 292626 - DNA, 98 bp, Homo sapiens
ttttttgctgatggagagctggaatctatgggattttcagctcgatacaatttcacacctgaacttgatggagagtttggattcattgctttgtgcag

SEQ ID NO: 292627 - DNA, 100 bp, Homo sapiens
cacatccaggaaaagataactttcgacacacctgtagacgttcgccaggtaaaggtgcagtagacattgttgcaatcatgatcggcaatctgaaaggcac

SEQ ID NO: 292628 - DNA, 75 bp, Homo sapiens
cctgcatggagcaagtctgtcagcaccatctttctaacaaaatgcactcggtgatggaaagagagccactattct

SEQ ID NO: 292629 - DNA, 71 bp, Homo sapiens
ccagcactggtcatgtctaaagacttaattcagtgcacaaatgagatgaatgtgaacatcccacagttggc

SEQ ID NO: 292630 - DNA, 100 bp, Homo sapiens
gtcaatgcaaaatcatgctgccgtgttccgtgtgggaagcgtgttgcaagaaggttggcaagttgatcaaagaagctgccgggaaaagcaatctgaagag

SEQ ID NO: 292631 - DNA, 82 bp, Homo sapiens
cttggagtctttgtccaggacgcaaattgtggctactaatttgccccctgaagatcaagatggctctggggatgactctgac

SEQ ID NO: 292632 - DNA, 137 bp, Homo sapiens
gaacaactaactttgaggggtttcttgcaaaacgcttctccggctgcaccctgaccgatgggaccctgtggctgtgacgtgaacagtcccagacaaccaggcgccaatggagaaggagaggaagaggctagagatgg

SEQ ID NO: 292633 - DNA, 100 bp, Homo sapiens
gaactacacccagatcgtggtggaccggacccaggccctggatgggactgtctatgatgtcatgtttgtcagcacaggatattagaaatggctactcccc

SEQ ID NO: 292634 - DNA, 75 bp, Homo sapiens
ttcggcaagaactggattcgtggcgccacaagctcattcactgtgtagaacccttaggagaaatcttgagagtgg

SEQ ID NO: 292635 - DNA, 75 bp, Homo sapiens
ggaggctgctgggcaggtcatgagtcaccatggtatctgtaatgcgtgatgaggataaattactgaggattaaaa

SEQ ID NO: 292636 - DNA, 74 bp, Homo sapiens
ctggttaatagtggcatggaagatccatttggtttttcgttggaatatacgttgcacatttatggcgattctga

SEQ ID NO: 292637 - DNA, 114 bp, Homo sapiens
gggatcgtgaccgagaccgtgaccgagagcgtgaccgagagcgcgaatatcgtcatcgttagaagcctcctgacaaggtgatccgggcgggccccgcaggaattttatcccctc

SEQ ID NO: 292638 - DNA, 100 bp, Homo sapiens
gagctgtagaagaacaacgtagtgtcatcctacatctcttgtcacagcttaagctgggcatggatttaacaagagatgatctgtctgctgtgcgtccgga

SEQ ID NO: 292639 - DNA, 75 bp, Homo sapiens
gaatcttcactcccgctgtctcagcagtctacagcacggttaaacccatccagagtaatggctgcggccttaccc

SEQ ID NO: 292640 - DNA, 100 bp, Homo sapiens
atccagctgttagtcgggtaggcataggtgggtgatggcaccacctcagtgaccttgctggctgcagagtttctgaagcaggtgaaaccctatgtggagg

SEQ ID NO: 292641 - DNA, 74 bp, Homo sapiens
atcgactcggacacagaggacagcggcagcgacgagaacctggatcagtacctccctgcacttggctattcaaa

SEQ ID NO: 292642 - DNA, 80 bp, Homo sapiens
agacctggacgccctggacaagcagcacagctgtgatgcagatccatccgccctagcaaaatatgttctggctttggtaa

SEQ ID NO: 292643 - DNA, 83 bp, Homo sapiens
cccaggcgcgcagctgggcgcctccttcctgcaggccagattttatcatgtgggcaacctgctgcaactggttctgcctggat

SEQ ID NO: 292644 - DNA, 80 bp, Homo sapiens
agaccctggagcctcagttggaagcagccgatccagcctgcggagcctgtggggcagggactggctggcttcgagcaggg

SEQ ID NO: 292645 - DNA, 100 bp, Homo sapiens
acttcatctcctcaacatggaaactaagaatccttgcagcctttcctggaagcctgtagcaactctttattttttcgtacttgctctgtgctgcttcgag

SEQ ID NO: 292646 - DNA, 100 bp, Homo sapiens
attactgcaacgcctacttaaatgctgtgcgctggcaccctcagaacatgcatccactctgggagagcgtggacctggttcctgggggcgatcgccagtc

SEQ ID NO: 292647 - DNA, 98 bp, Homo sapiens
gttggagaggtgttaccggaacggcggcgacaagggtgttcccgaactagagtgggtgaaaagaacggaggggagcccgatgacgctgaactagtaag

SEQ ID NO: 292648 - DNA, 82 bp, Homo sapiens
gtgaagacctccgaaggaccataggtaaggctggcctctctgcagtcagaggtctgagctctgccatggggataggggtgtc

SEQ ID NO: 292649 - DNA, 113 bp, Homo sapiens
ctgagcccagtatgggaaagatctaccttctggaagctactactacgtggtgcttggaaagcattttgaaagcgaagcagaagccgtagaatcagcggcgagcctgttgaaag

SEQ ID NO: 292650 - DNA, 100 bp, Homo sapiens
gtgatcaaggctatgttgcctctgtgttaggccaatgtgtgatgaatgcagactctgctaccattttggctgtttggatcctcctttgaaaaagtctcct

SEQ ID NO: 292651 - DNA, 82 bp, Homo sapiens
tggatatttgcttggaaaaacgtgtgggtacgaccttgtgattccaaatgatatttcaagtaatgctgcaattttaggagga

SEQ ID NO: 292652 - DNA, 90 bp, Homo sapiens
ataagccactgtgcctggccaaattttttgtagcatcagatccaacagttaaaacagatcgactgtggcacgacaagtatactttgagga

SEQ ID NO: 292653 - DNA, 101 bp, Homo sapiens
tggacagctggaggatgaacggagaagccgactgccccacagacctggaaatggccgcccccaaaggccaagacagaagccctgcagcagctgcagaagga

SEQ ID NO: 292654 - DNA, 100 bp, Homo sapiens
gggctgagctagcagtgagcaccttttggcccaatgaatatcaggcaagaaacctattggaattcgagacttaattaatgaagctttgcatcgagaaacg

SEQ ID NO: 292655 - DNA, 75 bp, Homo sapiens
ggcatacctgctggctggatgaaagcagatgagcgtcccactttcaaaattcttctgagcaatattctagatgtc

SEQ ID NO: 292656 - DNA, 116 bp, Homo sapiens
agacaattaggattacaagcgtttcttcaaaatttagtagctcacaaggacattgctaactgataaacaggggtcacatgacgacagaagccaagagggctgcaaagatggaaaag

SEQ ID NO: 292657 - DNA, 83 bp, Homo sapiens
ccgagggctaccacgttctgcggctgtgctccattgaagtgacttgtgaatcagccagtgtgatggctgcgacactggctaat

SEQ ID NO: 292658 - DNA, 98 bp, Homo sapiens
tgcacatcaccaagcagaggaacaagaacgcgctcctccgcctgctgcccgggctgggtgctggagaatctggtaaaagcaccattgtgaagcagatg

SEQ ID NO: 292659 - DNA, 74 bp, Homo sapiens
aaggctgcagtgagccctgtttttgccaccacactccagcctggctctagcctctcggaatttgtcttcttcag

SEQ ID NO: 292660 - DNA, 83 bp, Homo sapiens
cgccgttgcctccgccgccaagagtgagcgagcggacccgcgatggcacacggaccctgactactcggctgcctatgtcgtca

SEQ ID NO: 292661 - DNA, 75 bp, Homo sapiens
ttctcagatgttggatatttgcttggaaaaacgtgtgggtacgaccttgattgtagaaggcatgaaacaaaaaat

SEQ ID NO: 292662 - DNA, 75 bp, Homo sapiens
gaaagggaacacagaaatctggtatgctggtaaaaagggatggtgattgctcacaccaaagccttggacccctcc

SEQ ID NO: 292663 - DNA, 100 bp, Homo sapiens
cctggataaggaacagctacagtcgctgttaaatgtgcctgaaaagcaatttgcaatctttgcattaggaacatggttaatttccgcaatgtagtggatg

SEQ ID NO: 292664 - DNA, 100 bp, Homo sapiens
gcgtgagaacccgcccatgaagccagatttctcccagacgatcctgaagatcctcgtctccgggggcggcaagtcacggacaggtgtgatgatccccatc

SEQ ID NO: 292665 - DNA, 50 bp, Homo sapiens
gagagcagcagccatgccaatgcgatggaccgccgggagagcctgcccac

SEQ ID NO: 292666 - DNA, 100 bp, Homo sapiens
accttgattacctgaggagaagggttgatttcaaacaagataccctgaccataaatgatgaccagtgtttactcctctctgagactgtctggggagctct

SEQ ID NO: 292667 - DNA, 100 bp, Homo sapiens
accctataaatggcaagagcttcagcctcggagatatttattttaagtactgtaccccacgctatagtgagtttgaagagctcgagcggaaatactggaa

SEQ ID NO: 292668 - DNA, 96 bp, Homo sapiens
taatgatgaagaagatccttcaaaattaaaagaggagcagcatggcatttcagtcactggtttgcagagtccagatctacggaatccagaggcagc

SEQ ID NO: 292669 - DNA, 82 bp, Homo sapiens
acgaccaagagggtgttcgactgctagagccgagcgaagcgccctgggaggagcggggacactgaggacctctctccaaatt

SEQ ID NO: 292670 - DNA, 88 bp, Homo sapiens
gcggcgccgccgggctgtggagctgggagtgtccactcgccttccaccagcatggcaacgtcttcacagtaccgccagctgctcagtg

SEQ ID NO: 292671 - DNA, 97 bp, Homo sapiens
gacagcatggatgggctggagacaacagaaacagaaacgattgtggaaacaggtatattgaagcaagtcaaagattacattaaacagtgtagcaaat

SEQ ID NO: 292672 - DNA, 87 bp, Homo sapiens
atttgtgcctcagtggtatgtgcagcagatgaagagagggccagatacttgattctaaagctcgaaaggcctgctatagttcagaat

SEQ ID NO: 292673 - DNA, 101 bp, Homo sapiens
ccgtgaagaccttcaatagcgagtcgcagatatggccagtacactatgaaccaggaaagcaccaccatcaaagttatggagaagcctccatttgatcgatc

SEQ ID NO: 292674 - DNA, 83 bp, Homo sapiens
aggagattaaaattcagcagccttcgaaaaatgagtccctggaacgccagatgcgtgaaatggaagagaactttgccgttgaa

SEQ ID NO: 292675 - DNA, 75 bp, Homo sapiens
cacactgaaacagaagaagcttgaggaaatgactcggactgaacaagagggtattacaagtggataaataatgtg

SEQ ID NO: 292676 - DNA, 102 bp, Homo sapiens
tgtatctcaacaccctgagtgcggatttctgctatgatgacaggtatgactgattttcccaaaatattttgtgaaacttctcagaagttggtgagtgtggaa

SEQ ID NO: 292677 - DNA, 90 bp, Homo sapiens
cgaggacggtcggactcccgcggcgggaggagcctgttcccctgaggaactttatattgctgttggaatatctggagccatccaacattt

SEQ ID NO: 292678 - DNA, 102 bp, Homo sapiens
caccacatgttgtctcttagaagtgggagctgaacggtaatttcatctgtgccaaagcctccagaggacaagccagaagatgtacatacaagtcatccatta

SEQ ID NO: 292679 - DNA, 50 bp, Homo sapiens
caacagctcggcgggctggaaggccgaagaacagttgagaattgttgaag

SEQ ID NO: 292680 - DNA, 75 bp, Homo sapiens
ctcgctttctctcgtggatcttctcgctcctctgcagaaccttggcctgaaaatgctacattatatcagcaattg

SEQ ID NO: 292681 - DNA, 98 bp, Homo sapiens
cgactcctaagtccttcggccgccaccatgtccgcctcggctgtcttcattctggacgttaagggcaaggccattgagaaactagtcgctcttctcaa

SEQ ID NO: 292682 - DNA, 137 bp, Homo sapiens
tacgcctgcaccaagtgtacccagcgttatcctttcgaggagctctcccagggccagcagctctgcaaggatcaacactctgtggtaggccagaacacaggccccagtccaagtcctaacccctgctcaaatccaaa

SEQ ID NO: 292683 - DNA, 75 bp, Homo sapiens
gctgagcgtgcagcaggatttcacctccggacacgagacgacttcctgggccaggtggacgtgccccttagtcac

SEQ ID NO: 292684 - DNA, 74 bp, Homo sapiens
ccgtatcaagccaagaacagcccaatctcctttctgggcaaacgttccaagttagttgaatccatggacatgaa

SEQ ID NO: 292685 - DNA, 98 bp, Homo sapiens
agccaagctcatctctgagacccggaggaggttcgaagctgagtatgtgacagatgggaatttcttagccataggctcacatgacaactgcatctata

SEQ ID NO: 292686 - DNA, 90 bp, Homo sapiens
ctgagccagagcccacagaagcatggaagatgctgctgcagattgctgatgattttatcgagagtgtggtgacagcagcctgtcagcttg

SEQ ID NO: 292687 - DNA, 98 bp, Homo sapiens
aagaactattgaagacctagatgaaaatcagctgaaagatgagttttttaaacttctgcagacgttggaacttgccaggaatccagcaatgatgcagg

SEQ ID NO: 292688 - DNA, 50 bp, Homo sapiens
ctgccagctttcgccacaggaggtagcggggactcatctctggagaagga

SEQ ID NO: 292689 - DNA, 98 bp, Homo sapiens
ttttaatcagtgactcaaagctgtgatcaccctgatgtcaccgaatggccacagcttgtaaaagaattcccatttgcagaaaccctatgagattaacc

SEQ ID NO: 292690 - DNA, 83 bp, Homo sapiens
caggccctcgttgcccagatacacagaatgttcagcttaacaaagaaatgacacttgccagcaaccggagcctggcagaagga

SEQ ID NO: 292691 - DNA, 74 bp, Homo sapiens
taagagaagttgttaccgaacatctcataaataagatcctgtggtattgtggaaattcccagaggactttggag

SEQ ID NO: 292692 - DNA, 100 bp, Homo sapiens
gaaaagcagttgctcgaagaactcgagcgacagagacaagctgagcttgccgcacaaaaagctagagagctaatcacatatggctctgatagaactgagg

SEQ ID NO: 292693 - DNA, 75 bp, Homo sapiens
cagtgcttttggagctgcagcagcacctcctttcagagctgagagaatatacagagggtctcacggaagccaagg

SEQ ID NO: 292694 - DNA, 90 bp, Homo sapiens
agcgggcgggcgggcaagccagacagctgggccggagcagccgcgggcgcccgaggggccgagcgaggtgaaagaaatcacccgtgatat

SEQ ID NO: 292695 - DNA, 75 bp, Homo sapiens
gaagtagtaaaaccagctgcagtgttatcaaagatttcggtaccaggaccacacatttttaaagatgctcctcac

SEQ ID NO: 292696 - DNA, 82 bp, Homo sapiens
gctgacaatgatgaatctcaaactgtaagagtaaatgggtccagtaattggaatgactccagataagagagctgaaacccca

SEQ ID NO: 292697 - DNA, 90 bp, Homo sapiens
ccacctacgtcctccaggaggcatctcacaacgtccccaaccagagttccgagtcacttgctgatgggcttccccaaggatttattgaca

SEQ ID NO: 292698 - DNA, 101 bp, Homo sapiens
caaaaagctggccgaggagcagcaaaagcagtacaaggtgcacctggacctctgggttaaggtgctggaggcgctgctgccgctgaagggcctagaggagc

SEQ ID NO: 292699 - DNA, 50 bp, Homo sapiens
ctcccagtgggcccagtgtgtggtgtactaatggtcacttgatgtgcgct

SEQ ID NO: 292700 - DNA, 74 bp, Homo sapiens
tgggggcaagcaagctgtcttctttgttggacaatcagccagaggtggacggcacgtggattatgtggtagatc

SEQ ID NO: 292701 - DNA, 83 bp, Homo sapiens
ctcgacccagggcccgcgggccaggagagcgctcggcggaacatccagtcatggataaaaatgagctggttcagaaggccaaa

SEQ ID NO: 292702 - DNA, 97 bp, Homo sapiens
cgaaggtggcggcgctgctgctcgggctgctcttggaggatttgaagcctagcaacattgttgtgaaatcagactgcaccctgaagatccttgactt

SEQ ID NO: 292703 - DNA, 82 bp, Homo sapiens
gctgcttcaatgtccgcatcgcaaccaccgccctggccatctaccatgtgtctgcagtggtggtggtggcagctcggccact

SEQ ID NO: 292704 - DNA, 100 bp, Homo sapiens
ctcagtgaaaccttgtatgagctgctgcagctgggctgggaagaggctaggcgacgtggtttcagatacgaaaaggactattgctgggaatattttctgt

SEQ ID NO: 292705 - DNA, 80 bp, Homo sapiens
tctgtcacctccatgggaccaggaccgtaggatgatgtttcctccgccaggtctttcatggtgctgattcagacatagaa

SEQ ID NO: 292706 - DNA, 100 bp, Homo sapiens
tgcgacgctgccccacggccgttttcatggctgcttaaaatggtctatggtctgtctctgtgctggagaatctggtaaaagcaccattgtgaagcagatg

SEQ ID NO: 292707 - DNA, 98 bp, Homo sapiens
tgcagcctcggtggccccgacatgattccttacttctccgccaacgcggtcatctcgcagaacgccatcaaccagctcggctatgtgactacgtttgt

SEQ ID NO: 292708 - DNA, 96 bp, Homo sapiens
gggatgatcatgaagagttagcctggcctggcataatggggagacccaaaggagtaaaggagcaagatgtgtacatctgtgattatcggcttgaca

SEQ ID NO: 292709 - DNA, 100 bp, Homo sapiens
acaatcccgggcatgggcggcaactctttgatgtactactataatgggaaagcgttgctcctactattcaggaaattaaatctggcaccgtgacccccgg

SEQ ID NO: 292710 - DNA, 51 bp, Homo sapiens
cccatctcaggagcacctgaatgcccgatctgctcaacttcaagaagggat

SEQ ID NO: 292711 - DNA, 51 bp, Homo sapiens
cccaccgtgcagcggggcatcatcaagatgtttcactctttttgcccagcc

SEQ ID NO: 292712 - DNA, 100 bp, Homo sapiens
tcattgttgtgtatgagaagaggaagaggccagatgaggttcctgacgattacgtgtgaaaatgaacttgtgcaaacccaaccccatgctgataatccat

SEQ ID NO: 292713 - DNA, 100 bp, Homo sapiens
cctttctaattaatggctacacttcgatggacctgttgaaaaaaatctgggaggttgaacttattaatcctgaagttctggatcaaatacaaaatttgag

SEQ ID NO: 292714 - DNA, 100 bp, Homo sapiens
cgggccgtcaccctgcctcccctgcgtcccgccaccggccgcttctgtcctcgagctagagccggtgcaggccacgcagaacaagacagggaagtatgtg

SEQ ID NO: 292715 - DNA, 100 bp, Homo sapiens
gggaccagagatggacggtcactcagcctatggagagttttgcggcctccaggtggtggatccaatttttcattaggttttgatgaaccaacagaacaac

SEQ ID NO: 292716 - DNA, 110 bp, Homo sapiens
cagaagtgacggctttagacctgactgatctctctaggagctgacactcgaaccttcacgacccattcggatttttccaggactcaggagtggcactgggaagaagggga

SEQ ID NO: 292717 - DNA, 74 bp, Homo sapiens
agacgcagccgtagacaccagctccgaaatcaccaccaaggctgttttggagtcagcggaagatcaccaaggcc

SEQ ID NO: 292718 - DNA, 90 bp, Homo sapiens
tcgacttgtacaccgaagaacggccgcgtgaagatgctgtggacaattatcgagatagactaacagaataccccttctacacacccagct

SEQ ID NO: 292719 - DNA, 75 bp, Homo sapiens
ttgccatgaggaaagaattctccgagctccataatgggagaagtaaagaacaaagacttaaggaacagcttggcg

SEQ ID NO: 292720 - DNA, 100 bp, Homo sapiens
gccgcggctacgctgaggctctccgctcaggttacttcttgctgcagattctgcgcaggatcggagctgtgggccaggctgtgtccaggacggcgtggtc

SEQ ID NO: 292721 - DNA, 100 bp, Homo sapiens
gcgggtgctgctgcccctcgcccacttcttcctgagccacggcattgctaccatttatgttcgttataagcaagttcatgctctgagtcctgaagagaac

SEQ ID NO: 292722 - DNA, 101 bp, Homo sapiens
ctctcgctagggggtcgacgtagtgtcggacccggaagtggctttgggtcacgaggcttcacggaggagagttgcatgctgagaatttgaaaaatgaagat

SEQ ID NO: 292723 - DNA, 101 bp, Homo sapiens
caagggctgcacggtggaggagctgctccgcgggtgcatcgaagccttcggttctgctccagacgagcccttaccacgttgactcactcctgcagctcagc

SEQ ID NO: 292724 - DNA, 122 bp, Homo sapiens
tgtaaagtctgctttgtggcactcatccagtccttcagccactacagtatcgtgggacagaagctgatgctcccataatactctcagatagtgaagaagaagaaatgatcattttggaacca

SEQ ID NO: 292725 - DNA, 95 bp, Homo sapiens
gaacaatcacgacagcgtactacagaggagccatggtgcgagacaagaagcttctcaatgacctgaatggagccgtggaggatgcaaagacggcc

SEQ ID NO: 292726 - DNA, 74 bp, Homo sapiens
gggagatcccaggcggtgacagagtggagccatggctagagggagcatcgagtacagctgtccggcctccaacg

SEQ ID NO: 292727 - DNA, 89 bp, Homo sapiens
tctgcggaagtgcagctgcctcagttcttagcgcagccactgtagtctgcagatcaaagctctggcgaaaatccatgcctttgttcaag

SEQ ID NO: 292728 - DNA, 100 bp, Homo sapiens
gaccagttctgcaaggagcacggtttcgtaggatggtttgaaacatcagcaaaggtgcaaacagctgcacagcaagtggcagaggataaatttgtttttg

SEQ ID NO: 292729 - DNA, 51 bp, Homo sapiens
caagctcatccggctggtaaatgcgcaggccttaaaggtaaagctggagat

SEQ ID NO: 292730 - DNA, 90 bp, Homo sapiens
gggatgaagaagaggaggaatggcatttgaaaaatgctattagagtagatggaaaggaccctgatgctcccataagacagaaaatgcccc

SEQ ID NO: 292731 - DNA, 50 bp, Homo sapiens
agactcctgctcagtgtagcattaagatcgtcagtatttaaacagatcac

SEQ ID NO: 292732 - DNA, 71 bp, Homo sapiens
ctctgagatatgccgtttacgggattaaactgcaaatatctcatgaagctgctgcctgtatcactggtctc

SEQ ID NO: 292733 - DNA, 75 bp, Homo sapiens
gcagcggcggcccaggccagcattcccgcacttcgcctcaacagcatcaagaagctgtccaccatcgccttggcc

SEQ ID NO: 292734 - DNA, 100 bp, Homo sapiens
tgagtgcagctggctcgataactgtgcaacttacatcatctgaattggagtccacacttgaaacactaaaagctgaaaatcaacctataagagatgtcct

SEQ ID NO: 292735 - DNA, 90 bp, Homo sapiens
tcctaatgctcccaaaaggccaccgagccagatgaccaagatgctccagatgaacatgagtcgcctccacctgaagatgccccattgtac

SEQ ID NO: 292736 - DNA, 75 bp, Homo sapiens
gaaagatatcagcaccttggaacctttggcaggagtagggctgattggagccattgtacagtgtcgggaacatac

SEQ ID NO: 292737 - DNA, 100 bp, Homo sapiens
aaacatctggtggttcactcaggtccaggggcaagttcatcctactctcgagtctaatgatgatgctcttcagtatgttgaagaattaattttgcaatta

SEQ ID NO: 292738 - DNA, 100 bp, Homo sapiens
cactctttgtaaggaggatttagagagtatggacaaagagctttcttcgggaagtatcttaatgaatacaacggctcctacgtgccacccggctggaagg

SEQ ID NO: 292739 - DNA, 96 bp, Homo sapiens
ttttcaagtggcttcgattaagaactgtacacccaatattgttggtgattcgttggaaaaattcattgtctctagagattgtcagcttggtccaca

SEQ ID NO: 292740 - DNA, 100 bp, Homo sapiens
catggaggagaaggtccgcttcaaaatagcctaacatggcagaccagagacagcgctcactgtctacctctggggagtcattgtaccacgtccttgggtt

SEQ ID NO: 292741 - DNA, 90 bp, Homo sapiens
gtgggagtttgccgcccgagggggcttgaaggcacttttccttgttgacaatcaccacgaggtgtacctctggcaaggctggtggcccat

SEQ ID NO: 292742 - DNA, 51 bp, Homo sapiens
gcagagtcggggctttggcagcttcaggtttgcaccttctgctccatctcc

SEQ ID NO: 292743 - DNA, 90 bp, Homo sapiens
agcgaccgagggactgggagtcgttagtgaggcgcctagatgccaacctcatctccctggtcccggagaggagctttgaggggctgtcct

SEQ ID NO: 292744 - DNA, 100 bp, Homo sapiens
tccgcctggctgcactgcgtgtgtgtggtgggcttcgacctggagctgggccaggccgtggagattggccatctgcaagcttcccttctccgtggagagc

SEQ ID NO: 292745 - DNA, 88 bp, Homo sapiens
aacagtgtaccagcagggcgttggctatgtgcccatcacagaactgaagcaggcccagaccctgatgagctccctgggctgaggagaa

SEQ ID NO: 292746 - DNA, 114 bp, Homo sapiens
gcttgaggaagcaggcagggaaatgtctgccgccgccggctctcgggagcgcaacactgcagggttctctccccttgccaccatgagcgagtcatttgactgtgcaaaatgcaa

SEQ ID NO: 292747 - DNA, 100 bp, Homo sapiens
acatgagagagacagagaagactttaacagaactcaacaaatgctgtggcctttgtgtctgcccatgtaatagaaaagaatggtttgtcattcattgaaa

SEQ ID NO: 292748 - DNA, 75 bp, Homo sapiens
ctgactcctacttcctctgtatagagcaactgttgaactcagctgcctgtaggttacaggaaatacaggaggcag

SEQ ID NO: 292749 - DNA, 100 bp, Homo sapiens
gaaaatcaagacttgtccagttacagctttcagcagaggccaaggcagcattgcttgaatttgaagaaagggagcgacagcataaacaaggacgctacag

SEQ ID NO: 292750 - DNA, 90 bp, Homo sapiens
gctcttgctcctctctccttggcctctcctgggatcggcccaaggccagttctccgcaggatctttcgaagatggtttggctgccttgga

SEQ ID NO: 292751 - DNA, 100 bp, Homo sapiens
aacaattgctgcacgaaacactgaaattttggcaggtatcatctttatcagaaagtgaggagtcccaggactcatccgacagcataggctcctcacagaa

SEQ ID NO: 292752 - DNA, 82 bp, Homo sapiens
gtctaggggagcgaaggctgaggtggcagcggcaggagagtccggccgcgacaggacggtcgcaatggaagaagagatcgcc

SEQ ID NO: 292753 - DNA, 97 bp, Homo sapiens
aaaatagtgatagctttgataagcagattttgacaacaaaccagtaaatggccccaagtcagaatccatggactacagtagatgtggtcatggggaa

SEQ ID NO: 292754 - DNA, 50 bp, Homo sapiens
gacaagatggtctttaagacagatgccatggctagtccagggaaagataa

SEQ ID NO: 292755 - DNA, 75 bp, Homo sapiens
tgcctctgagaacttacgcagatcagccgagtgtgatgaatgcagactctgctaccattttggctgtttggatcc

SEQ ID NO: 292756 - DNA, 99 bp, Homo sapiens
gagacaactggcagctgtcttcctttgcaaaacgagactgttaataaaacctaccccagggtaggacggactgttcgggtgtcaaattgagaaccaggt

SEQ ID NO: 292757 - DNA, 83 bp, Homo sapiens
cgcgacagcagcagccatggaggacgagatgcccaagactctccctgggcgctgcctatggcacagccaagagcggtaccggc

SEQ ID NO: 292758 - DNA, 136 bp, Homo sapiens
tgaaaaagcagagcgactcggttaagggaaagcgccgagatgacgggctttctgctgccgcccgcaagcagaggaagatgttaccgagtacttcagtgaattccttagtgcaggggaacggagtcttgaattccag

SEQ ID NO: 292759 - DNA, 98 bp, Homo sapiens
ggaggcctccatcgacatcctccactccatcggagttgccgtgtggctcctctcatccagtgtgactattgccctctcctgtttcacatggattgcct

SEQ ID NO: 292760 - DNA, 83 bp, Homo sapiens
gctcaacaaggagctgggctgcatcaactcgatgatgaagatgaggaggcgcctgggccctcaaggcagcctcttcgggtgcc

SEQ ID NO: 292761 - DNA, 88 bp, Homo sapiens
gaggaaggagaattcaaccttttttgataagaaattgagatgctaccagatgggctgtttcagtgcaaaaagctgcagtgtttacttt

SEQ ID NO: 292762 - DNA, 100 bp, Homo sapiens
agtactgtccaaatgaattatgtcagcaacgtatccaaggtggtatcacggaaaacttgacagaacgatagcagaagaacgcctcaggcaggcagggaag

SEQ ID NO: 292763 - DNA, 97 bp, Homo sapiens
acaatggctctttagagagttatctgagtggctgctgtgaggtttcagtgagataacggcaagagactcgcccaggaaaccgatcattataacccct

SEQ ID NO: 292764 - DNA, 99 bp, Homo sapiens
aacggagaatggaactgtatgccagcagcttgttgtacaacaccattcgcttttcacccaagatgatttgatgtcttataaaactctgatgaaccatga

SEQ ID NO: 292765 - DNA, 100 bp, Homo sapiens
tcgtcctcatcctggtcactagcggactcttcttcgccttcgaagcagtcattatggcgaaccttggctgctggatgctggttctctttgtggccacatg

SEQ ID NO: 292766 - DNA, 95 bp, Homo sapiens
caaatggagctcagaaagctgtatggacctctgtgtggatgaggaaactgaggcttggtgaagttacgaaacttgtccaaaatcacacaacttgt

SEQ ID NO: 292767 - DNA, 82 bp, Homo sapiens
acatatttttggacctgaaacagaaattctggaacacctatatgtttctccttggaccaagatgactgatggaaaactctcc

SEQ ID NO: 292768 - DNA, 75 bp, Homo sapiens
cctagtgtcagcagattcagcggtactggtgtataataggtgctggagaatctggtaaaagcaccattgtgaagc

SEQ ID NO: 292769 - DNA, 100 bp, Homo sapiens
tcagtcacgaagaacaaaattatccagctttgcttggacctgaccactacagtccagaaggttttttgaggaacaggcgttattttgttttcatgacatc

SEQ ID NO: 292770 - DNA, 100 bp, Homo sapiens
ccctctgggggtcctctctgagtcaaatccagtgccttgcccctcttgctcgccttgaaaatggaaaagatgctcgcaggctgctttctgctgatcctcg

SEQ ID NO: 292771 - DNA, 100 bp, Homo sapiens
tagtgaagttcctcaattgaagcaagagatttctgaatgcgggagatacagatgacccaccaagaattactcagaaccctgtgatcaatgggaatgtggc

SEQ ID NO: 292772 - DNA, 83 bp, Homo sapiens
ccgcgggagagtgtgcagccgagtcactactgcctgcctgcctgcctgctacggagaagtccttgtgttcctggacagccact

SEQ ID NO: 292773 - DNA, 100 bp, Homo sapiens
gaaggagttcatgagtgctataagatgcgactgctacagggaccatgggacactattacgcaacaggttgactatagtcaatggggccaatggagccaag

SEQ ID NO: 292774 - DNA, 100 bp, Homo sapiens
cggacaacgagaaactggacaaccaacggctcaagaatttcaagaacaaaggccgcgacttggaggatgctggaaaaggctgatcctcacctcgagttcc

SEQ ID NO: 292775 - DNA, 83 bp, Homo sapiens
ggcgctccttcccgctccctcacacaccggcctcagcccgcaccgaggctgtggccaggccagctgggctcggggagcgccag

SEQ ID NO: 292776 - DNA, 88 bp, Homo sapiens
gtttgtgccagctctccagagagaaaaggtcccgcggcagtgctggtggccatggttcccgtagccagaaggagttgcccacagagcc

SEQ ID NO: 292777 - DNA, 75 bp, Homo sapiens
cggcattcacctctcaggctgtagggtttgaaattcctgatatagatgctgaaaagttaatgtgtccacaagaaa

SEQ ID NO: 292778 - DNA, 83 bp, Homo sapiens
gtgaagagagcgactcttcatccatcagtagtcatagctctgcctcagggccatcgatgcacccctcggagctaatagcggag

SEQ ID NO: 292779 - DNA, 81 bp, Homo sapiens
agtgcgtcaatcagagcgtcctgtgcggaatactcccccagttgcaagaggcgcaggaccgtggaagacttcaacaaattc

SEQ ID NO: 292780 - DNA, 100 bp, Homo sapiens
tggggtgtgagaacttgatcagtttgtgtcagccaccttgttctctaaagttgctatagcccaaggtggaacaatccagatttctaacccaggatctgat

SEQ ID NO: 292781 - DNA, 82 bp, Homo sapiens
ttcttatgagagtgaaggacctgaaaatcatatagagaaagacagatggaagtctttaagggccggtgcataaacttctccc

SEQ ID NO: 292782 - DNA, 75 bp, Homo sapiens
ccatgcagctattaaccagtgtcagatcattataaacctgcaatttcccatcgagatttaaacagcagaaatgtc

SEQ ID NO: 292783 - DNA, 100 bp, Homo sapiens
gcgggacaagaaaattcatgcggattagctatggaccctgcttctggagcaaaactcagacaaggatttagtaaatcttctaaaaaagattaactcctag

SEQ ID NO: 292784 - DNA, 98 bp, Homo sapiens
agaacctcacagaagaccagaagttcaaaatgctactattgagtttatggctccttcagaatacatgagtcagagctgacaaatttggcaggattata

SEQ ID NO: 292785 - DNA, 86 bp, Homo sapiens
cttgattccagggcctgccctgctcctggtggcacccagtggcctgtactactgcaattctgtggtgttcttggtcacacatttat

SEQ ID NO: 292786 - DNA, 90 bp, Homo sapiens
gcgtgatgttgggcggccacagagagattggtgtttttgtgaggcagtgagacctaagtggtggtgaccgcggtggcttcaaaaattttg

SEQ ID NO: 292787 - DNA, 101 bp, Homo sapiens
gcctgagcgactcgagtcagggaagggcaagtgtccgtacgatcccaagctggacacagcatcggccctcatcacaatggctgccatccggaagaaactgg

SEQ ID NO: 292788 - DNA, 90 bp, Homo sapiens
gacacatggaaattggactaaattaccagaatgcagggattgctgatctcctttgcaagtgaccgtgacacatatttgtggattggatat

SEQ ID NO: 292789 - DNA, 90 bp, Homo sapiens
ctgcctccggtctccggtactggagccggcggctgcggccggcagccggcagctttgcagcgggacctggtgtcaaagatgcttcatgta

SEQ ID NO: 292790 - DNA, 101 bp, Homo sapiens
ctcacacatgtatgatactaccaactacaaaagctattggttaggaagagagaagggcacagttacctaagtatcaacgtaatcttcctcggccaggacag

SEQ ID NO: 292791 - DNA, 98 bp, Homo sapiens
tcaggtggcaaaaacattgaacttgctgtcatgaggcgagatcaatccctcaagtttcagaaagtgctttctctctgtggacatgaggattggattag

SEQ ID NO: 292792 - DNA, 100 bp, Homo sapiens
gaacttagcagcagctccactgaacagataagggtggactgtgcattgtcacttattcgacttgggatggagcggaatattcctggtttgctggttctct

SEQ ID NO: 292793 - DNA, 100 bp, Homo sapiens
gagtacatcgtgcagcagtgcgcgctgccccccgagcaggagctcacctgttctccaggaccagccctgctggggcccaggcccaggctctgagaggccg

SEQ ID NO: 292794 - DNA, 50 bp, Homo sapiens
caagtccaagactccagagatgtacaatcggctgctgcaggtgatcacac

SEQ ID NO: 292795 - DNA, 90 bp, Homo sapiens
acacgttctcacctcgcgggatggcagctgctgatttgtcccatggtggacattgaagtggacctaattcggttttccttttaaaagccc

SEQ ID NO: 292796 - DNA, 97 bp, Homo sapiens
tctttgtgtcctgagatcaaatggcacttcattggccacctacagaaacaaaatgtcaacaaattgatggatgctttgctgactaatgttgaccaga

SEQ ID NO: 292797 - DNA, 101 bp, Homo sapiens
tcctgcgggtgcctttgaaaatcaacgacaacttgagcacaggaatcagtttagacttgaaattcagtttttcctgaaactgatcagaagttagtgacacc

SEQ ID NO: 292798 - DNA, 100 bp, Homo sapiens
tcttgctgcagcttgcttcctccctcaggtatgaagttaagggctagttgcacatagtgatttagatgaaagagctattgaagctttaaaagaattcaat

SEQ ID NO: 292799 - DNA, 75 bp, Homo sapiens
ctaaccaacaggcacgacaagtttctggacactctccgagaggtgaagtcatctggggacctggagaatgatgag

SEQ ID NO: 292800 - DNA, 96 bp, Homo sapiens
cctgctgccccccaccctggttcatgatcacagtcacgctgctggagtttcagctccagaatttgtttttgaacatggctatcaaacttacctgcc

SEQ ID NO: 292801 - DNA, 83 bp, Homo sapiens
cccagaggactttcttccagcttctgctgtccttctttgtggagagcaagtgccggatggagtgctgtgatgtgccagccgag

SEQ ID NO: 292802 - DNA, 74 bp, Homo sapiens
tttgtcagctcccgcacagtaacgagcaactggactctccggattgaccaagttcatcctgggctccattgggt

SEQ ID NO: 292803 - DNA, 75 bp, Homo sapiens
cgctctgaccaccgtgatgagcccctgtggaggtgaagacattgtggggccaccatctgtgcaagtagccaaaac

SEQ ID NO: 292804 - DNA, 82 bp, Homo sapiens
agccccctgctccggaggctggtgcagtttggtgccctggttgtcagatgttggaaagcagtaggacggaacatactcttcg

SEQ ID NO: 292805 - DNA, 99 bp, Homo sapiens
ccacctgtttattgctgcatttgtgggggctgcagctacactggtttccctgtctctggatggtcgtcagatccgtgtggatcatgcaggcaagtctgc

SEQ ID NO: 292806 - DNA, 121 bp, Homo sapiens
caaaagccaagaggaggacagttcgctacacagcaatgcatcgagagatgcccgagtggtaaaagacatggcaacaggaaagtctaagggatatggctttgtctcctttttcaacaaatgg

SEQ ID NO: 292807 - DNA, 82 bp, Homo sapiens
gtgccctacttcaaggataagggcgacagcaacagctctgccggctggaagcagcctcccgcgacgatgcccctcaacgtta

SEQ ID NO: 292808 - DNA, 100 bp, Homo sapiens
ctggagccgtcatctttaacttccccgggacccgcaatgaggtcatccccatgtctcacccgggtgccgtgagcgatgtggagatgcaggaacactatga

SEQ ID NO: 292809 - DNA, 83 bp, Homo sapiens
aagaaactcttcgactacttcaaccaggaggttttccgagacaacaacggcaccgcggaccctgatgcttggtgtgacctgag

SEQ ID NO: 292810 - DNA, 83 bp, Homo sapiens
gtccccggcgcgaagaggctggactcggattcgttgcctgagctcacaggaggcaaagagtccgaaggtggagctgcacagcc

SEQ ID NO: 292811 - DNA, 74 bp, Homo sapiens
aaaaaaactggctgtgaataatatagctggtattgaagaggtctattgaatgatggaactgtgggtatttttag

SEQ ID NO: 292812 - DNA, 101 bp, Homo sapiens
aggcccacggaggaagagccgggcagtccctggagcgggccagactagacgcttgaagcaaagctgccatcccagaagacgacatgctctcagcaaccccc

SEQ ID NO: 292813 - DNA, 50 bp, Homo sapiens
aggaagatgttgctgggcacccagatgccacttcaaatgaacaacaagag

SEQ ID NO: 292814 - DNA, 100 bp, Homo sapiens
ggggggcgccgcacgccagcgaccaggtgctggggcccggagtcacctacgtggtcaaggtccttttggaataaatcatgggattgagcttcattcagat

SEQ ID NO: 292815 - DNA, 90 bp, Homo sapiens
cttccaaagctgggaatcctattttttattatgttgcacggagaaccaacttcttcttaaaacagggaagaagacatgaatccaaagata

SEQ ID NO: 292816 - DNA, 75 bp, Homo sapiens
aagaagatcatcattaaggacggaggcacgggtgatgatgatgcttatctgtgtattcatgaagatcagactgtg

SEQ ID NO: 292817 - DNA, 75 bp, Homo sapiens
atgttagcttgacctatgcagatcttattccaggccctgggaggagcggggacactgaggacctctctccaaatt

SEQ ID NO: 292818 - DNA, 50 bp, Homo sapiens
ctcatggaggctgagcatttattcaggctttcatgagaaggacaagaagc

SEQ ID NO: 292819 - DNA, 75 bp, Homo sapiens
gagtggagtctttggctggctatgcagacatctttctgcttccagtggtgtctgtagtgagagaaacagagtccc

SEQ ID NO: 292820 - DNA, 82 bp, Homo sapiens
ggcctcacactagtatcgcatgtccactatccagaacctccaatctttcgtggactaaagaggatggacatagaacttccac

SEQ ID NO: 292821 - DNA, 82 bp, Homo sapiens
cgggggcaaggccaaaaagaagataacaaagctgcagctcttttgatgctgaccaagaatgtggattttgtgaaggatgcac

SEQ ID NO: 292822 - DNA, 100 bp, Homo sapiens
ccggatggaagaaggaggaagtgatccgaaaatctgggctaagtgctggcaagagcgatgtctactacttcagaattatatccagatcgagagacagaag

SEQ ID NO: 292823 - DNA, 75 bp, Homo sapiens
cagcatcgtaggggtcagtgtcctcaccatgcccttctgcttcaaacaggtcaaagttggaaattgtaatactcc

SEQ ID NO: 292824 - DNA, 97 bp, Homo sapiens
ccctgtcaaagcaagagatggctagtgcttcatccagccaaagaggcagaagatagtttacgaagagaaaagaacctggaagaagcaaagaagatta

SEQ ID NO: 292825 - DNA, 75 bp, Homo sapiens
agaaggaagagagctcagccacaatctactgctccatacggaaacctcagcacaccacacaaatgagtgatgagg

SEQ ID NO: 292826 - DNA, 85 bp, Homo sapiens
cttatctgacccccaaagatgatgaattctatcagcaggtggcatcccgttcatcttgactggtgagttcttccagcaatctcag

SEQ ID NO: 292827 - DNA, 75 bp, Homo sapiens
cagcaggctccgggctgaagattgcttctcttctctcctccaaggtgccgacttcctggtgacggaggtggaaaa

SEQ ID NO: 292828 - DNA, 97 bp, Homo sapiens
ggatatcgacgtcgtgatccagaagtccagagctgaggactgcctgtttgcaggagcagtatagcatcaagttctagaggaattgggagccattgca

SEQ ID NO: 292829 - DNA, 100 bp, Homo sapiens
ggagtcaatatctgcttaggattcactgcacatcgaattaagagagcagaaggatgggaggaaggtcctcctacagtttgctaatccagactttacacaa

SEQ ID NO: 292830 - DNA, 101 bp, Homo sapiens
cacaaggcagtcctagcagcatgcagtgactatttccgggttgaaaggattgttgacaaaaggaaaaataaaaaagggaagacagagtatttggttcggtg

SEQ ID NO: 292831 - DNA, 83 bp, Homo sapiens
caggattcatgctctacatccccatagagatcacctcagccagttctcagacacttaggggacatgttctctgcaggaccact

SEQ ID NO: 292832 - DNA, 100 bp, Homo sapiens
gccgaagacagtggtgaggagggcgcccctgaacctgcaccaggagaggcagatgcgaaccagaacaatgggacctcctctcaggacacagcggtgactg

SEQ ID NO: 292833 - DNA, 90 bp, Homo sapiens
cgaggagaacgtcccgctggatctgacccgagtgtttgggaaatgggaagtaatgacagctggcacctgaactaagtacttttataggca

SEQ ID NO: 292834 - DNA, 100 bp, Homo sapiens
tgcgcttcaagtactacagcttcttcgatttggatcccaaggtgccatacacagaggctgcctctttgtctactggttctactgtgacaatcaaagggcg

SEQ ID NO: 292835 - DNA, 90 bp, Homo sapiens
ccgctgcatacaaatcaggcaaccagaattctacatatataaggcccagtactacggggagattggcatcgggacgcccccccagtgctt

SEQ ID NO: 292836 - DNA, 100 bp, Homo sapiens
ctgaaatgctcactcattaaacgatgacgattgacagtgactgcaaagatctgctgatttgggtcctactttaatgacaagacctggacaaccagcactt

SEQ ID NO: 292837 - DNA, 138 bp, Homo sapiens
tgtgttttctgcaggcagggctttcttgagcgggctaccctcaagaagcatatgctcctggcacaccaccagatctacggaatccagaggcagcattgtctccaaccttccgtagtgacagcccagtgcctactgcac

SEQ ID NO: 292838 - DNA, 100 bp, Homo sapiens
cacacccactactccgctgactgggagggatggtagcctggccagcaacccttattctgaggctcggggtggtctgggggcccctccgctgcagtctgcc

SEQ ID NO: 292839 - DNA, 99 bp, Homo sapiens
gctggatccgtgggtcagagaacacaggaccagtttgccatcccaaggccgaagggaaaactgaggctgccatcaaaaacttcagtccctactacagtc

SEQ ID NO: 292840 - DNA, 50 bp, Homo sapiens
cagcccctctccagctcgaaatcatgagaaccacagtgctacagcagagt

SEQ ID NO: 292841 - DNA, 111 bp, Homo sapiens
catctgctatcgaaattttaaaaatcccttaccttgatgagcagctacagcctcccgagcacaacaaggagaggtgatgaggttggcatgtcgtttggatcccaaaactag

SEQ ID NO: 292842 - DNA, 83 bp, Homo sapiens
atgccgctcctaagcctgcacagccgcggcggcagcagcagtgagagcggaatcggacatgtccaaaccaccgtgttacgaag

SEQ ID NO: 292843 - DNA, 100 bp, Homo sapiens
ggtgctgggcgacctgcaggcagcaccggaggcccaggtctccgtgcagcccaacttccagcaggacaagatggaggtgcagcgccggccctggttagtg

SEQ ID NO: 292844 - DNA, 100 bp, Homo sapiens
gagacccggaggaggttcgaagctgagtatgtgacaggcacctgacttggactctgaagctgctgcagttcctgtaccaccgtgatgaggatcagctgcc

SEQ ID NO: 292845 - DNA, 75 bp, Homo sapiens
cgacgccgacgccacggagtcagcacaagtctcatcagagaacgtgactgtcattcctaaccaggtgtatcagcc

SEQ ID NO: 292846 - DNA, 100 bp, Homo sapiens
ttccagtcccctgaggtgatggcagcacctggccacattcatcatggacaagagcgaagccatcacgtctgtggacgacgccatccggaagctggtgcag

SEQ ID NO: 292847 - DNA, 75 bp, Homo sapiens
ccggagccggcgtggcgctcatcgagggacgcccggcccaagtgcagcctcccgcgacgatgcccctcaacgtta

SEQ ID NO: 292848 - DNA, 82 bp, Homo sapiens
ttaaaatcacaggggggacaccagacacctcacttcttacacttggctggttaacacagaaatctgcctcctgggccatgcc

SEQ ID NO: 292849 - DNA, 75 bp, Homo sapiens
ggagagggagtgatgtcttccagactcggtgctgtacccgcccgaatgacaacagagctgctcaaggcgggaact

SEQ ID NO: 292850 - DNA, 82 bp, Homo sapiens
gtggatggggacctgcctgctgtacctggagtagaacagaaaaattattatgtctgtgttcccttgggactcattggaaatt

SEQ ID NO: 292851 - DNA, 74 bp, Homo sapiens
gttaagtcccccaaagatgagatttacctgtgagatgtttcatcccaacaatggtgagcctgaaggaagacttg

SEQ ID NO: 292852 - DNA, 51 bp, Homo sapiens
ggccatcccagagcccgtggtgagtgggtaattccagaattgattggccat

SEQ ID NO: 292853 - DNA, 100 bp, Homo sapiens
gtacaatgtcagtgtttacactgtcaaggatgacaaggaaagtgtccctatctctgataccatcatcccagtccctcctcctatgtctccatcctccaaa

SEQ ID NO: 292854 - DNA, 51 bp, Homo sapiens
ggcgcttcggctccgctccctgtgcgcattccagttggcttttgagtggat

SEQ ID NO: 292855 - DNA, 133 bp, Homo sapiens
acgtcaagatgtttatgatttgctaaaaacaaacctttatcaggatgatgcagtaacaggtgaatcaaaaactctggttttaagcaacctctcctacagtgcaacagaagaaactcttcaggaagtatttgag

SEQ ID NO: 292856 - DNA, 50 bp, Homo sapiens
aatgtccggcaagatcgagaaagcagctccttgacctgtttatggtttgg

SEQ ID NO: 292857 - DNA, 101 bp, Homo sapiens
ctcagggctttaccagcaactaccccagtgccggggagggttctgctgcttcgaaagctgatttggagaccaagtatgagaccaagaagttatctttagaa

SEQ ID NO: 292858 - DNA, 98 bp, Homo sapiens
aagccaagaggaggacagttcgctacacagcaatgcatcgagataaaccgagaaaactggtgtacaatagagccatgccctgatgcagcatctcttct

SEQ ID NO: 292859 - DNA, 97 bp, Homo sapiens
gccaacaaggcgtcaccttaagttggaagggcacaatatcttctccactctgagctccagtgaatatgagcaggtgcttgagatcatccgcaaagcc

SEQ ID NO: 292860 - DNA, 50 bp, Homo sapiens
ccctcaaacctgctgctcacctcattggctttcattaaagatagaaccag

SEQ ID NO: 292861 - DNA, 100 bp, Homo sapiens
tctcagtcagcctggggaatgagacccaaactgctcatacagaattacgcatttccacttctaatgtggtccatgctgtggacggcaccgccgagaacgg

SEQ ID NO: 292862 - DNA, 74 bp, Homo sapiens
tgactgtcgctctgcctttgacaggagaggctgcttcttgtagaggactcgctcagcagcagcctgaaaacttg

SEQ ID NO: 292863 - DNA, 100 bp, Homo sapiens
ctcagggccatctcagctataaacacaaggagctgaatgagcgctggcggtccctacagcagctggccgaggaacggagccagctcttgggcagcgccca

SEQ ID NO: 292864 - DNA, 51 bp, Homo sapiens
aagcgcacgtttaaacatctcaaggagcagtgaggagaatgaataccttcc

SEQ ID NO: 292865 - DNA, 109 bp, Homo sapiens
caatgtgggatcgatgtttcaatattggaagcgctttgatttacagcagctgcagatatggatcagaaactttcgaagttggtagaagagctcacaacttcaggagaac

SEQ ID NO: 292866 - DNA, 96 bp, Homo sapiens
ggagaaggagtggctcctggctgaggagacggcagccacggcctcaggtcccacaataggccgtctgcaagctgaggagcatggagagccagcccg

SEQ ID NO: 292867 - DNA, 100 bp, Homo sapiens
cacacgatgctgggaggcctggggaagctggctgccgaaggcctggcccaccgcaccgagaaggccaccgagggagccaacggagtcttgctctgtcgcc

SEQ ID NO: 292868 - DNA, 100 bp, Homo sapiens
tcagcgcggcgctggccgagagccgcggctccgtgtttctggaaagtgacagcaggtaccatatgctactaggcacatacagagtggcagatctgcagac

SEQ ID NO: 292869 - DNA, 96 bp, Homo sapiens
cagagcaaagttaccggacagcaattaaacacagaaggaaatacccagactgttactacaacctcgggcgtctgatcctgaggaggatgaaggggc

SEQ ID NO: 292870 - DNA, 90 bp, Homo sapiens
ggagaatgaagctgaatctgatgtcaaacatagaaccagagaacattgatgatggcacctcagatcgcccctacagccatgctctggtgg

SEQ ID NO: 292871 - DNA, 98 bp, Homo sapiens
acttcatcatcatctacttcacaggaattgccatttgtacaccaggggttggaaaaaccacactaggcaaagaacttgcgtcaaaatcaggactgaaa

SEQ ID NO: 292872 - DNA, 100 bp, Homo sapiens
gaatcatacaatatttcagaggtcatgtcaaaagaggtgtacgaagccatcgacagcagagatggagcatcttgtgcagagttggtgtcttttaaacatc

SEQ ID NO: 292873 - DNA, 98 bp, Homo sapiens
cgcagaagcctcctctctgggccggaccccagcccgagcggccgaaaggagccccccgcccggatcacaggcatcaagcatgatggaaccatgtgtga

SEQ ID NO: 292874 - DNA, 98 bp, Homo sapiens
gatgccattccagcactggactcatggaggctgagcatttattcaggtggttaccctaacagctaatgataagacaagtgtttccttctcctccctcc

SEQ ID NO: 292875 - DNA, 75 bp, Homo sapiens
cccgcggccgcaccttcccgccttctcaggttaaacccatccagagtaatggctgcggccttacccaggaccctg

SEQ ID NO: 292876 - DNA, 75 bp, Homo sapiens
gatgtttcccttggtcaaaagcgcactaaatcgtctccaagaacagtgcccaaacctcgtgttaaaaagcagccg

SEQ ID NO: 292877 - DNA, 100 bp, Homo sapiens
cttgaaaaagctgccctgagacggtgtcccgccgaaagggcgccaatgcttcggcattagagaaagagattggtccagaacagtttccggtcaatgagca

SEQ ID NO: 292878 - DNA, 76 bp, Homo sapiens
cctggatcagtttctttgtcatgtagccaagactggagaaacaatgttcacgcaaagaatctgctccacaagtttt

SEQ ID NO: 292879 - DNA, 100 bp, Homo sapiens
aagtacgctgaggccgagaacaccattgaccagctacgcctcggggccaaggtcacgcatgaagggagcaccgtggagaagacagtggcccctacagaat

SEQ ID NO: 292880 - DNA, 105 bp, Homo sapiens
tgagactcctgctcagtgtagcattaaggacttccaatagtagtcagacattatcatcctgtcatactatggagccatgtacatcagatgaatttttccaagccc

SEQ ID NO: 292881 - DNA, 100 bp, Homo sapiens
aatgatggtcacttcatgcctgtcctgggatttggcacctatgcgcctgcagaggtatttggctcgagtaggggagcttgaagctactgacactgaagac

SEQ ID NO: 292882 - DNA, 100 bp, Homo sapiens
ccaaaatgaagggaaataaagtgaatgaggtgctgaatagactgcacctggctatcccaaccaggagggacgataagggtgagaactctgtctcagtcga

SEQ ID NO: 292883 - DNA, 98 bp, Homo sapiens
gacggtgctctgatgaggccaggccgactggaccggcacgtcttcattgatctccccacgctgcaggcccttctgcagaaaaatgtagagtgtgcccg

SEQ ID NO: 292884 - DNA, 100 bp, Homo sapiens
cattgaagaacagtcagagggaattgttaagaaggcacaacgactctgtaaacgctgtggtcaagcatggagagctgcaacacttgaaggctggaaactg

SEQ ID NO: 292885 - DNA, 100 bp, Homo sapiens
ttttcggatgatgccttcaatactacctttatttccaccatagtttgctaatccagactttacacaacctatctcagaagttgtagatgaagtaattcag

SEQ ID NO: 292886 - DNA, 75 bp, Homo sapiens
gtgcgctgtcctgggcggcagcgactccgagaagtgctcctactctcaggttcctactatctgaccaccacctac

SEQ ID NO: 292887 - DNA, 83 bp, Homo sapiens
taaagtccagagacagagcactaattagtacgctgggagcggactcttggagctattgtaagacaaaagaatcacccaatgac

SEQ ID NO: 292888 - DNA, 100 bp, Homo sapiens
ctaatccagaagatccacaaactggtgcagaagagagacttcctggtggacgatgcggaggtcgagcggttaagccttgaaaatcctatgagaagaatac

SEQ ID NO: 292889 - DNA, 100 bp, Homo sapiens
acgggggacgtggtggaggtcgtagagaagagcgagagcggttgaagcactggacaatgccacatactttgtggatggtgtgggtcttgggggtcatcat

SEQ ID NO: 292890 - DNA, 75 bp, Homo sapiens
gacagcctcgcttggccgccagttcttctgcagccgaaggcggtcacttttacaaagagaaagtttggattaatg

SEQ ID NO: 292891 - DNA, 76 bp, Homo sapiens
gcaaatgagatgaaccatcttcctgcacacagccacgatttgcaaaggttttgacacaagggcgcatatcttcaaa

SEQ ID NO: 292892 - DNA, 100 bp, Homo sapiens
ggcagcatccttcggacctcaccacgcgagattgccttggttgaatagaagtcaaacagtagtggaagagtatttggcttttcttggtaatcttgtatca

SEQ ID NO: 292893 - DNA, 101 bp, Homo sapiens
ttctgctttttgaccctatatcttcaaagcacataaaaacactttctgaagctcatgaagactgtgtaaataatatcaggctggagtgcaatggcgcgatc

SEQ ID NO: 292894 - DNA, 100 bp, Homo sapiens
tactttgcagatggaaaggtgtacgcattgtacagttacctggtgatgccgttcatgggcaccgacctgggcaagctcatgaaacatgagaagctaggcg

SEQ ID NO: 292895 - DNA, 100 bp, Homo sapiens
ctagccaatacttttgaagattttctctttactaaaagctttgggaactactttataaattgcagtttgtgtatacctatattgccccatggcagatcac

SEQ ID NO: 292896 - DNA, 100 bp, Homo sapiens
agtctcatcgcccgcctggagcgcctgtgcccgggaggcgcgggcgggcagcagcagcctgatgtgtgagaagcggatattggcggcagtgaccagtgcg

SEQ ID NO: 292897 - DNA, 51 bp, Homo sapiens
cctctcccgagctcagagagtaaatccaccaagcgtcctgaggaagtgtgc

SEQ ID NO: 292898 - DNA, 74 bp, Homo sapiens
ctgaagggaaaacagtccagatccccgtgtatgactttgtctcccattcccgggggatatgagactttctactc

SEQ ID NO: 292899 - DNA, 95 bp, Homo sapiens
ggctgtcgtcacgacgacgtgcggacgcagcggcgggggcattgcttccaagtatgatcatcaggcagaagaagatcttcgcaattggatagaag

SEQ ID NO: 292900 - DNA, 96 bp, Homo sapiens
aagattatggatgatgatagctatggtgtagatggaatggatctaacttcccagggggcaggcacttactggattaaactgcaaatatctcatgaa

SEQ ID NO: 292901 - DNA, 101 bp, Homo sapiens
cgcttctcagaggacgccttcaacaccaccttcatctccaccatcggtactaggttttgacaagcttgcatcatgcgtgagtataagctagtcgttcttgg

SEQ ID NO: 292902 - DNA, 75 bp, Homo sapiens
gctgcagctccgggacacctggggccgccgaggcaaaggttatgaagacagtatggagtttccagaccatagtag

SEQ ID NO: 292903 - DNA, 83 bp, Homo sapiens
cgcgaacgagcgacggcggaacccgtgggcctgtggactgcagcctcggcggtcagcaggaacattttagtggacaaaccaaa

SEQ ID NO: 292904 - DNA, 74 bp, Homo sapiens
tgggaacatgacgcaggtgcaggtgtctcttctcgccctggcggggaagggtaagcaggaagagaacgacgtgg

SEQ ID NO: 292905 - DNA, 96 bp, Homo sapiens
tgcagaagaatattttgcctgctggaacctgctgtatctactcaagagtggaagttttcacagcgttggctccaacttttgaaatgaatcctatga

SEQ ID NO: 292906 - DNA, 100 bp, Homo sapiens
tggtctcgaactcctgatctcaggtctgctccagctcagccacctgctgaagggacagaagggactgccccaggtgggggtccccctggccctcctccta

SEQ ID NO: 292907 - DNA, 90 bp, Homo sapiens
cttctttggcaagtggacattttactggctcaaagagaaaaggaacagttccgtaagctctttattggtggcttaagctttgaaaccaca

SEQ ID NO: 292908 - DNA, 100 bp, Homo sapiens
ccagcccgggtgcccacactggccgtcccggccatctcgctgcccgacgatgtccgcaggcggtgaaatgacaatggatgctctgttggctcgattgaaa

SEQ ID NO: 292909 - DNA, 108 bp, Homo sapiens
ggacggctgcgcgggacggctctgtaggaaggaacttggttccccctccctcagcttccgccccaaaagtactatactggcaattgctggagaagattttgcaattgt

SEQ ID NO: 292910 - DNA, 50 bp, Homo sapiens
gtttccttcccagggcaccaagggcactgtgtttagtcttgagtcagagg

SEQ ID NO: 292911 - DNA, 95 bp, Homo sapiens
acagagggttctttccattgtgtctgccagcagggtttctcaatctctgcagatggccgtacgtgtgaaggtgtcatggagaaactccagctggg

SEQ ID NO: 292912 - DNA, 101 bp, Homo sapiens
gccgccgcggtttgtcgccagaaggaagatggcggatctggaggagcagttgtctgatgaagagaaggcagaagatgccggtgcaagttcaaccagcagca

SEQ ID NO: 292913 - DNA, 82 bp, Homo sapiens
gtttagatatgctggtcctgaagatgatgctgccattaccttgaaaaaggagaagcgggctctagggaactggaagttgctg

SEQ ID NO: 292914 - DNA, 96 bp, Homo sapiens
agtcaccaatgccgtgggcatgggccgcgctgagcaggtcatctttgtccgagaatatggctcaagcctggaagatgacgtggtgggggacacttc

SEQ ID NO: 292915 - DNA, 100 bp, Homo sapiens
cttctctgtcagctctttccccgtcagcatcccagccgtgctcacggtggtggtgaagtttattaagaaggagaaggtcttggaggattgttggattgag

SEQ ID NO: 292916 - DNA, 75 bp, Homo sapiens
gtccagcatgactcatccccgggagtgttgatctgcgaaacttgtatctgttttaaagaaggcacttgaaattac

SEQ ID NO: 292917 - DNA, 83 bp, Homo sapiens
acaacattcagacccatttccagtcatgagacttcgcaggtgagcagtaacggaaatcagccccgtttattcctcccagcacc

SEQ ID NO: 292918 - DNA, 90 bp, Homo sapiens
gccggagcctgctggggcgagcgcttgtagattttcagtggaaactgggtatggctgtgagctcagacacttgcagatctcttaagtatc

SEQ ID NO: 292919 - DNA, 100 bp, Homo sapiens
gcgcgccttggctcgctggccttggcggcggctcctcaggagagctggggcgcccacgagaggatccctcacccgtaagactttgaccccgacgcaggct

SEQ ID NO: 292920 - DNA, 83 bp, Homo sapiens
cttggactgagtcctgcaggacacagcatgctacaagtgaaaactgatgagaaactgaatgtgtctgatgagaatacagcaag

SEQ ID NO: 292921 - DNA, 74 bp, Homo sapiens
caggagatcacccgcgacttcaacctcctgcaggtctcggagccctcggatgctcacaactgtattcctgagct

SEQ ID NO: 292922 - DNA, 74 bp, Homo sapiens
agcgggcgagcggtggtttggacgccggcggagacgcgggcgagacctcgaagtagggggaaaactgcagtgga

SEQ ID NO: 292923 - DNA, 90 bp, Homo sapiens
atatttcaataagtacccaaaagggcgttacctactgcagagaaagttcagcaagcagtcttaccatggcccatgtgccctggcatgagg

SEQ ID NO: 292924 - DNA, 100 bp, Homo sapiens
cgagccccgtcctccttcgccgccgcgcacaaccgcacgtgcagatcacccggaagttcaggctgaattctgaaggcaaacttgagcagacggtctccat

SEQ ID NO: 292925 - DNA, 74 bp, Homo sapiens
aggaaccggaccccggcagctacatctgaatgggactccgagtgccttacatccctgcagccccttcctcttcc

SEQ ID NO: 292926 - DNA, 100 bp, Homo sapiens
ataagctgcactgcatggttgctgctggatgtgttgtgttcctggcttccctctggatgctgacagaaacaagggttcctgcgccacgtgcctgtcgtgt

SEQ ID NO: 292927 - DNA, 89 bp, Homo sapiens
aaatgaagctgaggcgtgagcaatggttgcagacttcctgcctgacacagctcacttcaagaagtgcacaatgtcagaacgtggaatta

SEQ ID NO: 292928 - DNA, 82 bp, Homo sapiens
cagggagcagcgcagcgcgcgcagagcgtcgtccaggtgttgacttcaaaatcaaaactgtagagctaagaggaaagaaaat

SEQ ID NO: 292929 - DNA, 83 bp, Homo sapiens
cagcaatgagaggacccgcgtgggcaccctgcaggtggtcagacatgtcatcaactcagctgacaatgcagatcttcgtgaag

SEQ ID NO: 292930 - DNA, 128 bp, Homo sapiens
cacatgtctgggaggataattgggatgatgacaatgtagaggatgacttctctaatcagttacgttgctgagacaaaggaaaacccactcccttggaggagcatgaccttttcctgtaattcttccca

SEQ ID NO: 292931 - DNA, 75 bp, Homo sapiens
tcgcggagcgactggagagccagaggtatgagcagcagcgggacaatcttgcccaacagtcattcaacatggaac

SEQ ID NO: 292932 - DNA, 89 bp, Homo sapiens
gagaaggtggatgcaattctttgcgttgctggaggatgggccgggggcaatgccaaatccaagtattggaggtggacacaaaggaagag

SEQ ID NO: 292933 - DNA, 99 bp, Homo sapiens
acttaatcctactcagaagaacttgtacagagatgtgatgttggagaactatagcaatctggttttcttgggcatccgtgtcattctggaccttactcc

SEQ ID NO: 292934 - DNA, 75 bp, Homo sapiens
acgacgagtacgactacctattcaaagggaaagcaggcaggatgggagagtcgccgatagaaccacctcttccct

SEQ ID NO: 292935 - DNA, 95 bp, Homo sapiens
gtgatgtgtgtctgaaggaggatgataaaggaacaagcacatcatgattgacttggggactggcaacaacaacaagattaactgggccatggagg

SEQ ID NO: 292936 - DNA, 83 bp, Homo sapiens
gctactctctctttctggcctggaggctatccagcgaataactcaagtcacctgtactggaaatcagtttgctgaaattaatc

SEQ ID NO: 292937 - DNA, 75 bp, Homo sapiens
gaacagtgagaaaagttatgattcattgcccaattttactgctgctgactgtacctggaatggaaacacaaaagt

SEQ ID NO: 292938 - DNA, 80 bp, Homo sapiens
ttcatcgaccagctcagcaaccgcgtgaaggacctgatggaagctcttcgtgggcggtcttgactggagcacgacccaag

SEQ ID NO: 292939 - DNA, 74 bp, Homo sapiens
tcagtaatctagctgcagttttgatgcacagagggctgcagactcctgttccagaggtcattgttgatgtggaa

SEQ ID NO: 292940 - DNA, 100 bp, Homo sapiens
agaaaaacgatcctttgtctttgttagatgattcgaagtttcctatagaggataccccattggttccagcagcagaagaggatgaaacacaaaaccagca

SEQ ID NO: 292941 - DNA, 100 bp, Homo sapiens
agtcctatgagctcatccggaagattgaggcctacatggaagcccactgtttgtaacatggaagattggtcgagacaaaagattacgtggatgcataggt

SEQ ID NO: 292942 - DNA, 99 bp, Homo sapiens
tgagatccagctgaaccaagtgattttctggctcagtttcctgaagtcccttgtcccagttgaagaacccatagggatggtgtctgttttggacttgat

SEQ ID NO: 292943 - DNA, 100 bp, Homo sapiens
ctgcccgcctgcggctgctccgggaagtgggaaaactcttgcctttgccatcccaatgattcatgcggtgttgcagtggcagaagaggaatgctgcccct

SEQ ID NO: 292944 - DNA, 100 bp, Homo sapiens
gtgggacaccgtgggctgcgtgtgggacgggtttagcggcagcctcttcgtgagagtagcatgtttgtctccaagagacgtttcattttgaagacatgtg

SEQ ID NO: 292945 - DNA, 75 bp, Homo sapiens
tacactaggggttcatgttaaccaggccaaacagtatctggaccttcgtcgatttggatctgtgccacatggagg

SEQ ID NO: 292946 - DNA, 74 bp, Homo sapiens
ccatctctttataattccctaagcatggctatgcagactctaaagtatcttcaaagaacagtaaaacatccaac

SEQ ID NO: 292947 - DNA, 75 bp, Homo sapiens
gggcctcggcactggtaccctttacatcgctgagagtactatactggcaattgctggagaagattttgcaattgt

SEQ ID NO: 292948 - DNA, 75 bp, Homo sapiens
agccgggagttcaagaagaacactccagaggatcaggcaaaaatgatcatgccgaaaaagtggcggaaaagctag

SEQ ID NO: 292949 - DNA, 74 bp, Homo sapiens
gcctacggtgtcattgagttatacgtgaaactggacggccagttcgaattaaatatgggtgatgttgagaaagg

SEQ ID NO: 292950 - DNA, 90 bp, Homo sapiens
catacctcagattcattgtctcccgcatgaaggagagggtttatgaaggcgagcgtgccatgacaaaggataacaacctgcttggcaagt

SEQ ID NO: 292951 - DNA, 51 bp, Homo sapiens
ctatagacgttaatatgagaaccattgatctgatgtacggaggcatctact

SEQ ID NO: 292952 - DNA, 83 bp, Homo sapiens
ccgggaccctcgcgcgcgaccgccgaatcgctcctgcagcagaggaactctgcgaccttcaagtcgtttgaggaccgagttgg

SEQ ID NO: 292953 - DNA, 51 bp, Homo sapiens
gcttggagacggacttgcttccgaactcctctttcctaaaatggagtcgag

SEQ ID NO: 292954 - DNA, 100 bp, Homo sapiens
gaggaggccgtccagcagatggcggatgccctgcagtacctgcagaaggtctctggagacatcttcagcagattacgatgaggacctggtgcaggaagct

SEQ ID NO: 292955 - DNA, 98 bp, Homo sapiens
gcaccagacactccctggcccacacctcccgctcatcgcccgccacggcacaccctctggaagcgggtccaaggtgctgtcacccctctgctggcgag

SEQ ID NO: 292956 - DNA, 74 bp, Homo sapiens
gcctggcgcagcctccctctattaccagtgtcaacagcatctccaccctggagcctgtgagccggtgccagcgc

SEQ ID NO: 292957 - DNA, 51 bp, Homo sapiens
catctttagttcgtctttcctagagaggtattgtcttctaagaactctgaa

SEQ ID NO: 292958 - DNA, 90 bp, Homo sapiens
ggggcccacagactgacgctgctctgcttcctggattcagccctcttcctaaggagctccaagccttacatgaaatggtccagcagaaag

SEQ ID NO: 292959 - DNA, 97 bp, Homo sapiens
agagcaggccatgattggaccatcccccaatcctctcatcttgtcctacctgaagtatgccattagttcccaggacaagaagaggcaagcatctcct

SEQ ID NO: 292960 - DNA, 100 bp, Homo sapiens
ctcctgagacatctttgctgcaagatcgaggctgtcctctggtgagaaggtggtgaggcttcccgtcatattccagaaacctgctaatattttagttatg

SEQ ID NO: 292961 - DNA, 50 bp, Homo sapiens
gctgcagctcgtgggtgctcagaagtacggaggctgccataaaacattat

SEQ ID NO: 292962 - DNA, 96 bp, Homo sapiens
agcacctccagccacagcggaatccatacccagtgcagcaggtcaatcagtttcaagagccaacacgaggagctaaagaaacagcacagtgacttg

SEQ ID NO: 292963 - DNA, 127 bp, Homo sapiens
ggggacccgctgtcactgcgcctcccgctgccgacgccgcctggacggccgcactctccctgcccgagacccggtgaactgcgccaggccactgtggccatgatgaacaggaaggatgagctggagg

SEQ ID NO: 292964 - DNA, 76 bp, Homo sapiens
gcaagaagcgctttgaagtgaaaaaggcatgttacatggaattggaaaatttatagttgaaataatttgctgtcgt

SEQ ID NO: 292965 - DNA, 75 bp, Homo sapiens
gaggaggactctggagctgacagcgcgcacttcacccgcagttgtcagagcaccataacatggtgtgggaagtga

SEQ ID NO: 292966 - DNA, 134 bp, Homo sapiens
tctgagacaagctgttatgttgcctgagggagaggatctcaatgaatggattgctgtgaacaattgttgatccatttcagatacttgtggcagcaaacaaagcagttcacctctacaaactgggaaaaatgaag

SEQ ID NO: 292967 - DNA, 75 bp, Homo sapiens
aaggacaaaacgggactggctagttaaacaaagaggctggattccatgcaatggaaaagcagctgatcgcatcca

SEQ ID NO: 292968 - DNA, 82 bp, Homo sapiens
ggcaagaagatggcgggatcagtggccgacagcgatgccgtggtggtgaaaagagatttgaatgcccggaatgttctaaaag

SEQ ID NO: 292969 - DNA, 50 bp, Homo sapiens
aatcgagcagaaagaatgtctttcagtactatactggcaattgctggaga

SEQ ID NO: 292970 - DNA, 75 bp, Homo sapiens
aatggacagttagtcacccacctacatgttgagaacctaaggaaattagtggtcatacttctggtataaaaaaag

SEQ ID NO: 292971 - DNA, 100 bp, Homo sapiens
gcgtgaacatgaccgagtgcgtgccagtacccagttctgagcatgtcgccgagatcgtggggcggcaaggggataaaaacattcagatggcagatcacag

SEQ ID NO: 292972 - DNA, 100 bp, Homo sapiens
aaagcagtaaagccagaggaagttcgcctctacggaccaaacttcatccttcaggtgtactcatctcagaggaagtcctggcaccctgtgtgccaagacg

SEQ ID NO: 292973 - DNA, 75 bp, Homo sapiens
agaggacccaggagaaattcgccctcaaaactgtgtcagggaaaagggaggcaaggtcctggtccactgtgaggc

SEQ ID NO: 292974 - DNA, 51 bp, Homo sapiens
ccgaggagcgggaagagttgctggggtgaggcggaaccaaccctcctggcc

SEQ ID NO: 292975 - DNA, 100 bp, Homo sapiens
agactcctgcgtcctccgacttttcatggtgtccctggccagtgtccttccacctgtccacaagcatggggaacatcttcgccaacctcttcaagggcct

SEQ ID NO: 292976 - DNA, 75 bp, Homo sapiens
ccatgaagagtcctgaccacaatggggaggacaacttcgcccgggacttcatgatcagcaatgtgggagacagga

SEQ ID NO: 292977 - DNA, 97 bp, Homo sapiens
agtctctcgccacagcggcctcggcctccccttggattcagacgccgattcgcccaggtacaatccttggatttaccctccgaccatacagaatgag

SEQ ID NO: 292978 - DNA, 113 bp, Homo sapiens
cctcgggaccggctgtatgattaggccacaatcttcaatgagtaaacatattcctggggatatgagactttctactcggaatatcctgagtgttgcgtggatgtaaaacccat

SEQ ID NO: 292979 - DNA, 83 bp, Homo sapiens
aagggccttgttaatctgtataaccttccaggggacaagaacagcatatgccatatatgagctggctgtggcttcatttccca

SEQ ID NO: 292980 - DNA, 74 bp, Homo sapiens
cggccagggttctcgctcttggaagatgatccctatgatcttgaagatgtttctgcacagaaatgagggaaata

SEQ ID NO: 292981 - DNA, 90 bp, Homo sapiens
ggacttccctttggatgtagcaaggaagaaattgttcagttcttctcaggatttgggggttctttcatggcgccttccccatctccagtg

SEQ ID NO: 292982 - DNA, 133 bp, Homo sapiens
atcctactcagaagaacttgtacagagatgtgatgttggagaactatagcaatctggttttcttggtgtccatgggctattcctcaaaatacaatatcttgttctttggctgatgtaatgagtgaacagctgg

SEQ ID NO: 292983 - DNA, 100 bp, Homo sapiens
gctcctctctccttggcctctcctgggatcggcccaaggccagttctccgcaggtgcgttgtagaagacaagaactcaaaggtggcctggttgaaccgtt

SEQ ID NO: 292984 - DNA, 90 bp, Homo sapiens
tgtatttcatgccagagagtttggaaaaataattaacttcaagaccccagaggatgccaggtgagccatctttatggatttggactgatg

SEQ ID NO: 292985 - DNA, 75 bp, Homo sapiens
gcgcatcaaacaacagctgttgcttatttcgaagatggaccctggtggaatgaaggcaggaacatttgatcctta

SEQ ID NO: 292986 - DNA, 95 bp, Homo sapiens
ggatatttaagtacaatggtgggcttaattttaggtttccctaatgtgggaaagtcctcgctgatcaatgggctggtggggcggaaagtcgtgag

SEQ ID NO: 292987 - DNA, 75 bp, Homo sapiens
cgccctgagagaacagggtggccgcttggtccagatttgtcccatcagatgaaaagaagaaacaaggttgtcaac

SEQ ID NO: 292988 - DNA, 100 bp, Homo sapiens
acggtagatgactatggagctgactccaactctgaggatgaggaggaaggtgaagcgggtgtgggccgaagatatgctcatgtggtgttgaggaaagcag

SEQ ID NO: 292989 - DNA, 71 bp, Homo sapiens
gtgctcttcgaagtggcctgggaggtggctaacaaggaaatgagccgtcagactgctacagcattacctac

SEQ ID NO: 292990 - DNA, 98 bp, Homo sapiens
cgcctgctgcactttgggttcaaggcgacaaaacgcttcgttaagggactcaggcagtacgggaagaacttcttcagaattagaaaggagctgcttcc

SEQ ID NO: 292991 - DNA, 87 bp, Homo sapiens
cggacagatgaagctccccaaggagctgcagatccgagcagttggcagactaaaaagagagcggtctatgagtgaaaatgctgttcg

SEQ ID NO: 292992 - DNA, 75 bp, Homo sapiens
tgtttactgagcccgcagcactcaatcccttacgggatggggaacatgcagatttaacccttagtggcttctgaa

SEQ ID NO: 292993 - DNA, 83 bp, Homo sapiens
cagacgctgccagcatcgccgccgccaggcttcaacggaccacaccaaaatgccatctcaaatggaacacgccatggaaacca

SEQ ID NO: 292994 - DNA, 80 bp, Homo sapiens
gccgccgctcaccgcagccccctcctggcgacccgcaagaacaagatcactcaaggtgaaggataatctactaataccag

SEQ ID NO: 292995 - DNA, 80 bp, Homo sapiens
gctaaaataggccaggcctgcaggacatacgggagccttcacgtaaatgggtccagtcatgcctcccagtaagaagccag

SEQ ID NO: 292996 - DNA, 102 bp, Homo sapiens
gtttgtagcctattggaggaaaacacaccaaggatctagtgaaaagccatttgatgtatgcggtcagagaagaagtggaggtcctcaaagagcaaatcaaag

SEQ ID NO: 292997 - DNA, 75 bp, Homo sapiens
ctcaagtggaccctgagattgagctttttgtaaaggtagtaaacctattgatggcaattttgctgactgtggaag

SEQ ID NO: 292998 - DNA, 98 bp, Homo sapiens
gcggctcctccgggggacccgcggtccccaccgtgcagcggggcatcatcaagatggcctccatgaagaagtggactattctgagaaactgaagttca

SEQ ID NO: 292999 - DNA, 100 bp, Homo sapiens
aagagagagtgtgatcagtttcagaaagaacaatctcctgctaacaggaaggaactagaacagtctttggctagctggactcagaacttgaaagaacttc

SEQ ID NO: 293000 - DNA, 98 bp, Homo sapiens
actttttgaatttcaagaacagtaaagttggaacacagcagagggtgtgtaataaaatacagctatttgtcgtagatgtccagacaagccagatcacc

SEQ ID NO: 293001 - DNA, 126 bp, Homo sapiens
gcacatcgaccggcgacagcagccaggagtcatgagcgacagcggcgagcagaactacggcgagcgggccatttcataattctgaatcatgtctgataacggagaactggaagataagcctccagc

SEQ ID NO: 293002 - DNA, 50 bp, Homo sapiens
caaaatgacagatcttctagaagaaggtcacataatgagtatgactcctg

SEQ ID NO: 293003 - DNA, 100 bp, Homo sapiens
agacgctggaggacagcccgcagttctctttcaacatgttcgaccaccctattcccagggtcttccaaaaccgcttctccacacagtaccgctgcttctc

SEQ ID NO: 293004 - DNA, 98 bp, Homo sapiens
catggccgatcctcgcgtgagacagatcaagatcaagaccggcgtggtgaagcgattgttaaaggaaatgggctggcaggaagacagtgaaaatgatg

SEQ ID NO: 293005 - DNA, 98 bp, Homo sapiens
gtcgccggcagggaggcatagcgcctctctgatcttcctgcatggctcagctggacagtgccacatcgcttatccaggcagctaaaaacctgatgaat

SEQ ID NO: 293006 - DNA, 78 bp, Homo sapiens
cacacagcatggagaaatccttcgcaatgtcaccatcctacgagatgcctaatcattatgatctagactgccctacag

SEQ ID NO: 293007 - DNA, 74 bp, Homo sapiens
ttcttggaaagattccaggtgcttgaaaacgacgtctcagtgggtcaaggctgccgggccgcaagtacagccct

SEQ ID NO: 293008 - DNA, 100 bp, Homo sapiens
cggcgctctcctggctcccttctgccccagctccgtctcggcggcggcggatcatggaagggaagtggttgctgtgtatgttactggtgcttggaactgc

SEQ ID NO: 293009 - DNA, 100 bp, Homo sapiens
cggctctactgcgtctaccagagcatggtgctcttcttcttcgagaattacaccggggtccaggtgaccttgcaacttcatggatgacgacaaacctttt

SEQ ID NO: 293010 - DNA, 100 bp, Homo sapiens
ggagacgggagtattatgaaaagatcaagcggtaccgcgcggtgtatgactacagcgccgccgacgaggacgaggtctccttccaggacggggacaccat

SEQ ID NO: 293011 - DNA, 88 bp, Homo sapiens
aaaagcctccagactactagtacgaggacgtaggtgtaatggataggtaacagagaagacctcgtcccttcctagtcagggcatcagc

SEQ ID NO: 293012 - DNA, 100 bp, Homo sapiens
ggtcatctccagatgctagggttatggtattctaccttgtaaatactgttatttgtatatactgtaaatgatgacatcggtgggcactaaccgagcccgg

SEQ ID NO: 293013 - DNA, 75 bp, Homo sapiens
gcagccccggcctctcggcctctgccggagaaacagtatgcagttggcagtagatgtgcagataccagaatgttt

SEQ ID NO: 293014 - DNA, 50 bp, Homo sapiens
gttattgggaaaattcaacttcattcagggtcagtatagaccttctgatt

SEQ ID NO: 293015 - DNA, 100 bp, Homo sapiens
atcaagcgttacatggacggcatgaccgtggagttacactgttagaccttatgatagccaagataacgagtgatgagccactcaccaaggatgacatccc

SEQ ID NO: 293016 - DNA, 82 bp, Homo sapiens
cgggccacgcaccgcctgctgctgctgggcagttgtgaaaaacttcaggacaaaaatgtttcatttaaggacttgtgctgct

SEQ ID NO: 293017 - DNA, 75 bp, Homo sapiens
catcagcatctgggaccgcagcacaggcatcaagttctactccattcagcagcctcctgacaaggtgatccgggc

SEQ ID NO: 293018 - DNA, 51 bp, Homo sapiens
gctccagaaaatgctgcccaagttgcctcttgaagtggatttaactaaagc

SEQ ID NO: 293019 - DNA, 100 bp, Homo sapiens
cagcaagcgtggcggcaagatcatcgtgggcgacgccacagagaaagctatgaccatgagttagtgtttggtgtctccttgaagaacatgaataaagcgg

SEQ ID NO: 293020 - DNA, 80 bp, Homo sapiens
atgaccctagccagactcagggatcaaagagcaaacagattcagtggcctgcattgacctgcctagagctggaacgttac

SEQ ID NO: 293021 - DNA, 90 bp, Homo sapiens
gctaaagtttgctcgaagccttcagtccgttgcagagatcatgatgacaccgaacatgcaaggtattatcatggcgataggtaaatccag

SEQ ID NO: 293022 - DNA, 128 bp, Homo sapiens
gcaaagcgcaactccttgaaggaactgtggcttgtgatccatgggcgagtctacgatgtcacccgcttcctcaacgagagtacccaaaggcaagtggaacagctctaatggggttgaagaaaaggaga

SEQ ID NO: 293023 - DNA, 82 bp, Homo sapiens
aaaaaagcggtggatgctgaaccagtcctgaaagctcaccagtctcactctgcaggctgttttgctgcagcttctgaagtgt

SEQ ID NO: 293024 - DNA, 50 bp, Homo sapiens
gcgagctcctgaggtacggcgtcgggttctaatacccgatttacaattac

SEQ ID NO: 293025 - DNA, 111 bp, Homo sapiens
tcatcacaccatcagcttcagagaatggcagccatttatttgtcccgtgaacctgtgtgcagacacattagaaaaggattggaacaaggtaatttgaaaaaggctttagtg

SEQ ID NO: 293026 - DNA, 75 bp, Homo sapiens
tattgaccatgatggaatgcttgacagagatgagtttgcagttgttaaagctgaagctcaacaaagatatagtga

SEQ ID NO: 293027 - DNA, 75 bp, Homo sapiens
taaatttgaaagactttgagccacagcccgggtggcaatgaccatgagatcttcacagaccccagaaccatgggc

SEQ ID NO: 293028 - DNA, 75 bp, Homo sapiens
tgcttatgaatgctcgacttcagttcctctgtgacgagggtgcaggtatctctggggactacatcgatcgcgtgg

SEQ ID NO: 293029 - DNA, 100 bp, Homo sapiens
gataccaacggcaaaaatctcaagaaagaggtgggcaagatcctgtgcactgactgcgataatacatatgtgtcaagttcagagaatgatgaagatgtgc

SEQ ID NO: 293030 - DNA, 50 bp, Homo sapiens
gaagaattccagtcttataaagcgggtgccacgtctatgtgggcttcgtg

SEQ ID NO: 293031 - DNA, 83 bp, Homo sapiens
gagctggggcaccgagctctggccctgccaggagcccggaagtgggtccgcacgagacagaatagactacactcaaactccag

SEQ ID NO: 293032 - DNA, 98 bp, Homo sapiens
ctttcgtatctatgccccagaagctccatatacttcccatgataaacttaaggtgaatgaaaactttgccattgatttgatagcagagcagcccgtga

SEQ ID NO: 293033 - DNA, 124 bp, Homo sapiens
ggagcttctgataattggaggtgttgcagcccgggatcagctctctgttttggaaaatggagctctaatcaatcgtggggttaacctggatcccctgggcaagtggtcaaagactggactagtg

SEQ ID NO: 293034 - DNA, 75 bp, Homo sapiens
tggcaggagtagctgatcaaaccaaggatgggatgaaaactttcggaagagaaagttgcctgtggtaagttcagt

SEQ ID NO: 293035 - DNA, 99 bp, Homo sapiens
gagagagaggaataccgcaagagctggagtaccgccacctccccgctgggtggggagaggcccttcaggtgccccacgcctggctgtgatggttctgga

SEQ ID NO: 293036 - DNA, 75 bp, Homo sapiens
tggaaagtcacccaaagccgccccaagtgcaggtaagaatgattgatgttggctgatattggagtgctcattcac

SEQ ID NO: 293037 - DNA, 59 bp, Homo sapiens
tgaagaggttctacacaattgacagttgtgaaattcttggtgtactatgctggtgatct

SEQ ID NO: 293038 - DNA, 74 bp, Homo sapiens
ccatccgcctttgatcgtcttcctcttcagccatccagctgggagtgtccactcgccttccaccagcatggcaa

SEQ ID NO: 293039 - DNA, 80 bp, Homo sapiens
gctggacccgctcaccatctacggcatccggtctgagctgactgctgcccactttggaggaggcggtgggctccttcaca

SEQ ID NO: 293040 - DNA, 98 bp, Homo sapiens
ccagaagaagggaaggcgcgagtgaggaaaggaggtactgtagcttaaagaaagtggttattgtacaggtcatgaaccagattccctggagttcagta

SEQ ID NO: 293041 - DNA, 97 bp, Homo sapiens
aaaaatgacttcccattatgtgattgccatctttgccctgatgagctcctgtttagccactgcaggatttgtacacacagatatgacgaaagacttg

SEQ ID NO: 293042 - DNA, 76 bp, Homo sapiens
caccacaaaagcgaaatgggcacaccacaggcctcatggaggtccttccggagcgctgcgtgcagatcgccaagcg

SEQ ID NO: 293043 - DNA, 83 bp, Homo sapiens
cgtgaccagtggccacctctgcagtgtcttccacaacctgggatttcttgtctgctgtggaggatgcagagaaccggtttact

SEQ ID NO: 293044 - DNA, 75 bp, Homo sapiens
gagaagctgcaagagcaacatctttcctcaccccaagaaaacatagctctgctggcagaaacagctctgagattc

SEQ ID NO: 293045 - DNA, 100 bp, Homo sapiens
cagggcaagaagagtccgcgactcctactttatattcagagcaccaatcaaattaagcaagcctggggaacttcgtgaggaatatgaaagcttgagaaag

SEQ ID NO: 293046 - DNA, 100 bp, Homo sapiens
ggctaccctggggcccccggcttcaccaccggcgagcagctgatgcagctgtacagtgcgcgccagcggcggcggctgaaccggggcctgcggcggaagc

SEQ ID NO: 293047 - DNA, 98 bp, Homo sapiens
ttgagaggaccctgtacagagatgtgatgctggagaactacagccacctcgtctcagtggatggccatgctgctgaaacttcaagaagctgccaacta

SEQ ID NO: 293048 - DNA, 83 bp, Homo sapiens
ttcttagccctctacttttcaagacaccaagtgagaggccaaccagtattaagggacatcagcgagagaggcagggatcttga

SEQ ID NO: 293049 - DNA, 75 bp, Homo sapiens
ggagaccagagcagccaagttgcgggacaggaacactttccatcgctttgacaagtttaatgccaaatacaaccc

SEQ ID NO: 293050 - DNA, 101 bp, Homo sapiens
tctacacactggtgtctcctgcggaagggcagctgggcacgccttccagaccgaggtttgcccaaaggaccagccaaaacctcacctcaagccacgcatat

SEQ ID NO: 293051 - DNA, 100 bp, Homo sapiens
aaagctgagaaatgtccacacagcaaatcaaacagaaataaggtagactcaatggactacaagataaagttcgagaaactattgaagcattgagaatggc

SEQ ID NO: 293052 - DNA, 96 bp, Homo sapiens
ccttattgtggttcctgctgtggttttgatcatgttgttaccctcggacgtagcccggcttgtattggagtgatagattcgtgtggcctttcaaat

SEQ ID NO: 293053 - DNA, 95 bp, Homo sapiens
tacaacgaaggtgaagccacggaagataagtgctgctcacggccgtgaactgctacagcgtgaaggccgccacccgggtccaggatgcctttgcc

SEQ ID NO: 293054 - DNA, 75 bp, Homo sapiens
caaaatcctcggattctctacttctgctgttcaaaccttgtactactcagctgatcacaagctgcttgatgggaa

SEQ ID NO: 293055 - DNA, 100 bp, Homo sapiens
gagtacgaccagccttgggagtggaaccgggtcaccatcccagccctggcaggtccggaccctatttgtcagtggccttcctctggatatcaaacctcgg

SEQ ID NO: 293056 - DNA, 82 bp, Homo sapiens
aagctttggatcagacttttgtgttgcagttcgggtgacttaagagattaaaattaatttggttgctgttggttctgaacaa

SEQ ID NO: 293057 - DNA, 99 bp, Homo sapiens
agtcaccagcaggagcagccaaccagcagcagccatcatggaggcgctttgctctgtccaccaagattcctgacaccaaaggctgcttgcagtgtcgtg

SEQ ID NO: 293058 - DNA, 100 bp, Homo sapiens
agggggccataccggacccgcaagcatgcccaccactgccacaaacgccgcaccaggtcttgtagcagcgcctcctcgtttgcatttatgtcggatcctc

SEQ ID NO: 293059 - DNA, 100 bp, Homo sapiens
gggagtgccagacagtgggcgcaggaaagccagcccaccagcgtctgggtgggctgcgccgcgcggctggcggaccttcccgggttggagaagtgcgcac

SEQ ID NO: 293060 - DNA, 95 bp, Homo sapiens
caacttcgggccccggccccgcgcgccccggcccggccccgcgagggagcatcgagtacagctgtccggcctccaacgagtgtgagatcaccaag

SEQ ID NO: 293061 - DNA, 83 bp, Homo sapiens
ctgatccccacacctacatcaaaactccggactcacagaaaccctctgtacccagtcatgggccaaagacaccgtcatgcaag

SEQ ID NO: 293062 - DNA, 75 bp, Homo sapiens
aggcaagttatcctttggaaatgtgctcacactatgagaccctttttgctcttcctgctgcatctgagcctgtga

SEQ ID NO: 293063 - DNA, 100 bp, Homo sapiens
cacgatgccggggatcgacaagctgcccatcgaggagacgctggaggacagcccgcaggaagggaaaaggccgaggcatcagcgtgtgaagaccgcaaag

SEQ ID NO: 293064 - DNA, 74 bp, Homo sapiens
ggccgtcatgccgactctcatacaggcgggcgccagtgcatcttctaggatcgcagctcaagactacatcatcg

SEQ ID NO: 293065 - DNA, 99 bp, Homo sapiens
cccagctctgggtacccggctctgcatcgcgtcgccatgatgggccatcgtccagtgctcgtgctcaactactccaaaggattcggcgggaagtatggg

SEQ ID NO: 293066 - DNA, 100 bp, Homo sapiens
cccagctgcctatctccccactctgggccatcctcttcttctccatgctgttgatgctgggcattgacagccagcaaggtggctcagagttcgtgccagt

SEQ ID NO: 293067 - DNA, 74 bp, Homo sapiens
gccagaagaaagagttggtggtccagatagcaggactggaaggatcaccagcacatatgcggccagtcagcagc

SEQ ID NO: 293068 - DNA, 99 bp, Homo sapiens
cagacagtgagtttgtggaagcctcgcccgcatcctacagcccagacgagttagaacgtgctggccaaagcgctctatgacaatgtggccgagtccccg

SEQ ID NO: 293069 - DNA, 77 bp, Homo sapiens
cagcgcctgttcccggggcagatccaggttcagggctgggcggggcaagcaggaaggagcctgttacagtcaaggtg

SEQ ID NO: 293070 - DNA, 88 bp, Homo sapiens
ctttccaagccaatgcccaagacattataaacaggcatcctaattgatttttaaattcaagagatttatcgagcaccttctataagcc

SEQ ID NO: 293071 - DNA, 100 bp, Homo sapiens
ctccaaggaggaaacccccaagttctgcagccagtgcggagagaggctgcctcctgcagcccccatagcaggttggagcaaaacgtcccactcactggag

SEQ ID NO: 293072 - DNA, 100 bp, Homo sapiens
gcgtcgcgggagcctttggggcaccacagagatgcggggagtgcatccgccccaacccttttccccctcgtctcctgtgagaattccccgtcggatacga

SEQ ID NO: 293073 - DNA, 83 bp, Homo sapiens
cctggctacatcaaacttcgcaagattcgagcagcccagaatatctccaagacgggggtgaatctctacattaagaacttgga

SEQ ID NO: 293074 - DNA, 75 bp, Homo sapiens
ggccccacccagtgcccgactatgagcttattggtaaaggttttcaaggtgtcatgaaaagatggggatttaaag

SEQ ID NO: 293075 - DNA, 51 bp, Homo sapiens
catggaaatgcagggatctccagaaggcaactgaggagatagaggaccggg

SEQ ID NO: 293076 - DNA, 98 bp, Homo sapiens
ggaaatccaaaggcagacagtacgggctcccttcgccaaactcttcattttctctatttggattcaagatgtgaaataatcagcgatgggaaaatgca

SEQ ID NO: 293077 - DNA, 147 bp, Homo sapiens
ctgagagtgacctttgcatctgcctgtccagccagcatggaaccaaagcggatcagagagggctaccttgtgaagaaggatattgaggcaacaatgaactcggccctgaatgagctacgggaactagaacggcagagcagtgtcaaa

SEQ ID NO: 293078 - DNA, 82 bp, Homo sapiens
atcctggccagcctgctcatcgcctactgcaaaaaatggctacaaacttcctagcacatgagaagatctggttcgacaagtt

SEQ ID NO: 293079 - DNA, 100 bp, Homo sapiens
attagaatatggctacatattcccgctgtcatgcagcacattataccttttaggacctatgttattagtaatctatgccagcaattatgacaatgttagc

SEQ ID NO: 293080 - DNA, 75 bp, Homo sapiens
ctagaatctgccgtcttttgaagcaccctaatattggactatacaggctccaacccaagttccagtggttgtgtc

SEQ ID NO: 293081 - DNA, 76 bp, Homo sapiens
atgcctgggtgcccccaggccttaagccggagcagggaggctgtgctggatgcttttctggatgatggcttccttg

SEQ ID NO: 293082 - DNA, 100 bp, Homo sapiens
gtcatctgatgtggtgcttttgaaccactggaaagtgaggaattttgaagtacaccgtggtgacattgtatcattggtggaagaggaagaacgtctgaga

SEQ ID NO: 293083 - DNA, 87 bp, Homo sapiens
tgtccctttgcctcatcccaggttgccttggaaaatgccaacgccgtgtctgaagaactgtgtactgtgatgaaactgctgacgaat

SEQ ID NO: 293084 - DNA, 75 bp, Homo sapiens
ctgtcttttccttaaactctgaatcatcggcctagattggccatctgcaagcttcccttctccgtggagagcagg

SEQ ID NO: 293085 - DNA, 100 bp, Homo sapiens
agaacagctcagcaggaatactcataaagagactgagcctgtgtatgagagggaggcccccagaatgagaagtgacaacaaggaaaatccacaacaggaa

SEQ ID NO: 293086 - DNA, 98 bp, Homo sapiens
caagtggggcgatgctggcgctgagtacgtcgtggagtccactggcgtcttcaccaccatggagaaggctgggctgggcgagtatctcttcgaaaggc

SEQ ID NO: 293087 - DNA, 98 bp, Homo sapiens
atcacacaaaagcacacaaagacctcctcctccacaggggagacagaggtcccttcaataatcaggagatggcagaatggtttcaggcgggctatttt

SEQ ID NO: 293088 - DNA, 74 bp, Homo sapiens
gcaggggctgctgcgagctcgccgggcgccctttagacgcacttcctggacctcactactacacatggggagac

SEQ ID NO: 293089 - DNA, 90 bp, Homo sapiens
ttcttggggtgcagggagtgatggtcagctaggactcatgactactgaggattctgtggcagtgcccagaaatcgaaacgagttggctga

SEQ ID NO: 293090 - DNA, 100 bp, Homo sapiens
ggagcgagtggactcctgcgcctccatgtacagccgctccatccagggccaccatgtctgcctcctggtgaaaaaggtgtcgtatgctcgcccgagctca

SEQ ID NO: 293091 - DNA, 99 bp, Homo sapiens
gagagcgcgaatatcgtcatcgttagaaggaaacatgccctgaactgtcacagaatgaaaccagcgctcttcagcgtcctgtgtgagatcaaagagaaa

SEQ ID NO: 293092 - DNA, 101 bp, Homo sapiens
ggaggccagattttctccaattaaccagatcttgccctggtgcagacaagacttatttgaggagccgtgccatgtcaactcctcccagctcatcacgtgcc

SEQ ID NO: 293093 - DNA, 75 bp, Homo sapiens
gaagcgagcgagaaggcacggagtcgccgcggagcgcaggtccaaccgtgactgccagatcgaccagcaccaccg

SEQ ID NO: 293094 - DNA, 78 bp, Homo sapiens
agctccctagtggtcccacagctgcggccgccgccttcttcctccatgctgtcaataccagcaaatatgcagaaagct

SEQ ID NO: 293095 - DNA, 90 bp, Homo sapiens
gccagctccgggcccagggagaggcctgtgtgcagttccagtaccatgcggagaccatcaagaatgtgcgcacagccacggaaagctttg

SEQ ID NO: 293096 - DNA, 96 bp, Homo sapiens
cgggagccgtgcatcacgcccagtggcatcacctacgaccgcaaggacatcgaggagcacctgcaggccacgccgcaccaggacatcagccgccgc

SEQ ID NO: 293097 - DNA, 82 bp, Homo sapiens
ttaaccaacctcagctttacaaaccctgaatttataactgagtctatcagccacagtctctgcaagtttccaagagcagcag

SEQ ID NO: 293098 - DNA, 100 bp, Homo sapiens
ccgccactcacgctccactgcaacatcacggtgtggacactgccagcggctgcagccgacttggaatgacctgggagacaaatacaacagcatggaagat

SEQ ID NO: 293099 - DNA, 101 bp, Homo sapiens
cagaagctgaacagtttctcagaaagacacaaattcctgagaattgggaacatgctaaatacaaatggtatcttaaggttaacgtccctaaaacccgccgg

SEQ ID NO: 293100 - DNA, 75 bp, Homo sapiens
ctgacagagaagctcaaggtgctctacaagctacaccttcccccaggtacaggtttgcagattccgccagcagca

SEQ ID NO: 293101 - DNA, 75 bp, Homo sapiens
taacacctggcagactctgctccatgagaggatcatccagcagctcgtcaacggcatcatcacgcccgccaccat

SEQ ID NO: 293102 - DNA, 75 bp, Homo sapiens
tggcccgcgcggcgccgggcgctgactgagacttcccaagtaagaagcggaagaggagccgctggaaccaagaca

SEQ ID NO: 293103 - DNA, 90 bp, Homo sapiens
cctctctcggtcgtggtcacaggcaaaggcactgtactccagaaagccaagggccgttgctccagggagaactgcaaatatcttcatcca

SEQ ID NO: 293104 - DNA, 100 bp, Homo sapiens
ccggaatgctgcccgatggccctgggtcctcgctgtggggcaatccgggcttgcagacgaggtcaaaatgcagatcttcgtgaaaacccttaccggcaag

SEQ ID NO: 293105 - DNA, 82 bp, Homo sapiens
tgctgcagaacccccagaccatcatagctccacgcaggagatcggtgaggagctgatcaacggagtcatctactccatctcc

SEQ ID NO: 293106 - DNA, 75 bp, Homo sapiens
ctacggcaccatgtacatgaagacacggcttttccaggacttccaggactatgttaaaatagaagcattgataat

SEQ ID NO: 293107 - DNA, 100 bp, Homo sapiens
aaggacaccaaggtacccaatgcctgtttattcaccatcaacaaagaagaccacacactgggaaacatcattaaatcgagtcctccctcctgaacctgat

SEQ ID NO: 293108 - DNA, 97 bp, Homo sapiens
cactcattttttgaccatggatacaatcacctcgtggaccagaattttaacccattaccacaacagccaactcagtttataaatccagaaacacctg

SEQ ID NO: 293109 - DNA, 101 bp, Homo sapiens
gtaccacaacagggacacctggttccagctgcagcacgtggacgctgactcggaagtgcaggtaagtaaggaggtctctgtaccatggctcgtacaaagca

SEQ ID NO: 293110 - DNA, 89 bp, Homo sapiens
gcccaaccagtcccagcgctgtcgtgctcctctactcgtatcggttttatggagaacctgtaataaaagcatgtattgaaaatggagcc

SEQ ID NO: 293111 - DNA, 80 bp, Homo sapiens
tcaggacgccgatgagaagttcatggaagtcatgtacgggaccaagaagtttgtcctgaagaattatggagagaacccag

SEQ ID NO: 293112 - DNA, 82 bp, Homo sapiens
cgacgctatggcgcactggagtaccctgttcctggcaatttggaggccaatcactgccaccttttatttccctgtgggtcca

SEQ ID NO: 293113 - DNA, 90 bp, Homo sapiens
cggaaagtttatgccgacggaaagtttatgccgacggactgtgtccggcgatgggcacgggcagagaagcctgtgttcttcccagccttc

SEQ ID NO: 293114 - DNA, 98 bp, Homo sapiens
tcctcctcacggtcctcctggctgtgctcatatacacctgtccacattcttgagtctgatgacctccacggccagcgaggcagcgtcctatgagttca

SEQ ID NO: 293115 - DNA, 100 bp, Homo sapiens
aatggacagcatgcctcaccaagtcacatgacaagcagtcttatcgaatgttacttagcctccaacagtattcgagaagcaatggtaatggctaacaacg

SEQ ID NO: 293116 - DNA, 96 bp, Homo sapiens
caacaccctgatctggcatggacatcaaatccagtttgctgatgacatgcaggagttcaccaaattccccaccaaaactggccgaagatctttgtc

SEQ ID NO: 293117 - DNA, 48 bp, Homo sapiens
caatggaaaggtcatttcaactgctaggggagctgatcctggaccgtc

SEQ ID NO: 293118 - DNA, 100 bp, Homo sapiens
tacggcaataaagcaaagaaacaaaagacaactctgcttttccagaaactgtgccaggatcacgggaaagattttcaagggagcaaacttaaagtctccc

SEQ ID NO: 293119 - DNA, 90 bp, Homo sapiens
gtggactcggcgatggagctgttatttttagatacttttaaacacccgagcgctgaggaagaaatgcagagtaacgtggaagtggtccac

SEQ ID NO: 293120 - DNA, 98 bp, Homo sapiens
cgtccagcctaggttccacccttttctgggaacgtgagtatcaaccaaggatgtggcagataaccagatagactctggggacctgatggagtgtctga

SEQ ID NO: 293121 - DNA, 74 bp, Homo sapiens
gtctgtggcaaagttggagaaaaccatcgatgacctagaagataggtgcagatggtcacaactccggagtacgg

SEQ ID NO: 293122 - DNA, 83 bp, Homo sapiens
cttctcggcgctgccgtctctggaggagtactggcaacaggtttggtgcacctcgatttggaggaagtagggcagggccctta

SEQ ID NO: 293123 - DNA, 82 bp, Homo sapiens
tgtgactggggccttggaagatgcccttgccaagatgacagtcatgtccctttccagggacctcaaggacgactttcacagt

SEQ ID NO: 293124 - DNA, 88 bp, Homo sapiens
tgctcttgctgaggacccacaagaacttcgagatggattccaacatcctgctagacttgttaagaccttcacggcatggtgcaactcc

SEQ ID NO: 293125 - DNA, 83 bp, Homo sapiens
aacccagaacggatagctccctcctggaaaaggttgtctttgaagcttggtgatgctggaaaccccagaagtcttgctataag

SEQ ID NO: 293126 - DNA, 112 bp, Homo sapiens
gagaacctgaagtagcaaaggcaagaaggcaacgacgttccatctgtggaaggacctaccaaccaggaatcccgttctgcttccagaagtggaagtgctcacggatcgggga

SEQ ID NO: 293127 - DNA, 83 bp, Homo sapiens
cggtccctgtattggtctcctgctcctagagaacatccagtcatggataaaaatgagctggttcagaaggccaaactggccga

SEQ ID NO: 293128 - DNA, 51 bp, Homo sapiens
attcagcctcagtgatgtccatgaggagagccttgaacttaggaattcttc

SEQ ID NO: 293129 - DNA, 74 bp, Homo sapiens
ttcgagaacgaccccgagacgcttttcttgcctggagaagagggaggggagaggacaagggccctggctactcc

SEQ ID NO: 293130 - DNA, 100 bp, Homo sapiens
aaacgtcatcattaagttggagcagggagaggagctgtggataacgggaggtgaatttccatgtcaacatagtcctggaaataagatatgtggaacggag

SEQ ID NO: 293131 - DNA, 51 bp, Homo sapiens
aggcactgtctgaggagactacagcaggtaagaatgattgatgttggctga

SEQ ID NO: 293132 - DNA, 75 bp, Homo sapiens
cgaggctgggctgaggcgccgcggtaccatgaggcgccgtaacaatgatgatgttatgttgatttctgtggaaag

SEQ ID NO: 293133 - DNA, 75 bp, Homo sapiens
cagatggtggctcccggagtccagaacatccagtcatggataaaaatgagctggttcagaaggccaaactggccg

SEQ ID NO: 293134 - DNA, 83 bp, Homo sapiens
ccacagtgggctctgccatcagcaggaagcttggagacatgaggtgtccctggccagtgtccttccacctgtccacaagcatg

SEQ ID NO: 293135 - DNA, 96 bp, Homo sapiens
tgtagccacctcctaaccttcccttcttgaacccccagacatgaagaggagcatcggcggcgtgaggaagaaatgatccgacacagagaacaggag

SEQ ID NO: 293136 - DNA, 96 bp, Homo sapiens
tctacctcaaggacatggagcgcttgaaagaggaattatcccgaaaagttaacatgtcacctccacgaggccatcctctgtgaccgaaggcagctg

SEQ ID NO: 293137 - DNA, 100 bp, Homo sapiens
gtggaatgaatctgaacccagaagtggaagggacgctaattcgggtacccattccccaggacaatgatgttaattatcgggctgaatatgctatttggtc

SEQ ID NO: 293138 - DNA, 90 bp, Homo sapiens
agacatttgtcaaactcaacaaattgaaggttaacaccttaagagttgtagttactgaccaggacctgtgaaaagagcaagagaagaaac

SEQ ID NO: 293139 - DNA, 82 bp, Homo sapiens
agccgcaccatgccgctcctaagcctgcacagccgcggcggcagcagcagtgagagcacaggaagtcctggagaacctgaag

SEQ ID NO: 293140 - DNA, 100 bp, Homo sapiens
tgaagcacctctccagcggggacctgctccgggacaacatgctgcggggcacaggcaaatgttctgaaaaagactctgcatgggaatggcctgccttacg

SEQ ID NO: 293141 - DNA, 100 bp, Homo sapiens
ggggcctggctaaggaaaccctattacctccagagataatagtagcagaatttcacaaaaaaatcaaagaggcatttgaagtctttgaccatgagtcgaa

SEQ ID NO: 293142 - DNA, 82 bp, Homo sapiens
gttggaagcagccgatccagcctgcggagcctgtggggcaggacagaactgtaccgctctctttttggccagctccaccctc

SEQ ID NO: 293143 - DNA, 51 bp, Homo sapiens
gggagactgtattgtgtgcgagaagggttcatagtggcgtcatgcacgcag

SEQ ID NO: 293144 - DNA, 100 bp, Homo sapiens
gggcggggcggagccaggagccccacggagcgctgcggagcgaacctcacctttccagggcgcaagaagacctatggagcattcatgatctagaagcaag

SEQ ID NO: 293145 - DNA, 101 bp, Homo sapiens
gttcgcctgaagaagaccgccactgccggagccatctcggagctcacggagagccgcctgaggagcggcacagagataattgacgaccttgccaacctagt

SEQ ID NO: 293146 - DNA, 90 bp, Homo sapiens
agatggtggaggagcacttctactgggcttcattatttcaaaaatgttgtgctagtgggatccctacaggatcgctatgttccttatcac

SEQ ID NO: 293147 - DNA, 75 bp, Homo sapiens
agaagatgaggagactatgtatctgcggaggactttgattcctggtttgatacaaacaactgccttggggatcaa

SEQ ID NO: 293148 - DNA, 98 bp, Homo sapiens
ctatagaaacacctaatgtcagggcagaccccttcaaagaactaagatgttctcagtgcagctgagtcttggtgagcagacatgggaatccgaaggca

SEQ ID NO: 293149 - DNA, 100 bp, Homo sapiens
agaaccagtaccggctgacctcgctgtacgccgagcacccaggcgactgcctcatcttcaaggtcaaaatgcagatcttcgtgaaaacccttaccggcaa

SEQ ID NO: 293150 - DNA, 75 bp, Homo sapiens
cgccctccccgccaaggcccgtgcgaggaaaatgtttataggaggccttagctgggacactacaaagaaagatct

SEQ ID NO: 293151 - DNA, 100 bp, Homo sapiens
ggctgtgctgacttttttatccgtggagagcgactcagggacaaaatgaatatgtgagatccaggctgttgactgtactacaatatcctcatttacagtg

SEQ ID NO: 293152 - DNA, 75 bp, Homo sapiens
agtttgtccgcattgatccttttgtgaggaccttcctgaagaagaaaggcggagataaaaagaggggtgttaaaa

SEQ ID NO: 293153 - DNA, 76 bp, Homo sapiens
aatatggtctcatgcgatacaaaaatacttggaaatcccactgaaagatttaaagatgacaaatcctgccatacag

SEQ ID NO: 293154 - DNA, 82 bp, Homo sapiens
aagaggaggtgcagatggcactttccaaagtggatgcctccggggagacaatgcagatcttcgtgaagactctgactggtaa

SEQ ID NO: 293155 - DNA, 101 bp, Homo sapiens
gaggtgatgagaaacggaaaaataaaggcacttcggctcaggcagctgtccaaggacctgttggtacagatttcaaacccttaaatagtacccctgcaaca

SEQ ID NO: 293156 - DNA, 98 bp, Homo sapiens
cggagatgacggcgcccgccctcccgccgccgccctaaggatacctgcccactatgtctatccgcaggcttttgtgcagccgggagtggtcattccac

SEQ ID NO: 293157 - DNA, 80 bp, Homo sapiens
cagctgtttgcccttcacgccattggatgaagcctgctgggagcgtgaatgacatggccctggatgccttcgacttggac

SEQ ID NO: 293158 - DNA, 96 bp, Homo sapiens
tcgccatctatcacgcacacagaaccctggccaggatcatgaagggcgattgaaaaggttcttgggtgtctctggggagtccctgggccagacctt

SEQ ID NO: 293159 - DNA, 101 bp, Homo sapiens
ccggcctttgccccaatcttgtgtgggcactgaagggggactacaggttcgagaagtcgacttcaatgttcctatgaagaacaaccagataacaaacaacc

SEQ ID NO: 293160 - DNA, 83 bp, Homo sapiens
tggataccaaggaagagaagaaggaacggaaacaaagttattttgctcgcacttctcagaacttctggatgagttttcccaga

SEQ ID NO: 293161 - DNA, 93 bp, Homo sapiens
ttttgggaaactcgactttggagaaaccaccgtgctggaccgcttttacaatgcaggttttaaaatcaaagatgggaaaatcggagaaaattg

SEQ ID NO: 293162 - DNA, 105 bp, Homo sapiens
agaagaccattcagatgggatctttccggatcaatccagatggcagccagtcagtggtggaggtgcagctctgtcatttccactctgctctgctgcacagaaggc

SEQ ID NO: 293163 - DNA, 83 bp, Homo sapiens
tttcgccagcccgtgccgcgagcgcggcctgcaggagctggagcagatccgcagggacatccgagacttccggtctagcgcgg

SEQ ID NO: 293164 - DNA, 75 bp, Homo sapiens
cagggaaccctggtcaccgtctcctcagggctttttggtggtgctggagttggcaagactgtactgatcatggag

SEQ ID NO: 293165 - DNA, 100 bp, Homo sapiens
ctgctactgcgaagacagctggcaggaggaggaaaggcaagctctgactctgaggttggaggcagaacagcagcggtgctgtgtcctgcaggaagagcgg

SEQ ID NO: 293166 - DNA, 100 bp, Homo sapiens
agcctcgacacagattccaccaaaagctcaggtatctgtaattcttgcccaccaaacaagcctgcagaatctgttcagtcaaataactccagctcatttc

SEQ ID NO: 293167 - DNA, 100 bp, Homo sapiens
ctggggatgattacagttcttcctaaaaaagattagcctgaggcctgctcagtcgttcctaatgaataaaaatcaagtgccaaagcttcagccccagata

SEQ ID NO: 293168 - DNA, 98 bp, Homo sapiens
ccgattgccaggtccaagagcggttgcagggatcgatttgcttagtggtataatacctgaactctgtcagaaatatccagatttaaatttcataattg

SEQ ID NO: 293169 - DNA, 98 bp, Homo sapiens
gtccctgcatgctcctggcactgagggggaaccagaccatggtggagacgatcctacacctgccacctccgatggatccactgcctctgtgcctgcct

SEQ ID NO: 293170 - DNA, 74 bp, Homo sapiens
tgctgttagcattagcctttggatttgtgtccagattgtcatcgagatgcagggtttacagattggtacccgag

SEQ ID NO: 293171 - DNA, 100 bp, Homo sapiens
gccttgtctccggtcgttcccgttcaggagcagaaaaagcttgtggtgaaggggggcaaaaaaaagaagcaagttctgaagttcactcttgattgcaccc

SEQ ID NO: 293172 - DNA, 50 bp, Homo sapiens
cgccaccacccactccggacacagggcagcgggtggcatgagacgtggga

SEQ ID NO: 293173 - DNA, 89 bp, Homo sapiens
agggggtgtccccttcagctgtgtcattgttgatgagttgcaggaccagctctgccccctaattataaaagcagtagttcagattcatc

SEQ ID NO: 293174 - DNA, 73 bp, Homo sapiens
ggacgcaaagctgtcatcgtgaaggagtggaggcagcacagacagtgaggacgaagaagaggaggacgaggag

SEQ ID NO: 293175 - DNA, 100 bp, Homo sapiens
gactaatgacaacaaagaggctgatgaagatttctttgacatccttgtaaaatgtcaagaatgtgttccagaagatctagaactgaagaagaagattttt

SEQ ID NO: 293176 - DNA, 101 bp, Homo sapiens
acctctacaacgaaggtgaagccacggaagataagaacatacatatgatagttgagaaagacacatattctgatcatgaagaaataaacacaagttaaata

SEQ ID NO: 293177 - DNA, 90 bp, Homo sapiens
ctgtcgatgccctcagtgaagaactagtccagcttcgagcacaagtggaaagaggcaaaacctgatgaattaatggattccaaattgaga

SEQ ID NO: 293178 - DNA, 82 bp, Homo sapiens
gagcgcaccgacatctgcctgctcaaagcttccccgggcgctgcctggacaggcctgcctgcgtgctgggacatgtctggcc

SEQ ID NO: 293179 - DNA, 100 bp, Homo sapiens
agcggaaggtgatgcccaagatggaccagttactgtaaaatggggaaaggagaaatttgaaggtgtagaattgaatacagatgaacctccaatggtattc

SEQ ID NO: 293180 - DNA, 75 bp, Homo sapiens
agctgtactaggactgggaacgggaagcatgagtgggaaaagcatgggacctgcgccgcccaggtggatgcgctc

SEQ ID NO: 293181 - DNA, 83 bp, Homo sapiens
gcgcgcagggcctgcagcgggagctggacggcgagcgcgagcggcgcgagaaagaaacttcatggtgttatggtcaacttgcc

SEQ ID NO: 293182 - DNA, 75 bp, Homo sapiens
tggaagctgagcgcgtggtggagttttcctgtggcgtccgagctgggccacagcctgaacgagaacgtcctcaag

SEQ ID NO: 293183 - DNA, 74 bp, Homo sapiens
ggaagaaattgttcagttcttctcagttcagaaataccacactattaatgggcataattgtgaagtgaaaaagg

SEQ ID NO: 293184 - DNA, 82 bp, Homo sapiens
aagacgaccaccatcctgctggacgggcggcgggtgaagctgcagctctgccgcggcgagtcctttgcacatgttggcaaca

SEQ ID NO: 293185 - DNA, 75 bp, Homo sapiens
cctgcttggagacggacttgcttccggttgcacagacagcagatggtgtggatgctgacctctggaaagacggct

SEQ ID NO: 293186 - DNA, 100 bp, Homo sapiens
ctacggtaatggatgaaatccacactgttctcaagaagacttcacatgtatcattctccgagcctgatattccgtcctcaaaaagtactgagttacctgt

SEQ ID NO: 293187 - DNA, 113 bp, Homo sapiens
tgaaagagtaccggatctgcatgccgctcaccgtagacgagcggaatggccaaagactatgacgggtcttcctagcacatcagggacaactgccagtgtggtcatcattcggg

SEQ ID NO: 293188 - DNA, 82 bp, Homo sapiens
atgggagacaggaattgagagtcacagaggaaggacagtggagtctggcatcttattgtactgtcccactgaccaggctgct

SEQ ID NO: 293189 - DNA, 100 bp, Homo sapiens
acatgatgatgctgttagtaagatctgttggcatgacaacaggctatattctgcatcgtgggactctacagtgaagggtatatttgttcagctagtccag

SEQ ID NO: 293190 - DNA, 100 bp, Homo sapiens
ctgaactcaggacttggcaattaattggccttggtcctcacagctccaaaaagaaacaggatctcgataagctctatgagctgaagtccaaagctcggca

SEQ ID NO: 293191 - DNA, 74 bp, Homo sapiens
gctatgcagtatttctttggcatcactgcagctagtaatttgccttctggatttttcagaagaggagccccgcc

SEQ ID NO: 293192 - DNA, 101 bp, Homo sapiens
ttgcctgttcagtactgtgggtgatatttgcctttagtgcactcttctccttcacagtaaagtggctggtatacaaaactaggatatgctggaaatacaga

SEQ ID NO: 293193 - DNA, 119 bp, Homo sapiens
ctcaaagtgggacaatatcctctgtggagaacacccccccatggaggcgaggtagagttggggtcgcagaaacaccatctgattcagatcacaagaagaagaaaaagaaaaaagaagag

SEQ ID NO: 293194 - DNA, 78 bp, Homo sapiens
aggatccggaggtggcgaaatgtcagacacaaacggacccaggtgttcagctccgaggccgcctggcagtgtgtgagt

SEQ ID NO: 293195 - DNA, 82 bp, Homo sapiens
caaccgcccattcagtctacggctggggccgtcccagttcgcaatgagaaagagtgctgatggcagagattggtgaggattt

SEQ ID NO: 293196 - DNA, 75 bp, Homo sapiens
atgttggagaactatagcaatctggttttcttgggtctagagagcctggtgctgacctacgtcaatgccatcagc

SEQ ID NO: 293197 - DNA, 74 bp, Homo sapiens
ctggagccagtgcccaagtacggtttggaaggctttgtgatacctgatgaagggggcccacaggaggagcaaga

SEQ ID NO: 293198 - DNA, 75 bp, Homo sapiens
ctggaaagtgaggaattttgaagtacaccgtggtgacattgtatcattggtcctacaacacagcagtcccctcag

SEQ ID NO: 293199 - DNA, 82 bp, Homo sapiens
caaacctgaaggacttcatctcccgatttgaggttcccacgtaacatcacatcagacccaagggcccgttcattgcaaggcg

SEQ ID NO: 293200 - DNA, 101 bp, Homo sapiens
gtgagagatggaacccgaagaagaaaggattcgttacagccagagattgatggccaccatgtctgggagatggaagcgaaaactgaccgggacctgtgcaa

SEQ ID NO: 293201 - DNA, 73 bp, Homo sapiens
actgcacaggctacatcaaggcctggcccccagcaggactgtaactcttgaccaggcaacagataatgcaaaa

SEQ ID NO: 293202 - DNA, 83 bp, Homo sapiens
tgggggaccggctgttggcgggacgccaacaaggagagcagcaagacctccaagccacacaaggtgaccaaggagcaccggga

SEQ ID NO: 293203 - DNA, 99 bp, Homo sapiens
ggagctatgatccacaaaaacaacttattattgaagatccctattatggcagaagtgatagttcaagtaagaaggatgtgattgagctgacagacgaca

SEQ ID NO: 293204 - DNA, 75 bp, Homo sapiens
gttattaaagtctgttggtgcacaaaaagacacttatactatgaaagagacatgctggtgtctacacagcagaag

SEQ ID NO: 293205 - DNA, 100 bp, Homo sapiens
tttacccgcccgcctgctcggcgaccagatctctggaccggattcgtcccattctcgtcctcatggtggacaagaaactggtggtggttttcggaggcac

SEQ ID NO: 293206 - DNA, 100 bp, Homo sapiens
cgccgggtgtcgatccttttccctccagtcagatttgagcaatgctgtacacagtgagatgtttgttggctcagatgagtttgacttctttcaaattgga

SEQ ID NO: 293207 - DNA, 124 bp, Homo sapiens
tttcgggtcgtcatggctggctacgaatacgtgagcccggagcagctggctggctttgataagtacaaggaccaggactaaaacctccagaggaacggacaatagaatacctagaagaagttgc

SEQ ID NO: 293208 - DNA, 97 bp, Homo sapiens
atcgtgtgaactatagagtttgtggacagatttatattgattcaaggcctcttccagatgtagccctgactgggaagtgcactcgtgagtgtgatga

SEQ ID NO: 293209 - DNA, 75 bp, Homo sapiens
agaattctcccttgggatctggactggacccctttcctgtaacagaattacagcgattattggagccggaattgg

SEQ ID NO: 293210 - DNA, 83 bp, Homo sapiens
cccgcgagcacagagcctcgcctttgccgatccgccgcccgtccacacccgccgccaggtgttggagagcacaatggctgaac

SEQ ID NO: 293211 - DNA, 100 bp, Homo sapiens
aagaaactgaggcacagggagcaaaagtgtggggttagccaccagaaaactgggaaatttggccaaacccactgtgatcatcagcaagaaaggagatatt

SEQ ID NO: 293212 - DNA, 50 bp, Homo sapiens
ccgaggctcgcgggcggcgggcccgggctgatgtttcagacaccgcagga

SEQ ID NO: 293213 - DNA, 74 bp, Homo sapiens
ctccgcggccgagagtgcagcgattttccacctatttccctggatattttgatggtcagtactggctctggtgg

SEQ ID NO: 293214 - DNA, 89 bp, Homo sapiens
gtcgaaggggaaggcgcctgaagaggacgaagtcctgtccaagaacagcaagcctatccataccaccatcctaaacccacacgtccacg

SEQ ID NO: 293215 - DNA, 100 bp, Homo sapiens
tgagaccatcttttgcgagctggggaaccccttcaaacggaaccagagggatgtcagtgggcccctgagggagctgcgccctcggctctgccacctgcga

SEQ ID NO: 293216 - DNA, 135 bp, Homo sapiens
ttcgccggatcctctgagaggctctgcaacgatcccgatccaattcagcagcgttttaaaaggtaatagcctgcagctggtgttttgagaagccctactgctgaaaacttaacaattttgtgtaataaaaatgga

SEQ ID NO: 293217 - DNA, 89 bp, Homo sapiens
acgaacgcccttcggccggatcgaaggcgttcaatgtcatcaatggcggttctcatgctggcaacaagctggccatgcaggagttcatg

SEQ ID NO: 293218 - DNA, 101 bp, Homo sapiens
tgcaaattaattcatcattagagaaattagatctgggtgactgtgatctgctcgatgcattctatttctcatcatttggctcataactggaggaaggcacc

SEQ ID NO: 293219 - DNA, 82 bp, Homo sapiens
caggcagtcccgcggcagcaggatcacaggtgaccagaagtcagcagcttcccagaagccccgaagccggggcatcctccac

SEQ ID NO: 293220 - DNA, 90 bp, Homo sapiens
aaagcctggctcgaaacatctgaagggttcgcagtgataaaggaggcatttgacagcactagcagtcgttccccatcaggaagtcctcgc

SEQ ID NO: 293221 - DNA, 83 bp, Homo sapiens
tctgcgcatgcggtctcggggagaggctactctatgccatggacaatattaccaggcagaaccaattctacgatacccaagtc

SEQ ID NO: 293222 - DNA, 100 bp, Homo sapiens
ttggaccctgaactgcacctctgtcaaggcaacaggacctgtaccgaatcctgaaggcctacaccatctaccggcctgacgagggttactgccaggccca

SEQ ID NO: 293223 - DNA, 100 bp, Homo sapiens
acagaggaagatggacagctgggaattgctgaattagaactgcagaggttcctctacagcaagggtgaggacgcttgagcggaagttagaagcaaaaatg

SEQ ID NO: 293224 - DNA, 50 bp, Homo sapiens
gccattgagaaattgttgaggcaggttcttttgaagtaaccagtgatctt

SEQ ID NO: 293225 - DNA, 75 bp, Homo sapiens
cttgattacaagagagacttgttttgcctcagtgttgaagccattgaaaggtttgatgagaagagggcagtgcag

SEQ ID NO: 293226 - DNA, 82 bp, Homo sapiens
ggcctgcagcgggagctggacggcgagcgcgagcggcgcgagaaagtgtggaaacaggaagagaactagaactggaagtaaa

SEQ ID NO: 293227 - DNA, 83 bp, Homo sapiens
caggaattgagagtcacagaggaaggacagtggagtctggcatcttattggttcgagaacttgtcttggacaattgcaaatca

SEQ ID NO: 293228 - DNA, 52 bp, Homo sapiens
gcccactcgcctcacctgagcctggatcacatgtacatgaagacaatggaaa

SEQ ID NO: 293229 - DNA, 100 bp, Homo sapiens
ctcaactatctcgctgacacgcaggaaacctaacgaagcatatgaaatctaaagcacacatgaaaaaatgcctggaattgggagtctcaatgacatcggt

SEQ ID NO: 293230 - DNA, 96 bp, Homo sapiens
aacaccagcgtgccaaaagagcagtctcacatgaagaccaatttttacgtctagatttccatgcccatggaagctcaaattgaaattattccatgc

SEQ ID NO: 293231 - DNA, 100 bp, Homo sapiens
tggggaagtttacacatgtggtttgaacaccaaggggcaactgggccatgagagggaaggaaacaagccagtttgtggggacattcatggacaattcttt

SEQ ID NO: 293232 - DNA, 75 bp, Homo sapiens
cttaaatgacaccaagcaaagcctacttagtttagatctccagaaacctctgtagaggagcaggatgcaaccgac

SEQ ID NO: 293233 - DNA, 100 bp, Homo sapiens
tatggcgctcttaggcagccgagcggagctggaagcggacgagtctgaacaacccagtcctgccagctccagctccagctccagctccagcttcacacca

SEQ ID NO: 293234 - DNA, 90 bp, Homo sapiens
ttcatgtctatatatttccccattcactgatgaggtttatataactttccaagacaaggaagttgtgcaaagcctcacagctactaagag

SEQ ID NO: 293235 - DNA, 89 bp, Homo sapiens
gcccagcgcccccaggccgctcccggggctcacggtgtatgcccacgcaggcgcgacgctggaggggaagatgtatatcacctgcggcc

SEQ ID NO: 293236 - DNA, 82 bp, Homo sapiens
gcgaacgcggagagcacgccatgaaggcctcgggcacgaagccccatgtgccactcccctgatctgcagcttcggtaggccg

SEQ ID NO: 293237 - DNA, 82 bp, Homo sapiens
aagatgacagacttggacaacatgtcccaacattacatcccaattgcagattgagtacccagcacgaggaatcagcagatga

SEQ ID NO: 293238 - DNA, 74 bp, Homo sapiens
gctgatggcccctacctggtgatcgtggaacagcctaagcaggtcccgcagcccccggaagccaatagactccc

SEQ ID NO: 293239 - DNA, 96 bp, Homo sapiens
ccgaattcagaaggatatcgacgtcgtgatccagaagtccagagctgaggactgcctgtttgcaggatgttcgtgacctgctggcagggccaagct

SEQ ID NO: 293240 - DNA, 88 bp, Homo sapiens
cctgggtgaagaagtatgatcgctcctccctgcggaccctggggtcagcactttttacctcgatggaaatgtgagcagctgatcagac

SEQ ID NO: 293241 - DNA, 98 bp, Homo sapiens
atggccactccagtcggtgttgagcacggcgagcagtctcaggcctttagtgatgatgcaaagaacagtctgaacttgatcaagatttggatgatgtt

SEQ ID NO: 293242 - DNA, 82 bp, Homo sapiens
ggacggcgagcgcgagcggcgcgagaaagtgtacgtgaacggagagtgggtgaccaacatcagcgagggaggcagcttcggg

SEQ ID NO: 293243 - DNA, 98 bp, Homo sapiens
cgtgactctagggttagcagaaccatccaccaacataagtttcccattggtcactgtacacttggaaaagtttttgtcatccattggagggacactgt

SEQ ID NO: 293244 - DNA, 83 bp, Homo sapiens
ttccagcgagtcgacttcccatcctgagttgtggtttgaagaaaagcagcagcaatttgagaatctggatcagcaacttagga

SEQ ID NO: 293245 - DNA, 128 bp, Homo sapiens
ctgcgtcctttttcgtttttcggatgatgccttcaatactacctttatttccaccataggatgctgaaaacgccattcaacagatgggtggccagtggcttggtggaagacaaatcagaactaactgg

SEQ ID NO: 293246 - DNA, 100 bp, Homo sapiens
ctattttgtggaatattcattgtactgaatattacccttgtgcttgccgtgtaaggcaaacattggtgggcaccgatcttcctgttcattctgcaagaac

SEQ ID NO: 293247 - DNA, 100 bp, Homo sapiens
tggtggcatccttatccccaacgtgcacagccagaggacaacacatcacacacaagaaacagttgtgctcatgtgatgggggcctcagcactaggaagga

SEQ ID NO: 293248 - DNA, 75 bp, Homo sapiens
tgaggatacagaaggctggaggaaacgtcaggtgaggcagctgcaggaggatgcagcccgcctccaggcggccta

SEQ ID NO: 293249 - DNA, 83 bp, Homo sapiens
aaaggaagacttgtaacctggagaagagcaagattaccttatgctggctactttggatgagaatgaggaagtgatagatggag

SEQ ID NO: 293250 - DNA, 100 bp, Homo sapiens
ccgggtcttccagaaggctgtagaccagagtatcgagaaggtggcttgctttggtgaaggtattcatacagccttcctaaaggcaatgctttccacagga

SEQ ID NO: 293251 - DNA, 83 bp, Homo sapiens
cgccgcgcccccgcctagcccttccggatcctgcgcgcagagtaaacactacacgtgaagagtggtgaaagggaacattgatt

SEQ ID NO: 293252 - DNA, 88 bp, Homo sapiens
caaatgctcttcattgtgtaacaactagtcttctggctcatcccccctacagcccacaacctggagctgtacgagaattggctgctgt

SEQ ID NO: 293253 - DNA, 50 bp, Homo sapiens
aaggattccaagtaactcttatttgaggcagttggtgtcaccagccagcg

SEQ ID NO: 293254 - DNA, 100 bp, Homo sapiens
gaaaccatgaggattgctgagaagctctacactcaaggaaaccagcctggacaccaagtctgtgtcagaaggccacctcaagaggaacatcgtggtgaag

SEQ ID NO: 293255 - DNA, 97 bp, Homo sapiens
cacaggcttgtccggggagcagtatgccggaagctggttttcaggccacaaatgctttcacaggggacttatttgaaaattactgcagaaatgatga

SEQ ID NO: 293256 - DNA, 90 bp, Homo sapiens
cttcctttctcggaaacgcggcgcggccggctgccggaaacacccagtcagcttgaagagtttcaaatggaccctaccactgagaaatca

SEQ ID NO: 293257 - DNA, 90 bp, Homo sapiens
ctcagctaacatggcaacagaataatgttcagagtgcttttgcatctcttccaaagcacaaacctggtttctggtcagaggtagctgcgg

SEQ ID NO: 293258 - DNA, 100 bp, Homo sapiens
cattcagactgatgttacaggactgcacggcagtcaagacgttattattaaagatgaagagagttcttcaagaggttctgatctacaatggccaactgga

SEQ ID NO: 293259 - DNA, 100 bp, Homo sapiens
accctagtaagcacatatttggtagcctttgcatacaagaatgtgaaatttgttctcaagcacaagcctgaattattggaacaactttggaaagccagag

SEQ ID NO: 293260 - DNA, 75 bp, Homo sapiens
gcggagaccactgttcaaggccacagattgacgagatgcctgaggctgccgtgaaatcaacagccaacaaatacc

SEQ ID NO: 293261 - DNA, 74 bp, Homo sapiens
ctttacatatcatgaccccttcctggcatcttaggcactcaaggagttgcccctggtcctgtaattggacttca

SEQ ID NO: 293262 - DNA, 100 bp, Homo sapiens
ccgtgacccacggccgcctccggagcccgacgcggccaaacaccagagcaccctagaaggtttaactaaaagaatgctcatgtttgacccagttcctgtc

SEQ ID NO: 293263 - DNA, 90 bp, Homo sapiens
cagagatgtggaagaaactttattccaagtggctcatgatcccgactgtggagatgtggtgcgactaggaacaagactgccaatggagac

SEQ ID NO: 293264 - DNA, 90 bp, Homo sapiens
gttctggaagtcagggtactgggccagtcatttagccgggcgaaagtatcatatcagcagaatcaaattggatatccccaaccttatggc

SEQ ID NO: 293265 - DNA, 152 bp, Homo sapiens
tattgcaatcatggtgcagaaataccagtccccagtgagggtgtacaaatacccctttgaattaattatggctagaaagtggctcatgccaaagaagaaaaccttagtatgcatcagatgctggatcagactttactggagttaaacaacat

SEQ ID NO: 293266 - DNA, 82 bp, Homo sapiens
ctgtgagatgcagagccccagctcctgtctggtctgtgagatgtcctcactgtttcaggagcatcccagccatcactcttcc

SEQ ID NO: 293267 - DNA, 74 bp, Homo sapiens
gccaactgttggatgcagatgggatgcctggtgtgcaggagtatatacaacagcctattctcaatggtctgcgg

SEQ ID NO: 293268 - DNA, 101 bp, Homo sapiens
gtgggggaggaagccctttctcctcggcactgtattctttacctgcttcccaatcccactgatgaggatcagcccatgcatgctcatgcacattcatctgg

SEQ ID NO: 293269 - DNA, 100 bp, Homo sapiens
tgaataaagaagtggagcgtgtcctgaaggagttccaccaggccgggaagcccatcgggcagaatccagagaccacatttgaagtatatgttgaagtggc

SEQ ID NO: 293270 - DNA, 100 bp, Homo sapiens
aagccaagctcatctctgagacccggaggaggttcgaagctgagtatgtgacaggtacttcctatttaacagacattgtgtggtgggctggcacaatcgc

SEQ ID NO: 293271 - DNA, 100 bp, Homo sapiens
ctactgtactggctattggaaggaggagattctgaagataaggaggaggaatttgtgaaatggaagggctccctgttcttccgatttgtcagcactctga

SEQ ID NO: 293272 - DNA, 90 bp, Homo sapiens
aagggaagatcgatgtgtgcattgatggagaaggatgaaactgtgagtgactgctccccacacatagccaacatcgggcgcctggtagag

SEQ ID NO: 293273 - DNA, 75 bp, Homo sapiens
gatgatgctgaaaggaataacaaggcttatctctaggatccataaggccaagaataaaatctttatgaactaaca

SEQ ID NO: 293274 - DNA, 98 bp, Homo sapiens
tcgctgcagcggccctggcgggtgccctggctaccatggaccatcctgctggtcagcactgcggctgttccatgtctgtgacaagcttggaggccgag

SEQ ID NO: 293275 - DNA, 100 bp, Homo sapiens
ttgcgagcgggagcgaggggcgccggctggggtgtgtgctcctggtgagagttacgtgtgtgcatccaatgaaccatttcgtaaagtcgattacaccaaa

SEQ ID NO: 293276 - DNA, 100 bp, Homo sapiens
cggccagacacggacctgagccgcgaggacacgggctgcaacctgcagcacatcagcgaccgggagaacatagacggagttggtgaccttcagagatgtg

SEQ ID NO: 293277 - DNA, 90 bp, Homo sapiens
tatctgtgataaagttggtcagtctcgcactgggctaattcacctaaataagattgatcctcatgctccaaatgaaatgctctatgggcg

SEQ ID NO: 293278 - DNA, 83 bp, Homo sapiens
cgtccttctccactttcgccagcccgtgccgcgagcgcggcctgcaggagggcgccctgcgtccggcagaggaggcgagcatc

SEQ ID NO: 293279 - DNA, 100 bp, Homo sapiens
cttgtacagagatgtgatgttggagaactatagcaatctggttttcttggttgacgaaggatcagagattggtgtattcgggcagactgcttcccgatca

SEQ ID NO: 293280 - DNA, 82 bp, Homo sapiens
cccagatgtctgacagccctgtgtgacaccaagataagtaacgacacattcagctaacgtattttagcaggtggagtgaggt

SEQ ID NO: 293281 - DNA, 74 bp, Homo sapiens
gggccgttgatcttcggccccacacgctggtaggtgagtgctgtcctcggctcactttcctcaagctctccggc

SEQ ID NO: 293282 - DNA, 96 bp, Homo sapiens
tgacatctgcctgagagatctccaagaattacaggtccaggtgcaggtacagcagtctccgcaacaggtctcggctcagctctccccacaactcac

SEQ ID NO: 293283 - DNA, 82 bp, Homo sapiens
tccggttcgagatcagcttcgagtgcagtgaagccctggcggacggggcccggctcccgggcgcggccctcgggcggacgga

SEQ ID NO: 293284 - DNA, 95 bp, Homo sapiens
caagtacgagagtggccctgacggaggggaggaaagatgcagaggatgctatttatggaagaaatggttatgattatggccagtgtcggcttcgt

SEQ ID NO: 293285 - DNA, 100 bp, Homo sapiens
cagctttctgccatttcaaattgaccacatcaggcagatggcgtatcagatctgccagtcaataaattaggctgccattcgctgcaaggttgaacacccc

SEQ ID NO: 293286 - DNA, 100 bp, Homo sapiens
gtgggcaacccctactggatggcacctgagatgatcaacgcctacaaggagaagatgaaggagctgtcggtgctgtcgctcatctgctcctgcttctaca

SEQ ID NO: 293287 - DNA, 90 bp, Homo sapiens
ggtgaatgctgctaaaaacaagactggggctgctcccatcattgatgtggtgcgatcgctccaaagacaacaggccctccctctgccctc

SEQ ID NO: 293288 - DNA, 88 bp, Homo sapiens
ttgaagcatacatcaaaatgcagacagtagtattgtctctagtgatccctgaaaagttccagcatattttgcgagtactcaacaccaa

SEQ ID NO: 293289 - DNA, 80 bp, Homo sapiens
tttgggtcagatagatttggaagagacctcactcatattaactggactctacaagcagtgagcatccagacctgcatttg

SEQ ID NO: 293290 - DNA, 50 bp, Homo sapiens
gtcccatgctctgctgagcacggtggccaaagaatcctgggagatggata

SEQ ID NO: 293291 - DNA, 100 bp, Homo sapiens
acatcgggaataacacaccggagacttttggggggaaactaggtcgatggtcggcggcgcccggatgggcagctgagggccatgatccaaaggaaccaga

SEQ ID NO: 293292 - DNA, 50 bp, Homo sapiens
gccactgcgcccagccttgatcttgagaatcaggaaacccaggcccaacg

SEQ ID NO: 293293 - DNA, 75 bp, Homo sapiens
aaagaatgaacactgtccttcaaaacgagatgatgactttgagttcactggcagccacctgacagtaaggaatgg

SEQ ID NO: 293294 - DNA, 74 bp, Homo sapiens
gcgaagattgacgccagtaagaacgaggaggatgaagggttgcttagccagacaatgaaggatcatctagtaag

SEQ ID NO: 293295 - DNA, 99 bp, Homo sapiens
gtgagatatggtttgaatatgaaggcacaccactgaaatgaacagtaaatgtcctgagggaacaaaacccatgctgatatttgctggcgatgatttcga

SEQ ID NO: 293296 - DNA, 89 bp, Homo sapiens
cagaacggagccgccttggcctcggggtctccctacaccaacggttatgatgtgattgctcaagcccaatctgggactgggaaaacggc

SEQ ID NO: 293297 - DNA, 90 bp, Homo sapiens
aaattttggaaaatgtgataaaaacaaggtggaagattcttccaaggaaccagtgcgaaggaaccactcgttttgactattattttatca

SEQ ID NO: 293298 - DNA, 83 bp, Homo sapiens
gcgtcatcgagtgtgacgtggtgaaagctgagcgggctttggacaccatgaactttgatgtgattaagggaaagccaatccgc

SEQ ID NO: 293299 - DNA, 51 bp, Homo sapiens
cgcgaatatcgtcatcgttagaaggacttgtcagtcacatctgtaacctgc

SEQ ID NO: 293300 - DNA, 73 bp, Homo sapiens
ttcgactggctgcttggggagattgagtccaagttcaaccaagccattggtgatgttataggtctggagcggg

SEQ ID NO: 293301 - DNA, 75 bp, Homo sapiens
ctagaattacctggaacttcatcatcatctacttcacaggaattgccatttatgaccaagatgctagacctgcta

SEQ ID NO: 293302 - DNA, 101 bp, Homo sapiens
gcctgggttacaagcagcaagtgcgcggttggggccactgcgaggccgttttagtacaaatggtgatgatcatcaggtcaaggatagtctggagcaattga

SEQ ID NO: 293303 - DNA, 75 bp, Homo sapiens
ttgatactgacctgtaaatcatcctttagtactaaggctcgtacgtctgcatcgattatcttacgtggggcaaat

SEQ ID NO: 293304 - DNA, 101 bp, Homo sapiens
acagtggccgctatgaagagctggctcggatgctgatggggctggacctgctggtgttcgcccacgaccatgacctgtggatgaagagccagagtcctctg

SEQ ID NO: 293305 - DNA, 100 bp, Homo sapiens
gcgaaagcgcgcactcgagcgccaatgagagcggaaggaggggcaccgcgcctgaggaacactccaacccttaggagaaatcttgagagtggacagcaat

SEQ ID NO: 293306 - DNA, 100 bp, Homo sapiens
aggccggattgtactgtatggggactccaattgcttggatgacagtcaccgacagaaggaacatccatgatagcagtcttctgtaaatcgaacttttcaa

SEQ ID NO: 293307 - DNA, 50 bp, Homo sapiens
tgcagagcctttccttaggacaaacaagagtcttactctgtcacccaggc

SEQ ID NO: 293308 - DNA, 100 bp, Homo sapiens
ggtggtgtccatcgtgggcagcggactaataaaggccatggcgccagcagaaatcctgaacgggaaggagatctccgcatccagaagcagcaaggtctag

SEQ ID NO: 293309 - DNA, 102 bp, Homo sapiens
agagggggaaaaaggaagtttgtcctgtcctggatcagtttctttgtcatgtagccaagactggagaaacaatgaaaatgtttataggaggccttagctggg

SEQ ID NO: 293310 - DNA, 96 bp, Homo sapiens
ccggccacagcctgcagcggagcccacgagaggcagcgccatggcggagcagacctactcgtggaatacatggtttacaggaagcatacctacatg

SEQ ID NO: 293311 - DNA, 98 bp, Homo sapiens
aaacaatgatgaaggccttattaacaaaaagttacccaaagaacttctgttaagtgctgaagctgctgaaagatggcagaagaagtggtggtagtagc

SEQ ID NO: 293312 - DNA, 75 bp, Homo sapiens
aattatcaacattctcacagacaagcatggagcctggggaaattctgcagtgagacgaaatctcacaaaactgtc

SEQ ID NO: 293313 - DNA, 83 bp, Homo sapiens
ctccacatagaccatccactgcctcagggtcttcagtggtaacagccagtgtgcagcctgagacctcagatcattgttccctc

SEQ ID NO: 293314 - DNA, 100 bp, Homo sapiens
caaagattaaattaagagaaggtaaagctggacaaaatctgctggaaatgatggcctgtgaccgactgagccaatcaggcatctgtcatcagttctgggg

SEQ ID NO: 293315 - DNA, 116 bp, Homo sapiens
ctctgtgccggcagggtccctgcgctgctgctctgcctgggccattatgctgctggattggacctcaatgacacctactctgggaagcgtgaaccattttctggggaccacagtgc

SEQ ID NO: 293316 - DNA, 74 bp, Homo sapiens
gagcccggggcccggagccggcgcccccggcgcggtagtgagcctgatgcccccagactactgccttcccctgt

SEQ ID NO: 293317 - DNA, 82 bp, Homo sapiens
agggaatgacgccgctggctctggcagctgggaccgggaagatcgggccgtctggacaataaactttcaaagtctgtctcct

SEQ ID NO: 293318 - DNA, 98 bp, Homo sapiens
gaaaaaattcaggttctaacagacaaaattgatgtacttctgcaacaggtggcctccatgaaccagcgccgtgtggatttctaccttgcctccatcga

SEQ ID NO: 293319 - DNA, 75 bp, Homo sapiens
cgcaaacgaaaaagaacgacatgatgcaatcttcaggaaagtaagaggaatgatgccaatgggtggaatgatgcc

SEQ ID NO: 293320 - DNA, 123 bp, Homo sapiens
gcattaacctcactgctgctgatacctgcatcatctttgattcagactggaatccccaaaatgacctccagtgatcttccattgtttgaagcactggacctttaatccactgtaggtatggac

SEQ ID NO: 293321 - DNA, 110 bp, Homo sapiens
ccgatgaggaagtactgagcctgttggaggaactggcccggaaacaggaggacggtgctttcttctgcgacctggtactcatctacctcatcaaaaagagagagttttac

SEQ ID NO: 293322 - DNA, 82 bp, Homo sapiens
tctgctctgcctccggggacaagaaactagagcaaataaccgttttgaaattgcaaggggagagccagttgcgcagagccct

SEQ ID NO: 293323 - DNA, 98 bp, Homo sapiens
gcggaccgcttctcccgcttcaacgaagaccgagactttcaggttggctcaaaaacagaagttgctgagtgcaaggagaaattcgccgcctccaagga

SEQ ID NO: 293324 - DNA, 75 bp, Homo sapiens
ctttaaggcaggagctgatgaagagagagcagagacagctcgtctgcacaagctccgggtggataaggcagctgc

SEQ ID NO: 293325 - DNA, 75 bp, Homo sapiens
aggattctgtctattcagaaagacctgagcaccaagctatggatcatcatggagtacctgggcggcggctcagca

SEQ ID NO: 293326 - DNA, 49 bp, Homo sapiens
ttcctggaagctaaagagctcttcagggaggcgccacatccaccacctg

SEQ ID NO: 293327 - DNA, 99 bp, Homo sapiens
atgaggatgaagattcaccaaataagctatatactttggttacctatgtacctgttaccactttcaaaagtgccaaagatgtacaatgggaatttgtac

SEQ ID NO: 293328 - DNA, 100 bp, Homo sapiens
agcagcttcagaaggccatcagggaccgcgacgaggccattgcaaaatagaatgagtccatttaagtcccaggacggtggaaactagctagtagattgca

SEQ ID NO: 293329 - DNA, 95 bp, Homo sapiens
ttcccctgttgaagcttgctagggattacagtgggtttgactcaattcaaaacatcataggatcaagtcctgttgcagatttctctgctattaag

SEQ ID NO: 293330 - DNA, 82 bp, Homo sapiens
ggatgccctgcagtacctgcagaaggtctctggagacatcttcagcagccacacccactcgcccgggtctatggccacggtc

SEQ ID NO: 293331 - DNA, 90 bp, Homo sapiens
tggagttgaagaaaagaaatcattagaaattctcctaaaagatgaccgtctggatatggcattcgccctgaaaatgtgattatatatggc

SEQ ID NO: 293332 - DNA, 91 bp, Homo sapiens
ccggagcctcacagctgtattcatgtgggcctagttccccgagagcgttcagacagtgggggctcaagctcagagccatttgaccgtcatg

SEQ ID NO: 293333 - DNA, 75 bp, Homo sapiens
agcggcacggctgaggcccgcaagcgcaagttgactggtctgagtgtctccaatggaaaggaccaacttgtagtg

SEQ ID NO: 293334 - DNA, 101 bp, Homo sapiens
gcgcgccccaagcccgggcgccaccgctgccacctccgcgaggtgaaatgacaatggatgctctgttggctcgattgaaacttctgaatccagatgacctt

SEQ ID NO: 293335 - DNA, 100 bp, Homo sapiens
actgcactgggtgattcacgtgtgcccaggccctgaggtgggccggacctgggagtggcaggaagcaatgaggctccccaagaacacacctgaggaaaag

SEQ ID NO: 293336 - DNA, 75 bp, Homo sapiens
ctgctacaaggtgcagagtattttgagggcttccgagtggacctgccaatcaagtcggcccgctaccgtggccag

SEQ ID NO: 293337 - DNA, 75 bp, Homo sapiens
tctatgcaggatcttttggaagaagcatcctccagggacatgcaaatgcatcatggcagaacaggatgtggaaaa

SEQ ID NO: 293338 - DNA, 90 bp, Homo sapiens
gtgaaatccatgagcgtggatgagacagataagcgggaggaagcactgaaacaacacaaaaccctatctcaagaacttgttaacctccgg

SEQ ID NO: 293339 - DNA, 100 bp, Homo sapiens
ttgtcttgcctttgtcgcccccgcccctctcttccctggctggacttgcggagtccccgccgaagaacccgagagagatcttggtagaggagagcaacgt

SEQ ID NO: 293340 - DNA, 82 bp, Homo sapiens
tcgccctcgagatgattatcgtaggaggagtcctccacctcgtcgcaggcacccaatatttgaaaggagaggagatgatttg

SEQ ID NO: 293341 - DNA, 98 bp, Homo sapiens
ccggctccccccatctggctggaacacacatcagtcacgttggcttatttggacgtctaggcagttttccagttagagggacaccgatggccactcga

SEQ ID NO: 293342 - DNA, 102 bp, Homo sapiens
cctgtcgccgttcgctgcgctgccgggcaagagtttgtcgatgcttatgtggattacatattcaataaatcagtggcttccttatttgatgcttttcatgcg

SEQ ID NO: 293343 - DNA, 100 bp, Homo sapiens
cggagcctcccctgcagcgactcggaagattcgaggcggcgggggacaagtcggcgccccagagcggacgagcaagatcagcattggacacagctgcacg

SEQ ID NO: 293344 - DNA, 75 bp, Homo sapiens
cgacgagctgagcttcaaaaggggggacatcctcaagtacgccctgcatgtatacaatgaagtgatgagtgttgg

SEQ ID NO: 293345 - DNA, 80 bp, Homo sapiens
cggatcatgtctggtggctccgcggattataacaggttctcctgaaaagaaagctgaacattcatctataaatcaagaaa

SEQ ID NO: 293346 - DNA, 100 bp, Homo sapiens
gagcccctgtggtgactgcgaaggcttcgacgtgcacatcatggacgacatgattaaggtgcagacaactaagcgaggggatcctcatgagttaagaaac

SEQ ID NO: 293347 - DNA, 83 bp, Homo sapiens
gaattctcctgcctgcgggtctttaaagactgaggtacatgtcccagagcaagcacacggaggcccgggagctcatgtactcg

SEQ ID NO: 293348 - DNA, 83 bp, Homo sapiens
ctgaaccaggcccttttggatcttcatgccctgggttctgcccgcacggacccccataccccccaaagacacacgtgacccac

SEQ ID NO: 293349 - DNA, 75 bp, Homo sapiens
gggagcgcccccggcgcgatgcccttcaggaaaggtgttcgcgcccgagagggatgagcacgtgaagagcgcggc

SEQ ID NO: 293350 - DNA, 100 bp, Homo sapiens
caagcatgtggctcctggtcagtgtaattctaatctcacggatatcctctgttgggggagaaggagtgaacatggaaaggtttgcagaagaagcagatgt

SEQ ID NO: 293351 - DNA, 100 bp, Homo sapiens
cgctcattggtgcctcccgcatcctccatgccctggcccgggatgacctctttggttactcgaagtgcatccttgtggcccatgactggggtgccctcct

SEQ ID NO: 293352 - DNA, 73 bp, Homo sapiens
tgcgtcctcatcgggcttatgttcgagtttaaggaagaaatctctaaacgttttaaatcacatactgaccaac

SEQ ID NO: 293353 - DNA, 90 bp, Homo sapiens
ccggatcaatccagatggcagccagtcagtggtggagacaagctgtaacccttcacgtgccttaccttcactcaatactggcagctcttc

SEQ ID NO: 293354 - DNA, 75 bp, Homo sapiens
ttcgacattgccgtcgacggcgagcccttgggccgcgtctcctttgagattgcgtacccactgcagagtgctgaa

SEQ ID NO: 293355 - DNA, 82 bp, Homo sapiens
tggagatcacaggcgtgtcttgtcgggacgtctatgcgaagcttcccagtgacctgacagcagaggagcgtcaagaactgga

SEQ ID NO: 293356 - DNA, 100 bp, Homo sapiens
gagaggcccagcgggagtcgcggaacagcaggcccgagcccaccgcgccgggccccggacgccgcgcggaaaagcatcctgaggttagcattacacttct

SEQ ID NO: 293357 - DNA, 55 bp, Homo sapiens
gttggcagaactgtttgaaaatgctgaaccttttgaggatggctttgcaaatggg

SEQ ID NO: 293358 - DNA, 100 bp, Homo sapiens
aactacattgacaatgtgggcaacctgcacttcctgtattcagaacttgacaccacagccaaagccctatgggaagctttactgaacactaagcacaaag

SEQ ID NO: 293359 - DNA, 75 bp, Homo sapiens
cagatgtcttcctctcctttaaggcctggctcagaccctggcctatggggacatgaaccatgagtggattgggaa

SEQ ID NO: 293360 - DNA, 100 bp, Homo sapiens
cttggaattacatagctggaaaggatcttacagtaactctgaaccttcacaccataatagtgaaggagcagataactccagggatgattctagtagccac

SEQ ID NO: 293361 - DNA, 150 bp, Homo sapiens
caactcaagggcgagtggaaccgtaaaagccccaatcttagcaagtgcggggaagagctgggtcgactcaagacaaccttggagtgtacactgaagccaggcttggtttacaacaaggtgaatcccatctttcaccactggagcctgggt

SEQ ID NO: 293362 - DNA, 50 bp, Homo sapiens
gtttccactaaaagcccttcagtatgggttcatgcttgaaccagatccgg

SEQ ID NO: 293363 - DNA, 100 bp, Homo sapiens
ttgctgattttggctgacatggcagatgtctacaaattacttgttcagctgaaagttgtggaccaaactacgaattaacatgcttcctgctacaataatt

SEQ ID NO: 293364 - DNA, 98 bp, Homo sapiens
gtggctggacctacatgcttcctgctgtggctgtctcggaacccgtggtcctccgcttcattgtctttggtgcaacactaacaaggcttgtctggact

SEQ ID NO: 293365 - DNA, 133 bp, Homo sapiens
gcccgcggcgctgagccagccgggacggacatgcgcgggagggcgccgcggggcagccgccgctcctccgggggggagctgatcaccttctattactattggaagaagacccccgaagcagccagctcccgag

SEQ ID NO: 293366 - DNA, 97 bp, Homo sapiens
gaaggagctggcagagcagaagtctgtggagaccgcaaaaaggatcaccagccttttgcaaatgcacacgatgtgctagcccgctcccgcagtcgag

SEQ ID NO: 293367 - DNA, 96 bp, Homo sapiens
gcgtgaccgagagcgcgaatatcgtcatcgttagaagtgctacagctagaatgaagcacatcaacctatcatttgcagcgtgtggatttctgggca

SEQ ID NO: 293368 - DNA, 131 bp, Homo sapiens
aaactcttggaccaatcctaaagaaaatcatttgtgatgggtcagctagtatgcaggctaggcaaactgtgaacacacagtgttcatcccctcaggaggacacagcttttgaggtaccatcttggaagcag

SEQ ID NO: 293369 - DNA, 100 bp, Homo sapiens
ctttcttcatgtgttcctgtagctctgatgagtgcaatgacaacatcatcttctcagaagattttaccaaatgttgcaagaactctggagttcttatggt

SEQ ID NO: 293370 - DNA, 75 bp, Homo sapiens
gcctgcgaaggtggcggcgctgctgctcgggctgctcttggagcctcccaaagtgaaatgcctgaccaagatctg

SEQ ID NO: 293371 - DNA, 83 bp, Homo sapiens
tgaagtaatgcaatggtctcaatctctggaaaaacttcttgccaaccaaagtactaggttttgacaagcttgcatcatgcgtg

SEQ ID NO: 293372 - DNA, 100 bp, Homo sapiens
tccttggtgaacgagtctgaaatcatcccggccagcaacggacacgaggattttttatcaagcagaaatgcatcgaacaacgagaatcaagatcactgag

SEQ ID NO: 293373 - DNA, 101 bp, Homo sapiens
tcaggacaaagatgctcaggctgctcttggctctcaacttattcccttcaattcaagtaacaggtgcttttgaagatgatgatatcacgcacgttgaagga

SEQ ID NO: 293374 - DNA, 98 bp, Homo sapiens
ctcatctgcctcgacctcttctgcctcttcatggggtttggattcaggatttgttcctagtgtccaagattttgataagaaacttacagaagctgatg

SEQ ID NO: 293375 - DNA, 106 bp, Homo sapiens
ctccattggatttaaaagacagtcctcgtcagcactgactttcagctatggaatcggtcatcatcagatttgaaatatttaaagtggatacaaaactatttcagca

SEQ ID NO: 293376 - DNA, 100 bp, Homo sapiens
gcaacgtcctcaagctctacctgcgtcaggtgttcttcaacggtgccaacgtccggcaggtggacgtgcccacgctgaccggagccttcggcatcctggc

SEQ ID NO: 293377 - DNA, 100 bp, Homo sapiens
cctccttggagactagacgccagttagccttgaaggatgtcagtgggcccctgagggagctgcgccctcggctctgccacctgcgaaagggacctcaggg

SEQ ID NO: 293378 - DNA, 80 bp, Homo sapiens
cactatgattaccaccaggagattgcaagaaaacctcggatcaattctcagctggtggcacaacaagtggcacaacagta

SEQ ID NO: 293379 - DNA, 100 bp, Homo sapiens
ctgacccaaacattcggaacactgatgggaaatcagccctggacctggcagatccttcagcaaaagctgtccttacagtgcatccactctgggagagcgt

SEQ ID NO: 293380 - DNA, 82 bp, Homo sapiens
aagaagactgatggagcaggcttgcaatattaaagttgagaatgagctggaggacctgatagatgagttgcttgagagggat

SEQ ID NO: 293381 - DNA, 83 bp, Homo sapiens
gccgaaaacaccctgcaatctttcagacaggttcatgctggtcctggccagcaaccaaccagagcagttcgactgggccatca

SEQ ID NO: 293382 - DNA, 82 bp, Homo sapiens
caaacccaaagatccccgttcctggagattctgattgagtacctggagtagaacagaaaaattattatgtctgtgttccctt

SEQ ID NO: 293383 - DNA, 83 bp, Homo sapiens
ccggcctctcggcctctgccggagaaacaggcatcaagcatgatggaaccatgtgtgatacctgccgccagcaaccaatcatt

SEQ ID NO: 293384 - DNA, 90 bp, Homo sapiens
cgcgaagtcatggggctctgtcgggaagtgctggtcccaaaggcgataacatctatgaatggagatcaaccattctagggcctccaggat

SEQ ID NO: 293385 - DNA, 100 bp, Homo sapiens
ggaggtgcaatccttcggttacaagcggtttgggttttggccaaattgggcgagggcacaaaataaccacttaccccttctcaccgaggaagagcgggag

SEQ ID NO: 293386 - DNA, 75 bp, Homo sapiens
atgggacacagatatgttgaagagatttaccgcattgtttctcagaagcaaatgtcagacagacgcgaaaatgac

SEQ ID NO: 293387 - DNA, 100 bp, Homo sapiens
ggtcaccagcaccccagatgggtgagagatgtgatcactggtttcgtggcctgaccaaggacctccaaggtgaataagtctgatgacacagcagaacatc

SEQ ID NO: 293388 - DNA, 100 bp, Homo sapiens
cgacgactgggacaatgagaacagctctgcgcggctttttgagcggtcccgcatcaaggctctggcagattcatgacagatgctgcccgccgagagcagg

SEQ ID NO: 293389 - DNA, 80 bp, Homo sapiens
aaccccaaagccgcgcgagcagtgggaggagcaatgagaggcaatccttttggtgccctggttgtcagatgttggaaagc

SEQ ID NO: 293390 - DNA, 83 bp, Homo sapiens
caagagcatcttggatgtaggacaatggaagagttagacaatgcagatcttcgtgaagactctgactggtaagaccatcaccc

SEQ ID NO: 293391 - DNA, 74 bp, Homo sapiens
tctgacttccagttccagcgtacgagaaccacgaagctgccctgagacgctcactcacgctgtggggatgtcag

SEQ ID NO: 293392 - DNA, 90 bp, Homo sapiens
caagaccagtccatttggggaaatccttcggatggtgaactcattagaagtcaatgtgacggtggactacattagaccagccagcccagc

SEQ ID NO: 293393 - DNA, 97 bp, Homo sapiens
gaaggacaaagagatcatagccgagtatgaaagtcaagtcaaagattcctcacctattcctacctcttggccttcaatgtgtggcttctgcttgcac

SEQ ID NO: 293394 - DNA, 75 bp, Homo sapiens
ctgctgtatctactcaagagtggaagttttcacagaaagtgactgagaccgaagatgatagtgatagtgacagcg

SEQ ID NO: 293395 - DNA, 82 bp, Homo sapiens
ctcaactttctgggcgttcatgatcctggccagcctgctcatcgcctactgcagtctcctctgagcctccggcctccataag

SEQ ID NO: 293396 - DNA, 96 bp, Homo sapiens
ggaggggccccagcagcccccgaaggccctatcaggacatggagtatgaaagacggaccgctcaggaagtggcagcgaagaagactgagccccgac

SEQ ID NO: 293397 - DNA, 101 bp, Homo sapiens
gaccggccattactggtgccgggttgggcttctccagatgccggggctgggtccttcccaaggttgaggaattgaatgatctggcacgggaccctccagca

SEQ ID NO: 293398 - DNA, 97 bp, Homo sapiens
gtgtggaatatttctggcttctagtccaatgccaagtgtgtgacctgtgtgccagaaatcacatccaaagtcagttccagtttcttcaaagaagaaa

SEQ ID NO: 293399 - DNA, 100 bp, Homo sapiens
gtattttggctgctgcaggagccattttagaaagtggtaaaatagctgtggagtgcagacccagtgaagagattgtagatgtcagatgggaagaactaca

SEQ ID NO: 293400 - DNA, 75 bp, Homo sapiens
ctccactctggtcagcaagtatccagacatcaggatgatttgagacaacatttagataaatctttggaagagaac

SEQ ID NO: 293401 - DNA, 100 bp, Homo sapiens
gaattcggtttgtaggtcgtcagaaagaggtggacccccaaaagtacaagggcatatttaacggattctcagttacacttaaagaggatggtgttcgtgg

SEQ ID NO: 293402 - DNA, 75 bp, Homo sapiens
caatattggatctaattaagaaacacattcttcccctttggattgatggctcagatcatcctgcacttgaaaaat

SEQ ID NO: 293403 - DNA, 89 bp, Homo sapiens
cggccgccgcagccatggaggccaactggaccgcgttcctgttccaggtgcagaccatgaattacgtggggcagttagccggccaggtg

SEQ ID NO: 293404 - DNA, 100 bp, Homo sapiens
cgtttcctatagatgagaaaccatacaagctgtggagcagttggacatcatggagacaacttagtagagaagatcatttcagcacttccccagctcccag

SEQ ID NO: 293405 - DNA, 100 bp, Homo sapiens
agttacccgaagttcagcttgcagtgtaattcagaagagttaagaccagaagtactggaatcatacttcctttcagaattgtctatttcacagcaatatt

SEQ ID NO: 293406 - DNA, 90 bp, Homo sapiens
gtgatttgcctcagcttgtactgcatcacccagccaatgcctgtctgattcccatctgttctctgtatggtgctgccgtcaccacagtag

SEQ ID NO: 293407 - DNA, 50 bp, Homo sapiens
ccgggacctcctggaagccaaaaatgttaacaagcacaagccctggctgg

SEQ ID NO: 293408 - DNA, 100 bp, Homo sapiens
gaagaatccgccatgggctactcagtttacagccactgcagtatcacagccagaaaccatcatagcctttgcctgggaaccaaatggaagtaagtttgct

SEQ ID NO: 293409 - DNA, 100 bp, Homo sapiens
cctgaggtggacctcgcgtcctgagtctggaagagacaatgaccatgtttgaaaatgtcacccgggccctggccagacagctaaaccctcgaggggacct

SEQ ID NO: 293410 - DNA, 78 bp, Homo sapiens
aagcgactgagtccgcgatggagagcaatacttcaagtcagctgcaatgaccctaaacgagcggttcacttcgtatca

SEQ ID NO: 293411 - DNA, 83 bp, Homo sapiens
cagaaactgttggagtttatatacacaggaactttaaatcttgacaggtttggatgcatctgctcagactacttctcatgaac

SEQ ID NO: 293412 - DNA, 100 bp, Homo sapiens
accaaatatcggaacccctccttgaagctgatggtgaatgtgtgcggacacactctctgagatgagtgaactgagtgtggcacagaaaccagaaaaactt

SEQ ID NO: 293413 - DNA, 82 bp, Homo sapiens
cagacgcggcacagagagggcctgggagcttgctgcagcttcagcctcctgcccgaaggccacctgaacctaacggctccct

SEQ ID NO: 293414 - DNA, 113 bp, Homo sapiens
ctgccgtccttctccactttcgccagcccgtgccgcgagcgcggcctgcaggagctgcatcttcctcccgtgaggctggccgagctccacgctgatctgaagatacaggagag

SEQ ID NO: 293415 - DNA, 80 bp, Homo sapiens
gcagttctagtcaaagaacgctttctgttcaagaggcagctgcgtatttaaaactgcctactgaatcactcttctatcgt

SEQ ID NO: 293416 - DNA, 75 bp, Homo sapiens
tccgggggcctggctaaggaaaccctattacctccagtcttggctacttatgattcagcagacagaacaacttag

SEQ ID NO: 293417 - DNA, 97 bp, Homo sapiens
ttagcatgtggcaatgatgattgcagaattcacatatttgctcaacaaaatgatcagttgtggacatcggatacccaaggagacgaagctgaagcag

SEQ ID NO: 293418 - DNA, 99 bp, Homo sapiens
cattcatggccgagctggctcagaataaggagtggctggagaagatcgagcggctcatgatggagcagtccaagaagtcctccctcatggtggcccgca

SEQ ID NO: 293419 - DNA, 75 bp, Homo sapiens
gctgacgtctccttgcgatggagcatatccggacgaccaagatttggtgcttccagatgtgagttatcaggtgga

SEQ ID NO: 293420 - DNA, 100 bp, Homo sapiens
tgttaaggattccaagtaactcttatttggaacattctggacgtgtgtttcggctccagtttgatgagtttcagatcatcagcagctcccatgatgacac

SEQ ID NO: 293421 - DNA, 50 bp, Homo sapiens
gtgcagcatgtgccagaagactgctattcaggtgtgcactggggctatga

SEQ ID NO: 293422 - DNA, 100 bp, Homo sapiens
ctcacccctgccaggactcctctgggcttgcagtcgctcccccgtacctctcctggccccctcagttctcccagcatttcagagaaaagctgccttcgta

SEQ ID NO: 293423 - DNA, 98 bp, Homo sapiens
taatgaagaattattttgcaccactggatgttgtttactgatgagaactggactgatgaccaactgcttggttttaaaccatgcaatgaaaaccttat

SEQ ID NO: 293424 - DNA, 83 bp, Homo sapiens
atggattgattgcttttttgcagctcacgtctaccatcattacttgggtctcgaatttatttggaagggaaaatagactatgg

SEQ ID NO: 293425 - DNA, 73 bp, Homo sapiens
cagtaatctagctgcagttttgatgcacagagactattgcccagaagaaaagatgtttggttttcacaagcca

SEQ ID NO: 293426 - DNA, 98 bp, Homo sapiens
gccgcccctggtgcacacaccctcgtattctcctgcccttccccagactatcacaagtccctggaggatgctctgagctcagacacatctggccactt

SEQ ID NO: 293427 - DNA, 75 bp, Homo sapiens
ccatccaaatatgcagtggaaggtttcaatgacagcttaagagtattcaaaatctcttcctggtctctccacttc

SEQ ID NO: 293428 - DNA, 101 bp, Homo sapiens
gcggatctggacacccagcggtctgacatcgcgacgctgctcaaaacctcgctccggaaaggggacacctgctcttgcccctgttctttgcttctcgtttt

SEQ ID NO: 293429 - DNA, 75 bp, Homo sapiens
gcagaacagagatgacatgccagcccagactttcattgtcacccgcaactacctagactggctcacgtccatccc

SEQ ID NO: 293430 - DNA, 51 bp, Homo sapiens
cctccaatgtgggcatcaacaggtggcggctgatttggagcaatataaaaa

SEQ ID NO: 293431 - DNA, 134 bp, Homo sapiens
gcggaccgcggcggaggacgcgcccggcgcccctgagccggccgagcggcgacggaccgcgagaatggtcagtctgtagacgttgaagagacattgccatctgaaccagaaaatggagctcttttgcgatcaga

SEQ ID NO: 293432 - DNA, 143 bp, Homo sapiens
cggggacccagaccctggagcctcagttggaagcagccgatccagcctgcggagcctgtggggcaggacatgtattcctctgagaaaccttggacagcagattttggtttaatatctgattgggacaacattcagacccattt

SEQ ID NO: 293433 - DNA, 75 bp, Homo sapiens
accagcagggcgttggctatgtgcccatcacagactaaatgtgttaaatgggcttgccaacaatatggatgattt

SEQ ID NO: 293434 - DNA, 98 bp, Homo sapiens
cgtcctgcaggagggcttcaatgaggtcagcaaagtggaacgcgagaagaaccaggagctgcggcaggtgcgcgagcatgagcagcataagaccgcgg

SEQ ID NO: 293435 - DNA, 75 bp, Homo sapiens
ggaaaccaggtccaccacctcggctggctattgcttggatctgtgccagttcagaagcaggcgagcctcttccct

SEQ ID NO: 293436 - DNA, 83 bp, Homo sapiens
tgcaaatacaatcactctaaaatgtgtgatagcaattctgtggtgttcttggtcacacatttatggagtttctgaagggcagt

SEQ ID NO: 293437 - DNA, 98 bp, Homo sapiens
ttgagcaaccactacaccagttccgagatcagggtctttggtgccccggaggttctggagaacttggagaagaagcctgggaagtttataaacagata

SEQ ID NO: 293438 - DNA, 82 bp, Homo sapiens
cggagcgcgacacggagactaggtggcaggaaccacgtgaatgttgagggggcgacacacaagcaggtggtggacctgattc

SEQ ID NO: 293439 - DNA, 100 bp, Homo sapiens
ctggaagtagcaggccgcatgcttggaggaggaggagaacggggctgaggaggaagaagaagaaactgccgaggatggagaggaggaagatgaaggggaa

SEQ ID NO: 293440 - DNA, 98 bp, Homo sapiens
acattgttcctggaacgccctctttttaaaaaagctgagaaatttcttgaatctgttgaaggaaatcagaattatccactgttgcttttgacattact

SEQ ID NO: 293441 - DNA, 100 bp, Homo sapiens
gagagacaagtaaactctcagagtaactgtcccctctgactaccatttctaaggtattctctactgccgctgatggtcaaacgcaagtggaaattaaagt

SEQ ID NO: 293442 - DNA, 74 bp, Homo sapiens
tcagaagacagtcctgcccttgcatctggttcatcatcaggtaccccaagaagctagtgcagacttattcagtg

SEQ ID NO: 293443 - DNA, 76 bp, Homo sapiens
gcccctgaattttacccttcaggttattcttccagttacacagcatccttcatcaaaaagccatttgaccgtggag

SEQ ID NO: 293444 - DNA, 100 bp, Homo sapiens
atctgctataacctacaagcagttggacagattttaacctttgagaccaagaacccgtcggaattagcagaacgtttgcgctctgtttgtgggaatcaga

SEQ ID NO: 293445 - DNA, 82 bp, Homo sapiens
cggcggccgagctgcggcagagcgtgtctgaggtggtgcgcggctccgtgctcctgcaaaagactgttgaagtagagagcat

SEQ ID NO: 293446 - DNA, 100 bp, Homo sapiens
gctgctgggcacccacggagcctccggggctgaaatactacccgccggactttgacccatcaaagatccccaaactcaagctccccaaagaccggcagta

SEQ ID NO: 293447 - DNA, 51 bp, Homo sapiens
ggcgcggccacggagaagggcgcggaatgtatcctgtcaggtataatgtca

SEQ ID NO: 293448 - DNA, 83 bp, Homo sapiens
ggccggggtgcagtaccccagctccatcaacctcacgctgcacctggccgcttacaaacacgcagatggcaagaagattgatg

SEQ ID NO: 293449 - DNA, 100 bp, Homo sapiens
aaataatagacaaaactcagctaaatcctaccagtctacaaaagttacagatgtagagctaaaacgactgaaggatgctttcaagaggacctgtggactc

SEQ ID NO: 293450 - DNA, 100 bp, Homo sapiens
ctcggggagaagagaccccaagagtgttgagcagcccatcgtgcttaaagaagggtgtacgaagccatcgacagcagagatggagcatcttgtgcagagt

SEQ ID NO: 293451 - DNA, 100 bp, Homo sapiens
tggccaatcatgacgagctcatctccaagctcctctagagacacgaggcatcccttttatacccatgatttccccaagtcctagtcaagaggaactacag

SEQ ID NO: 293452 - DNA, 98 bp, Homo sapiens
ccaggagtcatgagcgacagcggcgagcagaactacggcgagcggattactttctatgaagacaaaaattttcaaggccgtcgctatgactgtgattg

SEQ ID NO: 293453 - DNA, 82 bp, Homo sapiens
tgcatttgtgtatgaagctcaagatgtggggagtggcagagagtatgcattaaagacctgcctagagctggaacgttacctc

SEQ ID NO: 293454 - DNA, 100 bp, Homo sapiens
tgtccaaagcagtcgtaagaagaggtcccaatcccccactctttccgccctaatggaggtctccagtttcgaaatggaatctatttggaatttgcagaag

SEQ ID NO: 293455 - DNA, 75 bp, Homo sapiens
tcctgggtcacatcaagaacgtgcctacaatgcagatcttcgtgaagactctgactggtaagaccatcaccctcg

SEQ ID NO: 293456 - DNA, 82 bp, Homo sapiens
gaccctgcccttgccagaatttcctgcgctgttccacctcattcaacttcaggagaagatggggagccccgaggatgacctg

SEQ ID NO: 293457 - DNA, 100 bp, Homo sapiens
agaaggttaagctggctgtcctgaaatattataaggtggagccagttcagagaactggttgacaggaagaaggatgccctcctgtctgccctgagcatcc

SEQ ID NO: 293458 - DNA, 82 bp, Homo sapiens
gttcttgtttgtggatcgctgtgatcgtcacttggattttttatcaagcagaaatgcatcgaacaacgagaatcaagatcac

SEQ ID NO: 293459 - DNA, 75 bp, Homo sapiens
ccccgctcagctcctggggctcctgctgctctggttcccaggggccgtggtgttggaccacctcggggggctttg

SEQ ID NO: 293460 - DNA, 73 bp, Homo sapiens
gaagagttacagactaccggattacagttcgtgtaaattcattagtgtgcttaggaaagattttggaatactt

SEQ ID NO: 293461 - DNA, 98 bp, Homo sapiens
ttgcatccactttttggctgttctgaagagtgttactgtgaacattcatgcacaaatttttatgtggagttacatccttaatgttcagtcaagcagtg

SEQ ID NO: 293462 - DNA, 74 bp, Homo sapiens
gcgtctctctgctgcggcgcggggaccgctgtgctctcggagggctccccgaggactttctgaactccctggag

SEQ ID NO: 293463 - DNA, 73 bp, Homo sapiens
gaaaaaagccgaaataccctcccaacaaagatactggctttggcactactagtggaggggcatttggaacatc

SEQ ID NO: 293464 - DNA, 75 bp, Homo sapiens
cggagacagagccctccggccagcggggagctcaaccagaacgtaagttctttccaaagaaaatttgttggtgag

SEQ ID NO: 293465 - DNA, 100 bp, Homo sapiens
ctcccagcgattggagagtctgagtgcagccaccacctttgagcctcttgagcctgtgaaggacactgacattcaggtgccagtcacgaattgcccgaac

SEQ ID NO: 293466 - DNA, 100 bp, Homo sapiens
ggggacaggaggctgcggggcctcaggaatcgggaaagttgacagtcatctgcaagagcactctccaaaccaaagacttctgaagagcgtgcagcaatgc

SEQ ID NO: 293467 - DNA, 75 bp, Homo sapiens
ctcagcccagccaccatgagcaccaagcagatcacttgcaggaatgacaccaaggaagatgtctttgttcaccag

SEQ ID NO: 293468 - DNA, 90 bp, Homo sapiens
tacacacctcattgtgcaagaaccaaaagcatatgagctatttgcattcatcagtcacatgggaacatccacaatgagtggtcattacat

SEQ ID NO: 293469 - DNA, 75 bp, Homo sapiens
ccagcacgactcctcgggcagcctcaacgagaactcggagggcaccggagctctctatcaatatcagctcacatc

SEQ ID NO: 293470 - DNA, 75 bp, Homo sapiens
ctcctggctggtgcggacacaacccaataggaagccagttgagggaagttctccatgaatgtacgtcacaatgat

SEQ ID NO: 293471 - DNA, 100 bp, Homo sapiens
cttaagtctgaatttcggcagaatttaggactgcctccgggcctgccaggagcagatcgaagccctgctggagtcaagcctgcgccaggcccagcagaac

SEQ ID NO: 293472 - DNA, 101 bp, Homo sapiens
gttggtctgctggtgggactcaatgttctcgatgccaatctctgcttgaaaggagaagacttggattctcaggctaaagtaaataatgccagcctgattgg

SEQ ID NO: 293473 - DNA, 74 bp, Homo sapiens
gccatgcccctcaggctggaacttgccctgtctcctcgcagatgagcaacagtatcaaagtgctctattttggg

SEQ ID NO: 293474 - DNA, 75 bp, Homo sapiens
gaacagagccgggagttcaagaagaacactccagaggagtccaaaactacttacctggaagaccttccaccaccc

SEQ ID NO: 293475 - DNA, 100 bp, Homo sapiens
ccttccttcctccccacccattcctttaaatccggagggggaaaaaatcccaaggtctgcaaaggactacgcccaagcaaggtttgatgcctatttccac

SEQ ID NO: 293476 - DNA, 75 bp, Homo sapiens
gaagagaagtacccttatatggtggaatgagttgcatgctgagaatttgaaaaatgaagatgatgtagacactgg

SEQ ID NO: 293477 - DNA, 51 bp, Homo sapiens
gtattgcaggacaagagatttaagttcttatcaggagaggatcaatggaag

SEQ ID NO: 293478 - DNA, 83 bp, Homo sapiens
tttttttttttctgttcagtgacatctggtgcagcggaactgctgcctgacgctctgcaacttcagcatccccgaggagctgg

SEQ ID NO: 293479 - DNA, 83 bp, Homo sapiens
ttacaagagaacctcctaagagtcacccaaacaatcggctgagaatgagaagagattcatgatgttgctatcaaaagttgaga

SEQ ID NO: 293480 - DNA, 100 bp, Homo sapiens
cggctgcatatcaaattcaaggactctgtcatcaacgtgcgcttctccgagaaggtcactgtccatttcctggctgtctgggcagggccggcccaggccg

SEQ ID NO: 293481 - DNA, 83 bp, Homo sapiens
acatctttgacatcatagaccgagaagcagatggaagtgacagtttggaggaactgtggctgcaccatctgtcttcatcttcc

SEQ ID NO: 293482 - DNA, 75 bp, Homo sapiens
gtgagcctagagctggagactagcgttaaccggcggggcggccggtgctggagaatctggtaaaagcaccattgt

SEQ ID NO: 293483 - DNA, 97 bp, Homo sapiens
gctcataaccgaagatgtcagcctcccctgtcccgaacgcagtgtgtggaaaggaactgtggctgcaccatctgtcttcatcttcccgccatctgat

SEQ ID NO: 293484 - DNA, 100 bp, Homo sapiens
acagtaacgaaaaacagggctgaaaggaaacagattcattgtctgtctgaggatgagttaagttcttctacaagttcaactgataagtcagatggggatt

SEQ ID NO: 293485 - DNA, 75 bp, Homo sapiens
ggtgtatcaagtaatggtgcaaagcctgaaacttttggaaaagaatttgataaacattttgggaaaggaggttct

SEQ ID NO: 293486 - DNA, 90 bp, Homo sapiens
attccttagaatccatgaaatttggagattccaacacagtcatgcggtttttgaatgagcagaaggaggagatgttaaagtaacccatct

SEQ ID NO: 293487 - DNA, 100 bp, Homo sapiens
cgcaccaaattgcatcgtttcccagtctctagtgatccctgaaaagttccagcatattttgcgagtactcaacaccaacatcgatgggcggcggaaaata

SEQ ID NO: 293488 - DNA, 75 bp, Homo sapiens
tctttactctggggtcccggctgccctgtggcctcgctcctcggagggcagatcttgtctggactaccagactca

SEQ ID NO: 293489 - DNA, 100 bp, Homo sapiens
cgggatctcaggtcctcgggggcggcggccacgccaaggacggcatttgacattgtgcagcaaagaaatggttatggagaagcccagtccgctgcttgta

SEQ ID NO: 293490 - DNA, 90 bp, Homo sapiens
ttttgtgatcgcagcgatgaaagtggccacagatgtctttaattccaaaaacctggccgttcaggcacaaaagaagatcttgggtaaaat

SEQ ID NO: 293491 - DNA, 85 bp, Homo sapiens
gtatgaccacaaacagccatcaagccctggcctcccacgactacatcctgaagattgtgcccacggtttatgaggacaagagtgg

SEQ ID NO: 293492 - DNA, 75 bp, Homo sapiens
ctgccatcctcgcctcagtcaaagaacagtgccggtggtggtgtgcacattgagccccggtatagacagttcccc

SEQ ID NO: 293493 - DNA, 100 bp, Homo sapiens
ggggccgtggctgacatggagcagcatggtaagacacaaggatggtggctattccgaggaagaggacgtgaagacctgtgcccgggactcaggctatgac

SEQ ID NO: 293494 - DNA, 129 bp, Homo sapiens
gaggcaccagccgggtgggctttgcctcctgctgctgctgctctgccagttcatggaggaccgcagtgcccagggtcatggagaaatgttgtagagggaaggaacaaagtctactgtgcatccagcaag

SEQ ID NO: 293495 - DNA, 74 bp, Homo sapiens
ccgatattcaccaagcgcttcgctacaagaactcttcatcttggcttatacctatactgcctgatatgctccga

SEQ ID NO: 293496 - DNA, 75 bp, Homo sapiens
agtgccttttgcctcccaccgtgattctgaggcctccccaaccatgtgcaattctcctacctcccggcagcctct

SEQ ID NO: 293497 - DNA, 74 bp, Homo sapiens
actacaccagccagcccgaccaggttggtgttcgaggaagagacattgttgttcttggtgtggagaagaagtca

SEQ ID NO: 293498 - DNA, 74 bp, Homo sapiens
tcgaaagtgacaaaacttttattccacatttggagagccaaatctcctcagccacctgttgaagaagaagatga

SEQ ID NO: 293499 - DNA, 83 bp, Homo sapiens
ctcaagaagaagaagttgcgaaggatccccaacggggaggccaacgtgaagaagagagaacattgaaagtattctctaagcta

SEQ ID NO: 293500 - DNA, 98 bp, Homo sapiens
gccgaggctgggctgaggcgccgcggtaccatgaggcgccgttatttctcaaactctgaggctgcggagttcacacattgaaatctgtcatctttttc

SEQ ID NO: 293501 - DNA, 89 bp, Homo sapiens
cgacgaacatttctgggtgacactcaacaggattcccgatgagttttgatcatcctgagaaaaatgggccttggcctgcagacccaata

SEQ ID NO: 293502 - DNA, 100 bp, Homo sapiens
atttctgttccgcacaggcctgctgaactgggtgctttatataggtttcaccagtgatcattaaagaatgggcagcttacaaaggaaagtctcctcaaac

SEQ ID NO: 293503 - DNA, 83 bp, Homo sapiens
cgacaagccgctggcagccgcggatctcaccgccgctcagggttgaaatcacaaagattagacacctttttagataggtgttc

SEQ ID NO: 293504 - DNA, 98 bp, Homo sapiens
ccaaaaagagatgccaggcagatttataaccctcccagtgggaaatatagcagcaatttgggcaactttaattatgttggatgttgatggacagatag

SEQ ID NO: 293505 - DNA, 82 bp, Homo sapiens
gccccaggcgccgccgcgccggccccgcggctctgaggttgctcgcgcgcccccgccgcctgaactctttgcttccggaatc

SEQ ID NO: 293506 - DNA, 90 bp, Homo sapiens
gccacagtcaagatgttgccaacattcgtaaggtccattcctgatggctctgatcctgtgccccagaaaccgtgagatgtctcaattccc

SEQ ID NO: 293507 - DNA, 101 bp, Homo sapiens
ctgaaagaattctgacttaccttgtactactagttggtatcaatataagtgatgaggattttcttttgctggagcttttgcactggtttaaggaagaattt

SEQ ID NO: 293508 - DNA, 100 bp, Homo sapiens
tgcctggcggccgactccaaggaccaggctccctgcaaggctgaccccgcactacatctacccaccagccatcgtgcagcccagcgtggtgatcccagcc

SEQ ID NO: 293509 - DNA, 75 bp, Homo sapiens
actacttcgtgctggtggcgttcgggccgcacccgcgcggagggagccatggatttgctgcgggagctgaaggcc

SEQ ID NO: 293510 - DNA, 100 bp, Homo sapiens
gaagacttggaagctcatggacaaagtgttgcacactgacaagaaacagatcagtgttgggttcattggctatccaaatgttggcaagagctctgtgata

SEQ ID NO: 293511 - DNA, 100 bp, Homo sapiens
ggaaaatgcatcttctaagtttttggcaccatatactactttttccagaattcatacaaagagtagagacaagagagacacctccaacttcgacaaagag

SEQ ID NO: 293512 - DNA, 128 bp, Homo sapiens
ggcgggagcgcctggcggccgagtcaagccgccgcctcgacccagggcccgcgggccaggagagcgctcggcggggctacagaactggctacccttatcgataccctgctctgagagagaagtctaaa

SEQ ID NO: 293513 - DNA, 83 bp, Homo sapiens
cccacttgttcgcggcctatagcgttacagtgtttctgccacctctgtacaaaagacaattttacttgtgtgacagatgggct

SEQ ID NO: 293514 - DNA, 74 bp, Homo sapiens
cccgtggccaccgcctccagcttgccaccaaagacctgcgactttgctcagatgctggacgagaaccaccacct

SEQ ID NO: 293515 - DNA, 75 bp, Homo sapiens
atcaactgtggccttaatgagcatgttgacagcatcgatgctagacagacaaatgcagtaatagtggccttgtct

SEQ ID NO: 293516 - DNA, 99 bp, Homo sapiens
ccgcccgggaagtacatggccggcctgaatctccatccgcacccgggggtgagcccctccagactccgaataggagatcaagagtttgattcattgcct

SEQ ID NO: 293517 - DNA, 119 bp, Homo sapiens
ccccagccgaccttgagctccaggagttcgtctcttacgtctgcggaagtgcagctgcctcagttcttagcgcaggtgatctgtgaaaatggttcgctattcacttgacccggagaacc

SEQ ID NO: 293518 - DNA, 74 bp, Homo sapiens
catgtccgcgcacaatcggggcaccgagctcggacagttttggcatgtgactgacttacacttagaccctactt

SEQ ID NO: 293519 - DNA, 71 bp, Homo sapiens
agcgtccttggccagaactacgacattacaatggaagagtccaaaactacttacctggaagaccttccacc

SEQ ID NO: 293520 - DNA, 52 bp, Homo sapiens
ggaatcccttgcatggctctcaacaaggtcttgatctgtcaccaggctgaag

SEQ ID NO: 293521 - DNA, 75 bp, Homo sapiens
aacaagaagttgagaccgagaatgtggaaacaggccctgagacgggagttaaaggagaaagaatattctgtcctg

SEQ ID NO: 293522 - DNA, 100 bp, Homo sapiens
ttgagcatgaccagaccatgttagataaacttgtggatggacttgctacctcttgggtgaactctagcaattacaagaaatcaatgtggactgaacataa

SEQ ID NO: 293523 - DNA, 60 bp, Homo sapiens
aagggagttgatttactcctagaaggtgttcaagattgtgcttcaagaagaccataggga

SEQ ID NO: 293524 - DNA, 101 bp, Homo sapiens
gccgcccagaccgcgcagcgcgggaggcaggttccgcacgaccttcacggcatggtgcaactcccacctgcggaaggcaggcacacagatcgagaacattg

SEQ ID NO: 293525 - DNA, 74 bp, Homo sapiens
tgaaacaccactgaagcattgccaaggaaagaaggcgtcggtggattttacaagggaattgctcctaatttgat

SEQ ID NO: 293526 - DNA, 145 bp, Homo sapiens
cctcgtggagacaggtcggcggctgctggacaccacgataacatttagcctggaacagagcggcactcggcctgagcgggaaactggatgccttcatctatgatgcagcagtgctgaactatatggcaggcagagatgaaggctg

SEQ ID NO: 293527 - DNA, 50 bp, Homo sapiens
aagggcccaactggaattccacttacgggctggagtgcggtggcgtgatc

SEQ ID NO: 293528 - DNA, 74 bp, Homo sapiens
cgaacatcttctggacctttgtccagccatcgactacagtgacagcgccatgctccaagctcagcagctgctcc

SEQ ID NO: 293529 - DNA, 73 bp, Homo sapiens
aagagcttcaagaacaagggccgcgatgtggaaagtaaccagagagcacagagaaatgctggtgaaactggcc

SEQ ID NO: 293530 - DNA, 141 bp, Homo sapiens
tgaaatctggcatattagcgctagccctgcagacagaggtgtgctgacgacctgctacaacagaaaataaatccaccagtaccccaacttctccggggccccggactcattcaactccctccatcccggtgctgacagcag

SEQ ID NO: 293531 - DNA, 51 bp, Homo sapiens
ctcagagaggtaccagaccatgaagggaggagctttatctttatatactgc

SEQ ID NO: 293532 - DNA, 100 bp, Homo sapiens
tcggcgtaatggataacctgtgatgagttccattagagaaaacgtggaaaaagcagggatggatttacccttgtagaagtagagacggagtttcaccgtg

SEQ ID NO: 293533 - DNA, 100 bp, Homo sapiens
gaggaggggaggaggaggaggattcagggaataggagctggggagcccttctgcgccacaggtgcgttgtagaagacaagaactcaaaggtggcctggtt

SEQ ID NO: 293534 - DNA, 80 bp, Homo sapiens
gattcccaggatgtgagcaacacgggaccgagacttgcagccaatacaggaagcaaacagcgtagtcgcctctctgttat

SEQ ID NO: 293535 - DNA, 113 bp, Homo sapiens
tttgcttttgtaacttttgatgatcatgatacagttgataaaattgttgactgcaaaattcaaaatggggctcaaggtattcgtttcatctacaccagagaaggcagaccaag

SEQ ID NO: 293536 - DNA, 75 bp, Homo sapiens
gcgccgacggcgacgtcggggccgagctaacccggcctctggacaagagcctgttacatgaacagaatatggcaa

SEQ ID NO: 293537 - DNA, 100 bp, Homo sapiens
ctgtggatggtttctaaaatgatcattgaaaacttcgaggcactcaagtcctggctcagcaagactctcgagcccatcaatcagccatgactgcctttgc

SEQ ID NO: 293538 - DNA, 74 bp, Homo sapiens
gtctgcgagccaggattcccgaaagcgtggatacccatcaacgaagttttgatattggaattcagattggctat

SEQ ID NO: 293539 - DNA, 100 bp, Homo sapiens
tgagaagaggagccaaaacatcatagttgaaccgtcctggaatagaagaatccatcaacagcatcaagtccagactaagcaaaagtgggcacatacaaac

SEQ ID NO: 293540 - DNA, 98 bp, Homo sapiens
ctgaatgacgcctacggaccccccagcaacttcctcgagatcgatcttcctggacaagatcgacgtgatcaagcaggctgactatgtgccgagcgatc

SEQ ID NO: 293541 - DNA, 99 bp, Homo sapiens
cgtctccagccaaattcaaaaaggataaggagatcatagcagagtacgatactcaggtcaaagcccatgactgaagagttgctgaaacaacaaaagctg

SEQ ID NO: 293542 - DNA, 90 bp, Homo sapiens
gtcgtcacctctgtgtcctggtggagccataaggtgctgggactgtacaacactctgaaccctgaagcatctgcctcgccttgctgcgtg

SEQ ID NO: 293543 - DNA, 83 bp, Homo sapiens
cttacctctttgatctcgacaataaggaatactcccccagttgcaagaggcgcaggaccgtggaagacttcaacaaattctgc

SEQ ID NO: 293544 - DNA, 51 bp, Homo sapiens
cttatcagagctctacttgggaaaggtggtctcaatgcaagcagacaaccc

SEQ ID NO: 293545 - DNA, 83 bp, Homo sapiens
ctaaaagtcatgggacagtacttggtccagtactgtaaggacaccggcatcaaaatcatgaccaccccaggaaaagagaactt

SEQ ID NO: 293546 - DNA, 97 bp, Homo sapiens
gaattggaagtttttgctaaagtactgagagctttggataaaagctatttccttcgtgctaccatcagccgccgcctcaatgatgttgtcaaagaga

SEQ ID NO: 293547 - DNA, 90 bp, Homo sapiens
gcatcgcaccgaaccttcggggggccgcggctggagcgctcggccggcgtgggagcgccaaggccgcagtgaaattaaatggtggcagac

SEQ ID NO: 293548 - DNA, 80 bp, Homo sapiens
aggtcttgtagcagcgcctcctcggttaacacagaaatctgcctcctgggccatgccgcttctaaggcctgtttcttctc

SEQ ID NO: 293549 - DNA, 87 bp, Homo sapiens
gcctcagtctcccaaagtgctggaattacaggggtaccagttcaacccagccttctttcagaccacggtcaccgcccagatcctgct

SEQ ID NO: 293550 - DNA, 114 bp, Homo sapiens
ccagcgccagctgcagccctggccgcgcactcgcctcagctgagcctggggattttgtcagggagaaaaagtatcggacagaagctgagatgtttggatggagctttgtctttg

SEQ ID NO: 293551 - DNA, 83 bp, Homo sapiens
catgccgctcctaagcctgcacagccgcggcggcagcagcagtgagaggcaggtacttcccggagcgagcggggaacgcgacg

SEQ ID NO: 293552 - DNA, 97 bp, Homo sapiens
aggactcggtcgaagcatggctggacgatcactgggactttaccttctcatactttgttagaaaagccaccaggtacatgtcccagagcaagcacac

SEQ ID NO: 293553 - DNA, 100 bp, Homo sapiens
tgcgcacctgctggggctgcggctccgtggcctgtaccctgtgtggcctcgtggaccctgtgtctaggtcgtttgggaaacgccttggagagtcaagaat

SEQ ID NO: 293554 - DNA, 87 bp, Homo sapiens
ctcgtctacttcctcagcagcaccttcaagcagatgcagtggcagaacgtggagcacgttggtgaccagagcccctacgtcacctct

SEQ ID NO: 293555 - DNA, 98 bp, Homo sapiens
ggcggcgccaagcaagtgctctacgtgcctgtcaagaccacgatctccaggacttcaagttagatgtgcagcacgtgattgaagtggatgagggaaac

SEQ ID NO: 293556 - DNA, 74 bp, Homo sapiens
aggatttggcactctacttaaaaccactaagtggaggtaaagggagaccagtgtaaatttgatcatgatgcaga

SEQ ID NO: 293557 - DNA, 83 bp, Homo sapiens
caacaaaaacagaccagaagattaccaagagcctttgttgatgttgtgaatggagaatatgtccctcgcaaatccatcctgaa

SEQ ID NO: 293558 - DNA, 87 bp, Homo sapiens
gcggttgggtgcccgcggccacttttgccttcccggagatcctgaaggagctagacgagtgctacgagcgcttcagtcgcgagacag

SEQ ID NO: 293559 - DNA, 154 bp, Homo sapiens
gaaaaccacaccgccctaactgttgtcatggcaagtaaaggttatcctggagactacaccaagggtgtagagataacagttcataaaccagaaaaggtcacatggacggaagcagcaggaagcattcgggatggagtgcgtgcctatacagctc

SEQ ID NO: 293560 - DNA, 50 bp, Homo sapiens
actgtccacactgctgaaaaatctgaccctacagcttggggcctgggctc

SEQ ID NO: 293561 - DNA, 101 bp, Homo sapiens
ggatctggccaacaccaccggcacagtgacggcttcagaggtaccttctccaggcaaattccgttcccctgcagcaccatctcctttggctcttcggcaac

SEQ ID NO: 293562 - DNA, 51 bp, Homo sapiens
ggaatcctattttttattatgctgcacgggtgtcaaaccagaagagaagta

SEQ ID NO: 293563 - DNA, 83 bp, Homo sapiens
cggcgagcagtctcaggcctttagtgatgatggaacgagttgaagcagttaatatggctgaaggaatcattcacgacacagaa

SEQ ID NO: 293564 - DNA, 129 bp, Homo sapiens
agaaagcctattacctggcatgtggattttgtcgctggacgtctagagatgtgggcatggcagacaaatctgtaggttgaattgaccaaagcaatggtgatggagaagcctagtcccctgctggtcggg

SEQ ID NO: 293565 - DNA, 80 bp, Homo sapiens
tggtgtcaaagcttttggacattcctgggtgtggcaaaggagcagagaactttgacaagttcttcacacgaggacagccc

SEQ ID NO: 293566 - DNA, 83 bp, Homo sapiens
cgctgctgttccaggagggggatttctactgctcctacttcctgtggttcgagaatgacatgagtttaccacctaggatgact

SEQ ID NO: 293567 - DNA, 71 bp, Homo sapiens
aaaatcttctgttggatgaaagggcaaaactggttgaacagcggatgaagatatggaattcaaagctctaa

SEQ ID NO: 293568 - DNA, 50 bp, Homo sapiens
cgaagatggtggcggctactcctcctgccttatgccagcctggaccatct

SEQ ID NO: 293569 - DNA, 75 bp, Homo sapiens
ataaatggcttttaggaatggtagcttcctggggatggtatgctggatatacagagaatgtgatcaatgggcagg

SEQ ID NO: 293570 - DNA, 105 bp, Homo sapiens
gggagagtgagagaaaggctggaagacgaggttcatggaatccgagctggacctaaatgacatcattcaggagatgcacgtggtggccaccatgccagacctgta

SEQ ID NO: 293571 - DNA, 90 bp, Homo sapiens
gttagcgtgagtgatcactctcaatcccgggagttgcgggagcttcaggacgagaaggcagagctgcagaagatctgcgaggagcaggaa

SEQ ID NO: 293572 - DNA, 80 bp, Homo sapiens
caaggaggcctgttcataaaagatatcgaggatttagccggaagagatcatcgacgagtacatcaaggagaacggcttcg

SEQ ID NO: 293573 - DNA, 100 bp, Homo sapiens
ttacctgccacccattgtgtcttctcaagaaggttctaagctggtctatgtccatcaccttcttggagaaggagcctttgcccaggtgtacgaagctacc

SEQ ID NO: 293574 - DNA, 101 bp, Homo sapiens
ccaacacacggtccacagctcatcatgatggacttggagctgccgccgccgggactcccgtcccagcaggtgcaaattgagcatgacccagaattagaaaa

SEQ ID NO: 293575 - DNA, 83 bp, Homo sapiens
actccttcggcagtccacccaccgccgccgcctcccagtgtgaaagcagctgtagacaacaaggaagtgaatgaatgttgccg

SEQ ID NO: 293576 - DNA, 80 bp, Homo sapiens
ccttcttgcctgatctcaagcccaacctcaactccttgcactcatcgccctctgattccaactccacagagtgaccagag

SEQ ID NO: 293577 - DNA, 80 bp, Homo sapiens
attttgctgctgaaagttttacttttttgatgagaaaggtgtctgcaattgaactccaaggtgcagaatggtttggaaag

SEQ ID NO: 293578 - DNA, 100 bp, Homo sapiens
gacgcggtgctgatggaggtggaggtggaggcgaaagccaacggcgaggactgcctcaaccaggtctaggcgttttacactgagattctccactgccacc

SEQ ID NO: 293579 - DNA, 75 bp, Homo sapiens
ctatccgtttgttcaggaaccaccagtgacagagaacttataatcaaaactgtattaagctcggcaagagatgag

SEQ ID NO: 293580 - DNA, 90 bp, Homo sapiens
gccggccacaggaagtggtgggcgtcagcccccaaatacatcaagatgtttgtactggatgaagctgacgaaatgttaagccgtggattc

SEQ ID NO: 293581 - DNA, 101 bp, Homo sapiens
actgcaatctactgcactcgagacagagtcttgctctattgcccaggctgcaactggtgtgatctcggctcactacaacctctgcctcctgggttcaagcg

SEQ ID NO: 293582 - DNA, 75 bp, Homo sapiens
ggagaagttctcccagctggcagaagcctatgagcttcttggacacttaatgattgttggcaagaaatgtgctgc

SEQ ID NO: 293583 - DNA, 75 bp, Homo sapiens
ctggcaaacagcatcagccatgcagacctattgggacaccttctggagtatgggccgggtgggcttggactgggc

SEQ ID NO: 293584 - DNA, 50 bp, Homo sapiens
tcaaaagtggggggcaggaaaggactgctgcagatcaatgacaaaatcgc

SEQ ID NO: 293585 - DNA, 100 bp, Homo sapiens
ctgccaaagcaggggtctccaaggatgccatcgtcacaggccctgcccccgggtccttccaccatggccttggccacaaccgagtgtgtcagcagccagg

SEQ ID NO: 293586 - DNA, 98 bp, Homo sapiens
cgagatcctggagagcctgcaggacggcgcggcagagtccccgtacgcctacagtaacggcatgcggatcctggtcactctgctgctggatacgctgc

SEQ ID NO: 293587 - DNA, 83 bp, Homo sapiens
ggaagaccgcgcgcagggcctgcagcgggagctggacggcgagcgcgagcggcgcgagaaagacgcccctttcgccccaacgg

SEQ ID NO: 293588 - DNA, 100 bp, Homo sapiens
ctaccagccagatcaacacaattgataaaagaagattcaggagtggatcccaccttcaacaccttacaagtaaagacaatgaagaacagttgaaacatgc

SEQ ID NO: 293589 - DNA, 82 bp, Homo sapiens
gagcgacaagccgctggcagccgcggatctcaccgccgctcagggtgacagagctgaatgaacctctctccaatgaagatcg

SEQ ID NO: 293590 - DNA, 98 bp, Homo sapiens
cggaggcaatgacgtcagcatgattcaggaatctgactgcggcgtgggagtggaaggaaaggttccaagaccaaagattaaattaagagaaggtaaag

SEQ ID NO: 293591 - DNA, 100 bp, Homo sapiens
gttcaaggaggtgctgaagagcgaggagccagtaatgttaaagtagagactcagagtgatgaagagaatgggcgtgcctgtgaaatgaatggggaagaat

SEQ ID NO: 293592 - DNA, 101 bp, Homo sapiens
gaaaaattcaagaagttgaaaaacgcttttcacgtcacctggagagatgcacagttcttcctgtccaagatccggtcccacgtggctacttgttccaaata

SEQ ID NO: 293593 - DNA, 100 bp, Homo sapiens
gagctaaacaagtagaagagttcctgcagcgaaaacgggaagctatgcagaataaagctcgagccgaaggacatatgaaagagcagcaactggatggcac

SEQ ID NO: 293594 - DNA, 54 bp, Homo sapiens
cagctgcctgggtccccgacgagagccagggcgaagctgtgctcaggcccgggc

SEQ ID NO: 293595 - DNA, 101 bp, Homo sapiens
gccgggacccagccagccctgcgcctcgcgccgtcgcgcatgcgtcctgggtgttgaaattccgtaaacttaacttcaatggggagggtgaacccgaagaa

SEQ ID NO: 293596 - DNA, 76 bp, Homo sapiens
tgaagacctattttactgataagaaaacacatctttacacactaaagaaacttgcccaggccaaagaagagaacgt

SEQ ID NO: 293597 - DNA, 75 bp, Homo sapiens
cccaagtcgactggaaggaccattttctgtactgtgccaaggtaatcctgggaatggtgacgcttgggaacatgc

SEQ ID NO: 293598 - DNA, 90 bp, Homo sapiens
agaaaatccccgttgtttttcgattgcaagaggtttggcagttctctaccagtggaccaatcttttcatccccgtgtacctcaccatcag

SEQ ID NO: 293599 - DNA, 89 bp, Homo sapiens
cgaccgggagctggacctccgggattatggtgacaagctgaacatggagctgagtgagaaatacaagctggacaaagagagctacccag

SEQ ID NO: 293600 - DNA, 100 bp, Homo sapiens
gccacctggagagaggccgcgtcctgggcagagaacctgcacttgttgccaagtcttccatcttactagatgtgaaaccttgggatgatgagacagatat

SEQ ID NO: 293601 - DNA, 125 bp, Homo sapiens
ctcgcttagaccttcctactggtgatggccagccatcccttgaaccccctatggctgctgcttttggtttagacgtctgtgccacttgccatgaacatgccacatgccagcaaagagaagggaag

SEQ ID NO: 293602 - DNA, 106 bp, Homo sapiens
ccgggaccccagcttttcagaactgcagggaaacagccatcatgagattcacagtctgagaatgaggcttcaccagtaaaacggccacgactacttgagaatacgg

SEQ ID NO: 293603 - DNA, 88 bp, Homo sapiens
atgagatgattgccaaacccccagcgctcaacgaacccaccatcgattatggtttccagaggttacagaaggtcattcctcggcaccc

SEQ ID NO: 293604 - DNA, 127 bp, Homo sapiens
gctgccctcagctgcactgtggcaaggcttttgcttccaaatacaagctgtatagctggacatcgtggagttcatcccctctctcctctactttggctacacggccctcatggtcttgtccttctgg

SEQ ID NO: 293605 - DNA, 49 bp, Homo sapiens
aagagaaccagttcagactttgcatgcggctaccaagggcatccttgtg

SEQ ID NO: 293606 - DNA, 100 bp, Homo sapiens
taaagtctgagagagggaagtcgcctctgtgctcgtgagtgcatggggtataagacagatttgaccagttttgggccatcaatcggaaactcatggaata

SEQ ID NO: 293607 - DNA, 75 bp, Homo sapiens
cccggcttcgggcatccaacgcaatgatgaacaacaatgaccttgtggatccaaacttctacagcaaaaacttac

SEQ ID NO: 293608 - DNA, 98 bp, Homo sapiens
tcattgtgaagaccggagggacacaccctgctggctattttggcattctgctggatatatgttcgtaaataccaaagtcggcgggaaagtgaagttgt

SEQ ID NO: 293609 - DNA, 98 bp, Homo sapiens
gtcgtcacaggctccggctcatggcatcaagtggcatccatcataaggaaaggcagcaacaggtggaagctgttgagttggaggctaaagaagttctc

SEQ ID NO: 293610 - DNA, 100 bp, Homo sapiens
gggtttgaggagttcagtgactgctattgaaccaccaaaagtccattatgaaactgggaactgtctgggacctttgctcatctgtgtcagcaagttgacg

SEQ ID NO: 293611 - DNA, 98 bp, Homo sapiens
cccgctgaagcaagtacaccacaaagagaacacagagccggaaggttctttcatgctggtgaatgcctctgggagacctgaggggcagagagcccacc

SEQ ID NO: 293612 - DNA, 92 bp, Homo sapiens
gctctacccagtcccaggacgtggcgcgggtctccagtgcttcagtgataccaagaagaagcaggggatgaagaagaggagcaacagtgaag

SEQ ID NO: 293613 - DNA, 100 bp, Homo sapiens
gacagcctcaaacaggagctggagcagctcaaagagccaaaagaatgcaatggtgtaaagattccagttgatgccagtaaacctaatccaaatgatgtgg

SEQ ID NO: 293614 - DNA, 110 bp, Homo sapiens
ggaggagctgtgcagccgcgaggaggcgcgggaggtgttcgagaacgaccccgagacggtggacgacatccttggagaaggcagcgacgacagcgacagcgagaagagga

SEQ ID NO: 293615 - DNA, 100 bp, Homo sapiens
ggatctcaggtcctcgggggcggcggccacgccaaggacgggaacgactgaagctggtgactgttttgggtgctggccttctctgtggaactgctctggc

SEQ ID NO: 293616 - DNA, 74 bp, Homo sapiens
attaagtgcaaaagtttgtgacttgaagtggatacatagtgaccaagaatatggcccaggtgaccaaagccctg

SEQ ID NO: 293617 - DNA, 100 bp, Homo sapiens
ggacagcacttccggtcacgccatcgttgctgccttcttcgtcaaggaaccctaaggactctgcaatatgaataattccctagagaacaccatctccttt

SEQ ID NO: 293618 - DNA, 83 bp, Homo sapiens
cacggccagttttgaaatcgacacacaaagaatagagttgagcctgtgggacacttcggctggcaggggccgcctgaagtggg

SEQ ID NO: 293619 - DNA, 100 bp, Homo sapiens
gagtgagcgctgccccctcacagagacctctttgccccctgggccaggcagagcaggccgccatggcatcagatgaaggcaaactttttgttggagggct

SEQ ID NO: 293620 - DNA, 98 bp, Homo sapiens
cgacgaggtgaggacttactttcatgagtttggtcacgtgatgcatcagatttgtgcacagacatccaatgacacctttgaaattcccctaatgttga

SEQ ID NO: 293621 - DNA, 75 bp, Homo sapiens
tgcagcagcgaaccaatcccaagggaaaacttgaaagcagtgacaactgaagatagagaaatgaggaaaaagaag

SEQ ID NO: 293622 - DNA, 99 bp, Homo sapiens
tacagcgagtggcttcagagattaaaggtagatcatgccactaatcgtacccagtttggggagaaaattcacaactttgggctgatccaggagaagctg

SEQ ID NO: 293623 - DNA, 98 bp, Homo sapiens
tggactgcccagatgggtatgacgaaggagtacattgtcaggatcagctgtttcatgtattagccttgcacatgcggctttatagcattgactctgag

SEQ ID NO: 293624 - DNA, 76 bp, Homo sapiens
cggggagctcggccaggctgctggtacctgcgtccgcccggcggaaagtggagaatgaggacatgaataaagacca

SEQ ID NO: 293625 - DNA, 90 bp, Homo sapiens
gcaggatggcggcggtgaagaaggaagggggtgctctgagctgcaattagaagtggatcggttggaagaactgaaaatgcaaaacatgaa

SEQ ID NO: 293626 - DNA, 80 bp, Homo sapiens
aacagaatcagctgttccctgcgaaaggtgctggacgtcattgctcctccttatacctctgacttcgtgcaacttttcct

SEQ ID NO: 293627 - DNA, 100 bp, Homo sapiens
ggagtttatctggagtgaggtggccggttcttggtgggatctgagcaggtgaccctggcagcaaccccaacaaacgccagaggcagccccctctcctggg

SEQ ID NO: 293628 - DNA, 100 bp, Homo sapiens
gcccccaatttcccagctgctaaaggaagaggaagtaatctatgccagcaattatgacaatgttagcagaccatgcagctcgtcagctgcttgatttcag

SEQ ID NO: 293629 - DNA, 90 bp, Homo sapiens
gacccttatgaacgagctcgccaaaagatgttattggagctattttgtaagcatgacgtatcccagactttactcaaggcaacactggac

SEQ ID NO: 293630 - DNA, 100 bp, Homo sapiens
cgactgtgtctgccaacctggcttcacagttgagggagaagacttgcaacaagaagatggacccacaggagaaccacaacaagaggatgatgagtttctt

SEQ ID NO: 293631 - DNA, 98 bp, Homo sapiens
tggttgctgtgcccttctttgagccagtgtttggagaaggaggaatatttggtccctggtcagtttctgctttggtagatatagttgtaggtactccg

SEQ ID NO: 293632 - DNA, 96 bp, Homo sapiens
tccgatgcaactgatagcagctctgatgacgatttggatgaatatacccttagaaaaaatgtggcagtgaagaactgaaccccattattgttacgc

SEQ ID NO: 293633 - DNA, 104 bp, Homo sapiens
cctgaggactgctactcccaggggaagttagattgtccggcatttatataactctgcagccttcaaagctcgaaccaaagctagaagcaaatgtcgagataaga

SEQ ID NO: 293634 - DNA, 100 bp, Homo sapiens
gtctcttatttagttctggggagcgcctcgtcgacatgagtgatgtggaggaaaacaacttcgagggcagagatttaagtgccctgtatgctcaaaattt

SEQ ID NO: 293635 - DNA, 51 bp, Homo sapiens
gccgagatgaggagcatgccgctaaccagatttttaaggactttcacgaag

SEQ ID NO: 293636 - DNA, 97 bp, Homo sapiens
gcttgggcgaggccgggcggcgcttctgtcctcctactcggacccgcaggcaagacatctgtatagattctgcttcatccgtgagagagaataagca

SEQ ID NO: 293637 - DNA, 98 bp, Homo sapiens
accggaggctctggatggaagccatggatggccgggaacctgcttatgcatctggatgtgacattgtaatactgggaagcgattttgaaagattacag

SEQ ID NO: 293638 - DNA, 83 bp, Homo sapiens
gcgtgaccagtggccacctctgcagtgtcttccacaacctggataacatccctgaggacctcagagaccctttctacgttgac

SEQ ID NO: 293639 - DNA, 100 bp, Homo sapiens
tggaagtctaattcaggagttggttctgcagccatggaggttccccctaaaggactcaaaacgtctaatccaatggttaaaagctgttcagagggataac

SEQ ID NO: 293640 - DNA, 100 bp, Homo sapiens
ttgacaaaatccatctcattaatgacaatcagccatcctggattggacagcagctgacacacaagagttcaggaccaaactgcacaaagtatttcgtgag

SEQ ID NO: 293641 - DNA, 90 bp, Homo sapiens
agaggaccgggctgggcgcgcccggccgcgacgcccgggacccagattgcgggttcaggttcgttaccgtgaacgcatcaccattcttcg

SEQ ID NO: 293642 - DNA, 90 bp, Homo sapiens
tggcgctagtctgaccctccgccaggcaaaaggaagtaagcactatcctttgtactccctcaacgtggcctccatgtggttgaagctagg

SEQ ID NO: 293643 - DNA, 96 bp, Homo sapiens
cttcgcgagaccagttgggcaacatggttcaccaggctggtttaacctgcgattattcagaacttcctcaccatatcagcacagaacaagaaatag

SEQ ID NO: 293644 - DNA, 82 bp, Homo sapiens
gcggattcgccgaggcaccgaggcactcagaggaggatccctgctgccttggtgatcccgggctgacagccagagagcacag

SEQ ID NO: 293645 - DNA, 100 bp, Homo sapiens
taatttctttctcgctgatcgcctaacttctactgacgaagcttggaagttgcagaagagccatgggaccacaccaccaccaccacaaccaataggccag

SEQ ID NO: 293646 - DNA, 100 bp, Homo sapiens
ctgggatttttgagctggtggaagtggttggaaatggcacctatggacaagtctataaggaacttgcttgctagaaaacaaagtgcaaggcttgacaaac

SEQ ID NO: 293647 - DNA, 82 bp, Homo sapiens
gacgattcagagactgaaaaacctgaggctgatgacccaaaggacttcgcaggtgagcagtaacggaaatcagccccgttta

SEQ ID NO: 293648 - DNA, 100 bp, Homo sapiens
gctccggctcgggttcatcaggacgacgagcagcccctggcgaagcggtgctgcctccagcccagagatgccgccaagatgcccgagagcgcttggaagt

SEQ ID NO: 293649 - DNA, 74 bp, Homo sapiens
tatctggggccaagggacaatggtcaccgtctcttcaggtgtgactgaagaaatatcaaatgtttcctagtaag

SEQ ID NO: 293650 - DNA, 71 bp, Homo sapiens
gaaacctgtgatccattctcattaaataaatctctgggttgagataagtcgaagagtgactctggaaaaac

SEQ ID NO: 293651 - DNA, 98 bp, Homo sapiens
ggatgacaccggagtttgacgaagaggtggtttttgagctcaagactgcagtgcagatgacgacaacttccttgtgcccatagcggtgggagctgcct

SEQ ID NO: 293652 - DNA, 76 bp, Homo sapiens
gaaataatggcaaataacttttccttggagagtcataacatatcactgactggagtggttaatgtgttgctaacaa

SEQ ID NO: 293653 - DNA, 100 bp, Homo sapiens
caccggaccacctgctccaagaccagcctcctggggggaccaggcacccggccttcactggcacccaggtacgcatagctgctaaattcatcactcatgc

SEQ ID NO: 293654 - DNA, 75 bp, Homo sapiens
cgccgaggcaccgaggcactcagaggaggtgccaagtcctgccctgccaacttcttggcagctgccgacgacaaa

SEQ ID NO: 293655 - DNA, 100 bp, Homo sapiens
agcgagcaggcgaagccgcggaggacggggtgaagatggcggccttctccgaagtgtcggaggaaggcttccagattccagctacaataacagaacgata

SEQ ID NO: 293656 - DNA, 97 bp, Homo sapiens
atcgggtgttccagtcaagcacatctcaagagcaagtgtataatgactgtgcaaagaagattgttaaaggggaggacccgcagatcctgtagactat

SEQ ID NO: 293657 - DNA, 83 bp, Homo sapiens
ctggctacagcttcagaagaccgaagcgttcgtatctggaaggtgtggacactgccagcggctgcagccgacttggaatgacc

SEQ ID NO: 293658 - DNA, 100 bp, Homo sapiens
ccatcctgccgcagctggcgcagcccacgctcatgatcgacttcctcacccgcgcctgcgacctcgggagcatcgagtacagctgtccggcctccaacga

SEQ ID NO: 293659 - DNA, 89 bp, Homo sapiens
gtgcggaagctggtgggcactcagcaccctctgcttaccacagccagaatgctatcttctttgagaagtcaaattgtcaggatcaggaa

SEQ ID NO: 293660 - DNA, 100 bp, Homo sapiens
acacccatttggtgaaaggcttggattttgctctgcttcaaaagaaacgggctgtaaaggcagaaaaccacgtcgtgaaactaaaacaggaaatcagttt

SEQ ID NO: 293661 - DNA, 90 bp, Homo sapiens
ctggaattagctgaagaacttctgaggattggcctgtcagtttcagagccaatggtgatcaaaagcttcaggacgctggtgagtcactgc

SEQ ID NO: 293662 - DNA, 82 bp, Homo sapiens
tctctctcgtcctcgctgctgtacttcgtctatgtggcgcccggcatagatctgactgcagccatgagcagcaatgagtgct

SEQ ID NO: 293663 - DNA, 99 bp, Homo sapiens
gtcccagcgagcccctgcagggacagtatggctgagggtcaggtgtgctgccaaagttccacctggtgccaagcatcaacaccatgagtggcagtcagg

SEQ ID NO: 293664 - DNA, 83 bp, Homo sapiens
cgccagtggcccgaggtccgggattctgatgagatggaggatgggcctggggttcaggattaggccttgaggcactgctccag

SEQ ID NO: 293665 - DNA, 100 bp, Homo sapiens
tcaccggcagaagaccgagagcaccctgaacgcgctgctgcagagggtcaccgagctggagcgagagattgccctcagtcccaataatcacgaagtgcac

SEQ ID NO: 293666 - DNA, 100 bp, Homo sapiens
cagggatcttgaaattaaagatcagcggggatctgatgagcttctttcttctggcatcattaacggaccttttaccatgaatagttctactccttctaca

SEQ ID NO: 293667 - DNA, 97 bp, Homo sapiens
tgatgtccgagttggagaacaggcgtggccagcactggctccttgatggaggctttggaatgggaagcaagtcagctgccaccagcccaaccggatc

SEQ ID NO: 293668 - DNA, 87 bp, Homo sapiens
aagatacggtcatgagcttttgattaacaccttaataaccagcggagctgacacagccaaatcttagcaaagcaatgtctcaagatg

SEQ ID NO: 293669 - DNA, 75 bp, Homo sapiens
atgcactctgtgaccagctggagctgtgcctgaatttcagaaactgtggaggagtgtcactgtagattccatgga

SEQ ID NO: 293670 - DNA, 94 bp, Homo sapiens
cgcaaaggctttctcgcttgtcaccttgccatgtggaagaaactgggacctcggacagtgatccaccctaaagcaagaattattgcggaagccg

SEQ ID NO: 293671 - DNA, 83 bp, Homo sapiens
gcgagaggtgcggcgaaggaggcagaggcacttatgcttgtcagcttcagaatggcagaagatgatccatatttgggaaggcc

SEQ ID NO: 293672 - DNA, 96 bp, Homo sapiens
agcggggacgcgaggacccgggctgggctttcctcacccggtttacaatgcactcagatcttggaaaaattattcagagtctgttggatgagtttt

SEQ ID NO: 293673 - DNA, 100 bp, Homo sapiens
tgacacggtggatgcagtgggtggatgcagcatctatcagttaccaggtcccctcttgctgttggctgcacatcaggaaggctgtgatgggaatgaaggt

SEQ ID NO: 293674 - DNA, 101 bp, Homo sapiens
ctcctactcatctattttgaataaatcagaaactgatgatgctgtgtatctggacaatgagaaagaaagagaagagtatgtcctgaatgacatcggggtaa

SEQ ID NO: 293675 - DNA, 75 bp, Homo sapiens
gtctgataaagctgtttctctccagcgaaaggaagctcttcgtgtggtgaagatcttacagaaccttgatccgcc

SEQ ID NO: 293676 - DNA, 98 bp, Homo sapiens
ctgacttctgcttttctttggttgccaaggctacatatttctgtggcacatttagaacgaacagggcattacttaactgtgaaagataaccaggtggt

SEQ ID NO: 293677 - DNA, 50 bp, Homo sapiens
aacccttgatcctcctcctaattgcagacatggaaggtctttaatgtaac

SEQ ID NO: 293678 - DNA, 102 bp, Homo sapiens
catacaaaggacacacagggattttgaaaatgctgcacatcccttaatagtcatctacatagattgaagacccactagctattcttattctctttgatgaag

SEQ ID NO: 293679 - DNA, 51 bp, Homo sapiens
gtcctcctccctgcaggctgatcaggaaagaccacagcaagattctttcat

SEQ ID NO: 293680 - DNA, 100 bp, Homo sapiens
attgcaaggtggcaaggagcagaagcagcccttacaagttgcaaagagtcccctttacttggtaaatcacggcgagagtggaccagtcagatgcaacagg

SEQ ID NO: 293681 - DNA, 51 bp, Homo sapiens
ggctaattagcaggatgctgtgggtggcaaagcaaagctatattcaagacc

SEQ ID NO: 293682 - DNA, 75 bp, Homo sapiens
tgtgtgtccagaacgtgccatggagacgcttaacggtccttctagatcctatggtaaaagaagaaaacagtgagg

SEQ ID NO: 293683 - DNA, 75 bp, Homo sapiens
ccctgagcccatggcagctccagcctctgcctcccagaaactcagatgagacaaaaggacccagtgaaaggaatg

SEQ ID NO: 293684 - DNA, 82 bp, Homo sapiens
tgaagacatcaagaagatcttcgagttcaaagagaccctcggaacgctactgcagcactggggtgtcagttgttggtccgac

SEQ ID NO: 293685 - DNA, 100 bp, Homo sapiens
ccggaagctctttcaccgccaaccgcgaggctgcaaagggtgtgaacccggaagcgatttcatagccacgagccctatgagtttgtctctctggaatggc

SEQ ID NO: 293686 - DNA, 82 bp, Homo sapiens
cacggatcatggccgcagccgctctggggcaggtcaatgagctgaaggagaaaggcaacaaggccctgagcgtgggtaacat

SEQ ID NO: 293687 - DNA, 75 bp, Homo sapiens
ccatggctctcgccgtccgagtcgtttattggtcttgttccagggcaagattggactccccatcctgtgcgtggg

SEQ ID NO: 293688 - DNA, 100 bp, Homo sapiens
cagcccccaacgccagcttcctgcaggcccagagccggcatgaactctcccaacgagtcgggataccgttaaccctggataaagagaatggaggttacct

SEQ ID NO: 293689 - DNA, 100 bp, Homo sapiens
accactgggccacaggaaaggcaggtgcaagaaagcctttgaggtgaaggtgtatgaaagtcatcataacagatgttttccaaaaacttgtagaaggttg

SEQ ID NO: 293690 - DNA, 75 bp, Homo sapiens
gaatgatttatagctaagactccaggacacccctgaagccgagaaatgctctaagcgaaagacatgaggcctcag

SEQ ID NO: 293691 - DNA, 75 bp, Homo sapiens
acagtacgcctacttctataaagtcatccaggttattgcagctgactgcaaaagggtcacagtgctgaagtattt

SEQ ID NO: 293692 - DNA, 96 bp, Homo sapiens
agtcttcccgcgtccgccgattcctcctccttggtcgccgcgtccttggctggcgtgctttgaacttggcctactccagcatttacggcagctacc

SEQ ID NO: 293693 - DNA, 75 bp, Homo sapiens
tgctgctgctgctgcccgcgtccgaggctcgcgggcggcgggcccgggcacattcaggaccccgcgagccagcgg

SEQ ID NO: 293694 - DNA, 75 bp, Homo sapiens
gcggttggggcgggaagagccggggccgtggctgacatggagcaggttgaccagtatctctaccacatgcgcctc

SEQ ID NO: 293695 - DNA, 83 bp, Homo sapiens
gaagagcagagcggagggagccccagacacgacctcctgccccccgaggtctgcagtctcctgaacccagcagccatctacgc

SEQ ID NO: 293696 - DNA, 100 bp, Homo sapiens
gcgagccagagcctgcagtcccacacgattccgagtccgaaaggtccctgagtagattggaagcagtgacagcacgctcctttgaagaggaaggagagca

SEQ ID NO: 293697 - DNA, 75 bp, Homo sapiens
gggccggccaaagcaagatcagacctcctgccccccgaggtctgcagtctcctgaacccagcagccatctacgcc

SEQ ID NO: 293698 - DNA, 75 bp, Homo sapiens
aagccaatcccaggaggaaaaacggccaaccaagccctcgagcagttattcccatgtcctgtataaccaatggaa

SEQ ID NO: 293699 - DNA, 93 bp, Homo sapiens
cgggcggcctgccccgccggagcagcatcatcaagtacgagctcaactggaggcagtcctgtgcggaaatctgaagaaaaaacagatacaaag

SEQ ID NO: 293700 - DNA, 75 bp, Homo sapiens
cccttccgtatctgcctaggcattttgctgtctcctcctaatacggtttgtggtaaatatgccagctctagaaca

SEQ ID NO: 293701 - DNA, 90 bp, Homo sapiens
gacgggagagtctgccggcggagaatataagcagataaacactgttgatgtgttaactacgatgggagctattcctgcagggttcaggcc

SEQ ID NO: 293702 - DNA, 97 bp, Homo sapiens
cctcggccaaacggccagacgccgacgtcgaccagcagagactggtctcagccttagatccaaggacagtccaaggaagtcctaagaccatggagtt

SEQ ID NO: 293703 - DNA, 49 bp, Homo sapiens
aggaatcccagtgcctgctggggacgagatggagtttcactgtgtcagc

SEQ ID NO: 293704 - DNA, 85 bp, Homo sapiens
gtcggagagccagctcaagaaaatggtgtccaagactataatgtaactgcaaactccaagctggtcattatcacggctggggcac

SEQ ID NO: 293705 - DNA, 75 bp, Homo sapiens
ggaggactcagaccctgagcctgaaggggaggcggaggacagtgcatcccaggcagctcttagtgtggagcagtg

SEQ ID NO: 293706 - DNA, 83 bp, Homo sapiens
cctgagagcccgagcgcccagcgccgcgccgggagacaatgcagatcttcgtgaagactctgactggtaagaccatcaccctc

SEQ ID NO: 293707 - DNA, 100 bp, Homo sapiens
ctccagaagagaggatgctgtctggtgctgggctacatggccaaggacaagtttcggagaatgaatgaaggggcatatgatattttcctgaatgcaaaag

SEQ ID NO: 293708 - DNA, 100 bp, Homo sapiens
tgcaaaaccacaccgacttcaaggacaaggtcaagtctggcaccatctttgacaacttcctcatcaccaacgatgaggcatacgctgaggagtttggcaa

SEQ ID NO: 293709 - DNA, 100 bp, Homo sapiens
ccaacgtgtggcggctcgcgacccccggcaacccggagaaggtctacagagcggcctgcgccagcgagtaagtaaggaggtctctgtaccatggctcgta

SEQ ID NO: 293710 - DNA, 100 bp, Homo sapiens
gccgatgccagagccaggtgaactggaggagcgatttgccatcgtgctggttctccttactatgacaatgtccgccccctctcttaccctgattcggatg

SEQ ID NO: 293711 - DNA, 75 bp, Homo sapiens
caaatcagagagaaggaatccaccttcttacgctatggcagtggtgttgtctccatctactggcaaagaagaaat

SEQ ID NO: 293712 - DNA, 51 bp, Homo sapiens
cctcggcggactcgccatggaggaggagtgttgggatctggtgcaacaaac

SEQ ID NO: 293713 - DNA, 96 bp, Homo sapiens
cgaaattgaaattacctccgagggaaacaagaaaacatcaaagaggtctagcaaagacgttgccccatctgacgctcggctcgaggcctctctgtg

SEQ ID NO: 293714 - DNA, 75 bp, Homo sapiens
gccgaagatggcggtccccgcggcgctgatcctacgggagagccccagtcttagagtttgaaagagtctatcttg

SEQ ID NO: 293715 - DNA, 101 bp, Homo sapiens
ctcggccttcttcactgtcactgtcacagggagtttgagcctttgctgaagccacacgtggctgtgaagaaggtcccgtatgtggatgaggaggggaatct

SEQ ID NO: 293716 - DNA, 100 bp, Homo sapiens
tgaaatatagaggcctgattaaatactggtttcacactccaccaagcatcccattacagatagaagagatgagacaaaaggacccagtgaaaggaatgac

SEQ ID NO: 293717 - DNA, 146 bp, Homo sapiens
ttgaaccggttcttgggggactatgtggtggacttggacacgtcccagctctctctgggcatctggaaagactactgtcagaggatgtaggaatggacatcccctttgaagagggcgtgctgagtcccagtgctgcagacatgagg

SEQ ID NO: 293718 - DNA, 88 bp, Homo sapiens
cactccagcactgcgcagggaccgattccagaattctctgatggtttctggactgggtcccagctggcgtgctggacgaattcggaaa

SEQ ID NO: 293719 - DNA, 98 bp, Homo sapiens
gcaagcaggcaacctgaatacagaggctgctgtcaagcaaactcaggacttcaagcaactgagaaatgaaaagaaaatacttgaaaaggaatttaaga

SEQ ID NO: 293720 - DNA, 100 bp, Homo sapiens
tcggagcctcactgctcccagcagcacctcaggactcagcccaggagagtgttattactcgagatattcatcgtacatttcccgcacatgattactttaa

SEQ ID NO: 293721 - DNA, 100 bp, Homo sapiens
cagtcagcattggatttctggcttctgtaactggagcgatgattaccagtccatgatgggaaaaaaagcatcagagctacgaactatgttgaaagcaact

SEQ ID NO: 293722 - DNA, 75 bp, Homo sapiens
gcagatattaatgggagcatatatgatgaggtccttgaatgggcaagagggcacatgaagtacggcgtcctccac

SEQ ID NO: 293723 - DNA, 73 bp, Homo sapiens
cattctcggattctagaacactattgtggacgatgaaaggctctctgcagaggagatggatgagaggaggcgg

SEQ ID NO: 293724 - DNA, 124 bp, Homo sapiens
aatgacgtctgctgatgatttcttccaaggaaccaaggcggccctggctgggggaaccactatgatcatatatcccaagaatgtacacattctgcaccaattatggaggacaacagtatgtgat

SEQ ID NO: 293725 - DNA, 76 bp, Homo sapiens
tcgggcagctacacatcttgaaagagaagctcttcctgtgagttactccattcgccattccataagtatgcctgct

SEQ ID NO: 293726 - DNA, 82 bp, Homo sapiens
ccgagacgcactgggggccggatgaagtggtccaaaggcaaagttcgggacaagctcaataacttagtcttgtttgacaaag

SEQ ID NO: 293727 - DNA, 73 bp, Homo sapiens
ggacctctggagtgcccccagcccagagcccgggaaatgtttcaacgtgcgcaagcgttgcggcggcgggcag

SEQ ID NO: 293728 - DNA, 100 bp, Homo sapiens
gagtactcaagaagttctgtcctcatcacctggtgggttcagtagaagaattccaaggccaagaacgaagcgtcatcctcatctccaccgtgcgaagcag

SEQ ID NO: 293729 - DNA, 90 bp, Homo sapiens
agacaacagcctggtggcagcgggtgtccgcaatgttgccagtgtctgtctgcagattggctacccaactgttgcatcagtaccccattc

SEQ ID NO: 293730 - DNA, 101 bp, Homo sapiens
ggcgactgtcattcacaaccccctgaaagcgtttttcgttggaatatacgttgcacatttatggcgattctgagtgtgagggcagacttctgccaggctca

SEQ ID NO: 293731 - DNA, 100 bp, Homo sapiens
ttcggcagagtacatcattcagcaaggtggctgggagtggtaaaatttcagccttccctttggccttgggactcagtgaggaacaatttgagaagtgccc

SEQ ID NO: 293732 - DNA, 100 bp, Homo sapiens
ccggagagttctgcatgttgattccttcttccagaccagctggtcttgcttctggagcatctcttggagcagaagactctgagcccccgaactctgcaaa

SEQ ID NO: 293733 - DNA, 100 bp, Homo sapiens
ctgctgaagtacaggcagtcaaccctaaacagtggactcaacttcaaagacgttctcaaggagaaggcagacctgggtgtttggagtagatgacaatcag

SEQ ID NO: 293734 - DNA, 78 bp, Homo sapiens
tcaaggacacggtctacaccgacttcgacgaggagcaggagcggcttcgcttggagcaggagcgagagcaggaacaga

SEQ ID NO: 293735 - DNA, 82 bp, Homo sapiens
acctgacactggagaccgtctggaatgtctatgacacactcttctgtgagggcttgccaagtatcttgctgcagagagaacg

SEQ ID NO: 293736 - DNA, 83 bp, Homo sapiens
ggagctgtgcagccgcgaggaggcgcgggaggtgttcgagaacgaccccgagacgaacaccttccaccatgaccacctcagca

SEQ ID NO: 293737 - DNA, 101 bp, Homo sapiens
gcgtcctctcccggccctctcgcgctgcactgtctctccgacgcaagactgtcccggcccggattatctcaactttggtctcctgggaccactcgttgctg

SEQ ID NO: 293738 - DNA, 80 bp, Homo sapiens
gggacgcgggtcgcgtcgttgtcctccgcgagcgtccggattgcagggcgccctgcgtccggcagaggaggcgagcatcc

SEQ ID NO: 293739 - DNA, 100 bp, Homo sapiens
gcgatgatgatcccttggaggcattcatggctgaagtggagagaaccatggagtctggcagtaccgccgccagtgaggaggcacgcagccttcgagaatg

SEQ ID NO: 293740 - DNA, 96 bp, Homo sapiens
ctgtcttcggtggactccttcggcagtccacccaccgccgccgcctcccagatccagagacaatggccccgatgggatggagcccgaaggcgtcat

SEQ ID NO: 293741 - DNA, 75 bp, Homo sapiens
agacaagtccccagggaatgccacagcatcctccagcacctcagattcactggatgaaagaaagataaaaggggt

SEQ ID NO: 293742 - DNA, 82 bp, Homo sapiens
ctacctgggcagctacagcggcaaggtggagctgagagagcctgttagtattaatgaagaaaatgagggatttgaacataac

SEQ ID NO: 293743 - DNA, 74 bp, Homo sapiens
gccgatattcaccaagcgcttcgctacaaggcaacgtgttggaccttccggagcttctcagaagacagagggtt

SEQ ID NO: 293744 - DNA, 97 bp, Homo sapiens
gtatgacgaaggagtacattgtcaggtggtgaactatgacaatgtagtggacacaggttctgaaacagatgaggaagacaagcttcatattgctgag

SEQ ID NO: 293745 - DNA, 100 bp, Homo sapiens
gcagagttcgagaactaagcaaattagctgagaccacagataaagtcaaacaaggcttttgggaagaatttgaggaaatggctagtgatgagctgaaaga

SEQ ID NO: 293746 - DNA, 75 bp, Homo sapiens
gaagatcctggtgtcgccatgggccgccgccccgcccgttggctgcggcccccagacctggcgcagcgtgtccag

SEQ ID NO: 293747 - DNA, 101 bp, Homo sapiens
aattaggataagatttgtatctgatgaatattttccttctgaaccagggttctgcatccactacaacattgtcatgccaaaaagaggcacagttagatgaa

SEQ ID NO: 293748 - DNA, 101 bp, Homo sapiens
aagacagtatgcaaggccacgacccacgagatcatggggcccaagaaaaagcacctggactatgccttcgtgaacagccaggaatggacgctgagtcgatc

SEQ ID NO: 293749 - DNA, 122 bp, Homo sapiens
caaaaactcagaaaatacgtggttggagagctcatctggaattttgccgatttcatgactaaccagtaaatatggctacacacacctttctgcaggagagctgcttcgtgatgaaaggaaga

SEQ ID NO: 293750 - DNA, 99 bp, Homo sapiens
ctgggcgccctgctggcaagatacatccagcaggcccggaaagactctaaaatagagctcaagcttgagaagagagaaccactaaagggcagagcaaag

SEQ ID NO: 293751 - DNA, 87 bp, Homo sapiens
gggagccttttccttcggagcagcagccctgtccggcatctgtcttgagctcccagcaaggatccatcagttacacaagtgacaaga

SEQ ID NO: 293752 - DNA, 100 bp, Homo sapiens
cccgtcagcatgccagggtcatcccgtccagtctctgatcgaaggggagtttccacagtgattgatgctgcctcaggctctcactatgttgcccaggctc

SEQ ID NO: 293753 - DNA, 100 bp, Homo sapiens
gcctgcttgactttgaaaatgatttaattgaatcaagctgcaaagtaactaggtagcctttccagtaaatatatgactcagggaaaagcctcagcgaaga

SEQ ID NO: 293754 - DNA, 98 bp, Homo sapiens
caagactgtgggcgtggagccggcagccgacggcaaaggtgtcgtggtggtcattaagcggagatccgagctcctgggttccaccaagaagatcaatg

SEQ ID NO: 293755 - DNA, 73 bp, Homo sapiens
tccaaggggattcaaacttcaacagaatgtggcaaccaggcaactcatgcagcaattccagaaccccgacttc

SEQ ID NO: 293756 - DNA, 50 bp, Homo sapiens
cggagctcccccaagagccggaaaggcctcttctgaagagctgaaagctg

SEQ ID NO: 293757 - DNA, 100 bp, Homo sapiens
cacctccattggatttaaaagacagtcctcgtcagcactgactttcagctatggaatcggcacaaatatttaaacatggaaaacgtgaagactgtttgcc

SEQ ID NO: 293758 - DNA, 100 bp, Homo sapiens
cagcaatgcagacaggaagaacagaagatgaccttgtgcccacagcaccttctgaaaaggatataatggatttgtacaaccaacccgagcctgtgaagtc

SEQ ID NO: 293759 - DNA, 97 bp, Homo sapiens
ctccaagaaaaaaaccacaaatgtttttctgttttgcctgaatacatgatttaaacaagagatttccacagaagggtgaaggtacactcgagcgtgg

SEQ ID NO: 293760 - DNA, 90 bp, Homo sapiens
ttggcattgaacctgtatttccggagaacacagggaaaccaggaacaactggtaactgtcatggaggaacgaatgatagaagttgaacag

SEQ ID NO: 293761 - DNA, 83 bp, Homo sapiens
tgatgccaacagtgtaccagcagggcgttggctatgtgcccatcacaggtaactaggatttctacctcaaccgcgagacctat

SEQ ID NO: 293762 - DNA, 90 bp, Homo sapiens
gtgcagcgggcccttggcgggggactctgagggaggagctggggacggcgaccctaggagaggtgctggagaatctggtaaaagcaccat

SEQ ID NO: 293763 - DNA, 100 bp, Homo sapiens
acggacaagcacagtcttcggaaggccccatcacaggtatatggaggagtgacctactataaccccgcccagcagcaggtgcagccaaagccctccccac

SEQ ID NO: 293764 - DNA, 100 bp, Homo sapiens
gtcagagcctcatggagtacggtgtggatgaggtcaccattgtcaacattttgaccaaccgcagcaatgcacagagacaggatattgccttcgcctacca

SEQ ID NO: 293765 - DNA, 75 bp, Homo sapiens
agcggctgtaaataatacccgagaggaaataggcccggcagtggtggtgaccgcggtggcttcaaaaattttggt

SEQ ID NO: 293766 - DNA, 100 bp, Homo sapiens
gcagcagcggcctcgccgccgcccgtctcctgtcgcgcagcttcctccgagagattaaacagattctagaaaatgaacttcagatacctgtgtccaaaat

SEQ ID NO: 293767 - DNA, 50 bp, Homo sapiens
gcaaatgcacctcctgcaagaaaagctgcaggcccagcaggatgctgtca

SEQ ID NO: 293768 - DNA, 74 bp, Homo sapiens
cccatctcaatcagaattactagattttctctcaaactacgagatgacggtcgaaccaaacccattccaaagaa

SEQ ID NO: 293769 - DNA, 83 bp, Homo sapiens
ccctagaggcctgcggcctgcgggtttccaggcctgaggtgcccgccctggccccaggagaatgaaccagccgcagaggatgg

SEQ ID NO: 293770 - DNA, 83 bp, Homo sapiens
cagcatgtcggtggcggggctgaagaagcagttctacaaggcgagccaggaggctactcacagtcgaactacaactccccggg

SEQ ID NO: 293771 - DNA, 96 bp, Homo sapiens
tgaagaaagacagatcctgtgtcacccggcaactcagaaacatcaggtccaaggtggcagtagagaagagcatcacagaagttgctcaggagctga

SEQ ID NO: 293772 - DNA, 75 bp, Homo sapiens
tttggaaacgacgtcatgtgttagttttcggctttgtgagaaaccttaccatcaaacacgatggccagcaacgtt

SEQ ID NO: 293773 - DNA, 100 bp, Homo sapiens
tgccaatcttgtaccaatgataatacaccttttggataagcaagttaaggtgaactgcacagctgaagtactttacccttcaacgggacaagaaactgca

SEQ ID NO: 293774 - DNA, 100 bp, Homo sapiens
gggagcagttggggactcaatgtgtgggcaacaaggtcaaaatgcagatcttcgtgaaaacccttaccggcaagaccatcacccttgaggtggagcccag

SEQ ID NO: 293775 - DNA, 75 bp, Homo sapiens
cacgaatgggaagccaagtgccatcttcaaaatttcaggtcttaaatctggtgctgctacccccgtatgatgatg

SEQ ID NO: 293776 - DNA, 75 bp, Homo sapiens
aggaggacggcgtgatcacggccagcgaggacaggactgatcctttgaaatactccagccatgactaaaagagaa

SEQ ID NO: 293777 - DNA, 75 bp, Homo sapiens
gtaggaaggaacttggttccccctccctcagcttccgccccaaaaggatctcatctggccaccgcgttctggaag

SEQ ID NO: 293778 - DNA, 83 bp, Homo sapiens
attcgccccgattaaagactgtgttgcattatcaggtagaacgtcatgacatgaataccttaagcctgcccctgaacatacgc

SEQ ID NO: 293779 - DNA, 80 bp, Homo sapiens
gcaaggtcgccctcaaggccatgatcaaaacgttctatgaatttgaatgctgtgtgtgtcgcgggggccctgagaaagtc

SEQ ID NO: 293780 - DNA, 75 bp, Homo sapiens
cggcctttgccccaatcttgtgtgggcactgaagggggactacaggttcgagagaatcacagccatggcccccac

SEQ ID NO: 293781 - DNA, 100 bp, Homo sapiens
gcaggacccgaggccaggagccaggggcccagaaggtactaggttttgacaagcttgcatcatgcgtgagtataagctagtcgttcttggctcaggaggc

SEQ ID NO: 293782 - DNA, 100 bp, Homo sapiens
ggccgtccagcagatggcggatgccctgcagtacctgcagaaggtctctggagacatcttcagcagccgcaagaggccggagctgcccagggcaccgtcg

SEQ ID NO: 293783 - DNA, 75 bp, Homo sapiens
gaacaacaacttgcagctcatctctattgatgtacctggagtagaacagaaaaattattatgtctgtgttccctt

SEQ ID NO: 293784 - DNA, 100 bp, Homo sapiens
gcctgcgctgcctgcccgagccggagcgccagctcagcgtgcccatcccggggggcagcaacggcgacatccagcaagcccccaaatacatcaagatgtt

SEQ ID NO: 293785 - DNA, 98 bp, Homo sapiens
gctgagcagtcaactcaaatgcaagtccaagaggaggaggaggcggaggtccaagcggaaaggaggatgaagaaggttataacgatggagaggtagat

SEQ ID NO: 293786 - DNA, 75 bp, Homo sapiens
ttgaagacttccgagtagatgatatccaggaggtgcagggctacgtgctcatcgctcacaaccaagtgaggcagg

SEQ ID NO: 293787 - DNA, 75 bp, Homo sapiens
gggcaggaaagcagcgggactttcagagactgacttgcataccaaatgtgtggtggatgtggatgcaaacaaggt

SEQ ID NO: 293788 - DNA, 89 bp, Homo sapiens
gcgcagtccgctgggcagaggcttgggccgccgagctggacccggaccggttttgggtcctggcattgatgtgcctgctccagacatga

SEQ ID NO: 293789 - DNA, 83 bp, Homo sapiens
gaaggatatcgacgtcgtgatccagaagtccagagctgaggactgcctgtttgcaggtggaagttaaacgagctgagcctcgg

SEQ ID NO: 293790 - DNA, 50 bp, Homo sapiens
aactggttctacacgcgagctggtatggatcctggcgggagccagtcaac

SEQ ID NO: 293791 - DNA, 74 bp, Homo sapiens
ggcgaccgagacggtggagctccataagctaaaggactggacctacagagacatctgggattttctgcgtcagc

SEQ ID NO: 293792 - DNA, 50 bp, Homo sapiens
gcttggcaaaatcgagcgggccattgcttcggaaccaaaaagaagcttcc

SEQ ID NO: 293793 - DNA, 75 bp, Homo sapiens
cgggcgaaggcggggcctgaggaggactgagctggggcgggacccaggtgactgggaagttccgcgggggtgtga

SEQ ID NO: 293794 - DNA, 123 bp, Homo sapiens
aagacaccccggaaacctaccgtgaaaaaagggtcccaaacgaaccttaaagacccagttggggccctggccaacgtcaacattgggagcctcatctgcaatgtaggggccggtggacctgct

SEQ ID NO: 293795 - DNA, 100 bp, Homo sapiens
aaccactagatgactgccagaagctcatagaacacggagtcaacactgcagaggacttagtccgagaagaaattggccagtttcagaaaatagttggtgg

SEQ ID NO: 293796 - DNA, 100 bp, Homo sapiens
catcagagactggaccacagcactgactttttttctgaggcttttgaacataatgggcgtccctattctcttttgaccagcatctcagacatgtcgaaaa

SEQ ID NO: 293797 - DNA, 98 bp, Homo sapiens
gcggtggagactctgtccccggactgggagtttgaccgcgttgacgacggctcgcagagtctgctacaatgctgctgctgcacagagctgtggtcctc

SEQ ID NO: 293798 - DNA, 100 bp, Homo sapiens
tcgagcctagggaggcgaggttcccgcaccggatagtgggcctttggagtgacgctgtgggaactcatgactctgggccagactccctacgtggacattg

SEQ ID NO: 293799 - DNA, 100 bp, Homo sapiens
tgggagtctccgcgtcccgctcgctgggagagagagctgttgcgcagccattggtacctgtattggggaaacatagcatacaagcaagaagcttacagcc

SEQ ID NO: 293800 - DNA, 76 bp, Homo sapiens
actacgcggccgcggagacctacctgcggcgtcggcagctgctgctccgagcatagttgttgcccaaatctcttgg

SEQ ID NO: 293801 - DNA, 96 bp, Homo sapiens
gccgacccgcgccctgctccctctcagcacctgggcggacggatgataatgaagataattcaaatgatgggacccagccatccaaaaggaggcgaa

SEQ ID NO: 293802 - DNA, 80 bp, Homo sapiens
acaaacaaatccttgaaagaagaagatggagaagaaatagttacctatgatcctatctcccctggttcgaggtattttat

SEQ ID NO: 293803 - DNA, 75 bp, Homo sapiens
acaaagaatagagttgagcctgtgggacacttcggtgtttcaaaccggcatggtcggctaccccgaggccctcac

SEQ ID NO: 293804 - DNA, 50 bp, Homo sapiens
aaagcagcgtgcgttcagccctgggctgctgatgcaaggaatcccctggg

SEQ ID NO: 293805 - DNA, 82 bp, Homo sapiens
ccggattgtactgtatggggactccaattgcttggatgacagtcaccgacagaagggtgcgcgcggagccatggttatcatg

SEQ ID NO: 293806 - DNA, 100 bp, Homo sapiens
attgggagtggacacctgcagtctctgcagcggctgggggtcctggtgttcctggaacaggctctcatccagtatgcccttcgcaccttgggaagtcggg

SEQ ID NO: 293807 - DNA, 75 bp, Homo sapiens
catgggctgctgcagctccgcctcctccgccgcgcaggagcggtggtgccccccccgggcacggggccatgtaca

SEQ ID NO: 293808 - DNA, 83 bp, Homo sapiens
cacatattctgtctgtccacgatagtgccaggcctatgttggaggaactgtggaaggtgcatcagtgaagaaatggaccaatg

SEQ ID NO: 293809 - DNA, 51 bp, Homo sapiens
ctgaagatggtgtcaaagagaaattctgataatgctgtagatccagatgta

SEQ ID NO: 293810 - DNA, 113 bp, Homo sapiens
tggaaaccaaatctcctggcaccttgatcttggattttacagcctccagaactgaaagtccatcagcttgataatggaggagaacaatgactccacggagaacccccaacaag

SEQ ID NO: 293811 - DNA, 88 bp, Homo sapiens
aatggcacttcattggccacctacagaaacaaaatgtcaacaaattgatgggttgtgggctgcacactgcagaaagatacagctgaaa

SEQ ID NO: 293812 - DNA, 105 bp, Homo sapiens
agactcagtcgccttcatggaatgtcttcaaagaatattaaaaaatctggagggactccaacttcaatggaagatttcgatgtcgatcattttgtgtctgactgt

SEQ ID NO: 293813 - DNA, 74 bp, Homo sapiens
gaaattcctaatattaagcctgatattcttatcattcaagatggaaagttgccttttgttcctccggaggaaga

SEQ ID NO: 293814 - DNA, 82 bp, Homo sapiens
tacttcctgtttggcttcaacattgtcttctggaaaccaaggtgtatgttggtaacctgggaactggcgctggcaaaggaga

SEQ ID NO: 293815 - DNA, 75 bp, Homo sapiens
caccccagatgtcctcatcatcccgtcagagctgaggtacttcgtgaagacagaccccgtgcggctgacacagct

SEQ ID NO: 293816 - DNA, 83 bp, Homo sapiens
ctcagcgtcgctggcagccgctgtacttgctgggaggctgtggcgtgctgggtgtcggcatctggctggccgccacacagggg

SEQ ID NO: 293817 - DNA, 82 bp, Homo sapiens
cgtagacaccagctccgaaatcaccaccaagagccaaatctcctcagccacctgttgaagaagaagatgaacacttcgatga

SEQ ID NO: 293818 - DNA, 51 bp, Homo sapiens
tcagcctcccgagtagctgtgattacagagttttgctcttgttgcccaggc

SEQ ID NO: 293819 - DNA, 100 bp, Homo sapiens
cgtccccctctccgccccccaggaggggcgagagggagccgcagctgatgtcaggtatgaggatacatgggctgcacttcacagaagagccaaagactgt

SEQ ID NO: 293820 - DNA, 100 bp, Homo sapiens
gtgccaggaactcttctggggagaccccgacgtggagtgccgagggattgtcaatgaggcagatcagattccgatttgacgggcaaccaatcaatgaaac

SEQ ID NO: 293821 - DNA, 90 bp, Homo sapiens
tggtgcacaaaaagacacttatactatgaaagaggaggatcgtttaaaaattgatgtaattgactggttggtatttgacccagcgcagag

SEQ ID NO: 293822 - DNA, 82 bp, Homo sapiens
gcgcctctctgatcttcctgcatggctcagattttaccaaatgttgcaagaactctggagttcttatggtagtaaaatgccg

SEQ ID NO: 293823 - DNA, 75 bp, Homo sapiens
ctggaacatgcagagtctgcacaacttatgaggtggcaacatcttgtacttcggagatctgaagccgagcaactt

SEQ ID NO: 293824 - DNA, 97 bp, Homo sapiens
gttcggcctgccatgtggaaaatgatgcttaatatcgatggtggtggtatcatggatacagaaatgtctgaagatatagaccacaacttaactccta

SEQ ID NO: 293825 - DNA, 97 bp, Homo sapiens
aagaagaccaacaaacaaggagcctaagggagttaagaaacaatcagctatgccttgggatcaagatccagaacaatcaactggaaattacagtgaa

SEQ ID NO: 293826 - DNA, 100 bp, Homo sapiens
caagatggtgaagcagatcgagagcaaggacttgggaccctggaggactgacgctgctggcctgggcgtccccttccgctgagccatggcgactcccgac

SEQ ID NO: 293827 - DNA, 88 bp, Homo sapiens
tctgacagcagtggggagaccaaggtgacaccacctctccctcgaggccaccaggaggccccatcatcaccgtccacccaaaggaaat

SEQ ID NO: 293828 - DNA, 75 bp, Homo sapiens
ggactcacctttggcaaagggactcatctaatcatccagccctgtatatgactgatgggatgttacttcgtgaag

SEQ ID NO: 293829 - DNA, 90 bp, Homo sapiens
caacaacaacaaggcatacaactgaccacccaatgcagtgcatattaacaagggtagattttgacggggtctggctctgtcacccaggct

SEQ ID NO: 293830 - DNA, 88 bp, Homo sapiens
ggacgctggtgaccaagatggcggcggagctggtggaggccaaagtcacgggatggatagccggcctgccatggccatctttgaactc

SEQ ID NO: 293831 - DNA, 100 bp, Homo sapiens
gcacgggcgccggcatagtacaatgaggcagccagcggatcttggcacgtcagctaactgttcagatgatgcaaaatcctcagattcttgcagcccttca

SEQ ID NO: 293832 - DNA, 98 bp, Homo sapiens
gccgccgcaggccgggaggagccgcagcgccgggcgaccccgcccgggcctcgggtgaaagaaaatggcccgaaccaagcagactgctcgtaagtcca

SEQ ID NO: 293833 - DNA, 75 bp, Homo sapiens
caagacagagcgctactcctggcagtgcgtcaatcagagcgtcctgtgcggtgctgcgagagatgtgcaagcagg

SEQ ID NO: 293834 - DNA, 100 bp, Homo sapiens
cactgatgggaagtgagacttgttaaacttgaaaggcagtgctcggaatgtgaccaggcagggagcagtgacatggaagcagatatggccatggaaaccc

SEQ ID NO: 293835 - DNA, 90 bp, Homo sapiens
tcagcctggactcattcagaaaaggttttacacacgctggaaagattgggaatcatggtattctcagagctttggtttacatttttcctt

SEQ ID NO: 293836 - DNA, 75 bp, Homo sapiens
gctgaggaaccggaccccggcagcttcaccttcaggccattcagaggaggaaagagaggggaatatgaagtcagc

SEQ ID NO: 293837 - DNA, 100 bp, Homo sapiens
tggagattctccggggacccttccgtatctgcctaggcattttgctgtctcctcctaatacggaagatgagaatgtgcctactgctcctgatcctccaag

SEQ ID NO: 293838 - DNA, 79 bp, Homo sapiens
cttatgaggatggctgcaagactgtcgacctaaagcctgactggggcaagtttgctattggctccctgatggacgatta

SEQ ID NO: 293839 - DNA, 108 bp, Homo sapiens
ctctacgcctcctacgtttacctgtccatggccaacgaggtgacggacagcgcgtacatgggctccgagagcacctacagtgagtgtgagaccttcacggacgaggac

SEQ ID NO: 293840 - DNA, 95 bp, Homo sapiens
tgggaatcggtcgcctggaggaccagtatttcccatggaggatcctgagagtgagaagcctgactgaccccgcctagacgccaggcccacttcac

SEQ ID NO: 293841 - DNA, 83 bp, Homo sapiens
ccggagcccgagtggatcggggacggagagaacacgagcccatcagcccagggccttgctgccgccatgactgaggaatcaga

SEQ ID NO: 293842 - DNA, 50 bp, Homo sapiens
cgtgtttcatgaactcagctattcaggtccatggaattgtacggcggtcc

SEQ ID NO: 293843 - DNA, 80 bp, Homo sapiens
accggcggcgctggaggagcgaggcagctgtactaggactgggaacgggttggtcaaagaaaaagtgatgtatgaaaaag

SEQ ID NO: 293844 - DNA, 75 bp, Homo sapiens
aagattgcttgaagaaatccatgccatgaaggcctttccccctggtgctcttcatcctttaccaaagagacaagc

SEQ ID NO: 293845 - DNA, 100 bp, Homo sapiens
gaattactcaaaaaaaggcaaaggaaaggcaaaactaggaaaggaaccagtattggccgcagagaataaagagatccgtgctcagctcacagagcagatg

SEQ ID NO: 293846 - DNA, 50 bp, Homo sapiens
gaaatgatcttagttctggaatagaaattgaaaagatatggtcctcgccg

SEQ ID NO: 293847 - DNA, 100 bp, Homo sapiens
atccagacaaaagcactttagaaaaagctattggatcactgaaggaagtaatgacgcgcctgtgtctggcagagctggtgtgagacgagacaatcctgcc

SEQ ID NO: 293848 - DNA, 101 bp, Homo sapiens
actccggaagaaacctgccacagatgggagaggtgctgagaggggaccggattgtcaacacccctttccaggttctcatgaacagcgagaagaagtgtgaa

SEQ ID NO: 293849 - DNA, 50 bp, Homo sapiens
taaacatgcaatgaacccaaaaggattatggcatcgtcaaagcattgtgg

SEQ ID NO: 293850 - DNA, 87 bp, Homo sapiens
acttcgcggtggtcaagcgggccacgcacctcgtcaccaaggccaaggtgctgttggcagcagcggtctgcacaaaagcaggaaagg

SEQ ID NO: 293851 - DNA, 100 bp, Homo sapiens
cgatggcctctcttttatctccagttctgtcatcatcaccaccacacactgtgagaactacgatgacccgcacaaaacccctgcctccccagttgtccac

SEQ ID NO: 293852 - DNA, 74 bp, Homo sapiens
cttgtgggagcaaaaccaacgcctggctcggagcagcagcctctgaggtgagcgagtgctgtgctttcatgggc

SEQ ID NO: 293853 - DNA, 90 bp, Homo sapiens
cgatgaagtgcagaggtttttttctgcctgtctctcttgctgatcgagaggtgatatcccggcttcggaactgcatcatctcgctggtaa

SEQ ID NO: 293854 - DNA, 82 bp, Homo sapiens
ggggcctatgtccatatggtcactcatttcattcaggctgatgaattcatccgagcaaatgccaccaacaagctgacagtca

SEQ ID NO: 293855 - DNA, 101 bp, Homo sapiens
tggatgatcgagaggatctggtgtaccaggcgaagctggccgagcaggctgagcgatacgacgacctgtactgtaccctggaggtggattccttcggctat

SEQ ID NO: 293856 - DNA, 82 bp, Homo sapiens
caaggaggaagatggtccaggctgggagcatccccttagcagcagcctctgatgaagactggcccatttgcagagcactcca

SEQ ID NO: 293857 - DNA, 100 bp, Homo sapiens
acaaaaacccttgggtgcagatcatgatgtttaagaacatgacgccgtcacccttcctgcgattctacttagtgagacggtttaagcggaagcatcttac

SEQ ID NO: 293858 - DNA, 74 bp, Homo sapiens
ctgtgtgtctcgggcgttcagccgctcgctctccgccttccagaaggttcgaaaacatggccaaaagaaatgcc

SEQ ID NO: 293859 - DNA, 90 bp, Homo sapiens
ccatgccagttcgagcagctgacaaattggctcctgctcagtatatccggagcgagaacccgagcagcgccatgagcaacactaccgtcg

SEQ ID NO: 293860 - DNA, 98 bp, Homo sapiens
gaagctcggtgccggctcgcgcgatcggtgggacagaatttcgttgttttcaccgacgagactggagacatttcagcagtcctcactgcagcacaaat

SEQ ID NO: 293861 - DNA, 100 bp, Homo sapiens
gagacgcggagggtcgaggcggcgcggcctgagcaatgtctcaggctgtgcagacaaacggaactcaaccattaagcaaaacatgggaactcagtttata

SEQ ID NO: 293862 - DNA, 100 bp, Homo sapiens
ggaggagctcgatggcgagccaacagtcactgccaggccattgctcggcgtctgaaaccattcggtgtccagagatttctgtacacagggcgccagccca

SEQ ID NO: 293863 - DNA, 96 bp, Homo sapiens
cagaaatcacattggaccctcctcccaactgtagcccaggagttaaagtcactgtttgaaaaaaaatctctcaaagagaagcctccaatttctggg

SEQ ID NO: 293864 - DNA, 100 bp, Homo sapiens
cgttgccgcactgtgtgcacttggaggcttcaaagagacaatcaagataggatccgaggttcagaaatatgagattacggagcagcgcaagattgatcag

SEQ ID NO: 293865 - DNA, 100 bp, Homo sapiens
gaacgattgggctgagcagaggacgacatgttgcttttcgtggaggactatgatttaatctccaaagaaccaaagccttttgtatttgagggaaaagtac

SEQ ID NO: 293866 - DNA, 51 bp, Homo sapiens
cgtcttggtgttctccacgctggttcgcagacaccctgtagaccttgaatc

SEQ ID NO: 293867 - DNA, 90 bp, Homo sapiens
gacagttatcacatctgtgggagacgaagaaggcagaaggagccacaattccttgatctatgaacttttctctgttatggttcattctgg

SEQ ID NO: 293868 - DNA, 96 bp, Homo sapiens
cgggacccggcgaagacgcgaccgcggcgcgagtcaccatggttctttcagagcacggcttcggccccatcactaccgacatccgggagggacaga

SEQ ID NO: 293869 - DNA, 90 bp, Homo sapiens
atgcgccactcgctccccaactcccgtatcatgatccaccagccctcaggaggcgcccggatttatgtgatcagtttggctgaaccccgt

SEQ ID NO: 293870 - DNA, 99 bp, Homo sapiens
ctcattactgggattctcctctccctggggcgttatgaaggtggagccgccaccaaaatgcagattttcgtgaaaacccttacggggaagaccatcacc

SEQ ID NO: 293871 - DNA, 90 bp, Homo sapiens
gtgcggagagaggctgcctcctgcagcccccatagcagggtctccgtctctccaccgggggcttcatccttccagggaggagaagaggga

SEQ ID NO: 293872 - DNA, 75 bp, Homo sapiens
aaagtcttcctgacaccaccggagaccctgcccccaggaattacatgaacgacagccttcgcaccgacgtcttcg

SEQ ID NO: 293873 - DNA, 89 bp, Homo sapiens
caagaacaaggtgacacatattctgtctgtccacgatagtgccaggcctatgttggaggctgcatttgatgccagaaggcaaacacaac

SEQ ID NO: 293874 - DNA, 90 bp, Homo sapiens
caggctccgtgcagagctgggccgacccgaaagtcaaaatgcagatcttcgtgaaaacccttaccggcaagaccatcacccttgaggtgg

SEQ ID NO: 293875 - DNA, 75 bp, Homo sapiens
ctccccagctggtggctggagcgaccccttgttctttggtggcgctgaaacctgtttccctccaatcttgtggtt

SEQ ID NO: 293876 - DNA, 89 bp, Homo sapiens
attgctgaacttaaaaagcagtctaaacctgtgaccacccctgaagaaattgcacagagtgatggctgttttagtacttcaggtggaat

SEQ ID NO: 293877 - DNA, 97 bp, Homo sapiens
tgaccctgtaacccaaaggaggaaacagctggctaagctcatcattgttactgcacctgtggaatcctctcaagaggaacagtcattgtgtgaaggt

SEQ ID NO: 293878 - DNA, 75 bp, Homo sapiens
tgcacaacgaactgggcaacatctacacgcacgaccctgtgtcaaggagagtggaaagcctcatttgaagagctc

SEQ ID NO: 293879 - DNA, 101 bp, Homo sapiens
cttttttttaggagagttagagaagtgccttgaagatccagaaaaactaggatccctttttgttaaacacgccctcgggaccaaggatcacgtcatgactc

SEQ ID NO: 293880 - DNA, 75 bp, Homo sapiens
tcatcgtccctgccaactttccaagtctggggatggccagtgccaggtggagctcaacaggaaagtcctagcgga

SEQ ID NO: 293881 - DNA, 74 bp, Homo sapiens
gaaggcagaacttatgctgactacgaatctgtgaatgaatgcatggaaggtaccgaaagcacagtaatcactgg

SEQ ID NO: 293882 - DNA, 98 bp, Homo sapiens
gcattttgacagagtacaccttaaagtatcagccaaatttcctttcctggatgaaaatgttgtctcctttctaaattctctgccgatttgggaaaaag

SEQ ID NO: 293883 - DNA, 50 bp, Homo sapiens
accccaaactcatggaaattgatcaggattcaggagcagttccagaaaaa

SEQ ID NO: 293884 - DNA, 75 bp, Homo sapiens
taaggattccaagtaactcttatttgagttgaaactggttgacaaccattaacctgggttgcaactacaggtggc

SEQ ID NO: 293885 - DNA, 75 bp, Homo sapiens
ctttcggtaatgatgctcggttcatcagaagatcatgtacaccaaatgcagagacaatgcagatcttcgtgaaga

SEQ ID NO: 293886 - DNA, 100 bp, Homo sapiens
cctgggccaacatggggcaggagtgcatcaagtgccacatcaacgtgtatccacacaagcagccagggtggtgcttgtgtgggaaggactttaaatccag

SEQ ID NO: 293887 - DNA, 98 bp, Homo sapiens
gacttcaaatgctgtttgtattccagagactagaagaagatagtggtgagctggcaaagccaaagattggttttccagagacaacagaagaggagcta

SEQ ID NO: 293888 - DNA, 75 bp, Homo sapiens
cggtcttcatctcggatatccgcaactggtctttacggaataaaggatgatgtcttccttagtgttccttgcatt

SEQ ID NO: 293889 - DNA, 82 bp, Homo sapiens
cgcaggcccagacgacgcgcgcgcagaccaagaatcgccttcagccctgtctggtgcatccttggcagaaagtgaggaggaa

SEQ ID NO: 293890 - DNA, 88 bp, Homo sapiens
gatatggaagactgggtgaagtcaatccgccgagtcatatggggacctttcggaggagagaaccatggagtctggcagtaccgccgcc

SEQ ID NO: 293891 - DNA, 96 bp, Homo sapiens
ctcgccgaccgccatttcacatccagcagaggaggcgggggcagccgctgagacggtttttcacaaggaatcagtgacattcaaagatgtgtctgt

SEQ ID NO: 293892 - DNA, 101 bp, Homo sapiens
attgaactcagagaagccgggacggaatcagtccccaatgcctggaaattcctcattggattactgtgttttaaacagaatttcgtgaacagccttttatc

SEQ ID NO: 293893 - DNA, 100 bp, Homo sapiens
agaaattgctcaggactttaaaacagatctgcgcttccagagcgcagctatcggtgctttgcaggcacatgatggctccgctacttacttgagattcatt

SEQ ID NO: 293894 - DNA, 83 bp, Homo sapiens
ggcaaggagctaaagcagcgtgcgttcagccctgggcgagacggtcatctgttccagccgggccactgtgatgctttatgatg

SEQ ID NO: 293895 - DNA, 98 bp, Homo sapiens
ttcactcccgctgtctcagcagtctacagcacgggaaggacatggagcccaacggcccgtcgctgcccagggatgaagggcccccgaccccaagctct

SEQ ID NO: 293896 - DNA, 75 bp, Homo sapiens
aggccaagcctgcagcggtggctgctgaaaatgaagaggtccagggagtcggtagtaagggatggcgggacgtca

SEQ ID NO: 293897 - DNA, 50 bp, Homo sapiens
tggaaattctgtttcagatgaacagggatttgtcttggctgttactatga

SEQ ID NO: 293898 - DNA, 100 bp, Homo sapiens
ggaattcagctgctcaaacaccagattttggaaattttagcattcaggtgccaggaatgcagatgggacagccagtgccagaaacaggcccagctatact

SEQ ID NO: 293899 - DNA, 90 bp, Homo sapiens
agaaaatgatcctactagcaagcacattcgtgtttggattatgggccttctccagaagcaaaaggagttggaaagtagtctcctgccttt

SEQ ID NO: 293900 - DNA, 50 bp, Homo sapiens
acatggagaacaagaccacgtggattatggattggatatgtctacttctg

SEQ ID NO: 293901 - DNA, 82 bp, Homo sapiens
gcgaagctggccaaagcctgcccagacggctcacctgtgcgggatggaacaaaaggtgctgtcccacaacctgtacacggtc

SEQ ID NO: 293902 - DNA, 50 bp, Homo sapiens
agtctgtgacctgccccttctctttacatgacttcaaacctgcttctatt

SEQ ID NO: 293903 - DNA, 82 bp, Homo sapiens
ataagaaaacacatctttacacactaaagagaagaagaaggaggttcctgctgtgccagaaacccttaagaaaaagcgaagg

SEQ ID NO: 293904 - DNA, 101 bp, Homo sapiens
gccaaggaccccttcgctcacctgcccaagaggccctcgattgattaaatggtgcccagccacgctggatgaggcctgatcttccttactcaacctacgga

SEQ ID NO: 293905 - DNA, 101 bp, Homo sapiens
gatgaggagttgctttttagggatgagcaaagaaagtggtttctcgagatggaatctactggcagcctggcatcctcgctacaacctcattgttgtgggcc

SEQ ID NO: 293906 - DNA, 80 bp, Homo sapiens
gtctgactctgactctcggactgagaaacgcaagatgatatcatcaagttgaatcgaaaggaagggaagaagcagaattt

SEQ ID NO: 293907 - DNA, 90 bp, Homo sapiens
tgccccctcacatctatgccatcacagacaccgcctacaggagtatgatgcaaggtctgtcagtggcccagcggaagtttgctcattcac

SEQ ID NO: 293908 - DNA, 75 bp, Homo sapiens
agaggagctcttgaggaaagccattgctgaaagcctgaatgggcataaggaaatggtggcaggcacttcctccta

SEQ ID NO: 293909 - DNA, 99 bp, Homo sapiens
cagctgcagccctggccgcgcactcgcctcagctgagcctggccgagttcctgttctgggcttcgctgtgcatgacccatctcagcaggatggccgagg

SEQ ID NO: 293910 - DNA, 74 bp, Homo sapiens
cgattacccacttcgagtcctttattgtggaggcagctatttttgctatgataatcctgctgcccttcagactc

SEQ ID NO: 293911 - DNA, 75 bp, Homo sapiens
ctcttctccaccacaccgggagtcaggatggctaaaggtgaccccaagaaaccaaagggcaagatgtccgcttat

SEQ ID NO: 293912 - DNA, 82 bp, Homo sapiens
aatgttttggaaggtatcgggctaatcgagaaaaagtccaagaacagcatccagtggaagatacatcattcactctttgggg

SEQ ID NO: 293913 - DNA, 100 bp, Homo sapiens
ttcaaagccaagtcaaaatattctccagaattactcaaataccggccgactgcagcagtggcccagggcaaagagtgtgcgtcatcgatgagattgggaa

SEQ ID NO: 293914 - DNA, 101 bp, Homo sapiens
agtgatgcttgatgctgcaacgcttaaaacgatgaagatttctcgtttcgaaagggagccagatgaccaagatgctccagatgaacatgagtcgcctccac

SEQ ID NO: 293915 - DNA, 82 bp, Homo sapiens
ccgcaagtcccccccggagaaaaagttgaagcgttatgtcatcatcagatttgaaatatttaaagtggatacaaaactattt

SEQ ID NO: 293916 - DNA, 75 bp, Homo sapiens
atgggccctggcggtggacgagcaggaagctgcggctgagtcggtattgggagagttgctgctacatctttagga

SEQ ID NO: 293917 - DNA, 100 bp, Homo sapiens
gttgacgtcaactggcaggacagcgaggggaacacagccctaatcacagctgcacaggcagatatctgtgtgaggctggattttctttgcctactccaac

SEQ ID NO: 293918 - DNA, 82 bp, Homo sapiens
tgaggtccgcggcagggtcccgcatggcggcgcacaggaagcacggttctaaatggcttctaagaagttgggtgcagatttt

SEQ ID NO: 293919 - DNA, 83 bp, Homo sapiens
ccaattcatatacacaggaagtctccacttccaagatctaggaagacggctacaaatgataataactgaagtgaagtgatgga

SEQ ID NO: 293920 - DNA, 75 bp, Homo sapiens
ctctatttagatgctaatcagattgaagagcttccaaaggcatgtaatgaatttactacacatgtgatgaacctt

SEQ ID NO: 293921 - DNA, 143 bp, Homo sapiens
gaaaaacttccgtaacatccaggttgatgaagctaatttattgacttggcaagggcttattgttcctgcaggaaactgcatatcttctggtttacatgaagatggagtgctaatggaaatgcccaaaaccttcagagattgac

SEQ ID NO: 293922 - DNA, 75 bp, Homo sapiens
atcgacatcaagtcggccggggatttaggtgaccatggaggaagaagatgagtctcgagggaagacagaggagtc

SEQ ID NO: 293923 - DNA, 90 bp, Homo sapiens
gaatccagtagaaaactggtcaaggaagctctgctgcacaggttctggaacctctggcggtctcagattgagcagaaaaaggaaagagag

SEQ ID NO: 293924 - DNA, 101 bp, Homo sapiens
gcgagccgtgaagatggcggcagtggtggaggtggaggttggaggtggtgctgctggggaacgggagctggatgagcctgcccactaaggaggaggagtca

SEQ ID NO: 293925 - DNA, 100 bp, Homo sapiens
ggaatctccttagtgaggctcagagatgcctgtaccgtgatgtgacgctggagaacctggcacttatatcctccctggaccctcaaactgacacaagacc

SEQ ID NO: 293926 - DNA, 75 bp, Homo sapiens
gtcgtgtcgtcgctgctggcacttcaggctctgcttggacagcttttagcagctacatgcaaagaacttccaggc

SEQ ID NO: 293927 - DNA, 75 bp, Homo sapiens
ggcgcggattcgccgaggcaccgaggcactcagaggagaacccttaggagaaatcttgagagtggacagcaattg

SEQ ID NO: 293928 - DNA, 83 bp, Homo sapiens
cctatcgcctggagctggaccaaaagggatagtatccaaagccaccaagaaagcctttctgttctcaggtccagcaatgagtt

SEQ ID NO: 293929 - DNA, 100 bp, Homo sapiens
tctggaaatgagtcttcaagctctgtaagacatgctttccttaaagtttcccatgtctcaatggactcctgaatataacgagctctacaccttaaaagtg

SEQ ID NO: 293930 - DNA, 50 bp, Homo sapiens
ctttgccgccaccatgcccaaaacggcagtcttgattgatatggaagaag

SEQ ID NO: 293931 - DNA, 100 bp, Homo sapiens
ggctcgagtctacctggatgaaaactacaaatcccaggagcacttcacggtagtgaagcgcgcagtggcgagccagccagactctgtggatgcagccgag

SEQ ID NO: 293932 - DNA, 95 bp, Homo sapiens
aactcttcgactacttcaaccaggaggttttccgagacaacaacggcaccgcggtggaccaggtgctctgaggctggcgtacagacacagcacgt

SEQ ID NO: 293933 - DNA, 76 bp, Homo sapiens
gccgacaacagcctggcgtccgccacggccggtctaattgaagccaacggagaactcaaggtcttcatagaccaga

SEQ ID NO: 293934 - DNA, 100 bp, Homo sapiens
gtagaaatgagaatgacagctgtgataaaaaaaaaattcatctgggcggtatctggaacttgtaccgacaccggagcctcttgcagccaaacaagtttgg

SEQ ID NO: 293935 - DNA, 75 bp, Homo sapiens
ctcctcaacatgagcagattggtaagtttcggagcaacatcccctgtcacctggttgatatctcttgcggattac

SEQ ID NO: 293936 - DNA, 88 bp, Homo sapiens
cagaagcctgcatttctgcattctgcttaattccctttccttaggacactgcccatctctaagataagaacctggaaaggggactctg

SEQ ID NO: 293937 - DNA, 95 bp, Homo sapiens
ggcgcagcgcttccagtggtagcagcagtaccaggtctcggaggaccccatcctagccctacctgtctcggcccgcaacctccccgaagccgtcg

SEQ ID NO: 293938 - DNA, 75 bp, Homo sapiens
gtccggggccgggctcaggagcagagatgagattgtggggaacctgggtgaaggcacctttggcaaggtggtgga

SEQ ID NO: 293939 - DNA, 95 bp, Homo sapiens
cttcctctacgtgtgggggggctacgtgttttaccaacagactgcagtttcttcactaccaaaatgacatcattttccacctctgctcagtgttc

SEQ ID NO: 293940 - DNA, 74 bp, Homo sapiens
cctggctgactgtcttcggagtcggatgtgtcttgctgaatcagggctctcttatccctgccatcgacttacag

SEQ ID NO: 293941 - DNA, 96 bp, Homo sapiens
cctggatctcgcgccacaaggagatggacctgaaggagaagaaggagaaggtggaggagaaggcaagccggaaagagcgaaagaaagaagtggtgg

SEQ ID NO: 293942 - DNA, 75 bp, Homo sapiens
cttccacctctccaccaccgaccgcgtcatcaaaggtatttcagtgtctgtagacaagatggaatcatctccatt

SEQ ID NO: 293943 - DNA, 100 bp, Homo sapiens
gtgttgagctcatccccgggcgattcctgtctaagaaaaggaggatttttccctgtattgaacactgatatacaaggaatgaatagaagtcaagaaaaac

SEQ ID NO: 293944 - DNA, 96 bp, Homo sapiens
cagccacctgagcctggagaggggacccccgacccccaggaccacccctaccatgagatggtggatgcttccaaaagcatcgaagctgtccatgag

SEQ ID NO: 293945 - DNA, 80 bp, Homo sapiens
atttgcacctgtggcttatctacgctttttagaattgcacttggaggacaagcttgcattcacaagagatgggctctgtg

SEQ ID NO: 293946 - DNA, 100 bp, Homo sapiens
agaactcgcaaaagctcagaggatgtgtatatctcatgattgatatggagaaactagtcatgggccaaaggtcaagatacttctctgggaaatgttgctg

SEQ ID NO: 293947 - DNA, 100 bp, Homo sapiens
gtgcggcagtaccgcctccttcccagccgcgcggcttcctccagacctctcggcgcggcgggctgacgcacgaggcacacaggaaggaggtggagcaggt

SEQ ID NO: 293948 - DNA, 71 bp, Homo sapiens
aattttgccaaggtgaagttggcccgacacatcctgactgggaaagaggtctgcttcgcctgtgtagatgg

SEQ ID NO: 293949 - DNA, 83 bp, Homo sapiens
cgcggatacacattctagatataacccagtgacttgattgtaaaaatttacagagcggaatcatatgctggtctccaagagtt

SEQ ID NO: 293950 - DNA, 82 bp, Homo sapiens
agagagggaagagattcagccagcacactcctcgcgagcaagaattaaacaaccaccatgtcgagcaaaaaggcaaagacca

SEQ ID NO: 293951 - DNA, 74 bp, Homo sapiens
aagatctaggaagacggctacaaatgatgtctgggctcttcagctgagcacttagtgtttgtacaggatgaggc

SEQ ID NO: 293952 - DNA, 100 bp, Homo sapiens
tcacggccggcgcttacctctgctacagggtgctggagaatctggtaaaagcaccattgtgaagcagatgaggatcctgcatgttaatgggtttaatgga

SEQ ID NO: 293953 - DNA, 46 bp, Homo sapiens
cgcctcctaatccctagccactatgatgtgtatatctcatgattga

SEQ ID NO: 293954 - DNA, 83 bp, Homo sapiens
gggaaccttctgcacccttctgtacccatcagtaacgatgagattgagaggatccagaatccagatctctggaatagctacca

SEQ ID NO: 293955 - DNA, 90 bp, Homo sapiens
gagacttcttgccatggctgccgtaagaatgtgcttttgaagatgatgatatcacgcacgttgaaggaagtgtagatcctattcgagata

SEQ ID NO: 293956 - DNA, 75 bp, Homo sapiens
atgcattggaccagggcgtgaacgtcacccagccccgggaaatggatacaagtagaagaaaattccatttataaa

SEQ ID NO: 293957 - DNA, 100 bp, Homo sapiens
cacatccagcagaggaggcgggggcagccgctgagacggtttttcacaagagttatgcccagccaagtcttcagtatatccaggggcaacagattttcac

SEQ ID NO: 293958 - DNA, 100 bp, Homo sapiens
gcagaaacaaaaagaggagcagaagaaactcgaggagctaaaagcgaaggccgcggggaaggggcccttggcccgtggaacacagagcattcctaatgac

SEQ ID NO: 293959 - DNA, 50 bp, Homo sapiens
gccacccggctgctctgggacgaatctcatcctggccttgggtgtcctgg

SEQ ID NO: 293960 - DNA, 83 bp, Homo sapiens
aaagccacttttgaaagtcagatgtctgtgatgaggggtcagtctcatctgtcaaccaggctagagtacagtggcacaatcac

SEQ ID NO: 293961 - DNA, 75 bp, Homo sapiens
gcgcagccaccccgcgggatacgcctcagcgcggaccaagaatcgccttcagccctgtctggtgcatccttggca

SEQ ID NO: 293962 - DNA, 74 bp, Homo sapiens
gaacgatgtgaacatcgaatcatggaatcccttgcatggctctcaacattgctacaagtggttggtgtggtctc

SEQ ID NO: 293963 - DNA, 100 bp, Homo sapiens
tgcgttcaacaagctagtgagcacaatgaaggcaagtgggactttgccttctcagcccaaagtcagcgatggagtgcaatggtgcgatctcggctcacca

SEQ ID NO: 293964 - DNA, 89 bp, Homo sapiens
cgtaccagaggtggaagtccaagtcaaacgcagaaggactgcctcactgagcaaccaagaacacgttggtcgtcattgcctccgagccc

SEQ ID NO: 293965 - DNA, 99 bp, Homo sapiens
gtttttgacagtactaaggatgactctaaaatagagctcaagcttgagaagagagaaccactaaagggcagagcaaagactccagtaacactcaagcaa

SEQ ID NO: 293966 - DNA, 75 bp, Homo sapiens
gagcaacatctttcctcaccccaaggcagaagaagagttcaacatagagaaaggtcggcttgtgcaaacccaaag

SEQ ID NO: 293967 - DNA, 100 bp, Homo sapiens
cttgattggacgtcaggatctttccaagcaggcctgcgaaggaaacttacccaaagggaagtctgataagcacattgaagaagtgcggaagaacaaagaa

SEQ ID NO: 293968 - DNA, 100 bp, Homo sapiens
agacaattgttcagttgcaaaaagaaactggagccaccatcaagctgtctaagtccaaagatttttacccaggctctcaaaattagagagatgtgtaatt

SEQ ID NO: 293969 - DNA, 76 bp, Homo sapiens
cagtgagctggtaaagaagatgcctggagcaggcagcatcctcaaatggaagcgggtccatatggaatatttgctg

SEQ ID NO: 293970 - DNA, 90 bp, Homo sapiens
tgggccccgggcggcggtcgccaggtctcagggccgggggtacccgagtgaaggcattggagtctttcagcaatcttctaaacaaagtct

SEQ ID NO: 293971 - DNA, 82 bp, Homo sapiens
ctccttcggcagtccacccaccgccgccgcctcccaggtaaccaaggagcagtgaacagcagctactacagtagtggaagcc

SEQ ID NO: 293972 - DNA, 100 bp, Homo sapiens
atcaagttaatggagtcaacccagcctatccagaatcccgctatacctcggattacttcattatgggtaattccagaattgattggccataccattgtca

SEQ ID NO: 293973 - DNA, 101 bp, Homo sapiens
gcgccgctcatccccctctcccagcagttccagggtctccctccactgctgtagtaacccgggtccggggcctcggtggtgctcctgatgcccctcaccca

SEQ ID NO: 293974 - DNA, 98 bp, Homo sapiens
gagaaactgagagttctactgctggattgaaagtcaaaaccgaagaaatgcagtgccagacctgaagattatcggctataagagaataagaattgcag

SEQ ID NO: 293975 - DNA, 90 bp, Homo sapiens
cgcccacccgctccgcgccgagggctggaggatgcgttccctggggtccgggaattgaatgatctggcacgggaccctccagcacagtgt

SEQ ID NO: 293976 - DNA, 74 bp, Homo sapiens
cgaggaggcagcgcgacctccgcacgggtggcccagttgaaatccttcccttcctctaccttggaagtgcctac

SEQ ID NO: 293977 - DNA, 101 bp, Homo sapiens
gccgctgtgtggttgcaacggagataaattcccggaaccgcgattcggcgtgtcaggattttttatcaagcagaaatgcatcgaacaacgagaatcaagat

SEQ ID NO: 293978 - DNA, 114 bp, Homo sapiens
ggacctcaagctctgggggatcgaccgggacagctaccggcgcatccttatgggcgaagctgtgctcaggcccgggctggacgcagagccagagctgtccccagaggagcagag

SEQ ID NO: 293979 - DNA, 100 bp, Homo sapiens
ctactgcacacttgagtccatgagattttagagtgatcagaaactgtttgccagcctcctcatcaagtgtgtggtccagttggaattgatacagaccatt

SEQ ID NO: 293980 - DNA, 83 bp, Homo sapiens
ccagcgggatgtgaaggactccgggtgaggccggccacgccccgcacggtaactaggatttctacctcaaccgcgagacctat

SEQ ID NO: 293981 - DNA, 80 bp, Homo sapiens
tggtgctgtaaccacctcacagattccagcttcggaacaagagaccctgggttacacatcattttggaatgactgtatat

SEQ ID NO: 293982 - DNA, 50 bp, Homo sapiens
cagaatacagagatatggaatcaggtggcttctggcacagcagcttaatt

SEQ ID NO: 293983 - DNA, 98 bp, Homo sapiens
acgtcacatgtcattataccttcacccagcatttcatccctcgtcgaaaggattggattggcatctttagagttaccagatgtggtggtttacccaac

SEQ ID NO: 293984 - DNA, 100 bp, Homo sapiens
aaagactgtttgttcaacatatctacaatctcggtactacagatatgttgatgatgtgatcagccgcattgacaggatgtttcctgaaatgtccatccac

SEQ ID NO: 293985 - DNA, 75 bp, Homo sapiens
caggcgctcaccatgttccctggagactgtcactgcgacacccaggctggagtgcaatggcgtgatctcggctca

SEQ ID NO: 293986 - DNA, 100 bp, Homo sapiens
ggcagatgagtctggggaccagcgaagaccaccagcacttcacctgcaccatctggaggtgcggtgcccatcctgctgcggagccaagcgcaaagccaag

SEQ ID NO: 293987 - DNA, 100 bp, Homo sapiens
ccattctatgctgtggaaaagaaagcatactgcgagccctgctacattcgtgttgctttgtcgcccacgctggttgcagtggtgcgatctcagttcactg

SEQ ID NO: 293988 - DNA, 114 bp, Homo sapiens
ttggaccccgcggcgcccctcggcctcggagcaacgagcgcagcgccggttcgatacaagaggctgttttcctagcgtggcttgctgcctttggtaagaacatgtcgtccatct

SEQ ID NO: 293989 - DNA, 75 bp, Homo sapiens
ttcctcctgtcccaaaagaccatcctgctctcaactacaacatcgtttcagggggtattcgagatgacattgaag

SEQ ID NO: 293990 - DNA, 74 bp, Homo sapiens
ggcagcgggagggcgcgcggccgagcggaggcggagtcggcgccgagaacatgatgcagattgagttcataaaa

SEQ ID NO: 293991 - DNA, 96 bp, Homo sapiens
ctgggaccagcaagcctcggtcactgcagccaccacactacgtggctgtgttggggtggaagaggaggaggcgcccgacatcgacatataccactg

SEQ ID NO: 293992 - DNA, 82 bp, Homo sapiens
gttgctggatcagtgcgagaaccaggagctcgaggtcatcatcagatttgaaatatttaaagtggatacaaaactatttcag

SEQ ID NO: 293993 - DNA, 80 bp, Homo sapiens
gaagctcaagtatatcaagcattcaaattgctcacagctgatcctaagcatgcagcagaactgattaaaacagtggcatc

SEQ ID NO: 293994 - DNA, 100 bp, Homo sapiens
atgaatgtcattctctggccaattcagacagcagtctgcagcctggaagaggaccctcaccagaacctgaccatcttagcactgtgttttggacttccag

SEQ ID NO: 293995 - DNA, 75 bp, Homo sapiens
aagctgtgcgacgtgaccctcaagggtgtgggccgaagatatgctcatgtggtgttgaggaaagcagacattgac

SEQ ID NO: 293996 - DNA, 97 bp, Homo sapiens
ctggacctcgttcagcagtcatgtaactataagcagcttcggaaaggagccaatgaggccaccaaagtccttggcactgtcaaatggttcaacgtca

SEQ ID NO: 293997 - DNA, 75 bp, Homo sapiens
cccgaagtcatcctgggtatgggctacaaagagaacggtacactgaggaggggacggctccgtcttcacattgtg

SEQ ID NO: 293998 - DNA, 75 bp, Homo sapiens
ctcccgggaccgaggccaacttctctgagcagtctgaatgccagaatggataaccgttttgctacagcatttgta

SEQ ID NO: 293999 - DNA, 87 bp, Homo sapiens
ctggttctacttcacactgcagaactgggttctggactttgggcgtcccattgccatgccaagtagcttccagcttacagcagccct

SEQ ID NO: 294000 - DNA, 90 bp, Homo sapiens
aggataaagggaaggacaaggaattacataacatcaaacgtgggtataagcagtttagccaaattttgaagaacattggagaaaatgaag

SEQ ID NO: 294001 - DNA, 140 bp, Homo sapiens
tcgtctcgttcctgatcgaacgcggtggtgagagcacacgtcctcgtctcgttcctgatcgaacgtggtgaaaatgacgacttatttatgatgccacgaattgttaatgtgacatcattggccacagagggaggtttggt

SEQ ID NO: 294002 - DNA, 113 bp, Homo sapiens
catcggcctttgcagatagtctctgcccatcaacctctcttctgtatcttgggcgaacagatatagccagtaccaacgtatgctgagcacgctgtctcaatgtgaattttcaa

SEQ ID NO: 294003 - DNA, 101 bp, Homo sapiens
ggaatatcagagagtgagggagagaatatttgcacacgatgtgacagatcagtcagtgaaagcatttgctgaacactgtcctgagcttcaatatgtaggct

SEQ ID NO: 294004 - DNA, 50 bp, Homo sapiens
ggccaaactacaattcccgagagatgcagacagacatgctgaactatctg

SEQ ID NO: 294005 - DNA, 83 bp, Homo sapiens
ctgaaggcaaagtactatcgggagcctcggaaaggaatacaggtgatggtacacgaggtcccagggcaggagattgaagtgga

SEQ ID NO: 294006 - DNA, 100 bp, Homo sapiens
tgaggtgcaccggaggtgaagtcggtgccacttctgccctggcccccaagatcggccccctgggtctggctgcggagcttgcagaatacactgccaagat

SEQ ID NO: 294007 - DNA, 100 bp, Homo sapiens
tcagaccttaccaagaacgttaaaggaaacaagtagaaatcagcagtggagtgtctgtgagacattttaaatccaaaggatgtgattagtgtccagctgg

SEQ ID NO: 294008 - DNA, 100 bp, Homo sapiens
gcagccaccatgaagacattctgtggcactccagaatatctggcaccagaggaaaattgccaaggatgcagaaggaaatgaagatgatcaaagacgagga

SEQ ID NO: 294009 - DNA, 74 bp, Homo sapiens
ctctgatcagccatggtatcggcaaggatgtggagtcctgccatgatatgatttcaggtatgctgctgaaagtg

SEQ ID NO: 294010 - DNA, 125 bp, Homo sapiens
tccagtgaagattgacaaagtgcgcattttcttattaggactggctgataacgaagcagctattgtccaggtgacaagtcagcagcaggagatggctgtcttggacaggcagttagggcataaaa

SEQ ID NO: 294011 - DNA, 75 bp, Homo sapiens
gtgcaaagcaagtggttcacgagacatgcaagaaagcacttcagccaagcagaagggagccagctggacgaggtg

SEQ ID NO: 294012 - DNA, 100 bp, Homo sapiens
atgtttccttaaagtgcctcgatctaaggatgaccctggaaagtctgttcggcacttgaagtactccttgtttaagaaatcactactgggcagtgtttcg

SEQ ID NO: 294013 - DNA, 75 bp, Homo sapiens
aagcctcctgcgccggccttgcctcggagaagatggcgaattagaagatggtgaaatagacgatgcaggatttga

SEQ ID NO: 294014 - DNA, 75 bp, Homo sapiens
ggagaaacttactaccgatcatgagaaagggaaccagcggggaaactgaggctcggggtggagcgcaggattgtg

SEQ ID NO: 294015 - DNA, 83 bp, Homo sapiens
acttcctgcagtgggcattagccacgtccagacctgcctagagctggaacgttacctccagagcgagccctgctatgtttcag

SEQ ID NO: 294016 - DNA, 87 bp, Homo sapiens
acctgcgcgccgcgtggcctccgccggcgcctgcccgccccgcgcctccgtctcccacgctacgagttccagggagctctgtcctgg

SEQ ID NO: 294017 - DNA, 75 bp, Homo sapiens
gctgaaggaggaggacaaagagcccctcatcgagctcttcgtcaagatctgactgcagccatgagcagcaatgag

SEQ ID NO: 294018 - DNA, 71 bp, Homo sapiens
agatgcagtctgtgtgctctgattgtaatggagaagggtgaccatgaagagtttaaccagtgccagacgca

SEQ ID NO: 294019 - DNA, 83 bp, Homo sapiens
caccactgaggaggaattcaccctgttcgtctatgatgagtataggatcaaaccagtggaagaggtcaaatacatgaaaaatg

SEQ ID NO: 294020 - DNA, 82 bp, Homo sapiens
ttcagaggccggaaaatgccctcaaacgcgccaacgaactgccattggatgtccagaatcccctgtagttgataatgttggg

SEQ ID NO: 294021 - DNA, 100 bp, Homo sapiens
aagacacaaattcctgagaattgggaacatgctaaatacaaatggtatcttaagggtatttgaagtataccatacaactgttttgaaaatccagcgtgga

SEQ ID NO: 294022 - DNA, 100 bp, Homo sapiens
ggccagcatcgtcatcgggccctacagcggaaagaagaaagccacagtcaagtatctgtctgagaaatgggtcttagatttgtccagtcattgtgccaca

SEQ ID NO: 294023 - DNA, 89 bp, Homo sapiens
gaactccaagctcttcctgaacgaagtggccaagaaggagaagcagctgcggaaaatgctagaaggtggttatcactaggctaaaactg

SEQ ID NO: 294024 - DNA, 82 bp, Homo sapiens
tcttcctctggcccgaagccttcctttatcgctttcagaacatccagtcatggataaaaatgagctggttcagaaggccaaa

SEQ ID NO: 294025 - DNA, 142 bp, Homo sapiens
tctgtgcagtggcacctgcgcgaagctggccaaagcctgcccagacggctcacctgtgcgggatggaacaaaagagtgcttgtgatttcacgtatttttgctgaactcgtaaaagagacacttggatggtggattaaccaga

SEQ ID NO: 294026 - DNA, 100 bp, Homo sapiens
attacgggtgttgtggaaactgccaaagtttaccaactaggtggcaccagaacaaacaaagggctgcaactacggatgaagcctgctgggagcgtgaatg

SEQ ID NO: 294027 - DNA, 74 bp, Homo sapiens
ctgcagcgccgatggctccgacccgctctgggtgaaaggtgtagcagtcactcggcctacacccacagcatcga

SEQ ID NO: 294028 - DNA, 75 bp, Homo sapiens
tccaccagagcacagaccggctgacggcagagatctggaaagacggagaagctgtccacctagccagggactttg

SEQ ID NO: 294029 - DNA, 75 bp, Homo sapiens
ctggattactggtcaaaaggtcaactaaaagcattgtttctagaacatgaggtctctaattaacagaagatggca

SEQ ID NO: 294030 - DNA, 75 bp, Homo sapiens
atttgctgcagaagcgtagtcggccagagcggaagatccatccaaaagctatgtgaaattacgagactttgtgct

SEQ ID NO: 294031 - DNA, 90 bp, Homo sapiens
ccggagcggaaaaccttctgaaaagcaaaacggacaagtcggtttttaagtggcattatcaactttattcacttcagagaagcatgccgt

SEQ ID NO: 294032 - DNA, 90 bp, Homo sapiens
ctgcgtgagtggagatgctttcagtggtggagaatggactggacccccaggctgccatcccgggatcttgcctcggagctggtcccacta

SEQ ID NO: 294033 - DNA, 75 bp, Homo sapiens
cctacctctacaaacagggctttgccatccccggctccagcttcctggtgaagaacgaggtggagaagctccccc

SEQ ID NO: 294034 - DNA, 100 bp, Homo sapiens
tgggagtctccgcgtcccgctcgctgggagagagtttaaggaagaaatctctaaacgttttaaatcacatactgaccaacttgtgttgatatttgctgga

SEQ ID NO: 294035 - DNA, 86 bp, Homo sapiens
ctctgtcagctctttccccgtcagcatcccagccgtgctcacgggcgccatgttttggaagtttgacctgcacacaagctcgcacc

SEQ ID NO: 294036 - DNA, 100 bp, Homo sapiens
ctgaagatagtgcctttcagccctaccaggaaggatatggagtaatagtactaaatcccaatgaaaactatattgaagtagaaaagccgaagatacacgt

SEQ ID NO: 294037 - DNA, 100 bp, Homo sapiens
ccggcagccgacggcaaaggtgtcgtggtggtcattaagcggagatccgaataactgaagtgaagtgatggactccgatttggagagtagtaagacgtga

SEQ ID NO: 294038 - DNA, 78 bp, Homo sapiens
ggcatataatcgaatagttgatgccctaaatgaattcagaaccttctgataacttaagagagattctccaaaatgtgg

SEQ ID NO: 294039 - DNA, 75 bp, Homo sapiens
aggagatcactgccctggcacccagcacaatgaagatcaagctcctgcccctcctaaagctgaagccaaagcgaa

SEQ ID NO: 294040 - DNA, 88 bp, Homo sapiens
aacgtgttggaccttccggagcttctcagaagacagagggttttcttttgagaaagttcaggagccctggaaaggagaaggaataaga

SEQ ID NO: 294041 - DNA, 82 bp, Homo sapiens
cagagctttcacgaaggcaccgacgtcatcatgctgaccaccaatcagatccgtaagacggattctcgctctgtcgcccagg

SEQ ID NO: 294042 - DNA, 100 bp, Homo sapiens
gggacagcaggagcagtggtgctgtcagcgcggccgtcggagacatgggagacccggggtcggaggttcttctgctggtgatgcagtgtggtcagggcat

SEQ ID NO: 294043 - DNA, 88 bp, Homo sapiens
ctgctcttcctcccttcgctcgcaccatgcaaccactggtgcaggtggcagcctggtgcattggggagtatggggacctcctgctggc

SEQ ID NO: 294044 - DNA, 98 bp, Homo sapiens
ctgaggaatctgtgctttctgtcccagaactccaggaagaggatcacctagcccgggtagaagaggcaatcacccgtatgcttgtgtgtgccctgaaa

SEQ ID NO: 294045 - DNA, 100 bp, Homo sapiens
gaagctggaagattctggtgtccacgtgatcattggggggcacgattctccctctcctagaggcgcgccgtgccgtccctgcagtgacaccgaggtgctc

SEQ ID NO: 294046 - DNA, 51 bp, Homo sapiens
ctggaaactgtacattgaagcagagggactaaataggaatagtttgccaac

SEQ ID NO: 294047 - DNA, 48 bp, Homo sapiens
gccagtaagaacgaggaggatgaaggagagataggtgagctctacctg

SEQ ID NO: 294048 - DNA, 75 bp, Homo sapiens
ccagctactttggacacagctcacccccgacagggggccgtcctgatgaggaaactgagacccagaaaggtggaa

SEQ ID NO: 294049 - DNA, 83 bp, Homo sapiens
ggcgcgggaggtgttcgagaacgaccccgagacgcttgttctaaagacgaaggggaactccctagtgctacaggctgtttcag

SEQ ID NO: 294050 - DNA, 89 bp, Homo sapiens
aaggaaacaaaattcgatttgcaaatcattcagtgaatcccaactgttatgccaaaggaaaaccgtcttcagatacagtccctaagccc

SEQ ID NO: 294051 - DNA, 75 bp, Homo sapiens
gagctcatcagactgaccgtgtcttacatcagttcagagaggtgcacaggtttcatattccagaaggttggaaag

SEQ ID NO: 294052 - DNA, 147 bp, Homo sapiens
acaatgataaagggctctgaaagctagaagaaaaggtgtacttgcaagaaacctcaggacttgagtaacagcaacatgagatgcccgagtggtaaaagacatggcaacaggaaagtctaagggatatggctttgtctcctttttcaa

SEQ ID NO: 294053 - DNA, 51 bp, Homo sapiens
tttccacgactttctgggagactcgtcagaaagcaacattgaatgcagaag

SEQ ID NO: 294054 - DNA, 100 bp, Homo sapiens
ctatcagcaggctccgggctgaagattgcttctcttctctcctccaaggatgtagtaactggagttagtcccctgctcttcaggaaactcagtaatcctg

SEQ ID NO: 294055 - DNA, 100 bp, Homo sapiens
ggaggctccaagacctcatcaacaattaaggtgatcacaggtgctttacagtgcctcatctgggtcttgaggttcccgctaccttccatagaaacaaaag

SEQ ID NO: 294056 - DNA, 100 bp, Homo sapiens
ctatttaacgaataccagttcagcgtggaccaacttatggaactggccgggctgagctgtgctacagccatcgccaaggagtacctggaggtgcagaggc

SEQ ID NO: 294057 - DNA, 76 bp, Homo sapiens
ccacaggctcctgccctggactaccgaggggatatcattttcaatgcccaatacccagaactgcctcccgatttta

SEQ ID NO: 294058 - DNA, 88 bp, Homo sapiens
gaagaagaaaggattcgttacagccagagattggtcacaaacatgtcagacaaaagtgaattaaaggctgagttggaacgtaagaagc

SEQ ID NO: 294059 - DNA, 96 bp, Homo sapiens
ctgtgactatgctggaggagctggaaaaagaactggaggagccaaggcaacagggacaatgactcattcttcccaggacactggttcttgtggcat

SEQ ID NO: 294060 - DNA, 74 bp, Homo sapiens
ggggacctgccctcctggacgcggagcctggtatttgaagtataccatacaactgttttgaaaatccagcgtgg

SEQ ID NO: 294061 - DNA, 99 bp, Homo sapiens
agtcgtgttctgatcactactgacttgttgatgtcagtattgaatatggtggtgaggcgtgaccctggcaacactgaacctgtgaaagccaaggaagag

SEQ ID NO: 294062 - DNA, 80 bp, Homo sapiens
tctgcaaagaaggttaaatcaggatggctggataaactctctcctcaaggggcttccgttacaagatgaggtctgtgtat

SEQ ID NO: 294063 - DNA, 82 bp, Homo sapiens
cgctacgggaccgcctgagctttctacaccgggttcgtgctggccgtgggcagcgccgtctttgatgccatgttcaacgggg

SEQ ID NO: 294064 - DNA, 101 bp, Homo sapiens
acgggctgtgggagctgccggtggagccggccgagcggaggcctgagtgcacccgctgcaggtatcttcaaagaacagtaaaacatccaactttactacag

SEQ ID NO: 294065 - DNA, 75 bp, Homo sapiens
caccttcccctgccttggaaaggggatcattccagaataacagtaaatactagaaatatttttattgaatgcacg

SEQ ID NO: 294066 - DNA, 98 bp, Homo sapiens
aataaccgtccccgccagtcagaagttgagcccaagatttctctacatttggccaaatgctcgtatctcagtgatgggaggagagcaggcagccaatg

SEQ ID NO: 294067 - DNA, 95 bp, Homo sapiens
gtgcatgttagtgctcaagagcctcattatctaccacccgagatgccccaagttctgggaggtgatcagtgatgaacatggcatcgaccccaccg

SEQ ID NO: 294068 - DNA, 83 bp, Homo sapiens
aagactcctggcccgggattatgccaagaaaccagccacctcctaagctgcccaacggtgtgttcacccccgacttccaggag

SEQ ID NO: 294069 - DNA, 75 bp, Homo sapiens
ctactctgaggggcttagaaattaacaggatatttgatcctgatgacctttattcaggggtcaatttctccaagg

SEQ ID NO: 294070 - DNA, 82 bp, Homo sapiens
cctgccgtccttctccactttcgccagcccgtgccgcgagcgcggcctgcaggaggctaccggctctctgaccagttccacg

SEQ ID NO: 294071 - DNA, 101 bp, Homo sapiens
tcatcattgtccaggcctgcagaggtgatttagcatgtagactgctggggcaatcaatggatgaaagtggattaccacagctgaccagttatgattgtgaa

SEQ ID NO: 294072 - DNA, 90 bp, Homo sapiens
ggggggaagtgactgggcggtgccggcgccggagacgatgccgttgttttataggatcacattgacaaaagtaccatggagttttatgag

SEQ ID NO: 294073 - DNA, 98 bp, Homo sapiens
cgaatttttggagcatctccacccaggaacctcgccatccagaaaaatcttcccaaggctgcagacaccgacggatttgctttgggagccagagtagc

SEQ ID NO: 294074 - DNA, 75 bp, Homo sapiens
acggctgaaggccctacgggagaaaaccgggcgcaagttggaatcgaagcctcttaaaatggcagatgacttgga

SEQ ID NO: 294075 - DNA, 74 bp, Homo sapiens
gccgtttgtcattcccttcctgaagaggagaggagacgccgtgagcgggacgaccagatgtaccgagagcggct

SEQ ID NO: 294076 - DNA, 75 bp, Homo sapiens
cgggtttggggcgccgcagtcccgggaacggaggatgagctttctgatgttagccaaggcggatctaaagctacc

SEQ ID NO: 294077 - DNA, 51 bp, Homo sapiens
gccttactccttcacagatcgcaaagccttctagacaagctcagtggaatc

SEQ ID NO: 294078 - DNA, 100 bp, Homo sapiens
agccctttgatggaattacaggtctttatttcttatctggagcagtacatgaccggttacttaatgtctggaaggaaaatcacctcggcagtgtttgaag

SEQ ID NO: 294079 - DNA, 96 bp, Homo sapiens
agcagagcttggaaggatgcttcagctcatcttaggctgtgctgtgaactgtgaacagaagcaagctgcaggtaccggtgctgcagcagatcaaag

SEQ ID NO: 294080 - DNA, 99 bp, Homo sapiens
cggagaccgtctggagcactgacaccggggaggcagtgtatcgctcccgggaccccgtgcgcaacttgcgcctccggtctctgcatggattcccccagc

SEQ ID NO: 294081 - DNA, 100 bp, Homo sapiens
tgagcgccctctactcagcatggatatccaggtgctgagccaggagcagcagcctttctctgcaagctttcttcctggtggcagatgacatcatggattc

SEQ ID NO: 294082 - DNA, 98 bp, Homo sapiens
agctgagtattggagccaggagcctgccatgagacgatgttaatatttcaagttttcgaggccatattattgcggacagcaagtgatctttcacattt

SEQ ID NO: 294083 - DNA, 48 bp, Homo sapiens
cttggaacaggaggagtaagattgagcaggaagatgatttgaagtggg

SEQ ID NO: 294084 - DNA, 90 bp, Homo sapiens
cgaggtggacctgcgggatctgcaccgcgaccagggccgcaggaagacgcagacagcctcgggggtaacagcaagaccgccatggtggct

SEQ ID NO: 294085 - DNA, 75 bp, Homo sapiens
atgtcagacgcagccgtagacaccagctccgaaatcaccaccaaggactggcattgcggactgacctccagggag

SEQ ID NO: 294086 - DNA, 100 bp, Homo sapiens
gccgtggtggctgggagtcgagggtacttcttgaagtactaaggctcgtacgtctgcatcgattatcttacgtggggcaaatgatttcatgtgtgatgag

SEQ ID NO: 294087 - DNA, 74 bp, Homo sapiens
aattctgatggactcggaataaaattcatgcccgaaaccaaaatgaaataatttttgggctgaatgatggatac

SEQ ID NO: 294088 - DNA, 100 bp, Homo sapiens
gacttgggcggaggatccactcagatcgccttcctgccacgcgtggagagggcctgaaggtgcaggagaacgaggacaaccttgctctcatccacgccgc

SEQ ID NO: 294089 - DNA, 95 bp, Homo sapiens
ggccgggagcccttagggaggcaggtgatccgcaggggctggctgaccatcaacaacatcagcctgatgaaaggcggctccaaggagtactggtt

SEQ ID NO: 294090 - DNA, 126 bp, Homo sapiens
ccgaattcagaaggatatcgacgtcgtgatccagaagtccagagctgaggactgcctgtttgcagatggactagaggcttttaccagatttcttaaaactgaattcagtgaagaaaatattgaatt

SEQ ID NO: 294091 - DNA, 50 bp, Homo sapiens
gtgaattcggattgtttgctggttgtcctttgtggagggtcttctcgaat

SEQ ID NO: 294092 - DNA, 83 bp, Homo sapiens
tcaggtgaaaggagcagtagatgatgatgtagcagaagtagtattattgattccacagaatacagccaacctccaggtttcag

SEQ ID NO: 294093 - DNA, 80 bp, Homo sapiens
aacctgccgctcatcgtgtggctgctggtgaaaagcttctccgagaggaactgtggctgcaccatctgtcttcatcttcc

SEQ ID NO: 294094 - DNA, 74 bp, Homo sapiens
cccggcgcgaagaggctggactcggattcgttgcctgagctgtgcaaccatattgcttctgggaaaaaatgtca

SEQ ID NO: 294095 - DNA, 82 bp, Homo sapiens
ctggcggctctagggaccccccccgcgcctgcacttagccccgcgcccgagtttcgccgtgaggaagatgcggaaaaggctg

SEQ ID NO: 294096 - DNA, 131 bp, Homo sapiens
ctggccggatggaaatcctaatgacagtctccaaattcgcctccatctgtaccatggtggacactcactgacctgtcacaaggttgccccacaaaactttggggtccatgtctgaatggattgccagagcc

SEQ ID NO: 294097 - DNA, 83 bp, Homo sapiens
cacagcggcagctccagcccggcccggcagcgacatggaaggctgcccccaagtgtaactccagcactgtgaggtttcaggga

SEQ ID NO: 294098 - DNA, 90 bp, Homo sapiens
cagaaatgttgatgtggtacttgaagacacctgtactgttgagggtcattttcaacattgttaacttcagtaaaaccaagagtctctata

SEQ ID NO: 294099 - DNA, 98 bp, Homo sapiens
agaagattgtgcagaatgctatcatccaaacaataggcaggccagaaagcagacccagggaggatagcacatgtcttcggctacactggtgaaggcat

SEQ ID NO: 294100 - DNA, 100 bp, Homo sapiens
ccaccgctgtcccgcggcctggagtacaacgaggtcaacgtcaccctggacctgggccagactagacgcttgaagcaaagctgccatcccagaagacgac

SEQ ID NO: 294101 - DNA, 100 bp, Homo sapiens
tgtggagccaaaaaaaatcattgattcccttgaggttttggccaaattgggcgagggcacaaaataaccacttaccccttctcaccgaggaagagcggga

SEQ ID NO: 294102 - DNA, 75 bp, Homo sapiens
tgatttgttctgtatcagaagacaatatcatgcaagtgtggcaaatgtacctccctgcacttggctattcaaaac

SEQ ID NO: 294103 - DNA, 75 bp, Homo sapiens
tcctttggttgaatccccaggcccttgttggggcacaaggtggcaggatgaccagtgtcccagtgaaggaacgag

SEQ ID NO: 294104 - DNA, 75 bp, Homo sapiens
ctggcgaccactgcttctccgtgggcagcattggcgaccagcgcttcacggtgctgccagtgggtactgaacttc

SEQ ID NO: 294105 - DNA, 83 bp, Homo sapiens
caacagccaccaccaccaccagatgatttgaatataacctgccgctttgcaggtgtattccacgtggagaaaaatggtcgcta

SEQ ID NO: 294106 - DNA, 100 bp, Homo sapiens
cctggatcccagctttgtggctgccgtcatcaccatcaccttcaatccgctctactggaatgtgctgggagtgtccactcgccttccaccagcatggcaa

SEQ ID NO: 294107 - DNA, 75 bp, Homo sapiens
ggagatcttccagctcctgaggaacatgcaggcttctggctgtgatgggtcggagattcctgatgaagtgaagct

SEQ ID NO: 294108 - DNA, 83 bp, Homo sapiens
gttcttgtttgtggatcgctgtgatcgtcacttggttggtgttcgaggaagagacattgttgttcttggtgtggagaagaagt

SEQ ID NO: 294109 - DNA, 100 bp, Homo sapiens
atatccagcaaaaccgctgctaaattgtcaactagtgctaaaaggggactatccccaggccatgaagcattatacagaagccatcaaaaggaacccgaaa

SEQ ID NO: 294110 - DNA, 100 bp, Homo sapiens
tacaagcccgtgccaccatgcccagatctcagaaaactgatcttcacaatgaaggctacatcttggaattagattgctgttcctccttagaccacccgac

SEQ ID NO: 294111 - DNA, 83 bp, Homo sapiens
ccctggagcccccatgatccctaagaagacagcttgaacctagcagctaccaagggggtgccagctggaaacagtgacacaga

SEQ ID NO: 294112 - DNA, 83 bp, Homo sapiens
cccgggagtaggagactcagaatcgaatctcttctccctccccttcttgtggccacagatgtctttaattccaaaaacctggc

SEQ ID NO: 294113 - DNA, 100 bp, Homo sapiens
cctccttcgccacttacagtatgcaacacattttcctatacctctggatttttagactctgaggagcagttggagctaatccacattatggaaatggaaa

SEQ ID NO: 294114 - DNA, 73 bp, Homo sapiens
ggaagccgtgctgcagctcacgcccgaggtgcagctggccatcgagcaggatgcagcagtctcggccctggct

SEQ ID NO: 294115 - DNA, 90 bp, Homo sapiens
cttgagtgctttggacgatcttcagctggccaacagcaccatcattgcatttacctcggatcatgattccagtgtttcagcgaggtggaa

SEQ ID NO: 294116 - DNA, 103 bp, Homo sapiens
ctgaaaaactgaggaaggagaaggaagaatttgaaaaagccagtatggatgtgtccaaaagaaactcttccttcaaaacctgtgaagaaagagaaggaacaga

SEQ ID NO: 294117 - DNA, 98 bp, Homo sapiens
acaagaaagctcagctggtggtgattgcacacgacgtggatcccatcgaggagaggacatgatgtgcgcccatcctcccttgcttccagattgtttta

SEQ ID NO: 294118 - DNA, 89 bp, Homo sapiens
cgatgaccttggacacctccatgttatggacacggtctttcttattcaggttggatggcaagcatgtggtgtttggcaaagtgaaagaa

SEQ ID NO: 294119 - DNA, 75 bp, Homo sapiens
attttctgacccaacaccagatgacttaattcagtgcacaaatgagatgaatgtgaacatcccacagttggcaga

SEQ ID NO: 294120 - DNA, 83 bp, Homo sapiens
cagaacatgatcaagggtgttacactggtggtatcacggaaaacttgacagaacgatagcagaagaacgcctcaggcaggcag

SEQ ID NO: 294121 - DNA, 98 bp, Homo sapiens
cagaatggcatccagagagaggctctttgaactttggatgctttattgtacaaagagaaaatgctgctgtgaagacccaattaaagctttcacataaa

SEQ ID NO: 294122 - DNA, 74 bp, Homo sapiens
cgaactacgaacccctggacgggagagtctgccggcggagaatataagactgttggcaagagtagcaagatgct

SEQ ID NO: 294123 - DNA, 75 bp, Homo sapiens
gcagctgcagggtctcgctgggggccgctcgggaccaattttgaagagctgaacatccatgtgggaaacatttcc

SEQ ID NO: 294124 - DNA, 98 bp, Homo sapiens
tgcccatctatcagcaggctccgggctgaagattgcttctcttctctcctccaaggacgagattgaggagctgcgggccgagatgctggagatgcggg

SEQ ID NO: 294125 - DNA, 75 bp, Homo sapiens
gagtgcccaacagacattttgctgctgctacaaaatttagtttcctaagcaaacctgttgatgagaatcaccagc

SEQ ID NO: 294126 - DNA, 97 bp, Homo sapiens
agagtgtcttgggccctgtgaacctgggaccagtgtgaatttggaagggatcgtgtggcatgaaacagaagaagagatggggtctcaccgtgttgcc

SEQ ID NO: 294127 - DNA, 82 bp, Homo sapiens
cccggcaaactccccatccagctccaggactacaggaatatgtggaagctgtctcttttcaacacttcatcaaaacacgatc

SEQ ID NO: 294128 - DNA, 81 bp, Homo sapiens
tacaaatttttggatgatgatggatccatttctcctattgaggagtcaacgcgcttaaattcctagcgaagtgccgtaaga

SEQ ID NO: 294129 - DNA, 100 bp, Homo sapiens
tccctgaagagggaagacacgcggaaacagagccaggactgtctccagtttggtcctcctgctgaaggggaagtggtccaagtgagatggacagacggcc

SEQ ID NO: 294130 - DNA, 75 bp, Homo sapiens
cggggggcccgcagctaccccacgctggaggacgaaggatgagacctgcacgcagtggctcacagcagcacgatt

SEQ ID NO: 294131 - DNA, 100 bp, Homo sapiens
tcctgctagagcggcgaaccgtgggcagtgaggagactcgagtccgggcaggggagctggaccaggctctaggacggcccttcaccctaagcatcagtaa

SEQ ID NO: 294132 - DNA, 101 bp, Homo sapiens
aatggaactcctggcaaagtcatcagttgccaattgttacatacgaaactaagctgctaacctgtgccaaacctccacggctgctacgacacctgtgactc

SEQ ID NO: 294133 - DNA, 100 bp, Homo sapiens
cccggggcaaccccgaaccaagctttagccgccgaggccgcgtgtcccaaaggccaggtcaatgagctgaaggagaaaggcaacaaggccctgagcgtgg

SEQ ID NO: 294134 - DNA, 90 bp, Homo sapiens
ggcctctctcggtcgtggtcacaggcaaaggcactgtactccagaaagccaaggtttctaagcatgaattgaggaacagaagaagcagag

SEQ ID NO: 294135 - DNA, 100 bp, Homo sapiens
tcacgcgtacggtcaagtaatcagttgccacgttcaaacaagcagctttttgaattactttgttatgcagaaagtgggttctgaaggaacattaaatgac

SEQ ID NO: 294136 - DNA, 75 bp, Homo sapiens
tgatcatcttgggagtgatttgcgccatcatcctcatcatcatcatagcaaagaatggccgagtggattctgagg

SEQ ID NO: 294137 - DNA, 100 bp, Homo sapiens
cgaccatcaaatccgtgtcggagtccttacagaatctccctggggtgccctccccaggcagcaatgccaggatgcctgtgtccacctccctccaccagga

SEQ ID NO: 294138 - DNA, 82 bp, Homo sapiens
actccaggtccgacccgcgaacccctctgggatccccgccgctctgtctacaacccgaggcataatcaccagcaacacccgg

SEQ ID NO: 294139 - DNA, 90 bp, Homo sapiens
cgctcccgcaggggttcctccaagatggcggcgcagaggaggagcttgctgcagagtgagtcgttcacgcctactgaggagcatgtgttg

SEQ ID NO: 294140 - DNA, 100 bp, Homo sapiens
cggcaatgtgctgcttcacgaaatggatgctttcattggatttggaggaaatgtgatcaggcaacaagtcaaggataacgccaaatggtatatcactgat

SEQ ID NO: 294141 - DNA, 83 bp, Homo sapiens
aacaagttcatcaaagagctcattaaggacgggaagaacctcatcgctgcgacgaaaaagtcatcagctacgagtgctgtcct

SEQ ID NO: 294142 - DNA, 100 bp, Homo sapiens
agatggaacaatagttttaatgggaacatacgatgatggagcaaccaagatgaatctggttatagatggacaagagacgatcattctgcaagcaggcaac

SEQ ID NO: 294143 - DNA, 100 bp, Homo sapiens
ctgcctatgactatcggggccgcactgtggtattcgccggcacgcgaagtggccgcatccgcaaggagcatcagatccatgctgctgctgactcggagcc

SEQ ID NO: 294144 - DNA, 82 bp, Homo sapiens
tgggggtgaagctggagatatttcgggaccaagaatcgccttcagccctgtctggtgcatccttggcagaaagtgaggagga

SEQ ID NO: 294145 - DNA, 97 bp, Homo sapiens
tccgtggcttcggaggcaagtttggtgtccagatggacagagttgatcagggagaagccggagacccagggccccctggactacctgcctactcccc

SEQ ID NO: 294146 - DNA, 128 bp, Homo sapiens
gccattggatgttttgtccagggcagcatctctggtgcatgctgatgacgaaaaacatccggggatttctttcacggtttgataatgtccttcccgtcagcctggcatttgacaaatgtacagcttgt

SEQ ID NO: 294147 - DNA, 90 bp, Homo sapiens
tttggcattgacatttaattttagggtcctttatatagaagggagagtaggtggtccgtactgagaagaacagtttgaacaaccgattct

SEQ ID NO: 294148 - DNA, 136 bp, Homo sapiens
tagacctccagattgtaaattccagtttggttccccagggggtagtattgatgatggaaattttcagaaatctggtttgtgtaaatcgtgaatgtgtagaatcaaggataattaaggcttcagcacatgtttgttc

SEQ ID NO: 294149 - DNA, 50 bp, Homo sapiens
agaggcggatgaactgctgagacttgcttccagaggcccttattagtcct

SEQ ID NO: 294150 - DNA, 100 bp, Homo sapiens
aaaaagtgattaagcagagaatggagaagaaggttgattccagctgctgatgaagaagcatttgaagataattctgaggagtacataaggagagatttgg

SEQ ID NO: 294151 - DNA, 83 bp, Homo sapiens
cggcgtccgccagcgatggcacagtgatggtcattgtcctccagagcagtgatggaggaaataccagcccaggaagcagcagg

SEQ ID NO: 294152 - DNA, 100 bp, Homo sapiens
gggaagcgcccacggggacggattggttgttttttcctgtatgaagcggttggcaccactgaagtgaccgaatgagctatgtgttctcatttcacccaag

SEQ ID NO: 294153 - DNA, 132 bp, Homo sapiens
ccccctgccatcctatgtctttgcattattgcctcactaccacatatgatcttcagaagaaaacctggtggtatggtcaggaaaaagactacaatgtactagtcatggatcttctgggacctagcctcgaag

SEQ ID NO: 294154 - DNA, 103 bp, Homo sapiens
ttgccctcctaacatcatgaccacaagcctcaggagtgcaagtagctgatgaagtatgtcgcattttttatgacatgaaagttcgtaaatgctccacaccaga

SEQ ID NO: 294155 - DNA, 100 bp, Homo sapiens
ggaaattgaaggaacttggagttaatggtctaatttatgatagtgagttattctccccacctcagaagtaccagcttttggtgtatcatgcagattctct

SEQ ID NO: 294156 - DNA, 90 bp, Homo sapiens
ggctctcccacccagtgccctgtgagcaacctgcactcctccgtgagttgtatcacggactgattcaccgagcccaaccgtactcaactc

SEQ ID NO: 294157 - DNA, 75 bp, Homo sapiens
catggcagaactgaacgccatcattgggatcagatccagactgtgaagacatgaaaagataatagttggaaacct

SEQ ID NO: 294158 - DNA, 75 bp, Homo sapiens
ccgtgccgcgagcgcggcctgcaggagcacttgcacctcctgcgccgccgccccccatccaaggatatgccttca

SEQ ID NO: 294159 - DNA, 100 bp, Homo sapiens
cgccatcgttgctgccttcttcgtcaaggaacagatggagtcggataactgttcaggaggagatgatgactggacccatctgtcttcaaaagaagtggac

SEQ ID NO: 294160 - DNA, 75 bp, Homo sapiens
aggagttccaccaggccgggaagcccatcggggtgcggggggcaatggcactgcagctctgggccctgaccctgc

SEQ ID NO: 294161 - DNA, 92 bp, Homo sapiens
tccgttgctttactttttgcttcaccgacatagtcattatgccgaagagaaaggttttaaaatcaaagatgggaaaatcggagaaaattgcc

SEQ ID NO: 294162 - DNA, 100 bp, Homo sapiens
atcttgtaatgtgtttaacaaagccacgaataacctataatggtagtatcttccccagcagatgttgctgaaaaagctgacagaattattacaatgctgc

SEQ ID NO: 294163 - DNA, 73 bp, Homo sapiens
ccagtgactgtcaggtcgatcatatgccaggagtggtggctcacacctgtaatcccagctctgggaggccaag

SEQ ID NO: 294164 - DNA, 85 bp, Homo sapiens
agaactccagtgagatggaaaaaatcccagaaattggcaaatttggggaaaaagagttcttacggatatggtgacctattctccg

SEQ ID NO: 294165 - DNA, 96 bp, Homo sapiens
catttgatgatattgtggatcccaatgattcagatgtggaggagaatatatcctctaaatctgatgcttggtggcatgcatgtttagtcccagcta

SEQ ID NO: 294166 - DNA, 100 bp, Homo sapiens
catccgccctggctccgctgcacgagctccacgcccgtaccccggcgtcacgctcagtctatatcggcacaggatgaaaacctctcaaaaacaatgtttc

SEQ ID NO: 294167 - DNA, 74 bp, Homo sapiens
ctggctgttgtgatcattctcacattcctctccttctcagcggtgtgatggcgggtgaaaaagttgagaagcca

SEQ ID NO: 294168 - DNA, 100 bp, Homo sapiens
acctgtggactctgaccgcaaacaaggagagcctactgagcagcctgagtggctatgccctttgccttctgtacgagagagaagcttccttggacagaat

SEQ ID NO: 294169 - DNA, 75 bp, Homo sapiens
agtcattgtttggatctgttgctgatgatcagaaacttatgatgcttttgaacacttgcagcaattagaattaat

SEQ ID NO: 294170 - DNA, 75 bp, Homo sapiens
caaccttttattggatgccaaggaacaggagtacagctgtgtagtaaagatgccttctggtgaatttgcacgtat

SEQ ID NO: 294171 - DNA, 82 bp, Homo sapiens
ctccgcgtcccgctcgctgggagagaggtacctctccttttccctctccctttccctaaggcatgcggctaccaagggcatc

SEQ ID NO: 294172 - DNA, 100 bp, Homo sapiens
gttcaggaaggattcctgagattccaggaggaagtactggcgaagtgctccatgggctacttctacaagtccgaacagccagtccagcaaaatgaacagc

SEQ ID NO: 294173 - DNA, 75 bp, Homo sapiens
ccagatgtgccagaagcagtgccgggacgaggtgtggacttcctggtgcccgtgatgggctatatctgccgcatc

SEQ ID NO: 294174 - DNA, 50 bp, Homo sapiens
aggttcgaagctgagtatgtgacagggacgcactctctgagatattttcg

SEQ ID NO: 294175 - DNA, 83 bp, Homo sapiens
caaggcctgttggtccatccagagtgtcaggatggctaaaggtgaccccaagaaaccaaagggcaagatgtccgcttatgcct

SEQ ID NO: 294176 - DNA, 82 bp, Homo sapiens
taaacacacagcttctgtggaaaaatcccagaaactgtagacaatgttcagcgttgtcagttccttgatgacagaattctac

SEQ ID NO: 294177 - DNA, 100 bp, Homo sapiens
ggcatgcaggatatatgattccaccaccttcagtgatgtcttggcattgcccattttcaagcaggaagattccagccttccattggatggtgaaacagag

SEQ ID NO: 294178 - DNA, 101 bp, Homo sapiens
cccggacgcagctgctggaggaagagctgagcagcctaaaggaggagttggccctgtgtcagacattcacggcatggtgtaactcccacctccggaaggcg

SEQ ID NO: 294179 - DNA, 50 bp, Homo sapiens
ctgtgaccacccctgaagaaattgcacagtttctcaactcattggatgct

SEQ ID NO: 294180 - DNA, 100 bp, Homo sapiens
accccatatatgattttctttaaggatggtttagaaatggaaaaatgtgtgaggcatgaaattcaagatggaaccatacatctttatatttattctatac

SEQ ID NO: 294181 - DNA, 100 bp, Homo sapiens
tggacagatggacttcaaatgctgtttgtattccagagactaggtccgcgggagagctgtggggcttggtgagtgtttcgtggcctctcgggttggtcag

SEQ ID NO: 294182 - DNA, 74 bp, Homo sapiens
gggagggtccgctccagccaaattccagcctgcatcagagggctccacaggtaagacgtgcctgatgaaggctg

SEQ ID NO: 294183 - DNA, 90 bp, Homo sapiens
aaggggagacacattttatgttgtgtcatttcgaagggtgaccaagaatatggcccaggtgaccaaagccctggacaaggccctgagcac

SEQ ID NO: 294184 - DNA, 75 bp, Homo sapiens
ggaagatcttcaaatgggcattcacaaggatggacaaccggaaattttctacacattttggaattcagttactca

SEQ ID NO: 294185 - DNA, 100 bp, Homo sapiens
cgagagaggccggtttcccccaccttttcggctttgtgagaaaccttaccatcaaacacgatggccagcaacgttaccaacaagacagatcctcgctcca

SEQ ID NO: 294186 - DNA, 100 bp, Homo sapiens
tgcggagctgcttcgccgctgcgtgtgtgctgtatttatggagtttaaagattaatcatcccaaaacattgtttctgcttcggggaaatcatgaatgcag

SEQ ID NO: 294187 - DNA, 74 bp, Homo sapiens
gcttgctgcaggctctggggagtcgccatggtgtggttacagaggaggctacatggaggtgatcaacctgcacc

SEQ ID NO: 294188 - DNA, 75 bp, Homo sapiens
ccaagctcgtagcctgccactccgtgcatcatggaagggaagtggttgctgtgtatgttactggtgcttggaact

SEQ ID NO: 294189 - DNA, 100 bp, Homo sapiens
ctcaatgtgactgaaggtgcaatgcaggaagcacagaaaattctatactatccattgcactggttacttgagaagctggcctccaaatattgttggaatg

SEQ ID NO: 294190 - DNA, 83 bp, Homo sapiens
ttttgaggacacttgtggagagctcgaattccagaatgatgaaattgtgagaaaagccttacagatgctcatgggaagggtgt

SEQ ID NO: 294191 - DNA, 114 bp, Homo sapiens
cagtgttaaaggaacctctacaacgaaggtgaagccacggaagataagggttttggccaaattgggcgagggcacaaaataaccacttaccccttctcaccgaggaagagcggg

SEQ ID NO: 294192 - DNA, 83 bp, Homo sapiens
aatttgcagagagaacggttgcaaaactggaaaagacaattgatgacctggaaggaactgtggctgcaccatctgtcttcatc

SEQ ID NO: 294193 - DNA, 95 bp, Homo sapiens
ccgggacctgtgacagggctggtagcagcgcagaggaaaggcggcttttagccagacggaatcagtccccaatgcctggaaattcctcattggat

SEQ ID NO: 294194 - DNA, 74 bp, Homo sapiens
aaggtcgcctttgctactaccgcgactggctgctgcggcgcgagaactttcacgatggccgtaaagcacagcag

SEQ ID NO: 294195 - DNA, 83 bp, Homo sapiens
ttcaaggataagggcgacagcaacagctctgccggctggaagtgtactaatggtcacttgatgtgcgctggctgttttatcca

SEQ ID NO: 294196 - DNA, 100 bp, Homo sapiens
ccagttattagttctctatatcatgaagaaaccatcagacaatggctttggccacagccgtcttgtgaaggaaaacctgattgactacttcatccccttc

SEQ ID NO: 294197 - DNA, 83 bp, Homo sapiens
ctgatgaagttcgagcactaatatttaagaaagaagatgttaactttcaggaagaggatcacctagcccgggtagaagaggca

SEQ ID NO: 294198 - DNA, 74 bp, Homo sapiens
agcaccctccgcttcctctcctaggcgacgagacccagtggctagctgcaccaccaccgcctgtgctgatgcac

SEQ ID NO: 294199 - DNA, 83 bp, Homo sapiens
gtgatcccaccactggggagactgatgacgaaggctatgaggatgagtatgtgagaatatgccttctgcatcctgtgatacac

SEQ ID NO: 294200 - DNA, 76 bp, Homo sapiens
cctgctggtaaataacactgaaatgtctcctctgagcctccggcctccataagacccaaaacagatgacacctctt

SEQ ID NO: 294201 - DNA, 83 bp, Homo sapiens
tctctctcatctcgctcggctgcgggaaatcgggctgaagcgactgagtccgcgatggaggcccactgctcagtggagcgtgg

SEQ ID NO: 294202 - DNA, 90 bp, Homo sapiens
caaccgcctctggcacagcccatcagggagaaagagcaggaacatgacatcgagacaccctacggccttctgcatgtagtgatccggggc

SEQ ID NO: 294203 - DNA, 100 bp, Homo sapiens
catagccatcgacttcggggagcaggtttaagaattgtttaagctgcatcaatggagcacatacagggagcttggaagacgatcagcaatggttttggat

SEQ ID NO: 294204 - DNA, 74 bp, Homo sapiens
gcactgtccagacggagatccggggtgcctgcggcagttgctggactttctccaccactggggccctggagtct

SEQ ID NO: 294205 - DNA, 88 bp, Homo sapiens
gccgaacaatacagaagctacagactggatattaaaagaagactaattagcccatataaggtttccaccgtgcacattatgaagaaaa

SEQ ID NO: 294206 - DNA, 83 bp, Homo sapiens
gccgctcctaagcctgcacagccgcggcggcagcagcagtgagagccccagtggacaggaaagctaaggcctcagcgatgccg

SEQ ID NO: 294207 - DNA, 102 bp, Homo sapiens
ccaccatgtcagacgcagccgtagacaccagctccgaaatcaccaccaagggagtgcatccgccccaacccttttccccctcgtctcctgtgagaattcccc

SEQ ID NO: 294208 - DNA, 95 bp, Homo sapiens
agacagctggcaagaggcagcctgggggccacagctgcttcagttactataacaacagtaccaaggtggctgtgaaaaccctgaagccaggaact

SEQ ID NO: 294209 - DNA, 75 bp, Homo sapiens
aatgaagatggctggagcaatgtctactacagcaaaagaatgaatctgaagtctgctgcagtaaaacacagaagg

SEQ ID NO: 294210 - DNA, 98 bp, Homo sapiens
aagctcttcacagatctcagagaaattggccatggaagctttggagcagtgtattttgttacgactatggctatgtctgcgtggagttttcactcttg

SEQ ID NO: 294211 - DNA, 89 bp, Homo sapiens
gaaaaactatgctgaccagaatctgccgacaccccaggccatcgagccccaggccatcgtgcagcaggtcccagcccccagtcgaatgc

SEQ ID NO: 294212 - DNA, 100 bp, Homo sapiens
ctaccccggctatcaggacagctgccagatcgcaccgtttccagaagctgcgttgccaacgtcacatcccaaaatagatggagtctcactttgtcaccca

SEQ ID NO: 294213 - DNA, 82 bp, Homo sapiens
ggcgaccactgcttctccgtgggcagcattggcgaccagcgcttcacggttttacagctctttaaaacactgcacaggacca

SEQ ID NO: 294214 - DNA, 101 bp, Homo sapiens
gaggtataggctggctgtaggagtcggatgctctctacgatgtcatcactgtgggagccccagctgcccattttcagggatttaagaatggtggtcttcgg

SEQ ID NO: 294215 - DNA, 82 bp, Homo sapiens
atcaccgacctcatcagtgagctgtccctgctggaggagcgcttccggcttgtattggttggtgatggtggtactggaaaaa

SEQ ID NO: 294216 - DNA, 74 bp, Homo sapiens
ggacctgcagcagctgagaaaggagctcggggactcccccaaagacaaggaatggccaacctgctgacgggccc

SEQ ID NO: 294217 - DNA, 83 bp, Homo sapiens
cccagcgtccgccgcgcctcggccaagggactttgaacatgtcggggatcgccctcagcagactcgcccaggagaggaaagca

SEQ ID NO: 294218 - DNA, 100 bp, Homo sapiens
caacctcaacccgctcaaggagccactcggcttcatcaaggtcctcgagtggggtgttccaatgaattcactcaggtttctctttgagggtcagagaatt

SEQ ID NO: 294219 - DNA, 100 bp, Homo sapiens
agaaatatgactttacagagaacaatgaagctatacagacttccagatgttttgacacaagggcgcatatcttcaaagcacctagtacctcctaccattg

SEQ ID NO: 294220 - DNA, 75 bp, Homo sapiens
ttcgtcctcgactcttctctccctatgtggaagaagcaaagaggtttttcattagtcaatacagtgaaggctggc

SEQ ID NO: 294221 - DNA, 100 bp, Homo sapiens
ttatagatggacaagagacgatcattctgcaagcaggcaacctgaatacagatcttcccagacccgtcagattttgaccgctgctgcaaactgaaggacc

SEQ ID NO: 294222 - DNA, 100 bp, Homo sapiens
tattcttttttcaagtcccttgtgggcaaggatgtggtcgtggaactaaagaatgacctgagttgctatagcccaaggtggaacaatccagatttctaac

SEQ ID NO: 294223 - DNA, 75 bp, Homo sapiens
accctgcggaggagaccggcgaggagaagcagccccattggatgagaatgacctagaggaagatgtggactcaga

SEQ ID NO: 294224 - DNA, 51 bp, Homo sapiens
gccctgtctcctcgcagatgaggtaagaatgattgatgttggctgatattg

SEQ ID NO: 294225 - DNA, 75 bp, Homo sapiens
gtttgatactgttgaagacttttgggcgccacagaaagcgaggctggtgatatggacctgagtgggttgccagaa

SEQ ID NO: 294226 - DNA, 98 bp, Homo sapiens
ttactactgtgacaacattaacgcttattccactaagctcaacaaatttcctgtatttaatattaatgatgacttgaatgatctgtgtaccagtgcag

SEQ ID NO: 294227 - DNA, 100 bp, Homo sapiens
ggctggactacgtggcggcgctggaagggatgtcgtctcagcagtgctcgggcgcaggacagaatgctttgacctccaagctgttttaaatctagtagat

SEQ ID NO: 294228 - DNA, 93 bp, Homo sapiens
cacgaaaggcagccgcggatcgccgcgctcagcgacaaacaaggcttcctcagccgccgcctcaagggctccatcaagcgcaccaagagccag

SEQ ID NO: 294229 - DNA, 83 bp, Homo sapiens
tgttgaccaagcctctacaggggcctcccgcgccccccgggacccccacgccgccgccagcccctggtgctgactgcatgggg

SEQ ID NO: 294230 - DNA, 74 bp, Homo sapiens
tggagccggagtgcgggcgcgccccaccaccgccctcaccatggtgccgtgagcgatgtggagatgcaggaaca

SEQ ID NO: 294231 - DNA, 100 bp, Homo sapiens
gtaccaggataaagcacttgttggagatttcatgaatcgaagaggtgactatgatgacccaaagccaaactgattatccaccagacactcagcgtcttag

SEQ ID NO: 294232 - DNA, 74 bp, Homo sapiens
ccgagctccagccgaaggagaagggggcggagctccctgggtcctcagcagtgaggctggcctccctgcgtgac

SEQ ID NO: 294233 - DNA, 100 bp, Homo sapiens
ctcaaaatatgatggtggttggacagtcagcatttgcagactttggtttgcaaaggccgtgtgctctcacaagagaagttcaccttggaggagggggccc

SEQ ID NO: 294234 - DNA, 82 bp, Homo sapiens
ctacttgctctgcgacaaggtgcagaaaggcatgccagatttcctggagaagctgcacatggccactctgaaagccaagaat

SEQ ID NO: 294235 - DNA, 100 bp, Homo sapiens
ctgcaacccagttttccagccaccagtgggatgatgaatctgtaccagaacaggtttttaggcctggccgccatggcgtctccttctagaaactcccaga

SEQ ID NO: 294236 - DNA, 83 bp, Homo sapiens
tcctgcgtcttcttcatcgtgtacctctccatcgagctgtatttcatcatgaacctggtacagcaacatctttcatgtcttca

SEQ ID NO: 294237 - DNA, 104 bp, Homo sapiens
agaaatgttagagaagaaagacagctttgtggaagagtcccacgcctttgacatctcatccttcagtccctttgctgtaaaggcaacttgaacaagcttcagcc

SEQ ID NO: 294238 - DNA, 75 bp, Homo sapiens
tccaaaatccaggggatcaagaggaacatcatcttcagcgggctatttcagcacagcaggtgtatggcgagaaga

SEQ ID NO: 294239 - DNA, 75 bp, Homo sapiens
cgacaggcggcgcgggcggcggtcttccccagggaggtcctgaactacacagctgagaacatctgtaagtgggcc

SEQ ID NO: 294240 - DNA, 100 bp, Homo sapiens
ctttcttggcctgatgctgaactctcgaggttaatggccagccaagaccccttgaatcaagtcaggtgaaatatctccgtcgagaactgatagaacttcg

SEQ ID NO: 294241 - DNA, 99 bp, Homo sapiens
ctcaacgtgaagatgatgaggatgaagacctttatgatgatccacttctacttattaaatagtgggaggtgtcagagcccagctcatgcacatcagctg

SEQ ID NO: 294242 - DNA, 98 bp, Homo sapiens
gggagtgccgtgcgccgcagcccgggcccaggccccggcagcgcctgggacaagggttacgctaaggacatggtgacagactttgatgagaaacatga

SEQ ID NO: 294243 - DNA, 75 bp, Homo sapiens
cagtccacgcaggagatccatgagaaggtactccaaagattcaggtttactcacgtcatccagcagagaatggaa

SEQ ID NO: 294244 - DNA, 100 bp, Homo sapiens
aagttgctgcgcggagagaaagctatctcaaggctactcagccatcccttacagaactcaccacactcaaaattaaacaaccaccatgtcgagcaaaaag

SEQ ID NO: 294245 - DNA, 50 bp, Homo sapiens
acgtgaggccgtggatgcaggcattaagtgctgcatttgatacagttctt

SEQ ID NO: 294246 - DNA, 83 bp, Homo sapiens
tcctcaacgacgcggacatggtcatgagctttgtgaacctgggttttgaagccgcttctctggccgagttaggtttcgcccag

SEQ ID NO: 294247 - DNA, 105 bp, Homo sapiens
ttccattggcaagctacaataatggggccacttcttggacacttaatgattgttggcaagaaatgtgctgctgatctgggcctgaataagggttatcgaatggtg

SEQ ID NO: 294248 - DNA, 75 bp, Homo sapiens
tccccgtcgaggtcaagatcaagatccaggtctatttcacgaccaagaagcaggaacatgcttgccaactcagcc

SEQ ID NO: 294249 - DNA, 73 bp, Homo sapiens
ggtgccagcacctttcggcttctgagacggcggcagcagcggcattcagtctgcgggccaggcatcgacatcc

SEQ ID NO: 294250 - DNA, 82 bp, Homo sapiens
tcactggaactgcctcattctcatcttgtgtgttacatttctgtgagacaacaaaggaggctttgaaaatgttttagaagaa

SEQ ID NO: 294251 - DNA, 137 bp, Homo sapiens
ctccgggcggcgcgaagcgctggtggcgggcccgggctgcggcgtgtgcgcgcccgccagctgctccggagatacgggggaaatttgcagtggtgagaaaatgtataaagaaagattctgggaaagaatttgctgca

SEQ ID NO: 294252 - DNA, 87 bp, Homo sapiens
gagaaaggaagaaaagcctcccacaaaagagatgagacaagaggaatggttacacaggtcgatggcgtgaacattcagggttttgcc

SEQ ID NO: 294253 - DNA, 128 bp, Homo sapiens
ttgaacagcagattttgtcaattgaccgagaaatgctagaaaaattgactgtatcctatgatgaagcagaacttaaggcatacagaacgatggagtatatggcagaatccaccgaccgcagccctgga

SEQ ID NO: 294254 - DNA, 75 bp, Homo sapiens
aactttcacggacaacctcagaggacaacgaagtgttcggagaagtaccagttctaaatgtcagttataagccac

SEQ ID NO: 294255 - DNA, 90 bp, Homo sapiens
tgtctgatgtcagatttatctcatgctgtgcaggtcacccctcctaatttctcagtgtcacaagtgcccaacatgcccagctgtccccag

SEQ ID NO: 294256 - DNA, 101 bp, Homo sapiens
gggatttcgttttgcctccggttggggctgctgtttctcttcgccgacgggaaattcaactactgaggaggttacggcacaaaaatgtcatccagctggtg

SEQ ID NO: 294257 - DNA, 100 bp, Homo sapiens
caccacttcacttcacctctttctggaaaccaggcgttggagaccagggccagccctggccacaccccaggctgtgtcaccttcgtcctgaatgaccaca

SEQ ID NO: 294258 - DNA, 74 bp, Homo sapiens
gcggatcccacacctccggaccgagggacgcggatcgcttcttgacctgcacaactttctgatttgatgagttc

SEQ ID NO: 294259 - DNA, 80 bp, Homo sapiens
gaatcgtatcgtatgtccgctatccagaacctccactctttcgcctggccgtgtggtgacgctccttgaagatcatgagg

SEQ ID NO: 294260 - DNA, 80 bp, Homo sapiens
cccatggagctcgagaacatcgtagcgaacacggtgctactcaaggcccgggaaggctgaaggggatgctaagggagata

SEQ ID NO: 294261 - DNA, 97 bp, Homo sapiens
tgttgctatagatgtggttccacctaatgtcagggaccttctggatattttacgggaaagaggaaggcagcaacaactcatctccagtggattttgt

SEQ ID NO: 294262 - DNA, 100 bp, Homo sapiens
cgtgcttcgtggcccggcaccgttccgcggacgtgctcgcagggcactgtgacctttgaagatgtggctgtgaacttttcccaggaggagtggtgtcttc

SEQ ID NO: 294263 - DNA, 75 bp, Homo sapiens
tcgagtgaccgagaccgcggccgggaccgagggcacttcctggccctgcggggtgccctgtctctggctggagct

SEQ ID NO: 294264 - DNA, 74 bp, Homo sapiens
tgaaggtggaggcagcgcggctctcagattttgcaagaacgaggctcaaggatgtgagggacacagtattgaca

SEQ ID NO: 294265 - DNA, 72 bp, Homo sapiens
cacccagcagctggcgcaggccaccggcaagcccccccaggcccagcagccaccacagcgcctgcttcctcg

SEQ ID NO: 294266 - DNA, 91 bp, Homo sapiens
ccatgccgctcctaagcctgcacagccgcggcggcagcagcagtgagagtcaggatggctaaaggtgaccccaagaaaccaaagggcaaga

SEQ ID NO: 294267 - DNA, 75 bp, Homo sapiens
gtgtgagaaaaaaataaactcctatttgtttatggcaagggtgaggtggctttgaccccgggttgcccggccagc

SEQ ID NO: 294268 - DNA, 100 bp, Homo sapiens
ctctgaaaggctctccttgcagctgcttagacgctggatttttttcgggtagtggaaaaccagggggatatgagactttctactcggaatatcctgagtg

SEQ ID NO: 294269 - DNA, 101 bp, Homo sapiens
tatatacttggagttggagacaggcacctggataaccttttgctaacaaaaacagatgcattaggacaccagaaaaggaagaaaagacagtggcagctgaa

SEQ ID NO: 294270 - DNA, 82 bp, Homo sapiens
caaggagctaaagcagcgtgcgttcagccctgggatcctgaggaggatgaaggggctggccctggaggccgagagtgagctg

SEQ ID NO: 294271 - DNA, 75 bp, Homo sapiens
gatctggaaccttgtgttcatccagtataacaggcctgaagctgcccagcaggcattccaaggcctgggtcctgg

SEQ ID NO: 294272 - DNA, 100 bp, Homo sapiens
gaaaacgtaatgaggatgaagattcaccaaataagctatatactttggttacctatgtacctgttaccactttcaaaagattaaactgcaaatatctcat

SEQ ID NO: 294273 - DNA, 50 bp, Homo sapiens
taaacatgcaatgaacccaaaagggtatatgatgatggaaagtatgtgta

SEQ ID NO: 294274 - DNA, 100 bp, Homo sapiens
cactcctgggccgtccctgaagactttgagaatcactacaagaaaaactccttgtggtgaaggttctaagacgtgggatcgtttccagatgagaattcac

SEQ ID NO: 294275 - DNA, 82 bp, Homo sapiens
ggaggaggagagagaaaggagagacaattatgttcctgaggtctcggtccagctcgacttccagctcaggctccagcaccag

SEQ ID NO: 294276 - DNA, 100 bp, Homo sapiens
acacaatatttcctggagaaatcttactgtttctgtatgaaaatgaaagtcttcagaatggaaggaagtcaactgaatttccaagaaaaatacgtgaaca

SEQ ID NO: 294277 - DNA, 87 bp, Homo sapiens
gctggcaagcaagattataatcaggaagtggatgcctccatttttaaggtggtctttgggaagaagcttcctgcctttgccaccatc

SEQ ID NO: 294278 - DNA, 75 bp, Homo sapiens
cgtgctactgtgcgctcgatccagcaccatggggaagcgggacaatcgggtggctaccggctctctgaccagttc

SEQ ID NO: 294279 - DNA, 50 bp, Homo sapiens
ctcaggcgtgcgcggacggtgtgcgggtgtgtggaggtcattgcaaagga

SEQ ID NO: 294280 - DNA, 100 bp, Homo sapiens
ctgctccatgcttgaaaacatggggattggaattcgtgggatggagtaggacctcttccagactgtgctgaaccaccaaaagggatccagatgctgtggc

SEQ ID NO: 294281 - DNA, 82 bp, Homo sapiens
cacaactccagtgctaactcaacaggaaattcagttcatgaagataagaagtttcttgacaaatacatgccccagttcatga

SEQ ID NO: 294282 - DNA, 51 bp, Homo sapiens
tgtttccacatcggtcagaaaaagattgatgctattgctgagattagagcc

SEQ ID NO: 294283 - DNA, 74 bp, Homo sapiens
gtcgactacaagaagagggcggagcggagacgggagtattatgaaaagatcaccgagacatgggtgcccggcac

SEQ ID NO: 294284 - DNA, 90 bp, Homo sapiens
gatttgtcatgaagaaactcaatgatcgtgtcatgagaggctgctggctcgtgtcacgttcaccaccagaccccacatcaggagtcccgc

SEQ ID NO: 294285 - DNA, 90 bp, Homo sapiens
gtggtttgaatatcgtaagcgcacgtttaaacatctcaaggtcacttttacaaagagaaagtttggattaatgaagaaagcctatgaact

SEQ ID NO: 294286 - DNA, 100 bp, Homo sapiens
gcaattatgggactttttatataacatcccagactgtcttctgaagattgatgtctatttccttgagctctttaattttgttgccaatttggataaacat

SEQ ID NO: 294287 - DNA, 83 bp, Homo sapiens
agggccgcttccgcatccccttcttcatgtctcaaggagtcagtggatcggtggggaaaatgctgcttaccctgggccctggg

SEQ ID NO: 294288 - DNA, 100 bp, Homo sapiens
aacaccacaataatccacagccaaggttctgccattactgcaatagccacatctgtgtgtcacggcccaccctgtcgccagcttcatcatgccctcatgc

SEQ ID NO: 294289 - DNA, 83 bp, Homo sapiens
caaagaagatgcctcgaactaaacaaattcatcccagaaatctaagagggaaatcctcattgacgattcaatttgttgaaggc

SEQ ID NO: 294290 - DNA, 60 bp, Homo sapiens
ggaaaccgctgcttcagagacacaggaaaatgttggggcttttcaggaagcataataaga

SEQ ID NO: 294291 - DNA, 85 bp, Homo sapiens
taacatctacgtcagtgataaaatctccttgaatcgctctctcccagatatccggcacccaaagcaaagtaacatcctagacatg

SEQ ID NO: 294292 - DNA, 83 bp, Homo sapiens
tagaaaacggcgagagtgggcgagaacgtccactgcgggccggcgaaagctggtttggaaggcgctttgagtccccgctgctg

SEQ ID NO: 294293 - DNA, 100 bp, Homo sapiens
gtggctttgatgctgtcatctgccttggaaacagtttcgctcacttgccagactgcaaaggtttgcccttgcatctcatttcctctggggactgtggtcc

SEQ ID NO: 294294 - DNA, 100 bp, Homo sapiens
ggtgtctacttctctgtggaagtattacactagccctgggaaatgcacagaaattgccaaaagtgatttgccttcaaggaaactggggagtcagaaaatt

SEQ ID NO: 294295 - DNA, 75 bp, Homo sapiens
cttcaggatagtatcttggccagggaactcaaacagcagatgcaggtaactcgggaccaaatgaagatgtttata

SEQ ID NO: 294296 - DNA, 75 bp, Homo sapiens
ccgggacccgcctgctgagtggacccgggtgcctgggccgaggccactggtgcatatgttcccgggagggataag

SEQ ID NO: 294297 - DNA, 100 bp, Homo sapiens
ttcaggctgcctttcgagctcaggggcccctggctatgctgcagcactttgatactatctacagcattttgcagaaactttgaaaagcaccccaaagaac

SEQ ID NO: 294298 - DNA, 75 bp, Homo sapiens
ggagtcatgagcgacagcggcgagcagaactacggcgagcggggaccagccaccactgttgccttttcaagaacg

SEQ ID NO: 294299 - DNA, 75 bp, Homo sapiens
aacacactgaagttcttcagcttctcagccccccagctagaacaacagaggcagcagttgcttactgaacgccaa

SEQ ID NO: 294300 - DNA, 114 bp, Homo sapiens
tgcaacctttagactaatgactgtccgaaacatcgcctccatctgtaatatggaaatgaaacacgatttccaaaatgaacttaatctttcatgagaaactgaggatagagatgt

SEQ ID NO: 294301 - DNA, 75 bp, Homo sapiens
caagtacatcgccaagtttcagggagaagacacggtcgtgatcgcggtctgaatttcctgctgctgttcacaaag

SEQ ID NO: 294302 - DNA, 100 bp, Homo sapiens
ctgctggttagtgtgctctgagggagggtccgagccagccgctgttttgccggaggagcccctcaggccgacctacaagaacagtgaggagcttcggtct

SEQ ID NO: 294303 - DNA, 98 bp, Homo sapiens
agcctcgttgcggccatcgccctgccggaccgcgcctcaggctcccccaggaaggaagcagccaccctcgccatggcctccccgcccgcctgcccctc

SEQ ID NO: 294304 - DNA, 58 bp, Homo sapiens
ctcagcttctactacttctcccgccacgtgagtacctcctgaccgtgctggcatctaa

SEQ ID NO: 294305 - DNA, 75 bp, Homo sapiens
tgctgaacggaatatctgcagcaagtattcgcaccacaccccactctggccggagcacgccaagcagctccccat

SEQ ID NO: 294306 - DNA, 100 bp, Homo sapiens
tgtgagaaaagggggaaaatgcccaggaggaagcaggagcagcccaagcgccttccctcacatcatagcaatggatcatttaacttgaaagctttgtcag

SEQ ID NO: 294307 - DNA, 98 bp, Homo sapiens
caagccagcgccgtgacccaggtgtgggggatgatggtgacgcttctcactcacgtgtgaagggaaatgtttcaacgtgcgcaagcgttgcggcggcg

SEQ ID NO: 294308 - DNA, 82 bp, Homo sapiens
acaccacccccgacagggcggagcagaaacttgaagggtcaaagtgcaaagggcagcttttgatttttggggcaaccaactg

SEQ ID NO: 294309 - DNA, 83 bp, Homo sapiens
cccctcttagttcttcgcggctaacgacaatgcagatcttcgtgaagactctgactggtaagaccatcaccctcgaggttgag

SEQ ID NO: 294310 - DNA, 138 bp, Homo sapiens
gtccttcaaaccagatatgatatcccagttggagagggaagaaaagctttggatgaaggagcttcaaacccaaagagggatacttgactttcagagatgtggctatagagttctctttgctggagtggaaacgcctgg

SEQ ID NO: 294311 - DNA, 124 bp, Homo sapiens
gccgacatcatccaccactggaacgccaaccggctggacctgttcgagatcagccagccgaccgagagctggtgatgctgctggagtggtggtcgggcacggaatgcaccatcttcacggaccc

SEQ ID NO: 294312 - DNA, 82 bp, Homo sapiens
aaaaagaagcgtatggactactatgactctgaacagattgaatatgatgcatatcgcactgatttggaagaactgaatcttg

SEQ ID NO: 294313 - DNA, 97 bp, Homo sapiens
cagaatatacaaaacattgatgaagatgaagatttagaggtcaaaatgcagatcttcgtgaaaacccttaccggcaagaccatcacccttgaggtgg

SEQ ID NO: 294314 - DNA, 100 bp, Homo sapiens
gaccttgcagatgcttcgggagaacctggaggaggaggccatcatcatgaaggacgtgcccgactggaagtaatctatgccagcaattatgacaatgtta

SEQ ID NO: 294315 - DNA, 82 bp, Homo sapiens
aattctcaaggattctacgtcagacggttgatgatgaagcgccggccgtgtaaatgaagatcgggtgaggagcaggacgatg

SEQ ID NO: 294316 - DNA, 83 bp, Homo sapiens
agtgaaggaaaggtgaaactggttccaaatactaaaatccagatgtcatattcagaacatcatcttcagcgggctatttcagc

SEQ ID NO: 294317 - DNA, 51 bp, Homo sapiens
catcgagcttatgcagagcagcgagctcctccccggtgattgagaatggcc

SEQ ID NO: 294318 - DNA, 50 bp, Homo sapiens
catcaaagctggattagaacatctgaaccccctgaagctgtgccaagatg

SEQ ID NO: 294319 - DNA, 100 bp, Homo sapiens
cagctgcctcagttcttagcgcagggttatatcagttcctagcttgaggttttccagggactttaaaacctcagcaaagaatagttttaaggactcctcc

SEQ ID NO: 294320 - DNA, 75 bp, Homo sapiens
catcctgccggagctgctcaagaatgccatgagaaaactacccctgagtgtggtcccacaggatatgtagagaaa

SEQ ID NO: 294321 - DNA, 96 bp, Homo sapiens
tggttaaagtcattgaggactttccagcaaagacgcctgtgtgagcacaagtatggcaatgcgccccgtgtccgcatcaatggccatgtggctgcc

SEQ ID NO: 294322 - DNA, 89 bp, Homo sapiens
aatcaggcagttttgtgtccatgtgaacaactagatcaatggcttttcaaaagcagcacaccaaactgtcaaagtggtgatccctcttc

SEQ ID NO: 294323 - DNA, 100 bp, Homo sapiens
ccgctgcccacagcctagcagtcgggaccgtactgagatgccagcacgagccgccgcttcacgccgccttccaccgcgctgagcccaggcaagatgagcg

SEQ ID NO: 294324 - DNA, 83 bp, Homo sapiens
gactactggggccagggaaccctggtcaccgtctcctcaggtcagcccaaggccaaccccactgtcactctgttcccgccctc

SEQ ID NO: 294325 - DNA, 98 bp, Homo sapiens
catccgttgtgcttcccataccaagtactggtcttcttggacattaatctttgaatacttgctgactgctaagaaatgaccagaggggaagaggagtt

SEQ ID NO: 294326 - DNA, 75 bp, Homo sapiens
ctgagatccagaggagtggaaggctcccccttgactaaagctgaggaggacttcatccaacccagcagccgagaa

SEQ ID NO: 294327 - DNA, 98 bp, Homo sapiens
atgcatgcatgtaccgaccttctgaacaaggccaacacctatgcagcaagtacagatgaagctcaggttccccaaggaaatattgaccaggttgctgt

SEQ ID NO: 294328 - DNA, 100 bp, Homo sapiens
ccttcctccccacccattcctttaaatccggagggggaaaaaatcccaaggtctgcaaaggacaaggtggagcagacacctcgcagtcaacaagacccgg

SEQ ID NO: 294329 - DNA, 97 bp, Homo sapiens
ctccaatacttacagtaatctcatattaacagagtgatcagcagctggactgtgccttggacctaatgaggcgcctgcctccccagcaaatcgagaa

SEQ ID NO: 294330 - DNA, 75 bp, Homo sapiens
gagagcctagcacctactgagcgctcagtaaagtgatgaagatatgtgccagaagttcctccagcagaacagctg

SEQ ID NO: 294331 - DNA, 100 bp, Homo sapiens
gcctcctgtacctcatggaatgatgccgcagatgatgccccctatgggagggccaccaatgggacaaatatttagcttcctgtggtatactgatgagcag

SEQ ID NO: 294332 - DNA, 158 bp, Homo sapiens
cagtcaggagaaactcctgcagaaccaggtccagaagctgatccaggagttgaaggaacagaaggagcgagcccagtggcttttgcagagctgcagacggacatcaatgagctgactaaccacatggacgaggtgcagatccccttcctggactaccg

SEQ ID NO: 294333 - DNA, 101 bp, Homo sapiens
cccgtgctgctgttgatgctggctttgttcccaatgacatgcaagttggacagacgggaaaaatagtagcaccaatttggggatattccctgcccaaaaaa

SEQ ID NO: 294334 - DNA, 101 bp, Homo sapiens
gtccaggatgcctttgccgccgccaagctcctggccctggccctgatcatcctgctgggcttcgtccagatcgggaaggagctgcgggtggaagtggagca

SEQ ID NO: 294335 - DNA, 100 bp, Homo sapiens
attctgtaaataaaggctccactagtctctgttggatgaacccaatcccaatagtccagcaaacagccaggctgctcagctgtaccaggagaacaaacgg

SEQ ID NO: 294336 - DNA, 90 bp, Homo sapiens
cgccgccgcagtcttcgccaccacctggtgaggagatggaggcttgtgaggagctggccctggccctgtctcggggcctgcagctggaca

SEQ ID NO: 294337 - DNA, 48 bp, Homo sapiens
tccttgagctccccgatgaagaactgatttcatctgaaattgaagaga

SEQ ID NO: 294338 - DNA, 97 bp, Homo sapiens
ttccccggaaatgcaggcgtgccagggaccccaggagaacgagtgctgaagagacctgtcacctctgaggaactccttactcccggggctccgtatg

SEQ ID NO: 294339 - DNA, 101 bp, Homo sapiens
cggggttcgggtgtctcgtgtgtgaacatcacagaactgataaatttcaaacggaagagagtggcagcatttagaaagaatctaattgaaatgtctgaact

SEQ ID NO: 294340 - DNA, 83 bp, Homo sapiens
ctagctgcttatggctataaaattacagctggagaatgctggaggagaccttaaggatggccaccaccactatgaaggagctg

SEQ ID NO: 294341 - DNA, 98 bp, Homo sapiens
ccagctttctgttgggaacactcaaaggtctgtttatgatggtgaagaacatggacgtttcatggagaagcttgaaactcgtatccgtaatcacgacc

SEQ ID NO: 294342 - DNA, 82 bp, Homo sapiens
ggcgcggattcgccgaggcaccgaggcactcagaggagatgaagatctccttcaacgacaaaagcctgcagaccacatttga

SEQ ID NO: 294343 - DNA, 83 bp, Homo sapiens
ctcttgccctcatcctggttctggaatcctcagttcaaggtggatatggttatagaagaagtggccgagataaatatggccct

SEQ ID NO: 294344 - DNA, 100 bp, Homo sapiens
agaagagccaagaaggaagcgccgagtagtcaccaaggcctataaggaaccaggaaagcgttctcagctgtggaggatgacaggaacaggaatgctggcc

SEQ ID NO: 294345 - DNA, 97 bp, Homo sapiens
ctcaaccccatccactgccgcggccgtgggcccgaccgcggggacccatgagtgaccgaggaggtggcgttcctttgaggaaaattgacagactttt

SEQ ID NO: 294346 - DNA, 100 bp, Homo sapiens
aaaacctcagcctggaggccattcagctgtgcgaccgggacggtctaccctgaactgcagatcaccaatgtggtagaagccaaccaaccagtgaccatcc

SEQ ID NO: 294347 - DNA, 90 bp, Homo sapiens
aggaggcagtagttccccgcttcccttccgcgggagggagagttagcttgatggaccagacaaataggatgatggctgcccccacacaat

SEQ ID NO: 294348 - DNA, 98 bp, Homo sapiens
tctaaacctgtgaccacccctgaagaaattgcacagttttctggatatgccgcagaaggatccgtgccagaagcaagcctgtgagatacagaaatgtt

SEQ ID NO: 294349 - DNA, 51 bp, Homo sapiens
ctttatatagaagggagagtaggttgttttctgcatggaccgtgccctaga

SEQ ID NO: 294350 - DNA, 98 bp, Homo sapiens
tccttcaaaccagatatgatatcccagttggagagggaagaaaagctttggatgaaggagcttcaaacccaaagagcaatctgaagaggatgtaagtc

SEQ ID NO: 294351 - DNA, 59 bp, Homo sapiens
caccctggacgaagccacccccaccctcaccaaacaagtgtgccatttgaccatctcgg

SEQ ID NO: 294352 - DNA, 100 bp, Homo sapiens
ataagcagggcttcacagaagaggtgacagaggaggcctaccagaaactggccagcgagaccctggaggagctggactggtgtctggaccagctagagac

SEQ ID NO: 294353 - DNA, 100 bp, Homo sapiens
ctatttggaatggccagagtattttatggctgtggccttcttatcagcacagagaagcaaagatccaaattcccagcattgatgttgatgggacaatgac

SEQ ID NO: 294354 - DNA, 100 bp, Homo sapiens
cttcggaggatggaagagctgcacaaccaagaggtgcaaaaacgaaagcaactggagctcagatctgctcactttagcactctggcaattaaacagaacc

SEQ ID NO: 294355 - DNA, 100 bp, Homo sapiens
aatttccacatttcttccaagttctcttgccctgagacgatggctgatcactgggaaactgcacctcgtcacatgatgcgtctagatattcgttctttgc

SEQ ID NO: 294356 - DNA, 75 bp, Homo sapiens
taacccgaataagctgtcagactttgatagactgtgatcaaccactctatgattgtcctatgtgtgggctcatat

SEQ ID NO: 294357 - DNA, 98 bp, Homo sapiens
gaaaaagcccgtgaggatgcagcccgggaaagagctagatactctggatgaatattttgaatatgatgcagaggagttcttggtctctttggccttgc

SEQ ID NO: 294358 - DNA, 75 bp, Homo sapiens
ccaacagccaccaccaccaccagatggacagaagtggcggttgctgacgcctggaaattcccctgaaggtggagc

SEQ ID NO: 294359 - DNA, 80 bp, Homo sapiens
ggcagcagcactacctgcacaaggacaaggacagcacctgcctagagaactttttcagaagaagtgaagtcaagatgaag

SEQ ID NO: 294360 - DNA, 100 bp, Homo sapiens
cacacgccggacttcgcaggcccagacgacgcgcgcgcaccatccagtccaatggatcagatgggcaagatgagacctcagccatatggcgggactaacc

SEQ ID NO: 294361 - DNA, 98 bp, Homo sapiens
gaccaatgaagactcaggaagagatttgaaaccacatgaagatcaacaagatataaataaagatgtgggtgtgaagggttgaaaaataccggccacag

SEQ ID NO: 294362 - DNA, 98 bp, Homo sapiens
agccatcaggtaggctgcgttgaggatctttgctcttccatccgcctttgatcgtcttcctcttcagccatccagaatgccagctgatgaagaccgag

SEQ ID NO: 294363 - DNA, 88 bp, Homo sapiens
tgttcagtctgatggccagttgctgcggctggttcaagcggtggcgggagcctgtcaggcttcagggatgacttcttagggggcaggg

SEQ ID NO: 294364 - DNA, 100 bp, Homo sapiens
actcttccaaactatactaaaggcagtggagatgttttgggaaaggcatccaggctggagaagcagaacagcacacctgagagtgactacgacaacactc

SEQ ID NO: 294365 - DNA, 100 bp, Homo sapiens
tagacattgaccccgaggagacggatcttagaaatgaagttgaaaaattacgcaatgaagtgaatgaaagagagaaagcaatggaaaatcgttacaagag

SEQ ID NO: 294366 - DNA, 96 bp, Homo sapiens
aaaggaagaaaaagaagctgtgtcagccagaagggccctggagaatgaactggaggctgctcagaaaactttagaaactgttcctttggagaggaa

SEQ ID NO: 294367 - DNA, 75 bp, Homo sapiens
ggcggcaggggagagcatggctcagcggatggtctgggtggacctggagatacagtttatgtaacttgatggaag

SEQ ID NO: 294368 - DNA, 75 bp, Homo sapiens
cggacctttcccgctggcgcgcagcctcagctagaaagttcaggagccctggaaaggagaaggaataagacggca

SEQ ID NO: 294369 - DNA, 82 bp, Homo sapiens
tttgaccatcttggtgagaaacattaagacctactaccagtttggtgccctggttgtcagatgttggaaagcagtaggacgg

SEQ ID NO: 294370 - DNA, 115 bp, Homo sapiens
cgaggagagccggagtcggggacccaggagtttcctgtgtccagcgctgccggagccgcctgagactcctcagacccctgcacaattgagagaaaagcccgaagaattagcgtga

SEQ ID NO: 294371 - DNA, 101 bp, Homo sapiens
ctctctccatttcccacaattgtgctggaatccagatcttacataagatggaagtctctcacactagatactgaacattaaatagaaaatctatttagtaa

SEQ ID NO: 294372 - DNA, 51 bp, Homo sapiens
tccgcccgtcggtctgcagcgcggctgagatttataatcgcttagatacaa

SEQ ID NO: 294373 - DNA, 75 bp, Homo sapiens
cgcagctccggccgcctggctccccatactagtcgccggtactgctataaccagaatttggtagaaaaaggattt

SEQ ID NO: 294374 - DNA, 100 bp, Homo sapiens
tcaatccttcagatcatcctcgggccagcacaatattcctcagtaaatctcagacggacgagacaaagcatggaggacacaagaatgggaggaaaggcgg

SEQ ID NO: 294375 - DNA, 83 bp, Homo sapiens
ttgacgagctgctagccagcaaatgaggcattgaaacttcagcaggatgtaaggaaaaggaaacaagaaattttagaaaagca

SEQ ID NO: 294376 - DNA, 100 bp, Homo sapiens
gcaaccactattttcttcctgcccctcgttgatgagagcattcgaagtgacctcagcagggcatccaggacagagcgggatgccaccagcttgtccaaag

SEQ ID NO: 294377 - DNA, 75 bp, Homo sapiens
cattctcctgccctggcgctgacaagggtccagcctccgatgcttctagaaagatctagtatgagcttaactcag

SEQ ID NO: 294378 - DNA, 89 bp, Homo sapiens
aagtgatgaggaactggcaagaaagctaagcattgatattgcagcctggcatcctcgctacaacctcattgttgtgggccgatacccag

SEQ ID NO: 294379 - DNA, 90 bp, Homo sapiens
tgaaattatctctggtgctgcagctctgaaatcaaagagcaggaggttgtggacaaagtcatggaaacactggacaatgatggagacggc

SEQ ID NO: 294380 - DNA, 75 bp, Homo sapiens
agctgctcccttcgccttcgccctttccacctcgcggcagttcgatggaggagatgtataagaaagctcatgctg

SEQ ID NO: 294381 - DNA, 98 bp, Homo sapiens
tgccaaagaagatgtagacttcctgccctacatgagctggcagggggagccccaagaagccgtcaggaaccagctcagagtcaagatctccactgaag

SEQ ID NO: 294382 - DNA, 82 bp, Homo sapiens
ttctgcaccatcttcaggtcctactccaggggcgctcagcacatgattaagtaccggtacatcccgttcacacatgggaaga

SEQ ID NO: 294383 - DNA, 75 bp, Homo sapiens
tgcggtgcccacccatatcccgcagagtctgccagggaattcctggggaagtcggagcctgagcaccagcactga

SEQ ID NO: 294384 - DNA, 90 bp, Homo sapiens
tgaaatcacttaccctgaatctgaaggtacttcatctggtcttcttaatgcttctgcacaggaagagagaagggcacagttacctaagta

SEQ ID NO: 294385 - DNA, 75 bp, Homo sapiens
cactctctcagaagatcagatgagccgtcttgccaagctgggatagatgggcagcagaagatcatgtgcttcgtg

SEQ ID NO: 294386 - DNA, 90 bp, Homo sapiens
cacaattgtctgtgacagtaacagtacttgggatcccccagttccaaagtgtcttaaaggctctcaccacacacttgttcatgggcgcag

SEQ ID NO: 294387 - DNA, 50 bp, Homo sapiens
gagatgatagccaaaccctcagaccaagatcactccatggatgaaatgac

SEQ ID NO: 294388 - DNA, 75 bp, Homo sapiens
aagaggaagaggaaagcaaaggagtcagggatggctcttcctcaggcacccgagtgtacagccccccggagtgga

SEQ ID NO: 294389 - DNA, 50 bp, Homo sapiens
agagcccacaggctataattggagcacaaacttcagtgctctcaagaagg

SEQ ID NO: 294390 - DNA, 83 bp, Homo sapiens
gcaacaacagcagccggcccttgttaactacaacagaccatctggtattagtgctttggttgaaatacctaagaactgtgttg

SEQ ID NO: 294391 - DNA, 50 bp, Homo sapiens
agcccgcccaactcccagcggagagcaagatatggtccggaaaaagaacc

SEQ ID NO: 294392 - DNA, 88 bp, Homo sapiens
cctggagcctcagttggaagcagccgatccagcctgcggagcctgtggggcaggtggataagattgtggaccagctgcagcagttaat

SEQ ID NO: 294393 - DNA, 100 bp, Homo sapiens
gggtgcgcagcctcgagtttgagagctacccggagctccaagacaggggttgcagagcctgaggcctgtgatcagatgtacgagagcttagcgcgactcc

SEQ ID NO: 294394 - DNA, 100 bp, Homo sapiens
aaataaaagaatatgctgcgatatttcatgaacacaccagcaggcttgtagagcaccagccacaacgggaccactgccttcagctcctcgggatgtcgtg

SEQ ID NO: 294395 - DNA, 75 bp, Homo sapiens
agaagaaggtgtactcctttctattttaaagagccaagcctcagagatccaagtggtaagaagttcagaagcaag

SEQ ID NO: 294396 - DNA, 90 bp, Homo sapiens
agcgactccccggctcgaagcctggatgaaatagatctctcggctctgaggaatatgagttggaagtaaagagggtgcaagacattcttt

SEQ ID NO: 294397 - DNA, 100 bp, Homo sapiens
cttgttggaagaatactaccagaacatgacctttgacctgccatcagatgccacagtggtgctcaaccgcagctcctgtggaaaagagaacacttctgac

SEQ ID NO: 294398 - DNA, 114 bp, Homo sapiens
aaaaacagctaaagcagcaaattccaagtcaaaagagagtgatgaacctcaccattctaagaatgaaaggccagcacggaaagtagtagatcatccaaaaaggcgatttggtat

SEQ ID NO: 294399 - DNA, 99 bp, Homo sapiens
gtcaaagaactcatgcaagtggaacttacagcttccttgatcggactcagcattcagaactgtggtgtatggcgagcccatcactgccagcttgggaac

SEQ ID NO: 294400 - DNA, 100 bp, Homo sapiens
acccgttttggcattgctgctaagtacatgctggattgtagaacttctctctctgggcggcctgtggtaatttgtgataaggaggatactgagaccatta

SEQ ID NO: 294401 - DNA, 50 bp, Homo sapiens
agatgtcttacttgtgaaactctggttatattctgggcactaaatgaagg

SEQ ID NO: 294402 - DNA, 82 bp, Homo sapiens
ttcagatgggatctttccggatcaatccagatggcagccagtcagtggtggagagtggctacacacttataaggaaagatag

SEQ ID NO: 294403 - DNA, 100 bp, Homo sapiens
ctggccgcggcccgcctcagcatctggtacagccgaatgagccccgctagggccgccccgcgctgagagcccagccccgccgctgcccgcccgccatgtc

SEQ ID NO: 294404 - DNA, 101 bp, Homo sapiens
gtccctggattcggggctggacgcagcaagcggggcgctgtgtccccaagctccccgtcctcggtgttaatgtaccgcggtgaggctcttgaagatttcac

SEQ ID NO: 294405 - DNA, 78 bp, Homo sapiens
cgtggaagcggccaccgactactgtcagcagctgtgccagaataccacttgggtcgctcgaggaggaagagtgtccca

SEQ ID NO: 294406 - DNA, 83 bp, Homo sapiens
tgaaaacatccagctcccaccggggtcaaaatgcagatcttcgtgaaaacccttaccggcaagaccatcacccttgaggtgga

SEQ ID NO: 294407 - DNA, 100 bp, Homo sapiens
agcagagcgactcggttaagggaaagcgccgagatgacgggctttctgctgccgcccgcaagcagaggaatgaattcagatatttccagagaatgaccac

SEQ ID NO: 294408 - DNA, 155 bp, Homo sapiens
ctcatgggcaaaaggaggagctggctaaggtgtataattggattcaaagccagactgtcactcaagaaatcgacattcaagacatggatttgattgacatactttggaggcaagatatagatcttggagtaagtcgagaagtatttgacttcagt

SEQ ID NO: 294409 - DNA, 74 bp, Homo sapiens
gtccagagcattgtccagactgatgcctgtgaggagccaccaacatttgaagctatggagctcattggtaaacc

SEQ ID NO: 294410 - DNA, 100 bp, Homo sapiens
caggtgcagatcaagaccctggagggcgagttctcggtcaccatgtggtcctcagaatgacatagggactgcaaggaaggaacagctgctggaaacgaag

SEQ ID NO: 294411 - DNA, 94 bp, Homo sapiens
gaaagtcctctcgggagaagcagcgcctgttcccggggcagatccaggttcagacctgcctagagctggaacgttacctccagagcgagccctg

SEQ ID NO: 294412 - DNA, 82 bp, Homo sapiens
ggaccggaggagacatcggcctctgcaggcttgccgaagaagggaggtccggcctctttggcctacccccgttggctccgct

SEQ ID NO: 294413 - DNA, 100 bp, Homo sapiens
gcgagagcgagaggacccagtcccacatctcccagttactgtaaaatggggaaaggagaaatttgaaggtgtagaattgaatacagatgaacctccaatg

SEQ ID NO: 294414 - DNA, 100 bp, Homo sapiens
ctgacctctgacacgtattgtctcaagattaaagagtcattcttatagaagagcatcagaggaagataaaaaagaatcctcaatgtcaggcccctgagcc

SEQ ID NO: 294415 - DNA, 50 bp, Homo sapiens
acgtggagatcaagcgcagcgatgcttcggaaccaaaaagaagcttccca

SEQ ID NO: 294416 - DNA, 88 bp, Homo sapiens
cctgggaggagttcagccgcgctgccgagaagctttacctcgctgaccctatgaagacaaatttacatgtattggagaccagaccaga

SEQ ID NO: 294417 - DNA, 50 bp, Homo sapiens
aaattctgcgtgctctatctagcagagtttaaactcatatcccaggcata

SEQ ID NO: 294418 - DNA, 74 bp, Homo sapiens
ttgaccgctttctccagtggaagtggttggaaaggtggtttagattagaatccaaacaaggaaaacgaatcaaa

SEQ ID NO: 294419 - DNA, 75 bp, Homo sapiens
gccagctctagctcacaggttacagccagcacatcggaccttggacagggcccagcacaggggccctggaatgtg

SEQ ID NO: 294420 - DNA, 100 bp, Homo sapiens
ggctgcaactgcctgccgcgccgagggaccgccgggcggcggaaagcagtcacccacaaaagctgtatataatgccagacattggaatcatccagattca

SEQ ID NO: 294421 - DNA, 50 bp, Homo sapiens
tcccacggatagcaagagtgtgcaagtgtttggccagcgcttggatgaga

SEQ ID NO: 294422 - DNA, 82 bp, Homo sapiens
caacctgggattcaaatgaaagtgaaaatgttagaagaactcgtgagccggattgatgagacggtctcgccacattgcccag

SEQ ID NO: 294423 - DNA, 46 bp, Homo sapiens
cggacccgctgtggccacgtgaagtgtttggattgtgagctatttc

SEQ ID NO: 294424 - DNA, 50 bp, Homo sapiens
ccgagaccgcggccgggaccgaggcatattcaggaggccttactacgtgt

SEQ ID NO: 294425 - DNA, 82 bp, Homo sapiens
cctacgtcccgctgccgtcgccgccgccaccatgcccaagagaaagcgtccgtctccaagagagtatgaagagagtgcgtct

SEQ ID NO: 294426 - DNA, 75 bp, Homo sapiens
cgaccacctcttcaagctgctcatcatcggcgacagcgcttccttcaaaatgtctactgttcacgaaatcctgtg

SEQ ID NO: 294427 - DNA, 50 bp, Homo sapiens
ggcggtgcctggacgtacaacgggaagatcagcttctatataccaccacc

SEQ ID NO: 294428 - DNA, 98 bp, Homo sapiens
gacacacccggccggatgctggagaagggcgtcatatctgctgtgatccaaaatcccttcagcaatggtggcagtccggcggccgaggctgtcagcgg

SEQ ID NO: 294429 - DNA, 100 bp, Homo sapiens
gcggggacgctggctcgctccctccctccctccctccgacgctccactatcgaaaacgatcggcatcccggggtcgctctggaagtcggtctagaagtcg

SEQ ID NO: 294430 - DNA, 51 bp, Homo sapiens
gtgaagtggaaaggatggcccccaaagctcatcttggcagccaacagggat

SEQ ID NO: 294431 - DNA, 83 bp, Homo sapiens
ccggggcagggactgccgctgcggagaggaagacgagtagatggcccgggacaagccacgcctcctagctgccctggaagtgg

SEQ ID NO: 294432 - DNA, 75 bp, Homo sapiens
tggaggagaaggtccgcttcaagacagtcattttgtttactcattcagccctgttgcaggtcccaataaactctt

SEQ ID NO: 294433 - DNA, 74 bp, Homo sapiens
ctagcacctgtgttgctcagaaaacccagtctcgctaaagcacttcagaaccactggttcacctacaatgagac

SEQ ID NO: 294434 - DNA, 97 bp, Homo sapiens
gctgggtaggagtggtgaagctggaacagccagaattggacccgaaaccatgcctcactgtcctaggcaagagaggaacgaagggcatcctacgact

SEQ ID NO: 294435 - DNA, 100 bp, Homo sapiens
atgccacctatgattacagagtggtgagagcggctgaggaggctgcgtccacactggccagttccatccacccggagcagtgcatcaaggtgctctgccc

SEQ ID NO: 294436 - DNA, 82 bp, Homo sapiens
ctgcagaaggtctctggagacatcttcagcagcgcccggcagaatggcgggaaggtgaggcacaagcggcaggccctgcaag

SEQ ID NO: 294437 - DNA, 90 bp, Homo sapiens
tcagggacgtagccatccagagtcaccaggagactaaagtccatcaaaaacatccagaaaattaccaagtctatgaaaatggtagcggca

SEQ ID NO: 294438 - DNA, 82 bp, Homo sapiens
gagcctcagttggaagcagccgatccagcctgcggagcctgtggggcaggttatttcttatgagggtcatggatatccccta

SEQ ID NO: 294439 - DNA, 98 bp, Homo sapiens
cagccgtgtgcagcctatcaagctggccagggtcagccatgtcatctgagcctcccccaccaccacagccccccacccatcaagcttcagtcgggctg

SEQ ID NO: 294440 - DNA, 75 bp, Homo sapiens
ggatagcacagtgcctcaatttgaagctccttctccatcacacagtgtttgggaaatgggaagtaatgacagctg

SEQ ID NO: 294441 - DNA, 96 bp, Homo sapiens
tggcggacggcgtggaccacatagacatttacgcggatgtcggcgaagagttcaaccaggcttgggcactgtttaaaggaaagttccgagaaggca

SEQ ID NO: 294442 - DNA, 100 bp, Homo sapiens
aacaatggcatttacagaaagagtcaacagcagtggcaacagatatggatcagaaactttcgaagttggtagaagagctcacaacttcaggagaaccccg

SEQ ID NO: 294443 - DNA, 96 bp, Homo sapiens
gatcataaagagacacataccaaattggatctatccaggaggcagttcccatgttatacgcagcagatacttacggagcattgtaatgaagtgtgg

SEQ ID NO: 294444 - DNA, 82 bp, Homo sapiens
atgacaaaaagtttgtcattaaacccatcgacaagaaggcacctgtttggtgcacctcgatttggaggaagtagggcagggc

SEQ ID NO: 294445 - DNA, 75 bp, Homo sapiens
cctcatgcaagcgagggacctgggactgctcacagccagattcgggaactggagcctctcctctgtcacagtgac

SEQ ID NO: 294446 - DNA, 100 bp, Homo sapiens
agtcagccctggaggcggcccattatttcacagaggacagctcctcagaagagctccacaatggccaggtcctcactgttctccggattgacaatacctg

SEQ ID NO: 294447 - DNA, 100 bp, Homo sapiens
cctggaggagccgcagtgggtcccggacaaggaggtgcacattcaggttcccgagcacaaacatcaagataacgttcactgccctgtccagcgagaagag

SEQ ID NO: 294448 - DNA, 83 bp, Homo sapiens
aagatctcaagatctggactactgttgaaaaaatttccagtgagacctaatctgggagcctgcaagtgacaacagcctttgcg

SEQ ID NO: 294449 - DNA, 90 bp, Homo sapiens
cttttaccatcttattaattcactctgctgtcaccactgactaaagaagagaaaactgcggcagagcaattcaaatttcacatgccagat

SEQ ID NO: 294450 - DNA, 123 bp, Homo sapiens
aaaggaatgaacatgtatttaaccaagttccaacaaaagaatgctgccgcagatgtatcggaacagtacaacatctaaagagtaaatttggaaaaggctactttttggaaattaaattgaagg

SEQ ID NO: 294451 - DNA, 100 bp, Homo sapiens
gcgggagttcaaggaggtgctgaagagcgaggagcctcctgacagtgggcctccaccattgccaacatcctccctcccagaaggttattatgaggaagct

SEQ ID NO: 294452 - DNA, 97 bp, Homo sapiens
ggcaacagttgtcctcaattgcgtaggaccaggctgggagagggttctgccctccttcatccagacagcaggtctcatcctaggtccttagagaaaa

SEQ ID NO: 294453 - DNA, 98 bp, Homo sapiens
aaagaagaagtatcagaaagcagggctgtattctgacgtttacaaaactacagagtttgaggaaccactggccaacctgttaaatgaacaacatcgga

SEQ ID NO: 294454 - DNA, 80 bp, Homo sapiens
agcagctacacaaagagggtcatctcttctattgtacctgcagagcagcccgacggccatggaggctgaagagacgatgg

SEQ ID NO: 294455 - DNA, 98 bp, Homo sapiens
gggtcttccagagcgtgaagatcaagatcgatgttcctcctgctgatcaagagaagctttttatccagaagttacgtcagtgttgcgtcctctttgac

SEQ ID NO: 294456 - DNA, 83 bp, Homo sapiens
ctttctggcctggaggctatccagcagcactacaaacaccactggtttcccgaaaagccgtccaagggctccggctaccgctg

SEQ ID NO: 294457 - DNA, 75 bp, Homo sapiens
gactactggggccagggaaccctggtcaccgtctcctcagttgtctggcgccgggagtgagaccctaaaacaaag

SEQ ID NO: 294458 - DNA, 75 bp, Homo sapiens
ggaaacaatggcatttacagaaagagtcaacagcagtggcaacaggtgtcgtgaaaactacccctaaaagccaaa

SEQ ID NO: 294459 - DNA, 95 bp, Homo sapiens
cggcggagcgccatggcctgcatcctgaagtatttgattttcatcaagcagctgatggtatccaggaacaacagagacaagaacaagcaggaaaa

SEQ ID NO: 294460 - DNA, 75 bp, Homo sapiens
aacagaatattggtcaagttgctgaccttgaagtatacaaaactaggatatgctggaaatacagaaccacagttt

SEQ ID NO: 294461 - DNA, 75 bp, Homo sapiens
cggcagtcagagtcaaaacagagcttttggaatctgaacaagggatatgaggccccaggattcctggcgaggtcc

SEQ ID NO: 294462 - DNA, 100 bp, Homo sapiens
cttcttacaacagggaagcagccctcaaggccagcggagtcttcagcacccccacaagcatgcaggtgatgctggaatcctctgtgtacctgactctggc

SEQ ID NO: 294463 - DNA, 90 bp, Homo sapiens
tgcaaatcattcagtgaatcccaactgttatgccaaagctattcctctacacagccgactagttatgatcagagcagttactctcagcag

SEQ ID NO: 294464 - DNA, 95 bp, Homo sapiens
agggaatggcagctgctgggaactatgcctgggtcaaccgctcttccatgaccttcttaacccgtcaggtggggtggaagacaacccgtgagtat

SEQ ID NO: 294465 - DNA, 98 bp, Homo sapiens
cagccaggccctgcctccagctgggctgagccctctgtttacagagatttaccgcattgtttctcagaagcaaatgtcagacagacgcgaaaatgaca

SEQ ID NO: 294466 - DNA, 74 bp, Homo sapiens
gaactgtcacaagggccctccccacagcaaatctggagctgagctgcccctcctggacctgatgaagctgtacg

SEQ ID NO: 294467 - DNA, 78 bp, Homo sapiens
ttgaacttaatacagcaagaaagaccatcaagtttaccaaatccagcaactatcacaagaatactccttagccacttc

SEQ ID NO: 294468 - DNA, 100 bp, Homo sapiens
ttggtttcccgcacaaggcagcaggattgcccatgaatgaacatgggtgaaatcgttggatacagatggctcccgcaaagaagggtggcgagaagaaaaa

SEQ ID NO: 294469 - DNA, 80 bp, Homo sapiens
agagtaaagttgtgctcaacgggtgagttctgcatcctggtacttcctcaatgtatttgggcttcggagcatttactctc

SEQ ID NO: 294470 - DNA, 50 bp, Homo sapiens
ctggagcaagtcgctcacctgaaatgaactgaacggctcttgtatgtggt

SEQ ID NO: 294471 - DNA, 100 bp, Homo sapiens
gtgcgcgctgcctacgaggctttctgccgctggagggaggtctccgccaaggattcctgagctgaaatgcagatgaccacattcaaggaagaactttctg

SEQ ID NO: 294472 - DNA, 98 bp, Homo sapiens
ctgaatgacatctacctccatcaggaccccagatgtctgacagccctgtgtgacaccaagataagtaacatcacacgcgctgcaacgtgtggattctg

SEQ ID NO: 294473 - DNA, 82 bp, Homo sapiens
ccgcagcagggcagcccgcactcgctgccgccgccactcacgctccactgcaacatcacgagaggtggagaagagcgagtac

SEQ ID NO: 294474 - DNA, 75 bp, Homo sapiens
ggagtcatgagcgacagcggcgagcagaactacggcgagcgggaacgcgctcatgttcaacaacgagctcatggc

SEQ ID NO: 294475 - DNA, 100 bp, Homo sapiens
tgataggctgcgctaccggaatgtcatccagcgagtgattagattagtgacaagagctggggttaggatccggttggactctgacatcggatgccctcaa

SEQ ID NO: 294476 - DNA, 83 bp, Homo sapiens
gggggcagtcccgggagaacctgcggcggccggagcgcctcccgcgacgatgcccctcaacgttagcttcaccaacaggaact

SEQ ID NO: 294477 - DNA, 100 bp, Homo sapiens
gaggagcagttgtctgatgaagagaaggtgtcttctctttagggatggtgaggttggaaaaaggctcctgtaaccctcctccaggatgaaccacctgcca

SEQ ID NO: 294478 - DNA, 82 bp, Homo sapiens
caagtacctttatgaaccagtgtatcccaaacgccacaggtcatcatctggatcatcccattctggttcccgttcaagttca

SEQ ID NO: 294479 - DNA, 82 bp, Homo sapiens
gaactgtttgtccttcgattagcatacaggatgtggaggcaaagaccatgcggctggaagaacatggcaaagtggtgctggt

SEQ ID NO: 294480 - DNA, 75 bp, Homo sapiens
cctgaacatcatgaattcccaagaaggagccactgaggcggctcccagctgcgttggcgacatggccgacacccc

SEQ ID NO: 294481 - DNA, 98 bp, Homo sapiens
cagatctttgctcctgacgtccctcagatgcacgtgattgaccacaccaaggggcagccgtccgaaggcgagagcagacctatgaggaccagcacagc

SEQ ID NO: 294482 - DNA, 75 bp, Homo sapiens
ccagaagatgattttccagataattatgaaaagtttatggagactaaaaaagacatttgtcttcaccgacagccc

SEQ ID NO: 294483 - DNA, 74 bp, Homo sapiens
tagtcgcgggagccacgcagaggacgccggaacaccctggaagccgagaaatgcaacacagtcactcctggcgg

SEQ ID NO: 294484 - DNA, 50 bp, Homo sapiens
gcattttgctgtctcctcctaatacgagagaacgaggtgctcaaagtcca

SEQ ID NO: 294485 - DNA, 80 bp, Homo sapiens
agaatttcctctgaagcaccggcgccatgtcagaaccggctggggatgtccgtcagaacccatgcggcagcaaggcctgc

SEQ ID NO: 294486 - DNA, 75 bp, Homo sapiens
gcccgtgcctggagtctggaattcagaacgtcagcacctgcaggttcagtgcttctcagcttcacgggaaagggc

SEQ ID NO: 294487 - DNA, 100 bp, Homo sapiens
cggtacttctgccactgctgctccgtggagatcgtcccgcgcctgccggaaagaccacagcaagattctttcattcgtctcctcctagcctgggggacca

SEQ ID NO: 294488 - DNA, 100 bp, Homo sapiens
gggagagtagcagtgccttggaccccagactgctgagcagagagtctccttcaggcaccatgaaagctgtgctgcgcaaggctggaggcacgggccctgg

SEQ ID NO: 294489 - DNA, 95 bp, Homo sapiens
gagatacagaaaccagcctcgaggtccagttggaaatgcatgcagcagattggaataaatatgatgaccgattgatgaaagcagcagaaaggggg

SEQ ID NO: 294490 - DNA, 99 bp, Homo sapiens
cagaggccataggccccagcaccatcagggaccttgctgtggctgggcctgagatgcagcaatgttgtggagaagtgtgttactcacgcctcacgtacg

SEQ ID NO: 294491 - DNA, 100 bp, Homo sapiens
gaaacgaggctacaaggctgggctggggaagtacacaagtggatagatacttctcaagacatcacacagcgtgagtcaatcaaggagggaagccacaagc

SEQ ID NO: 294492 - DNA, 75 bp, Homo sapiens
tctgctgcgaatctccggcctcggtcttattagtaggtaagaaacagctgctcctccacctccaccccagcccca

SEQ ID NO: 294493 - DNA, 86 bp, Homo sapiens
cctggtgcctcccgcctccgtgtgccctggttgtgagaagacgtctgtgtcgtgcgacaatgcagatcttcgtgaagactctgact

SEQ ID NO: 294494 - DNA, 74 bp, Homo sapiens
cccagcgcagtgaagtggtgagcctttttgtcactgaaaacccgcctagtgccaagcaaccctccaagatgcta

SEQ ID NO: 294495 - DNA, 97 bp, Homo sapiens
atcgacgtcgtgatccagaagtccagagctgaggactgcctgtttgcaggacctgagagtcagtatactaagactgcccaggagattgtgaacgtct

SEQ ID NO: 294496 - DNA, 75 bp, Homo sapiens
ctacaaagaacagctggctagactggaggagaggatgtccctggtagatttgggaaagaagcttttagaagcggc

SEQ ID NO: 294497 - DNA, 100 bp, Homo sapiens
gatcaaggcagttttcttctttgagaaactatcccagatatcatcatagagtcttctgctcttcctcaactaccaaagagacagggtttcgccgtgttgg

SEQ ID NO: 294498 - DNA, 74 bp, Homo sapiens
ccgagttcaacatcctcctggccaccgactcctacaagaagttccacctggtgccaagcatcaacaccatgagt

SEQ ID NO: 294499 - DNA, 74 bp, Homo sapiens
gcaccagggccggccgccaccgcctctagaacgcggaggaggtgggatgcagatcttcgtgaagaccctgactg

SEQ ID NO: 294500 - DNA, 76 bp, Homo sapiens
cgagaaggtggacgtgctggtgtctgagtggatggggacctgcctgctgatttatcatagaatccccgactcagac

SEQ ID NO: 294501 - DNA, 75 bp, Homo sapiens
ccgcagtatcatgctggccaagaagatcatcattaaggacggaggcacgtttggaaattttagcattcaggtgcc

SEQ ID NO: 294502 - DNA, 49 bp, Homo sapiens
agctggaaccaaatgtgacaaggtgatcgtgcagtccggccgccacccc

SEQ ID NO: 294503 - DNA, 100 bp, Homo sapiens
tcaggctgggaggaggaggaggagagctgtgctctgtggaaggggtgagaactttctgtgtgccagtggaatctgcatccccgggaaactgcaatgtaat

SEQ ID NO: 294504 - DNA, 100 bp, Homo sapiens
caaccccagttgctttgccagcctggctgggctcaggagtggaagatagatgataagcctgtaaaaattgacaagtgggatggatcagctgtgaaaaact

SEQ ID NO: 294505 - DNA, 100 bp, Homo sapiens
gggcgtcggacctgcacgagctgtctggtctccacctctgggcaggagagttgccgaccacctcgggggtgctttctctgcgcttgaacatctatagctg

SEQ ID NO: 294506 - DNA, 90 bp, Homo sapiens
gaactcgtgagccggattgatgatatccttggaacagaagatcttattgtggaagtgacttccaatgatgctgtgagattttatccctgg

SEQ ID NO: 294507 - DNA, 100 bp, Homo sapiens
gttttgagaacagagtgctgttttagagctggcagcagcatctcagcccaagagaagttttgctgctgcagcccattgagagtgacgacatggagcacaa

SEQ ID NO: 294508 - DNA, 100 bp, Homo sapiens
gtggagaccttacagagaatgcacactacatttgagcatgacatccaggctctgggcacacagccaaaacctattgatgtacaagtcattacacaccaca

SEQ ID NO: 294509 - DNA, 100 bp, Homo sapiens
cgtctgcctcaaggaggagtggatgaagtgcccctgggcgctgggattgctctagcctgtaagtataatggaaaagatgaggtctgcctgactttatatg

SEQ ID NO: 294510 - DNA, 100 bp, Homo sapiens
tctaattatgccaactttgagctggatcttggcaagaaagtcctaaacctgctgaagtctattatcctcccagtccacaacgctgaaccgtggctggacg

SEQ ID NO: 294511 - DNA, 97 bp, Homo sapiens
ggccggtgaagcagtgcttcgtggtgactgaaaaaggtcaagtctggcaccatctttgacaacttcctcatcaccaacgatgaggcatacgctgagg

SEQ ID NO: 294512 - DNA, 75 bp, Homo sapiens
agatgacgacacgcctttgcacgacgctgccaacaacgggcactacaaggtctttcccgcggtgacttcccttgg

SEQ ID NO: 294513 - DNA, 83 bp, Homo sapiens
agaggagatgcgtgataccaacgatggtggtgtggtacctatttcagattgtttcagcagtgagctgcatccataaagctgga

SEQ ID NO: 294514 - DNA, 75 bp, Homo sapiens
gatattgatgccttaaatgggagggaaacaaagcttagcaggagaggagagccagagaagtgacagggaagctac

SEQ ID NO: 294515 - DNA, 100 bp, Homo sapiens
catttaaccagcatggctacttcatattttggaaagcagtttttaagacaagagtggagtcaacatatcaatggagcaagtcacagtcgtcgatgccagc

SEQ ID NO: 294516 - DNA, 100 bp, Homo sapiens
gagttcacactgaagagcaaccctgaaaaattactgaatgtgaagaaattacctgccatcctggctggacttgaccccagggacattgtggctgtgctga

SEQ ID NO: 294517 - DNA, 100 bp, Homo sapiens
gcagtgcttgctgctgaacctgagctgcaagttggaattgatataatgaagactagttttccagcttttggaaagaacaaacagtggatttgaagaatca

SEQ ID NO: 294518 - DNA, 90 bp, Homo sapiens
gccatctgtggtgccaattgaaggagagaagatgactgaggaggaggtggagaccgttctggcaggacacgaggacagcaacggctgcat

SEQ ID NO: 294519 - DNA, 101 bp, Homo sapiens
taacgtcatggaggatgaacgacaggaatggtttgcagtgtatgtggaacttaatcagcaaattgcagcactcttgaatgctggcgatgaggaagatcttg

SEQ ID NO: 294520 - DNA, 75 bp, Homo sapiens
tgtatccacagggccacagcgacaccactgatgaagggcgccctaatggagatcatccagctcgccagcctcgac

SEQ ID NO: 294521 - DNA, 74 bp, Homo sapiens
ggggaagcgggacaatcgggtgacaacagcagttctgtagagagtttaaatatgaaggaatggcaggacgggct

SEQ ID NO: 294522 - DNA, 100 bp, Homo sapiens
agtagaggatggtgcaaccatgacttttttcaaggtgatggtgtttgtacatgctcgaaatgccactgtaagaacagctatgtctctaatagaaagagca

SEQ ID NO: 294523 - DNA, 75 bp, Homo sapiens
ggagaatcgcgaggcagagcgggagcgcgcagccagcccattgcagatgcaaaggctcctgagaagcgggcctca

SEQ ID NO: 294524 - DNA, 97 bp, Homo sapiens
gcaccgggtccctcgcccaggtccccttggacaaatggagtaatcaagtcagaggattatatgacttttatctgcctagagaagaactatggatcta

SEQ ID NO: 294525 - DNA, 83 bp, Homo sapiens
gaaccagctcgggggccaactctgaggagtccactgcagcagtgaaaatgcctcgtgtaaaagcagctcaagctggaagacag

SEQ ID NO: 294526 - DNA, 100 bp, Homo sapiens
gtcctgtacagcatcgccgagaaggttggtttgttggaccttgaactcaatcggctgacgaaagcgctatttttggctttagttgctctttccattgtta

SEQ ID NO: 294527 - DNA, 112 bp, Homo sapiens
gtgggacctattgttcagttacaagagaaactttatgtgcctgtaaaagaatacccagatgacatccaggcagaaattgatgcccacaatgacatatttaaaagcattgacg

SEQ ID NO: 294528 - DNA, 83 bp, Homo sapiens
aagacgtagaggaagtggagatcggcagagacaccttctggcccgaacgtaaaacagcaggggccgatcctgacaaagcacgg

SEQ ID NO: 294529 - DNA, 82 bp, Homo sapiens
cgagcgcgagcggcgcgagaaactggcaaacgcccttctggaaaaggaagtgataaactatgaggacattgaggctctcatt

SEQ ID NO: 294530 - DNA, 50 bp, Homo sapiens
cccaggcagaccttgcagtcaaagtgaagtaatcccaagaacattctgtt

SEQ ID NO: 294531 - DNA, 82 bp, Homo sapiens
cgggcagtttgtcgaacgatgttggactcatagtcactgccagaaagttggctggagttgtcttccttggagtcgggctgtg

SEQ ID NO: 294532 - DNA, 101 bp, Homo sapiens
gttactgggagataacttcgaaggattttgcaacaaattcgagctgtccgactctgagaatgtcttcccaagggattgttgaagaaacttctgaagaggga

SEQ ID NO: 294533 - DNA, 74 bp, Homo sapiens
ttgaagctgctggactagagagagagcggaagatgctggaaaagtgggacacagcaggccaggaaagatttcga

SEQ ID NO: 294534 - DNA, 100 bp, Homo sapiens
ccagcgtagctgaatccagtaccaaaaacgtcaacaacagttttacgttgcccagaagattgttgccacaaggaagaagcagcagctgtccataggaccc

SEQ ID NO: 294535 - DNA, 100 bp, Homo sapiens
ctgtagtgagctatgattgcaccagtgcactccagcttggatgacagaggtgtcgtagtcattcttcagcacaattcttaattggagaccaagaaccctg

SEQ ID NO: 294536 - DNA, 73 bp, Homo sapiens
gtggagtgttctaaccaacaaggaagacgacagttgcctgctgtcagtaagctggtacagaaggttgacgaaa

SEQ ID NO: 294537 - DNA, 75 bp, Homo sapiens
tttgcaacgcagttcggagttattatgaggcatttattaatacagcaaaagaaatttatgaaaaaattcaagaag

SEQ ID NO: 294538 - DNA, 50 bp, Homo sapiens
acattgcattgcctcttatgaagatctccagtctatgtgctgaagaagca

SEQ ID NO: 294539 - DNA, 100 bp, Homo sapiens
agcatgcctattctgaaaatgctgatttttctggactcacagaggacaatggtctgaaactttccaataggtcctgtaataaagagggatccgaacaagc

SEQ ID NO: 294540 - DNA, 97 bp, Homo sapiens
tgccgctgttgctgctgctcggcctggcccgcggcgccgcgggagcgccgggccccgacggtgctgttccagaattcaaagaagagaaactgcagct

SEQ ID NO: 294541 - DNA, 82 bp, Homo sapiens
tgctggacaccagggagcactgtctgaacgagttcaacttcccggatccctactccaaaggtggtgaaggaggagatctttg

SEQ ID NO: 294542 - DNA, 82 bp, Homo sapiens
gttcctccccgggcccctgagccatgcccatcgcagccgccccgaaggagccagctggacagtgccacatcgcttatccagg

SEQ ID NO: 294543 - DNA, 99 bp, Homo sapiens
gtccgcggccctgctgagagggaaaaggacgccgcggtcttcccaggcgtcgcggagagcagacaatgcagatcttcgtgaagactctgactggtaaga

SEQ ID NO: 294544 - DNA, 98 bp, Homo sapiens
tggtttctaaaatgatcattgaaaacttcgaggcactcaagtcctggctcagcaagactctcgagcccatttccaggaatggatggaggtgctttaac

SEQ ID NO: 294545 - DNA, 75 bp, Homo sapiens
ctcactgtgcgggctgctgctccagagggcggaggtaaaagcagctgttaagtatgcccttagcgtaggctaccg

SEQ ID NO: 294546 - DNA, 82 bp, Homo sapiens
agcagttcagaagagccaaggaataaacatgcaatgaacccaaaagggtcacagactgggatgagcaacgggctgaaggcac

SEQ ID NO: 294547 - DNA, 80 bp, Homo sapiens
cctgcggtggattgactacggcaaagtggccactcaggtcgcaatggaagaagagatcgccgcgctggtcattgacaatg

SEQ ID NO: 294548 - DNA, 80 bp, Homo sapiens
ccgagtgctgctcctgtcattgtggccatggacgatgtgaagttcatttccaatccgccctccatggtggcagcggggag

SEQ ID NO: 294549 - DNA, 75 bp, Homo sapiens
cagtcttccctggcaagattcttctgaattgtgctgccttggccaaaagagtctcacaccattttgctggtacag

SEQ ID NO: 294550 - DNA, 100 bp, Homo sapiens
cgggtgggaaatggcggagtatctggcctccatcttcggcaccgagaaagacaagtagaatcactgtggactgagacccacctttctagacctgaagccc

SEQ ID NO: 294551 - DNA, 100 bp, Homo sapiens
aacccgagagcgtggagcgggctgggccagtgccctgcaggagtcattaaatcaaaacttcatgctgatcatcacccaccgagaagtccagcgggagtac

SEQ ID NO: 294552 - DNA, 83 bp, Homo sapiens
attcattcagtggtgttaaggattccaacaacaattccgatggcaaagccgttgccaagcttaaattccccactcggccaaag

SEQ ID NO: 294553 - DNA, 100 bp, Homo sapiens
ttggcatactttgtgcatgcagcagggctgggacctgacggtgaagatgctggcgggcaacgaattccaggtgtccctgagcagctccatgtcggtgtca

SEQ ID NO: 294554 - DNA, 100 bp, Homo sapiens
actttagttcatgtgacagactggatagagaagaaactggagcaagagtttcaggaatggaagttggatacactttgtgacttgtacgagacactgacca

SEQ ID NO: 294555 - DNA, 98 bp, Homo sapiens
ccgggtggtgatcttcagcaagagctactgtccccatagtactcggaacattggcaaaaagatgtcctgtcagcaattcattgccaacttggaccagc

SEQ ID NO: 294556 - DNA, 100 bp, Homo sapiens
tgggagcagttttcatggatgcccctgtttctggtggattcttttcacagacactatctgagacggtcctcaccgtcaagcagctccacccaaccccaag

SEQ ID NO: 294557 - DNA, 87 bp, Homo sapiens
atgtgcgccaggagtacccatgctccagcttttctgcagctcacccaaggctgctctccgctatgctgctgttcgtaccctcaataa

SEQ ID NO: 294558 - DNA, 90 bp, Homo sapiens
gccgcccgaagaggagagagcgcgggcctctaggaagacccaacatgagtgaagtttcctgcaagaaacgggacgactatttggaatggc

SEQ ID NO: 294559 - DNA, 74 bp, Homo sapiens
aagcttgaagggtttggttaaggatatctatagagaaatggggtttggtcactatgaagaagaagaaagctgtt

SEQ ID NO: 294560 - DNA, 80 bp, Homo sapiens
tctattttccctacgaaaaacagatctttttaagactgtgccctgtccacggtgcctcctgcatgtcctgctgccctgag

SEQ ID NO: 294561 - DNA, 98 bp, Homo sapiens
caggagtgtacgggaatgtgatggtattcacggactggatttatcgacaaatgaggcttccaaactacaaaaactttaaaggcacgattcaagaactt

SEQ ID NO: 294562 - DNA, 97 bp, Homo sapiens
gaggcctccccagccacgtggaactgggctctccagcctgcattccatggccaacagcagtgcagctgcagaagcacttctggaagcctcctgactt

SEQ ID NO: 294563 - DNA, 76 bp, Homo sapiens
catctgaaattaaaaagggaaggataaccccatcacaggtatgatctcgtgaaatcttgagagaaactgaatgacg

SEQ ID NO: 294564 - DNA, 139 bp, Homo sapiens
gacccggaacagaccgccgtgagagaggaggggtgccggccgggattcgcggcccggagctcgggaccgtgtggaagccagctctccaggccacggaagtcctctgagcagcctgttaccttctgcctcagtgccagag

SEQ ID NO: 294565 - DNA, 83 bp, Homo sapiens
agcagcagcagctccagcaggcgctggctcctgctcagttaataaaggtatccatggagaacactgaaaactcagtggattca

SEQ ID NO: 294566 - DNA, 50 bp, Homo sapiens
caaagttatggatgtcactgagaacctcagagtgacagagccaaaagacc

SEQ ID NO: 294567 - DNA, 82 bp, Homo sapiens
ttcttcctcctccgctaccaccaccacaccagaaactagcaccagccccaaatttcgttatggaggttttgatgactatggt

SEQ ID NO: 294568 - DNA, 98 bp, Homo sapiens
attttcctgagttccctgatccccacacctacatcaaaactccggttggatggcaagcatgtggtgtttggcaaagtgaaagaaggcatgaatattgt

SEQ ID NO: 294569 - DNA, 98 bp, Homo sapiens
acctgaagagaaggagcctgctgccaatggtgtggacaccgcagtgtgcttgaggagacttcagaaacgagaactggctcttcagagtaacctgaggt

SEQ ID NO: 294570 - DNA, 83 bp, Homo sapiens
gcggcgggggccgcgaccaggacgagcctgccacagtgactcaggtcactcaaggaactatccgaccagctgccaacttcgat

SEQ ID NO: 294571 - DNA, 100 bp, Homo sapiens
ttggagaacttctggagctggccaacgtgcaggaggaaagaccacagcaagattctttcattcgtctcctcctagcctgggggaccaggctcgaactgac

SEQ ID NO: 294572 - DNA, 75 bp, Homo sapiens
tggaggacatgcttctcgagctgctgccagatgactgatcatatattttgtgaagagtgcatgaccttatggttt

SEQ ID NO: 294573 - DNA, 90 bp, Homo sapiens
cacagttcctgggaaggtggagccaccagcctctccctggtgctttacaaggccaagtacggtccaatgtggatgtcctacttagggcct

SEQ ID NO: 294574 - DNA, 100 bp, Homo sapiens
ggccgtgctgcttatggcggcgctggagagggggcgctgagctgttgggatggcaagattattttatcataaaccccagtttgccattttggatgaatgc

SEQ ID NO: 294575 - DNA, 82 bp, Homo sapiens
cccgcgccgcctccccgcgccgctcgcgcagccatgtccgaggagaagcccaagctgctgatgcaaggaatcccctgggctc

SEQ ID NO: 294576 - DNA, 100 bp, Homo sapiens
gcggggaacgactgcggcgcgctgctggacgaagagctctcctccttcttcctcaactatctcgctgacacgcagatgaggacggggacttggttgcctt

SEQ ID NO: 294577 - DNA, 100 bp, Homo sapiens
tggacagccagggcaggaaggtggtggtgtgcgacaacggcaccggggtcttacttatccgagcccagacattgtataagaagtttgtgaagtcaactgg

SEQ ID NO: 294578 - DNA, 83 bp, Homo sapiens
ggcgggccagtgcggcaaccagatcggcgccaagggaattcacaattgaaactgaagggaaaacatttcagttaacaaaagac

SEQ ID NO: 294579 - DNA, 80 bp, Homo sapiens
tccaggcaggacagcatctttaaatcagagaccaaggacacacaggttaagaatagacccaccagcatttcgtgggatgg

SEQ ID NO: 294580 - DNA, 71 bp, Homo sapiens
gagccagccgctgttttgccggaggagcccctcaggcccccggaagctgaagaaacttggtaatctgaaac

SEQ ID NO: 294581 - DNA, 75 bp, Homo sapiens
gggaaactgcgaggcgaaggtgaccggggaccgagaaaaggacaggggcggcccgactgggcgatatttgggaga

SEQ ID NO: 294582 - DNA, 75 bp, Homo sapiens
gcgggaggtgttcgagaacgaccccgagacggatcccaaaatggctgggcgaaaacttgctctaaaaaccattga

SEQ ID NO: 294583 - DNA, 97 bp, Homo sapiens
gaattcccaagccaaagctttccagttgctgtggttggctgataaatatttgtcgaagaaagaaagagctgaaagctcgcacagtatggcttggatg

SEQ ID NO: 294584 - DNA, 82 bp, Homo sapiens
ttttctactgtaaagtcaccaacgagatcttccgccactacgagttcgagaacttgtcttggacaattgcaaatcaaatgat

SEQ ID NO: 294585 - DNA, 100 bp, Homo sapiens
ggaactgccggattccctggatcccctggtgctaagggtgatgctggtgcccctggagctcccggtagccagggcgcccctggccttcagggaatgcctg

SEQ ID NO: 294586 - DNA, 73 bp, Homo sapiens
agttaatttctatgcctggaagaggatggaggaaagagaagcctccggaccagaagctggttgttcgcagctc

SEQ ID NO: 294587 - DNA, 80 bp, Homo sapiens
cagcaacagctcggcgggctggaagcttcttaatgaagaggataactcagaatcatcggctatagagcagccacctactt

SEQ ID NO: 294588 - DNA, 83 bp, Homo sapiens
ctggagctgggtcagtccgccgctcaccccgcggccgcaccttcccgccttctcagcccgtggaccgggagcccgtggaccgg

SEQ ID NO: 294589 - DNA, 87 bp, Homo sapiens
tgttgctcaccccgcaggagaacgagtccctcttcactttcctcggcaagaaatgtgtggaaatacaactggagcacgcaaagcaag

SEQ ID NO: 294590 - DNA, 51 bp, Homo sapiens
cagcagcatgcgattctcgtggatttagaattctgcttggtcagaatcgtg

SEQ ID NO: 294591 - DNA, 50 bp, Homo sapiens
gagagcttcacctcttccttaaatatgccgagacgcatccagagctttcg

SEQ ID NO: 294592 - DNA, 100 bp, Homo sapiens
ctaaaggatgtgaccattttggcagctactaaccgtccagataggatagacaagcgatgaggcttcctctttgaagatcacaggtgagaagattaggtgc

SEQ ID NO: 294593 - DNA, 75 bp, Homo sapiens
tactgtcatcctacccaccataccacaggggtatactctagttgaatatgaaacatacaaggaagcccaggctgc

SEQ ID NO: 294594 - DNA, 98 bp, Homo sapiens
agctcgctggacacagccctggctgagctgagggagaaccacggccaagcagaccatctccattgccaaggccggcattctcaccacactcaatgccc

SEQ ID NO: 294595 - DNA, 51 bp, Homo sapiens
cgcgcccttcctcggcgggccggactgacctgttaccctccaaatcttctg

SEQ ID NO: 294596 - DNA, 75 bp, Homo sapiens
gaatcaataagccatggcatctaagaaatttgctgttaaaaactgataaatttcaaacggaagagagtggcagca

SEQ ID NO: 294597 - DNA, 75 bp, Homo sapiens
gggaagacatcactgattatgtctctggtcagtgaagaatttccagaagaggcagacctgttatcctaaactagg

SEQ ID NO: 294598 - DNA, 75 bp, Homo sapiens
tgggacgcgcactggtcggtgccggctcaggagccgggttccctgtattgaacactgatatacaaggaatgaata

SEQ ID NO: 294599 - DNA, 100 bp, Homo sapiens
gaaggagatgtccacactagcaacagaaccagacataagttcagaggaatctgtctccactgtagaagaacaagagaatgaaactccacctgctacttcg

SEQ ID NO: 294600 - DNA, 98 bp, Homo sapiens
ccaccgccgccatggtaggaaaaggtgccaaagggatgctggtcaaaatgcagatcttcgtgaaaacccttaccggcaagaccatcacccttgaggtg

SEQ ID NO: 294601 - DNA, 96 bp, Homo sapiens
tttccctccagctctgtctatcctaccaaggtaaactttcctgagaatggctttctctctcctgataaactgtctttgctggaaaaactcctaccc

SEQ ID NO: 294602 - DNA, 75 bp, Homo sapiens
ggcaaagcctttccaactggacagcaccatgtccaccaaagcggagcagtatttgatccaggctaccaacgagac

SEQ ID NO: 294603 - DNA, 98 bp, Homo sapiens
gacaagggtgggctgcagcctccagattccaaggatggtatcgaaggatgatcgcagtgatgtggagagcagctcagaggaagaagatgtgaccacct

SEQ ID NO: 294604 - DNA, 82 bp, Homo sapiens
gaggctgccgttcagcacccgtcgagcgtagctacagcaagctgggtagcaggcagatccaaaggatatcatgaagtttcca

SEQ ID NO: 294605 - DNA, 50 bp, Homo sapiens
ctctcatcaacaccaccgacagatgaaatgattctggggaccattctgac

SEQ ID NO: 294606 - DNA, 51 bp, Homo sapiens
tctgtccccacaattattctgacacatcatctcagagttggagcacctgac

SEQ ID NO: 294607 - DNA, 50 bp, Homo sapiens
ggagaaaatacggcattgctagtttctagaaaatttctccacaaactgag

SEQ ID NO: 294608 - DNA, 100 bp, Homo sapiens
gcaatttgaagatacatgagacagcagccaaacccccagttatcagggaataccaagagcagagagagcatccaggaacctagatctgattactacaatc

SEQ ID NO: 294609 - DNA, 90 bp, Homo sapiens
agctggggcaacaacccatgactggttgcagcattgcaggaagagaaaagtagtttgttggcagagaatcaggtattaatggaaagactc

SEQ ID NO: 294610 - DNA, 82 bp, Homo sapiens
gttgaacagtcctgtatcaaaactgaagatggtttgaaacagcttcacaaggctgctctttggcgtaaattgcaatcgatta

SEQ ID NO: 294611 - DNA, 100 bp, Homo sapiens
gaaaagataactttcgacacacctgtagacgttcgccaggtaaaggacttcagaaatgggcttgggaaccagctgagttcaggatcccacacctctgctg

SEQ ID NO: 294612 - DNA, 100 bp, Homo sapiens
ggcctcctcctgctgctactgtgtccagcgcagcttcttccagaccagctggtcttgcttctggagcatctcttggagcagaagactctgagcccccgaa

SEQ ID NO: 294613 - DNA, 100 bp, Homo sapiens
tgggggcaaggagaagatcctggcctcaagaaaggagaactagttatgaaccgtttcatccaggcccatccccagtggatcatgattcactggaatcgaa

SEQ ID NO: 294614 - DNA, 100 bp, Homo sapiens
tttgtcacctggctcgatggcattaaggatcagtgtccttcagtgatgtggctgtgggcttcacccaggaggagtggcagcatctggactctgctcagag

SEQ ID NO: 294615 - DNA, 101 bp, Homo sapiens
atgcagtgaaagaaacttcctcagtaaagcgtaaagatgtctttgaagcattttataaaaaagatttggcaaaaagactccttgttgggaaaagtgcctca

SEQ ID NO: 294616 - DNA, 90 bp, Homo sapiens
atggtggaactccctatggaggtcaataataacctgggtatcttgtggtctgaaagagaagaaattgaaactgcacaggcttacctagag

SEQ ID NO: 294617 - DNA, 50 bp, Homo sapiens
gtttctaggaaaggccggacaccaggattgccccctgtgggtcactttct

SEQ ID NO: 294618 - DNA, 83 bp, Homo sapiens
cgcagccttgggcctcgcgccggctatggccgtgccctggggctgagccctcaggctgaaggggatgctaagggagataaagc

SEQ ID NO: 294619 - DNA, 100 bp, Homo sapiens
cgggggcgacagggccgattccggagtggctgacaagctctctactgatgatctgaactccctcattgctcatgcacatcgtcgtattgatcagctgaac

SEQ ID NO: 294620 - DNA, 100 bp, Homo sapiens
tggagctggagaacgaccggctcctgctcaagatctcagagaaggaggaggtgaccacgcgcgaggaagctcttcgtgggcggtcttgactggagcacga

SEQ ID NO: 294621 - DNA, 74 bp, Homo sapiens
cactgcctttaaccctcagcctcagagtcagatgcaggggtcggtgtacccgagagaactgcaagtaccttcac

SEQ ID NO: 294622 - DNA, 75 bp, Homo sapiens
cagacacccctgaaatctgccaaaagccgcggagctggtgacccagaactgcgaggcttatgaggcccacatgag

SEQ ID NO: 294623 - DNA, 90 bp, Homo sapiens
gacaccctgaaggtcccggtgctcacttggacatgacatctgtggaatttaagaacagtatggagctcatcagagtatatcattgaagaa

SEQ ID NO: 294624 - DNA, 76 bp, Homo sapiens
gtcacagggaagaaagcgatttcctccgcctcttccaaagcgatcgtcagtatttaaacagatcacatcatgcgtg

SEQ ID NO: 294625 - DNA, 100 bp, Homo sapiens
ggatctttgtcctttgggatttctgaacttcagaaagccagtgttgatggctgattctgaaggaagatttccattaggtaatttgtttaatcagtgcaag

SEQ ID NO: 294626 - DNA, 98 bp, Homo sapiens
gtcatcctgctgctgaagatctggaagacgcgctcctgcgccgggtgattctgggggtccacttgtctgtaatggtgtgcttcaaggtatcacatcat

SEQ ID NO: 294627 - DNA, 75 bp, Homo sapiens
tgcacgatcctcaccgcaacattccttatccaatcccttaccgggtataactccaccagggaatgctccgactgt

SEQ ID NO: 294628 - DNA, 83 bp, Homo sapiens
ggagcgaaggctgaggtggcagcggcaggagagtccggccgcgacaggacgaagtcccgggcccagagcccggccagcaggag

SEQ ID NO: 294629 - DNA, 97 bp, Homo sapiens
atttcgagagacgctgactgtcgggcggtggtgatctctggtgcaggaaaaatgttcactgcagaaaacatggtaagaggcttagatgaagatgaga

SEQ ID NO: 294630 - DNA, 100 bp, Homo sapiens
ggaactctttgatgttgtggctaatcccttggtcaatgacctcattcatggcaaaaatggccttgtttgtatgaagtccagcacatctgtggttgagctt

SEQ ID NO: 294631 - DNA, 100 bp, Homo sapiens
gtctttttaaagaatcaacatgtattcacaggaaacccagcgtttgctggcagaaccagttcctggcatcaaagccgaaccagatgagagcaacgcccgt

SEQ ID NO: 294632 - DNA, 83 bp, Homo sapiens
catggtgcatggaaggaaagccaatgcgcagagcagtcattatggcgaaccttggctgctggatgctggttctctttgtggcc

SEQ ID NO: 294633 - DNA, 100 bp, Homo sapiens
ggtctgcagggcctgggccgccgctgctacctgcagcgccgtgtggcacgacacaaaaatcaggcttctgggaacttggcagacgcagcttagagagact

SEQ ID NO: 294634 - DNA, 98 bp, Homo sapiens
aggcggctcgggctcgggctccggtgtcatggagaaactccagctgggcccagagattctgcagcgggaaaatccaaggcttatttatgccaggctga

SEQ ID NO: 294635 - DNA, 100 bp, Homo sapiens
aaaggactccggaaaggccaagacaaaggcggtttcccgctcgcagagagccggcttgcaggtggatccataaagaacccagccaacccgcagagggagg

SEQ ID NO: 294636 - DNA, 101 bp, Homo sapiens
tatgtggtggacttggacacgtcccagctctctctgggcatctggaaagatcttcataaacaatgaatggcatgattcagtgagtggcaagaaatttcctg

SEQ ID NO: 294637 - DNA, 80 bp, Homo sapiens
gggctcgcgggtgaccgaaaggatcatgaactagtgacctggaaaggtaaaggaagcacctgatgaggctgaagtggtgt

SEQ ID NO: 294638 - DNA, 51 bp, Homo sapiens
gaaatgtatcaggtaacaaattagagtactggtgtggcatactcggacaga

SEQ ID NO: 294639 - DNA, 50 bp, Homo sapiens
tagatggtgacactgcagttgtattgcggaatgctgcagcactccttact

SEQ ID NO: 294640 - DNA, 100 bp, Homo sapiens
gatgagctggatggtgtgaaagcagcatgcccctgcccacagagcagccccccagaacagaaagagatgccagaaaaatccacactgcccctgcccgaac

SEQ ID NO: 294641 - DNA, 50 bp, Homo sapiens
cctggatccaggataacggaggctggcacaagcccaccgtactgttgtgt

SEQ ID NO: 294642 - DNA, 83 bp, Homo sapiens
ctcagctccgagtccagggcgagagtttatgtggccgaggcagacaagtggaattaggccttgctgcaggggacttcatttcc

SEQ ID NO: 294643 - DNA, 101 bp, Homo sapiens
caagtacctgcagatcctgacctctctgatgagatggatcggagcggttggttccccgaggcgtacgtgaaggctctggaggaggggcccgtgaatcccat

SEQ ID NO: 294644 - DNA, 89 bp, Homo sapiens
ttcatccctccggagaaaaagaatgtgaaattgactaaatacatggtaactgcgtcattgattggctggtatccaaccagtctgttagg

SEQ ID NO: 294645 - DNA, 100 bp, Homo sapiens
ttcctagtcagagaattcaactttcttcttttcttcattcatgaaaatgcagatccactgagaaagggaataagctctaagcgaaagacatgaggcctca

SEQ ID NO: 294646 - DNA, 100 bp, Homo sapiens
atcaacagggatgcccccggccgggagcagaagtacatgctggggaccaatcaccaactcacggatgtccttacggacctgtcagcggagagtgaggtgc

SEQ ID NO: 294647 - DNA, 88 bp, Homo sapiens
agacagttggcaagaaaaccccgaggagccctgttccaaagcctcctggaccgtccaagaactgcatcttcctcccgtgaggctggcc

SEQ ID NO: 294648 - DNA, 96 bp, Homo sapiens
cttaaaggcgatggtagcagataacagcctgtatgatcctgaaaggtgcagtggaggcttgcctcttgcatcagctgagacgccgtgccgctggct

SEQ ID NO: 294649 - DNA, 83 bp, Homo sapiens
acaagaagagccccaatggaaaggggaaatacgtggtctgctttgacccactggatggatcttccaatattgactgcctggcc

SEQ ID NO: 294650 - DNA, 75 bp, Homo sapiens
gtcatgtacaactgaagcaaagaggaaagcagacccatggctcaggtgaccaagaatatggcccaggtgaccaaa

SEQ ID NO: 294651 - DNA, 75 bp, Homo sapiens
gaagatatgtgagatggtggatgaatccccaggttggtaacaaggaagatgctgagaaggaagtagctatttcta

SEQ ID NO: 294652 - DNA, 96 bp, Homo sapiens
ggcagcgcgggatcccagcctcaggcgtgcgcggacggtgtgcgggcatgaaaacagccctggaagtctgccctggcgcctgcactgagactaatc

SEQ ID NO: 294653 - DNA, 100 bp, Homo sapiens
gtatgtaccaaatacatttataataggagtccagctattgctgctgttggtgatgtgtccaatctagatcccaacttctcatttgaaggcaccaaactgg

SEQ ID NO: 294654 - DNA, 75 bp, Homo sapiens
cagctctgcggctcgggccctgaggatttttgtccctgagtcatggaagacagaagagctgaaaagtcatgtgaa

SEQ ID NO: 294655 - DNA, 83 bp, Homo sapiens
atgttcttctaatactcctcctctaacatgtcagcgttattgtaatgcaacttgccaagaagtatcaccctgacacaaataag

SEQ ID NO: 294656 - DNA, 100 bp, Homo sapiens
tcggatccttctggagtccgtgtgccagcaacagagctgggtccgggtgtacgttggattggatgctgctggcaagacaaccattctgtataaactgaag

SEQ ID NO: 294657 - DNA, 123 bp, Homo sapiens
gggtcctggtctttggcttctcgactcggtcctgtttcgacagcgaacatgtcgcggcctgtcagacatgaagaggagcatcggcggcgtgaggaagaaatgatccgacacagagaacaggag

SEQ ID NO: 294658 - DNA, 101 bp, Homo sapiens
ccaccatcaagctgtctaagtccaaagatttttacccaggacttaaccaccaccatgtcgagcaaaagaacaaagaccaagaccaagaagcgccctcagcg

SEQ ID NO: 294659 - DNA, 80 bp, Homo sapiens
ggaaaataaggatctggcatgtttctacacaacaaaacattcatggagggggaaatgtcatttgtcagagtgaaccgctg

SEQ ID NO: 294660 - DNA, 100 bp, Homo sapiens
cgagatcatcaagttgtatagctgtatcattggcaacatgatttcggaccagttgctcttctgtgatgactgcgatcgtggctaccacatgtactgtctc

SEQ ID NO: 294661 - DNA, 75 bp, Homo sapiens
ttccaaatgaaaatcaagtagtgtttgccagagttgattgtgatcagcacttgacgggtcagtcttacgagaata

SEQ ID NO: 294662 - DNA, 75 bp, Homo sapiens
cgccatcttcgaacttagacttccggaaggactttggcgagggttgtgaccgagattcccgacgagagagactga

SEQ ID NO: 294663 - DNA, 73 bp, Homo sapiens
ccatcgcagttggaagcccatggggcagaaccaaaaacttttgctagaaaatcagcttttacgagagaaaact

SEQ ID NO: 294664 - DNA, 76 bp, Homo sapiens
cggggaagtggatgatgatgatgcaggaggcccagtgctctggcctgagttgggttgtggccttaccccaggtgaa

SEQ ID NO: 294665 - DNA, 90 bp, Homo sapiens
ggacaagtcctgcgcttggggatcctctgtacgcccgttcactgaagagaagaaggagagtggccacgttgattcagccaagcacctcca

SEQ ID NO: 294666 - DNA, 75 bp, Homo sapiens
ggcggagcagaacggattgcaggatcttggccctgattgcattcatctgcatagagaccatcatggcatgctccc

SEQ ID NO: 294667 - DNA, 82 bp, Homo sapiens
gagaaagtgcccaaacttcacagcattagggacaggaatggaacacacttggatgcaggagctaccaggaggctacggtcgc

SEQ ID NO: 294668 - DNA, 75 bp, Homo sapiens
gtaaatggagactttcagattaaaccagttgaattaccagaaaacagattttgaagatgtaactgagtttctgga

SEQ ID NO: 294669 - DNA, 75 bp, Homo sapiens
gcccagctaggcggagaatcgaggaggggttcccgtgcaccaattccagctggacatcactgtgaaaatgggacg

SEQ ID NO: 294670 - DNA, 74 bp, Homo sapiens
gcatcgtaggggtcagtgtcctcaccatgcccttctgcttcaaacagaggtgctgatactcaaagaaggtttaa

SEQ ID NO: 294671 - DNA, 100 bp, Homo sapiens
tctgctgtccttctttgtggagagcaaggatgaagtgaagctgccggccaaactgagcatcagcaaatcgctgaaagagtcggaggcgctgccagagaag

SEQ ID NO: 294672 - DNA, 82 bp, Homo sapiens
gcatttccaggggaagcgtgggctggaccaggatgtgcgggtgctgaaggtagtcaaggccgcacccctccttgtccatgtc

SEQ ID NO: 294673 - DNA, 80 bp, Homo sapiens
aatttcgagctaagggttacagtcctttaaatctggaaatttcaaggtgatgatgaacagtctacacagatggctgcaag

SEQ ID NO: 294674 - DNA, 96 bp, Homo sapiens
gttttgccacgtggatgtgaagatttcctctaaaaggaattacatgaatgacagtcttcgaaccaatgtgtttgttcgatttcaaccagagactat

SEQ ID NO: 294675 - DNA, 89 bp, Homo sapiens
ggaggaggatgctctgggctaggcgaggtgacagagttagtccttgataattgcctgtgtgtcaatggggaaattgaaggcctgaatga

SEQ ID NO: 294676 - DNA, 75 bp, Homo sapiens
cgcggtgcagggtaacatggcggatgcggaagatgtgttcagagcaacattgttttgttgacacaagcatttaga

SEQ ID NO: 294677 - DNA, 74 bp, Homo sapiens
cgtctgcggaagtgcagctgcctcagttcttagcgcagattagctaatcatcagctggataaagagaaagcaga

SEQ ID NO: 294678 - DNA, 98 bp, Homo sapiens
ttcattccgcagcagcactccgacaggatattaccttccaaatgatgatggagaattttatcagttctgttacgttacccataagggtgaaattcgtg

SEQ ID NO: 294679 - DNA, 82 bp, Homo sapiens
gaagaattcatgctcatccgggtttgatgagaagagggcagtgcagcagctgagagcatgtggtgtcctggaaaccatccga

SEQ ID NO: 294680 - DNA, 83 bp, Homo sapiens
cagaacgtgagggtgtaacttacaaaaaggagtccaaaactacttacctggaagaccttccaccaccccctgagtatgaattg

SEQ ID NO: 294681 - DNA, 101 bp, Homo sapiens
gctgctccagaaatctgatttataccgagtccactttcttctcgtgctcttaaagttccgtacagataaaggaagagatcccagttctgatacatatgagg

SEQ ID NO: 294682 - DNA, 100 bp, Homo sapiens
gggagtattatgaaaagatcgtgtgttccagagaacaagccttcagacatttgctatattgacgctgagctgtcaggggactcaggcttatgaggaggta

SEQ ID NO: 294683 - DNA, 75 bp, Homo sapiens
gcagcaccagcgtgcctttgggtgataagggcacacagcaagaaggaggccatcagcaaactgggaagaggaccc

SEQ ID NO: 294684 - DNA, 100 bp, Homo sapiens
gattcaccaaataagctatatactttggttacctatgtacctgttaccactttcaaaaatcccgtgctgatgtctttgaaagaaggctataagaagtcct

SEQ ID NO: 294685 - DNA, 75 bp, Homo sapiens
gtgctgcgagggcagaacctgggtatgagcagcagcgggacaatcttgcccaacagtcattcaacatggaacaag

SEQ ID NO: 294686 - DNA, 98 bp, Homo sapiens
cgaaaacacccggccttactgaggaacaaaggagtgtgaacatggctacgcctcttcattcccgtccatgccgagcccccgactgcagcattcaaagc

SEQ ID NO: 294687 - DNA, 74 bp, Homo sapiens
tggtgcagaagaaaccagccgaacttcagggtttccaccgttcgttcaagatgataatctacctcactttccct

SEQ ID NO: 294688 - DNA, 98 bp, Homo sapiens
ggcgcggctggggcgcggcagaggcttgcccgatcctcggccatgtcactgctctgcgtgcgcggatgagctttctgatgttagccaaggcggatcta

SEQ ID NO: 294689 - DNA, 50 bp, Homo sapiens
tttcattcgaggtttcgggccgtgtaaacaggaacatcgataagtagtgt

SEQ ID NO: 294690 - DNA, 74 bp, Homo sapiens
gggactacgacgtccctcaaaccttgcttctaggagataaaaaggtggtttgtgatgaaaatggttccaagggc

SEQ ID NO: 294691 - DNA, 100 bp, Homo sapiens
ctgtccccgaggaggggaccatgacacagttttaaaatcaaagatgggaaaatcggagaaaattgcccttccccatggccagcttgttcatggtatacac

SEQ ID NO: 294692 - DNA, 97 bp, Homo sapiens
cgaagcttgaaagacttggtaatggcgacgggtttggctccatggtccccttctcgatgcgcatcttgcacgcggagcttcagcagtacctggggaa

SEQ ID NO: 294693 - DNA, 51 bp, Homo sapiens
ggactaagaaacaagccttgtatagctcatggaatgctgtgtaaatgccct

SEQ ID NO: 294694 - DNA, 100 bp, Homo sapiens
catgtccctgtgggacacaatgcccccaagctgagatctgtatctgtggacctgaatgttgatccctcgcttcagattgacatacctgatgcgctcagtg

SEQ ID NO: 294695 - DNA, 95 bp, Homo sapiens
ctgcgatggggcgagaaaggtcccactgcagccctccaagcagctgggagtgtccactcgccttccaccagcatggcaacgtcttcacagtaccg

SEQ ID NO: 294696 - DNA, 90 bp, Homo sapiens
gggaactgcggacggtggcgggcgagcggctcctctgccagaggacacaactcagatgggaagttcatcgcccgggcacagcggatagag

SEQ ID NO: 294697 - DNA, 100 bp, Homo sapiens
gggagacgggtgaggtacaggctcagtctgcggccaagactccgtcctgcaagaggtgctcagcacagtggactttgtcgcccctgatgatcgagttgtc

SEQ ID NO: 294698 - DNA, 75 bp, Homo sapiens
caagccgcacctggagaagctgaccctgggcatcacgcgcatcctaggaattttcagatcagcatccagaaaatg

SEQ ID NO: 294699 - DNA, 83 bp, Homo sapiens
cagagtggagtatctggtgaaatggagaggctggtcgcccaagtatcatgatattagctggtttgacatcaagtcatttgtga

SEQ ID NO: 294700 - DNA, 82 bp, Homo sapiens
tcggaactgggaccaaggtcaccgtcctaggttaacacagaaatctgcctcctgggccatgccgcttctaaggcctgtttct

SEQ ID NO: 294701 - DNA, 75 bp, Homo sapiens
tctggagaaagcaagcaagcagcttcttccagaccagctggtcttgcttctggagcatctcttggagcagaagac

SEQ ID NO: 294702 - DNA, 90 bp, Homo sapiens
gaagctaccagaccaacacagcagacacagggagagcccgggccacccggacagatgggaccagaaggtcctggaggccagcagggctcg

SEQ ID NO: 294703 - DNA, 83 bp, Homo sapiens
gtaagcgcagaaagcaggcgaacccgcggcgcaataacgtggctcaagcatgttgatgatcaaggtagacaatattactacag

SEQ ID NO: 294704 - DNA, 51 bp, Homo sapiens
agaggaggaagtaaatcgagttagtcagtgttatccaagataaattctgtg

SEQ ID NO: 294705 - DNA, 100 bp, Homo sapiens
ttccttctggtggagaagaaagcagatcaccatctcttcaacttaagcctctggattccagtgttttacagttttccagagtttcgctcttgtcacccag

SEQ ID NO: 294706 - DNA, 88 bp, Homo sapiens
ccaatattcctgctctttacaatagtaaacagcttgaagactttttcaagagaactcaatttcctgtatctactgagtctcaaaaacc

SEQ ID NO: 294707 - DNA, 75 bp, Homo sapiens
gatcgacctcaagatgattcagtgcaagagagttgttaatgttggtgcttcccgtgctgctgttgatgctggctt

SEQ ID NO: 294708 - DNA, 90 bp, Homo sapiens
cacaccggagacttttggggggaaactaggtcgatggtcggcggcgcccggatgggcagctgagaaaccctggccctggatgcccatgtt

SEQ ID NO: 294709 - DNA, 82 bp, Homo sapiens
tccgtcccccgcgggtctgctctgtgtgccatggacggttgaagaagctggatctggcagctgcggcagcacacaccttctt

SEQ ID NO: 294710 - DNA, 96 bp, Homo sapiens
ggagaacaccccgagcgaggccaaccttcaggaggaggagggatacaattggtgtcatgatcggaatgtggttaccattttcagtgcacccaatta

SEQ ID NO: 294711 - DNA, 74 bp, Homo sapiens
cggttcgcgtctctctgctgcggcgcggggaccgctgtgctctcgttttcggctttgtgagaaaccttaccatc

SEQ ID NO: 294712 - DNA, 50 bp, Homo sapiens
aggacatcctggaagctgggaaaggtgcctgatcaactttctagcgggag

SEQ ID NO: 294713 - DNA, 74 bp, Homo sapiens
cggagatgtttccaaaggactggactgttatgcgcttggttgctaacaatgtatgcagagaatatttccaaaat

SEQ ID NO: 294714 - DNA, 102 bp, Homo sapiens
actgatgtgatggcccggggaattgatattcctgaagtcaactgggttttgcagtatgaccctcccagcaatgcaaggtctataagaaggagaaagctcgag

SEQ ID NO: 294715 - DNA, 83 bp, Homo sapiens
ctttgtccgaagagccaaaaatgaccaagtccctggacttctgcacggacctggccgtctccagtgccaacttcattcccacg

SEQ ID NO: 294716 - DNA, 90 bp, Homo sapiens
gccagatggaagcatcctgcctcgtcatccagttggggaaggtgtggctcattgactttaatccatttggtgaagtcacagattcactgc

SEQ ID NO: 294717 - DNA, 75 bp, Homo sapiens
tctctcaagtacccatcttggagggtacggaccccacatgaggaaaataaacagagttgtctttgttggaaactt

SEQ ID NO: 294718 - DNA, 100 bp, Homo sapiens
tcaccatcaaaatggaatgtaaccctagccaggtgaatggctcaaggtactaggttttgacaagcttgcatcatgcgtgagtataagctagtcgttcttg

SEQ ID NO: 294719 - DNA, 83 bp, Homo sapiens
ctggcatatctgggcgccaagccgcggagcctccagacggaacatccagtcatggataaaaatgagctggttcagaaggccaa

SEQ ID NO: 294720 - DNA, 90 bp, Homo sapiens
aagaagtaaactgaagttgcaaagcaacagtaatattgctgatagtccaactccaccgccaccacctccaccagatgacattcccatgtt

SEQ ID NO: 294721 - DNA, 74 bp, Homo sapiens
ttcaaaggatcagtttgaaaagaagaaaaatgataccttagaccccgaaccgttccacttccaaacatgagttc

SEQ ID NO: 294722 - DNA, 75 bp, Homo sapiens
gccagggtccctgaagagggaagacacgcggaaacaggttgggacaaacattcctatggttaccatggtgatgat

SEQ ID NO: 294723 - DNA, 98 bp, Homo sapiens
ggaaacgtctgctaagactgcttccaatgtagaagaggaaatctactttcttcaatgtgttaaccaatagtcaggcttcagcagaaaacttcccgttc

SEQ ID NO: 294724 - DNA, 75 bp, Homo sapiens
ccacagaattctgtgatgcccttgaccgtttctccagtttctacagccagagaattacatgaacgacagccttcg

SEQ ID NO: 294725 - DNA, 100 bp, Homo sapiens
gagtcctcaatccaacagcccagtgcttctgtctcgactgcactttgagaaggagcacgtgaattgcctctgcttacgttcaggccctgtcctaaaccca

SEQ ID NO: 294726 - DNA, 75 bp, Homo sapiens
gtccaatactcatcggcaagctgcaaggagaaatgtgatgctcagagggtgtggctgacaagctccaggacacag

SEQ ID NO: 294727 - DNA, 100 bp, Homo sapiens
tgtcccacgcatccctgctggcacagtgccgggctctgacccaggcgtgcgggtactcagaagacctggagaatacctgccctctccctgcaacatcctc

SEQ ID NO: 294728 - DNA, 100 bp, Homo sapiens
ctggacccaattcctgacagcttcattctgcaaccaccagtcttccacccggtcagagatgtcatcatcgctgcaagcgttgcaggaatgggcttggcag

SEQ ID NO: 294729 - DNA, 75 bp, Homo sapiens
atactactacatcccgcagtacaagaactggagaggatgaatttcacccattcatcgaggcacttcttccacatg

SEQ ID NO: 294730 - DNA, 101 bp, Homo sapiens
cgccccaagagcaccgcgagggtaaaagtatggtttcagaaccgaagaacaaagttcaaaaggcagaagctggaggaagaaggctcagattcgcaacaaaa

SEQ ID NO: 294731 - DNA, 75 bp, Homo sapiens
attctctcccaggccacaagacatttcctgctcggaaccttgtttactaattggagcgacagtgcccaggggtct

SEQ ID NO: 294732 - DNA, 51 bp, Homo sapiens
aaaggattgaactggatgacagcaaataccaagtcgccagaagaaaatttt

SEQ ID NO: 294733 - DNA, 82 bp, Homo sapiens
cagggcgctcctgagaccctccagcgctgcctggaggagaatcaagagctccgagtaaggtacctgccgtgggcagatctga

SEQ ID NO: 294734 - DNA, 50 bp, Homo sapiens
tggagccaccagcctctccctgtttcaccagtgatcattaaagaatgggc

SEQ ID NO: 294735 - DNA, 80 bp, Homo sapiens
aaaggttattggaattctgttcggtgtttaagccagcaatgccaagatctgttgtggtatttaccttgctgtggattgct

SEQ ID NO: 294736 - DNA, 100 bp, Homo sapiens
tgccagtggtagcgctcgtctggcggagctgggaacagcgccttttgatagtcctaagtaattgctgctatctagaacgtcacaccttcctaaatatcgc

SEQ ID NO: 294737 - DNA, 100 bp, Homo sapiens
acagaagcaaaagccttgatagcatggatttctgtgagctcactgctcccagcagtcttatggagacgcttgaacagcatctaaatacattagaaggaaa

SEQ ID NO: 294738 - DNA, 100 bp, Homo sapiens
caaacgccaagagatggattctcaggtggtgttcccactgatgaagagcaggcgactgggttggagagggagatcatgctggctgcaaagaagggactgg

SEQ ID NO: 294739 - DNA, 109 bp, Homo sapiens
gttttggagtcacacaagctaaagacgggccattttccagacctcatccagggagtgcatccgccccaacccttttccccctcgtctcctgtgagaattccccgtcgga

SEQ ID NO: 294740 - DNA, 82 bp, Homo sapiens
agggaaccctggtcaccgtctcctcagattgtctaaagccccaggaaaaatggtggaaaattcaccgtcgccattgccagaa

SEQ ID NO: 294741 - DNA, 75 bp, Homo sapiens
gcgctcagtgcttccagcagttcccagaaggactcttctatgagataaagaaatgggggctccgagcagtcaaga

SEQ ID NO: 294742 - DNA, 98 bp, Homo sapiens
cgagcttccgcgccgcccgcacgcgcgacctacctgggcgctccgcgcccccggatgctgcaggttcctaatgtgagaggctagacccagatcatgga

SEQ ID NO: 294743 - DNA, 100 bp, Homo sapiens
taagaattaaaagatgatgagaaataaggacaaaagccaagaggaggacagttcgctacacagcaatgcatcgaggtggcagcaaatgcacacattcctc

SEQ ID NO: 294744 - DNA, 97 bp, Homo sapiens
tccctcagcttggagagaatcagtgacggctataaagaggtatcagaatggcaaagcaacttaaccttccagaaaatacagatgattggacaaaaga

SEQ ID NO: 294745 - DNA, 100 bp, Homo sapiens
gcagccctgctgacagctacaacgagggtgtcaaggtcacgagaagagaatgccttctagatgcaaaatcacctccaaaccagaccacttttcttgactt

SEQ ID NO: 294746 - DNA, 90 bp, Homo sapiens
caagtggccatggggagcctcagcggtctgcgcctggcagcaggtacgtgccctggaggaggccaatgctgacctggaggtgaagatcca

SEQ ID NO: 294747 - DNA, 50 bp, Homo sapiens
aagttgaagctgttgatagtgacctgtttgattcacatgatgacagagat

SEQ ID NO: 294748 - DNA, 75 bp, Homo sapiens
acatcgcccaggaagcaatccaggcccagaaaaggttacttcctcagaatgttggcctcctgtatgttggaggtt

SEQ ID NO: 294749 - DNA, 103 bp, Homo sapiens
caaccggtcaggctggacgtgcacgcagcccggcgggaggataaagaccaccacggtgcagcggaactgctgcctgacgctctgcaacttcagcatccccgag

SEQ ID NO: 294750 - DNA, 100 bp, Homo sapiens
tggaaatgcaactgcatcccaggaacttggttatggttgtctcaaggttactttgacgcgcacgcccttgctatggactatcggagtttgggatttcggg

SEQ ID NO: 294751 - DNA, 50 bp, Homo sapiens
gcaaagcagcgaagattcgagtcaccagacggagtttcactcttgttgcc

SEQ ID NO: 294752 - DNA, 96 bp, Homo sapiens
gagtttcctgctgtcttcagccattttcaaaaccttgttctataatactttgtgctgggcaagagggatctaaggatcaccccttctgtgtcattc

SEQ ID NO: 294753 - DNA, 96 bp, Homo sapiens
cagctttcgccagatcctgcctcgcttccgaagtgctgaccatgaccggtgaaaggtgtagcagtcactcggcctacacccacagcatcgaccttg

SEQ ID NO: 294754 - DNA, 96 bp, Homo sapiens
gtacgtgcaagagttcatacaagcagagctaaaggagaagaaggaagttgtggaagaggcagaaaatggaagagacgcccctgctaacgggaatgc

SEQ ID NO: 294755 - DNA, 73 bp, Homo sapiens
tcccaagtaggtgggactacagatcagtccaaagtgtttgtgaaggtgtttactgaaattgaccggatgcccc

SEQ ID NO: 294756 - DNA, 83 bp, Homo sapiens
gcggcctacgtgaacaacctgaacgtcaccgaggagaagtaccaggaggcgttggccaaggttcaaaagaatgctgaaccggg

SEQ ID NO: 294757 - DNA, 88 bp, Homo sapiens
cctgagaaactcggcaagcgcgcagtgtcgactccccggtctatgccaggcgcatctcagatggcccactgcgtgaccttggttcagc

SEQ ID NO: 294758 - DNA, 96 bp, Homo sapiens
cgcgggggagccccgggagccgcacgagaacagcccatcttcaccacccgagcgcatgtcttccagattgaccccaacaccaagaagaactggatg

SEQ ID NO: 294759 - DNA, 101 bp, Homo sapiens
gatgaaccatcttcctgcacacagccacgatttgcaaaggttgcaatgaatgtgtatgagttatcatcagctgccggattaccttgtgagattgatcctgc

SEQ ID NO: 294760 - DNA, 90 bp, Homo sapiens
ccgaggcgcaggtggcgctggagtgtgaacatggctacgcctcttcattcccgtccatgccgagcccccgactgcagcattcaaagcccc

SEQ ID NO: 294761 - DNA, 50 bp, Homo sapiens
aattcccaagctgagatatctaggaacatcatttacagcgagcaatttca

SEQ ID NO: 294762 - DNA, 75 bp, Homo sapiens
cggaggtctcatctttgaactactgccggagcttctgccaggttgaagctccattcataccaaagtttagaggct

SEQ ID NO: 294763 - DNA, 100 bp, Homo sapiens
tttaccaacagttagtggccagcatcctcctgctgcaggccccttcacagatgtagtcactacaaatcttaaattgcgaaatccatcggatagaaaagtg

SEQ ID NO: 294764 - DNA, 100 bp, Homo sapiens
ctgaaagcgaaaaactatgctgaccagagacaaacagaggatgtgcagatgctcctgcgctttggggcagatcccactttgctggatcgacagtctcggt

SEQ ID NO: 294765 - DNA, 100 bp, Homo sapiens
acagcttatgcatacaggaatcccaaaattggatactgccaggttgtatctcccacttcacccttctagaccatcccagaagatctataagatttcatct

SEQ ID NO: 294766 - DNA, 98 bp, Homo sapiens
tggagggctgagcagtcaactcaaatgcaagtccaagaggaggaggaggcggaggtccaagcggaaaggtttccatgtgatccccactatctcaagca

SEQ ID NO: 294767 - DNA, 100 bp, Homo sapiens
ccacagtgtgatcccagctttaaaggagatgcaggagaaaatacggcattgctagaatggctggtgctccagacccctcacctggagttccaggagggag

SEQ ID NO: 294768 - DNA, 83 bp, Homo sapiens
ctttggtgaaagctaagaaggttcaaacaaatttgcaaatgatatacaacttctaaggaagccacagatgatggacataacaa

SEQ ID NO: 294769 - DNA, 75 bp, Homo sapiens
cggtcctcctggctgtgctcatatacacctgagctcttccccgcagctctgggagacgtggaggcctctgaagct

SEQ ID NO: 294770 - DNA, 101 bp, Homo sapiens
cctgacggcacttagctgctgacaaacaacctgctccgtggagcgcctgaaacaccagtctttgggtacgaggtacttaagatagccgctgacatattaat

SEQ ID NO: 294771 - DNA, 132 bp, Homo sapiens
ctcaccctctgccgagtctcaatatctgtcttcggtggactccttcggcagtccacccaccgccgccgcctcccagcacatggattaattgatgtatgttgagtttatggagctgccttttggtggcttgct

SEQ ID NO: 294772 - DNA, 82 bp, Homo sapiens
agtttctttcaaaggatgcagatggtgacacgaattacatgaatgacagtcttcgaaccaatgtgtttgttcgatttcaacc

SEQ ID NO: 294773 - DNA, 83 bp, Homo sapiens
cctggagtacaacgaggtcaacgtcaccctggacctgggccaggtaatcattaccaaatgaggaggaaaggacgatgtcatcg

SEQ ID NO: 294774 - DNA, 97 bp, Homo sapiens
cgcctcccgagtcactgcagccaacccttcagcaagcagccattgtttgatgtcctgtgactgagaaaccaggctttaaactttatgcctttggaga

SEQ ID NO: 294775 - DNA, 101 bp, Homo sapiens
cttcccgctgctgctcttctccaggctctgtgttattcaagcggagaaatgttgctacagcagaagaagaaacagaagaagaagttatgtcagatggaggc

SEQ ID NO: 294776 - DNA, 97 bp, Homo sapiens
ccggaccgtgctcaggtgctgccgagggtggatgcagcagcccgacgaggagggctgcctctcggctattcctgcaccaactgacctgaagttcact

SEQ ID NO: 294777 - DNA, 75 bp, Homo sapiens
tctgccctatgaacagcttaagcacttttaccgaaaaccttctccccagacaggcgagggcgtgaacgatgtgcg

SEQ ID NO: 294778 - DNA, 82 bp, Homo sapiens
cgtcagcagcgaggaaggaaacagcggtacaaattctgagctgtctaacccctctgaaacggaatctgagcgtaaagacgag

SEQ ID NO: 294779 - DNA, 80 bp, Homo sapiens
ctggacaagtgtaatgaaattatcaactggcttgataagaatcaggctgttcacggaagaccaggatgtagatgagggac

SEQ ID NO: 294780 - DNA, 83 bp, Homo sapiens
ggcggcgtgggcaagtcggcgctcaccatccagttcatccaggttttaaaatcaaagatgggaaaatcggagaaaattgccct

SEQ ID NO: 294781 - DNA, 51 bp, Homo sapiens
ggatgtagagaaatggcgtgtgaagagacttccgtctgagcaacacactct

SEQ ID NO: 294782 - DNA, 75 bp, Homo sapiens
agaaaatgactttctgccggtagaaaagcctctgacctttttgagcctgggaaatgcttaccttgctctgaagaa

SEQ ID NO: 294783 - DNA, 100 bp, Homo sapiens
tcaggagcagccgcagcgacggcggcgacagcaggtttttagaacttcagccataaaaatgggcagaattttccttgatcatatcggtggtacccgtctg

SEQ ID NO: 294784 - DNA, 75 bp, Homo sapiens
tcgctggagatcgagtaccaaaaactgaggcttcttgaagagcttgaagacacttggctcccttatctgaccccc

SEQ ID NO: 294785 - DNA, 83 bp, Homo sapiens
ccatccagggccaccatgtctgcctcctggtgaaaaaggtgcatctgcagacgcagcaggaggtgaagctgcgcatgacgggc

SEQ ID NO: 294786 - DNA, 74 bp, Homo sapiens
gacttcatcctcccagacactacagagcttgcttggctcaggaacaacagaagagaataaagaaaatgacctca

SEQ ID NO: 294787 - DNA, 75 bp, Homo sapiens
gcaagatggtgttggaaagcactatggtgtggtggactcagatgatctccccttgaatgtttcccgcgagactct

SEQ ID NO: 294788 - DNA, 100 bp, Homo sapiens
acagcagcgccgtgccccccgtgctcctctactcgctggccgccggggtccccgtgctcgtggtcacactgcagaacagagtgatattgcaaaaagccaa

SEQ ID NO: 294789 - DNA, 83 bp, Homo sapiens
gtgatttctgcatttccatctgagttggttgaatctggcgatgtggaacccatggatatggagggctgactatatacaccatg

SEQ ID NO: 294790 - DNA, 75 bp, Homo sapiens
agcggcagcagcagcggcgggaggagcctccgggaccatcatggagcagttcaaccctagcctccggaacttcat

SEQ ID NO: 294791 - DNA, 100 bp, Homo sapiens
cggatttactggaccccagtgtgaaagaggcaaatacgccatgcgagacctagtccacaggcttccaggagggaacaacagcaacaacactgcaagcaag

SEQ ID NO: 294792 - DNA, 130 bp, Homo sapiens
ttgctgtgggcagcggctctcgtgtgatctccatctgttatttcgagcaggagaatgactgctctagaggacaaaatcccagtccttggcacaaactcaggaaatggaagccggagtctgttttttgtgg

SEQ ID NO: 294793 - DNA, 100 bp, Homo sapiens
ggagacgtcggagcagccgcggtacaggatgaagtcgctcacacagtcaccgagagccgggtcctccagaacaccaggcacccgttcctcactgtgagtt

SEQ ID NO: 294794 - DNA, 88 bp, Homo sapiens
ttgggccagtcttaaatatctacccatggaataaagagctgtatttgatcaggtgcacaggtttcatattccagaaggttggaaagtt

SEQ ID NO: 294795 - DNA, 90 bp, Homo sapiens
cccaccatcttccatccctgatgcttggagaagctgaggacacacagggttggggaccagattctagaagtgaatgggcggagctttctc

SEQ ID NO: 294796 - DNA, 100 bp, Homo sapiens
aatagccacttcacacatggagagatgcaagaccagtccatttggggaaatccttcggatggtgaactcattagaaatggcttgttcaatcagtatatca

SEQ ID NO: 294797 - DNA, 99 bp, Homo sapiens
gtcgccgccatgacagcgagcgaggcggagggtcaaatagaaattgacgatcaggtggaaggactccaatatctagcttctcgatatgatttcattgac

SEQ ID NO: 294798 - DNA, 95 bp, Homo sapiens
cattgcgcccagacgggccggcccagagctcccgggtcgtctttcgtgtggccgcgaggtatcctacctcctggaagggggcagcatggcccatg

SEQ ID NO: 294799 - DNA, 100 bp, Homo sapiens
ctcacaagtgcatgggagattcctgcatcttttgcgctctcaaggcagcacacttctgcttttgttccttcatcaggacgaatttactcttttgggcttg

SEQ ID NO: 294800 - DNA, 115 bp, Homo sapiens
tgagtacgacagcctcaaacaggagctggagcagctcaaagaggaactgtggaaggtgccatggacttgatcttgatcaattccctacctcttgtatctgatgctgaaacatctc

SEQ ID NO: 294801 - DNA, 100 bp, Homo sapiens
cagcagccacaggaaccttgagtgggaatgatggttagatgctgccgaacatacgaagaagtgtgcgaaggtgatgtgatgttggcaaagtcatcaagct

SEQ ID NO: 294802 - DNA, 75 bp, Homo sapiens
taaccacatttggaaattatttgagaacttcttggtggatatggcaagggtcctctggtgatgttcttgagacgt

SEQ ID NO: 294803 - DNA, 75 bp, Homo sapiens
caatccagatggcagccagtcagtggtggagcttttatcaaaatacaactcaaacctagctactccaatagcaat

SEQ ID NO: 294804 - DNA, 83 bp, Homo sapiens
gttaaaggcaagatcgacaccatgaaggttaatttggagtggcccctggagtcagtttcctacaccatccgaggccccaccca

SEQ ID NO: 294805 - DNA, 100 bp, Homo sapiens
tcttcctcccttcgctcgcaccatgctgctcctgtttttcacatccaaggtttctcctccatggcactactgacgttttgggctgacgaattctttgggg

SEQ ID NO: 294806 - DNA, 82 bp, Homo sapiens
ctctttctgtatagccccacagcagtcttccccagcaccccaccagaggcccgccaagctgccccctgtgtgctattctttg

SEQ ID NO: 294807 - DNA, 100 bp, Homo sapiens
aaaggaacctctacaacgaaggtgaagccacggaagataaggttgaaatcacaaagattagacacctttttagataggtgttcttcagcaccactgacaa

SEQ ID NO: 294808 - DNA, 88 bp, Homo sapiens
acgggaagctccaagccgcagctctgcttcctcgggacctcagatcctgattttggaaataatcagggttattttaaaactatatgag

SEQ ID NO: 294809 - DNA, 90 bp, Homo sapiens
cacaatccaggacaacatggaaaactacaggaagctgctctccctcggtaactcaactggacccaaataaatcattattggaggtaaagt

SEQ ID NO: 294810 - DNA, 76 bp, Homo sapiens
agaccacacagttaattgaaatgctacatgccgacatgaatgtcccctttccagatggagtctccctctgttgccc

SEQ ID NO: 294811 - DNA, 98 bp, Homo sapiens
ccggcgggagcggcggcaagaaaaatgccagccagaagaggcgttcgctgcgcgtgcacattccgggggggccctcagcctcttggccttgaacgggc

SEQ ID NO: 294812 - DNA, 75 bp, Homo sapiens
atcgcgacgacgttgcctaccgtcaagatgattgtggagatacagatcacttggattcagtcgagtttgctttgc

SEQ ID NO: 294813 - DNA, 100 bp, Homo sapiens
attttgggagcttcgagtcaacaataaaggaccgagggtgccgagcgggagtggcctcgttgggtccaattggttccaagacgcgtaggcgagttggtct

SEQ ID NO: 294814 - DNA, 136 bp, Homo sapiens
gatgcactctccaagttggaacgaggagaagaaccatggacaatggaagatgaaaggcacagtcgaatctgtccaggggtcattgtcattcgaagatgtggctgtgggcttcaccagggaggagtggcagtttttg

SEQ ID NO: 294815 - DNA, 50 bp, Homo sapiens
ctgctccgatcccactagtgagagggagaagaaatgggtgaccgttggtg

SEQ ID NO: 294816 - DNA, 100 bp, Homo sapiens
ggtccaaatctcagcaacccctgtgcttctccccaggtccagccaatgcattcagaagccaaaatgggccgcgatgggcctcttggaacattggtgtgtt

SEQ ID NO: 294817 - DNA, 100 bp, Homo sapiens
ggctgcagtaaaaatcattaaattggagcctgggtctaatggctattgattgtccacatactggcattgtggactatcggcaggtggctttgtcatttgc

SEQ ID NO: 294818 - DNA, 88 bp, Homo sapiens
gatagatttggagttgtccagacgacactaccagctatccttaatactttgttgacactgcaagagttacttgctggacagaagaaaa

SEQ ID NO: 294819 - DNA, 100 bp, Homo sapiens
tgctgctcgccgcgctgcgcccttcggccgcctacttcggaccaagatcactccatggatgaaatgacagctgtggtgaaaattgaaaaaggagttggtg

SEQ ID NO: 294820 - DNA, 82 bp, Homo sapiens
tgggccgggggctgcagcatgggagatgtcctttgcttctcagatgtaaatgcactttaagtttgttattcaacagtgaaaa

SEQ ID NO: 294821 - DNA, 90 bp, Homo sapiens
tgctgatcaagatgatctggttgtcatgtttactgaatggttcctgatgttattagcagcataaggcaattatctaaagcggccatgaaa

SEQ ID NO: 294822 - DNA, 90 bp, Homo sapiens
gtactgttgacacaagtgttgctaaagaacagagccttccctcagtgatggactggcacagcctccaggttggcgggctcatctgcgctg

SEQ ID NO: 294823 - DNA, 75 bp, Homo sapiens
caggcagagagcagaagatattcacagacatgcggaatttgagcgagtgatagacagccaagcagagaaactgaa

SEQ ID NO: 294824 - DNA, 87 bp, Homo sapiens
cagcacttcagtcggaaagttggaacctctgacaagaccaagtactaccttcaagcttcccggaccaggaggtgcgtcgtatggctg

SEQ ID NO: 294825 - DNA, 49 bp, Homo sapiens
ttcggcccgggccgctcaggtgcaggatcaaaatacttgctggatggtg

SEQ ID NO: 294826 - DNA, 75 bp, Homo sapiens
catagatactacactgaatttcctacagttcttgatattacaggtactgcttaggatgaatatgatttggagaaa

SEQ ID NO: 294827 - DNA, 50 bp, Homo sapiens
ggaggacctacgccggcctgggccggtctaattgaagccaacggagaact

SEQ ID NO: 294828 - DNA, 115 bp, Homo sapiens
gcagctgaactgagcgtatgtgccacgccgcccaggagacccctctgctgcaccacttcatggcaacatcgaaaccaaccataacctgccaccgtcgcacaaatctcgaaacaac

SEQ ID NO: 294829 - DNA, 101 bp, Homo sapiens
agactcgggctgagtttgcggagaggtcagtaactaaattggagaaaagcattgatgacttagaaggtcagcttcaggccaccaaatccctctgccatttc

SEQ ID NO: 294830 - DNA, 90 bp, Homo sapiens
gcgcgggccgggatgagggactgtggcggcgcggcccgcgcgcagccggccgacaatgcagatcttcgtgaagactctgactggtaagac

SEQ ID NO: 294831 - DNA, 75 bp, Homo sapiens
cagaaagcggcttatcgaacagagccgggagttcaagaagaacactccagagaaatgagccgtcagactgctaca

SEQ ID NO: 294832 - DNA, 75 bp, Homo sapiens
agattcatgcaaacgtttgtccttgctcctgaggaacatcatttacagcgagcaatttcagcacagcaagtgttt

SEQ ID NO: 294833 - DNA, 100 bp, Homo sapiens
ctcggcgtcgcgcggcgtgccctgcttgtcacaggtacatgtcccagagcaagcacacggaggcccgggagctcatgtactcgggagccctgctcttctt

SEQ ID NO: 294834 - DNA, 75 bp, Homo sapiens
ctctttctggcctggaggctatccagcgtgccgacgccaccgccgagcccatgatcctggaacagtacgtggtgg

SEQ ID NO: 294835 - DNA, 90 bp, Homo sapiens
catcgcgttttgccagcgataatacgcctcagctgaagaaagtagtagtagtgacagtatgtggttaagcagagaacaaacactgcacac

SEQ ID NO: 294836 - DNA, 101 bp, Homo sapiens
caggggatagtggtgtggatcagttggtagaaataatcaagagtttgtttctaatggaagaggttcacatgataaagaacaaaccagccagtcctcacatc

SEQ ID NO: 294837 - DNA, 90 bp, Homo sapiens
ctccagcctgctgcgcaggataaaaggcaaactcttcacctgattggttgtgatcgtagccaaaaccttgtggacatttgtagagagagg

SEQ ID NO: 294838 - DNA, 100 bp, Homo sapiens
gtgggaagaagatttgtaaagaaaactcttagactggtcgaattgacaaatcttaccctacagtatgtggccacacaggaccagtgctggacatagactg

SEQ ID NO: 294839 - DNA, 50 bp, Homo sapiens
cccaggcgactgcctcatcttcaaggccgccatggcatcagatgaaggca

SEQ ID NO: 294840 - DNA, 100 bp, Homo sapiens
gattgaatctcttgaaaaatatgtggtattgtgtgaataccatgctgtgaagtccaggccacatggaggtgtcctgtgtagatgctccagctgaaatccc

SEQ ID NO: 294841 - DNA, 75 bp, Homo sapiens
acagctttacctccctgaaggacagacaaggaacccataaagatgctgtgtgctggaattgatgttcgtctgtgt

SEQ ID NO: 294842 - DNA, 90 bp, Homo sapiens
gaggccggggagcagccgaccatggagccccagatgatggatgtaacagatataataaatggaaaagtagatgatgaagataagcagcat

SEQ ID NO: 294843 - DNA, 58 bp, Homo sapiens
cttctccccgcgggagcccccagcatgggagattacctggggcaattgatgttatcgg

SEQ ID NO: 294844 - DNA, 75 bp, Homo sapiens
agtcggacgccatggaggggctgctgaaggcggagatcgcccgccgaggttacgaagtgacagtgctggtgcggg

SEQ ID NO: 294845 - DNA, 100 bp, Homo sapiens
tgagcctctgcactctcctgactcagaacgatcttctaaactccagccagtaacagaaggagatttcctctggaagacatcccgctggatgaaaaggaag

SEQ ID NO: 294846 - DNA, 82 bp, Homo sapiens
gtgatgggctaccaggtctggagcagtgcagttgtgaaacttttctgaagctcagcagcagctatgcaacaccagacaggaa

SEQ ID NO: 294847 - DNA, 152 bp, Homo sapiens
ggtcagacccaggatggggccagaacggacaggggccgcgccgctgccgctgctgctggtgttagcgctcagtcaaggtcgttgaggacttccacatggagattggcacaggaccagactcaagacacacaactcataacagttgatgaaaa

SEQ ID NO: 294848 - DNA, 51 bp, Homo sapiens
actatactccgatcaccaatggagcacggtctgaatctgcacagagcaaga

SEQ ID NO: 294849 - DNA, 74 bp, Homo sapiens
ctttttcgtttttcggatgatgccttcaatactacctttatttccaccataggaccgcagctgaatgcacagct

SEQ ID NO: 294850 - DNA, 100 bp, Homo sapiens
cgggaggagggtacgagtggccgaccacggatttgcattgccgaggacgggaccccagggcagcgaagcagtgccggtggtggtgtgcacattgagcccc

SEQ ID NO: 294851 - DNA, 83 bp, Homo sapiens
ctcatcgcccataaagtggatgagcaggtcacccaacctgcctgcagtttaccctgaacatgaccgaggctgtcaagacctac

SEQ ID NO: 294852 - DNA, 75 bp, Homo sapiens
tgtcatgcctctgaaaatgaaggttttcaaatggaacattttgatgcatcacttagtacctatttcaaggcattg

SEQ ID NO: 294853 - DNA, 101 bp, Homo sapiens
ctttgcagtctcgacataagtcccagaagctgtggctaccctggcatctctacagctgcctgcaggccgcaccatgagcccccaggaagtagaagggttga

SEQ ID NO: 294854 - DNA, 99 bp, Homo sapiens
aatgacaatcgccccaccatcccccaaccctgggagctccgagtgtcagaagaaaccagccctgagcaaaggggttctgaggtccataccaagaagacg

SEQ ID NO: 294855 - DNA, 101 bp, Homo sapiens
agatggagatgggcagacggattcatttagagctgcggaacaggacgccctctgatcgggactacttgttgatatttgaggagggaagtgtcttacctgag

SEQ ID NO: 294856 - DNA, 99 bp, Homo sapiens
caagaaggccctggacacagcaatatctctgggctttcacagggtgtggaacgtccgctacaaccactctcatgaccagctggtcctcacgggcagcag

SEQ ID NO: 294857 - DNA, 83 bp, Homo sapiens
gccctttccacctcgcggcagttcgcagggtttccaggcctgaggtgcccgccctggccccaggagaatgaaccagccgcaga

SEQ ID NO: 294858 - DNA, 130 bp, Homo sapiens
ttgattctctctcagccagcacagctcaggccagttcgtcggctgccagcaacaatcaccaggccttttctgatgccattaaaaaatggcaggagctatcaccagaaaccagtggaaaaaggaaaaagag

SEQ ID NO: 294859 - DNA, 100 bp, Homo sapiens
gccatggctttgcacagaaccagctagttatttggaagtacccaaccatggccaaggtggctgaactcaaagacctgttaccctccaaatcttctgtgac

SEQ ID NO: 294860 - DNA, 100 bp, Homo sapiens
cagaaactgaaggggtgaaagaaaacccaaggactgactgcattgcacagatgatggatatttacgtatgtttgaaacgaccatcctggatggtggacaa

SEQ ID NO: 294861 - DNA, 97 bp, Homo sapiens
cttaagtgtgattactgtgacaagttgtttatgcggaggcaggacctcaagcagcacgtgctcatccacactcagctggagtgcagtggtgtgatct

SEQ ID NO: 294862 - DNA, 101 bp, Homo sapiens
ggacctgcccgcctgcggctgctccgggctgacaaacgggctcatcataatgcactggaacgaaaacgtagggaccacatcaaagacagctttcacagttt

SEQ ID NO: 294863 - DNA, 98 bp, Homo sapiens
tcgcaggcgccgcacggagttgcgtcccggggacttggggccgcagggagatactgcttctaaactaggacccatagaagctatccagaagtcagtcc

SEQ ID NO: 294864 - DNA, 100 bp, Homo sapiens
ccggcctcctaggcgcgctgcacctggtgatgaccctcgtagtggctgcggcgcgggccgagaaggaagaaatcaacgaccgggagcagaagttgcatgc

SEQ ID NO: 294865 - DNA, 75 bp, Homo sapiens
ctctgtctacggacccttgtgtattccagtaccagtacccggagagaacatgtcaaagttaaaaccagctcccag

SEQ ID NO: 294866 - DNA, 100 bp, Homo sapiens
tggtggccgtcaagaagatggacctgcgcaagcagcagaggcgcgagctgctcttcaacgaggccacattcgtggctgactggcggaactcgaatcgcta

SEQ ID NO: 294867 - DNA, 75 bp, Homo sapiens
tttgccattttcttatggagaactgtccttgttgaaatggctagtgatgagctgaaagagatgcggaaaaacttg

SEQ ID NO: 294868 - DNA, 90 bp, Homo sapiens
cagaaatggaagcagctaggcatgaacaccaattaatgctaatgaggcaagatggcaggcagcagattctgagtttgggcatggacctgc

SEQ ID NO: 294869 - DNA, 82 bp, Homo sapiens
aacggatctgtgtgcccacagctcctggagccccacaggtatcgagaaccttccctgcgaacttcagaggaacttccagctg

SEQ ID NO: 294870 - DNA, 96 bp, Homo sapiens
gtggaatatgccaaggaaaaactggagagcttcatcaaaaatagtgatagctttgataaattgctggactcgctgaagagagactacgcaggaaag

SEQ ID NO: 294871 - DNA, 50 bp, Homo sapiens
taggaggaaaattcatcatctggtgcccagggtggctccgtggcccgcac

SEQ ID NO: 294872 - DNA, 97 bp, Homo sapiens
cagaaaattcatcccacatcagttattagtggctatcgacttgcttgcaagttcgagcatacgggccaggtttggagaaatctggatgcattgtcaa

SEQ ID NO: 294873 - DNA, 82 bp, Homo sapiens
acacctcccacctgtcctcaggcatatcaaagactattgcccagaagaaaagatgtttggttttcacaagccaaagatgtac

SEQ ID NO: 294874 - DNA, 87 bp, Homo sapiens
gcagacatccctccgtggtgtgtgtcttggtgcattggaaaaggagtcaggagccactgtgaggccttccggagcagtactacagcc

SEQ ID NO: 294875 - DNA, 100 bp, Homo sapiens
aaagatgctcaggctgctcttggctctcaacttattcccttcaattcaagtaacagagatggggtcttggtatgtcatgcaggctggaatgcagtggtgt

SEQ ID NO: 294876 - DNA, 75 bp, Homo sapiens
gaagaactcttaggagcagcttggcctaaagggagtcttttagtcctgctatacagctgcaccttgtacatcaag

SEQ ID NO: 294877 - DNA, 96 bp, Homo sapiens
agaagacaatgatgaaattaagattgggacctcatgtaagaatggagggtgttcaaagttatcaggaactgttgccgttattacatcagatgggag

SEQ ID NO: 294878 - DNA, 75 bp, Homo sapiens
ctgacggcgactgcgggaggccagggattaaagcctgtggtttccacagaagcaccacctatcatatttgccaca

SEQ ID NO: 294879 - DNA, 51 bp, Homo sapiens
actggaaacccacaggcacacccaaatcctgtgccggtatcagaatatctg

SEQ ID NO: 294880 - DNA, 98 bp, Homo sapiens
gaagtgcttagattctggatacattttgaagtggaagaagttgttccgaatgtaattgaaccttccttcggcctgggtaggatcatgtatacggtatt

SEQ ID NO: 294881 - DNA, 100 bp, Homo sapiens
atcaacaagtgcccagaacacgtgctgaggcacacccagggccggcggtaccagcgagctctgtgtaaatgtggccctcatgacactgacgctcttcccg

SEQ ID NO: 294882 - DNA, 50 bp, Homo sapiens
ggacccctggagagcctggaccccaggagtggagtcaacatatcaatgga

SEQ ID NO: 294883 - DNA, 75 bp, Homo sapiens
tctcaccccgtcgttgcctccacttggcccgtccatagagccagggccgagaactactggtggcgtggccagaac

SEQ ID NO: 294884 - DNA, 50 bp, Homo sapiens
attacaggcatgcaccaccatgcccaggactcgggggactatcctctgac

SEQ ID NO: 294885 - DNA, 75 bp, Homo sapiens
ccctatgacccagatgtgctctactatattttcctgtgtattcaaaagggagaagagaagtttacctttattgag

SEQ ID NO: 294886 - DNA, 98 bp, Homo sapiens
tggaaatcgacttcggtttcagttggagttggaatttgtgcaatgtttagccaacccaaattaccttaattgctaagaagcaccaggccttcctagta

SEQ ID NO: 294887 - DNA, 98 bp, Homo sapiens
aatatgggtcgaccattccaaaaaaatcggttaaatgagggacatactgtgtacttggaacgccacatttgcggacgattgtttggtgaaaagttcag

SEQ ID NO: 294888 - DNA, 100 bp, Homo sapiens
cagtgtcaggcatgggagtcattgtccacatcattcagtcaagaacaatacccaagtgctcatcaactgccgcaacaataagaaactcctgggccgcgtg

SEQ ID NO: 294889 - DNA, 100 bp, Homo sapiens
ctgcgagcggctgctgagccgggtggccgccctgttccccgcgctgcggcctggcggcttccaggcgcactaccgcgctcggcaagatgtcggtgaagga

SEQ ID NO: 294890 - DNA, 71 bp, Homo sapiens
tggattatactgtactgcccatgaaaaaggatgttgaccggacaggctgtcctggggcggaggtgaccttg

SEQ ID NO: 294891 - DNA, 82 bp, Homo sapiens
tgcggcggccgcgacttccccgacgcggggcgctgagaagcagatagcagaacttgatgtagctgatgaaaatgacattaac

SEQ ID NO: 294892 - DNA, 100 bp, Homo sapiens
gacgctggaaagtcggccaagaaagacaaagacccagtgaacaaatccgggggcaaggccaaaaagaagcctttatacccaatacctatgacgcccatgc

SEQ ID NO: 294893 - DNA, 125 bp, Homo sapiens
ccgaatccgaggtatttgagatcacggacttcaccactgcctcggaatgggaaagtaccacatgcggatccacaaggaggaacggaagtacctgtgccctgagtgtggctacaagtgcaagtggg

SEQ ID NO: 294894 - DNA, 56 bp, Homo sapiens
gggaagcagaaacttgggccatacccaaattagagacggggtttcgccatgttggc

SEQ ID NO: 294895 - DNA, 98 bp, Homo sapiens
aaagaatccagtgggagagagtcaatggcctgcttgacgtgaactccaaagtcctcctggtacttcaaaggctcatcaagtcccgaggaaagtctcag

SEQ ID NO: 294896 - DNA, 101 bp, Homo sapiens
ctgcagtctgtggtgtgtttgctgttcccagggcagagcggcttgggtaaatccaccttaatcaacaccctcttcaaatccaaaatcagccggaagtcggt

SEQ ID NO: 294897 - DNA, 75 bp, Homo sapiens
cccacctcagccttccaagtagctgggactacagacatgcgccagcacgcctgtgcgaaaacaggagatcattaa

SEQ ID NO: 294898 - DNA, 82 bp, Homo sapiens
tgtccacatgctcctggtggatctggagctgctgctgggcatagccaagactatctgatcaacgtgatggatgccctgggcc

SEQ ID NO: 294899 - DNA, 80 bp, Homo sapiens
gcccactattaagtgggaacgggcagaccccaccaacaactgaacgctttggtcaggctgctacaatggaaggaattggg

SEQ ID NO: 294900 - DNA, 100 bp, Homo sapiens
atgctcagtttgatgcgtcacactacgacagtgagaaaggagatcactttgggaagcagtgacatccaacctgtatcaagtcttctaatctgtgaacatg

SEQ ID NO: 294901 - DNA, 75 bp, Homo sapiens
gttatcatgcatctcttgtcgcaggttagacttggaatggatcttactaagtggtattcatgggtagtttgaaat

SEQ ID NO: 294902 - DNA, 120 bp, Homo sapiens
cccagcgccaccatccacgccagccgcaccatgccgctcctaagcctgcacagccgcggcggcagcagcagtgagaggtcctctccacccggatcctggccatgaaggcctcgctctgca

SEQ ID NO: 294903 - DNA, 98 bp, Homo sapiens
tggagaggggccgtggcccctgcagcggaaccggacccagtccctgagccgcccctacacccacaggagaagccccgatatccaagcaaaagaagagt

SEQ ID NO: 294904 - DNA, 75 bp, Homo sapiens
acagtgatggtcccaatccagaagtggaaagctgtttgcctggagtggctaggcagctggaagagaaagaccgag

SEQ ID NO: 294905 - DNA, 75 bp, Homo sapiens
attgagagcaaaatctacaagatgatgcagggaggagatttgcttgtaaatgcatcacgaagaggcagcccagaa

SEQ ID NO: 294906 - DNA, 97 bp, Homo sapiens
cctaccagaggacctcagaaaggagctctatgaactttgggaagcagtggagctactgctgtggttcaggcagccctatgcaaacccaggcaagaac

SEQ ID NO: 294907 - DNA, 84 bp, Homo sapiens
ctgcgctgtgatgcctgcagagctgtggcttaccaggccatgcggaccctcagttggaagcacaccctgggcctggtgaccatg

SEQ ID NO: 294908 - DNA, 100 bp, Homo sapiens
ctttctgttcaggccagaccctctgggagcttctcagccattttccacagatcaggaatgacagtgatggggaaggagaatctgatgatcctgaaaaaaa

SEQ ID NO: 294909 - DNA, 90 bp, Homo sapiens
tttaccaaagattccaaggccacgaactcgaatcatttatgacagaaagtttctgttggatcgtcgcaattctcccatggctcagacccc

SEQ ID NO: 294910 - DNA, 78 bp, Homo sapiens
cccggtgcccgaggaggcagccaagctcgtagcctgccactccgtgcgttcggctttccagtttggcagcagcactac

SEQ ID NO: 294911 - DNA, 51 bp, Homo sapiens
tgagcactcggtcccaaaaaggcaaagtgtaaacaggaacatcgataagta

SEQ ID NO: 294912 - DNA, 75 bp, Homo sapiens
cttgctatcaacaaagttttttgtaataaagcgtccattaggtggaagtatgcgagacttaagagctcaagtgac

SEQ ID NO: 294913 - DNA, 75 bp, Homo sapiens
gcaataatgaatcattagtatcggacacagaaacgtacctgtttcccaggcaactactgatcaggcatttctgga

SEQ ID NO: 294914 - DNA, 90 bp, Homo sapiens
gtgacgttgtggagatggggagcgtcctggggctgtgctccatggcgagctggatttggagtcagcatatgaaaataagagtttacctac

SEQ ID NO: 294915 - DNA, 100 bp, Homo sapiens
ttcggctgccccaatccccggcagctctctcaggatcaggatgcagtgaaaaaagctagaagctttctcgaatttgctgaagatgtaatacaagttccaa

SEQ ID NO: 294916 - DNA, 95 bp, Homo sapiens
agaaagaggcctccctcgtgagttgggcttggtaccgtgctgcccagaatgcccttcgggaggtctgaaggggcgtctcgattacctgagctctc

SEQ ID NO: 294917 - DNA, 80 bp, Homo sapiens
atctgcaaccgcaacatcgaccagaccatgctctccatcctgctcttcttccacagtccacaggtcctggctaccctggg

SEQ ID NO: 294918 - DNA, 82 bp, Homo sapiens
agactccggcgctcgccatggccgacgaaaagcccaaggtgtcgtgaaaactacccctaaaagccaaaatgggaaaggaaaa

SEQ ID NO: 294919 - DNA, 75 bp, Homo sapiens
tcgaattccttctcaccagaggtatttgtgctgcctgttgatgtagaaaaggctgaccagtgcaccggtcttcag

SEQ ID NO: 294920 - DNA, 74 bp, Homo sapiens
agaagcagttagcaagaaagtggaatcaactgatttatcatagaatccccgactcagacccatcttctagcaaa

SEQ ID NO: 294921 - DNA, 82 bp, Homo sapiens
cggaaaccggtagcgcttgcagcatggagcaggccgggctctcgccatgggtcactgtcgcctctgccacgggaagttttcc

SEQ ID NO: 294922 - DNA, 100 bp, Homo sapiens
gaaataggctggtctgcagtgagcccttggattctagccagcacgactgaaggagggttattcccattgtgttgatgtttatataaagcagtgccaggag

SEQ ID NO: 294923 - DNA, 96 bp, Homo sapiens
ctgaggaccagcagatggccagtcacgagaacccagtctcgcccaagaacttcaaggtgaaaatgatcatgaagacatcagttctgctcagctggg

SEQ ID NO: 294924 - DNA, 75 bp, Homo sapiens
gcagatcctcatttccatcatttcctgctaagccaaacagagaagctgccactgcagagccccgccatggaagac

SEQ ID NO: 294925 - DNA, 97 bp, Homo sapiens
agatacaacagttatcatatggcaagttgatccggaatgattatcggacactgcgccaggggattatcgacatggtcttagccacagaaatgacaaa

SEQ ID NO: 294926 - DNA, 80 bp, Homo sapiens
aaacattgtttgaggattcctttcaacagggtaaagcccacagcttgaagccaagcataaaggagaagctggcaggcagc

SEQ ID NO: 294927 - DNA, 51 bp, Homo sapiens
aattgcaccacagatatatgggttggcccaccagctctgagcagatcatga

SEQ ID NO: 294928 - DNA, 110 bp, Homo sapiens
aagtatttggctgaggagttttcaatcccagcgaggattaaatccaccacacagggtgaaatctatctccatgacaacattcacacaacaggaaattgaattcttacaaa

SEQ ID NO: 294929 - DNA, 83 bp, Homo sapiens
gtgggcctgtctacggagccagcttcagtccggataggagttaacagagcagtttcataaagttgaatctcaactgaataagc

SEQ ID NO: 294930 - DNA, 126 bp, Homo sapiens
ctctgatcttagctccaatcttgaagaaagaatgcaaagtccccagaatcttcatggccagcaagatggagttggtaatgcttctcttagaatataatgctgatactactattgttaatgggagtg

SEQ ID NO: 294931 - DNA, 100 bp, Homo sapiens
cgcgtgcgtcagattctcatggcctctgggtccaccaccttcaccaaggtggacatcttcaataaggagctactgctaatccccatccacctggaggtgc

SEQ ID NO: 294932 - DNA, 98 bp, Homo sapiens
cctgcaggaactctacaacccaatccaggcataatcaccagcaacacccgggacaataatacgggggccacctacccccacctgaacttcagcattcc

SEQ ID NO: 294933 - DNA, 82 bp, Homo sapiens
ccgggcgggtcccggggtgcgagcagcgcacttccgggaggaggtacaggagaactgtgtgcggtggcgaaagaggttcacc

SEQ ID NO: 294934 - DNA, 75 bp, Homo sapiens
agagcgagtacttcgttccaacatggacatcctgaagccaatcctgacctgatggccaaaagaaaggaagaaaat

SEQ ID NO: 294935 - DNA, 100 bp, Homo sapiens
ggagatcccggcaccttctgagacacagttcaccgaacagcagaaagaatttcaagctactgctcgtaaatttgccagagaggaaatcatcccagtggct

SEQ ID NO: 294936 - DNA, 95 bp, Homo sapiens
cactgccttcttgggaattgcttcgtttgccattttcttatggagaactgtccttgttgttggacagatgacccaggcaggtctcctggagcacc

SEQ ID NO: 294937 - DNA, 82 bp, Homo sapiens
tctggcctggaggctatccagcactaatagggatgccaaaggaaaaatatgatcctccagatcctcgcagaatttataccat

SEQ ID NO: 294938 - DNA, 88 bp, Homo sapiens
tcaaggaagaagtgggctgaagaatttaatgatgaaactaatgtgagagtcgacttcaatgttcctatgaagaacaaccagataacaa

SEQ ID NO: 294939 - DNA, 82 bp, Homo sapiens
aaagcagcgtgcgttcagccctggggtttcagtgttgactggtgggctcttggagtgctcatgtttgagatgatggcaggaa

SEQ ID NO: 294940 - DNA, 100 bp, Homo sapiens
ctaaacctcagagtcctagatggatatgtgatttctcagaaggaaagagatgaaattggcctgatcccatgtcctgaagctaggtataaccggagtccca

SEQ ID NO: 294941 - DNA, 50 bp, Homo sapiens
gaaattaaacgtcggctcactagaaaggatttgttaaggattccaagtaa

SEQ ID NO: 294942 - DNA, 100 bp, Homo sapiens
gggaagacgcggcggcggcggcggaggatgagcctgcagagcgcgcagtacctccggttcgacgaggtgctttataaatcatctcaggactttcaaccca

SEQ ID NO: 294943 - DNA, 100 bp, Homo sapiens
atagaagtgacctgctttttcgcaagtgttgctgcactggattccaacgtatccggaaaaattggtctgcgcgctgtcgtgtattatttctgtaccactc

SEQ ID NO: 294944 - DNA, 75 bp, Homo sapiens
aagaaagaccatcaagtttaccattgctgatgtatattcaagatgagtggattaggagaaaacttggatccactg

SEQ ID NO: 294945 - DNA, 80 bp, Homo sapiens
cgggtgacatggaaggggcagtacaagcttacgtctctgctcttcagtacaatcctaatgtttctccatcccagagagat

SEQ ID NO: 294946 - DNA, 73 bp, Homo sapiens
tcgcctccctcggctcggcccaaagcagcagcttcagccccgaatctcggaagggtgctgacctggaccggga

SEQ ID NO: 294947 - DNA, 118 bp, Homo sapiens
ccaagacccgacacaaggcagcttcccacagcaggttggacagttcacagggatctgaaacttgcccacccttcgggatattgcaggacgctgcatcatgagcgacagtaaatgtgac

SEQ ID NO: 294948 - DNA, 106 bp, Homo sapiens
cacagctggccacagactttattcagagccttttagtaaaaaatccagagcagggcaagaatcctttcgttccatcacaaggtcgtattacagaggtgcagcagga

SEQ ID NO: 294949 - DNA, 83 bp, Homo sapiens
cgcagcctcagcaccgcagagcggagagcggagcccggagcccgccgccccaggtcaaaatgcagatcttcgtgaaaaccctt

SEQ ID NO: 294950 - DNA, 100 bp, Homo sapiens
ctcatccccaagactaagatccctgcccacacgcgctacgccctgcagtgtcgcttcagccccgactccacggtttgccgctgtctctgctattccatcc

SEQ ID NO: 294951 - DNA, 51 bp, Homo sapiens
aacgaaactgacagtaaacccatgttcaagcactgtcttcctgttggccct

SEQ ID NO: 294952 - DNA, 82 bp, Homo sapiens
ccgggatttgggtcgcagttcttgtttgtggatcgctgtgatcgtcacttggctgcctgctgtttcccggggagatcatgaa

SEQ ID NO: 294953 - DNA, 83 bp, Homo sapiens
tagcgcggctgtgcaagtacctgccagagaacgacctgaagatgatatcatcaagttgaatcgaaaggaagggaagaagcaga

SEQ ID NO: 294954 - DNA, 100 bp, Homo sapiens
aaggattccaagtaactcttatttgatcttcttggaaacagaattgttctacaaaggtatccgccctgcaattaacgttggtctgtctgtatctcgtgtc

SEQ ID NO: 294955 - DNA, 100 bp, Homo sapiens
aagcagggaaagagagcgccaggtgcttagcagggcagctgcaatgactctccgcacggtattattgtcattgcaagcactattggcagctgcagagcca

SEQ ID NO: 294956 - DNA, 80 bp, Homo sapiens
ggcagatcctgccccgtggccgcggccgtctcgtccctggtgctgaaccgcctgcgtccagttgccagcgggggtgggaa

SEQ ID NO: 294957 - DNA, 82 bp, Homo sapiens
cgctgctctaatggtccggacttccgtgtaggtacttggaaggctccatcgcccctgaagacaaaggaagctgctcattgct

SEQ ID NO: 294958 - DNA, 71 bp, Homo sapiens
caactccaacgtcatcatgcacgagacctcgcagtaccacgtccagggagtggacatccgccataacaagg

SEQ ID NO: 294959 - DNA, 100 bp, Homo sapiens
gatgaatgatttgcactatctaaacctagacacctggacttggtctggaaggtttaaagcaatgttgtggatgtgtgaagagtttcccctctctctggtg

SEQ ID NO: 294960 - DNA, 71 bp, Homo sapiens
aacctgtcagagtacctgctgaaccacaaacaatggtaaaataccatgaagattttgaaaaaacaaagggg

SEQ ID NO: 294961 - DNA, 98 bp, Homo sapiens
atgaatggattcccagtcaagaaatgctcagccttccaattttttaagaagcgggaccagcaacggagcgaggagctggctcgaatcatgggggagtt

SEQ ID NO: 294962 - DNA, 100 bp, Homo sapiens
ccgccgaggatgcgacgcaccgcaggtcagctacacaacctggatcttaccacagtttggatatgactgaggctctccaatgggccagatatcactggcg

SEQ ID NO: 294963 - DNA, 98 bp, Homo sapiens
actctccagctagaacaagaagtgagaaaccaagatagattcatctcgacactgaaattacaggttctaagctggtctatgtccatcaccttcttgga

SEQ ID NO: 294964 - DNA, 50 bp, Homo sapiens
gtaccatggcgtggattaaaaggaggcgatcgagatcggatgacagcaaa

SEQ ID NO: 294965 - DNA, 107 bp, Homo sapiens
gaaatagaacattactaaagccacctgtacatctttctccttttgaattacctgccctccgaagaaaatgtactcaagactgatcttctaagttcactggaaatgat

SEQ ID NO: 294966 - DNA, 73 bp, Homo sapiens
gggttccatgtgatggtggagtaggaggcaggtctccgcggtgaaagaaaagatgttgtcccggttaagagta

SEQ ID NO: 294967 - DNA, 100 bp, Homo sapiens
tgacacagaagactgctgagcgctcctaccgggagcacattgagcagcagatccagacctaccagcgcaggatgagccccaagagcctcaagaacccaac

SEQ ID NO: 294968 - DNA, 75 bp, Homo sapiens
aaagacttccgaggccgccctccgcgtgttcccaggcccgtggagaggtgctgtctggatgcggagtctacgatg

SEQ ID NO: 294969 - DNA, 100 bp, Homo sapiens
cgcgccgcccggcgcgcacaggctgtagcaggttccggcggacggcgttgcgaaggttatggccacaccgtgcccttgtcagatggaggtaaggccttct

SEQ ID NO: 294970 - DNA, 80 bp, Homo sapiens
gccaggcagtctatgctgcggagaaggtgattggtgctgggaagaaaaaggtagcagcactgcctaaacaagaggttata

SEQ ID NO: 294971 - DNA, 100 bp, Homo sapiens
atgtactccagttgctggatatccaagcctctcagcttcggagaatggagtcttccatcaatcatatctcacaggatgaggatgggacagaagaggataa

SEQ ID NO: 294972 - DNA, 98 bp, Homo sapiens
aagagtgtgtaggccagccccggtcacagagtgcaccgtatcctgtcacttctggatgtgagtgcattccactcttcgttcaacttgttttggagaga

SEQ ID NO: 294973 - DNA, 50 bp, Homo sapiens
ctgagattgagtacgccatggcctacgttaagaatagacccaccagcatt

SEQ ID NO: 294974 - DNA, 82 bp, Homo sapiens
tgatagtgtggtttatggactgaggtcaaaatctaagaagtttcgcagacctgacatccagattgaaaatattgaacttccc

SEQ ID NO: 294975 - DNA, 90 bp, Homo sapiens
agctcactcagcgctcagtgcacatatgtcacgtggcacggaaggaggagctatggcctgctgtgcagttagccaacttctacctggtcc

SEQ ID NO: 294976 - DNA, 73 bp, Homo sapiens
cgaaatgggcatattgccacaaggtgcctatggttcatgcttgaagttttaatgacaaagaatgaaaacaata

SEQ ID NO: 294977 - DNA, 90 bp, Homo sapiens
tgcgcgccgtggatttcgctgagcggcacggctacatcaagggcatcgtcaagagctctcctgtgccccgcgttccgagccccatcgccc

SEQ ID NO: 294978 - DNA, 75 bp, Homo sapiens
aggcgccagcctggtggtgggcaatactatactggcaattgctggagaagattttgcaattgttgcttctgatac

SEQ ID NO: 294979 - DNA, 80 bp, Homo sapiens
ctaaatcctggatggaagatagcttgaacagggctgacaacatttttccttttccggtctcttaaccttcattaactgtg

SEQ ID NO: 294980 - DNA, 95 bp, Homo sapiens
aagacgcggggaagaggaggcggaaaaggacgcaaagttctccggcgagtgggaatgtaagacggacttagatattgcatacaaatttggaaaaa

SEQ ID NO: 294981 - DNA, 82 bp, Homo sapiens
tgaaatcatcgagaccatccgatgtgaagttcatttccaatccgccctccatggtggcagcggggagcgtggtggccgcagt

SEQ ID NO: 294982 - DNA, 99 bp, Homo sapiens
agcccgcacgatatcatcagaatagtgccaggcttcccgtatccagcagccaccgccgcggccgcctaccgaggggcgcacctgcgaggccgcggtcgc

SEQ ID NO: 294983 - DNA, 83 bp, Homo sapiens
ccaattataaaggcaaatggaagcctcctatgattgacaatcccagttaccagttccaagattatcccctaaaactcatagac

SEQ ID NO: 294984 - DNA, 50 bp, Homo sapiens
gaggaggcttgggcttgcgccgttgaagacacgatgaggcgagtggtacg

SEQ ID NO: 294985 - DNA, 82 bp, Homo sapiens
ccgccgaagaagcatcgttaaagtctctcttcaccctgccgtcatgtctaagtcagaggttttaaaatcaaagatgggaaaa

SEQ ID NO: 294986 - DNA, 75 bp, Homo sapiens
tcgacttcccatcctgagttgttgcagaatgaagaagagtctggagaacctgaacaggctgcaggtgatgctcct

SEQ ID NO: 294987 - DNA, 75 bp, Homo sapiens
cacatggatggcaaaattcgtctttggaattacatgaatgacagtcttcgaaccaatgtgtttgttcgatttcaa

SEQ ID NO: 294988 - DNA, 100 bp, Homo sapiens
gcagaagctcctcaatggccagcgccagctgcagccccggctgcccactcgcctcacctgagcctggtttggctgtagcagcaattcctgaaggtctccc

SEQ ID NO: 294989 - DNA, 75 bp, Homo sapiens
cgctgacggcgactgcgggaggccagtaatgtgtgtggctggtattggacttgttgtattattcttcagttggat

SEQ ID NO: 294990 - DNA, 83 bp, Homo sapiens
gtgctgctggtggccaacattttgcggatactcttctggggccaaaccagtgctcctgccacctctctggctgccccctagag

SEQ ID NO: 294991 - DNA, 80 bp, Homo sapiens
gcacttctagtaaacgggtctccaggagtctagatggaggtagagaagattatctgtaacttaaaaccagctttaaaact

SEQ ID NO: 294992 - DNA, 97 bp, Homo sapiens
ttattataggctccctcctgctgtcaggctacatcagcaaagggaaaacggtccggatgtaccccttccagattcacagcatcgctctctccacctt

SEQ ID NO: 294993 - DNA, 100 bp, Homo sapiens
ctcgaaggttgtttggcttgtttaacagcatataccatcttcctatgcatggaaactcattatgagaaggtgtggaaacaggaagagaactagaactgga

SEQ ID NO: 294994 - DNA, 97 bp, Homo sapiens
aggagaacgccagtctggatgaacaggacagcttgggagcgtgcttcaaggatgcagagtatagaaaccttctggcgaattccagccaagctgagtc

SEQ ID NO: 294995 - DNA, 97 bp, Homo sapiens
aaacaagattgaaggaaaaggaagatgcactgactagaactgaacttgaaacacttcaaagtacacggctgccccacaccccctgctatctcttgat

SEQ ID NO: 294996 - DNA, 75 bp, Homo sapiens
gaagagctatggtgaaacaccactgaagcattgccaagggtgaggtggctttgaccccgggttgcccggccagca

SEQ ID NO: 294997 - DNA, 90 bp, Homo sapiens
tgaaaacacagtttctgcaggaaaagatctctctacttctcctaagaataatccagaatggctactctgatctatgttgataaggaaaat

SEQ ID NO: 294998 - DNA, 75 bp, Homo sapiens
gagcaggagcggcggcccgcggtgcggcggccctacgacctggaccgatcccatttaaaattctgagtgggcacg

SEQ ID NO: 294999 - DNA, 98 bp, Homo sapiens
ttcagctgacagagagattcagagaacgttaatggagatatcagaaaaccaggactctgcagatgttgatcctcaggagcattcatttactcgaacta

SEQ ID NO: 295000 - DNA, 82 bp, Homo sapiens
cacgacctggacgtgggtgaaatctgcaccgtggacccgtgccacaagagttcaggatggtcaacggcagcagcagctgtga

SEQ ID NO: 295001 - DNA, 50 bp, Homo sapiens
agattcagccctgtcatcttgtgcaaagtcatcatcaagaatatgggctg

SEQ ID NO: 295002 - DNA, 91 bp, Homo sapiens
tgggatcctttatcctggtcatcttctatttccaaagtgcagtctttgcaagccacatttggaacttttgagtccatcttgagaagctccc

SEQ ID NO: 295003 - DNA, 90 bp, Homo sapiens
gtcagagagagacagctcacgttccgggttgacatcatggacatatgtgagtccatcctggagaggaagcggcatgacagcgaaaggtct

SEQ ID NO: 295004 - DNA, 88 bp, Homo sapiens
acaaatctgaagatggtgtcaaagagaaattctgaggcggggtttcaccatgttgcccagactggtcttgaactcctgagcttaagca

SEQ ID NO: 295005 - DNA, 97 bp, Homo sapiens
ctcccgagtggctgggactacagaaaatggggagttcctttccctggatctcggagggtccaagttccgagtgctgaaggtgcaagtcgctgaagag

SEQ ID NO: 295006 - DNA, 82 bp, Homo sapiens
cggcgagcgcgagcggcgcgagaaactttagatagtgacgggggcagagagctggactgccagctgtgcggtgcctggtttg

SEQ ID NO: 295007 - DNA, 74 bp, Homo sapiens
catcataggtcgtcatgcttatggggatcaagagctggtacatacactacctcttctttgagcacaaaatctac

SEQ ID NO: 295008 - DNA, 100 bp, Homo sapiens
ctgaggaggcccgagcggcggcggtggcggcgaaggccgaggcggcggtaaccagcgtgagctcgcccgccagaagaatatgaaaaagcagagcgactcg

SEQ ID NO: 295009 - DNA, 89 bp, Homo sapiens
cggggaggtaacaagaaataccgtgccctgaggttggacgtggggaatttctcctggggctcagagtgcgacattgactacagcaccgt

SEQ ID NO: 295010 - DNA, 74 bp, Homo sapiens
tcatctcccgccttccctacgggccagagggtgcggttcctccttggtggccgccatggtgaattcaagttcct

SEQ ID NO: 295011 - DNA, 101 bp, Homo sapiens
cagacacaacctctttataacataagggatgccaaggcctgcgtagtacacggcagtgatctaaaggacatgacctccgagcagctggatgacattttgaa

SEQ ID NO: 295012 - DNA, 88 bp, Homo sapiens
gaacagctaaaggatgtgaccattttggcagctactaaccgtccagataggatagacaagtcaagtccatcatctccagaaccagcta

SEQ ID NO: 295013 - DNA, 50 bp, Homo sapiens
ttgtggaagatggcgcctgttgtgacaggaattcagcttagagaactatc

SEQ ID NO: 295014 - DNA, 83 bp, Homo sapiens
cgcaccgcggcttaaatgatgtattttgtgatcgcagcgatgaaaggaaattgctcagaagacctcttatgtatcctgaaaag

SEQ ID NO: 295015 - DNA, 75 bp, Homo sapiens
gcccttcgccaaggagatcgtctctctcatcgaggcccaaaccgccaaggttatactactccaactgccccccag

SEQ ID NO: 295016 - DNA, 75 bp, Homo sapiens
gaaggaagaggtgtttgaaaagatcatcacgaagtatgtatatgagctcctggaaaaggattgtaatttgaaaaa

SEQ ID NO: 295017 - DNA, 100 bp, Homo sapiens
ggagaaagtcctacaacagtttggcgtgcaacatggggcttgagaaaggcgtgaagcctctgcgggccttcttttcgtcttatttgaagtcattgccgga

SEQ ID NO: 295018 - DNA, 100 bp, Homo sapiens
cctcgcactgtgacatgtctgatcccttgctcccatccctgcagcatgaacaagggagaagatgtcaaccggacactagaaggtggaaggaaacctcttc

SEQ ID NO: 295019 - DNA, 82 bp, Homo sapiens
ctggccgcctctgccgcagctggagttgcggcgccgcttcggggacgtgttcagcctgcagctggcctggacgccggtggtc

SEQ ID NO: 295020 - DNA, 100 bp, Homo sapiens
cagaatttcctgtgttccctttgccgctcctggagttcactgatgcctgaagggaacagcactgtctacatccctgaggaccccaccttcaagccctcag

SEQ ID NO: 295021 - DNA, 50 bp, Homo sapiens
tcttgtagttttctgcatagataagcttctccagggaaagtgaccgaggc

SEQ ID NO: 295022 - DNA, 100 bp, Homo sapiens
gctgaccttgagtgcagctccccctataagcctcggcctccacaggaaaagatggtaaagcacgcaataaagacaagaggaatgtaaagaagctcgcagt

SEQ ID NO: 295023 - DNA, 82 bp, Homo sapiens
ggatcgggtggagtgtaggtcatatcgccgcgtggagacctttggcgacttggcctttggcgacatcttcctccacctgctc

SEQ ID NO: 295024 - DNA, 74 bp, Homo sapiens
gtcaaaacctccgaggggacgtgttccagaaattcattgagaggcagacctgtctaactacaagccagacttgg

SEQ ID NO: 295025 - DNA, 88 bp, Homo sapiens
cgaagtgggcaagttccgctttctcaacgagctcatcaaggtcgtgtctcccaagttgcaccaccagcaccaccttccagtagtcagc

SEQ ID NO: 295026 - DNA, 75 bp, Homo sapiens
aaagccaaggaaaggaagcagagagagatccagatgaactggagcagttcagcatggagagcccatcagccagcc

SEQ ID NO: 295027 - DNA, 96 bp, Homo sapiens
ggatggccgagtggtctaaggcgccagactcaagcatcagaggctccttgaaatgctagatacagagaaggaactgttaaaagaaaaaataaagga

SEQ ID NO: 295028 - DNA, 95 bp, Homo sapiens
cgattctccctctcctagaggcgtctgaacaagtgtcggaggccgagttactcccacagctgagcagagccccatcccaggctgcagaaagtagt

SEQ ID NO: 295029 - DNA, 49 bp, Homo sapiens
ctgtgaaaaaagccatttccgaagtgaggtcaccaagaattccctggag

SEQ ID NO: 295030 - DNA, 75 bp, Homo sapiens
agacaaccttttcaaatgggtagggaccatccatggagcagctggaacaagttcctcagcagaagggcataccga

SEQ ID NO: 295031 - DNA, 100 bp, Homo sapiens
ctggaagatggcggcgtccgtggtctgtcgggccgctaccgccggggcacaagtgctattgcgcgcccgccgctcggtggtcagagcgctcacggtgatg

SEQ ID NO: 295032 - DNA, 75 bp, Homo sapiens
accgtgtgggacgccggcggcagatgagagcatccaacggtactccaaagattcaggtttactcacgtcatccag

SEQ ID NO: 295033 - DNA, 100 bp, Homo sapiens
ccccaagtagtccgatggctgcggctgcgccgaggcgccctactcagcaaaagctggcaggctgacagaggcggcctcaggacggaccttctggctactg

SEQ ID NO: 295034 - DNA, 98 bp, Homo sapiens
cagggagtctatgccatgggcttcaatcgaccctccaagatacaagagaacgcattacccatgatgcttgctgaaccagacgaggtttcaccatgttg

SEQ ID NO: 295035 - DNA, 98 bp, Homo sapiens
tgcttgcaaggacctgggggccgacatcatcctggacatggccaccctgaccggggctcagtctcgaagatatgactccaggaccactatattttctc

SEQ ID NO: 295036 - DNA, 75 bp, Homo sapiens
gttcgcggtcggccgccaccaggtcaccctggaagagtcgctggccgaagcagacctactccaatgaagtccatt

SEQ ID NO: 295037 - DNA, 98 bp, Homo sapiens
gagaggccgagtagccacagcggcagctccagcccggcccggcagcgacatggaagacaatgcagatcttcgtgaagactctgactggtaagaccatc

SEQ ID NO: 295038 - DNA, 83 bp, Homo sapiens
cgaccccgaactccaggacagcatccaggcctcattggacagcattcgaggtcatttcttcagatagctccccagctgtggaa

SEQ ID NO: 295039 - DNA, 75 bp, Homo sapiens
gcagtcccgggagaacctgcggcggccggagcggagtgctcccaccccagcccgttgctgcccagctattggaac

SEQ ID NO: 295040 - DNA, 83 bp, Homo sapiens
gccgcggctgtggctcctcctggccgcgcagctgacagcacttgcacctcctgcgccgccgccccccatccaaggatatgcct

SEQ ID NO: 295041 - DNA, 75 bp, Homo sapiens
gacagccaggcccgggagaatttgaggtggtatcaacatcctacagaagaagaattaagaattcttgcagggaaa

SEQ ID NO: 295042 - DNA, 50 bp, Homo sapiens
atgccaccatggagaagcataaagagttaagtgggcagaccaacatccac

SEQ ID NO: 295043 - DNA, 74 bp, Homo sapiens
tggaagttcccgccccggagagcggcgaggcggcagccacagggactttgaacatgtcggggatcgccctcagc

SEQ ID NO: 295044 - DNA, 88 bp, Homo sapiens
gggtgactcttctcaaatgccttctcatccccacataaaatcatgagtggaggatctcaagtccacattttttggggtgctccaattg

SEQ ID NO: 295045 - DNA, 74 bp, Homo sapiens
acagatctctgcagttacaggaacatcgtctgcttcatggcatccaaacaattgactctacccaggctctgttc

SEQ ID NO: 295046 - DNA, 83 bp, Homo sapiens
acggtgctggtggagcgctccacgctcaaaggcagcggaggaggagaaagagatggacctcccggactcggcctcgagggtct

SEQ ID NO: 295047 - DNA, 75 bp, Homo sapiens
gtctcagcggtattctggtgcttatggtgcctcagatttgagttctgtgaacctgcatttgttgttggtaattgc

SEQ ID NO: 295048 - DNA, 74 bp, Homo sapiens
tgtcagatggtgttctggataaaaagcctgtcttcaacttggaatcccaatgtggcctcatggatgagctggta

SEQ ID NO: 295049 - DNA, 101 bp, Homo sapiens
ggacactttcgcaacatcaagggagttttccggggccctctcagcaagaacgggaacaaaactctggaactgtggctgcaccatctgtcttcatcttcccg

SEQ ID NO: 295050 - DNA, 74 bp, Homo sapiens
ggagaagaatcacgcctctctgcatagcacagctggacactggccgtgctatcaagactaatcaggaccttctc

SEQ ID NO: 295051 - DNA, 100 bp, Homo sapiens
aggtctatgagaacaagacggacgtcatcctgatcttggaacttgcctggatcaaagtggaacagctgaagccatatcatgctcataaagaggaaatgat

SEQ ID NO: 295052 - DNA, 75 bp, Homo sapiens
ctggacccctactattgcaacaagtctgctccatctggacacaagcatctgacggtagaagagttatttggaacc

SEQ ID NO: 295053 - DNA, 82 bp, Homo sapiens
ttcaccgccaaccccttcgagcaagacgtggttggttgaatctggcgatgtggaacccatggatatggagggctgactatat

SEQ ID NO: 295054 - DNA, 100 bp, Homo sapiens
tgccaagcagccttagccctagtgtagagcattgtcttcagtgttaagaaatgtggactcctgtgaggtgctggaggtttgaatcatcttgaaaactttc

SEQ ID NO: 295055 - DNA, 100 bp, Homo sapiens
cctgtctgggaccttctccctgcctggacccctactattgcaacaagaggccacaagaggaagctgaatgaagaggacgccgccagcgagtccagcaggg

SEQ ID NO: 295056 - DNA, 90 bp, Homo sapiens
gccgtgtggcacgacacaaaaatcaggcccctggccccaacatggcccgtcgctctcagagctcctcgcagggggacaacccactggcac

SEQ ID NO: 295057 - DNA, 75 bp, Homo sapiens
cgcagtggtcgcttcttctccttggtccctgtacccctacccgaccggcgtcgccgcttcctagccatgaagtgg

SEQ ID NO: 295058 - DNA, 83 bp, Homo sapiens
ggcaaaaatcccatctaccgcaactctcagttcgagagtaaaggttagctttatacgtctacgaatatttactgcacgtagga

SEQ ID NO: 295059 - DNA, 109 bp, Homo sapiens
gtcaaggtggccgtgagggtccggcccatgaatcgcaggcctcaggagtgcaagtagctgatgaagtatgtcgcattttttatgacatgaaagttcgtaaatgctccac

SEQ ID NO: 295060 - DNA, 74 bp, Homo sapiens
ggctccggcatggccgggatcattaagaagcagatcctgaaacacctgtcccgcggctgcatttcaacaaggaa

SEQ ID NO: 295061 - DNA, 100 bp, Homo sapiens
gctccccgggtcctccaggccctatcattatgtttgagaccttcaacaccccggccatgtacgtggccatccaggccgtgctgtccctctacgcctctgg

SEQ ID NO: 295062 - DNA, 98 bp, Homo sapiens
caaagagattaatagaattttatgaagactactttaaagtgccctattccttgccaaaactaggagatcatgaatcagacagataaaaatcaacaaga

SEQ ID NO: 295063 - DNA, 159 bp, Homo sapiens
agataaaaaggagcaaaagaaaaaagaatgggtcaaccaagaacgtcaaacactccaacgattgagagcatttaaagataggattcagaaattcagaggttgattacagaaatggaggcatgtatatctgtacttccaacagtaagtggaaacacagat

SEQ ID NO: 295064 - DNA, 100 bp, Homo sapiens
caaggataagggcgacagcaacagctctgccggctggaaggagcaggaactcaaagcagccgctgatggcgtactatctgaagtgaggaaaaaacaagca

SEQ ID NO: 295065 - DNA, 75 bp, Homo sapiens
aacgtcatcacgccctttctcttgctcaaggcgaggattaaatccaccacacagggtgaaatctatctccatgac

SEQ ID NO: 295066 - DNA, 74 bp, Homo sapiens
ttagaactctgtaacctgatcacagacaaagagatgctcgtcaagcagtaaaaacacccccccggaggttaccc

SEQ ID NO: 295067 - DNA, 83 bp, Homo sapiens
ccgtaccgcagcccccgggcacgacctctcggacacggtgcaggcaggtgtccctggccagtgtccttccacctgtccacaag

SEQ ID NO: 295068 - DNA, 100 bp, Homo sapiens
ggcggggtggagcagccagctgggtccggggagcgccgccgccgcctcgatgggggctggtgaattaccatatctccgtcaagtgcagtaaccagttcaa

SEQ ID NO: 295069 - DNA, 49 bp, Homo sapiens
ccactaccgaaaagctgtctattgttcctggaaggtgacgtgaaagatc

SEQ ID NO: 295070 - DNA, 100 bp, Homo sapiens
gccgtgggagccctgctggtctgcgccgtcctggatggagtcggataactgttcaggaggagatgatgactggacccatctgtcttcaaaagaagtggac

SEQ ID NO: 295071 - DNA, 83 bp, Homo sapiens
tgattgaggacgttcccttcacggagaaagattttgagttgtgaccgagattcccgacgagagagactgaggggaagagagga

SEQ ID NO: 295072 - DNA, 100 bp, Homo sapiens
gcacccaggccttctcgcgctgcctggtcgctggtgaagcccgcggcgcgcgcctctcccggaccctgcaggactgtgccctgtccacggtgcctcctgc

SEQ ID NO: 295073 - DNA, 73 bp, Homo sapiens
gctcccagccacaccaagttcaggtatttattacagtatcaggagccaataccttgtgagcagttggttacag

SEQ ID NO: 295074 - DNA, 75 bp, Homo sapiens
ctcagagtgaagatgagttgacaccttttgacatgagcatccaggtcaaaatgcagatcttcgtgaaaaccctta

SEQ ID NO: 295075 - DNA, 100 bp, Homo sapiens
ggactatggcatctatgttatcaaccaggatgctcgtcagaagttccgctctgttctggttgaagcaacggtgaaactggatgaactggtgaagaaaatt

SEQ ID NO: 295076 - DNA, 90 bp, Homo sapiens
ggaaaaggtcgctgctggacacctggatcgggtctgtcatacacggaggaagcggctgttctacattgtgaaaactgctgagagagactt

SEQ ID NO: 295077 - DNA, 74 bp, Homo sapiens
ggggggcctggccagcctggcaaaagatggtcttgggcgtctttggtactggcttttttaggggtctgcctggg

SEQ ID NO: 295078 - DNA, 90 bp, Homo sapiens
cctcgccgggaccctcctgtgggcccaggggacttccttcgctgggcatctggctgggattcttgttggactaatgtacactcaagggcc

SEQ ID NO: 295079 - DNA, 98 bp, Homo sapiens
gggcctaccccctggactccctggagaagcagatggaaaagtatgcaaccgattataaagtcgtgacccagaacagcagctctggaaatgtaacccat

SEQ ID NO: 295080 - DNA, 73 bp, Homo sapiens
gaagcgctgcgctcgcgcccggatccctcagatccagacatttaatgtggatgcaccatgccagaccgtggaa

SEQ ID NO: 295081 - DNA, 83 bp, Homo sapiens
ggaagaaccagttccactagagacacagcccttcgccacaagaagatgggcagatcatgtttgatgtggaaatgcacaccagc

SEQ ID NO: 295082 - DNA, 100 bp, Homo sapiens
gtacaccccatcccagacgaagacagtccctggatcaccgacagcacagacagaatccctgctaccagaccctgctgggatctttgagcttgtggaggtg

SEQ ID NO: 295083 - DNA, 100 bp, Homo sapiens
tggagatgtatcctacaagttgaaaattcctaagaatccagaacttgtgccacagaactacagtctcatggactgattggctctcattcagcaggaacct

SEQ ID NO: 295084 - DNA, 100 bp, Homo sapiens
tctctgtggaactgctctggcagtcatcgtgcctgaaggagtacatgccctttatgaagatattcttgaggacctaatctgggagcctgcaagtgacaac

SEQ ID NO: 295085 - DNA, 74 bp, Homo sapiens
cgcgcctcgctcagctccaacatggttcggctttccagtttggcagcagcactacaaatttcaacttcacaaac

SEQ ID NO: 295086 - DNA, 100 bp, Homo sapiens
agaaagtcctacaacagtttggcgtgcaacatggggcttgagaaaggccattcaaactcctccccacgacactctgaagcagcgacggcacagcgggaag

SEQ ID NO: 295087 - DNA, 100 bp, Homo sapiens
gagtgcagaggcatcacctgaaagctcataggtctctgaatcaagagaagccacatctggacctgatatagaagagactattagagatcctgggcttgag

SEQ ID NO: 295088 - DNA, 87 bp, Homo sapiens
acagcacttccggtcacgccatcgttgctgccttcttcgtcaagaattgccaagaagatgcttttagaagaaattaaagccaatctt

SEQ ID NO: 295089 - DNA, 124 bp, Homo sapiens
tcggctcatgttctgggacttaggagggcaggaagagctgcagtctttgtgggacaaggacgtgaccacgcagtctgtgatggggtttgatcctctgcctccttcggacacaatctactcctac

SEQ ID NO: 295090 - DNA, 50 bp, Homo sapiens
gcctcttctaccggggcaagcaggtagctacagcaagctgggtagcaggc

SEQ ID NO: 295091 - DNA, 75 bp, Homo sapiens
tcatttgcaacttatatcgccagtccagcagctaaggatattttgtgcagatggagatcttataacaatttttga

SEQ ID NO: 295092 - DNA, 101 bp, Homo sapiens
gaggccggccggtgccagcacctttcggcttctgagacggcggcagcagcggcattcaggtactaggttttgacaagcttgcatcatgcgtgagtataagc

SEQ ID NO: 295093 - DNA, 50 bp, Homo sapiens
gcagcagccggccgacccagagtattaactgctgaagtactgatcgagtt

SEQ ID NO: 295094 - DNA, 100 bp, Homo sapiens
gggcacagagccatcttcttcaatcggatcggtggagtgcagcaggacactatcctggccgagggccttcacttcagtttaagtgctgtggggctgctaa

SEQ ID NO: 295095 - DNA, 82 bp, Homo sapiens
gctgcgcggcggggctgaggcggccgcggggcccgagcgcagacaaatttacatgtattggagaccagaccagaagcccttc

SEQ ID NO: 295096 - DNA, 75 bp, Homo sapiens
aaacggcagaaaaagttggcatcctccatcttggctaaagaacgtgccaatggaatggagcttgatgggcgtagg

SEQ ID NO: 295097 - DNA, 100 bp, Homo sapiens
gaacttgtgattgagcagtttgaagacttgctagttaggattttattactggcagcatgtatatcttttgttgtcggggccaaagtggtaacgaacgccc

SEQ ID NO: 295098 - DNA, 100 bp, Homo sapiens
gtcactgcctgcgcagctccggccgcctggctccccatactagtcgccgattacctaaaacctcgggcagaagaggagaggaggatagcagcagaagaga

SEQ ID NO: 295099 - DNA, 114 bp, Homo sapiens
caatatctgtcttcggtggactccttcggcagtccacccaccgccgccgcctcccaggtttttagaacttcagccataaaaatgggcagaattttccttgatcatatcggtggt

SEQ ID NO: 295100 - DNA, 98 bp, Homo sapiens
ctgtgtggacgcggtgcgcaaatccctgcaaggggtggcagctccagaattcaaaagctgtgatccagtcaaaggacgccaccatccaggagctcaag

SEQ ID NO: 295101 - DNA, 101 bp, Homo sapiens
cggcggcaccgggaggccgggccgagcgaaaatgggtcacttggcctaagaccatttgtgggagaaatgatatggatggatcagatggtgatgatagtgga

SEQ ID NO: 295102 - DNA, 100 bp, Homo sapiens
tgttgttcaggctgccctcaaactcctggactgaaacgatcctctcatctcagcctccaaaagtgctggcattacagtttggtggagaaccattgtcata

SEQ ID NO: 295103 - DNA, 100 bp, Homo sapiens
cagctgcagagccagatgatccacaggatgctgtagtagcaaatcagactatgaaaatgatgttagacaaaaagcaaattcgagcaattttcttattcga

SEQ ID NO: 295104 - DNA, 75 bp, Homo sapiens
gaggagcggaccagcgccaagggccctgagaccatgtggaagtagtggaggaagtggaagtcgagaaaacagtgg

SEQ ID NO: 295105 - DNA, 90 bp, Homo sapiens
gtagcagcattggttttccaaaaaatgtgagactttttcttggacgaattcagatttggagcaagaggtggtggtggccttcccccgaag

SEQ ID NO: 295106 - DNA, 100 bp, Homo sapiens
ttttgcagagatcataccccagaaccaaaaggccattgctagttccctgaaatcctggaatgagaccctcacctccagtatatttatcctctggcacggg

SEQ ID NO: 295107 - DNA, 123 bp, Homo sapiens
tttgagcgatccctctccccggggcctggccgcgcgctgctgtgttctggaagggctcattgtacagtcaaggcggcagaaagtactgaaatcccaccttatgtgatgaagtgtccgagcaat

SEQ ID NO: 295108 - DNA, 100 bp, Homo sapiens
gcatttcctcgtcgagcgcaacccaagctacgtaattcgaattgacttgattttttcaagtaatcctagaaagggggagcattccatatagaaactgctg

SEQ ID NO: 295109 - DNA, 99 bp, Homo sapiens
caaatccccctggacctgcctgggtcgccttatgccctgcaggtggtccattatggctgacatgcaaaatctggtagaaagattggagagggcagtggg

SEQ ID NO: 295110 - DNA, 83 bp, Homo sapiens
ctgctttccactcggctcctgtcgtccgttctctcaggctcccgttcagacacagaatgttcagcttaacaaagaaatgacac

SEQ ID NO: 295111 - DNA, 50 bp, Homo sapiens
cgcggatctcaccgccgctcagggtggtataagttgaaatccaaaccagg

SEQ ID NO: 295112 - DNA, 100 bp, Homo sapiens
gctggaagatggggatggcatcaacctgaatgacatcgagaaggtccttccagcctggcagctatccgtggtcctgaaccagttatgtgtgttgcatgag

SEQ ID NO: 295113 - DNA, 100 bp, Homo sapiens
acttggcaagggcttattgttcctcactggatgtgtgtgagaagtggggagaaatgccaccactacaacccaaacatatgagggaagccgttagaaggtt

SEQ ID NO: 295114 - DNA, 83 bp, Homo sapiens
caacgacaacgacctcagctgcgatgaccgggactttgtagccaagcagaaggaggacctggagctggccatgaagaggctca

SEQ ID NO: 295115 - DNA, 100 bp, Homo sapiens
gtgaacaacccgttcttgcctcaggccagtcgcctccaggccaagagggatccttcacccgtgtctggcccagccccagcccaggggaccccagacgtct

SEQ ID NO: 295116 - DNA, 98 bp, Homo sapiens
ttgatacgactgccataaacaaaagctattacaatgtgatctcccttgagtttagaaatctggctgagaaataccaaacagtgattgccgacatttgc

SEQ ID NO: 295117 - DNA, 75 bp, Homo sapiens
cgacggggcgcctctgcaactcacagtgcagattcactttataggaacagcttcagcttcagtgatgaaaaactg

SEQ ID NO: 295118 - DNA, 90 bp, Homo sapiens
cgctgcgcccgcggccagggccgaggcaggcctgacccggggccgggcagcccgcgcgactttcggctgatttaaactgcaatattcaag

SEQ ID NO: 295119 - DNA, 73 bp, Homo sapiens
tgcgatctggacgcggcgctgctgaccgacatcgaagctgcggcatgaagctgaacctggactatctgctgga

SEQ ID NO: 295120 - DNA, 98 bp, Homo sapiens
ctggagcacgagtgcccggagagaagcctgagctgccggcattgccgggcaccctgctgcggagcagacgtgaaggactcagaattcatgattgaaga

SEQ ID NO: 295121 - DNA, 75 bp, Homo sapiens
gagcgtatcggcctcgccactgcagggcaccgttcctgccttgggcgctcatgggcttctcgctgctgctgggca

SEQ ID NO: 295122 - DNA, 90 bp, Homo sapiens
gagggcattcagactaaaatctacaaccttctcattcagacacacggaagaggatcacctagcccgggtagaagaggcaatcacccgtat

SEQ ID NO: 295123 - DNA, 100 bp, Homo sapiens
cggaggcatcggaggcggctgcgagagtggcagaggagctggcggagagcggcctgcgggcgatcgggccgagccgggaagatttccagaggattccaga

SEQ ID NO: 295124 - DNA, 82 bp, Homo sapiens
cgctgaactgctccgatcccactagtgagaggaattcctggtgactggaagggggagtgactcaggccctcaacctctagca

SEQ ID NO: 295125 - DNA, 100 bp, Homo sapiens
aaattaatcgattaaggcagaagatacaggcagaacatgctagtcatggagatcgagaggaaataatgagacaggtgatttggcttctgcacagttagga

SEQ ID NO: 295126 - DNA, 121 bp, Homo sapiens
ggcaggacgttcagccctgggattctggccgaccctcgccttccttctctgcagcttccccgcaggctgctttgaatgctgcatcaagtgtctgggaggagtcccctacgcctccctggtg

SEQ ID NO: 295127 - DNA, 100 bp, Homo sapiens
gcccagccaaatgcaggccgccgccctccctgaggagatccgttggctcctggaagacatatgtagagtgtgtcggtcagaaggaacacctgagaaaccg

SEQ ID NO: 295128 - DNA, 73 bp, Homo sapiens
tcacctccaaatactggtcccacggaatccctgggccactggagtcaaggcttgaagatttctatgcaggacc

SEQ ID NO: 295129 - DNA, 50 bp, Homo sapiens
ctccagggttctttggggcccgagctatttgaactgctgggacctgaagg

SEQ ID NO: 295130 - DNA, 93 bp, Homo sapiens
ggaagcagccgatccagcctgcggagcctgtggggcagtttgatgaaggccggaacaactttgaaggggaggtcaccaaggagaacctgctgg

SEQ ID NO: 295131 - DNA, 100 bp, Homo sapiens
caactccaccgagcatgagctgaccgtcagcaccaggagcagcgaggcactcatcctgcacgccggcgagtgccagcgctgtgagccgtgagctttgagg

SEQ ID NO: 295132 - DNA, 75 bp, Homo sapiens
cgcggagaatgcagcaggctgctcctacagatcctgacttaccaccaggtgggagacctacctgatgcagatatt

SEQ ID NO: 295133 - DNA, 82 bp, Homo sapiens
ccgcgcctgcacttagccccgcgcccgaggctctgacgcccgctctgcggcttcggtgtttgaacaggccacagtccaggag

SEQ ID NO: 295134 - DNA, 86 bp, Homo sapiens
acttaaggattcagagaaagagaactctttgttaaagaagagaataagatttttggaagaaaagcttcacttaaaggacaagaagc

SEQ ID NO: 295135 - DNA, 87 bp, Homo sapiens
gccaccgccggacttcaatgcccagtccccagctcgccagccgccctcacaaagccaatgctgaggagatgaccaagtaccacagcg

SEQ ID NO: 295136 - DNA, 75 bp, Homo sapiens
tggaggtggttctttacaggatatttatcacggcggaagaaggactcggtggagagccacccgacctgggtggac

SEQ ID NO: 295137 - DNA, 50 bp, Homo sapiens
ggaaagtacaggtcctgacagctgtcctcatcaccgggggcatcgtggcc

SEQ ID NO: 295138 - DNA, 59 bp, Homo sapiens
aaggtggagccaccagcctctccttgtgttatagttttgccgctggactcttccctccc

SEQ ID NO: 295139 - DNA, 96 bp, Homo sapiens
caccgtttcctccaggacagcacctagtcgtggccggaggagtctcagagctgtcagaaaggatgtacagttacccagcacgtgtacctcctcctc

SEQ ID NO: 295140 - DNA, 74 bp, Homo sapiens
cgggcagccgagaaggtgtccgaggcccgcaaaaagtttccaggatggcttctgcatcaacttctaaatataat

SEQ ID NO: 295141 - DNA, 90 bp, Homo sapiens
ggacattattttgttcagggatcgctttgatggttatgtattccttgacaataaaggacacaactcagatgggaagttcatcgcccgggc

SEQ ID NO: 295142 - DNA, 100 bp, Homo sapiens
gctgtgtggttgcaacggagataaattcccggaaccgcgattcggcgtgtcaggtgagcgagtgctgtgctttcatgggcctcttctttatgaagcaaag

SEQ ID NO: 295143 - DNA, 82 bp, Homo sapiens
gcggccaatggcacggaggcctgcgtgtaactaggatttctacctcaaccgcgagacctatgcaaggacggtgtggaccaac

SEQ ID NO: 295144 - DNA, 50 bp, Homo sapiens
tgacggaggagcttgtaccaccgtttgtagaagactatgaacctaccaaa

SEQ ID NO: 295145 - DNA, 96 bp, Homo sapiens
gccgctccgagtggaggcgactgggggctgaagagcgcgccgccctctcgtcccactttccagacccaacatgagtgaagtttcctgcaagaaacg

SEQ ID NO: 295146 - DNA, 100 bp, Homo sapiens
ctgaacgtgcgcctcagcctgcgggagcccccggccgggcatgagtcagaggacagcatgtctacactggctggaaggcgaggaatgagaccaaaaatga

SEQ ID NO: 295147 - DNA, 75 bp, Homo sapiens
ggaactaaggcggaggaactgagacgtttcgaattccagatgtctttggtggacttgggaaagaggttgctagaa

SEQ ID NO: 295148 - DNA, 74 bp, Homo sapiens
ggtcctctgggacagcccctgccttctaccaggtgaataagtctgatgacacagcagaacatcttctggagttg

SEQ ID NO: 295149 - DNA, 83 bp, Homo sapiens
aaaagtttgtcattaaacccatcgacaagaaggcacctataacgaaggaggcccaacttcattcaataaggagcctgacggat

SEQ ID NO: 295150 - DNA, 98 bp, Homo sapiens
agatggccagtttgccctctcaggctcctgggatggaaccctgcgcctctgggatctcacaacacttcagtattgatgctcctccatcctttaagcca

SEQ ID NO: 295151 - DNA, 90 bp, Homo sapiens
gggaaaaggacgccgcggtcttcccaggcgtcgcggagagcagaacaaaatccagtctcatagcagaggagaatataatgtttacagcac

SEQ ID NO: 295152 - DNA, 100 bp, Homo sapiens
gtctctgaccatgtggaattcccagtacgacaggcagtaagagattcaacactacatttaaaagagggaatgaaagggcaattaacagaagcttcttcag

SEQ ID NO: 295153 - DNA, 137 bp, Homo sapiens
gtggatttccgaggcaagaaggtgatcgaactgggtgcggggacaggcatcgtggggatcttggcagcgctgcaggctgagtgctgtccaggaggcccagttaaagcggctcgaggtgacaagaccccgagtgctgg

SEQ ID NO: 295154 - DNA, 100 bp, Homo sapiens
cggggcttgccctggtcttgctcggccgatgaagtgcagaggtttttttctgagtgctgagattgattctgatgacaccggaggcagcgctgctcagaag

SEQ ID NO: 295155 - DNA, 95 bp, Homo sapiens
ggtcggtcgagtgtggcctgtgtggactcgcatcttgcccgaagccgggcggaggagagctcaagctaaggttatgggtgctacatgtgtgcttt

SEQ ID NO: 295156 - DNA, 51 bp, Homo sapiens
cagctggtataattcatagagcaagaaactatattcagtctttgactcaga

SEQ ID NO: 295157 - DNA, 100 bp, Homo sapiens
gccgcgggagccgctgcccgaactcccggcccgaactccagcagcctcgtcttacagcgtgactgcaaagaaaaagacttttgttttgcaaaagaaaagc

SEQ ID NO: 295158 - DNA, 100 bp, Homo sapiens
gcttttggtaccacctcttctgcaacagttaataatccattccttccatctgaagatcaggtatccaaaacaaggatgaagtaggtgttccaggtagcaa

SEQ ID NO: 295159 - DNA, 50 bp, Homo sapiens
gagctgctaaaaattactgcggtgaacagcttctgcagaaagccgtcatt

SEQ ID NO: 295160 - DNA, 75 bp, Homo sapiens
aagatgatgatgaattgggtagagagaccaaagatcttgatgagatgaactctttgccagcagagaggatccagg

SEQ ID NO: 295161 - DNA, 100 bp, Homo sapiens
aaaaacttggcagtggaagttttggaactgtctatctggtttcagacaagaaagccaaacgaggagaggaattatatttggagttcttacaacatggcag

SEQ ID NO: 295162 - DNA, 101 bp, Homo sapiens
gaaggtgatgcccaagatggaccagggcttccttctgaactctccccagctattgaggaagaagagtcaaagagtggcttagatgtcatgcctaatatttc

SEQ ID NO: 295163 - DNA, 98 bp, Homo sapiens
agatgacacctgtttggagaagctcctggactggtttaaaacggtcactgaaggagctctacgtctcctccgagagccgcttcaacaccctggccgag

SEQ ID NO: 295164 - DNA, 100 bp, Homo sapiens
ttttccttttcgttaaatcctcagggaatgggtactgttcaaaaaggaatgccccacaagtgttaccatggcaaaactggaagagtctacaatgttaccc

SEQ ID NO: 295165 - DNA, 99 bp, Homo sapiens
ggagctggagcagatcccccagccggctgagacagggctaccacccgatgccccatgaagtggagatcgcacacaccaagaagctgttccgcaggagga

SEQ ID NO: 295166 - DNA, 100 bp, Homo sapiens
gagaaacattagccttaaatgaaagaatcatgttgtctcttgtcagcacaggagaactgcaagcacatgttgaccagataactgaaatggcagcagtaat

SEQ ID NO: 295167 - DNA, 75 bp, Homo sapiens
gccgtctctgtcaagcctggagacgcgctctgcccggatggccctagtcttcgtgtacggcaccctgaagcgggg

SEQ ID NO: 295168 - DNA, 99 bp, Homo sapiens
aactgtcccctctgactaccatttctaaggagcctttgatgaagtgacctcatgcctggtgaaggtgccagagaagacagaaggtggcaacaacatggc

SEQ ID NO: 295169 - DNA, 98 bp, Homo sapiens
ggacggctgcgtcgcccgaggcgaggaggagcgctggcggactgactgcattgcacagatgatggatatttacgtatgtttgaaacgaccatcctgga

SEQ ID NO: 295170 - DNA, 74 bp, Homo sapiens
atcaacttcattcatcatggaagaatgttccatccgtaaacagattaaaagtcattcaggagagcaggaaagaa

SEQ ID NO: 295171 - DNA, 88 bp, Homo sapiens
tgtggaacgacacaacaagccggaagtggaagtcaggaagaagttctaaaggattttgaagacttggctggaaaactcccatggtcaa

SEQ ID NO: 295172 - DNA, 82 bp, Homo sapiens
aagcagcttgggcttccagctcagcagggaaccctgcagattttactatgagcagcgattactacggaaggtcttcgaagaa

SEQ ID NO: 295173 - DNA, 75 bp, Homo sapiens
cagggatcggaagccggttggggtgtgagaggttttctcgctctagtaattttgcacgatggcagtcaaatgaga

SEQ ID NO: 295174 - DNA, 149 bp, Homo sapiens
aagagatactgtctgcgacatgtggaaaatgacggttataagaccatttatttctttggagacaaaactatgccagtatctgtaccacgttttgaccaaaaacaccacagtcacagaacagaaccggaacctgctagtggagaccatcc

SEQ ID NO: 295175 - DNA, 132 bp, Homo sapiens
tgtcgctgtgctcaaaactgtcattttgggactgctgtgcctcctcctcctgtggtggaggagaaggaaagggtatttctcaagctgccagatacgtttaccaacgactcatcaacgacgggattttgagcc

SEQ ID NO: 295176 - DNA, 74 bp, Homo sapiens
gggccgtcaccctgcctcccctgcgtcccgccaccggccgcttctgtcctcgtgtactaatggtcacttgatgt

SEQ ID NO: 295177 - DNA, 100 bp, Homo sapiens
gccagggcttcctggcccgaaaggagagcctccctggtacctgacagtgtaaagaaggagctcctacaaagaataagaacattccttgctcagcatgcca

SEQ ID NO: 295178 - DNA, 75 bp, Homo sapiens
agttgcagagctacgtggacgcaggaactccatggaagatagatgataagcctgtaaaaattgacaagtgggatg

SEQ ID NO: 295179 - DNA, 145 bp, Homo sapiens
gaagaggtgggtgctcgccctggtcttcgggctgtcgctcgtctacttcctcagcagcaccttcaagcagaatgaaatgaatgatgtgcctttctttgatatccaactgccttacgaattggcaatcaatatatttcagtatctg

SEQ ID NO: 295180 - DNA, 100 bp, Homo sapiens
gaggattcgttttcctggctttgagcccctcacaccctggatccttgacctactagcttgggcactgtttaaaggaaagttccgagaaggcatcgacaag

SEQ ID NO: 295181 - DNA, 74 bp, Homo sapiens
gtacgcgaaggatatcggtttcattaagcggtttgctgtgtttcaaagaagggtgctgaccacagtagtgctcc

SEQ ID NO: 295182 - DNA, 98 bp, Homo sapiens
tcggggcgtctgggcagcctacgctttccggaattggattcaagtacgtggctctgggagacctcatcatcctcatcacttttggcccgctggctgtg

SEQ ID NO: 295183 - DNA, 51 bp, Homo sapiens
ttgaagctgactactaaggagaataaggccatccgggatggtgtcattgag

SEQ ID NO: 295184 - DNA, 83 bp, Homo sapiens
aagctctgtccgcggagaggagtgggacaactcctaaaggaactgtggctgcaccatctgtcttcatcttcccgccatctgat

SEQ ID NO: 295185 - DNA, 90 bp, Homo sapiens
aacttcctgtagctcagataatacaccagattggagacccacagttggtgatctgtatggactgctcggcagacaccatgaccaaccgcc

SEQ ID NO: 295186 - DNA, 75 bp, Homo sapiens
cgggcgaaggcagcatcagccatgaggagcagaagtcagtccggctgtctgaaggaatggctcccgtgtcttcat

SEQ ID NO: 295187 - DNA, 98 bp, Homo sapiens
aagcgggattggaccaaaccagagggacagagtcttctgggtctctctgcctgaggccctggagggagagaagatggaccagcttttgggaaatatga

SEQ ID NO: 295188 - DNA, 83 bp, Homo sapiens
ccggcagccgacggcaaaggtgtcgtggtggtcattaagcggagatccgggtttggaaatcccttgtctccaggttgctggga

SEQ ID NO: 295189 - DNA, 100 bp, Homo sapiens
caaagggaaaaactgttccaatcgatgattcctctgaaactttagatggacaatctaaaatatgtaaatcagttgaagaaggaaaatgaacgtgcccagg

SEQ ID NO: 295190 - DNA, 49 bp, Homo sapiens
tgacatgcccgtcctatatgacagagttactggaggtgaactgtttgaa

SEQ ID NO: 295191 - DNA, 100 bp, Homo sapiens
agggaacagccagacgagagcttcagccatcacgaggatgatttcggaacctggagaaaatgtggagccgccaccaaaatgcagattttcgtgaaaaccc

SEQ ID NO: 295192 - DNA, 74 bp, Homo sapiens
tgatgatgtgcgggttcaggaggtacccaaactgaaggacttcgagtaagaaggtgatttacagccagcctagt

SEQ ID NO: 295193 - DNA, 75 bp, Homo sapiens
gggctgagaggaatcttctggagtactcttattttgaaaaggtcatagaaggttatgaaatagcctgcagaaaag

SEQ ID NO: 295194 - DNA, 80 bp, Homo sapiens
actctcaccatcatcaagacggaaaaagtcgatctggagcttttcccctccccgggaatccatgggaaagagctatgatg

SEQ ID NO: 295195 - DNA, 75 bp, Homo sapiens
caactcggactgcacaagctatttttgatgacagctatttgggcttgaagtagaaaatgccatgatgagaaaaac

SEQ ID NO: 295196 - DNA, 82 bp, Homo sapiens
tcttcagccatctgactctcctagggggacattgacaaggtagatgaactgatgactgacatcacggaacaacaggaggtgg

SEQ ID NO: 295197 - DNA, 75 bp, Homo sapiens
aaatcaggttgccgatcttcacaccgtcccagagggataacttcaaactaatgtgtactaatgccatgatttaca

SEQ ID NO: 295198 - DNA, 101 bp, Homo sapiens
ccggcccagagttcgtggaggtcattggagatatctctgcgactttacctactacacctctttgtaccagagtcacggtcgatcagccttcgtccacgtgc

SEQ ID NO: 295199 - DNA, 100 bp, Homo sapiens
gtttggcactaccctgaagaactgtaggcatctcttggaatgtgctaaggaacttgatgtccaaataattggggttaatatgtgcaacgtatagagaaac

SEQ ID NO: 295200 - DNA, 83 bp, Homo sapiens
cgatccctctgcagtctttcccttgaggctccaagaccagcaggtatcatgatattagctggtttgacatcaagtcatttgtg

SEQ ID NO: 295201 - DNA, 75 bp, Homo sapiens
tacgaaggccacctacaaatagcaggttggtgttcgaggaagagacattgttgttcttggtgtggagaagaagtc

SEQ ID NO: 295202 - DNA, 96 bp, Homo sapiens
cgcctgcacctggccaggctgcggctggagacctgtcatttactccatcctttatagtgatgctacaggacgaagaggaatggataaaaacattgg

SEQ ID NO: 295203 - DNA, 90 bp, Homo sapiens
tccagagattgccgcagatgctggctcacgttcgaaccctggaggtgccactggacgagcgcatcgtcttctcggggaacctcttccagc

SEQ ID NO: 295204 - DNA, 82 bp, Homo sapiens
cccgggtgccgaggagcgggaagagttgctggggtgtcgtgaaaactacccctaaaagccaaaatgggaaaggaaaagactc

SEQ ID NO: 295205 - DNA, 75 bp, Homo sapiens
acggcggatttgacctgtacttcattttggacaatacgaggatgtcgtccaggaaagattgtgcagatgactgaa

SEQ ID NO: 295206 - DNA, 100 bp, Homo sapiens
gcaccagaagacttttctcaaaactggaaggcgctgcaagagaaaaagcttgtggtgaaggggggcaaaaaaaagaagcaagttctgaagttcactcttg

SEQ ID NO: 295207 - DNA, 82 bp, Homo sapiens
cgcagagacaaaagaaacgggccccgactgggcgccaatgcttcggcattagagaaagagattggtccagaacagtttccgg

SEQ ID NO: 295208 - DNA, 75 bp, Homo sapiens
tcatctttgaactactgccggagcttctgccaggaggaggtgcgccagtctgtaactcctgccgagccagtccag

SEQ ID NO: 295209 - DNA, 100 bp, Homo sapiens
ctcagctgaaggacccgcagggccccgggccagacgcaaacatgcagatctttgtgaagaccctcactggcaaaaccatcacccttgaggtcgagcccag

SEQ ID NO: 295210 - DNA, 73 bp, Homo sapiens
caaacaaactacccattttcttttttggaactcatgagacggtctccaactgaattccttgaagagaaaatgg

SEQ ID NO: 295211 - DNA, 95 bp, Homo sapiens
gaccagctcatgggcacggctcgggacgaaatcatgttgttgatgtcagtgttgcggtcagtactcctgcaggactcatcacacctattgtgttt

SEQ ID NO: 295212 - DNA, 51 bp, Homo sapiens
aacttctgcccagctctccttggacaatcatatcctgattcagcccttcct

SEQ ID NO: 295213 - DNA, 74 bp, Homo sapiens
gccgtccggcctccctgacatgcaggctgaggaattcctctacagattcttgccacagaaaatcatatacctga

SEQ ID NO: 295214 - DNA, 82 bp, Homo sapiens
cttgactgtatacagaatcttgaatcagaaattgagaagctgggtgttgaaagcagcaggggcctagaagacattaaaccga

SEQ ID NO: 295215 - DNA, 90 bp, Homo sapiens
cggaaccgagcgggcaggaggccaccgctgcagcgcgggccccgcagaggaaggaagccggcgggcgggctcaggaatcttgcttttaag

SEQ ID NO: 295216 - DNA, 51 bp, Homo sapiens
gtgaacatgccaggagagcaatgcaaaagctgccactgcagagccccgcca

SEQ ID NO: 295217 - DNA, 100 bp, Homo sapiens
gtcaacatggaggagagctactactgccgctgccaccgtggctacactctggaccccaatggcaaaacctgcagccgtatggacgacaaaggcgacccga

SEQ ID NO: 295218 - DNA, 83 bp, Homo sapiens
ggacgcagtgatttgctccccctcgtgcagcaacccccacacccagcaccagcaggatacagacgtccctcaccagtgccagc

SEQ ID NO: 295219 - DNA, 75 bp, Homo sapiens
caacctctcgtacatcggcgagggcgcctacggcatggtgtggtcctcagaatggttggaatgaccctccagctt

SEQ ID NO: 295220 - DNA, 97 bp, Homo sapiens
agcttggaatccctcagaacactattttggtgcagactttgctgagggtgacccagtcagcagataagcagagagccctagaagaaaccaaagccta

SEQ ID NO: 295221 - DNA, 75 bp, Homo sapiens
tgggaaagaaagtggccttaaaacttttgaacaggtgattgagtgtaacttgagagcttctcgatccttcccctt

SEQ ID NO: 295222 - DNA, 96 bp, Homo sapiens
cccacatgtgctgtctttataacaatgaaccctgggtatgctgggcgatcagaactgccagataacctgaaggtaaaatatacccaggaccataaa

SEQ ID NO: 295223 - DNA, 74 bp, Homo sapiens
ctgccgcgactgggaggagcgccggaacgccgaggcccagatgtccaacatcacagtcacatacagagatggcc

SEQ ID NO: 295224 - DNA, 98 bp, Homo sapiens
cgaattcagaaggatatcgacgtcgtgatccagaagtccagagctgaggactgcctgtttgcagagatggagtttcactgtgtcagccaggatggtct

SEQ ID NO: 295225 - DNA, 100 bp, Homo sapiens
catgtgagtgaccatgcagcaaaagaaggagggtcctctcagtgattaagctctcgtgctcattcccccatgatcgccgtaggaagtgatgacagtagcc

SEQ ID NO: 295226 - DNA, 76 bp, Homo sapiens
aactatagcaacttggtatcactaggatcccattgaagataccacgctgcatgtgtccttagtagtcatgtctcct

SEQ ID NO: 295227 - DNA, 100 bp, Homo sapiens
ggaaccagaagcagattgccaacattgaccgtattacaaagagacgttgatccagcagcacgtgtcatttcattaggtcctgtatctgatgttgtggtta

SEQ ID NO: 295228 - DNA, 96 bp, Homo sapiens
ttatacttggcactgttatctgctgtttctgcttcaattaatgttggagaagattgtccagtgtttgatggactctttgagttttgtcagctctca

SEQ ID NO: 295229 - DNA, 108 bp, Homo sapiens
gaagacctatatcacagatcctgtttcagccccctgtgcgccaccattgcagccaaagaaatacaggtatcaggatgaagatacacctcctcaagagcatatttcccc

SEQ ID NO: 295230 - DNA, 100 bp, Homo sapiens
taaagatgatgatatccttctcaaccttgtgggatgtgaaaactctgttactgaagggtcaacatatttcactggcacctattcacaagcttgaagaagc

SEQ ID NO: 295231 - DNA, 100 bp, Homo sapiens
cagtaaggctgaaatcattgaagtgcttggagtgcagaactgaaagagatactacatcctttgaagacataagtccacaaggtgttagtgatgattctag

SEQ ID NO: 295232 - DNA, 51 bp, Homo sapiens
atctggaggcagtatcacctaacggttcctgggtggagctacccatgaaca

SEQ ID NO: 295233 - DNA, 103 bp, Homo sapiens
tgcacataccacccaggtgttccggtctttcacgatgcattaaaggtcactggaaggactgagcgcattcaggagcctggaggaactcatcttggacaacaat

SEQ ID NO: 295234 - DNA, 99 bp, Homo sapiens
agtccagccaacagcagaagagaaagccagttatccacggactggaagatcaaaagaggggaagtcccacctggccatcgtgcagaaggtaaacaacga

SEQ ID NO: 295235 - DNA, 98 bp, Homo sapiens
ttttgcaaaagtaaaattggcaagacatatccttacaggcagagagccaaactggcaagacgcagtcaagaacgggacaatcttggcatgttggtctg

SEQ ID NO: 295236 - DNA, 100 bp, Homo sapiens
ctttgctcaggttgcaattgatgcaaaagtgtgtgtgctgtatttatggagtttaaagattaatcatcccaaaacattgtttctgcttcggggaaatcat

SEQ ID NO: 295237 - DNA, 98 bp, Homo sapiens
ttcagcagcagcagacgtttggaaaggtactccaaagattcaggtttactcacgtcatccagcagagaatggaaagtcaaatttcctgaattgctatg

SEQ ID NO: 295238 - DNA, 100 bp, Homo sapiens
aagagaagattcaaccaaacccaccatcttctggtttcattgatgaacgggaccgggttcagaagaaaacgttcaccaagtgggtcaacaagcacttaat

SEQ ID NO: 295239 - DNA, 75 bp, Homo sapiens
atttgaagctggcagtctggttccaggttcgggaagaataccggaagtgggcctgcctagttgctggggggagca

SEQ ID NO: 295240 - DNA, 100 bp, Homo sapiens
ggaagagggactggaaccatctcagaagccatgcccctcaggctggaacttgccctgtctcctcgcagatgaggtatcattggaacatttcaagatcatc

SEQ ID NO: 295241 - DNA, 75 bp, Homo sapiens
cgctggagaaggagaacgacggctactttcggaaggtacatgtgaagattttttggcagcttagcgtggaaacca

SEQ ID NO: 295242 - DNA, 100 bp, Homo sapiens
atagatcttctgcactgtttacaggcacagttcaatttcaccatttagtattgagagcacaagacgccagagacggtctgaatccccagactccagaaaa

SEQ ID NO: 295243 - DNA, 90 bp, Homo sapiens
gtccgagaccatcctgggcggcctggggctcgggctgggcggtggcgactgcagaggcgatatgaaaggtgaggtctatccatttggcat

SEQ ID NO: 295244 - DNA, 100 bp, Homo sapiens
atctcaacaccctgagtgcggatttctgctatgatgacagataatgttaattcaagactctcgaagagaagcttcagtgcagatggatttgagatgctac

SEQ ID NO: 295245 - DNA, 100 bp, Homo sapiens
tgagggacagcgagagcgtgccaggcgtgtactgcctatgtgtgctatagtaaagctgttacttcgtcacggtggaaatccatttcaagctaataaacat

SEQ ID NO: 295246 - DNA, 90 bp, Homo sapiens
tggaaatggaaattaaatgggttccaggttcattcatagtgcagcatacatcagaacttcgttccttgttattgctgagtagtattccat

SEQ ID NO: 295247 - DNA, 90 bp, Homo sapiens
cttacctacaaatcttgattgaacaattaaaggaagaaatagaaccatttccagaagaaagggagaactttcttcagcaattgtacaaat

SEQ ID NO: 295248 - DNA, 80 bp, Homo sapiens
ccgtgtctctggattcaagtcccaggagtcctgaccagagagcagattctgctcctaagtgtaggagagaacttggtgcc

SEQ ID NO: 295249 - DNA, 75 bp, Homo sapiens
atcttatgacctactttagaggaaggccgtcaccgatgggttgtatatactactgaaatgaatggcaaaaacaca

SEQ ID NO: 295250 - DNA, 83 bp, Homo sapiens
tccagaagtttcagttcagtatgaagaaaaatttcagaaccatcacaaactgggtgccaagtaccggggctccatccatgact

SEQ ID NO: 295251 - DNA, 129 bp, Homo sapiens
caagaagccaacagcgaggctttcagttctttggaattccattcttttccttattcttctgatgtggatccaggctttctctggatctggcaatagactggatggaaagaagaaaggggtagagcccag

SEQ ID NO: 295252 - DNA, 100 bp, Homo sapiens
aaacctcaaagcatggctaagagtgttcagtagaaatggccagagagatgacacgggggaaattcctcaatattctagagaagcccaagaagtagcagct

SEQ ID NO: 295253 - DNA, 90 bp, Homo sapiens
acacctacagccccgacgaacatttctgggtgacactcaacaggattcccgtcttcgagtgcttcgactgaccatgatcccctgggcccc

SEQ ID NO: 295254 - DNA, 82 bp, Homo sapiens
ctccctggacgaactcatcaggaagcgcggggcggcggcgaaaggacgcaaaatgatgcttcaacacccaggccaggtctct

SEQ ID NO: 295255 - DNA, 101 bp, Homo sapiens
ttctatgcaggccccaatggcagccagtttggattttcactggacttccacaaggacagccatgggagctggatctaccatgaaagacttgtgaatccagg

SEQ ID NO: 295256 - DNA, 100 bp, Homo sapiens
gggaaacaaggcttccagtgccaagaatgccagctgatgaagaccgagaggccgcgacccaacacctttgtcatacgctgcctgcagtggaccacagtca

SEQ ID NO: 295257 - DNA, 74 bp, Homo sapiens
actaaagccacctgtacatctttctccttttgaattacctgccctccgaagaaaagaagaagaggacagtgctc

SEQ ID NO: 295258 - DNA, 100 bp, Homo sapiens
agagaagcacgtgtttgagcaggcatccagcaaccccttcctggtcggattacactcctgcttccagacgacaagtcgtggccttcaagtcacaggacgc

SEQ ID NO: 295259 - DNA, 120 bp, Homo sapiens
cgccggggccgccatggagcccgactcggtgattgaggacaagaccatcgagctcatggtgaatgaaaactttgccattgatttgatagcagagcagcccgtgagcgaggtggagactcg

SEQ ID NO: 295260 - DNA, 101 bp, Homo sapiens
gggtggtgctggctcagtacatattcaccttgaagaggaagacggggcggaagaccaagatcatcgagatgtgatgctattgctgagattagagccatttg

SEQ ID NO: 295261 - DNA, 100 bp, Homo sapiens
agtaaggtgctgcggagcgacgcggcctgggaggataaggagacagaagaaattctggcagatgtgctcaaggtggaagtcttcagacagacagtggccg

SEQ ID NO: 295262 - DNA, 80 bp, Homo sapiens
cttggggaaggaggcgtcttggcccgggcagcagtggcggcagcgcccgagagagcttttgtctggtcctctgagcccca

SEQ ID NO: 295263 - DNA, 75 bp, Homo sapiens
gcagattctggaaactgtacattgaagcagaggcaatcttgctgccaatgatctctccccgtcccgaatagccag

SEQ ID NO: 295264 - DNA, 101 bp, Homo sapiens
agaaggctctgtgcaatcctcacattcaagctgataggctgcgctaccggaatgtcatccagcgagtgattaggagaaataaagtgtagtccttctgaaag

SEQ ID NO: 295265 - DNA, 75 bp, Homo sapiens
gaagacagagcgggtgactggaggtggctccccagatcactccaagaactgaggcccctgtcagcagtgtcagta

SEQ ID NO: 295266 - DNA, 83 bp, Homo sapiens
gcagatggactcggagcgccccgccgacaatgcagatcttcgtgaagactctgactggtaagaccatcaccctcgaggttgag

SEQ ID NO: 295267 - DNA, 98 bp, Homo sapiens
ttgggccggtggacgtacccagcgctcgtgtactaatggtcacttgatgtgcgctggctgttttatccacctactagcagatgcccggctgaaggagg

SEQ ID NO: 295268 - DNA, 89 bp, Homo sapiens
ggaggattcgatggcaattttttgtggaacagaattggagcagtatcctgtggagcacccagacaaattcctgaagtttggcatgacac

SEQ ID NO: 295269 - DNA, 75 bp, Homo sapiens
tgccctttgcctttttctttctggaatcagaaggctttgctggcctgaaaaagccgttggacataccagatggtc

SEQ ID NO: 295270 - DNA, 101 bp, Homo sapiens
gacctgctgctgcttcaatgtccgcatcgcaaccaccgccctggccatctaccatgtggtgacgcggcgcacggcgcggatggtggccgagtggcagtgtg

SEQ ID NO: 295271 - DNA, 136 bp, Homo sapiens
tgccttacactttcttgtacaaagtggaatttcctactgtatcatgatcatcataggagtggagaacatgcacaactttggacatcagacagtgcaggagaagaatgtgatgcggcagaaggggctgaaaactaaa

SEQ ID NO: 295272 - DNA, 100 bp, Homo sapiens
actggctcctgattacgatgctttggatgttgccaacaaagttgcacactgggccacagaggatccagcaaggatgaagaaatggagcagcacagacttg

SEQ ID NO: 295273 - DNA, 103 bp, Homo sapiens
tcaatattgcctggacgattgcttagaggagtatttcctgaactgtgtgggctggagcattggatttgctaaaggagcttaagaatattcctatgaccctgga

SEQ ID NO: 295274 - DNA, 100 bp, Homo sapiens
ctcagaagacagagggttttcttttgagggaatctaagggaggaaattatcaactgtgcacaaggaaaaaaatagatatgtgaaaggttcacgtaaattt

SEQ ID NO: 295275 - DNA, 50 bp, Homo sapiens
agacctcttcagcatgaagccgagctgcccaatggggaccccaaggaggg

SEQ ID NO: 295276 - DNA, 100 bp, Homo sapiens
tctcgctcggctgcgggaaatcgggctgaagcgactgagtccgcgatggaggagacaggtactgggtgttcaaggacaataacgtagaggaaggataccc

SEQ ID NO: 295277 - DNA, 87 bp, Homo sapiens
atgtcaacagagctatcaatgttcttctggaaggaaacccagacacggaagtccttgttcctgaagcctcagaatttgatgagtggg

SEQ ID NO: 295278 - DNA, 75 bp, Homo sapiens
cctggttcttccaaagtgcccggacccaaaacaggaaattcgtcttctggatgtctaaaagcctcaactaatcag

SEQ ID NO: 295279 - DNA, 74 bp, Homo sapiens
gaggccagcgggggaggggccttcctggtgctgcccctgggcaagatcctggagagctcccagactttgctcag

SEQ ID NO: 295280 - DNA, 75 bp, Homo sapiens
ggccgctaccgctcaggtgctgcaggcacagcccgagaaaccgcagcactacacagttttgcggcctccaggtgg

SEQ ID NO: 295281 - DNA, 100 bp, Homo sapiens
ctaacagcagctgggaaagaagttatgcttgttggaattggtgacaaaatcagaggcatactttatagactcagaaccgtgctgcatactatcctcctag

SEQ ID NO: 295282 - DNA, 83 bp, Homo sapiens
aggatcatgtctgcgagccaggattcccggttctggaggacacgtgccggcggcaggacttcaacccctgtgaatatgatctg

SEQ ID NO: 295283 - DNA, 101 bp, Homo sapiens
aacatcaacctcatctttgcagtgacaaaaaaccattatatgctgtacaaggactgtgaattggagaatcaagaggcacatgagcaagatggaaatgatga

SEQ ID NO: 295284 - DNA, 100 bp, Homo sapiens
acaaacacccggaaagaaaacagccgacttcgacagtctttggtcatgcttcaaggaagaaggtagataatgactataatgcccttcgagaaagactcag

SEQ ID NO: 295285 - DNA, 83 bp, Homo sapiens
gctgaagacatcaagaagatcttcgagttcaaagagaccctcggaacgagggtgtgaagacagagaatgaccacatcaacctg

SEQ ID NO: 295286 - DNA, 50 bp, Homo sapiens
gaccagtaatggcactttacactcggctccttcctcagagaagcttcctg

SEQ ID NO: 295287 - DNA, 46 bp, Homo sapiens
ggaaaacaacttcgagggcagagtattgttgcagcatctggcagtg

SEQ ID NO: 295288 - DNA, 85 bp, Homo sapiens
tatttggggagaatgactgaggagccattgatgtgtaatggcaccttgaaaattatcgaccggaaaaagcacatatttaagctgg

SEQ ID NO: 295289 - DNA, 100 bp, Homo sapiens
aagccggagtattttactaagcccctaaaatgtcgagatttgtacaagttgatgcggatgaaattaaaaggctaggaaagagatttaagaagcttgattt

SEQ ID NO: 295290 - DNA, 100 bp, Homo sapiens
ccgagatgtctcgctccgtggccttagctgtgctcgcgctactctctctttctggcctggaggctatccagcgaaaactttattctcaagagatttctca

SEQ ID NO: 295291 - DNA, 75 bp, Homo sapiens
gacaaccaggcaatgctggatagataccgaattcttatcacaaaggagtctaccatggctcaagaatctcccaaa

SEQ ID NO: 295292 - DNA, 100 bp, Homo sapiens
tgttgaatatgcatctaaagttgatgagaactttgactgtgtagaggtcacaaacatgtcagacaaaagtgaattaaaggctgagttggaacgtaagaag

SEQ ID NO: 295293 - DNA, 100 bp, Homo sapiens
tctgagaaggacagagccaatctactcctcctgggttatgctcaaggaagactagagtgctgcaggtggagaaattttcagcctgtgtttacctgagttg

SEQ ID NO: 295294 - DNA, 100 bp, Homo sapiens
cgtgaacaacctgaacgtcaccgaggagaagtaccaggaggcgttggccaaggggtatgatgtgattgctcaagctcagtcaggtactggcaagacagcc

SEQ ID NO: 295295 - DNA, 101 bp, Homo sapiens
cacctgtctggagcaaggcaaagagccctggaatatggagagacatgagatggtggccaaacccccaggttctgacaacaaaggagattgtgacatattgc

SEQ ID NO: 295296 - DNA, 98 bp, Homo sapiens
gagcatttgctgcagaagcgtagtcggccagagtcgcaatgtatctgctgagcaaaaagatgaaaacaaagaagcaaagcctcgatccctacgcttca

SEQ ID NO: 295297 - DNA, 100 bp, Homo sapiens
ctctctcgctgtgagacatgtctgagactcctgctcagtgtagcattaagacaaatggacacctaccagggaacggagatgtgtatcaagaaaggctggc

SEQ ID NO: 295298 - DNA, 82 bp, Homo sapiens
gaactgtgaggagagtaaaccaagaagaaatccacagatttagttctgtagttgatgtcacttggcgatattcctgcaaaca

SEQ ID NO: 295299 - DNA, 90 bp, Homo sapiens
atgctgcagaggtcacatcggccctcatgttcctccaccagcatggagtcatctacaggcactgtgaagacagtggtgtgcaaagcagag

SEQ ID NO: 295300 - DNA, 100 bp, Homo sapiens
gtcagtacgcgaaggatatcggtttcattaagtgcctttcttcctgacgtggagtgtggtgaactcagtgcattgggccaatggttcgacacaggctctg

SEQ ID NO: 295301 - DNA, 101 bp, Homo sapiens
gccacctacagaaacaaaatgtcaacaaattgatggtttcaccagtgatcattaaagaatgggcagcttacaaaggaaagtctcctcaaaccccggaactg

SEQ ID NO: 295302 - DNA, 97 bp, Homo sapiens
cgatgagtacgaccagccttgggagtggaaccgggtcaccatcccagccctggcaggcatcaagcatgatggaaccatgtgtgatacctgccgccag

SEQ ID NO: 295303 - DNA, 100 bp, Homo sapiens
aagtacagggtcatcaagggcaatctccatccagttcctggtgtacaggcgcagcaccgccgcctcggagcttgagcccctcctccccagctgaccagaa

SEQ ID NO: 295304 - DNA, 50 bp, Homo sapiens
actgcctctgggctcaacagaacacagggctgaaacagctttaagagaat

SEQ ID NO: 295305 - DNA, 75 bp, Homo sapiens
tatggtcattggtcgactgagatctgatgatatttacaaccaggtggacatcttcaataaggagctactgctaat

SEQ ID NO: 295306 - DNA, 100 bp, Homo sapiens
atggccttgcggctcctgaagctggcagcgacgtccgcgtccgcccgggtcgtggcggcgggcgcccagcgcgtggtacggggctgatgttgacgtcaac

SEQ ID NO: 295307 - DNA, 82 bp, Homo sapiens
aacattgttacactggacagattaattctctgcctggtgtgatccctcacatccacaaatctctgattggaaagaagggaca

SEQ ID NO: 295308 - DNA, 120 bp, Homo sapiens
tggagagcccggacatctgctttatatttctctcagaccattcccatcagtgagcattacagccgcagggccgtaggcagccatggcgcccagccggaatggcatggtcttgaagcccca

SEQ ID NO: 295309 - DNA, 74 bp, Homo sapiens
aagtatgcggcgccaggagctacaatgcagatcttcgtgaagactctgactggtaagaccatcaccctcgaggt

SEQ ID NO: 295310 - DNA, 99 bp, Homo sapiens
gactggtgcgcggcctgaaggccggggtgctcagccaggccgactacctcaacctggtgcagtgcgagacgctagaggcaccctggaggagaagaggtt

SEQ ID NO: 295311 - DNA, 90 bp, Homo sapiens
caaaggcgcaagtcgagaggaaactgttgtgcctcttcatattggcgatcctgttgtctgatgtagcccagcagttccagtatgctgtgc

SEQ ID NO: 295312 - DNA, 96 bp, Homo sapiens
ccacgtctacaatggagtcgagtctagaattcacacagagccacctaggtccagatggctgtggaggccaagtttgtccaggacaccctgaaagga

SEQ ID NO: 295313 - DNA, 100 bp, Homo sapiens
caagtgcattgcctttggaaacgagagtgtgtcctgcccagagctcttggaccagcattatactgtggacatgacagaaactgagcactctatccagcac

SEQ ID NO: 295314 - DNA, 99 bp, Homo sapiens
aagcgcccagcctgccgcctcgctgtccctgcggcttctggggatctgggcaccacagacgtccagaagaagaagcttgtggatgccatcgtgtccggg

SEQ ID NO: 295315 - DNA, 100 bp, Homo sapiens
cgcgagctgcatcgcgcgcccgaagggcaactgcctgccttcaacattttgatccaaacaatatcttcaaggcattctttggcggtcctggcggcttcag

SEQ ID NO: 295316 - DNA, 75 bp, Homo sapiens
cggaaaccggtagcgcttgcagcatgatcacccggaagttcaggctgaattctgaaggcaaacttgagcagacgg

SEQ ID NO: 295317 - DNA, 108 bp, Homo sapiens
cgggtcgcaacgctgtgggcgttccaggaggtggtcgtggcgaacctggcagctgcgactgtgccctgtccacggtgcctcctgcatgtcctgctgccctgagctgtc

SEQ ID NO: 295318 - DNA, 83 bp, Homo sapiens
acactaaggaaatgctgaagcttttgcagcagcagctccaggcgcagcacctctcccatgccacacacggccccccggtccag

SEQ ID NO: 295319 - DNA, 100 bp, Homo sapiens
ttacagttacagatcctgacttgatagagaaatccaacttaaatagacagttcctatttcgtcctcatcacatacagaataactgaagtgaagtgatgga

SEQ ID NO: 295320 - DNA, 101 bp, Homo sapiens
caagtattcaccagttaatagcaccagcattaaagggcagtatttaaagtcagttggcaagcagtggaataagatttttgtaaagaaaccttgtgcagcat

SEQ ID NO: 295321 - DNA, 74 bp, Homo sapiens
aagggctggtgggcgatgggcccgtggacatgcgcacctcacacagagagaagaagaaggaggttcctgctgtg

SEQ ID NO: 295322 - DNA, 100 bp, Homo sapiens
tttatttcttctacaaatggttgggccataggaaaaggatacagagtagagtttcatgaacctgaaacttggtggaaatttgatcctgaagaattagaaa

SEQ ID NO: 295323 - DNA, 75 bp, Homo sapiens
tatttctttgaaattctacaaggaacttcaggcacatggtgctgatgagctccctggaattcccatgccaccacc

SEQ ID NO: 295324 - DNA, 149 bp, Homo sapiens
gttttcatggattctaatggaatcaggcagttttgtgtccatgtgaacaactattctggctgtgactcagtcactgacactgagcctgaggacgagaaggttgtttcctactcgaagcagcagaacctgccgacggtgacttcacctgg

SEQ ID NO: 295325 - DNA, 83 bp, Homo sapiens
caggctggtcagtgtggcaaccagatcggtgccaaggttttaaaatcaaagatgggaaaatcggagaaaattgcccttcccca

SEQ ID NO: 295326 - DNA, 110 bp, Homo sapiens
ttcaccattttcataaagaaccacatccgtttccccaaattcaacttctccaaacaatgcagatcttcgtgaagactctgactggtaagaccatcaccctcgaggttgag

SEQ ID NO: 295327 - DNA, 74 bp, Homo sapiens
gtcgccgctggagaggggctcggcgcccggcggggactgcagacagtgaccaacaccttcaggacgaacaatat

SEQ ID NO: 295328 - DNA, 100 bp, Homo sapiens
cacatctctgctttttcccaagaagagcaggaaatggccaaaccccagggctggttgatatgtgaagagccaacctgtcgcaatcgaactcgtcaccttc

SEQ ID NO: 295329 - DNA, 75 bp, Homo sapiens
aagtacagtctatgaatgagatagtccagagcaacctctttaaaaagcaagctcaactataaggactgtgagaag

SEQ ID NO: 295330 - DNA, 97 bp, Homo sapiens
tgaaccagtgaataaagatttggaatttcagctccatgaaccatttcttctgtatagaaatgcaagctttggagtgcttagtgcagttggtgagagc

SEQ ID NO: 295331 - DNA, 82 bp, Homo sapiens
atgaacggagaggaagaattctttgatgccgtcacaggtgctgggcgtcctcttctttgccatagcctgcttcttatacaag

SEQ ID NO: 295332 - DNA, 100 bp, Homo sapiens
ggcttgatgaaggcgtggatagcctgaaggcagccattcagttcccgatgggtcccggctcggacggtccgatgggcggcatgggtggcatggagccaca

SEQ ID NO: 295333 - DNA, 80 bp, Homo sapiens
gggagcttctcagccattttccacagatcagtgtggcaaaggagcagagaactttgacaagttcttcacacgaggacagc

SEQ ID NO: 295334 - DNA, 100 bp, Homo sapiens
cccgccttccgccgtctcttcgagttcttcgtgctgctcaagggcagcgaggtcacaggccccacctttgctgatggcgagctcatccccagggaacccg

SEQ ID NO: 295335 - DNA, 88 bp, Homo sapiens
gtatctttaagaaattttatcttttgaaacacgttctgattaaccaagggctgcatcccatatctatcaaaatcaatttgttcaaatg

SEQ ID NO: 295336 - DNA, 103 bp, Homo sapiens
gcccctccaggagcggactgaaggccccgcaggtgaatggagagtagcagccggggcccaggtcattaatagcatctgggctctatggctacaatgccaccct

SEQ ID NO: 295337 - DNA, 105 bp, Homo sapiens
gagctggtgagcctcatcacacaggatccgcccctggacatggaggagaaggtccgcttcaagtttactcctggcttgggggcattaggaagcactggaggctct

SEQ ID NO: 295338 - DNA, 98 bp, Homo sapiens
ctcttctcccgactatttggcaagaagcagatgcgcattttgatggatacagtggaaggtcttgatgcccaggttgtaaatggttacatgattcatga

SEQ ID NO: 295339 - DNA, 73 bp, Homo sapiens
gatggggcaggatggctgcgttgacacgtcttatttaatccacatcatagtgacattctgaaagttcccaaac

SEQ ID NO: 295340 - DNA, 75 bp, Homo sapiens
gtaaagtcaccaacgagatcttccgccactacgagacctgggccttgagaggaccctccttcctgatatcctcta

SEQ ID NO: 295341 - DNA, 50 bp, Homo sapiens
acagatgcccctgataaaggatacgttggaccctatgtactcggaactgg

SEQ ID NO: 295342 - DNA, 75 bp, Homo sapiens
agagtccaaggtccgggtatcttaccaggaaataaagtctttgcttttgctttttggaggtcagtttgccagcag

SEQ ID NO: 295343 - DNA, 83 bp, Homo sapiens
ctaggcccgggtcccggatccccgcgcacccggccaggtggaaatgtaaatcagtccatgttactcacctcggagaagcagaa

SEQ ID NO: 295344 - DNA, 83 bp, Homo sapiens
attcagtggtgttaaggattccaacaacaattccgatggcaaagccgttgccaagcttcaggatgagttagagaaaggtgaac

SEQ ID NO: 295345 - DNA, 82 bp, Homo sapiens
aacagatctgcaaaggacaaccagccagccagtatcttcgagaaagcgtatttttgaaacatacttatttgagttaaaattg

SEQ ID NO: 295346 - DNA, 75 bp, Homo sapiens
gttgcagtcggccagcccccttctccacgctgccactgcagagccccgccatggaagacacgccgttggtgatat

SEQ ID NO: 295347 - DNA, 100 bp, Homo sapiens
gtaggcacctgagttaacggacgctaagcggggtaggggaagcaaagggttaccttccagttcaacatttaccttggaagaggggaccatctacttgacc

SEQ ID NO: 295348 - DNA, 88 bp, Homo sapiens
ccgggctcttcgtggctcaggcggggggagcggaccctgacaagttccaggtacgagtgcttccatatccatttacccaccattggca

SEQ ID NO: 295349 - DNA, 74 bp, Homo sapiens
ttggcgtggacctggatgaaaatctgaaggaggacccctcctcacaacaccagatgtccggtctgtgctacgac

SEQ ID NO: 295350 - DNA, 98 bp, Homo sapiens
atttctactccacataatctgaatcttttagctgaaaaagtagagcagctgatggaatggagttccagacgctcaatcttccgaatgaatggtgataa

SEQ ID NO: 295351 - DNA, 74 bp, Homo sapiens
tgcctcctatctatgtgcctcctggatatgccccacaggaggagatgttaaagtaacccatcttgcaggacgac

SEQ ID NO: 295352 - DNA, 48 bp, Homo sapiens
ctagatccaggttggaatcctcaggctttcaaggatatgctgtattca

SEQ ID NO: 295353 - DNA, 100 bp, Homo sapiens
atctggaaacatcaatgctgccaagtctctgctggatgaaccgaatcctaacagtccagccaatagccaggcagcacagctttatcaggaaaacaaacga

SEQ ID NO: 295354 - DNA, 118 bp, Homo sapiens
cacaccagacctacggagggagctggaaattcctgacgttcattgatctggagtacgagacccaatctagtgcagaagccaaatttgtgaagcagctagaccaatgtgaaatgattct

SEQ ID NO: 295355 - DNA, 51 bp, Homo sapiens
ccgcttcagcaacatttccgccgccaaagatgacttccggatcttctgtgg

SEQ ID NO: 295356 - DNA, 90 bp, Homo sapiens
aaaagtatcaacatcagatcaatatgaaacccagcgtttgctggcagaaccagttcctggcatcaaagccgaaccagatgagagcaacgc

SEQ ID NO: 295357 - DNA, 100 bp, Homo sapiens
gtcacctacccccagcaccacctccagcccctgcgcctcgggatgatgcagtgtgtgattgcagtcgcggacaaagtattcgatgccttcctgaacatga

SEQ ID NO: 295358 - DNA, 79 bp, Homo sapiens
gccccggatgtggcgcggctgcgcgaggagcaggaaaagcctcttcgagcactactgctactcccggggcggcatgcgc

SEQ ID NO: 295359 - DNA, 75 bp, Homo sapiens
ggatctttgctcttccatccgcctttgatcgtcttcctcttcagccatccaggcagatccagttcctaatggttt

SEQ ID NO: 295360 - DNA, 100 bp, Homo sapiens
caggaggccagtgaaaaccatgttgctgccacagggagtcacctctgcgttctcagggatcattttggatccaaacacccaaaatattctgatacactgc

SEQ ID NO: 295361 - DNA, 75 bp, Homo sapiens
tgttccccatggagaatcagccaagtgttatagatgtccagctgggtggaacgggcccttcatcagatgctggtt

SEQ ID NO: 295362 - DNA, 95 bp, Homo sapiens
agcaccggaggcccaggtctccgtgcagcccaacttccagcaggacaagcctctactcaatagtccccccagctttgtgtgctggtctcggggct

SEQ ID NO: 295363 - DNA, 82 bp, Homo sapiens
tccagcctgcggagcctgtggggcaggaacatcatttacagcgagcaatttcagcacagcaagtgtttagagaaaaaaaaga

SEQ ID NO: 295364 - DNA, 97 bp, Homo sapiens
gcagcatggcgtccgtgacgctgagcgaggcggagaaggtgtacatcgtgcatggcgtccaggttttgaagagacaggggacacgctctatgccccc

SEQ ID NO: 295365 - DNA, 85 bp, Homo sapiens
cggatgccctgcagtacctgcagaaggtctctggagacatcttcagcagtctaatgtttgcccatcgtccacgatcttggaggga

SEQ ID NO: 295366 - DNA, 75 bp, Homo sapiens
ctgtgaccagctgcactggtttcgtggaaggatccagagaatcacccgctgatggtttttgcccaggcctgaaac

SEQ ID NO: 295367 - DNA, 82 bp, Homo sapiens
cgcagtttctcacgacgggccgagcctgccactggagtaccctgacttctaccggaagctctacggcctcttggacccctct

SEQ ID NO: 295368 - DNA, 75 bp, Homo sapiens
tgagaactcaacacctccctacaaggaccttcctcccaagccaggagggccctcctggacccgggagcggaccct

SEQ ID NO: 295369 - DNA, 52 bp, Homo sapiens
gtaaaggtcaatgcgtaggggtagagtaagtggtggtgaccgcggtggcttc

SEQ ID NO: 295370 - DNA, 90 bp, Homo sapiens
ctgtccccggcgtgaagaggaggcggctgatccccgaggtacaggattatcatggtcataaaatttgtgacccttacgcctggcttgaag

SEQ ID NO: 295371 - DNA, 83 bp, Homo sapiens
gaagataaagaagacaaaaaaggaaaaaagactgatatctgtgaagatgaggacaacctgccattttgttctgaagatttgaa

SEQ ID NO: 295372 - DNA, 80 bp, Homo sapiens
gccagcctcagcaccgacagccgacgcgcagatagcagagccatccttggggccaagatgctgaattatcagggacactt

SEQ ID NO: 295373 - DNA, 100 bp, Homo sapiens
gaagtaccttcgcagtgtaggagatggagagactgtggagtttgatgttgttgaaggagaaaaggcggcactctggctgagttcatccaaaagcgctgta

SEQ ID NO: 295374 - DNA, 51 bp, Homo sapiens
tttccttgatggtcaaaagattaaggcaggccagaaagcagacccagggag

SEQ ID NO: 295375 - DNA, 50 bp, Homo sapiens
ccgacatcaagttttcctctgcagggatgaccaacccggaggtgattcag

SEQ ID NO: 295376 - DNA, 51 bp, Homo sapiens
tgtctgtcttccaccactggcagcagcagtgttgtactgctacttctataa

SEQ ID NO: 295377 - DNA, 100 bp, Homo sapiens
acccgggcagccctcaccctggtctcggcgcggaagatggccggcggcgtggacggccccatcgggatcccgttccccgaccacagcagcgacatcctga

SEQ ID NO: 295378 - DNA, 74 bp, Homo sapiens
ccactctttccgccctaatggaggtctccagtttcgaattcaattcgccacaatctctctctgaatcgttattt

SEQ ID NO: 295379 - DNA, 75 bp, Homo sapiens
gtgattcatctgtggatccaaaaaagatgctttcattggatttggaggaaatgtgatcaggcaacaagtcaagga

SEQ ID NO: 295380 - DNA, 74 bp, Homo sapiens
cgtggcgctcggctgcgcgctgctcctcgccctcaagttcacctgcagtttaatggatcgagaagtggcgttgc

SEQ ID NO: 295381 - DNA, 83 bp, Homo sapiens
gggcgcttcgccccgggccccccagcatgaagaccccggcggacacaggtctcggcgcggaagatggccggcggcgtggacgg

SEQ ID NO: 295382 - DNA, 75 bp, Homo sapiens
agaaaccacaggcgaatccataactctgataagccgtacagacagaaacagtctccgccagtcaagaaaccctca

SEQ ID NO: 295383 - DNA, 98 bp, Homo sapiens
catgttgggcgccccggacgagagctccgtgcgggtggctgtcagatttggtcgtattgggcgcctggtcaccagggctgcttttaactctggtaaag

SEQ ID NO: 295384 - DNA, 82 bp, Homo sapiens
gtgctaaagagagcagtaccctgatggagtcccttgcaggacagagcgggatgccaccagcttgtccaaagggaagttccag

SEQ ID NO: 295385 - DNA, 98 bp, Homo sapiens
gcacgcggtgcagggtaacatggcggatgcggaaggtctctgaaggtcggcctgcagatctccctggactactggtggtgcaccaatgttgtccttcg

SEQ ID NO: 295386 - DNA, 100 bp, Homo sapiens
tctgaagttgttaccaatggtgaaactacatgttcagaaaacggttgatgatgaagcgccggccgtgtaaatgaagatcgggtgaggagcaggacgatgc

SEQ ID NO: 295387 - DNA, 82 bp, Homo sapiens
ggaaaagatgctctccaaacctgagtggtatcacggaaaacttgacagaacgatagcagaagaacgcctcaggcaggcaggg

SEQ ID NO: 295388 - DNA, 51 bp, Homo sapiens
cccagaaagtccaagctcgtgaaggtggtcttctgccctgttaaagaagcc

SEQ ID NO: 295389 - DNA, 100 bp, Homo sapiens
tctacctgacgggcctgcgagggttgaagattgtgaagcaatagcctaagttgcaggaaccttccctctacaccatcaaggctgttttcatcctagataa

SEQ ID NO: 295390 - DNA, 90 bp, Homo sapiens
ctactattcctcaagacacactgggagttgattttgattcagccatatcctgcaaatgagagttctaaacttgtctctgagaaggtggat

SEQ ID NO: 295391 - DNA, 98 bp, Homo sapiens
tggcttgccggcttcagctcgcgcctcttcgccgtcatccgcttcgaaagcatcatccacgagttcgacccgtggaccatggccaacctggagcgcac

SEQ ID NO: 295392 - DNA, 74 bp, Homo sapiens
cggcagggaccagcagttactgggaagggatttgtcttggctgttactatgacacgggaagcaattgatgaatt

SEQ ID NO: 295393 - DNA, 82 bp, Homo sapiens
ctggaggcctgggaagccaacgaccacacgcagagaactacgatgacccgcacaaaacccctgcctccccagttgtccacat

SEQ ID NO: 295394 - DNA, 100 bp, Homo sapiens
gaaaggcgtttgggatgccaacggaaggatttgatgccctggatccctttattcccatcctggtttccaactataacccaaaggaatttgaaagttgtat

SEQ ID NO: 295395 - DNA, 100 bp, Homo sapiens
cgtgcacggcgggactggagcaagtcgctcacctgaaatgagttgtaggtagtatggatgcacacccaagcagatactgtgccacagtaagagttcagag

SEQ ID NO: 295396 - DNA, 101 bp, Homo sapiens
cctggttgcagaagtgccgaaagagcactggactccggaagaatgaattcccagttcctgagcagttcaagaccctatggaacgggcagaagttggtcacc

SEQ ID NO: 295397 - DNA, 82 bp, Homo sapiens
atgagatagccgtcctgagaaagtcagcccaaggccaaccccactgtcactctgttcccgccctcctctgaggagctccaag

SEQ ID NO: 295398 - DNA, 100 bp, Homo sapiens
gatgtgactcgtcggcgaatgcaattaggaactgttctgccggaatttgaaaagtgcctgttgaggaagaatttgaaatcattcatcattgttcatccat

SEQ ID NO: 295399 - DNA, 82 bp, Homo sapiens
aaagcattaccgggttcgctaggctcacaggtcttcaaagcttcacctttctccaaaggcagatgtgaagaacttgatgtct

SEQ ID NO: 295400 - DNA, 100 bp, Homo sapiens
cagacgaaagaaagatctctggtctccggagtagagatgaagagagaatttctaaacctggggctgtctcaactcctgtaaagcatgctgatgatcacac

SEQ ID NO: 295401 - DNA, 100 bp, Homo sapiens
tgaagagactataaagcttctgaaagttttgacagatcttctagatgccatgcacactcttagggaaaaatatggtattaaatcccattgtcattgtact

SEQ ID NO: 295402 - DNA, 100 bp, Homo sapiens
agttgcctgctcaccacggacacagtgattcgaagctacttaggggcatacattactaagattaaactgcaaatatctcatgaagctgctgcctgtatca

SEQ ID NO: 295403 - DNA, 98 bp, Homo sapiens
tcaataacttcatgctgcgcataggagagcaaagcagttagagttcagaggccagcggcctcagggccactccctccctagccttcatcagcagagca

SEQ ID NO: 295404 - DNA, 83 bp, Homo sapiens
tcagaatcgaatctcttctccctccccttcttggcgacctgggagacccagccagtaccgcccagacggacttcggagtggtg

SEQ ID NO: 295405 - DNA, 75 bp, Homo sapiens
ccgcattcttctcagagaactggagaagaacatgctgtttgagagcatccaggagggcaagtacgagttccccga

SEQ ID NO: 295406 - DNA, 116 bp, Homo sapiens
acggccagtgggagagcgaggcctgagcctctgcgtctagtacttcctcgcgtattgctaaaggaggagttgaccacaccaaaatgagtctacatggtgctagtgggggacatgag

SEQ ID NO: 295407 - DNA, 75 bp, Homo sapiens
gcctcgtccttcgtcttcctcaacttgctgggacagctgaattgaggacgagacgcaggtgtcacgggccactca

SEQ ID NO: 295408 - DNA, 74 bp, Homo sapiens
ctcctctggcaggatgaggcgtgcaggcctgggttgagtgaacccaacatggcttccatcagtgggcagctgga

SEQ ID NO: 295409 - DNA, 75 bp, Homo sapiens
tctcgacctgctaacagaactggaccttttcgtcctcctccatcaaagaaaatgaagttatttggatttaaagaa

SEQ ID NO: 295410 - DNA, 75 bp, Homo sapiens
ttgaagtgctttgctgctagtggtttggacctgagaaatgccagtggcctgacagcagcagacattgcacaaacc

SEQ ID NO: 295411 - DNA, 90 bp, Homo sapiens
cagattcgcagtggtcgcttcttctccttggccctttctggttactgtggctttatggcagccaacctttatgctcgttccatatttggt

SEQ ID NO: 295412 - DNA, 100 bp, Homo sapiens
cagcatttgccgtcagtgtcctggactcactcatgagcgcggtgtcctggggaagtgtcgctacgtttactatgggaaaaactcagagggcaacaggttt

SEQ ID NO: 295413 - DNA, 76 bp, Homo sapiens
gggagatatttacacacaacttaaaaatcttgttcgaactttcaggtggtttagattagaatccaaacaaggaaaa

SEQ ID NO: 295414 - DNA, 82 bp, Homo sapiens
gagctcggccggcaaccgagggacccgcgtccaggaggctactcacagtcgaactacaactccccggggtccggccagaact

SEQ ID NO: 295415 - DNA, 75 bp, Homo sapiens
agagaagggtgatgaatcagagatgtttactgaactgcaacagatgaggcaacagttaccagacatggaatttgg

SEQ ID NO: 295416 - DNA, 100 bp, Homo sapiens
cttgggtgacatctgcctgagagatctccaagaattacaggtttctgacgtagaagagcttacccctccagagcatctttctgatcttccaccattttca

SEQ ID NO: 295417 - DNA, 99 bp, Homo sapiens
gccaagtggaataaaaaccaacatcaagtcggcttccatgcatccctaccagcgccccctacagaagctaagcagcatggacccggccatgctggagcg

SEQ ID NO: 295418 - DNA, 90 bp, Homo sapiens
agccgcaggagagacacgctgggccgaccccagagaggcgctggacaggccgacgcccccaacccatccctcatcccagagactgatgcc

SEQ ID NO: 295419 - DNA, 75 bp, Homo sapiens
gaaagttttaaaagccatctccagtatccattctttatggcagcccccattcactggggagaatagaaagaaaac

SEQ ID NO: 295420 - DNA, 98 bp, Homo sapiens
catgccagaggtggtacaattaaggatgactgaaaacatcctggaatcaaatagtgttacggcaacaaggcctgatcacttgaacggacatatcaagc

SEQ ID NO: 295421 - DNA, 100 bp, Homo sapiens
ttgcaaatcattttgaaattgccaagtgccacatacagccagttggacaaatgcgagtaaaaagcaacgtgaaaagctacttgagctgatacgtcgtctt

SEQ ID NO: 295422 - DNA, 99 bp, Homo sapiens
cgatactgagcttcttcctatttgccatgggaagcaagatttccagatgtagcaaatgggtttattgaggaaataattcattttaagaattattatgat

SEQ ID NO: 295423 - DNA, 98 bp, Homo sapiens
gactccgtaggagcgcgggggcggctcctgctcttcctggactcctgagcagagatcaggatcctcatgaccagccaaagagaagaagaattaggaag

SEQ ID NO: 295424 - DNA, 110 bp, Homo sapiens
ccacgcggctgcacaactgcaggaacaccgtcacgctgctggaggagggacttcaaaatgagcgtccctgactacatgcagtgtgctgaggaccaccagacgctgctcgt

SEQ ID NO: 295425 - DNA, 80 bp, Homo sapiens
tgtgctgtgaactgtgaacagaagcaagatgttttactgtgcctggctaactatagtcgagggggtgatggtcctatgtg

SEQ ID NO: 295426 - DNA, 80 bp, Homo sapiens
accgtgacttcccggacgctgggaaatgactattgcccagaagaaaagatgtttggttttcacaagccaaagatgtaccg

SEQ ID NO: 295427 - DNA, 100 bp, Homo sapiens
tcagcttcctaagagataccgctcagaagaaaatgcaaaaaaactaatggaattagcctgcaacatgaaggcaaagggcgttgtgaatacagctgtgtct

SEQ ID NO: 295428 - DNA, 100 bp, Homo sapiens
gaagagctgctgaagtacatgcttcatagtccttgcgtctctctagcttacaagaccctatgaaaaaattagttgagaaagaagagaagaagaaaatcaa

SEQ ID NO: 295429 - DNA, 75 bp, Homo sapiens
tgggagatggcaaagacatcttctggtcagagatacttcttaaacccgaccattttgttcaggaccctgcagtgc

SEQ ID NO: 295430 - DNA, 75 bp, Homo sapiens
aaagagcgccttgggacagggggatttggaaatgtcatccgatggcacaatcagacagaatgttgctgcgggatg

SEQ ID NO: 295431 - DNA, 75 bp, Homo sapiens
tgtgagtgactctttgacatggagagaatttcactatattcagtgttcgactacagttatagagattacattctg

SEQ ID NO: 295432 - DNA, 51 bp, Homo sapiens
ctgacggcgactgcgggaggccagccttgtcagagtttcttccttgccttg

SEQ ID NO: 295433 - DNA, 100 bp, Homo sapiens
gccgcgcggacgagaagccgctccggaggaaacggagcgctgccctgcagcccgagcccatcaaggtgtacggacaggcataatcaccagcaacacccgg

SEQ ID NO: 295434 - DNA, 95 bp, Homo sapiens
cagccagtgcagtgagcttagacattccattggggagcatgtaacttcaaggtttaaaaacgaggtggagaggatgggttttgatatgaacaacg

SEQ ID NO: 295435 - DNA, 76 bp, Homo sapiens
ggggaaacaggggatttgggcaagagagataggagcatgctgctatgtggaatgttcagctttaacccagaaggga

SEQ ID NO: 295436 - DNA, 90 bp, Homo sapiens
ctggcggtggctacctcacgctggaagtcagaactacagggccgccgccacgcaggtatcgctctgaagacttgatgaaggtttgctgac

SEQ ID NO: 295437 - DNA, 98 bp, Homo sapiens
ctcagtatatggatacggagtacaaaaacggcccttggatgatggaggtatgtttctataaaacctgataaccgaaaattggccaacggaacaaatgt

SEQ ID NO: 295438 - DNA, 74 bp, Homo sapiens
aggacacaagaaaaattgttctgtgagaacagccagcaggttgggggccgtcccgctcctaaggcaggaagatg

SEQ ID NO: 295439 - DNA, 100 bp, Homo sapiens
gtgggcctgagcctcgaggatgacggtgctgcaggaacccgtccaggttcaccggaacagcacaatccgccctggctgtgatgtgaatccctcctgcgca

SEQ ID NO: 295440 - DNA, 90 bp, Homo sapiens
gtggatcagttggtagaaataatcaagtaacaaatgtggcaattattttggatctatcacctgtcatcataactggcttctgcttgtcat

SEQ ID NO: 295441 - DNA, 100 bp, Homo sapiens
caggtggaccccaagaagaccattcagatgggatctttccggatcaatccagatggcagccagtcagtggtggaggtacatcaggaacgtctctatcaag

SEQ ID NO: 295442 - DNA, 100 bp, Homo sapiens
ttccacggggtcccggacagcgcccaagtacggcaacgccgagctcatggagaccggggatggaatttgctgattcccttggaattccgtttttggaaac

SEQ ID NO: 295443 - DNA, 121 bp, Homo sapiens
cgcggctccgggaacatggctcgcttcgctctgactgttgtccggcattgccctcggaccagaaagaagaaaatctgactcaggagttatgttgccaacgctcagggtctctcttattcag

SEQ ID NO: 295444 - DNA, 100 bp, Homo sapiens
gaatcccctgtttgagaaaaggcctaagaattttggcattgccaagaagtatgatgcgtttttggcctcagagtctctgatcaagcagattccacgaatc

SEQ ID NO: 295445 - DNA, 101 bp, Homo sapiens
ctgagatccatctgcaccacggtgctggaggaaggaacctaggaagcaagcaggaagtctggcctcgctctcggatgcaccccccttaaaaagtggactca

SEQ ID NO: 295446 - DNA, 50 bp, Homo sapiens
tttgtcagattatcaggatgaggtatgactatgaatatgatgaaaatggt

SEQ ID NO: 295447 - DNA, 100 bp, Homo sapiens
cagcccaatacaactggcaaacaactttttgaccagatgccttcaattaagttgcagagttctgatggagagatatttgaagttgatgtggaaattgcca

SEQ ID NO: 295448 - DNA, 90 bp, Homo sapiens
gctcagagccctttgacacatcgagtccccaggctggacgtcagctcggtggtggaggtggatacagcagtcggagaacatctggcagag

SEQ ID NO: 295449 - DNA, 80 bp, Homo sapiens
gaatggaagcatacagatctgggaccgaaatttgactgctgctttgtaccgcctcagtggagactggaatcccttacaca

SEQ ID NO: 295450 - DNA, 75 bp, Homo sapiens
caagctggttctctgggatataaataaggtgtagacggggcactgccttcagagcaggtcctgccagcctcgctg

SEQ ID NO: 295451 - DNA, 98 bp, Homo sapiens
cgcggccccccagccgctggagaaggagaacgacggctactttcggaagtatatttgccttccctccatgatctccaacactatccgataaagtagaa

SEQ ID NO: 295452 - DNA, 111 bp, Homo sapiens
ccgctcgatcttgggacccaccgctgccctcagctccgagtccagggcgaggtgtggacactgccagcggctgcagccgacttggaatgacctgggagacaaatacaacag

SEQ ID NO: 295453 - DNA, 100 bp, Homo sapiens
gcaaggagccacaaagaagaaaacatttcttttaatttttaaacttggtttgaaagtcctatgaggatctggttcagcgtctggagccagtgataatgga

SEQ ID NO: 295454 - DNA, 105 bp, Homo sapiens
aactccttagcatggtaccaagaccagtctgtgcagtcttacttctctttcctattacagaaaaggctgtctgggtccgactttcctgacgaggagtggctgtgg

SEQ ID NO: 295455 - DNA, 99 bp, Homo sapiens
cgccggccccgcgcgcgcctcgaggccgagtcaaggtggtattaaagataatcaaacattatcaagaagaaggacaaggaactgaagttgttcaaggag

SEQ ID NO: 295456 - DNA, 75 bp, Homo sapiens
ctgcggtggcggcgtttggatgattgtctctcggcggcggagtcggatttgcctctgaagcagggagtgtctgca

SEQ ID NO: 295457 - DNA, 74 bp, Homo sapiens
gggcgacctggaagtccaactacttccttaagatcatcaaaggccttttccacctcatatccagctccctccag

SEQ ID NO: 295458 - DNA, 100 bp, Homo sapiens
ccgctgcccgcggctgcagtcggggcggcagctgaggcggaggctgacgaggaggcggatcccccggcgtcagatccgatcacataggacagtatgcacc

SEQ ID NO: 295459 - DNA, 100 bp, Homo sapiens
ggtgactgtgggtgacacgtccctgaggatatttaagtgggttcctgtgacagacagcaaggaggaaccctctggatattgatgcctcgggtgtggttgg

SEQ ID NO: 295460 - DNA, 100 bp, Homo sapiens
tgccaactctgcccttatggaattggacaaagaaatctgccctgattgtccaggggccccgggaagtgaaaaagcgggagctggtcttcctccagttccg

SEQ ID NO: 295461 - DNA, 98 bp, Homo sapiens
tgctaatgaagactacagagaagcttcttcttgtgccgtgaacctcgttttgagattaagaaacctttatttgaagccgataaatgacttgtcgtggg

SEQ ID NO: 295462 - DNA, 83 bp, Homo sapiens
taccagaaacatacccatttaatccccctaaggatgatggaccaacagcaagagacctgctagtacaatatgctacagggaag

SEQ ID NO: 295463 - DNA, 98 bp, Homo sapiens
catccagcattacacgatgcacttaatgaccctaaaaatggcgattctgcaaccaagcacctgaaacagcaggaaactatggtccaggaggcagtgga

SEQ ID NO: 295464 - DNA, 101 bp, Homo sapiens
tagttttgggaatttttacgttaattgagatctttaatctcatgaagtacgacagctacagccgcttcttaaagtctgacttgtttttaaaacacaagcga

SEQ ID NO: 295465 - DNA, 100 bp, Homo sapiens
ggcttcctggccctctaccaaaccgtgggtgaaattgccctcttggaaggcctgacagtggtatacaaaagcagtatagatctctatttctatgtgattg

SEQ ID NO: 295466 - DNA, 100 bp, Homo sapiens
ccgctggacagtgaagatagcttatcctttgtgaagacggctgcttctgatgcttggaagatatcctctcagccacaaagatggtaataaatctttgcct

SEQ ID NO: 295467 - DNA, 100 bp, Homo sapiens
gttagaaatggatgataaaatattggttgacttccggctttctaaggatatagctgacctggcatttgaggtatcagggaggaagcctcacccattccct

SEQ ID NO: 295468 - DNA, 100 bp, Homo sapiens
ctcagggtgccagacctcatcatggagtctacctttgtcacccaggctggaatgcagtggggcgatcttggcttactgcaacctctgcctcccaggttca

SEQ ID NO: 295469 - DNA, 90 bp, Homo sapiens
aaggaacgagagaaggaaattagtgatgatgaggcccagagcaagagaggcatcctcaccctgaagtaccccatcgagcacggcatcgtc

SEQ ID NO: 295470 - DNA, 97 bp, Homo sapiens
ccggcccagagctcgggtctccggggaccgagtgcccagcgcctcaagttccggctgaacctgtatgagttgaaggaaggtcggcagatcaaacctt

SEQ ID NO: 295471 - DNA, 100 bp, Homo sapiens
gggaaagtgaggcagctgcaaggagggcggcgggactgcactcgagtgtccagacctgctcgatgggccgcgatgggcctcttggaacattggtgtgttc

SEQ ID NO: 295472 - DNA, 100 bp, Homo sapiens
ctcttaaacgcaaggcccgacgggaggccaaggtcaagtttgaagagagattataagaagaccagtctagcaccttatgtgaaagtttttgaacattttc

SEQ ID NO: 295473 - DNA, 83 bp, Homo sapiens
caattttctgtacaccaatggaaagtgcgtcatcctaaggaacatcgacttgtgaatgggagagttcacatccgcgactggcg

SEQ ID NO: 295474 - DNA, 100 bp, Homo sapiens
cgcgtcctgctgaccccagccggcgccgagggcttggaatctcgagcgggaaaaggtctttactcacctggagacctgtggcccactccgccagtgtgtg

SEQ ID NO: 295475 - DNA, 83 bp, Homo sapiens
acaacccctgcaaacttggattcagactttctgctgctgaagtaatgcaatggtctcaatctctggaaaaacttcttgccaac

SEQ ID NO: 295476 - DNA, 100 bp, Homo sapiens
tgatgtcgaacttcctccttgggccaaaacctcagaagaatttgttcacataaacagattgccatgaagactttgaatttatttcaggaacacgaatgcg

SEQ ID NO: 295477 - DNA, 97 bp, Homo sapiens
tatgttggtgccttgtttaatggtctgacactactgattttgggtattggaaattatgcccttgctcagcactgtttcatcaaatcaatccagtcag

SEQ ID NO: 295478 - DNA, 75 bp, Homo sapiens
tgacaacaaacagagcagcttcaaggctgatgtgcaggcccatggggagacccatcggctctaccgcctgaagct

SEQ ID NO: 295479 - DNA, 96 bp, Homo sapiens
gttgagaaccctgaccctaaggattctgagcctgcaaaccctggagaaaagccgagccccgctgcggagctcccggcggcccagccccgaggctct

SEQ ID NO: 295480 - DNA, 96 bp, Homo sapiens
tggaatccatgtttctggacgcggatttttggcctcatactctgttatagataaacaaggcaattaagttggaatatgcaaggttggttaagttgg

SEQ ID NO: 295481 - DNA, 100 bp, Homo sapiens
aggaacccaaacttggactgaagtgactctactaaggttgttgtcgggataccagatttcctactccgagaggccccgggtccctctgccacaacttctg

SEQ ID NO: 295482 - DNA, 100 bp, Homo sapiens
gttctcggtactcttcagggatgagtcatgtggcagtggaaaatgcgctcgggctggaccagcagggtgaaggttgccgaactgtccccctggctggaca

SEQ ID NO: 295483 - DNA, 100 bp, Homo sapiens
gttcaggcacgcagcatctaccccatcaccagaacccagcagcttgccagcatcgttgcagatccataaatggactaggacaaatcttagaaacacaaag

SEQ ID NO: 295484 - DNA, 83 bp, Homo sapiens
tttgatgtgttggggaatgacaggagtgagaaagatcagtctaaagaaaaggagaagaaagtgaaaaaaacaattccttcctg

SEQ ID NO: 295485 - DNA, 98 bp, Homo sapiens
tcctgtgacctgcaggtactgggagatccatagggaggacggcggaacatctggaggctgggaaatgtgattgttgagcccattccaattggacaagc

SEQ ID NO: 295486 - DNA, 98 bp, Homo sapiens
cattcttctctacagaagagcttctcctcatcaactggggatgattacagttcttcctaaaaaagggaaatcctcattgacgattcaatttgttgaag

SEQ ID NO: 295487 - DNA, 90 bp, Homo sapiens
cagctcctgcagctctgaagtggttctgaggtggtttgtgctccccctactgcctatatcgacttcgcccggcagaagctagatcccaag

SEQ ID NO: 295488 - DNA, 100 bp, Homo sapiens
ggaaagtgcgtcatcctaaggaacatcgacgtcaaaatgcagatcttcgtgaaaacccttaccggcaagaccatcacccttgaggtggagcccagtgaca

SEQ ID NO: 295489 - DNA, 83 bp, Homo sapiens
atctcattaatgacaatcagccatcctggattggacagaggagacatcacagctttcccagatcgggaggaaaaatatggaat

SEQ ID NO: 295490 - DNA, 100 bp, Homo sapiens
ctcgtaagttggtgatcattgaaggagacttggaacgcacagaggaacgagctgagctggcagagtctggaagtatgcgagacttaagagctcaagtgac

SEQ ID NO: 295491 - DNA, 101 bp, Homo sapiens
ggagtatgatgggcggggggtgctcatcgcagtcctggacacgggggtcgacccgggggctccgggcatgcagcacccttacccttctgaagaacagaaaa

SEQ ID NO: 295492 - DNA, 100 bp, Homo sapiens
atctctgagacccggaggaggttcgaagctgagtatgtgacagatggccctattgaatttcttcttccctgatgaaaagccatactctgaagaagaaagt

SEQ ID NO: 295493 - DNA, 100 bp, Homo sapiens
catgtcgcgttacgggcggtacggaggagggggccgaaggccagagaccaggatttggctacggaggcagagcgtccgactataaatcggctcacaaggg

SEQ ID NO: 295494 - DNA, 76 bp, Homo sapiens
gggttctgacaagatggccgggctgccccgcaggatcatcaagtctgaagatgatgagaaactgaaaaagaggaag

SEQ ID NO: 295495 - DNA, 51 bp, Homo sapiens
ggagaagtgtccggggtagccccgttacagatgcaccagcaaggaatactg

SEQ ID NO: 295496 - DNA, 75 bp, Homo sapiens
ctcggggtcgctgtaggcgctgaggctgcagggaactgctcgcagaaagaagaaggtggttcatagaacagccac

SEQ ID NO: 295497 - DNA, 90 bp, Homo sapiens
gaagaagaagcaggatgaactgaaacggattgccagagaattggcagaagggcaagtgtccagagaatggctgggatgaaagtacacttg

SEQ ID NO: 295498 - DNA, 83 bp, Homo sapiens
gccggttcttggtgggatctgagcagtgtctccagaacgctatagctatggcacctccagctcttcaaagaggacagagggta

SEQ ID NO: 295499 - DNA, 98 bp, Homo sapiens
gccagggctgctgccttccagcaccttctgctcctcgtgggcatccacctcctcaaggatctcgaggacctggaagaagcagaggagccagacatgga

SEQ ID NO: 295500 - DNA, 100 bp, Homo sapiens
cgtttgtgtgcaatgccccgggctgtggacagtgcttagatgagtacgaagatgatgaagcagggcagaaagagcggaaacgagaagatgcaattacaca

SEQ ID NO: 295501 - DNA, 107 bp, Homo sapiens
ctgaaggaagccgcccgccccccaccgccgccccctccggcgtgttcatgcccccggggattatatctgtccaagatgcgagtctggttttatcgaggagcttccgg

SEQ ID NO: 295502 - DNA, 100 bp, Homo sapiens
ctctccctgtcctagctctgtaactgtttacagatattggtgctggaaaaggcaaatactatgctgtcaattttccaatgagagatggtatagatgatga

SEQ ID NO: 295503 - DNA, 51 bp, Homo sapiens
ccaccacgcagagaatccagcctggtggctggtgaaggtgctgatcaccac

SEQ ID NO: 295504 - DNA, 49 bp, Homo sapiens
gccaattgcagtttgaggctgatgaggagaacaatccccttgagacaga

SEQ ID NO: 295505 - DNA, 82 bp, Homo sapiens
agagacacgaagcaaatgaagttttatactaactctcagcgttctcatctctcttccttcaccatgaagctgatggacaaat

SEQ ID NO: 295506 - DNA, 100 bp, Homo sapiens
cactgtggccatggccaactggtaggaccagcaccccataccccgaagccagatgagattgtggggaacctgggtgaaggcacctttggcaaggtggtgg

SEQ ID NO: 295507 - DNA, 80 bp, Homo sapiens
ggaggaggaagaagaagtgttatatgtcctaaagtaaggtttcagaaccgggctgtgggtcggcccaaggggaagctggg

SEQ ID NO: 295508 - DNA, 80 bp, Homo sapiens
ccggaacaccctggaagccgagaaatgctgcctttgccttcattgtggtgaaagatagtgcgggtgactcagatgtggtg

SEQ ID NO: 295509 - DNA, 50 bp, Homo sapiens
ccccattatttcgaggaaggaagtatgccattgcattggccttaagggaa

SEQ ID NO: 295510 - DNA, 98 bp, Homo sapiens
ggagatcaaaatggaggaagagagcggcgcgcccggcgtgccgagcggcaacggggctccgggccctaagggtgcaccgtccaggtgaggttagagct

SEQ ID NO: 295511 - DNA, 81 bp, Homo sapiens
ctcagtaccagagacagaagcagatggattcgtccttttagatttggtgcttccagatgtgagttatcaggtggaatccag

SEQ ID NO: 295512 - DNA, 75 bp, Homo sapiens
gccggccccaacacggaccttgagcgggatgccttcgacacgctgttcgaccacgccccggataagctcagcgtg

SEQ ID NO: 295513 - DNA, 82 bp, Homo sapiens
gaagctgaggaggggagtaaattgaaaatattggggccatttagtaacttctttgcaagggggatatgagactttctactcg

SEQ ID NO: 295514 - DNA, 100 bp, Homo sapiens
ataagaaggcggcacaagaaaagatgatccagcaggagcatgagcggcagcggagaccctgttaactactacgttgacactgctgtgcgccacgtgttgc

SEQ ID NO: 295515 - DNA, 82 bp, Homo sapiens
ggggcttacgcagaaggacctggccacgtttgatgaaggccggaacaactttgaaggggaggtcaccaaggagaacctgctg

SEQ ID NO: 295516 - DNA, 100 bp, Homo sapiens
acttgtagaaggttgtgaaaaaactactaggatcacgcggcatgtattgaggctaacagagaccctgatgctggaattgatgaagctcaagttgaacaag

SEQ ID NO: 295517 - DNA, 82 bp, Homo sapiens
gtttctgttgtgctgcctgaaaattcagatattttggatggcagtagtagcagcagtggcttatcctcagacccgctggcta

SEQ ID NO: 295518 - DNA, 100 bp, Homo sapiens
gcaggctctgtggttcaggactcccgacttgacacgatattttttgctaagcagattctgaaaaagagttccacgtcctcccttatcgagtctttgttcc

SEQ ID NO: 295519 - DNA, 90 bp, Homo sapiens
cgtgagcatggatgtgattcaacatgaaacaatccgtgctggtatagaggactctaagaagtggggcatgctgtttctggtgaaccagct

SEQ ID NO: 295520 - DNA, 75 bp, Homo sapiens
gatgctccagctgctggtgaagatgcatgaataggtctatgcctctcagcgaatgagagctggcaaaggcaaaat

SEQ ID NO: 295521 - DNA, 98 bp, Homo sapiens
ggacacgcccatccttggacttcctgaaaatgacccaggaattatcagccaggctgctgtccatccacagtgaccaggaccggatcgtggtgacgttt

SEQ ID NO: 295522 - DNA, 75 bp, Homo sapiens
gcctgggcaggtgtcttcctcgagaggcaggcaggggatcccggacaggctaaaggcagcagttcactatactgt

SEQ ID NO: 295523 - DNA, 100 bp, Homo sapiens
agaggtggaagtccaagtcaaacgcagaaggactgcctcactgagcaaccaagagctgaaaggttccctgagtcgaggtgactggtacaagacaaaggag

SEQ ID NO: 295524 - DNA, 100 bp, Homo sapiens
cgcgagtgggagcaccaggatctcgggctcggaacgagactgcacggcgcctgtgtctggcagagctggtgtgagacgagacaatcctgccccgccgccg

SEQ ID NO: 295525 - DNA, 100 bp, Homo sapiens
ccagaacaatttgaggtcctaaagcaacaaaaagaaataatagaacaagggatagatttggcattctacttggacaagtcaaattcaccaccaaactcca

SEQ ID NO: 295526 - DNA, 75 bp, Homo sapiens
aggaggccatcatcatgaaggacgtgcccgactggaaggtctttgagagctggatgcaccattggctcctgtttg

SEQ ID NO: 295527 - DNA, 100 bp, Homo sapiens
attgactatggaaaagttgccaaattgatcatatactcctatgaaaggaggaatctccaatgtatggtttgacagatttaaaataaccaatgactgccca

SEQ ID NO: 295528 - DNA, 83 bp, Homo sapiens
ctctcactgtggtggacgttcggccaagggaccaaggtggaaatcaaacgtgtggtggacacaggcctattcatcaacatggc

SEQ ID NO: 295529 - DNA, 101 bp, Homo sapiens
cgacaacagcctggcgtccgccacggaactgtcccatcgaccagcaccaccgcaaccagtgccaatactgccgcctcaagaagtgcctcaaagtgggcatg

SEQ ID NO: 295530 - DNA, 75 bp, Homo sapiens
ctggtgtggagtaagtgcacttagcaacattgtggatatcaagcctgccaatatggaagagctaacagaggtgat

SEQ ID NO: 295531 - DNA, 75 bp, Homo sapiens
ggagtgctgtcccttggaacaggaggagtaagattgagttttagaaagagcgttttcgctacgtaaagcacattc

SEQ ID NO: 295532 - DNA, 98 bp, Homo sapiens
ggcgacctcacccactctggtctgtggcgggtgtgctgcatcgaaggataagttctgaacgtcgaaaagaaaagtctcgagatgcagccagatctcgg

SEQ ID NO: 295533 - DNA, 75 bp, Homo sapiens
atacaattgaataatcaaagggtggagcctggacaaaatgtttacttgtctggttgaagctgtctccaagccctt

SEQ ID NO: 295534 - DNA, 100 bp, Homo sapiens
cttgacctacgcaagagacaatgtcatgtgattcagcctaatatctcatataaggatgcatttatgaaagcaaatcctggctacaaatggtgtcctacca

SEQ ID NO: 295535 - DNA, 106 bp, Homo sapiens
gagaagaaactgaggcctggaatttgattaactcattcaaggttacccagttgaccctggaagctgtcctgaatttcaaatactctggaggcccgggccacactga

SEQ ID NO: 295536 - DNA, 73 bp, Homo sapiens
gggagaaccaccattgccaacttgaaatcagggaaagcggcgttatgacaggaagcagagtggctatggtggg

SEQ ID NO: 295537 - DNA, 82 bp, Homo sapiens
ctgtgtgggtgattctgagcgagagacgtctcccacaacctgctccgggcgctggacgttgggctcctggcgaacctctcgg

SEQ ID NO: 295538 - DNA, 100 bp, Homo sapiens
ccgctgtgacctctgtgcccctggctactatggctttggccccacaggctgtcaaggaacctcactctggagcctgagatcatgcctgctgccactgaca

SEQ ID NO: 295539 - DNA, 75 bp, Homo sapiens
gaggactgactggggttctgagactccctgtcccggaccgcaggttaaataggattgcgaatcaggtggccattc

SEQ ID NO: 295540 - DNA, 100 bp, Homo sapiens
ctacgtcccgctgccgtcgccgccgccaccatgcccaagagaaagacacaagatggtgaaggagacccagtactatgacatcctgggcgtgaagcccagc

SEQ ID NO: 295541 - DNA, 100 bp, Homo sapiens
caggaacccaccagaaggaaccaattccggacacataacaagcagcagtgaggacaccaaaggtgccagtcacgaattgcccgaacattacctgctgatc

SEQ ID NO: 295542 - DNA, 82 bp, Homo sapiens
gatgacaatgatctctaccgatgggaagtccttattattggccctccagatacactttagatgaaacaggcgcctatttaat

SEQ ID NO: 295543 - DNA, 100 bp, Homo sapiens
aaagatgttcctccttcagctgtcacaagaccaatatttggtatactgggcacaatccatctggtggcaggggcaagattcttgccaagagaattaatgt

SEQ ID NO: 295544 - DNA, 75 bp, Homo sapiens
gaaatcttcaatccagatattggtagttgtgtcaactaacatagcagagacgtctttgacaatagatggtgtggt

SEQ ID NO: 295545 - DNA, 74 bp, Homo sapiens
tagaattgcacttggaggacaagaacatgaacgattggatgcccatcgccaaggagtatgatccactcaaagcg

SEQ ID NO: 295546 - DNA, 98 bp, Homo sapiens
agagggaggaaagggaggcaagaaggaagcagggcatggtgctgatgtgaaatgtgtagactggcatccaaccaaagggttagttgtttcaggaagta

SEQ ID NO: 295547 - DNA, 82 bp, Homo sapiens
gtgtttgggcaggatgagatgatcgacgtcatcggggtgaccaagggcaaaggctacaaagttgcatcaggcctgaacccgt

SEQ ID NO: 295548 - DNA, 50 bp, Homo sapiens
cggaaggaaggcaattagagcgggacttcagggccacaggtgctgccaag

SEQ ID NO: 295549 - DNA, 99 bp, Homo sapiens
gtcttgtccacagctggcaaattcagtgcagatcaggcatatctcacagatttcctctgccagtttgctcagcagccctgctacataatgttttcaggc

SEQ ID NO: 295550 - DNA, 88 bp, Homo sapiens
aggaacccgcgccgcgagggctccttccctcaggttgaccccctgtttacagtgccagcgccaccaccgccgatttccagcagtctca

SEQ ID NO: 295551 - DNA, 96 bp, Homo sapiens
atgggggtccacactgcaatgtttttgtggaacatgagtgcttgtgatttcacgtatttttgctgaactcgtaaaagagacacttggatggtggat

SEQ ID NO: 295552 - DNA, 75 bp, Homo sapiens
gcgcttggaatatcagataaagaggcagaggaggtggacacggtggacgtctccggcgtgcccgcagaggtgctg

SEQ ID NO: 295553 - DNA, 97 bp, Homo sapiens
ccagagttgtgggccgccgtcggcagcaagaacagagagagaggtggacagatctgagagatactgagagagtaaaacttgtctcggcacagagtca

SEQ ID NO: 295554 - DNA, 83 bp, Homo sapiens
gccgcgttggggtgagaccctcacttcatccggttggcaaaagcagcttttgatgatgcaattgcagaactggatacgctgag

SEQ ID NO: 295555 - DNA, 96 bp, Homo sapiens
aaagaacagtactacagaccaagtatatcagctgcagcgggagcccctaacccctgaggaagtacagtctgttcgagaacaccttggtcatgaaag

SEQ ID NO: 295556 - DNA, 99 bp, Homo sapiens
ttcaaggaggccttccagctgtttgaccgaacagtgacttctgacagctctctccatggaaggaggcggcggccgcgatgagccttcagcctgccgggc

SEQ ID NO: 295557 - DNA, 82 bp, Homo sapiens
cggggagcgaccgggagcggcggcagcggcggcgcggaggcggctgaggtgcgagccgctgcctgtggaggaaccgattgtg

SEQ ID NO: 295558 - DNA, 88 bp, Homo sapiens
gttggaaacgccaagccagctgcgtcctaatccaaaagtctcggaagggtgctgacctggaccgggagaagaaggctgccgagtgcaa

SEQ ID NO: 295559 - DNA, 95 bp, Homo sapiens
gccctggcgggtgccctggctaccatggaccatcctgctggtcagcactgcggctggaagcaagatttccagatgtagcaaatgggtttattgag

SEQ ID NO: 295560 - DNA, 50 bp, Homo sapiens
gaagatggtggataagcccacccagaggaacttcctgaagtgctccgaag

SEQ ID NO: 295561 - DNA, 82 bp, Homo sapiens
taaggtggcggcgctcaatggacggaggctgggctgtctgtccccagaccccagagcacgtccggcaccaccatgactgggc

SEQ ID NO: 295562 - DNA, 75 bp, Homo sapiens
ggagagaccatacacaatgtgagaacccagagaagaatgaggcctttctgggagaggaggtgggcaggaggaacg

SEQ ID NO: 295563 - DNA, 76 bp, Homo sapiens
cgcctccggctgcctggcgtccccggcccaccccggaggctggccaagtccacgctcctgcttatcccgctgttcg

SEQ ID NO: 295564 - DNA, 100 bp, Homo sapiens
aaaaaaaggaggaggagaaaatggaagtggattcggcagagtttgatttgttgtttgaaaatgcttttgaccagtgggtagccagcacagcgtcagaaaa

SEQ ID NO: 295565 - DNA, 97 bp, Homo sapiens
aaacaagccaatcccaggaggaaaaacggtcgtttatacgcaatgcagactggaatgaagatcgatagtaaaactcctgaatgtcgcaaatttttat

SEQ ID NO: 295566 - DNA, 76 bp, Homo sapiens
agagaaaagcccccaaaagcagctattcagaggcggggtttcaccatgttgcccagactggtcttgaactcctgag

SEQ ID NO: 295567 - DNA, 135 bp, Homo sapiens
tgtttcctaccgaaaccctgcagagggaacctggtacatccagtcactttgccagagcctgagagagcgatgtcctcgtaggatatatctgcatcttgaaaggaagataaaacaaaagccttctttggaatagat

SEQ ID NO: 295568 - DNA, 98 bp, Homo sapiens
tctagactttggtttacatacaggaaaaactttccagccattgccacagaccccgcacctggaggaggacttgaaggaggtgctgcgttctgaggctg

SEQ ID NO: 295569 - DNA, 75 bp, Homo sapiens
ttaatgaatggtgctatacttgaattttctaaggtgtcattaggctgtggaaaatctctgttctcacaaagtctc

SEQ ID NO: 295570 - DNA, 74 bp, Homo sapiens
ccaatacagttcaagagaaaacattcaacaaagatacagtgattatagtaggcaaaatcagtaaaggcttggag

SEQ ID NO: 295571 - DNA, 101 bp, Homo sapiens
atggcacatggcccaggcagaccttgcagtcaaaatttagcatgtagactgctggggcaatcaatggatgaaagtggattaccacagctgaccagttatga

SEQ ID NO: 295572 - DNA, 73 bp, Homo sapiens
ttacaatgaaggaggaaattttggcggtgttgaagctttatatcaaactacatacccagaatatctccagtac

SEQ ID NO: 295573 - DNA, 100 bp, Homo sapiens
ctcactgcagaggtgctggagctggcagggtgcttcaaggatgaccgcatcgtcttctggacttggatgttctccacctacttcatggagaaatgggctc

SEQ ID NO: 295574 - DNA, 96 bp, Homo sapiens
ctacatcgagcccgggccctgcagaagaggcatgatgactttgaagaggtggctcagaaacgatcttcaagacacagaaataagtccaagacagaa

SEQ ID NO: 295575 - DNA, 50 bp, Homo sapiens
cagaacattgcacgatgcctcctggactggtaccatcagtcctatgactg

SEQ ID NO: 295576 - DNA, 80 bp, Homo sapiens
acctgacgctcgtcctcatcctggtcactagcggactcttcttcgccttcgaccttatgccagcctggaccatcttggag

SEQ ID NO: 295577 - DNA, 98 bp, Homo sapiens
gtgtttggggaggcgctggtcaaggatgtctttgcctttcaggtagcagtagctgatgtgcagtttggccccatgagatttcatcaagatcaacttca

SEQ ID NO: 295578 - DNA, 90 bp, Homo sapiens
cggctgggtgggcttggccatggtcagcgtgaacgcgcccctcggggctccagtggagagttcttacgggaccttggtagctaatgtccg

SEQ ID NO: 295579 - DNA, 100 bp, Homo sapiens
ctgcagcttatgaccatcaatatgtttgcagtacacaactcccagctgaaagaaatcgagctatagcagattatcttcgttcaaatggctatgaagaggc

SEQ ID NO: 295580 - DNA, 129 bp, Homo sapiens
cggaacagcaggcccgagcccaccgcgccgggccccggacgccgcgcggaaaagagtgggaaaccacccatcaatgatatgttcacagacctcaaagatggaaggaagctattggatcttctagaaggc

SEQ ID NO: 295581 - DNA, 50 bp, Homo sapiens
ggattccaagtaactcttatttgggaaatgatgtcactctgaaactcagg

SEQ ID NO: 295582 - DNA, 76 bp, Homo sapiens
gatgctgccagggtccctgaagagggaagacacgcggaaacaggtccctccagcctcagccaagcaacatggggtg

SEQ ID NO: 295583 - DNA, 98 bp, Homo sapiens
taattacaactttcggggcatgtacaatcagagaacccagtgacttgattgtaaaaatttacagagcggaatcatatgctggtctccaagagtttaaa

SEQ ID NO: 295584 - DNA, 100 bp, Homo sapiens
agcgtttccgcagacagaagtggggagaagcggagacaaagatcattccactcagcctgggacgatggggaggaaaaaaatccagatctcccgcatcctg

SEQ ID NO: 295585 - DNA, 95 bp, Homo sapiens
gtctggcgcgcaggagcggagacctggacgccctggacaagcagcaaagacagagccgctaccctggaggaggggaacccaacagacgaggtccc

SEQ ID NO: 295586 - DNA, 98 bp, Homo sapiens
ttcaggaaccctctctataaaggcttcactatgtatggggtactcaatcctagtactgtgccctacaacattcagacagccagtagaggtgacttcat

SEQ ID NO: 295587 - DNA, 75 bp, Homo sapiens
aaacaaaaaatcactgcattacatcagcagcaaaagatacagatattgtggatgaagccatctattacttcaagg

SEQ ID NO: 295588 - DNA, 51 bp, Homo sapiens
tacacgccaggtggtggtgcgctcaggacaaggcagacgtgcagtccatca

SEQ ID NO: 295589 - DNA, 98 bp, Homo sapiens
agagacctgggaaattaagtttcttgcggaggtatataatgtttacatggcagggaggcagctgtgttctaagcggtaccgggagtttgctatcctac

SEQ ID NO: 295590 - DNA, 100 bp, Homo sapiens
ttacttcctgcttaagccagcacagaagtgtctggagtggttgattcacagatgaccttgaatgatgccatgaggaacaaggcaaggctgtcaattacag

SEQ ID NO: 295591 - DNA, 100 bp, Homo sapiens
tgaccactagacccacagctgttaaagcaacagttggtgagtttgtaagtgatgcccttctcgttcctgacaagtgcaaattcttacaccaggagaggat

SEQ ID NO: 295592 - DNA, 100 bp, Homo sapiens
gaggaggcgggagagtgagagaaaggctggaagacgagacaccattcgcttttcacccaagatgatttgatgtcttataaaactctgatgaaccatgatg

SEQ ID NO: 295593 - DNA, 75 bp, Homo sapiens
aaaaaccttcaggcggcccatgggcataccatgaagttccctacacaacgtcctttaccttggccaaacagttgt

SEQ ID NO: 295594 - DNA, 75 bp, Homo sapiens
ctgaatctggtgatgaacttagcagcagctccactgaacagataaggattacatgcagcaaactggaggtcaagc

SEQ ID NO: 295595 - DNA, 51 bp, Homo sapiens
gaatgctgtcattgtttccattgagtgactgtggggatcatgttgttataa

SEQ ID NO: 295596 - DNA, 90 bp, Homo sapiens
cggcaagaacaagtccaagactccagagattttcgcgatcccgagtacggggaatggtttggctacctgagccgagagggcaaggtggcc

SEQ ID NO: 295597 - DNA, 80 bp, Homo sapiens
cgtgctggctggtgcaatgcttgccttgggactaatgacatgcttgtcagaggagaaggcagagcccccccaggctatga

SEQ ID NO: 295598 - DNA, 75 bp, Homo sapiens
tctctcttcaccctgccgtcatgtctaagtcagagagtaaacatcagtctccaaagataactacatcccttcttc

SEQ ID NO: 295599 - DNA, 100 bp, Homo sapiens
gccactgggacggcggcgcggagaaggcaggaatgatccaggctctcggtggcttcttctcttactttgtgatcctggcagaaaatggcttcttgcccgg

SEQ ID NO: 295600 - DNA, 100 bp, Homo sapiens
agcattgtgtgtgccatttgccttggtttagctggaaaacctgctttcatgggacgagcagataagcatctaacattcacaagggaatttgattcagatt

SEQ ID NO: 295601 - DNA, 90 bp, Homo sapiens
ctgggggtcctcagcgtggtctgcctgctgcactgctttgatgagctttgatccaaaccttctccacaacaatggacataatgggtaccc

SEQ ID NO: 295602 - DNA, 75 bp, Homo sapiens
ggcgttactgatggtgctgctcacatctgtggtccagggcagggccactccaggaacagcttgagaactatgact

SEQ ID NO: 295603 - DNA, 75 bp, Homo sapiens
aagaggcccagagacatgctgaaacatcgaagcccagatggctacctgtatgagcgtgaggccatcctggagtac

SEQ ID NO: 295604 - DNA, 75 bp, Homo sapiens
ccgtgatatgttccagttgcacatttcctgcaaggactccaaagtggtgaggtcaccagtgaaaagttgtgcaga

SEQ ID NO: 295605 - DNA, 99 bp, Homo sapiens
tttatttcctgctgatgaattgtatggaatagttggtgctaaccttaagaggagctttgatgtccgagaggtgattttcctgcatggattgggagatac

SEQ ID NO: 295606 - DNA, 100 bp, Homo sapiens
actccttctggtgaattcaggaagactaatcaaagaatagataacaagtgcagtgaattgaatgatctggcacgggaccctccagcacagtgttcagcag

SEQ ID NO: 295607 - DNA, 80 bp, Homo sapiens
tcaacgtgcgtgtcacccacgcagacatcttcagccgctgccaggaaaaggccaaagttgttgagcccctggactatgag

SEQ ID NO: 295608 - DNA, 100 bp, Homo sapiens
ggaaactggcggctgctggtagttccatgctgtctgttcagacttcagcttggtattctacaagggggttgctcctctctggatgagacagataccatac

SEQ ID NO: 295609 - DNA, 76 bp, Homo sapiens
accgagagcgtgaccgagagcgcgaatatcgtcatcgttagaaggggtggcactgaatcaacaagacaagcaactc

SEQ ID NO: 295610 - DNA, 75 bp, Homo sapiens
ctgccagaaatttgaacaactttccgaatctgcaaaagaaggttaccagcacaactttgacacctatgatgatag

SEQ ID NO: 295611 - DNA, 98 bp, Homo sapiens
cgctctcgtcttctgcggctctcggtgccctctccttttcgtttccggaaacatgttccagaaacgccgctggactgcgaggtctccctgtggtcgtc

SEQ ID NO: 295612 - DNA, 75 bp, Homo sapiens
ttgtgccagcatctgctgtcaggtggctcaggacttgattattcttagaaatgcacttgacctgcttttgccaaa

SEQ ID NO: 295613 - DNA, 100 bp, Homo sapiens
gttggagttggtggtggcttaagttttgaagggaggtagcatccgttggatatccacaccatccttctcgctgcaggacaccatcatccgagcagtattg

SEQ ID NO: 295614 - DNA, 97 bp, Homo sapiens
tgcggcctcctcgcaaaacaaggtgctggccacagggctcagtgccctgtactcatcactgcctcgaaagattgaggttccaggggatgattggcac

SEQ ID NO: 295615 - DNA, 100 bp, Homo sapiens
aggaacataatgtatttcaaaacaaaatacatgtcagttatcaagagactcaacagatgcagatgaaggtagcccagcagcagtgaagatgcagactgat

SEQ ID NO: 295616 - DNA, 74 bp, Homo sapiens
aagaactgagctatttttgaaagaacatgaccaccttcgaaattcaaaaggtgatgacctatcaacagccattc

SEQ ID NO: 295617 - DNA, 99 bp, Homo sapiens
acctcacccacccggggaacaagatcaacctcctcggcttcttgggccttgtccactgccttccctgcaaagattggaggtggacacaaaggaagaggc

SEQ ID NO: 295618 - DNA, 75 bp, Homo sapiens
ccagacgccgacgtcgaccagcagagactgaacctaaaggcagacccagaagagctttttacaaaactagagaaa

SEQ ID NO: 295619 - DNA, 100 bp, Homo sapiens
tcttgaaggctgtgctgagaaaagtaaacagctgaaggatgaaggagccagtttggctgaaaataaaaggtcgtttaggccaattgggtttgaaagaagg

SEQ ID NO: 295620 - DNA, 100 bp, Homo sapiens
tcacatctatgccatcacagacaccgcctacaggagtatgatgcaagattttgcctgcctgagctcctctagtagtggccacaattgccagagaagatag

SEQ ID NO: 295621 - DNA, 99 bp, Homo sapiens
tcgagaaatgatggagtccttcgaaggccctcagcctgcggatgtgaggctgatgaagaggaaaacaggcatttcccggaaacattaactctgacggtg

SEQ ID NO: 295622 - DNA, 100 bp, Homo sapiens
gccaggtgaagcccaacgatcagcacttcagtcggaaagttggaacctctgacaagaccaagtactaccttcaagagagtggatctttcctacaattgct

SEQ ID NO: 295623 - DNA, 95 bp, Homo sapiens
gtttcatgttgggtttagaaacgcatgaccgaaaatcagaagacaaacttgccaaagctacaagagacaggcccagagacggaaagtacaaagac

SEQ ID NO: 295624 - DNA, 106 bp, Homo sapiens
gcggtttttattaaggctgttcatgtgaaagcctcctgacaaggtgatccgggcgggccccgcaggaattttatcccctcaccggcctcacactagtatcgcatgt

SEQ ID NO: 295625 - DNA, 96 bp, Homo sapiens
ctgcctcctgcagcccccatagcagattgatggttctacactgcggacattgtgtttgcaacatgggcctcttatcacattccacctgaatctgac

SEQ ID NO: 295626 - DNA, 100 bp, Homo sapiens
tgctgcagcacaatctggcctcccggtacggatagagagtattaaatgtggagcccagtttcctccaattgcagcacaagaccttccttttgttctaaag

SEQ ID NO: 295627 - DNA, 82 bp, Homo sapiens
tttcaaagacgattaaccgaggctcacgtcgcggagacgttatgacagtgttataaatcgactgtacactggtattcagtgt

SEQ ID NO: 295628 - DNA, 76 bp, Homo sapiens
tgaagagaaaggcccggagactgaacttctgggtcaaccagttcagagacctgcttcttccaatcttctgagtggc

SEQ ID NO: 295629 - DNA, 100 bp, Homo sapiens
ggtcacctacgtgcggctggagaatggcgagccccgtggactccccatcatccaagacgtcatgctagccgaggcccagttgagcagctttgatctccgg

SEQ ID NO: 295630 - DNA, 100 bp, Homo sapiens
cggagcccccagcgcagcggccgcgatgacacacaataatttttggttgaagaagatagaaatcagtgtttcagaagcagaaaaacgaactggaagaaat

SEQ ID NO: 295631 - DNA, 50 bp, Homo sapiens
ggatgagggagcatctgcaggtcaaggtgtcacaccttggattcaccata

SEQ ID NO: 295632 - DNA, 98 bp, Homo sapiens
caggtcacacatggacttgaaggatgggtgctgaaaagtcacccaccacttcagctgaccttaagtcagacaaagccaactttacatcccaggagacc

SEQ ID NO: 295633 - DNA, 75 bp, Homo sapiens
aagccgacaagcccgggagacacagtgtcagaattacaagctctgctttcccagcacgctgcctcaccaagaaag

SEQ ID NO: 295634 - DNA, 96 bp, Homo sapiens
ccatcgcaaacccaaagatccccgttcctggagattctgattgaggccatcgaagacggcaatttggaggaaatggaagaggaagtacggcttaag

SEQ ID NO: 295635 - DNA, 75 bp, Homo sapiens
ggctgggcagccttgtccgcggcatcacagccctcacctccaagcacatgtccctggtagatttgggaaagaagc

SEQ ID NO: 295636 - DNA, 82 bp, Homo sapiens
ccgggcacctccgagcgcaaggacagcgcgaggtccgcgcagcccagcgcagccatagatcccgctgtgcgctggctgtgac

SEQ ID NO: 295637 - DNA, 75 bp, Homo sapiens
tcctatgtggacgttggcactgggaaggtggggacccatcgtgaagatggcgtggccctgagaggcagccattct

SEQ ID NO: 295638 - DNA, 90 bp, Homo sapiens
tgatgatgctctgtccgactggaatttgactcccatcccagatctcaaagtgtttgagcgtgagggagtacagctgaatctgtctttcat

SEQ ID NO: 295639 - DNA, 98 bp, Homo sapiens
gggacttgagactcaccggccgcacgccatgagggccctgtgggtgctgggcctctgctgcgtcctgctgaccttcgattgggggcactgaggaatat

SEQ ID NO: 295640 - DNA, 75 bp, Homo sapiens
tggagccggagctgggcgcggattcgccgaggcaccgaggcactcagaggagaacaactctgctcatggtgatta

SEQ ID NO: 295641 - DNA, 75 bp, Homo sapiens
actacaacaagttcatctcagccacagctgctggagccagttctgcttctcggcaaggagcgatttgctggtgta

SEQ ID NO: 295642 - DNA, 134 bp, Homo sapiens
cgctggggaaatttcccacttcctctcctgagaccaggaactcagcagagaaactttgtggtgctggagaatctggtaaaagcaccattgtgaagcagatgaggatcctgcatgttaatgggtttaatggagag

SEQ ID NO: 295643 - DNA, 98 bp, Homo sapiens
ctcccagcagagtcgtatggcaacgatgagtcttttagtcctgctatacagctgcaccttgtacatcaagctccatgtaatgttcctccttacctctc

SEQ ID NO: 295644 - DNA, 100 bp, Homo sapiens
tcggccagcctgagcaagcggaggacctacgccggcctggatgatgattattctccaccgtctaagagaccaaaggccaatgagctaccgcagccaccag

SEQ ID NO: 295645 - DNA, 82 bp, Homo sapiens
caccgctgccctcagctccgagtccagggcgaggtatcatgatattagctggtttgacatcaagtcatttgtgagtcatcag

SEQ ID NO: 295646 - DNA, 50 bp, Homo sapiens
cccatcgcagccgccccgaaggagccagttgatgcggatgaaattaaaag

SEQ ID NO: 295647 - DNA, 75 bp, Homo sapiens
gtcgggcggggaaggaagttgccgagttgcagggcgaactttctgaccaagtatacaactacccagagggcctag

SEQ ID NO: 295648 - DNA, 75 bp, Homo sapiens
tcttctgtgggctgtgattttcagaggggaatgctaagagggaagtgttcgccagttactacatgaaaagataag

SEQ ID NO: 295649 - DNA, 50 bp, Homo sapiens
gaccattccgtatggagagccgggattgccccctgtgggtcactttctca

SEQ ID NO: 295650 - DNA, 100 bp, Homo sapiens
ttggtaggcatcatgttctgtttacttgaaccagtgagaagatggccgagcaagcaaggataagtgacccagatgatgtggtaccagttggccaaagaag

SEQ ID NO: 295651 - DNA, 75 bp, Homo sapiens
tgggagaaaagatcctcttcattaggctttgaaatatcagtgatgtataatgaatctgacctgcatacactcgtg

SEQ ID NO: 295652 - DNA, 75 bp, Homo sapiens
cgttgtatcttgggagaaagacacagtctccatcatcccaggccaggtcagagcagcccaccatgggatggggag

SEQ ID NO: 295653 - DNA, 100 bp, Homo sapiens
cgcacaggcggcggagccggtatgggcccgcctgaccctgggcgccgcgccgcacgagcaccagcctagagccaggtattgcactatgtggagaaaccca

SEQ ID NO: 295654 - DNA, 100 bp, Homo sapiens
cctggatttcctggttctgtgggctccgtggcaatgaattcttctgtgaagatgctgaaaacgccattcaacagatgggtggccagtggcttggtggaag

SEQ ID NO: 295655 - DNA, 100 bp, Homo sapiens
ccaatggggaacagttcagctctttgattaatgatgccaatgggtggaatgatgccacctggaccaggaataccacctctgatgcctggaatgccaccag

SEQ ID NO: 295656 - DNA, 100 bp, Homo sapiens
ggagcccagagtcagcgcgcgtggaaagtgctagcccgagcgaggatcatgaggcacgaacaaattggagctctggcagatcagcatatcattcatgtgg

SEQ ID NO: 295657 - DNA, 101 bp, Homo sapiens
ggccgtcgcccaggagtcatcggacgccagaatctggcacaaatcctgaagagcccgtgggcgtggactgctcatctgtaaagaaagtggagacatgacct

SEQ ID NO: 295658 - DNA, 75 bp, Homo sapiens
gcgcccgccagctgctccggagatacgcatgcagcagattggaataaatatgatgaccgattgatgaaagcagca

SEQ ID NO: 295659 - DNA, 74 bp, Homo sapiens
ttgttaagagtggacaggttaagggactcccaggaatatcagttagttgatactactgtggagttggcaaacaa

SEQ ID NO: 295660 - DNA, 98 bp, Homo sapiens
ctggacagcgcatcgccgcccgcccgggtcgccgcgccacagccgctgcggatcatgctatatgttctcctttcagccaagacctttcaccagtgcag

SEQ ID NO: 295661 - DNA, 90 bp, Homo sapiens
cctcagcacccgcccaaggctttgttggtgttgcacctttcggccctgttgcttctgcgccggcgatcagcaccccctgaagagcagcac

SEQ ID NO: 295662 - DNA, 100 bp, Homo sapiens
ctttcatggagttcacagaagagtcgaggaggtcttgggcgtctttggtactggcttttttaggggtctgcctggggattacccttgctgtggatagaag

SEQ ID NO: 295663 - DNA, 75 bp, Homo sapiens
ctggcatggatggcggcatgagtatctgggatgtgaaggtcttcctgaaggagacggagcggcaagccctgcagg

SEQ ID NO: 295664 - DNA, 75 bp, Homo sapiens
acgtggcttatgagtacctttgtcatttggaagaagcgaagagctctttcgacgtgtagcagcagctttgccggg

SEQ ID NO: 295665 - DNA, 100 bp, Homo sapiens
tttctcagccagctctgaggggacccgcatcaagaaaatctccatcgaagggaacatcggctgcagagactgcaagtctggaagaacagctgcaaggatg

SEQ ID NO: 295666 - DNA, 88 bp, Homo sapiens
gaactatagagtttgtggacagatttatattggtgaggctccaggttgggctctatgctgtgtaccttctggactggctcagcgtttt

SEQ ID NO: 295667 - DNA, 74 bp, Homo sapiens
gtgcaaacccgagagaactgggaagaagaccagctacaaggaaatacttctgaaaaatcactctgaaccccaag

SEQ ID NO: 295668 - DNA, 82 bp, Homo sapiens
tatcgacgtcgtgatccagaagtccagagctgaggactgcctgtttgcaggtagagtacagagagatggatgaaagcttggc

SEQ ID NO: 295669 - DNA, 80 bp, Homo sapiens
cctatgccatgaagcgggacctcactcagatggccgacgaggaagctcttcgtgggcggtcttgactggagcacgaccca

SEQ ID NO: 295670 - DNA, 100 bp, Homo sapiens
gcggctcgctgtcctgccctacgagctgcggttcaaggagcccttaccggaatacgtgcggctgggcagaagagcactgatcgtactggctcactcagag

SEQ ID NO: 295671 - DNA, 100 bp, Homo sapiens
ctgttcaggccagaccctctgggagcttctcagccattttccacagatcagcttcggaaccaaaaagaagcttcccagagccggggccaggagccccaag

SEQ ID NO: 295672 - DNA, 78 bp, Homo sapiens
ggaattgatctcgccaaaaaggacatctttggagccaggtgcattggatcgttgtgtgatggggataacagcagttga

SEQ ID NO: 295673 - DNA, 95 bp, Homo sapiens
gaggcggcgcggcagcggagggacggcagtctcgcgcgattctcagcgctgattttgagatgatgggcttgggaaacgggcgtcgcagcatgaag

SEQ ID NO: 295674 - DNA, 100 bp, Homo sapiens
cttccgtgggcaacgtggccgacagcacagaaatggtggagtcaatgaagaaagtagcagggatggatgtggagctgacagttgaagaaagaaacctcct

SEQ ID NO: 295675 - DNA, 99 bp, Homo sapiens
gaggccttcacagcatgtggttttgtgcagggttctccaaaaaatgtggaatcctttgcatctatgctgagacattctcctcttacacagatgggacct

SEQ ID NO: 295676 - DNA, 90 bp, Homo sapiens
ctggtttcgtggcctgaccaaggacctccaagggcaattgaaggaacagactaaaaatcgtgtcctggaaggaaactacaggtactacca

SEQ ID NO: 295677 - DNA, 80 bp, Homo sapiens
cgctctgggatcccggccaccagcaattgtccggtagcagcagcagcagcagcagcagcagcagcagcagcagcagcagc

SEQ ID NO: 295678 - DNA, 89 bp, Homo sapiens
tctcaagatgctgcttactggtgggaaatcaagtcgtaaaaacaggtcaagtgcgacgagtagaacagcccctctatggtttagatggc

SEQ ID NO: 295679 - DNA, 50 bp, Homo sapiens
gctaaagcagcgtgcgttcagccctggggatgctccagaccttgtatgat

SEQ ID NO: 295680 - DNA, 50 bp, Homo sapiens
accagcaaaaaggagacacttgtgaacacgggtctcactatgttgcccag

SEQ ID NO: 295681 - DNA, 97 bp, Homo sapiens
ggtcgaggacggtcggactcccgcggcgggaggagcctgttcccctgaggccaccaccacctatcatgacagatggtgaagatgcggattacactca

SEQ ID NO: 295682 - DNA, 75 bp, Homo sapiens
ccccgaacgggggtcttcctcctccgccgttgacagctcttcagtgggtcatctgtgtgtcacagcctcagaaga

SEQ ID NO: 295683 - DNA, 51 bp, Homo sapiens
cgccatcgttgctgccttcttcgtcaaggtctggaagctccgagtttatct

SEQ ID NO: 295684 - DNA, 82 bp, Homo sapiens
aaacatcatccctgccctggatcggcctggagccagtgcccaaggaacggcaggagcagctgatgggatatcggaagagagg

SEQ ID NO: 295685 - DNA, 74 bp, Homo sapiens
cagttgttcgaattaactctcccaattcaaaggaacttgtaatagctggcatcgttgagaatgaatggaaaaga

SEQ ID NO: 295686 - DNA, 75 bp, Homo sapiens
gtggaaaatgagccatgaaccaaccaatggcaagactggagagttaaatcagcttttaaatgcagttaaatcaat

SEQ ID NO: 295687 - DNA, 90 bp, Homo sapiens
gcagtcggcggagcttcgccaaggctggcgcagtcgctggctgtcccaactccttgattaaagagctccatcacttcaggattctgggag

SEQ ID NO: 295688 - DNA, 96 bp, Homo sapiens
gggacaaagaggctacctatggtgtcatggagaaactccagctgggcccagagattctgcagcgggaaaatccaaggcttatttatgccaggctga

SEQ ID NO: 295689 - DNA, 106 bp, Homo sapiens
cctggtttcacaccacgcctggcaatattacagcttctcaataggtttggcatggacaagatctatgaaggccaagtggaggtgactggtgatgaatacaatgtgg

SEQ ID NO: 295690 - DNA, 100 bp, Homo sapiens
tggagccctggcttctcaggcagacctggtgtctccagctgatgatttgtccctgtctgaaggtgtcatggagaaactccagctgggcccagagattctg

SEQ ID NO: 295691 - DNA, 98 bp, Homo sapiens
tggcggatgccctgcagtacctgcagaaggtctctggagacatcttcagcagcgctcctttaccctcatcgtggaggcctgggactgggacaacgata

SEQ ID NO: 295692 - DNA, 100 bp, Homo sapiens
actcaagtctggacctgggacccactgcaggtctgagagtcactggagctaccagaagcatcatggggccctggggagagccagagctcctggtgtggcg

SEQ ID NO: 295693 - DNA, 100 bp, Homo sapiens
ccagacccaggagagcaaggcccagaaagagaaattgtgccatccttcatcaacaaagatacagaaaccataaatatgatgtcagaatttgttgctaatt

SEQ ID NO: 295694 - DNA, 73 bp, Homo sapiens
ctgaccaatgaagaatttaaggagatgggtgtaatcctgagagattcacatggtgttgcacaagtacgttttg

SEQ ID NO: 295695 - DNA, 100 bp, Homo sapiens
ttactatcaaaaggagcggggtcgacggtccccactttcccctgagcctcagcacctgcttgtttggaagggaagaaacccttttttcttggagccagca

SEQ ID NO: 295696 - DNA, 50 bp, Homo sapiens
aaaaagctgaggccagatattggaaggagttctgggaaatcgttcattca

SEQ ID NO: 295697 - DNA, 59 bp, Homo sapiens
cgtgctgcacggaagaatatcagctccagagttttgccgaattgacaagcccctgtgtc

SEQ ID NO: 295698 - DNA, 100 bp, Homo sapiens
cttcatgattctttggctcaaaggagttgtatttagtgtgacgactgttgacctgaaaaggaaattcacagtatggccaacagcaagatgcataccaggg

SEQ ID NO: 295699 - DNA, 100 bp, Homo sapiens
caagtttttcaaagcctaccaaaatctaagattctagtgttccagaaactccagataatgaaagaaaagcaagtatatcatatttcaaaaatcaaagagg

SEQ ID NO: 295700 - DNA, 100 bp, Homo sapiens
cagggccagcagctggacagcgtcatgagaggcctggacaagatggagtcagacctggaggtggcggacagttccaggaccgtctgcagccctaacaaca

SEQ ID NO: 295701 - DNA, 75 bp, Homo sapiens
gcccctcgcgtccggagtccccgtggccagcatttaaatcaaacggtattgagatggattgggttatgaaacata

SEQ ID NO: 295702 - DNA, 80 bp, Homo sapiens
atttatagctaagactccaggacacccctgaagccgagaaatggtacccactgatggtaatgctggcctgctggctgaac

SEQ ID NO: 295703 - DNA, 100 bp, Homo sapiens
ccaggactcagaggccgccatcaaccgccagatcaacctggagctctacgcctcctacgtttacctgtccatgagaacactttttacagttggctagaag

SEQ ID NO: 295704 - DNA, 75 bp, Homo sapiens
aggtcatgaaggacctgagcctgacgcgggccgcgcggacgaatatgatgacaagcagccactgaccagcaaaga

SEQ ID NO: 295705 - DNA, 90 bp, Homo sapiens
gtaccatccgcctgtgggacacctaccaggtcacagagatgcggcggaccctgacgcctgccagctccccagtgtcctcgcccagcaagc

SEQ ID NO: 295706 - DNA, 100 bp, Homo sapiens
ctgatcagagcactctgcatgcagaagatcctctttccatcaccttcatggaccaacataactttagtccaagatggaggtggggaagacagggctccag

SEQ ID NO: 295707 - DNA, 96 bp, Homo sapiens
ggaagaactaaactggcagcttcacattttcttgctcattcttctctctatgcacacaagggtaactctcaggagccttctccgcagttggcttcc

SEQ ID NO: 295708 - DNA, 100 bp, Homo sapiens
gccaagtggatgtggcgggtgatcgagccaccctgcccaggggcgcccagcactggcagagacatttgtttgggtgaacaatgcatctgcacattcccag

SEQ ID NO: 295709 - DNA, 88 bp, Homo sapiens
cctaatgtttcatatgcagcgacaaagaaaacttcctgaagaacatgccaggggccttcagaaggaagaagttgttttgcttacacat

SEQ ID NO: 295710 - DNA, 98 bp, Homo sapiens
ctccttcgggggttactgctctggtgaagactatgagacactgcgtcagatagatgtgcacattttcaatgcagaatccacgccagtacaagatccca

SEQ ID NO: 295711 - DNA, 90 bp, Homo sapiens
cctttgcaccctgcttggagacggacttgcttccgcaccgacagtaaatggttcacggccgacatcatgtccataggggtgaattgtaca

SEQ ID NO: 295712 - DNA, 90 bp, Homo sapiens
cgttgaaacacccacagactgccaagtgggacaactttctggcttttgaaaggctccttcttcaggcatttttagtgatgtgtggcctca

SEQ ID NO: 295713 - DNA, 83 bp, Homo sapiens
gttacttcatggcagctatcccacaggtggcaagtgggatgatactggtcatggctttctttctcatcacctacacctttcat

SEQ ID NO: 295714 - DNA, 75 bp, Homo sapiens
caggattcttctttgcagcaagaagccagttgagggaagttctccatgaatgtacgtcacaatgatgatgaccga

SEQ ID NO: 295715 - DNA, 98 bp, Homo sapiens
agtccaaggtccgggtatcttaccagctgggtacattgctcaaaagataggcctgcccatccgtctggtcgtggcagtgaaccgcaatgacatcatcc

SEQ ID NO: 295716 - DNA, 100 bp, Homo sapiens
caggacctgtctgacgatagtccaaaaactgaagaagatggtggataagcccacccaggatgagagccactcagagtgggtgtcttgtgtccgcttctcg

SEQ ID NO: 295717 - DNA, 100 bp, Homo sapiens
cctctgtcatttttgaagccttggctacaggctgcaccagcaccacagcctatataagcatccacaaaaggaagaggcccagcagaagggactcgctgag

SEQ ID NO: 295718 - DNA, 100 bp, Homo sapiens
gtgctcatggggatgaagaaccagctcgcctcatgggaccagaatcgcatgggacaggactcctatgtcctcatggccagctctcaggcggagatggagg

SEQ ID NO: 295719 - DNA, 50 bp, Homo sapiens
ggattgtagaacttctctctctgatgaatttttagatgtgatctactggt

SEQ ID NO: 295720 - DNA, 100 bp, Homo sapiens
cgggaacagccatgcaaaggcaggggaggaagccacctcgagatgccttcaattaagttgcagagttctgatggagagatatttgaagttgatgtggaaa

SEQ ID NO: 295721 - DNA, 75 bp, Homo sapiens
cacaaggggaaatttggcttgcaattcatcactttgaaaaggactcctaaatgcaaagtccctggatgtttcttg

SEQ ID NO: 295722 - DNA, 96 bp, Homo sapiens
cggcgctttccccgcaagatggacggtttcgccggcagtctcgggggcagctggcattttatgctatgtgggagcctatgtcttcatcacttatga

SEQ ID NO: 295723 - DNA, 100 bp, Homo sapiens
caccgccggcggtgatgcggctgtgaagccctagtcggacgagattgaggagctgcgggccgagatgctggagatgcgggacgtctatatggaggaggac

SEQ ID NO: 295724 - DNA, 126 bp, Homo sapiens
agacacaacccggccatcgaggccctgctgcacgacctcagctcccagaggatcaccagcgtggggcgaagctgtgctcaggcccgggctggacgcagagccagagctgtccccagaggagcagag

SEQ ID NO: 295725 - DNA, 100 bp, Homo sapiens
cagaagttaggtcaagatgaagacatggatgtcaaatactttgcacaggaagctataagtggaacatcatcttcagcgggctatttcagcacagcaggtg

SEQ ID NO: 295726 - DNA, 98 bp, Homo sapiens
gtcagaggcgaacgccactcagcttttgcggcacttggagaaacacaagttcctgagaagaaaaaaggaatcttcaggagagcctatgacctattttg

SEQ ID NO: 295727 - DNA, 139 bp, Homo sapiens
gttccaggtagacatggaggccgtcggggagacgctgtggtgtgactggggcaggaccatcagggatgggcgtgttttgggcgtgctagaggtgtcacgctccattggggacgggcagtacaagcgctgcggtgtcacc

SEQ ID NO: 295728 - DNA, 98 bp, Homo sapiens
cgctggctcagccgcaagtacccgtccatcatagtcaactgcgtggaagagaagataatgtggatgcaaatgatcttaagcagttttttgagaccaac

SEQ ID NO: 295729 - DNA, 80 bp, Homo sapiens
cttttctcagatgttggatatttgcttggaaaaacgtgtgggtacgaccttgacagttgaatttctgaatgaaaagctgg

SEQ ID NO: 295730 - DNA, 51 bp, Homo sapiens
agcaaattcgtcagatcaaagaacaagtcaccaggagactaaagtccatca

SEQ ID NO: 295731 - DNA, 51 bp, Homo sapiens
ttccccacctgcgattgcgtcggaaccagttacattcaaggatgcctctgt

SEQ ID NO: 295732 - DNA, 98 bp, Homo sapiens
aggagctcaaccaatcgctgaaggatgcctgggcctcagaccagaaagtgaaggctctaaaaatagtcatccaggattcatgcttaacaagtctagca

SEQ ID NO: 295733 - DNA, 98 bp, Homo sapiens
ctcaaacccctcagacaatgaattcacaacctcaaacccgttctccgaacatgatgagtgtatcacaaatcagcacaactgtgatgaaaatgctttat

SEQ ID NO: 295734 - DNA, 100 bp, Homo sapiens
atgaaaatgaagacgacattcagtttgtcagtgtacagtagcagagggagctcccattattccaatttcagctcagctgaaatacaatattgaagttgtt

SEQ ID NO: 295735 - DNA, 75 bp, Homo sapiens
gctggagcatctgccttcggaaagctcttttatcttcctgccaagaagaatgtggattccattcttgaggattat

SEQ ID NO: 295736 - DNA, 90 bp, Homo sapiens
agcagcagcaagttagtggattaaaatctcccaagaggaatgacaaacaaccagctcttcagcaattctgtggtgttcttggtcacacat

SEQ ID NO: 295737 - DNA, 97 bp, Homo sapiens
agaccggtggatcctgtccttcatgcagtctctcattggcttctttgagactgaaatggcagaacagacccaggaaagcattcagcattttgagcga

SEQ ID NO: 295738 - DNA, 97 bp, Homo sapiens
actgataaactttgagaaaaggagaagggctgaccggttccctgatgtgttacctgcttctgctactgatccaaactgcagaacttctcattcatcc

SEQ ID NO: 295739 - DNA, 75 bp, Homo sapiens
ctgccttctggagagctgaccaaacactaagggttgtctgcattcaaaagagcattctattaaagctaccttaat

SEQ ID NO: 295740 - DNA, 82 bp, Homo sapiens
gatgtcagtgttatatcctccaggaatactggccagctctacaagtttcacgctgtttaagtcatgaacctacaaaagcctg

SEQ ID NO: 295741 - DNA, 74 bp, Homo sapiens
ccttggtgcacctgtggccgccatgtttgagcgagctgcggataaccgtctggtccttgtgcacaaaatccgtg

SEQ ID NO: 295742 - DNA, 101 bp, Homo sapiens
gttctgggaacagccagggcttcagctgtcgcctggttgggcccggaaatgggacgtcgcgctttctcagggagcgtagaagcagccagggcctctccaag

SEQ ID NO: 295743 - DNA, 75 bp, Homo sapiens
cgagtgcttcctgagccccagatttggagttccatggagtgatgagattttattttcaagataaagctgctggaa

SEQ ID NO: 295744 - DNA, 100 bp, Homo sapiens
cacgactacagcaagaaattgaaaacctgaaagctgagagagcaccacgtggagatgaaaagatgaaactgttaaagatggagtcaccttatacctgcta

SEQ ID NO: 295745 - DNA, 100 bp, Homo sapiens
gtggctgaagcaaagccacctacagttactatgcctcgaatcaagatatgatggacgtggtcacctgcatgacctttctgagtacgatgctgagtattcc

SEQ ID NO: 295746 - DNA, 117 bp, Homo sapiens
gtgaaccttcgcattcagaatttgaccatcttggtgagaaacattaagacctactaccaggagccttcacgtaaatgggtccagtcatgcctcccagtaagaagccagaaagctcag

SEQ ID NO: 295747 - DNA, 75 bp, Homo sapiens
gctgcaccgacctcgacgtcttgcctgtgtcccacttgttcgcggcctatagtatttttcagtgctgtacaagcg

SEQ ID NO: 295748 - DNA, 100 bp, Homo sapiens
gcttgaatgtctgccgaaatgttcaagtttaccaaaagagaggcaccgctggaacactaatgagggtttgaaagtattcttgaagggctgtttggacctg

SEQ ID NO: 295749 - DNA, 123 bp, Homo sapiens
ttttattacaagactacggagcataggaggaaaattcatcatctgcccctctgaaatcaaagagatcttgcatctggctggactcaatgagctggaggtgattcccttggtgcagacatttgg

SEQ ID NO: 295750 - DNA, 127 bp, Homo sapiens
cggggacggctgcgcgggacggctctgtaggaaggaacttggttccccctccctcagcttccgccccaaaaggaataagacgagttggaagaagacctgatcaacaacttcagggtgaagggaaaat

SEQ ID NO: 295751 - DNA, 98 bp, Homo sapiens
taaattgtgaggattcttatgtggctagtttgcagcctgattacatcaaccccagagccgtgcagctgggctcccttctcgtccgcggcctcaccact

SEQ ID NO: 295752 - DNA, 74 bp, Homo sapiens
gccatggacaattccaccagaggagttcagcaagagaagggatttaaggtggagtctttcattttggatcagga

SEQ ID NO: 295753 - DNA, 50 bp, Homo sapiens
ggaaaatctccccggtgactttcagtcactcttgcaggactgatcctttg

SEQ ID NO: 295754 - DNA, 75 bp, Homo sapiens
tacagagagccctgctacgcgtcgggtccaggtggcagaacatcctagagcagtaaacagtcctcagcgaagccg

SEQ ID NO: 295755 - DNA, 75 bp, Homo sapiens
actggggactgcttcatcctggacctgggccaggcctccggtgtggctgtctctgatggtgtcatcaaggtgttc

SEQ ID NO: 295756 - DNA, 88 bp, Homo sapiens
gcttggttaaaacctgacacttttaacaggtcactacaggaaaagatatcttcattaaagtgcaacagcacactgagagcaacacacc

SEQ ID NO: 295757 - DNA, 89 bp, Homo sapiens
ggaatctgttcttcttttgcatcctacgtaaccagaccaagctgtgggaggaacgagccagaatctattcatcagacagtgatgaggga

SEQ ID NO: 295758 - DNA, 82 bp, Homo sapiens
ctcttccgcagtgattgaagctttgataaatgaaatcttcctaagtataggtagccctaatggagaaccttgtggaaagact

SEQ ID NO: 295759 - DNA, 100 bp, Homo sapiens
cagctacctcatcatcgacacccaggcccagctggctgtggctgtggacccttcagaccctcgggctgtgcaggctatctctcagagaagctggagctca

SEQ ID NO: 295760 - DNA, 100 bp, Homo sapiens
cgcagcctcctatggtcgccccttcccgacccaccccaggcgtcaggagttccgcgcccggcccatgcaggctctggaggtcctcctgctgctacggatt

SEQ ID NO: 295761 - DNA, 100 bp, Homo sapiens
aaacagttacagatttttgttatcttctggataaatctaagcaactgttcaatgggttaagagaaatctgacagaatattttgtggctgtggatgttaac

SEQ ID NO: 295762 - DNA, 75 bp, Homo sapiens
agtcataacatatcactgactgataaaaatctggataatgccgcagaagcagctgaacaatttaaattaatccaa

SEQ ID NO: 295763 - DNA, 75 bp, Homo sapiens
gagagcaatcgccaccgctttcctggaacttgagaatcttgtggaagaagaatgaagttgctgattatgaagcta

SEQ ID NO: 295764 - DNA, 100 bp, Homo sapiens
gctacgctatgtggcgaatatcttcccttacaagggttatatatggaattatggtaccctccctcagaatgaactcagttcaaaagtagagctgcttaga

SEQ ID NO: 295765 - DNA, 101 bp, Homo sapiens
tccgcgcacaatcggggcaccgagctcggcaacagcattattgagaaaagcccttacagaagagtgtggccgtaggtcagctattcacagtagtgaatcat

SEQ ID NO: 295766 - DNA, 85 bp, Homo sapiens
gcctcatagacagaacgattgatgaagtagttgatggtgggggaaaagtagctccagctcaaccatctgaggaaggaccaggaag

SEQ ID NO: 295767 - DNA, 89 bp, Homo sapiens
gttgcatctgctaaagaggatcctgccaacattttacaggccaatggtggcagagtctacatagaactatgcttcgtggtgttctgggg

SEQ ID NO: 295768 - DNA, 100 bp, Homo sapiens
gggaaaatagagtgtgtatcagcagagaccaccgaagactgcatcgccaagatcatggacccatccattttcacagtattgactgctaagtctgtccgcc

SEQ ID NO: 295769 - DNA, 75 bp, Homo sapiens
ttccagcctgatgctaccaaaggtggaaagtcctgaagaaatccagtgggtagcagaaggtcaagaaatttgtgt

SEQ ID NO: 295770 - DNA, 100 bp, Homo sapiens
atgaaggcctgttttgaagagaaggggaataagactgcatctgttcatatgaggaagctgtagagaaatatgaagaagtgctacataatttggaatttgc

SEQ ID NO: 295771 - DNA, 88 bp, Homo sapiens
gagaaacatgaagttcgggactatcttctgggcaaggggacgcgagataaggtcctgatcagaatcatggtctcccgcagtgaagtgg

SEQ ID NO: 295772 - DNA, 73 bp, Homo sapiens
tgccctggctgcctcagccctaccagcactggtcatgtctaaaggtcctggtccgcgccagagcccagcgcgc

SEQ ID NO: 295773 - DNA, 82 bp, Homo sapiens
cgagcacagagcctcgcctttgccgatccgccgcccgtccacacccgccgccagggtcccctggaagtgacgctgactcagc

SEQ ID NO: 295774 - DNA, 74 bp, Homo sapiens
gctgcgctttcctgtccccaagccgttctagacgcggattaaaggatcctggtcaaataaaagaggtaaagaaa

SEQ ID NO: 295775 - DNA, 100 bp, Homo sapiens
gtccttgcttgctggtctgattgtcgtttttacccggccaaagtcactgctgttaacaaggatggtcatttgaaccaattctccgcctccttccccaggg

SEQ ID NO: 295776 - DNA, 75 bp, Homo sapiens
ccaaatggacgggactattaagaacacaccacagccatcagcactggaatgcaaagaccagaacaaacagaagga

SEQ ID NO: 295777 - DNA, 99 bp, Homo sapiens
cgaccgtcgccggcagcgccgcgaaggcggtgctcgggccagcccttctctgccgtccctgggagagagagcaggagattcggatgggtcagatggcta

SEQ ID NO: 295778 - DNA, 49 bp, Homo sapiens
cctacccgggatacggaggaggggaagcgttgttgacgaccatggacat

SEQ ID NO: 295779 - DNA, 100 bp, Homo sapiens
gggccaggaagaggaccaaggtgctgtctttggccaagagggtggaatggaagttaaggagcctcaggtccgtttaggccgtctcttcctgtacagtttc

SEQ ID NO: 295780 - DNA, 100 bp, Homo sapiens
atcgactacaaacggaacttgccgcgtcgaggactgtcggtgtgtcccggcatggatatccggaacaacctcactaggttgcatgagctggagaattgct

SEQ ID NO: 295781 - DNA, 100 bp, Homo sapiens
ctggacttcattcctggaaaaagaagttcatcagattcaagacgccacaggtcatcatctggatcatcccattctggttcccgttcaagttcaaaaaaga

SEQ ID NO: 295782 - DNA, 90 bp, Homo sapiens
aatgtgggcgataattcctttcttacaagaaatcttcccaaggctgcagacaccgacggatttgctttgggagccagagtagctgccgcc

SEQ ID NO: 295783 - DNA, 82 bp, Homo sapiens
ccagaccctggagcctcagttggaagcagccgatccagcctgcggagcctgtggggcagcctctgaagagccaatccattca

SEQ ID NO: 295784 - DNA, 100 bp, Homo sapiens
tggctttctgcgccatcctgcaccgccaccggcccgacctcatgtgacagagttagtccttgataattgcctgtgtgtcaatggggaaattgaaggcctg

SEQ ID NO: 295785 - DNA, 100 bp, Homo sapiens
aggccggctgccaccttctgggctcctggggccctgcccaccacaagcgttttaaggatgaacagattgacatcctcgtggccactgatgtggcagcccg

SEQ ID NO: 295786 - DNA, 76 bp, Homo sapiens
aaaagggagcatctcgaatactcctgggcaacgtgctggtctgtgtgctggcccatcactttggcaaagaattcac

SEQ ID NO: 295787 - DNA, 95 bp, Homo sapiens
gtgaccatgaaagacaccaggttgacagcactggaaactgaagtaccagttgtcgctagaacaggatgcggagatctctgcctttgagctgcaga

SEQ ID NO: 295788 - DNA, 99 bp, Homo sapiens
ctcagaaacaccaagggcaacgtcagctacaaagcccaaggtgttatagatgaccttgtctatagtataatagaccatatacgcccagggccttgtcgt

SEQ ID NO: 295789 - DNA, 100 bp, Homo sapiens
gcacttcgacccggaagtttacctagacaaggtggcaagttatggtgtgaagccaagatatggtctagtgacatatgccacataccccaaaatttgggtc

SEQ ID NO: 295790 - DNA, 96 bp, Homo sapiens
agttattccagtttaggaggaagatgcaagcggtttgggaccttgaacaaggcaaatatggttttgagccagcccctgggcaacaaagtggaaatg

SEQ ID NO: 295791 - DNA, 129 bp, Homo sapiens
caccctggggagtggaactgcagagacaagacctccagagaatacccaggccccagccttcttcttggaggagcgcctgccaacggtaccgctgtccggcatgtacaataaatctggaggaaaagtgag

SEQ ID NO: 295792 - DNA, 50 bp, Homo sapiens
tctgacgtctcccacttccgcttccatctcctgacccctgaggattacca

SEQ ID NO: 295793 - DNA, 88 bp, Homo sapiens
cctcagcctcctaagtagctgggattacagatacactgcctctaggactgggacagatagccactgagtacctgcttcaaatcaccct

SEQ ID NO: 295794 - DNA, 100 bp, Homo sapiens
gaacgcttagaaagagatcacatctttcgacttgaaaaaggaatttgaagtactgccttgtaattcttaatcagcctttggacaactattttcgtcatct

SEQ ID NO: 295795 - DNA, 76 bp, Homo sapiens
gaaggattgtggtcccgcctcacctggggtatggagaggaaggaagagaaaccaatagagccatggcgactccctc

SEQ ID NO: 295796 - DNA, 90 bp, Homo sapiens
aaagaatggcccttgtggataagcacaaagtcaagagacagcgattggacagaatttgtgaagctcgtgtctgcagttgttgaatatggt

SEQ ID NO: 295797 - DNA, 95 bp, Homo sapiens
cgttggctgggaccgtgcgcgtgcgcctgggggcaccgctgccgttccgagatgtccagctcgccgctgtccaagaaacgtcgcgtgtccgggcc

SEQ ID NO: 295798 - DNA, 75 bp, Homo sapiens
ctactggccgcgagcagcaagacaagagccctgtgtgagcccctcccgaggttccatgacgagcctggagtccag

SEQ ID NO: 295799 - DNA, 98 bp, Homo sapiens
gaagactaaagaaggctggggcttcatgccctatttgcaagaaagagattcagctggccgagacgcatccagagctttcgtgaccggggactgttctg

SEQ ID NO: 295800 - DNA, 100 bp, Homo sapiens
gccatcattttctgtgtcgcgctcagcggctatgaccaggtgctccacgaagacgaaaccacgtttgaggagccgtgccatgtcaactcctcccagctca

SEQ ID NO: 295801 - DNA, 75 bp, Homo sapiens
tggtgtctggaggagtgagagccggcagatcaggatcctcatgaccagccaaagagaagaagaattaggaagcat

SEQ ID NO: 295802 - DNA, 100 bp, Homo sapiens
agaggacgccttcaacaccaccttcatctccaccatcgttcgatcctttggtacagaagacagaccgacagatcgtccaataccacctcgagatgaagtc

SEQ ID NO: 295803 - DNA, 94 bp, Homo sapiens
ccggagctgggcgcggattcgccgaggcaccgaggcactcagaggagaatcatattctaagaactcagccactcaggtatccaccatggtgctg

SEQ ID NO: 295804 - DNA, 75 bp, Homo sapiens
aatgacccaccaatggaagcagctggcttcactgctcaggggttgggggcctgggtctcagcgtgtgacactgag

SEQ ID NO: 295805 - DNA, 73 bp, Homo sapiens
gttcactgtaaacttcataatgggataaacagagacagcagcatgactgaactttacagactagcatggcaaa

SEQ ID NO: 295806 - DNA, 75 bp, Homo sapiens
atcccaacgacaaagtcatgggacccggggtttcctacttggttcgggaacctcactctggagcctgagatcatg

SEQ ID NO: 295807 - DNA, 74 bp, Homo sapiens
cccagcagacagtgctacagagccaactcctgacagatggttgccaccctggggaccacaacatgctgctcctt

SEQ ID NO: 295808 - DNA, 83 bp, Homo sapiens
ctggctactcggagggggaccagcagctgctgaagcgggtgctcgtccggagccaggaggaactctctcccagtccgcctttg

SEQ ID NO: 295809 - DNA, 100 bp, Homo sapiens
ggcctaagggtgaaaacggtgttgttggtcccacaggccccgttggagctgctggcccagctggtgctcgtggaaatgatggtgctactggtgctgccgg

SEQ ID NO: 295810 - DNA, 82 bp, Homo sapiens
cccaatttgtccgtaaccttgtggagaagaccccggcgctggtgaacggagcacgtgaattgcctctgcttacgttcaggcc

SEQ ID NO: 295811 - DNA, 75 bp, Homo sapiens
ctctgttgaaaaagagaacttggcaatagaaagtcaatcgtgtaagaagaagcttgggaagctgccacctcagta

SEQ ID NO: 295812 - DNA, 75 bp, Homo sapiens
atgcctgtcactgggggcaccattaacatgatggagtacctgttgcaggagtggcagaatttagtgacatttgga

SEQ ID NO: 295813 - DNA, 100 bp, Homo sapiens
cccgtccccggcacacgcgcagccccggcctctcggcctctgccggagaaacagcaacatctgaatgaattgatgacgaagaagtggctattagggtcaa

SEQ ID NO: 295814 - DNA, 50 bp, Homo sapiens
cttcagttggtcgaagacagaggttcaggggaagctggaagatgggacag

SEQ ID NO: 295815 - DNA, 100 bp, Homo sapiens
attgatctcttggagcagctggggatcatggaatggttttagggaagactgttgccggatgacaaggctgtcactattgttctgtactacctgacattat

SEQ ID NO: 295816 - DNA, 98 bp, Homo sapiens
gaagaggcactgctgagggggcgcgaggggaacggaggccagagctgcggaatacgtcgcctacagccacacgggccgcatcatccctgcaatctggt

SEQ ID NO: 295817 - DNA, 97 bp, Homo sapiens
ccagagaacgtgaggaagaaccgctacaaagacgtgctgccttatggcctggccaaaaagtttgggcttactcccgagcagtttggggagaacctgc

SEQ ID NO: 295818 - DNA, 83 bp, Homo sapiens
cgacgctaagttgctgatcgtggcgggcttgtcaatgaggcagatcagattcaggttcgacgggcagccaatcaatgaaactg

SEQ ID NO: 295819 - DNA, 51 bp, Homo sapiens
aagcaaaggcattcattgttaaccttatctgactgcagccatgagcagcaa

SEQ ID NO: 295820 - DNA, 75 bp, Homo sapiens
cccgcctgccctgaggagtccccgctgcttgagcatgaataatctttcatttagtgagctatgttgcctcttctg

SEQ ID NO: 295821 - DNA, 100 bp, Homo sapiens
ctgtcttattccactcttcggcgaagctttacgttcatgtaaacagcatgacgtgaggccgtggatgcaggcattaaggacaacaccatcgacttcctgg

SEQ ID NO: 295822 - DNA, 50 bp, Homo sapiens
caggagctctgcattgaaggcactgggcaaaattctgtggcatctctgga

SEQ ID NO: 295823 - DNA, 82 bp, Homo sapiens
aatctcaaatttccaccattatttactcagaaatatccttgtgagatcagtgtactgttacccggacatacctattccttca

SEQ ID NO: 295824 - DNA, 98 bp, Homo sapiens
cgaggctcctgcgctcccgcgccgcgctcccctcgcccgcccgggccgccagtgtgccggtccaacaaaagcccttgggtctgtttgacttgttcaag

SEQ ID NO: 295825 - DNA, 101 bp, Homo sapiens
catagagtctggcgaagtgagcatcttgattagaagcagggtatcctgctgtccatcggcccgcagctagtctatccacccaaccgcccgtcagacctccg

SEQ ID NO: 295826 - DNA, 49 bp, Homo sapiens
cgtgaggtgtgggtgttcgtttctcagattaaattctatcgcatgagac

SEQ ID NO: 295827 - DNA, 75 bp, Homo sapiens
tgagtagtattactgcctgcatacttgatgagctatttcgtactcttgcatcttataaacttattgcaccaagat

SEQ ID NO: 295828 - DNA, 95 bp, Homo sapiens
gaggactgggagctggcggagcggtggggtggcagttgaaaaatttggtgaatgcactacgagaggacccgagtggtgttatcttaactttgaaa

SEQ ID NO: 295829 - DNA, 115 bp, Homo sapiens
ccgattgccaccgcaaagcctacagcaccaccagtattgccagcgtcgctggccctggccaacgtcaacattgggagcctcatctgcaatgtaggggccggtggacctgctccag

SEQ ID NO: 295830 - DNA, 100 bp, Homo sapiens
atcgtatcgtatgtccgctatccagaacctccactctttcggttgtttacattcagagctctatcaataagaggaatacatattacagtgaattcgacaa

SEQ ID NO: 295831 - DNA, 90 bp, Homo sapiens
ttgggattggcatcttcctggcattggatttccttggtacactcacgtggaagctgagtgtcctttcctgacttttgacgacctcctgaa

SEQ ID NO: 295832 - DNA, 74 bp, Homo sapiens
tctgcttggtgtggagccatgaagtgctgagcttgcaagacctctgctgccgggcggtcgtgtcctgcacgccg

SEQ ID NO: 295833 - DNA, 75 bp, Homo sapiens
caagaggctcctcagtgtgggcgagtaaaatgccctgcgtgtgagaagcagcaaattcaacacccaacagcttcc

SEQ ID NO: 295834 - DNA, 100 bp, Homo sapiens
cacagctcagaacagttggatcttgctcagtctctgtcagaggaagatcccttgtcaagagaatccatcccattaaatgacctgaagtcagaagtatcac

SEQ ID NO: 295835 - DNA, 100 bp, Homo sapiens
ttgctcaaggaaggaatgtgaagagtcggaaacttaaagaaatatttaacaaagctttggttgatccaggttggcaacattgtacaagtcacccagccag

SEQ ID NO: 295836 - DNA, 74 bp, Homo sapiens
taccaccccatgacccacgccaacgacatctgcctgctgcggatggttctttggtgtcgctgtccctaacgtca

SEQ ID NO: 295837 - DNA, 95 bp, Homo sapiens
gaaagagctggtgcatgatgacgagcacatgattaagtaccggtacatcccgttcacacatgggaagagaaggtacagaggcaaggaggatgccg

SEQ ID NO: 295838 - DNA, 83 bp, Homo sapiens
ggcaacttcgcggtggtcaagcgggccacgcacctcgtcaccaaggccaagaaaattgtacaagctggagataaggaccttga

SEQ ID NO: 295839 - DNA, 89 bp, Homo sapiens
cgcctagagtggttcagccacaaggagttggtgtacatgggttttgatgcactcgtggccgaagctgcgctgagagtgttcagaggcaa

SEQ ID NO: 295840 - DNA, 50 bp, Homo sapiens
cgtcaatggaaaagtggttctttgcgggccaatccgagcctacatccttg

SEQ ID NO: 295841 - DNA, 97 bp, Homo sapiens
ctagatagtctggatcccggggaagaggaggcggcggagcatgcatatgcgctagaacttctatttgatcagttgcatgaaggagctaaagctcttg

SEQ ID NO: 295842 - DNA, 100 bp, Homo sapiens
ccacgctggagagcgcggagctagaggcggcgcaggaggccggcgcacagattggaaacctggaagattactaccatttttatcacagcaaaacctttaa

SEQ ID NO: 295843 - DNA, 100 bp, Homo sapiens
gacgagcttgttttgtcccggactcgagataattgacgaccttgccaacctagtggagaacacagatgaaaaacttcgcaatgaaaccaggcgggtaaac

SEQ ID NO: 295844 - DNA, 75 bp, Homo sapiens
gagcggagcaaaggccgcatccagcgccagctggagataagtggtggaggtggatacagcagtcggagaacatct

SEQ ID NO: 295845 - DNA, 90 bp, Homo sapiens
ggcggagagcggcctgcgggcgatcgggccgagttcagaatgaccgaagaagcatgccgaacacggagtcagaaacgagcgcttgaacgg

SEQ ID NO: 295846 - DNA, 100 bp, Homo sapiens
ggggtgcaccagacgacacagccagactgagaaaggtggtcccagagcagacatatctgaagagatggattaagaatgctttggattaaggattgtggag

SEQ ID NO: 295847 - DNA, 112 bp, Homo sapiens
gacagtgatggcattgtggcccacttccctgcccatgagaagccagtgtgctgcatggcttttaatacaagtggtttggtgcacctcgatttggaggaagtagggcagggcc

SEQ ID NO: 295848 - DNA, 100 bp, Homo sapiens
acctggacccggacccaaagtgccatgtctttaatgttgatctcctatcaagagtttttggcatttgaatctgttttatgtgctccagattccatgttca

SEQ ID NO: 295849 - DNA, 100 bp, Homo sapiens
attgaactcagagaagccgggagtgtggtgatggtggtcttcagtgaagacaaaaacagagatgaacagctcaaatactggaaatactggcactctcggc

SEQ ID NO: 295850 - DNA, 100 bp, Homo sapiens
cgaatatcgtcatcgttagaaggcttgcttccggcgtcatggctcaaagggccttcccgaatccttatgctgattataacaaatccctggccgaaggcta

SEQ ID NO: 295851 - DNA, 100 bp, Homo sapiens
ctttggttacctatgtacctgttaccactttcaaaacaatgtgtattcctccatcatatgctgaccttggcaaagctgccagagatattttcaacaaagg

SEQ ID NO: 295852 - DNA, 100 bp, Homo sapiens
cccggttttaacaacctggatcttcgaacttttgacacggctttggaaacgacgtcatgtgttagctgctaggggagctgatcctggaccgtcacaactt

SEQ ID NO: 295853 - DNA, 100 bp, Homo sapiens
aattacttggagcaaagggcagtcggcggagcttcgccaaggctggcgcagtcggattctgaaaccttccttgtatccctcctgagacatctttgctgca

SEQ ID NO: 295854 - DNA, 100 bp, Homo sapiens
ccagcagggctccagagtttcttctgctgccacagttctcaaaataaatacttcagtatcaaccaggacttaaaggaagactgtagttcatggaggctcc

SEQ ID NO: 295855 - DNA, 101 bp, Homo sapiens
tcttatttagttctggggagcgcctcgtcgacatgagtgatgtggaggaaaacaacttcgagggcagatgatgatgatgatgattttgatgatgaggaagc

SEQ ID NO: 295856 - DNA, 100 bp, Homo sapiens
gcgcccgccgcgcggagcgccccttcgcgtcccctgcaccatgagctggggcaccgagctctggaaatgactgctgtccatgcaggcaacataaacttca

SEQ ID NO: 295857 - DNA, 51 bp, Homo sapiens
tggttcaacacacccaccagagacggaagcttgcaagtagaagtctcaggc

SEQ ID NO: 295858 - DNA, 98 bp, Homo sapiens
aaccccctgacgaggagcccattatcacccatggcttcaccatgaccacagacatcttcttcaaacatcaacgtcaatgacacctgcaagtatcactg

SEQ ID NO: 295859 - DNA, 50 bp, Homo sapiens
agccgccaatgatcccatttttgtgcccggccgcaccacctgggtctccg

SEQ ID NO: 295860 - DNA, 75 bp, Homo sapiens
aagcagcgggggggcaggcgatcgaaggcatgtaatgaatttactacacatgtgatgaaccttctccgagaacag

SEQ ID NO: 295861 - DNA, 82 bp, Homo sapiens
agtatgacgccatctgctgccacaccagcaccagcaagcggcattggctgcggtcttgaggaccggcccagctcaggctcct

SEQ ID NO: 295862 - DNA, 75 bp, Homo sapiens
attcctgatgaatcgaaaatgctttgaggaggacttccggatccatggtggtgaagcagtattttccaatttgaa

SEQ ID NO: 295863 - DNA, 100 bp, Homo sapiens
caaaaatgtcagatgatatcaggaaaaggtttgaatttccaaattctcttatccaatcacaggcaaatgttctgaaaaagactctgcatgggaatggcct

SEQ ID NO: 295864 - DNA, 75 bp, Homo sapiens
agcttcatgactacgcggagcgggagagcggccacaccatgcgaggatcagtttgacaacttagaaaaacacaca

SEQ ID NO: 295865 - DNA, 101 bp, Homo sapiens
aaggatcacgaaaacagattggaagctcttcagcaggctcaggatagacgtgcataggaaggagaacgcaggtgcagctgaaaaagccatcagtgtgcact

SEQ ID NO: 295866 - DNA, 101 bp, Homo sapiens
cccaagaagcaggaatgaaagtggcgctttctccgccccaggctcaggccacagggtcaccacatacatcgcccacccatggaggcggccggccaatgccc

SEQ ID NO: 295867 - DNA, 100 bp, Homo sapiens
gcttggtggagcaggagcggctgggcatcctcctgagactccggggtcagacgcccactccaggaaacatgccctgaactgtcacagaatgaaaccagcg

SEQ ID NO: 295868 - DNA, 100 bp, Homo sapiens
ttggaatgacaatgaaccatttcttttccctgatgcagagccatccaaaactctgtttgtcaaaggcctgtctgaggataccactgaagagacattaaag

SEQ ID NO: 295869 - DNA, 100 bp, Homo sapiens
ccgccgcctgtgcgcctctgctgagtcgtgctggagaatctggtaaaagcaccattgtgaagcagatgaggatcctgcatgttaatgggtttaatggaga

SEQ ID NO: 295870 - DNA, 82 bp, Homo sapiens
caagaactggctcaagaaatttgcctcgaaaaccaaccgttggacataccagatggtcgaagagctccacttcctgctcatt

SEQ ID NO: 295871 - DNA, 100 bp, Homo sapiens
cacatttcataaagagttctgattctaagagcaggcattttggagatcaaagatgggtagaaaagatgctgctactataaaacttcctgttgatcagtac

SEQ ID NO: 295872 - DNA, 83 bp, Homo sapiens
gctgcagtgagactctcctcagggtcatgaccttgagccatgtgaatgttggctaccagggtatttagcctagttggcaagcg

SEQ ID NO: 295873 - DNA, 82 bp, Homo sapiens
ctgcttatggcggcgctggagagggggcgctgagctgttgggattggagctggagtgagccttccaggaattttggctgcca

SEQ ID NO: 295874 - DNA, 100 bp, Homo sapiens
tggacctgggagaagtgtctggtgatttggtgctatggagaaatttttggtagaatataagagtgcagtggagaagaaactggcagagtacaaatgtaac

SEQ ID NO: 295875 - DNA, 74 bp, Homo sapiens
cggggaccccggccactggagcaggtcacctgttacaagggtggtgacttcacacgccataatggcactggtgg

SEQ ID NO: 295876 - DNA, 74 bp, Homo sapiens
ctagaaaagctggtgcggaggcttttgaagcaaacagatgagtgtattcgagttcatgcgggagatggcagggg

SEQ ID NO: 295877 - DNA, 100 bp, Homo sapiens
ctgacgaggttctgtgagagcatagtctcaagtcaaagtcgtggccctgtgtgctggttctgggagcagcgttctgcagggtgttgaggctgacctttac

SEQ ID NO: 295878 - DNA, 100 bp, Homo sapiens
gctgctgcggaccccgccgagtcctagcgcctggcctgcgcgccgctgcccgcgccacagaatcttgacaaaacttttggaagtgtcagatgatccccaa

SEQ ID NO: 295879 - DNA, 74 bp, Homo sapiens
caagcacatccttgctaatttcaaaaactaccagccttcctgaacctgcctctctgaggataaagcaattcatt

SEQ ID NO: 295880 - DNA, 100 bp, Homo sapiens
tctgagaattgcggcgagggtcgcctcgagagacggtttctgaggtcctgatccggttccccatgcagaggaacttggtggtgatccccaagtctgtgac

SEQ ID NO: 295881 - DNA, 74 bp, Homo sapiens
gcaccatgagcgacgtggctattgtgaaggagggttggctgcacaaacgaggtggctattatcatggaaaacta

SEQ ID NO: 295882 - DNA, 75 bp, Homo sapiens
acatgcccgctcacctgcgctgtgatgcctgcagagctgtggcttaccaggtgaaaggtgtagcagtcactcggc

SEQ ID NO: 295883 - DNA, 80 bp, Homo sapiens
gtggaaggagtacagggaagtctataagctttgcaacagaattacagagtatgatacaacgactgaaagacctttcattc

SEQ ID NO: 295884 - DNA, 90 bp, Homo sapiens
tgtggttcactgtgcatcgcccactccagaagtagcatggaaatggagggcatcttcaaccacaaagggagggcctgaccataactacac

SEQ ID NO: 295885 - DNA, 100 bp, Homo sapiens
cccaggagagaggactggggtcccaggagtaggaggaggacggagctgaccaccgagagcccactgtgggtcggcgcctggtgggtcggcttcctgggct

SEQ ID NO: 295886 - DNA, 101 bp, Homo sapiens
aattacactgaagaagtagagtatttcaaccataaagacatcttaattgggcacgaaagagctctctatcaatatcagctcacatcattgaaaagataatt

SEQ ID NO: 295887 - DNA, 100 bp, Homo sapiens
ctcattcaaggttacccagttggatctcatagatcagaacatactggagcctgtaacccgtgcacagagggtgtggattacaccaacgcttccaacaatg

SEQ ID NO: 295888 - DNA, 100 bp, Homo sapiens
cagagagggaagagattcagccagcacactcctcgcgagcaaggcattatccaattggtttgctatttgatcttcttgcatcaagttcagctcttccttg

SEQ ID NO: 295889 - DNA, 82 bp, Homo sapiens
agaaatttggagtgtgcgtgcgcgccgagcggaggctactcacagtcgaactacaactccccggggtccggccagaactaca

SEQ ID NO: 295890 - DNA, 50 bp, Homo sapiens
gcgggcccggcggctctcactatccagtccagttacaacacagggatcac

SEQ ID NO: 295891 - DNA, 98 bp, Homo sapiens
ttcagatgttgatcaactaggaaaaatcttggaaaataagcgggttttgaaaacaaaaaaaagaaggagtggaagagggggccaggatccaggcctcc

SEQ ID NO: 295892 - DNA, 100 bp, Homo sapiens
cagaaggaaatacccagactgttactacaacctcgggcgtctgcacttttccagccattaactccaggctctcgagaatttgaagatgttgtaaatattc

SEQ ID NO: 295893 - DNA, 75 bp, Homo sapiens
aagaggttcagctgtcctaatcctcactgccgaaagacagtgggagtagctcaccgttacccaagtatgcttcat

SEQ ID NO: 295894 - DNA, 74 bp, Homo sapiens
gaaattgcgctggaccgtcgccttgctcctcgccgcggcggggactgcaggcctcccagaagttcctgccgaat

SEQ ID NO: 295895 - DNA, 83 bp, Homo sapiens
cggcgagcgcgagcggcgcgagaaaactcactgccacaacgacattgtcaaccttctcctggactgtggggccgacgtgaaca

SEQ ID NO: 295896 - DNA, 75 bp, Homo sapiens
tttggctgctgcaggagccattttagcttataggctttatactgtggtgcctcgcctggtcaagtttgtagatat

SEQ ID NO: 295897 - DNA, 96 bp, Homo sapiens
tgaacattggtctaaagtctttccaaaaggtcaaggttcacaaggaagccgaaaactggaatattaatgctaaacatgggaggccctgaaactctt

SEQ ID NO: 295898 - DNA, 100 bp, Homo sapiens
gtgcatgaagacagcagccacatcattgctttatgtgcgatgtctcatctcctgttctaaaaagaggcagcttctcctcttccagtttgctcatcactta

SEQ ID NO: 295899 - DNA, 50 bp, Homo sapiens
ctgctggctgcccttgtctcctttgagccagcaccgctctttgaccttgc

SEQ ID NO: 295900 - DNA, 83 bp, Homo sapiens
gccacggcgaggggccgggccaggccgggcggagacaatgcagatcttcgtgaagactctgactggtaagaccatcaccctcg

SEQ ID NO: 295901 - DNA, 90 bp, Homo sapiens
ttgcggcttccggcccccgcagcctcagtacctctgctatctcttttgcagaagtccaggccaggtgtggtgtcttacacctgtaatccc

SEQ ID NO: 295902 - DNA, 119 bp, Homo sapiens
tgatagatgaatgtgtggagatggcgactagtggacaacagaacaatattggaatggtggcccagtgtaaggaatcatggtcaggagtcatgaaaaaaatgccaacacactgagatggc

SEQ ID NO: 295903 - DNA, 83 bp, Homo sapiens
tcgaacttttgacacggctttggaaacgacgtcatgtgttaggtgaagtggatcctaaagagaggatagcacgccaacgaaaa

SEQ ID NO: 295904 - DNA, 80 bp, Homo sapiens
cctgcactgaaaggaaatgacggattttcggcttctacgctccggcactctgagttcatcagcaaacgccctggcgtctg

SEQ ID NO: 295905 - DNA, 75 bp, Homo sapiens
caggcacatatatgccaaagtcagtatagagccacgaaccccctgaacaaggagctcgactgggccagcatcaac

SEQ ID NO: 295906 - DNA, 75 bp, Homo sapiens
gttgattgaggacgttcccttcacggagaaagattttgagggatgccaacagacagatcagcgacctcaaattta

SEQ ID NO: 295907 - DNA, 126 bp, Homo sapiens
cgtgccaggcagggccggttcgtgcggaaccgccatggccgagccggcttcggaccccgagacagacaagcacacagaggaccagagtccttcgacacccttgccccagccagctgctgagaagaa

SEQ ID NO: 295908 - DNA, 75 bp, Homo sapiens
ggttgataactgtgccatctgcaggaaccacattatggatctttcaccaatgttgttatgaattattcagagatc

SEQ ID NO: 295909 - DNA, 75 bp, Homo sapiens
gccatgggccgccgccccgcccgttgtctctgctttctatccgtcaagatgataaagtcgtgtgcccgagaacca

SEQ ID NO: 295910 - DNA, 74 bp, Homo sapiens
caatggatgcagtcattccagcaccaacaggatccaattcgaaaagatataatccgcatcctccccagtctaga

SEQ ID NO: 295911 - DNA, 100 bp, Homo sapiens
gcctcccacctgccgctgctgtggcagctgctgcagccactgccaagatcacagctcaggagtaatggagtccaaagagaaacgagcagtaaacagtctc

SEQ ID NO: 295912 - DNA, 100 bp, Homo sapiens
ggcagcttacctctaacctgctgctcattggcatggaagatgagtgccaaaccaaatatggaaatgctaatgcctggagatactgtaccaaagtttttga

SEQ ID NO: 295913 - DNA, 76 bp, Homo sapiens
ctgggatgtgccttagaggattatggattctgaaagtcaagaagacatcatccggaatattgccaggcacctcgcc

SEQ ID NO: 295914 - DNA, 98 bp, Homo sapiens
tctgcgtgagtgtggtctacgagctgtttctcatctttatactcttccagctggctggaggcgtgatcctgggtgtggccctgtggctccgccatgac

SEQ ID NO: 295915 - DNA, 50 bp, Homo sapiens
gaccacttgcggcctgagtatgggatgtttcagcagcccctgagaaggaa

SEQ ID NO: 295916 - DNA, 100 bp, Homo sapiens
gcgggagcttggtggagcaggagcggctgggcatcctcctgagactccggggtcagacgcccactccaggtaggtgagctcgtgaaacaatatgaagagg

SEQ ID NO: 295917 - DNA, 98 bp, Homo sapiens
caagactgtctttgctgagcacatcagtgatgaatgcaagaggcgtttctataagaattgggctgaggagcagacatcattccctgccctggcagtga

SEQ ID NO: 295918 - DNA, 75 bp, Homo sapiens
taggagaatgagtgtaattgttcaggcaccttcaggtgaggaagaggatggagatgaagatgaggaagctgagtc

SEQ ID NO: 295919 - DNA, 90 bp, Homo sapiens
acccggtgctgcggctgttgccatgtccgcaccgggacgatcatcctggggacctggtacatgggagagcccattgctaaaaaggcccgc

SEQ ID NO: 295920 - DNA, 50 bp, Homo sapiens
gctccttctcctggagacgcaactcaagcactccacctcgctgagcatca

SEQ ID NO: 295921 - DNA, 96 bp, Homo sapiens
gacagctgcggttggcgggcaccataggccgaagcacccggaaccacacgatgagccagcacgcacagtgagggatcgctcaacaggacacctctc

SEQ ID NO: 295922 - DNA, 101 bp, Homo sapiens
aggctgaaggccgggccccgcgagtgccatggcggccgccctgggagcgagcggaggagcaggcgccggaggtttctgacgtagaagagcttacccctcca

SEQ ID NO: 295923 - DNA, 50 bp, Homo sapiens
cttaatgcatccaaagccttctggcaaatttgctgacctctctgaggctg

SEQ ID NO: 295924 - DNA, 100 bp, Homo sapiens
gagccgatcctcagcgtcctgatgtggggggtgaaccacacgtacatccagcagtggtcattcgacaacgaaagtcataccgtagaaaagatggcgtgtt

SEQ ID NO: 295925 - DNA, 100 bp, Homo sapiens
catgagcagtcccgacgcagcaaaggcaaacttggaaagagcaagatcggcagccctaaaggactgttgacatttagggatgtggccatagaattctctc

SEQ ID NO: 295926 - DNA, 82 bp, Homo sapiens
cgagctccaacccgcggccccggcgccaagccgccgtcatcttcttcctgtgccaggcaccatgactcctgtgaggatgcag

SEQ ID NO: 295927 - DNA, 98 bp, Homo sapiens
tgagaaacttcggtctcagttggagttattaattagcccaacctgttcttgcaaacaagcagatatttgtgtggcatgttatttgaaagcaattgaga

SEQ ID NO: 295928 - DNA, 82 bp, Homo sapiens
gcgacaagccgctggcagccgcggatctcaccgccgctcagggagtgcgccggtctcggggaaatgcccggttccttcgtgc

SEQ ID NO: 295929 - DNA, 82 bp, Homo sapiens
ctccgtgtctgcagctagtgtgtcaactcagcgtttctcctctcgtccctgaacatccagtcatggataaaaatgagctggt

SEQ ID NO: 295930 - DNA, 98 bp, Homo sapiens
tggactcggcgatggagctgttatttttagatacttttaaacacccgagcgctgagctgttcgggggtcttgtctggattttggttgcctcctccaat

SEQ ID NO: 295931 - DNA, 50 bp, Homo sapiens
ccagctccgaaatcaccaccaagaagatggcagtgaacgtatactcaacg

SEQ ID NO: 295932 - DNA, 74 bp, Homo sapiens
cgagaaccgcagggactggccgagtcctgtgcctcctgattgctgagtgttcacctggaccttctgactacctt

SEQ ID NO: 295933 - DNA, 74 bp, Homo sapiens
tcacctggcggtgcccgaggagtagtcgctggagtccgcgcctccctgggactcaggacacccctgcacggcgg

SEQ ID NO: 295934 - DNA, 83 bp, Homo sapiens
tgtatttagtgtgacgactgttgacctgaaaagagcatgcaagcggcaagatgtcctacagatgaattatctttaaccaattg

SEQ ID NO: 295935 - DNA, 75 bp, Homo sapiens
gaatttccatgtcaacatagtcctgccctggtacctgacagtgtaaagaaggagctcctacaaagaataagaaca

SEQ ID NO: 295936 - DNA, 82 bp, Homo sapiens
cgcgggcgccaatggggagcagaaggactcggacacaggtgtccttaagtttgctcgcttggtcaagtcctacgaagcccag

SEQ ID NO: 295937 - DNA, 100 bp, Homo sapiens
ttaaagacttcaacaaatacgtggcctacatagagtcgcagggagcccaccgggcgggcctggccaagttacagaatgtctgaaggggacagtgtgggag

SEQ ID NO: 295938 - DNA, 100 bp, Homo sapiens
cctctacttagctcagcaattcttacctttcttattgttacaggtatcgctgtgctgctcggagccagaacacacctgatagctctgcttcgaatctggg

SEQ ID NO: 295939 - DNA, 100 bp, Homo sapiens
aaagagtgtcagaaaccctgcaggagatctacagcagcgagtgggacggtcatgaggagctgaaggccatcgtatggtggacgtgatgctgaatccaggc

SEQ ID NO: 295940 - DNA, 83 bp, Homo sapiens
cttgtggagccggagctgggcgcggattcgccgaggcaccgaggcactcagaggaggtagctacagcaagctgggtagcaggc

SEQ ID NO: 295941 - DNA, 90 bp, Homo sapiens
atcaggaatttcatggcaaggctggtggacttgaagctgacagtggatgggctggagaaggaacgtgacttctacttcagcaaacttcgt

SEQ ID NO: 295942 - DNA, 82 bp, Homo sapiens
cctgtggaatatgagtgatgacaaaccctttctatgtactgcgcctggatgtggccaggcagcagtgaggatgccagagttc

SEQ ID NO: 295943 - DNA, 74 bp, Homo sapiens
agtcggggacccaggagtttcctgtgtccagcgctgccggagccgcctgagaaatcctaagtaatgcactgaag

SEQ ID NO: 295944 - DNA, 90 bp, Homo sapiens
gggcggccagtgatgctgtgagtcagagctttcattgttgaggttcctcagtgctgaactaacaagagggtacttccttgaacataatga

SEQ ID NO: 295945 - DNA, 80 bp, Homo sapiens
atttccatgtcaacatagtccagaaaatgggaagcttcccttcatggccatgcttcggaacctgtgcaacctgctgcggg

SEQ ID NO: 295946 - DNA, 100 bp, Homo sapiens
aatgcagaagtaagaggatttatagatcagaatctcagtccaacaaaaggtatttctgggaaaagccagcttctgtttgcactggtcttcacaactcgtt

SEQ ID NO: 295947 - DNA, 88 bp, Homo sapiens
ccgcggaggaaagaatgcaccgtggccctggcccccaacttcactgctaacaacaggccaagaagacgctggagggaggctgttagga

SEQ ID NO: 295948 - DNA, 100 bp, Homo sapiens
gagacagatcaaagcagctcggcgcctgatggacatcttgcgctgccgtggcaagaggggctatgaggccttcctggaagccctggagttctactacccc

SEQ ID NO: 295949 - DNA, 90 bp, Homo sapiens
taggtcccctcacccggctggagggcatcaaggttcacagcatgtccgcctcggcccctgctgcggagggggagggaacccccacccagc

SEQ ID NO: 295950 - DNA, 97 bp, Homo sapiens
gtgcccgtcctctccgacgactcagtgcctatcggcatgctgggaggagactactacagaccccatgcccatggagcctcaaggccaaaagcctctc

SEQ ID NO: 295951 - DNA, 83 bp, Homo sapiens
cagaaagtaaagttccatcctgagaatatttcacaaagaatttccttaagagctggactggaattccagaagattgccatggc

SEQ ID NO: 295952 - DNA, 82 bp, Homo sapiens
tccggccagggccgggagccgggccggcctagccagcaattctgtggtgttcttggtcacacatttatggagtttctgaagg

SEQ ID NO: 295953 - DNA, 96 bp, Homo sapiens
cgtctgcttcgggcctctggaatttagcgctcgcccagctagccgcaggagtggagtcaacatatcaatggagcaagtcacagtcgtcgatgccag

SEQ ID NO: 295954 - DNA, 100 bp, Homo sapiens
gaaggaagatggcggatctggaggagcagttgtctgatgaagagaagacaccttcagcagtaaacaagataaaacaacttcttaaagataagcctgagca

SEQ ID NO: 295955 - DNA, 98 bp, Homo sapiens
ataaaaataccagtagtgtgtgctttaactcaagaagaatcttcagcccagttatcaaatgaagagtggtcctttgctgttgctaccatcacagaaat

SEQ ID NO: 295956 - DNA, 101 bp, Homo sapiens
gaatatagatatggacacaagcctcattttggaatattgcagtctatccagaagttaaaggagagattgctcgtaaagatgaaaagctgctgtcgtttcta

SEQ ID NO: 295957 - DNA, 95 bp, Homo sapiens
gttcgaggtggtgggactcaccgctctggccagggtgcttttggaaaccctcccacatgtcatcagcaggatgggcaagctggagcaggtggacg

SEQ ID NO: 295958 - DNA, 74 bp, Homo sapiens
aggaggcggtgcacagcgccaaggttttccctgatgaatttcacctccagactttgaatccttttcttcgggcc

SEQ ID NO: 295959 - DNA, 97 bp, Homo sapiens
ggagacacagtgtcagaattacaaggtgagatcagccgcccggccaagctatcttctcgctagcagcaggaggagccagaggccagagtcccggccc

SEQ ID NO: 295960 - DNA, 100 bp, Homo sapiens
gcctgggcgcagctctggactctgcgtataacagtccagaaagcagcccaggcctttaactctgggctgctgtgtgtggcatgtggttcataccgacggg

SEQ ID NO: 295961 - DNA, 100 bp, Homo sapiens
ctccctccagaaatagcaaacttcatgcagctggtggaactagatgtgtctcgaaatgatacactctgtgcagttttagagagagacacactcagtattc

SEQ ID NO: 295962 - DNA, 51 bp, Homo sapiens
gcctgtctgtgagcaaacaacccatgacgggaagaaggagaaagggccaac

SEQ ID NO: 295963 - DNA, 75 bp, Homo sapiens
aaagtctcttctgctgggaaatcccagtacagatctgcttgatgaagccaccagtgccctgacagaggaagtgga

SEQ ID NO: 295964 - DNA, 97 bp, Homo sapiens
agatgatcgccgggtgtcgatccttttccctccagtcaggataaaagaatcagagtgtctcaacccttgacaagaggaccaagtgcctttattccag

SEQ ID NO: 295965 - DNA, 50 bp, Homo sapiens
gtgttgctgctgtactccttctccggtcccacccgaaagatgccccccag

SEQ ID NO: 295966 - DNA, 50 bp, Homo sapiens
gcctatcgctaccctccgaagtccggttccagttacagccatcccttgtc

SEQ ID NO: 295967 - DNA, 82 bp, Homo sapiens
cgcaagatggcggacagtgcggaactaaaggcatttggctttatgtcccgagttgccctacaagcagagaagatgaatcatc

SEQ ID NO: 295968 - DNA, 100 bp, Homo sapiens
tttacacccttggagaatgtgggctcatatccttttcagactacattttcctcacaactgttctttccacaaattcaacacccaacagcttccttaatag

SEQ ID NO: 295969 - DNA, 96 bp, Homo sapiens
tgtcaggactaagagaagtcacaaaacagcagatttcccaagagcagcggaaaatgatccagtcacagggcacattcactgaaatccccgccagca

SEQ ID NO: 295970 - DNA, 50 bp, Homo sapiens
tgctgcgtcaaggtggccgtcagatgcctgtgaggagccaccaacatttg

SEQ ID NO: 295971 - DNA, 74 bp, Homo sapiens
ttgcgcgccttgtcactggagtgcaagaagaaattcccacctgtcaaagaggtgtacatgttcctggtgaaatg

SEQ ID NO: 295972 - DNA, 101 bp, Homo sapiens
cgggccagccagagctccccaggggacttctccatctctgtcagtgcttagatgagtacgaagatgatgaagcagggcagaaagagcggaaacgagaagat

SEQ ID NO: 295973 - DNA, 75 bp, Homo sapiens
gccagcgccggcctcctccgtgcggagaagaagctgcggccgcacctggccaagattgactggggcgactttggg

SEQ ID NO: 295974 - DNA, 100 bp, Homo sapiens
gggagacgccaccgaccccaacggcaccagccctttgcacctcgcagctaaaaacggccacatcgacatcatcagttaagtgggcagaccaacatccacc

SEQ ID NO: 295975 - DNA, 97 bp, Homo sapiens
attccaagagattctttgcttaggagagcagcaggtattttggcctctccccagtctgctcctggaaacttggacaatagtaaaagtggagaaatta

SEQ ID NO: 295976 - DNA, 75 bp, Homo sapiens
ccttcgcctttcggaccccaaagggtgtgcggtcagaccccctgcagcagtgggagctggtgcccattgaggtat

SEQ ID NO: 295977 - DNA, 100 bp, Homo sapiens
ttgttactggaacctgccgattgccagtaggaggatttgctgatctcatgggtctctcggctgctgggggcattccacaacccaaaacaggtgaccagag

SEQ ID NO: 295978 - DNA, 74 bp, Homo sapiens
catacataacatgggaattgtgcaccgagatctgaaggagtccttcaataatgttaaacagtggctgcaggaaa

SEQ ID NO: 295979 - DNA, 88 bp, Homo sapiens
cacccggcggccaaaggccagtgactaccaacgtttggaccagaaggtgcaacccagtttatgcctgaccccaagctcatggatcacg

SEQ ID NO: 295980 - DNA, 100 bp, Homo sapiens
agaagataaacgaggggctggaacacctcgccaaagcagagaaatactgtatgttgatgtctcatcttgaggaaccaaaagtaacagaagatgaagaacc

SEQ ID NO: 295981 - DNA, 100 bp, Homo sapiens
ccgacaccgcctgtgtggggcccaccctccgggtcccaagcaagacagaactgcagaagggcaagcactaagtgaagcaagaaagcatttaaaagaagag

SEQ ID NO: 295982 - DNA, 96 bp, Homo sapiens
aaatagtaaaaagacgttgcgagaagttggaagtgtgaaagcattgatggaatgtgctttagaagttaaaaagatacagtctcgctgtgatgccca

SEQ ID NO: 295983 - DNA, 96 bp, Homo sapiens
tcggagtcggagggcttggagttccaggtgttgggggccttggagggaaatgtttcaacgtgcgcaagcgttgcggcggcgggcagaggactacta

SEQ ID NO: 295984 - DNA, 77 bp, Homo sapiens
aaaagattgtaaaggtttgggattcagcattttggattaccaggatgaatttcatcctttcatcgaagcacttctgc

SEQ ID NO: 295985 - DNA, 99 bp, Homo sapiens
gaagagctcatctgaaaacaggaggcaatttcccatacctgtgcagaagtgcagaggtcaatctttatgtacagggatctcaagggcatttccctttgc

SEQ ID NO: 295986 - DNA, 75 bp, Homo sapiens
agtgggatatgtccgcagaaaatgctaggtgcaaagtttgtcgaaagaaagccttccttgaatccagaagctggc

SEQ ID NO: 295987 - DNA, 98 bp, Homo sapiens
agcgcagtacaatgcgggcttgtgtcatgagcatggcagaggcacccccagggacattagcaagctcagatcatcctgcacttgaaaaatgaagtttt

SEQ ID NO: 295988 - DNA, 100 bp, Homo sapiens
ccacaaccagtttataagtgctgttaaatatgtgacatgcgtcgggatgtccaggaaatttttcgcatgaccccccacgagaagcaggtcatgatgttca

SEQ ID NO: 295989 - DNA, 80 bp, Homo sapiens
tggcattgttgggagcgctgttttcgtgatcttcagaccccaggttctttggtgagaagccctaccactgcaactgggac

SEQ ID NO: 295990 - DNA, 101 bp, Homo sapiens
cggagaacagcggtcgcgccggcaagagcagcgggagcggcgcggggaagggggcggtgtccgcagagcaggtcggcagcttcactcccgagggtgccgcg

SEQ ID NO: 295991 - DNA, 75 bp, Homo sapiens
acaagtgtgtgcatctggctgttagaagaattcatgctcatccggtagaacttcatggaggaacacggagtgacc

SEQ ID NO: 295992 - DNA, 75 bp, Homo sapiens
cctcacctggccagcgggacagcaggttcaacttcccaggatctagtttgaagcactaagaagaataagacatca

SEQ ID NO: 295993 - DNA, 100 bp, Homo sapiens
cttgagggggactggcctggcgtgcactccgcacctcggggacattattgcgcgtggaacggctgcttttggaaggggaacgcccttttgcttgtgactg

SEQ ID NO: 295994 - DNA, 83 bp, Homo sapiens
cccgggaggaaggaacgaggcaaggagctaaagcagcgtgcgttcagccctggggtcacccgtgtgaacagaaagtgagaggt

SEQ ID NO: 295995 - DNA, 98 bp, Homo sapiens
aatgaggatgaagattcaccaaataagctatatactttggttacctatgtacctgttaccactttcaaaagggtttggtgcagaaagaaagatccgtc

SEQ ID NO: 295996 - DNA, 98 bp, Homo sapiens
tgcggcctttcggcagccgaacggccgcggcaggtcgtgtacaacgtgggactctgcatttgtctgtttgatatcaccaaactggaggatgcctatgt

SEQ ID NO: 295997 - DNA, 101 bp, Homo sapiens
ggaagaggcgtccttagcagagactgccctaacatctggatcatccccttccgcacccgcctcggactctattggggtgaagatggttttccaggattcaa

SEQ ID NO: 295998 - DNA, 73 bp, Homo sapiens
ggcgctggggacccgcgagcagttggatggcaagcatgtggtgtttggcaaagtgaaagaaggcatgaatatt

SEQ ID NO: 295999 - DNA, 75 bp, Homo sapiens
actacttgaatctgccatgaggttggagaacaaacttacattacttgctttctggaagatgacagcctgtacctg

SEQ ID NO: 296000 - DNA, 102 bp, Homo sapiens
ggatcatgtctgcgagccaggattcccggtactggctgtgatcgaacttctcaaccctcagagacttagatcttccacctcactccctcagccaagcctcca

SEQ ID NO: 296001 - DNA, 75 bp, Homo sapiens
atgataatgagaaaaaatgggaactgatttgtgatcagatgcctggaatgatgtcgtcagtaatgcctggaatga

SEQ ID NO: 296002 - DNA, 75 bp, Homo sapiens
ggtagctcccagcaaagcggcccagcggggaatgtagtttcacaaagcagcttaaccccattgatggtgaacggg

SEQ ID NO: 296003 - DNA, 100 bp, Homo sapiens
agagaagccaagaggaagaaggaggaggaaggtttcccccaagaaagagcagctgagtccttgcatcttgtggcagctggtgtgcccagcactgagtctg

SEQ ID NO: 296004 - DNA, 100 bp, Homo sapiens
cccactcccaccgccagctggaaccctggggactacgacgtccctcaaaccttgcttctaggagataaaaagaggacctgaaaaacgtgttcccacccga

SEQ ID NO: 296005 - DNA, 100 bp, Homo sapiens
agagcacggcaagcgcctggagcggctggccatcgatcccggcagcggctccgctgaagggcccaggcccctcttcgtccccgtcactacctcaccaggc

SEQ ID NO: 296006 - DNA, 100 bp, Homo sapiens
gcgagtggcggagcggcgggacctcggcggactcgccatggaggaggaggactcagtggcctctgaggatgtggctgtgaacttcacacttgaggagtgg

SEQ ID NO: 296007 - DNA, 99 bp, Homo sapiens
aagatctgctgcaaggaactgatagcttatggttctccattgtgatgaaagcacatggtacaggcaatggacctcatcatgaccgttgctgtacttaca

SEQ ID NO: 296008 - DNA, 75 bp, Homo sapiens
gatcatgtctgcgagccaggattcccgcaattctgtggtgttcttggtcacacatttatggagtttctgaagggc

SEQ ID NO: 296009 - DNA, 74 bp, Homo sapiens
agtcttctgaatagcttggagtataggatcccctaacaacagtgagagagcaatgcgagcagttggagaaatgt

SEQ ID NO: 296010 - DNA, 82 bp, Homo sapiens
gcgccgcgcacttcgtcatgttcttcgcgccctgccagtctcagttggagggctgatagtaaaccttattggtatctgtgcc

SEQ ID NO: 296011 - DNA, 99 bp, Homo sapiens
tggacatgttgacattttgaagttacttttgaagcaaaacgtggatgtcgaagcagaggtggttgtgtcaaaccgattggtgacatctccatgctgtat

SEQ ID NO: 296012 - DNA, 100 bp, Homo sapiens
gtgtaattatgcagaagaatggagctggattacacacagcaagttcctgcttctgggacagctctactgacgatggagcagcatattgtatgggacgtat

SEQ ID NO: 296013 - DNA, 100 bp, Homo sapiens
cgactctaaacggactcatgtactttgtcaggtggtttagattagaatccaaacaaggaaaacgaatcaaaaacaggggtgagataaaggtcaatattca

SEQ ID NO: 296014 - DNA, 75 bp, Homo sapiens
atgaagaccacaataaaagagacctctacttagctcagcaattcttaccttctgactggaaataccggcatgcag

SEQ ID NO: 296015 - DNA, 75 bp, Homo sapiens
cgggatctcggtgctgcagacggcgagacctcctgcacaggaggcagtggagaaggtgacacagcacatccacgg

SEQ ID NO: 296016 - DNA, 110 bp, Homo sapiens
tatatgtgttgtgaagttttcttcgaggattttccagttggtggctaaaggagttaagagttctgatgtttctccacctttgggacagcatgaaacaggtggctctccat

SEQ ID NO: 296017 - DNA, 100 bp, Homo sapiens
gctcactgcaacctctacctcccaggtatcacagcctgtacctgaaggtgaaggggaatgtgttcaaaaacaagcggattctcatggaacacatccacaa

SEQ ID NO: 296018 - DNA, 75 bp, Homo sapiens
ggacaagatggtttacatctcgaacggtctctaattaacagaagatggcaaagcccagccacagcagctatgtcc

SEQ ID NO: 296019 - DNA, 99 bp, Homo sapiens
aacactctgttcctggtcgtggtcattgttgcttccttcttcatattgaagaacttcaaccccacagtcctcccacatgtcatcagcaggatgggcaag

SEQ ID NO: 296020 - DNA, 88 bp, Homo sapiens
ctttccaacgctgtaaaaaaggacagaggctgttccctatggcagatggctccctaatgagtagaatgagacctgtgtgccaaccctg

SEQ ID NO: 296021 - DNA, 86 bp, Homo sapiens
gggagctgactcaggagatgactttctcattcagttcctgatctcactggtgcagtcaaaccggatcctgggggtgaagagaaaga

SEQ ID NO: 296022 - DNA, 75 bp, Homo sapiens
ccattccagaaagatggcatcatttttgccctcaaaagaaatggcagccaaaacctattgatgtacaagtcatta

SEQ ID NO: 296023 - DNA, 82 bp, Homo sapiens
gcctcaccgttctgcccccagaactagatccaaggctcgtgacactaaggtattgatagaagacacagatgatgaagctaac

SEQ ID NO: 296024 - DNA, 50 bp, Homo sapiens
ccgcggagcgccagctcaatgaaaaccacaatggacactgccagccatag

SEQ ID NO: 296025 - DNA, 97 bp, Homo sapiens
cttgttctgtatccagagggcattcagactaaaatctacaaccttctcattcagacacacgaagtaaaagattatgagcctccatttggttccaagg

SEQ ID NO: 296026 - DNA, 82 bp, Homo sapiens
gcaggtctctccgcatcaaagtcatctccatgggcaacgccgaagtggggaaagttgggttaacggcatggagaacagtcac

SEQ ID NO: 296027 - DNA, 100 bp, Homo sapiens
cctaaacaagacagtgactccaggatttctgaagactattgtggaagaagcatccattaaggggcataaggaaatggtggcaggcacttcctcctaacaa

SEQ ID NO: 296028 - DNA, 91 bp, Homo sapiens
cggccagaaggagtgcttctaccagcccatgcccctgaaggcctcgctggagatcgagtaccaacttgaagctcaactagagaaaaaggac

SEQ ID NO: 296029 - DNA, 50 bp, Homo sapiens
tgagaaacaggacatacctttcgtagagttgatgaaagaatttcctcctc

SEQ ID NO: 296030 - DNA, 100 bp, Homo sapiens
tgttggcagctataacttacacagcggagtcttgctctgtcgcccaggctggagtgcagtggcgcgaccttggctcactgcaagctccacctcccgtgtt

SEQ ID NO: 296031 - DNA, 74 bp, Homo sapiens
ggaggcctgggactgggacaacgataccaccccgaatgctcactcccactatctctacggacacatgctctccg

SEQ ID NO: 296032 - DNA, 75 bp, Homo sapiens
agcgactccccggctcgaagcctggatgaaatagatctctcggctctgaggagttttccgtctgatgaaggttgg

SEQ ID NO: 296033 - DNA, 122 bp, Homo sapiens
atttggcccctattcctgtaacggtcaagcgagagcctgaagagttggaccagttgtacctggatgacgaggccacaagaggaagctgaatgaagaggacgccgccagcgagtccagcaggg

SEQ ID NO: 296034 - DNA, 74 bp, Homo sapiens
ccgcgacactcactgtacttcattggctaccaaggtacatgtccagggccgccgggtccccttccccattgcca

SEQ ID NO: 296035 - DNA, 75 bp, Homo sapiens
gccgagttctccagcctgctgcgcaggataaaaggcaaactcttcacctggggctgtttgcggggtggggtgggg

SEQ ID NO: 296036 - DNA, 101 bp, Homo sapiens
atgccagtagtgcccgccccacccgcatgctctttgtcactccccggcggcagcacgaaagtaccatgaggcaagtgaggcctatctggttggcctttttg

SEQ ID NO: 296037 - DNA, 100 bp, Homo sapiens
ctcatggatgttcttcttcgagtatttgtagaagggacagccacactcggggctcttacaatcaggggtcataagctgctatgtcacctacctcaccttc

SEQ ID NO: 296038 - DNA, 75 bp, Homo sapiens
agaatcttgtcactttagccactgctactacaggcttctattctgctgcttgaagtcagaactgctgatggagac

SEQ ID NO: 296039 - DNA, 100 bp, Homo sapiens
ggatgacatcgtgaaggttgaagtctgggatgtagtagacaaagctctggcaggctgccctgagcacgctcaaccccaaccccacggacagctgtcccct

SEQ ID NO: 296040 - DNA, 75 bp, Homo sapiens
cagaacgttgcaaactctggaaaaaaacttgggtggaaaacgaagctcattcccaacgtgcaaagccaaggcagc

SEQ ID NO: 296041 - DNA, 90 bp, Homo sapiens
ttcgtctcttacgtctgcggaagtgcagctgcctcagttcttagcgcaggtcattaaatttgacggtggagaggaagtacttatttcagg

SEQ ID NO: 296042 - DNA, 75 bp, Homo sapiens
tgctctctctccagtccttgctgaagagactttccgttacatgaagccataagtgtgatccttggtgacaggtgg

SEQ ID NO: 296043 - DNA, 75 bp, Homo sapiens
ccgagcaaccgccctctcctgcatccaccagcagccaggaatccaagcggagggtgcaggacgtcatcagcccga

SEQ ID NO: 296044 - DNA, 50 bp, Homo sapiens
tatggccaggatgctatagcattgtcagtaaacgctccagaggacaagtg

SEQ ID NO: 296045 - DNA, 96 bp, Homo sapiens
gacctcagatgatgactcaggctgtgctttggaagagtatgcctgggtcccgccgggtctgaagcctgaacagggaagtcttaagagaagccgaca

SEQ ID NO: 296046 - DNA, 75 bp, Homo sapiens
tccgccttaccccagatatgcaaagtaaacagggtgccttgtggaaccgggtggattaacctccatttcagctaa

SEQ ID NO: 296047 - DNA, 74 bp, Homo sapiens
gcagatgaaaaagtgtgacttggcagctgcatggtagcccaagcattagtgttccagagaaccaggcagatgct

SEQ ID NO: 296048 - DNA, 82 bp, Homo sapiens
gtccaaccgagtggtctgccgagaagccagtcacgccgggagctggtacacagcctcaggcagaagctcctcctggggtaga

SEQ ID NO: 296049 - DNA, 88 bp, Homo sapiens
cgtcaaggagctggacctctacctggcctacttcgtgcgtgagcgaggaagctgagctgaacacattacgatggatgatggaaacata

SEQ ID NO: 296050 - DNA, 100 bp, Homo sapiens
taattctaacaggagctggagccctcaacaaagtgatgagctatatttagaagattcagactttttggaaaatcttatgtctactgaaaaaaagactgag

SEQ ID NO: 296051 - DNA, 82 bp, Homo sapiens
ccctacccaagacacccacatggaaacggacctgctcagcagcctaccacctcctccaccctgaagggtgccatccagctgg

SEQ ID NO: 296052 - DNA, 95 bp, Homo sapiens
ccccatggcatgggggcctcagggcagcctgcctggaggtggacgtctgatttatgaagctccccatccacctatctgagtacctgacttctcag

SEQ ID NO: 296053 - DNA, 100 bp, Homo sapiens
atggcggatggccccaggtgtaagcgcagaaagcaggcgaacccgcggcgcaataacgcagcctgagggaactggcatgatagatgaagagttcactgtt

SEQ ID NO: 296054 - DNA, 74 bp, Homo sapiens
cgtctaccggattccgccccgggcctccaaccgcggttacagtgcatcagagacctttgccccagccagcacta

SEQ ID NO: 296055 - DNA, 50 bp, Homo sapiens
tctcagaggatggtcatcactgctcgatatgacatgtctacatttattag

SEQ ID NO: 296056 - DNA, 100 bp, Homo sapiens
acttcgtggcctgcaccatcggaaacccctgaacttccagaacctgccagaacatttggaccagttgctacaggtggacaatgaggaggaggaaagccag

SEQ ID NO: 296057 - DNA, 76 bp, Homo sapiens
aatgcactacaacaggaaaatcatattatagatggagtaaaggaatgtatcctgtcaggtataatgtcagtgaatg

SEQ ID NO: 296058 - DNA, 100 bp, Homo sapiens
tagaaggttctgctcagtaccgggaaaggctagaaatggcagagaattacttccagctctcagtagactggccagaaagtggagacggggtttcactgtg

SEQ ID NO: 296059 - DNA, 82 bp, Homo sapiens
ctctgggagacctgctgcacatcgtcattgacatccctatcaatgtctacaaggtcctcgaggccacacgggttaatcgaag

SEQ ID NO: 296060 - DNA, 98 bp, Homo sapiens
cctcatcgaattcttgaagcagaagtgggcgctccatgaggtgcgagttcttcctgtccacttccaacgaagcggtctataagatctttgatgacagc

SEQ ID NO: 296061 - DNA, 50 bp, Homo sapiens
agtctcatatttctcctctgaaggcccctagcagtcttcttgatgctttg

SEQ ID NO: 296062 - DNA, 99 bp, Homo sapiens
attccaagtaactcttatttggaacaagaccctgcagatggagaagatcaaggctcgtttgaaggctgagtttgaggcacttgagtcagaggaaaggca

SEQ ID NO: 296063 - DNA, 100 bp, Homo sapiens
gtcctatatctcaaaccacttctcagacaagttccatcccacctttgagtcagatgaggtttatataactttccaagacaaggaagttgtgcaaagcctc

SEQ ID NO: 296064 - DNA, 75 bp, Homo sapiens
aaggttattagacttcatcggcggaagcaggacaacatatcaggaatctttgtctgaagtggaagaaaaatacaa

SEQ ID NO: 296065 - DNA, 119 bp, Homo sapiens
cgcgatgtggagcgcttctttaagggctacgggaagatcctggaggtggatctgaagaacggggcgtctctggccgagcctctttttgtggaaaacgacagcagcagcagtggcctgga

SEQ ID NO: 296066 - DNA, 100 bp, Homo sapiens
ccctcggccccctgagtgagtccggtctcccggcgaaagtgagcgaggtttgcccggagcgcgcacgagagccttgaaaccagcgaaacaataatcaaag

SEQ ID NO: 296067 - DNA, 82 bp, Homo sapiens
gggcgctccggtggcggcggaggcaagccgattttttcagttgatattcaccctgacgggaccaagttcgcaactggaggac

SEQ ID NO: 296068 - DNA, 100 bp, Homo sapiens
ggggcggacgcgcgcagcccgcccgcccggcgaccagcaagttcctacaacagcagccagtacccctgatgccgttgacaagtatctcgagacacctggg

SEQ ID NO: 296069 - DNA, 122 bp, Homo sapiens
gcaatgcatcatgctatttcatacctaatgagggagttccaggagattcaaccaggaacttaattcagtgcacaaatgagatgaatgtgaacatcccacagttggcagacagtttatttgaa

SEQ ID NO: 296070 - DNA, 90 bp, Homo sapiens
taggaacatggcggatcggctcacgcagcttcaggacgctgtgaattcggtgaccaaccgcggggaggctcacctcgagctgaacgcctt

SEQ ID NO: 296071 - DNA, 75 bp, Homo sapiens
agagttcaagagaccattgaccaggttggaatggtctgtagcatctctgtctgttggagaaggcacaggtgtcag

SEQ ID NO: 296072 - DNA, 75 bp, Homo sapiens
agcaaaaccaacgcctggctcggagcagcagcctctgagagccagtcttggtgctctgtgttcacctggttcatc

SEQ ID NO: 296073 - DNA, 50 bp, Homo sapiens
ccaacccccaaattggctgggacagggtaagacgtgaccttttgaggtga

SEQ ID NO: 296074 - DNA, 80 bp, Homo sapiens
atacagcaaaagagtctacatagaaatctccgagaagcaagggataatgctgtggctgaaaaggaacgagcagtgatggc

SEQ ID NO: 296075 - DNA, 75 bp, Homo sapiens
gagagggcagtggaactccttaggaaatgtctggaggagttaatcccgtcatgtattgacccggaaacatcatct

SEQ ID NO: 296076 - DNA, 75 bp, Homo sapiens
caacgccaggcgccgctcctttacaggttcggctttccagtttggcagcagcactacaaatttcaacttcacaaa

SEQ ID NO: 296077 - DNA, 100 bp, Homo sapiens
tcactgagaccgtctacgcaggcctctttctgcgttatgacaacctcaaccacagtggagatttgcctgagaatacagatcaacccacagaacaaagcgg

SEQ ID NO: 296078 - DNA, 75 bp, Homo sapiens
gccgcccgccccccaccgccgccccctccggcgtgttcatgcccccgggtaccatggggcgcaagttggacccta

SEQ ID NO: 296079 - DNA, 82 bp, Homo sapiens
tgacaagagcttccgcggtgtcattctgacctcgtagtttatgccaacgtgacttcattcatacagatgaaccaaggatcgg

SEQ ID NO: 296080 - DNA, 100 bp, Homo sapiens
tacctgtggactcagcagcagcaactgtgggactttttgactacaattctcaacaacagaacactctggacctggaggaaactggcgaggctgtccaggg

SEQ ID NO: 296081 - DNA, 85 bp, Homo sapiens
gatagaccaagggctgatcacgcggcaccacctcaagaagcgggcccattttgcagactttgatcacagtgaaacgttccatggg

SEQ ID NO: 296082 - DNA, 75 bp, Homo sapiens
ctgctgtggaggctgaggaggcggcggcggagatctgggcggcttcaatgatccatcctaaagaggtgccccctg

SEQ ID NO: 296083 - DNA, 76 bp, Homo sapiens
acaagagcaccatactttgaggatggccctgctgtggcaccagtgaccaacgggaacacaacggtgccacccctga

SEQ ID NO: 296084 - DNA, 98 bp, Homo sapiens
tctgaactaggatgtcccgacatgaagctggtgtccgaatgatctacccagcatgctttgttctagtccctcagtcagacattcctactcctagccct

SEQ ID NO: 296085 - DNA, 95 bp, Homo sapiens
gacatcgacgccgcctggcaggccctgcgcaccagtcactctctgaaagagaacaaagtaattttctgaagggaagctgcagaatatggaaaaca

SEQ ID NO: 296086 - DNA, 100 bp, Homo sapiens
ggaaaggccaagacaaaggcggtttcccgctcgcagagagccggcttgcagacggggaagcggagccaacatgccagtggcccggagctgggtttgtcgc

SEQ ID NO: 296087 - DNA, 75 bp, Homo sapiens
gagatcggcggagaccctcgaagtgcgcaaacttgacactcaccctgaccggcacgcgtttcccattggtgacat

SEQ ID NO: 296088 - DNA, 90 bp, Homo sapiens
gacaaagagttcagcatcacagagttctccgagggagcgaagcagagctggaagtcgagtgtgctactcaactcaggagatttggagaca

SEQ ID NO: 296089 - DNA, 98 bp, Homo sapiens
ttaacacctgtgattgaagaattgacgaatgcaggctttctacagacagctttcagtgccaatggaaaagatatcattgtcgactttccccagcagtc

SEQ ID NO: 296090 - DNA, 75 bp, Homo sapiens
gattcagcgcatcggcagcggcacctacggcgacgtctacaagtacgaggatgtcgtccaggaaagattgtgcag

SEQ ID NO: 296091 - DNA, 99 bp, Homo sapiens
gcatgttggatcggatccttctggagtccgtgtgccagcaacagagctgggtccgggtgtacggcctgatcttttggccagaaggagattaaaaagatg

SEQ ID NO: 296092 - DNA, 101 bp, Homo sapiens
agcaaatctacttttgggttacaaaaatccagaccagccatgctgtgacctacaagcaaactaaatagccaacatttctgaacccctaagtctcctgtgcc

SEQ ID NO: 296093 - DNA, 82 bp, Homo sapiens
agcagatccatctgccaaagcagtgcttactgtagacccaaatgatttgtacattgtagaacccctcaagttttctccagaa

SEQ ID NO: 296094 - DNA, 100 bp, Homo sapiens
aaatgcaagtccaagaggaggaggaggcggaggtccaagcggaaaggtgccagtcacgaattgcccgaacattacctgctgatcagaagccagaatgtcg

SEQ ID NO: 296095 - DNA, 75 bp, Homo sapiens
ataattcccaggacagtcagtctggtactaacaatgcagatatgtgtcacaaagatgtctacacggaactgccag

SEQ ID NO: 296096 - DNA, 99 bp, Homo sapiens
ctgcgcggcgcctgacagaagagaggcctgcgagcactccggcgaggccaaggccttccaggactatgcagcggaggaggagaaagagatggacctccc

SEQ ID NO: 296097 - DNA, 100 bp, Homo sapiens
gtccgagccagccgctgttttgccggaggagcccctcaggccgtacaccagaggatcgcttcctggcagaatttgggagctgtttattgcagcactgttg

SEQ ID NO: 296098 - DNA, 50 bp, Homo sapiens
gagcgcctcagtcttccacccaattctcacaccattttgctggtacagcc

SEQ ID NO: 296099 - DNA, 88 bp, Homo sapiens
gcaggacctgcagcatcccagagctggtgctcaagaccgaatcggctgggcttttggcctaggattagaaaggctagccatgatcctc

SEQ ID NO: 296100 - DNA, 73 bp, Homo sapiens
ccgaagcccaaaaagctgaaggtggaggcgccgcaagcgctgaggtactccaaagattcaggtttactcacgt

SEQ ID NO: 296101 - DNA, 100 bp, Homo sapiens
ccagtgtatacaactttgaagggggacagtcattttgtttactcattcagccctgttgcaggtcccaataaactcttcataaggttgacagaagcaccct

SEQ ID NO: 296102 - DNA, 75 bp, Homo sapiens
atgtccagaaatctgcctctggttctcggtgctcttctgatgccaatatgcttggagagatgatgtttggctcag

SEQ ID NO: 296103 - DNA, 100 bp, Homo sapiens
cgtggcccagcagcagcaggaggagctcaaggggatgcagctgctgcgggaggatactgctattgttcatccagttcccattcgtatgactccaagcaaa

SEQ ID NO: 296104 - DNA, 75 bp, Homo sapiens
agggaaatggcgaaggagctttctgaaatcatgcatgagcaggctattgagggcacctacattgacaagaaatgc

SEQ ID NO: 296105 - DNA, 75 bp, Homo sapiens
ggaccgtggagaaggaggagaggcatggcggccttgaccagccagtgcgtacacagactttactaaaagagtaca

SEQ ID NO: 296106 - DNA, 50 bp, Homo sapiens
ctggccgccaaggagggcaagatcgaggtcaaaatgcagatcttcgtgaa

SEQ ID NO: 296107 - DNA, 100 bp, Homo sapiens
ccaccttttgtcaattccagaatacaaagaagcggggagaggtggtgagagatgacccctgttgaggatttcattggtgtctgccacaggccgccatggc

SEQ ID NO: 296108 - DNA, 101 bp, Homo sapiens
ctcagtgcttccagcagttcccagaaggactcttctatgaggtggctgaatccacagaggagcctgctggttctaatcggggacagtatcctgaggattcc

SEQ ID NO: 296109 - DNA, 90 bp, Homo sapiens
cgtgtacgagcgcaccagcgaccacaagatcgtcttctttaaagaaggcagggagtgtgtgaactgtggggcaacctcgaccccactgtg

SEQ ID NO: 296110 - DNA, 90 bp, Homo sapiens
gggcttcaacatggccaaggtgctggcgtccctcagtgatgttgcacctgtaaccatctttttatgggtggagcagagagtcaatccctg

SEQ ID NO: 296111 - DNA, 50 bp, Homo sapiens
aaatgaagccctatgcagtcatggccaaactgttttcagatagtagttca

SEQ ID NO: 296112 - DNA, 75 bp, Homo sapiens
aaagttctgccgggaagcaagaggcaaagagaatcggttgggccgcatcatcgagtgcacacactgtggctgtcg

SEQ ID NO: 296113 - DNA, 75 bp, Homo sapiens
tgggaaaccacgcaggcaaacgagaattaaatgccgagaaggccagtacgggcaagaatatcacggcatgggcat

SEQ ID NO: 296114 - DNA, 100 bp, Homo sapiens
cggctgcgggaaatcgggctgaagcgactgagtccgcgatggagcctgacatttaccccggtaactgctgggcatttaaaggctcccaggggtacctggt

SEQ ID NO: 296115 - DNA, 100 bp, Homo sapiens
actacatttggaagcagcacaaccagtgcaccttcatttggtacaaccagtggcgggctctttggtctcggtccagctcgacttccagctcaggctccag

SEQ ID NO: 296116 - DNA, 50 bp, Homo sapiens
gggggtgatgcccacccgggcgagaaagggagtgcatccgccccaaccct

SEQ ID NO: 296117 - DNA, 82 bp, Homo sapiens
ctcggctgcgggaaatcgggctgaagcgactgagtccgcgatggaggttcctgcacttggccatcatccatgaagaaaaggc

SEQ ID NO: 296118 - DNA, 100 bp, Homo sapiens
gtcgggcctgcccggcatgcagatcatggaagggaagtggttgctgtgtatgttactggtgcttggaactgctattgttgaggctcatgatggacatgat

SEQ ID NO: 296119 - DNA, 75 bp, Homo sapiens
gttaacgctggaatatgtaaaggaaagaaccggaggctgaagcaggccaaagaagaagctcaggctgaaattgaa

SEQ ID NO: 296120 - DNA, 82 bp, Homo sapiens
ggagtatctggcctccatcttcggcaccgagaaagacaagcgccatgtcagaaccggctggggatgtccgtcagaacccatg

SEQ ID NO: 296121 - DNA, 123 bp, Homo sapiens
ggaaagtggatcccacctacggtctggagagcagctgcattgcaggcacagggcccgatgagccagagaagcttgacgaagttatacggaagcgtctcctcattgatggagatggtgctggag

SEQ ID NO: 296122 - DNA, 74 bp, Homo sapiens
tcttcgtgcttccatgactaacttggtcaagctgcaagctttcttcctggtggcagatgacatcatggattcat

SEQ ID NO: 296123 - DNA, 75 bp, Homo sapiens
ggatattcagttgcacatccccacatcaatgcactgccaatggtttctagaccaactggggagattcccgttaaa

SEQ ID NO: 296124 - DNA, 75 bp, Homo sapiens
aaagcctcctacaagagtcctaccaaaacaaaccagtccagctacgggggcccagccagccagcagctgagtggg

SEQ ID NO: 296125 - DNA, 73 bp, Homo sapiens
aaaattgaaaaaatggttgacctcacccagggagatgacagtctgtctgcagtcacctttgactctgatgtgg

SEQ ID NO: 296126 - DNA, 75 bp, Homo sapiens
ggccgtgaagaccttcaatagcgagttatccaagcattaggtgaacatcttaaattaagacaacaagttattgcc

SEQ ID NO: 296127 - DNA, 95 bp, Homo sapiens
acatgtacacctcatccctgtacgggtgcctggcctcgcttctgtcccaagcaaaatatgctgtgaattccatcaagaagaaagtcaacgacaag

SEQ ID NO: 296128 - DNA, 101 bp, Homo sapiens
cagcaggacgctgcgcacaacatgggcaaccacctgccgctcctgcctgtgcaatcgtgtacctgatgagaggaggtactccctgcccttaaagagcatct

SEQ ID NO: 296129 - DNA, 97 bp, Homo sapiens
gtcaactcaaatgcaagtccaagaggaggaggaggcggaggtccaagcggaaaggtgaccctggcagcaaccccaacaaacgccagaggcagccccc

SEQ ID NO: 296130 - DNA, 50 bp, Homo sapiens
gctcccagctgcccacctcatagcctgaactctttgcttccggaatccgg

SEQ ID NO: 296131 - DNA, 100 bp, Homo sapiens
ggtcagtgtggcaaccagatcggtgccaagcagtctcctgggttaggcaggcctatctggctccagattgccgagtctgcttacagattcactctgggct

SEQ ID NO: 296132 - DNA, 75 bp, Homo sapiens
tctggaacattgcgatttggaattgatgccatctgcagttttgtgatctgcaatgattcttcccttcgaggtcag

SEQ ID NO: 296133 - DNA, 74 bp, Homo sapiens
tcgcctccaggccaagagggatccttcacccgtgtctggagctggtggtggctctgagtcatcttgtggttcag

SEQ ID NO: 296134 - DNA, 80 bp, Homo sapiens
ctggccgatgccacggagcaagtgggccaggccctggccaacgtcaacattgggagcctcatctgcaatgtaggggccgg

SEQ ID NO: 296135 - DNA, 90 bp, Homo sapiens
atcacaatcccattattcagagcgcgtatggagtggaaacgcttgtagggcttcaccagtgcagaatacagaaactgcagccatgaccac

SEQ ID NO: 296136 - DNA, 98 bp, Homo sapiens
gcgcagcaaggctgacgtggagcggtacatcgcctcggtgcagggctccaccccgtcgcctcgacagggatcgcttacacctgagacgaactacagaa

SEQ ID NO: 296137 - DNA, 101 bp, Homo sapiens
tggttcataagggcaaacccaggcgaaatcattactataaggattcctccttggtcacttttcagcagcagcctgctcttcttttgcaatctcttcaggat

SEQ ID NO: 296138 - DNA, 85 bp, Homo sapiens
aagtgtgactttacagggacactgattgttgtgcctgacgtctccaagcttagcacaccagaatctttagaacacgatgttcttg

SEQ ID NO: 296139 - DNA, 95 bp, Homo sapiens
ccctgaggctgcaccaagtggcgaaggagccggctccaaggcctccggtgtggctgtctctgatggtgtcatcaaggtgttcaacgacatgaagg

SEQ ID NO: 296140 - DNA, 82 bp, Homo sapiens
ctgactacctgctgtacaccctcaacaaacaccagcgctttggacctcctgccccccgaggtctgcagtctcctgaacccag

SEQ ID NO: 296141 - DNA, 91 bp, Homo sapiens
ggccggggcgctcacggccacggcgctggtcaccggggtctgcctgggtgctggagaatctggtaaaagcaccattgtgaagcagatgagg

SEQ ID NO: 296142 - DNA, 83 bp, Homo sapiens
gttattaaccagccatattacaactatgagggctagtgccacgaggtttacttgactgttgtgtgaaaagctgataagaaaac

SEQ ID NO: 296143 - DNA, 85 bp, Homo sapiens
agctgaatgcaacaaacattgaggcccagagacggaaagtacaaagactagtaaaatacatccttgcccttaaggagctaagtac

SEQ ID NO: 296144 - DNA, 122 bp, Homo sapiens
gtgccctgtactctgaggagcggaactacagccagatgcggatccgggccaagcagtgggccgaggacggggaggtttactgcatcgacgcgcggttctacgggaacgtcagccggttcatc

SEQ ID NO: 296145 - DNA, 101 bp, Homo sapiens
caactagactctgaaatgaattagatggagatttaaaatagggcaatttagtgggaagagatacttaatttgaagtgtttcctgaggttataggcgggtgt

SEQ ID NO: 296146 - DNA, 100 bp, Homo sapiens
cacacagatgaagaaggttatgttaacagtatttaaacacaatcatggtgcctaccagttcttcagagaagcgttgcagctggagtgcagtggcgcgatc

SEQ ID NO: 296147 - DNA, 100 bp, Homo sapiens
gatgaactgataaaacccaccagtctagaaaattccttgacatactccaagaataaggtaggataacataaaggtggtaactctagaaaacttaacgtgg

SEQ ID NO: 296148 - DNA, 100 bp, Homo sapiens
acattgggggcctgtggaaattttcaatcttgtagaaaatttcagctgtagcccttggactagaagctgaaataacagaagctgtgtacgatgcattagg

SEQ ID NO: 296149 - DNA, 50 bp, Homo sapiens
gaaaatcttcgaagacttttcatgagaaagatcagtctaaagaaaaggag

SEQ ID NO: 296150 - DNA, 83 bp, Homo sapiens
gggcagtgctcccggaacacaagctgtgaaacactaggagaatgcagttgaaactaattttgtggatagagaaactgttggaa

SEQ ID NO: 296151 - DNA, 83 bp, Homo sapiens
gcttggtttcgggatctcggtgctgcagacggcgagacctcctgcacagcgctgcgtcgtgctgcggtttctgaagtttcctc

SEQ ID NO: 296152 - DNA, 75 bp, Homo sapiens
gacctagttaaactagtatcagattatagaaggttgatgttgatgaatcaacacttagtccagaagagcaaaaag

SEQ ID NO: 296153 - DNA, 101 bp, Homo sapiens
ggctggaggacagagaagccttttccgttgccggtgccggcctagcgtcctggaattacttcaatcaatgatgcagccaacacgaacggttgtcatgtgta

SEQ ID NO: 296154 - DNA, 112 bp, Homo sapiens
gtccaggctgaccacgagcttttcctccaggcctttgagagttatgatgtgattgctcaagcccaatctgggactgggaaaacggccacatttgccatatcgattctgcagc

SEQ ID NO: 296155 - DNA, 108 bp, Homo sapiens
cagaccctggagcctcagttggaagcagccgatccagcctgcggagcctgtggggcagagccagccccagtgcctgctgagccgtttgacaacactacctacaagaac

SEQ ID NO: 296156 - DNA, 75 bp, Homo sapiens
gaatccccaggcccttgttggggcacaaggtggcaggaagcagtcaattatagatttcttcaaaccagcttcaaa

SEQ ID NO: 296157 - DNA, 100 bp, Homo sapiens
cgggcactgttgctgctgcgggagagctctcgatgttctgaagtatgaggaagttgacatggattcattagccaaggctgttccagagcccttgaagaag

SEQ ID NO: 296158 - DNA, 100 bp, Homo sapiens
aattttgagagagttttgggaaagcaagatgacgattactttgccaccctgagggaactggaagctacccttcggacgcagagcctttctctggcagtga

SEQ ID NO: 296159 - DNA, 75 bp, Homo sapiens
cattgtgggcctcatcatcttcctcctgtgcaccctcttcatcagaattggctgtgaaaggactgaggcagccat

SEQ ID NO: 296160 - DNA, 98 bp, Homo sapiens
aaacaaagcatctgataaagccactatcatggcctttgatgccctggtgaccttctgtgaagaactggggttgtttgatgtgtgcacagtgtcacgaa

SEQ ID NO: 296161 - DNA, 90 bp, Homo sapiens
aagaagcaccgcacgtggttcttctcggcctcctccgaggaggagcgcaaggcgcgcctcaagttccccatcgactacccatactctcca

SEQ ID NO: 296162 - DNA, 97 bp, Homo sapiens
tcccaccgcacgttcagaagtcggagtaccaggtggatgcccagccccttcgtccctgtgagctgcagagggaaacggcctttctgaagcaagcaga

SEQ ID NO: 296163 - DNA, 82 bp, Homo sapiens
ctccctgtgccttgcttggagctgacgccgacgggtatgccaccatatacaccatgttcccagtgttctccttagtgctgga

SEQ ID NO: 296164 - DNA, 90 bp, Homo sapiens
cacttagaaccgcagcagggacgtcggtttgctatcgggactcggcgaggacgatcttggcatatacagaagggctgcatggaaaatggc

SEQ ID NO: 296165 - DNA, 100 bp, Homo sapiens
gtgcgcccagcgtcccagggcccaggccgagcaggtgtcccgttcccaaagaatttcatgtctgtggcaaaaactatactcaaacgcctctttagggttt

SEQ ID NO: 296166 - DNA, 99 bp, Homo sapiens
gcagcaccctccaatggcatcaccatgtacggggccacgcagtcacagagtgacatggcactgacaagaaaagtctccattgctcgggggagaaacaaa

SEQ ID NO: 296167 - DNA, 99 bp, Homo sapiens
aaaccttgttctataatactttgtgctgggcaagagggatctaagcttcataaacaagcagatatgcaagaagagaaaaaccgaatcgaaagagtcctt

SEQ ID NO: 296168 - DNA, 98 bp, Homo sapiens
agactttctggagagcatccgcaaacattcagacaaaattggagagactgccatgaagcaagtcaatgtgacggtggactacattagaccagccagcc

SEQ ID NO: 296169 - DNA, 82 bp, Homo sapiens
ggacctcagttccaagctgacctcagcaacctgcacttgaaccggcactgtgagaagatactatactggcaattgctggaga

SEQ ID NO: 296170 - DNA, 100 bp, Homo sapiens
cccagccctgcctctccctgggctctgattagagatggacaaccgaattgttatgtactaaagaataaagatttagaacaagcttttaaaggagttattt

SEQ ID NO: 296171 - DNA, 51 bp, Homo sapiens
ctggatcacggatgtaggaagtgacagggtctcactttgttgcccaggctg

SEQ ID NO: 296172 - DNA, 103 bp, Homo sapiens
ggggcagagcgctcctgtggggatgaaggccgagggcttcgtggatgccctgcaccgggtccggcagccagagactgctgctactttgaaacgtacgatagag

SEQ ID NO: 296173 - DNA, 75 bp, Homo sapiens
tcataaagggatagcagcccctcatgcagggtgttggagagcacaatggctgaacaagtccttcctcaggctttg

SEQ ID NO: 296174 - DNA, 96 bp, Homo sapiens
actggggacagaaagtttccttctaccagctgagtggaaaacaggatgcagactcatctgagcgtatcattgctcccatgcgctggggcttggtcc

SEQ ID NO: 296175 - DNA, 100 bp, Homo sapiens
agaacaaggcgattaggaaacatgaagcagtccggatgccgcccgcatccgagtcaagcgctaccgccagagcatgaacaacttccagggcctccggagc

SEQ ID NO: 296176 - DNA, 100 bp, Homo sapiens
agtcagtggatatccaaccctgaagatatttagagatggtgaagaagcaggtgcttatgatggacctaggactgctggccctggccaacgtcaacattgg

SEQ ID NO: 296177 - DNA, 93 bp, Homo sapiens
gccaccctgcccccaagaaggaagtcatcatgggccggcctggaacagcagcgtccgtctccaagagagtatgaagagagtgcgtctgtaggg

SEQ ID NO: 296178 - DNA, 51 bp, Homo sapiens
agaaagagaggaagctcaagcggcaggtgactcgaaaagccctgtttcctg

SEQ ID NO: 296179 - DNA, 100 bp, Homo sapiens
gaataatagggacctgtctgaatgtagtttggccttggtattaccaacctacagtttttactatataaaagccaaactagaagagacaataactcaggcc

SEQ ID NO: 296180 - DNA, 97 bp, Homo sapiens
tacccgtgacctggggatcgctacggaccttaaaatacccgcaacagccccttcgtcccaaagtgtgaacatggctacgcctcttcattcccgtcca

SEQ ID NO: 296181 - DNA, 82 bp, Homo sapiens
agaaggattagtagctaatgtgattacagcaggagattatgaccttaacatcagtggggtaccaaagtctgatctcttgcac

SEQ ID NO: 296182 - DNA, 101 bp, Homo sapiens
acccctcacctcgatgcagccagtagcttggatccttgtgggcatgatccataatcggtttcaagatttctggcatcagaaaaacaccgactacaacaaca

SEQ ID NO: 296183 - DNA, 82 bp, Homo sapiens
ggtcgttgtggtgcgctgtcttcccgcttgcgtcagggacctgcccgactcagtggtgaaggaatacgactccatctcccgg

SEQ ID NO: 296184 - DNA, 90 bp, Homo sapiens
gggacatgcaggacttgtatatgagtatacattgcttacagggatcttcagaccagggaagacatacggaatgcagcatggcacaaacat

SEQ ID NO: 296185 - DNA, 82 bp, Homo sapiens
gtatggtcaacattgatggaaaacaaatcaaactgcaaatctgggatacggtagatcgacacttgagaaagctggatcagga

SEQ ID NO: 296186 - DNA, 97 bp, Homo sapiens
gaattcagaaggagctagctgaaataacccttgatcctcctcctaattgcagctgcaaatcagaaggagcccatgaatcttaattttaaagtgaaag

SEQ ID NO: 296187 - DNA, 105 bp, Homo sapiens
ctgacgtgtttggagggaaatgggaatgtacacgataattaaagagtaaagttgtgctcaacgctaatggcagcattagccgctgttgggcctcctaatcctcgg

SEQ ID NO: 296188 - DNA, 82 bp, Homo sapiens
gcaaacaaattattgacggtcaaggtatttcatgccgaggacagagcgggatgccaccagcttgtccaaagggaagttccag

SEQ ID NO: 296189 - DNA, 97 bp, Homo sapiens
gaaggaacgaggcaaggagctaaagcagcgtgcgttcagccctgggcacttgcacctcctgcgccgccgccccccatccaaggatatgccttcaagc

SEQ ID NO: 296190 - DNA, 82 bp, Homo sapiens
ctccatcacccaccaacaacaccacaataatccacagccaaggaactgtggctgcaccatctgtcttcatcttcccgccatc

SEQ ID NO: 296191 - DNA, 100 bp, Homo sapiens
gcggatccaaagacccaggaatgacagatgccatggacaatattaccaggcagaaccaattctacgatacccaagtcatcaaacaagaaaacgagtcagg

SEQ ID NO: 296192 - DNA, 78 bp, Homo sapiens
agggccttactccttcacagatcggttctaagctggtctatgtccatcaccttcttggagaaggagcctttgcccagg

SEQ ID NO: 296193 - DNA, 83 bp, Homo sapiens
cagacgcggtggagccgccggagtctgagaaggtcaaaatgcagatcttcgtgaaaacccttaccggcaagaccatcaccctt

SEQ ID NO: 296194 - DNA, 101 bp, Homo sapiens
ttaggagaaaacttggatccactggccagtgattcacgaaaacgcaaattgccatgtgatactccaggacaaggtcaccattactttaagtactgcaaaat

SEQ ID NO: 296195 - DNA, 75 bp, Homo sapiens
gacagcccatcgtgtgaactatagagtttgtggacagatttatattgcattactctactgactggcagagacagg

SEQ ID NO: 296196 - DNA, 100 bp, Homo sapiens
tccattgataataaagcactgtatgatacattttctgcttttggtaacatcctttcatgtaaggaaatagttgacaaacagggacataccaaagtattga

SEQ ID NO: 296197 - DNA, 100 bp, Homo sapiens
aggctgatggagagctgaacattactcttccagaagaggcccctagcagtcttcttgatgctttggaacaacatttagcttccttggaaggaaagaaaat

SEQ ID NO: 296198 - DNA, 111 bp, Homo sapiens
tgggttaccgctgctgcccctgctgtcgctcctggtcggcgcgtggctcaagctaggttggatggcaagcatgtggtgtttggcaaagtgaaagaaggcatgaatattgtg

SEQ ID NO: 296199 - DNA, 82 bp, Homo sapiens
aaccaggcgggtaaacatggtggacagaaagtcagcctcttgtggtgacttaagagattaaaattaatttggttgctgttgg

SEQ ID NO: 296200 - DNA, 75 bp, Homo sapiens
gctcttcctcaatgcttgtgtggaaaacaagcatcgttgtgggtccaaggagacattttccgatccaaactgaaa

SEQ ID NO: 296201 - DNA, 100 bp, Homo sapiens
gttcgcatcattcggcctatgtagccctgaaatatgggagttacttctgaagtcagtccatctttataacccaaagaggttgccctcaaattggctgtag

SEQ ID NO: 296202 - DNA, 100 bp, Homo sapiens
agactctataagaacatgtttttctaagccctttttgtgccaggtgtcccgttaacgtctctgttagttcagagattctctcgggcctagccgtccttgg

SEQ ID NO: 296203 - DNA, 82 bp, Homo sapiens
aataaccaggtgcttggcaaaatcgagcgggccattggagctgacatggacccaaatcctcgggccgccctggagcgccagc

SEQ ID NO: 296204 - DNA, 100 bp, Homo sapiens
cctgaagaagcggctcaacgggaaccggaactacagagaggtgatgctggcattaacacttcctgaagccacctctcaaaccagccacctgcgtgcaagt

SEQ ID NO: 296205 - DNA, 100 bp, Homo sapiens
tgcaaccttgggcgctgccaaccgtgggcgagctctgggtgtgcgggcggcctggcgcggcgctccgacaatgcagatcttcgtgaagactctgactggt

SEQ ID NO: 296206 - DNA, 83 bp, Homo sapiens
ggtgaaatggagaggctggtcgcccaagccctgggctgcatcttgtacctgctgtgcttccggcagcacccttttgaggatgg

SEQ ID NO: 296207 - DNA, 51 bp, Homo sapiens
tgggaagccagtgaggtagtcagggctcagaaacacttatgggattttcta

SEQ ID NO: 296208 - DNA, 100 bp, Homo sapiens
aggaggttcaggctacggtgagccgaagccccacagtgaacactactctgagaaacctgggagctctgtataggcgccagggaaagctggaggctgctga

SEQ ID NO: 296209 - DNA, 100 bp, Homo sapiens
gaaagttgagtctctcctgcgccgagccttcggggcgatgtgtagtgccttccatagggctgagtctgggaccgaggaactggcccaaataaggaaggag

SEQ ID NO: 296210 - DNA, 51 bp, Homo sapiens
cagatgtgtttcccaggcttttcaaggtgtttgtggcttgatcgtccccca

SEQ ID NO: 296211 - DNA, 90 bp, Homo sapiens
ccgcggcctggggcaggaatgcgtcctgagcagcagccccgcggtgctggaggtaaataccggattgtatacgtaactccagaatactgt

SEQ ID NO: 296212 - DNA, 109 bp, Homo sapiens
actacagaacagcacgtaccagaggtggaagtccaagtcaaacgcagaaggactgcctcactgagcaaccaagagtccagccgccgcagggaatgacgccggtgctcct

SEQ ID NO: 296213 - DNA, 82 bp, Homo sapiens
ctggagcctcagttggaagcagccgatccagcctgcggagcctgtggggcagaaaacctcggatcaattctcagctggtggc

SEQ ID NO: 296214 - DNA, 100 bp, Homo sapiens
aagttgaagaatctcttatgatgcctgcagtttttcatactgttgcttcaaggacacagcttgcattgaatcagtcggatttgtcagatgaagagctaaa

SEQ ID NO: 296215 - DNA, 100 bp, Homo sapiens
caggctatgactactaccacattgatgacctggagctcctggccaggtgtcaccagcaccgtgccaagtcctgccctgccaacttcttggcagctgccga

SEQ ID NO: 296216 - DNA, 100 bp, Homo sapiens
acacgcataatggatgaaaggaaccgacagggaagtcgagacaacatgagtgtgattttgatctgttttccaaatgcacccaaagtatcgccagaagcag

SEQ ID NO: 296217 - DNA, 75 bp, Homo sapiens
cagcattcctgaaatacatccaggaaagacatggagattctcttaaaaaggccattgagaaactagtcgctcttc

SEQ ID NO: 296218 - DNA, 87 bp, Homo sapiens
gacaggagagactgtcagacagttcctgctgctgcccaggtgcatctgactactcccgagcccggagaggacccacgcgtgacccgg

SEQ ID NO: 296219 - DNA, 75 bp, Homo sapiens
ttctttaagggctacgggaagatcctggaggtggatctgaagaacggctccttcgagaactcatagaacggaaga

SEQ ID NO: 296220 - DNA, 98 bp, Homo sapiens
ttccaacatgccatgtcagacagtgaagttaatgcctagcttgttgcctggcactgaagagaaagtaaatatttgaacaagggaatgaatgaatgaca

SEQ ID NO: 296221 - DNA, 100 bp, Homo sapiens
cttgtcctggctggacgctactccggacgcaaagctgtcatcgtgaaggcctcagcaactgttgccattcccaaagaacaccatcgctttgttattggca

SEQ ID NO: 296222 - DNA, 75 bp, Homo sapiens
tcattctgcacgacgatgaggtgacagtcacgactccatcaagaatgctggaggaagggtgtttgtccactgcca

SEQ ID NO: 296223 - DNA, 97 bp, Homo sapiens
ataattatcacaattactgatgggagcaagttgactaccaccagtggagtccaggatgaggaaggggccctggaccttctgaagaagctgcacagct

SEQ ID NO: 296224 - DNA, 100 bp, Homo sapiens
aaatggattggagtgaaccggagaccccgaaaacggaagcgcagggagaaggaagaggtgtttgaaaaggatgaccagtgtcccagtgaaggaacgagtg

SEQ ID NO: 296225 - DNA, 97 bp, Homo sapiens
ccccgctctgctgtgggcgctgctggcgctctggctgtgctgcgcgacccccgcgcatggtacgcaataactgtttggtattttgatgcagatgaga

SEQ ID NO: 296226 - DNA, 87 bp, Homo sapiens
accatcgctccaaccaaaaccgtgaatggtgtctggaggagtgagagccggcagctttggcagcatgtaagcagctgtttgccaaga

SEQ ID NO: 296227 - DNA, 95 bp, Homo sapiens
acacgcaggaacggctccagcatcaagatccgtctgacagttgacatttggtcagttgggtgcatcatgggagaaatgatcaaaggtggtgtttt

SEQ ID NO: 296228 - DNA, 100 bp, Homo sapiens
gcaagggaattctgtccctgaggacaggactgaagctgggttctttattggtgaaaacatgaatccagatggcatggttgctctattggactaccgtgag

SEQ ID NO: 296229 - DNA, 83 bp, Homo sapiens
atcagcgccatccccgagcagcggtggaagctgttggaatcgaagcctcttaaaatggcagatgacttggacttcgagacagg

SEQ ID NO: 296230 - DNA, 100 bp, Homo sapiens
atgagtggggtaaaaccccagacgccatgaaagctgccatggccctggagaaaaagctgaaccaggcccttcttgaatttctccaaagagtaatagataa

SEQ ID NO: 296231 - DNA, 90 bp, Homo sapiens
gaaaagaaaaggtccaaactcctatctccttacagcccgcagacacaagtcgaggctgtctgtcaacagcgtgactgctggagactactc

SEQ ID NO: 296232 - DNA, 100 bp, Homo sapiens
gagaagtgattcttgtgggtggcatgactaggatgcccaagctctctgatgtaaaggatggagtaaatcaagcagcacctgcatttggatttggcagcag

SEQ ID NO: 296233 - DNA, 97 bp, Homo sapiens
aaatgtagaaaatgtatagcaagctctggttgttttatggagtatcttgagaatcaagtgattaaggacaatataaggcttcaagattgctcagcac

SEQ ID NO: 296234 - DNA, 100 bp, Homo sapiens
tgccatggcagtttgctgcatctattaacccattacctaggtattaagcccgtgcttgaatttcagccacatccctaagctgccatctcagaccagagga

SEQ ID NO: 296235 - DNA, 100 bp, Homo sapiens
gttttccttgcggcggccgtggaaggcgacccggcggctgtggaggccacgctcagctcgccaggcggcgcagggggttgagcattcatgatggtacctg

SEQ ID NO: 296236 - DNA, 100 bp, Homo sapiens
gagagaagcgcggaagaaggcctccgtggaggccagattgaaggccacggcagagacaacgtgtgtaccccaagtgcacatggctgaccacccctaaaag

SEQ ID NO: 296237 - DNA, 87 bp, Homo sapiens
cagaggcgcttcgccaagggggtgcagtacaacacggaaggagagttttacatggaagtggcttacagaaacttggcgctgaggtgc

SEQ ID NO: 296238 - DNA, 75 bp, Homo sapiens
gcctggactgcattgtcgaatggtccaagagttttgcggcctccaggtggtggatccaatttttcattaggtttt

SEQ ID NO: 296239 - DNA, 90 bp, Homo sapiens
gttgatggcattccagaatatctcagatgagcagcctgctataactgcggtagaggtggccacattgccaaggactgcaaggagcccaag

SEQ ID NO: 296240 - DNA, 100 bp, Homo sapiens
gttacaagcccaggaaggattgtctaatgatggagaaacaatggtaaatgtgccacatattcatgcaaggcagcctgcttctgcaaagtggtacgatcga

SEQ ID NO: 296241 - DNA, 104 bp, Homo sapiens
cttttcagaagcggctgcgcacggactgctggagatggtggagtccgtcaataatttttatggtgggacgaggatacctgtctccagatctcagtaaggtacgg

SEQ ID NO: 296242 - DNA, 98 bp, Homo sapiens
aatccctgaagctcactaatggcatttggattttggccgaactacgtatccagccaggaaaccccaattacacggctctaaattatcttggtattcag

SEQ ID NO: 296243 - DNA, 134 bp, Homo sapiens
ggacagacagctcaccaaccgtgacagcaccatactggaacttcaaaaagttctgaaaacatgttgtaatccggtacaacagtgatctggttcagaaatatcacccttgcttctggatcgatgggcagtatctc

SEQ ID NO: 296244 - DNA, 80 bp, Homo sapiens
gtgaagaaggcgcgggagagctcggggcgcctgatggagaaggatgaaactgtgagtgactgctccccacacatagccaa

SEQ ID NO: 296245 - DNA, 100 bp, Homo sapiens
agttctcccgccctcttggtgaggtcctagccaatggtctggacaacaagctccgtgaagacctggagcgactgaagaagattcgggcccatagagggct

SEQ ID NO: 296246 - DNA, 100 bp, Homo sapiens
agaccgcttaccgcatctggctggagccctgcattcgcggcgtgtgcagagttacctgttcctactgtcctcggactacgagaggtcagagtggagagaa

SEQ ID NO: 296247 - DNA, 50 bp, Homo sapiens
cggggaaccatggctgccccgagagcaaagccgtggaggaaattgtgaat

SEQ ID NO: 296248 - DNA, 74 bp, Homo sapiens
tgaccccaaagagtcaaacttctcagatgttaataccaaccgttcaatcatttggggaagaatctacagttgct

SEQ ID NO: 296249 - DNA, 82 bp, Homo sapiens
cataccaatttgtcttaaccacagaaattgcccttttggaaagtattgggtgtggcatgcagcattttggaaggaaaattga

SEQ ID NO: 296250 - DNA, 90 bp, Homo sapiens
cagccctgcctctccctgggctctggatgcagaaaatgcgattgtgcatatgggcggtcagtggttgggtggtcgtcaaatccgaaccaa

SEQ ID NO: 296251 - DNA, 80 bp, Homo sapiens
cctgggggctccctggacaactccgagcaggatcgaatcatcaatttagttgttggcagcttaacatccttattgattct

SEQ ID NO: 296252 - DNA, 88 bp, Homo sapiens
ttgatctgggtggacatgttcaagtggaaatttaatggagccaccatttcagaaccaaaagaaatttggaacaaacttcacaaagctg

SEQ ID NO: 296253 - DNA, 51 bp, Homo sapiens
cctccttatgctgatatacatccaatgaggttggcagatatccctgttaca

SEQ ID NO: 296254 - DNA, 75 bp, Homo sapiens
tgaatcttgagccttctccattgcagccatccctggccgggaaccttctgaccagcctcatgggctcctcagagc

SEQ ID NO: 296255 - DNA, 51 bp, Homo sapiens
ccctgaagagggaagacacgcggaaacagggaatgggtactgttcaaaaag

SEQ ID NO: 296256 - DNA, 98 bp, Homo sapiens
caggcctccactggcatcaccgacacactatgctccctccaaagccatacgtaggtaacctttccagagatgtgacagaagtccttatacttcagttg

SEQ ID NO: 296257 - DNA, 75 bp, Homo sapiens
gggagttacaccgccaccgccaggtaccaaccaagaagctgaagaaatatgagaaagaatatcagacaatgcgag

SEQ ID NO: 296258 - DNA, 75 bp, Homo sapiens
ttttcagaatagaaaacactctgaaaagatggctaaattagggaccattgacatttatggatgtggccatagaat

SEQ ID NO: 296259 - DNA, 89 bp, Homo sapiens
ttaaataaaaaaaataaaattggagctgcctttactgatgatggctttgccatggccaccttgggtgttgaggttcatcccctagtgtt

SEQ ID NO: 296260 - DNA, 76 bp, Homo sapiens
atatttaaagcgtttggaaaatccacaggaaagtggagaatgaggacatgaataaagaccagatcttgctggaaaa

SEQ ID NO: 296261 - DNA, 96 bp, Homo sapiens
tcagtcattttactgtcaagacatttcttcggcattctgcaacagaatttaagcagaacggtgggaagccctatttgtctgtgattacggggagag

SEQ ID NO: 296262 - DNA, 74 bp, Homo sapiens
agagctgcaccgcgcgggacaagtcgccggcggcgcccgacggagcaggcaggtcttgacgagccctgcccggg

SEQ ID NO: 296263 - DNA, 98 bp, Homo sapiens
cgaacagctggagcaaggcgacgaaccttggagagaggagaacgaacatcttctggacctttgtccagatttgcttgctgaaaatggtcgattaagca

SEQ ID NO: 296264 - DNA, 50 bp, Homo sapiens
cttcatgaaggtggtgaagcccaagacaaatcttcctattttcaagctga

SEQ ID NO: 296265 - DNA, 83 bp, Homo sapiens
agcacacggagcactgcaggcgccgggaacacatataactgtggtttcccattcaagacctgtgggccactgcttagaagctg

SEQ ID NO: 296266 - DNA, 100 bp, Homo sapiens
tctccacgccgctccgactccaggggagccgtggcctcctctccgccctagcgctgaggtacggttcctggagcagcagaacaagatgctggagaccaag

SEQ ID NO: 296267 - DNA, 133 bp, Homo sapiens
ccgggacggccggggcagcgctcctggcgctgctggctgcgctctgcccggcgagtcgggctctggaggaaaagaaagagagttctggaagagaatcaagaacattatcatatagttcaaaagtttcttatcc

SEQ ID NO: 296268 - DNA, 90 bp, Homo sapiens
tgctgcgagggcagaacctggaccaatctgaccttcgttggctgcgtgggcatgctggatcctccgagaatcgaggtggcctcctccgtg

SEQ ID NO: 296269 - DNA, 84 bp, Homo sapiens
gctggatgatgctgttcggcctgaggcagaaggagaagaggtcgtcatacctcagaagaaaggcaagaaggctgctgcaacctc

SEQ ID NO: 296270 - DNA, 98 bp, Homo sapiens
cgtatgcagtcccccaggatacagggtcaaaggagagcacaaccatcgcagttggaagcccatggggcaggctacgcccaggaggaacagctgaaaga

SEQ ID NO: 296271 - DNA, 100 bp, Homo sapiens
atagtgagacttttggcaaagacatgcgcaagtcacccacaaaagctgtatataatgccagacattggaatcatccagattcagaagaactgcctgggcc

SEQ ID NO: 296272 - DNA, 73 bp, Homo sapiens
gcccacaagatccagtctccgcaagagaaggaagctctttatgccttaacgaactcctgcgtctggtgaagga

SEQ ID NO: 296273 - DNA, 105 bp, Homo sapiens
accgctcccggcccgctccgcccagagtccgatggcggcggcactgagggccccgacccaggttgttggcatgaagtgaaggatgaagagtcatcttctgaacag

SEQ ID NO: 296274 - DNA, 75 bp, Homo sapiens
agagctgtaccagtacacggcccacgttgccagaccaagatcactccatggatgaaatgacagctgtggtgaaaa

SEQ ID NO: 296275 - DNA, 73 bp, Homo sapiens
agacctctgtggcagcattttttccagaacacaaaaggtgccagctattcaacagaaaagaacggtggctttt

SEQ ID NO: 296276 - DNA, 100 bp, Homo sapiens
gcgaaggccgggacccggttccccggcccacagtgggggtgtgcaaacccgagagaactgggcatagaatgtcaagctaaccaggcgtccgctacttcag

SEQ ID NO: 296277 - DNA, 106 bp, Homo sapiens
tgaagagcgacaagccgctggcagccgcggatctcaccgccgctcaggggccgagaactactggtggcgtggccagaacacacggacgctgtgtgtggggcccttc

SEQ ID NO: 296278 - DNA, 100 bp, Homo sapiens
ccgtgggggtctctatgataggggaaggtgttggggatgtcctttgcactgaccctgaactgccagattgacaaaaccagccagaccatagggctatgat

SEQ ID NO: 296279 - DNA, 82 bp, Homo sapiens
ccaggatctcgggctcggaacgagactgcacgcaaaatgatgcttcaacacccaggccaggtctctgcctcggaagtgagtg

SEQ ID NO: 296280 - DNA, 75 bp, Homo sapiens
agggagagaagtggatttgggagacatttaggaggctttatcctgtggataaacgcagagtgaacgagtttgggg

SEQ ID NO: 296281 - DNA, 100 bp, Homo sapiens
tgggttggaagtcagagctgcacaaagggaaaggcttgagagtttttccagcagtaccagctccagccaggatcaccctctctactctgggcacccatcc

SEQ ID NO: 296282 - DNA, 75 bp, Homo sapiens
agcgactcttctgacctccgcgcgacgtacccgccgccgccgttggctggagctccttcgagaactcatagaacg

SEQ ID NO: 296283 - DNA, 90 bp, Homo sapiens
gctgaagcgactgagtccgcgatggaggacggggaggtttactgcatcgacgcgcggttctacgggaacgtcagccggttcatcaaccac

SEQ ID NO: 296284 - DNA, 83 bp, Homo sapiens
cccgggtgccgaggagcgggaagagttgctgggaattcagaaggagctggcggacatcactttagaccctccacctaattgca

SEQ ID NO: 296285 - DNA, 78 bp, Homo sapiens
acccatgttgtcatggcttaacatcaggtctgctcaccaggtggccagataccgcccacgtgcccccatcattgctgt

SEQ ID NO: 296286 - DNA, 75 bp, Homo sapiens
ggttcaggctgtccagaagtaaaaggggtggagagattcaaccagttagcgtgaaagttggagataaagttcttc

SEQ ID NO: 296287 - DNA, 75 bp, Homo sapiens
ccagagcattcagctgtctcaaatgcagggccccacggttcccctgatagacctggagcacgtccttccactcat

SEQ ID NO: 296288 - DNA, 88 bp, Homo sapiens
aagcagatagcatagctgctgtggctgaactacgacaacacattgctgagcttgaaatccaggtttggaaggtttgcagttgctgctc

SEQ ID NO: 296289 - DNA, 75 bp, Homo sapiens
tgcgtggggccttttgacaactccaatgttgactattctggacaatcaggaagtccaagccacaatgatcctgcc

SEQ ID NO: 296290 - DNA, 90 bp, Homo sapiens
ggagagggagtttctcgccctcgtcgcgcctgccgcgcggagagataagataccatgtttgtgtggaagtgccccgtgtttgctatgccg

SEQ ID NO: 296291 - DNA, 83 bp, Homo sapiens
ctccactgttcctggaggaatccgagaagagcagagcggagggagccccagacacgtgtggccgcaggacgagtacatcgtgg

SEQ ID NO: 296292 - DNA, 95 bp, Homo sapiens
tacaaatgcaccgttggattctttgtcgttcaagtgaatgttgactatttacaggagttgtaagacgttcatcgccgtgttatccttgagtaaag

SEQ ID NO: 296293 - DNA, 100 bp, Homo sapiens
actactatgtccagcctatttgcacaccatccaggagtcagtttattactggaaagagattacctggggcaattgatgttatcggtcagactataactat

SEQ ID NO: 296294 - DNA, 98 bp, Homo sapiens
gagtgcagtttcgatggaaaatgaaggtgccttagctggaccaattattgtggagccacatgtcacagcagtatggggaaagaatgtttcattaaagt

SEQ ID NO: 296295 - DNA, 132 bp, Homo sapiens
caagagcaagtccaagtattgattgagaagtatgaacccaacaacagcctcgccagaaaagttactatgcgagtcagaagaaaacatttgaaattaatcccagacacccgctgatcagagacatgcttcgac

SEQ ID NO: 296296 - DNA, 98 bp, Homo sapiens
ggtgacgagagctacagggagctcttcagcctactatggcccactgcgtgaccttggttcagctgtccatttcctgtgaccatctcattgacaaggac

SEQ ID NO: 296297 - DNA, 83 bp, Homo sapiens
tccaaggaggtgacccaacagggacaggttctctacttaaaagacaatgactactgatgaaggtgccaagaacaatgaagaaa

SEQ ID NO: 296298 - DNA, 75 bp, Homo sapiens
ccaaaaggggctgcttcatgtacggaaacagctttagtgatgagagcacccagacagagtgcaagacgatgactt

SEQ ID NO: 296299 - DNA, 73 bp, Homo sapiens
aaattctggaacacctatatggctagagctaatggtctgcagtcctgtgtgattatcatacgcattcttcgag

SEQ ID NO: 296300 - DNA, 100 bp, Homo sapiens
ctcaagtaccagcacaccggcgccgtcctggactgcgccttctacattgcccccgaggaattagcacttgttcacaacttgaggaaaatgatgaaaaatg

SEQ ID NO: 296301 - DNA, 101 bp, Homo sapiens
aaaacctacccaagaagcctatcagaatgaattaaagattgaaagtgtagaacgttccttcattctctcagccagatgctgcagttggagaagaaacttga

SEQ ID NO: 296302 - DNA, 50 bp, Homo sapiens
cggggtggtcctcttccctttgtcgactgtgagcacgccaggatgaaggt

SEQ ID NO: 296303 - DNA, 120 bp, Homo sapiens
tctggaggtggagttgagcgtcctgcggctgggcctccgggaggcagaagagaagtccctgctgagatggtggccacacagcaggagatgatggacgcgcagctgaggctccagctgcgg

SEQ ID NO: 296304 - DNA, 83 bp, Homo sapiens
agccacacatccccgaccacttgcggcctgagtatggacactcatgaggaccatgatacttccactgagaatacagacgagtc

SEQ ID NO: 296305 - DNA, 88 bp, Homo sapiens
attgaggcggagaaaattgaaaaaagaagaaaaactgaattggaaatttttattcggaagccatgcagtgacacccgctaagacttgt

SEQ ID NO: 296306 - DNA, 75 bp, Homo sapiens
aacccaccaagccccgctaggagccacctagactggatgcagagcatggtatccacaaattacccattatcaaaa

SEQ ID NO: 296307 - DNA, 83 bp, Homo sapiens
ggacagaagatggtgcagaagaaaccagccgaacttcagggtttccaccgttcgttcaagttcccagtgacctgacagcagag

SEQ ID NO: 296308 - DNA, 82 bp, Homo sapiens
tgaaggctgacctgaggaccctcaaacagctggccatgaactctatcaacccctcccgaggaatgacttcccccgcattgaa

SEQ ID NO: 296309 - DNA, 100 bp, Homo sapiens
aagctgcgcatgatcgtcatgggacacagaagtgaccatgcagcaggtggccaggacagtggctaaagtggagctctcagaccacgtgtgtgatgtggtg

SEQ ID NO: 296310 - DNA, 83 bp, Homo sapiens
cctgatgcaaaggatacccctgatgaggtgcaggtgatggtcctaccagtgtgtctgttgaggtcacccgtcctaaagtgacc

SEQ ID NO: 296311 - DNA, 74 bp, Homo sapiens
ttggttttgatatggattatacccttgctggtacttggaaaaatggacaaggattgtgaaatgaaacgcaccac

SEQ ID NO: 296312 - DNA, 49 bp, Homo sapiens
gcttcctgcttcatagataagaggacttccatagcttggccacctattt

SEQ ID NO: 296313 - DNA, 90 bp, Homo sapiens
gagggaggaagcagaattgcgggaccaccggcgcattgggaaggagacagacttattactagatgattcgctggtgtccatctttgggaa

SEQ ID NO: 296314 - DNA, 83 bp, Homo sapiens
cagctgatgacctgctgctcgtgctgatctcaggaagggaaaaggccgaggcatcagcgtgtgaagaccgcaaagacgatccc

SEQ ID NO: 296315 - DNA, 98 bp, Homo sapiens
ctggatctcttatccatcacatgggaaactgcatggaccatcatacagcacaacggctctgacttaacaagagtcagaaatactaatccagagaaccc

SEQ ID NO: 296316 - DNA, 100 bp, Homo sapiens
tacctgcagctgaagagcacggactctggagccaaagatcttgccgtggaccttattgaaaaatgcctgctgatgaagtttttagatgtgtgcctttaag

SEQ ID NO: 296317 - DNA, 100 bp, Homo sapiens
gaagctcagtttttattgaagacagagtctgggagaagaagggggactccggaagacagtgatgcggtcattgatgtccttcaccccgggaaggcgacag

SEQ ID NO: 296318 - DNA, 100 bp, Homo sapiens
caacttccgcctcccaggttcaagggattctcctgcctcagcctcccaagtagctgagattatagctccaggtttacaccctgtacctggtggagtgttc

SEQ ID NO: 296319 - DNA, 82 bp, Homo sapiens
agcgccttcctcaacgacgcggacatggtcatgagctttgtgaacctgggacatttcattaccatccagaagtgtctcccac

SEQ ID NO: 296320 - DNA, 96 bp, Homo sapiens
ctattttctcctgcgttggctccgaggatctctctaggagctgacactcgaaccttcacgacccattcggatttttccaggactcaggagtggcac

SEQ ID NO: 296321 - DNA, 50 bp, Homo sapiens
gctgtctttcctcgcggagacaggatgaccagtgtcccagtgaaggaacg

SEQ ID NO: 296322 - DNA, 100 bp, Homo sapiens
gcggcgctcgagggaccatggccgatcctcgcgtgagacagatcaagatcaagaccggcgtggtgaagcggtaagaatgattgatgttggctgatattgg

SEQ ID NO: 296323 - DNA, 98 bp, Homo sapiens
ggcaaggtttacacagcacagaaccccagtgcccaggcactgggcctgggcaaacataattactgccgtattggtaaaggttttcaaggtgtcatgaa

SEQ ID NO: 296324 - DNA, 83 bp, Homo sapiens
cggctctctgctcattggggcgttgaggaaaactcaagccagtggattatgagtaccgagaagaagtccactgggccacgcac

SEQ ID NO: 296325 - DNA, 100 bp, Homo sapiens
ctgaggcagggcccctccgcaagagctccctcaagaagggagggaggctggtggagaagtgggatgaagctctcttgactatgagtaaaggagaaaaggc

SEQ ID NO: 296326 - DNA, 75 bp, Homo sapiens
ctttaaagaaggcaaggagagaatgtatgaagaacagtcacaggacagaaatgagccgtcagactgctacagcat

SEQ ID NO: 296327 - DNA, 100 bp, Homo sapiens
gaggaacaagcatttaaaagatctagaaacactgatgagatggttgaattacgcattctgcttcagagcaaggaagctgttttaggttatgtgaaagaga

SEQ ID NO: 296328 - DNA, 100 bp, Homo sapiens
gggagcggcggccgagttctccagcctgctgcgcaggataaaaggcaaactcttcacctggtgtcagttgtacccgaggcgttctcagcagcagcaagta

SEQ ID NO: 296329 - DNA, 74 bp, Homo sapiens
gtggagtccgagctgagatccatctgcaccacggtgctgggccatgatccaaaggaaccagagcagttgagaaa

SEQ ID NO: 296330 - DNA, 98 bp, Homo sapiens
caaggttatgtgctgctctcctgagcaacatctctgactgtgatgaaacattcaactactgggagccagcgctccaggcccctgcctgtcacgagaac

SEQ ID NO: 296331 - DNA, 82 bp, Homo sapiens
ttccgagaggaacctctatgccgacatcgacgccgcctggcaggccctgcgcaccaggtcttgaggaccggcccagctcagg

SEQ ID NO: 296332 - DNA, 100 bp, Homo sapiens
cgccgctgctacctgcagcgccgtgtggcacgacacaaaaatcagaggccacaatcagagaatggaattcctaggtgactccataatgcaactggtagcc

SEQ ID NO: 296333 - DNA, 75 bp, Homo sapiens
gacagatctgagagatactgaggtttttcgttggaatatacgttgcacatttatggcgattctgagtgtgagggc

SEQ ID NO: 296334 - DNA, 82 bp, Homo sapiens
tgctgatcctgcagcgtctgctagtggagcatggggcatccccatcaggaggctaggaattatctgtgaatgtaggaccact

SEQ ID NO: 296335 - DNA, 100 bp, Homo sapiens
cttccccctgcttctgcctccatgagtaactacctatatgacgtgctgctgctgagaccaaggaatgaataaggtgtacctcggccccccacgcctcttc

SEQ ID NO: 296336 - DNA, 100 bp, Homo sapiens
agcctgtcgaaaaatgggggtgcctgaggaggccccgtgtgggccgcggcccggccctcaccatggagtccatgttcgaggacgacatcagcatcctgac

SEQ ID NO: 296337 - DNA, 83 bp, Homo sapiens
gatctggcctacagttctggagccttggaagtccgagatcaaggagctgcatctggtgtcttctgcggaggtgcgcatcgggc

SEQ ID NO: 296338 - DNA, 99 bp, Homo sapiens
aatatttgggagagcaggcgtgggcaagtcagacagaatgttgctgcgggatgtaaaagctcttaccctccactatgaccgctataccacctcccgcag

SEQ ID NO: 296339 - DNA, 98 bp, Homo sapiens
aggggccagcaccttggggcttccggctgcaagggggcaaggacttcaatgtgcccctctccatttcccgggcatcgactgggcccccgagagtaacc

SEQ ID NO: 296340 - DNA, 90 bp, Homo sapiens
aggccctatcaggacatggagtatgaaagacgtaacaaatgtggcaattattttggatctatcacctgtcatcataactggcttctgctt

SEQ ID NO: 296341 - DNA, 100 bp, Homo sapiens
gatgattccagcagtggtcttgctcttactccttttggttgaacaagcagaaccgggagaagtacctgctgcccttcctgtccctgcaaatcatggacta

SEQ ID NO: 296342 - DNA, 96 bp, Homo sapiens
tggtggtggctgccatgatgatttccattgtggggggatggcattcctactgtatttgtggcagtggcaggcagaagtaatggtttgggaccagtg

SEQ ID NO: 296343 - DNA, 100 bp, Homo sapiens
tctacagcctggacaagctctaccccgaatctcagggctcggacaccgcctggagggtcccgacctgaaggaaaagattatgcccttcattggctagtgc

SEQ ID NO: 296344 - DNA, 116 bp, Homo sapiens
gatgagagctgtctttctcttgatgatcttgccaaaaggatagagattgcagaggaagaccaacactgtcatctgaagttggaatcatcatctgtgatattgctaatccagcctcg

SEQ ID NO: 296345 - DNA, 90 bp, Homo sapiens
ctggagcttttcccctccccgggctggaggaagtacccctggaggtgctgaggcagagggagtccaagtggctggacatgctcaacaact

SEQ ID NO: 296346 - DNA, 75 bp, Homo sapiens
acagagcggcctgcgccagcgaggggaaatttgcagtggtgagaaaatgtataaagaaagattctgggaaagaat

SEQ ID NO: 296347 - DNA, 100 bp, Homo sapiens
gcagcagtggagaaagtgctccagatagctacatcgggataggaaattcagaaaaggcagcaatgagcagatcaaagatctgcgagaccacaagctggac

SEQ ID NO: 296348 - DNA, 75 bp, Homo sapiens
gcagaagcttcaccacaaaagcgaaatgggcacaccacaggtgtcgtttcagtcagatgttgcatccaatttttg

SEQ ID NO: 296349 - DNA, 100 bp, Homo sapiens
gtgaatttgatggtactgaagttttaaagggagatgaggaattggcaacaagctcatttcactggtgggtttgctgaagcattatcacaagacagtcaga

SEQ ID NO: 296350 - DNA, 101 bp, Homo sapiens
tctcgcgcggtgaggagccgggttgggggagcggctcgtggaggtacatgtcccagagcaagcacacggaggcccgggagctcatgtactcgggagccctg

SEQ ID NO: 296351 - DNA, 100 bp, Homo sapiens
tgatgagcaagatgaacaagagccgccagcgcgtgcgctacgactcctccaaccaggtcaagatccgttggaagtacatgattgtggacgaaggtcaccg

SEQ ID NO: 296352 - DNA, 97 bp, Homo sapiens
gacggtgcatctgcagtcacgggcgcggtacaccagcgagatgcggagtgagctactaggcacggatggagcactcatagcaactggctccgctgat

SEQ ID NO: 296353 - DNA, 100 bp, Homo sapiens
tgtgctgtgcctctctcgcccacattttccccaagcactctcaggaacctggcaacaggtgacagtatgttgactgctgtctctgtggccagagattgtg

SEQ ID NO: 296354 - DNA, 75 bp, Homo sapiens
gtttgccgaagtgacccccacaacgatgcgtctcctggatgggggaaagttggggacatgctgctacaatacggc

SEQ ID NO: 296355 - DNA, 108 bp, Homo sapiens
cctgcccctcgttgatgagagcattcgaagtgacctcagcagggcatccagttgttgacctcctgtactggagagacattaagaagactggagtggtgtttggtgcca

SEQ ID NO: 296356 - DNA, 75 bp, Homo sapiens
gcgcaggagtaaggcaggaaaccgacgagaggacctcagctccaaggaatgaatctgaagtctgctgcagtaaaa

SEQ ID NO: 296357 - DNA, 93 bp, Homo sapiens
cccgccggttcgcgtctctctgctgcggcgcggggaccgctgtgctctcgggcagctgcaatgactctccgcacggtattattgtcattgcaa

SEQ ID NO: 296358 - DNA, 101 bp, Homo sapiens
gttccaggcgcacactagtctacaaggccagagctttctggaagggggcagttgtgtgtgtcccgctgtggattctcatgtcctttctgtgcctggtggtc

SEQ ID NO: 296359 - DNA, 100 bp, Homo sapiens
tcctccaggcatgccccgctacgagctggctttaatcctgaaagccatgcagcgggtttccaatacttatctacaggaatcgccatgaccccagctctga

SEQ ID NO: 296360 - DNA, 75 bp, Homo sapiens
ttccgtccgagaaattctcgcagagcttacagttgctgttgctgatgcaaagaagtctctagaactcaatccaaa

SEQ ID NO: 296361 - DNA, 100 bp, Homo sapiens
tagccacaccaggctggagaatatggtgcagaggccctccacgctctacattaatcatactcctccaccactgtccaagagtaaggagagagaaatggac

SEQ ID NO: 296362 - DNA, 76 bp, Homo sapiens
gcaggctccagagctgagcttatctagtcaggatttggaggatcccaaaatggctgggcgaaaacttgctctaaaa

SEQ ID NO: 296363 - DNA, 90 bp, Homo sapiens
gtcaccgaagctgatttggtggcaggaaatggctacagaaagaggcttgttcgggttagaaatgtggagattctggacgcaaagacaagg

SEQ ID NO: 296364 - DNA, 83 bp, Homo sapiens
ccacaacgtcaaggagctggaagtgctgctgatgtgcaacaagtcaggatggctaactggttggctccccacatggtgcccta

SEQ ID NO: 296365 - DNA, 75 bp, Homo sapiens
aacaagaagagcagttcccaggatctgcataaagatgatgaggagtctgatgaggaagctgtgaagaaaaccaac

SEQ ID NO: 296366 - DNA, 80 bp, Homo sapiens
gagcctcagttggaagcagccgatccagcctgcggagcctgtggggcagcggtgctgtggtgaaggcgcgggataagtac

SEQ ID NO: 296367 - DNA, 50 bp, Homo sapiens
ccggaaccgcgattcggcgtgtcagataacgaaggaggcccaacttcatt

SEQ ID NO: 296368 - DNA, 76 bp, Homo sapiens
gagagtcgtcagtgccctattccttcacatgtaattcagaaattagggacaggttgaagaagaggatgaacttgaa

SEQ ID NO: 296369 - DNA, 112 bp, Homo sapiens
tgcacgtcaagatgtttatgatttgctaaaaacaaacctttatcaggatgatgcagtaacagaataactgaagtgaagtgatggactccgatttggagagtagtaagacgtg

SEQ ID NO: 296370 - DNA, 143 bp, Homo sapiens
ctcctgtgcaaggtggtaggggcccgtggagtgggcaagtctgccttcctgcaggcctttctcggccgcggcctgggggaacttgctactaccagcaccatgccctaccaatatccagcactgaccccggagcagaagaagga

SEQ ID NO: 296371 - DNA, 83 bp, Homo sapiens
gggagacgcaggaagcgatgaaagagatgtctgctgcctccggagccagcgtggtggccatagacaacaagatcgaacaggcc

SEQ ID NO: 296372 - DNA, 100 bp, Homo sapiens
taccacacgaaggtgcgcgccggccgcggcttcagcctggaggagctcagggtggagccgccaccaaaatgcagattttcgtgaaaacccttacggggaa

SEQ ID NO: 296373 - DNA, 90 bp, Homo sapiens
gccagagacagcgaatttaccacaaatcaaggtggcagctttggctatcgcaagtggcaatggcttgttactcaaaggagggaaggaggc

SEQ ID NO: 296374 - DNA, 82 bp, Homo sapiens
gaaaagcaaatgggagatggacacatctgaggcaaagctagctgctctgttaaaagcgaaaatgaaacaattgcctgcggca

SEQ ID NO: 296375 - DNA, 82 bp, Homo sapiens
gtcctcgcttgcagttcagcgaccacggtttgggccccatggtatccctgtgacagtatttcccaaaagggaatataaggat

SEQ ID NO: 296376 - DNA, 75 bp, Homo sapiens
gccaagttgaaaatggacgagtaatcgcctgctttgattcattgaaaatcattgagactgaaaatatgatggacc

SEQ ID NO: 296377 - DNA, 82 bp, Homo sapiens
aaattaaaagaggagcagcatggcatttcagtcactggtttgcagagtccagatgtgttcagagcaacattgttttgttgac

SEQ ID NO: 296378 - DNA, 100 bp, Homo sapiens
actttgggaggccaaggagggcagatcacttcagttccgccatggagtcatagttgcagctgactccagggctacagcgggtgcttacattgcctcccag

SEQ ID NO: 296379 - DNA, 75 bp, Homo sapiens
atttttcttcaccttttccttactcatgagccagaaagtgaagtcactgcttttgctgtcttggatcaagaccag

SEQ ID NO: 296380 - DNA, 100 bp, Homo sapiens
acaattgttgagttgggctccatctttcagcagttggcacacatggttaaggaacaggaggaaaccattcagagactctgtcaggacggcagcctcgctg

SEQ ID NO: 296381 - DNA, 90 bp, Homo sapiens
agtacttaaacaaaaagccaaaaagaggagaaggggagaaaccaggcagtggcaaacagtacataccgagcatcaaatattaaggcaccc

SEQ ID NO: 296382 - DNA, 82 bp, Homo sapiens
ctcggaatttctcggctgcctctgccctaaatttcccctttgcccggagccggagtcagagtggtggctacagtgaccggag

SEQ ID NO: 296383 - DNA, 123 bp, Homo sapiens
ggccgaggtagaggcagtggcgcttgagttggtcgggggcagcggcagacaagttggatggcttgaggactggtactaaaaggaaacgtgactgggaggccattgccagcagaatggaggatt

SEQ ID NO: 296384 - DNA, 100 bp, Homo sapiens
gccgagactcacggtcaagctaaggcgaagagtgggtgaccaagaatatggcccaggtgaccaaagccctggacaaggccctgagcaccatggacctgca

SEQ ID NO: 296385 - DNA, 105 bp, Homo sapiens
ccggtgtgtggcgcgcccagagccccgcgtttcagccctagggaagatacaggctagttccaaaggtttattttcctgagcaaattcatgatgttgtacgggcca

SEQ ID NO: 296386 - DNA, 76 bp, Homo sapiens
ccaagtagctgggattgcaggcgcccaccaccacgctcaggcgcgggcggtgatgaactttgtggttcgctaccgg

SEQ ID NO: 296387 - DNA, 100 bp, Homo sapiens
gcacgtctgctcggagatcatttgggagatccaagagattcagtatcactcgctcccttgatgatcttgagaacctcccggtggccagcctcctccgagg

SEQ ID NO: 296388 - DNA, 74 bp, Homo sapiens
ggcagctggtgagtcggtgacctggcctgtgagaatgagaagactttgggacatttcatgagtcattcaagcaa

SEQ ID NO: 296389 - DNA, 100 bp, Homo sapiens
caaaaacgtttttcctgataactggaaagttcctcaagatggagactttgactttcagttgatgagctatccactctccgaagggcaactggaccagaag

SEQ ID NO: 296390 - DNA, 50 bp, Homo sapiens
gtgaagcgcgcccggcgtcacggaatcttcctgatgcagcagagcccgat

SEQ ID NO: 296391 - DNA, 75 bp, Homo sapiens
caaccacccctacatgttccagcacatcgagtttgccccaatgtcagatgacgagagccctacatcatcctcggc

SEQ ID NO: 296392 - DNA, 98 bp, Homo sapiens
ctgaaaatataggatttgcttgtgaacttctgactgaagacaccaccatctgctatggggaggatattaaccccaagactagcatctaccaactcctc

SEQ ID NO: 296393 - DNA, 75 bp, Homo sapiens
aaagagttgattgaaattatctctggtgctgcagctctagttctcttggaacggttgattgtaaataggccacat

SEQ ID NO: 296394 - DNA, 82 bp, Homo sapiens
cgatccagcctgcggagcctgtggggcagcaatggctgccatccggaagaaactggtgattgttggtgatggagcctgtgga

SEQ ID NO: 296395 - DNA, 100 bp, Homo sapiens
tgctatacataaggatttggaagacactgaagcaaataaagagaaaaatctggagcagtataatagggtatctcattaggtaattcagaggcagacagac

SEQ ID NO: 296396 - DNA, 74 bp, Homo sapiens
gaagaaacccagcttgatatgttggtatcgacttcaatattataaagattctgaacaacccaagagcatatacg

SEQ ID NO: 296397 - DNA, 118 bp, Homo sapiens
aggaacttgcagaaatcacattggaccctcctcccaactgtagtatctggagtccatctttcaccatcttctcctgagattgtactggaccgtgaccactcttcttccattggctgcc

SEQ ID NO: 296398 - DNA, 101 bp, Homo sapiens
gttgctgctgcacattaggttgcagtatgtggccagttatttgcctcagtaaaagaatgtctcgaagtcggagtccttctccaataagatgtggattgcca

SEQ ID NO: 296399 - DNA, 83 bp, Homo sapiens
cctggagcccccatgatccctaagaagacagcttgaacctaggttcacaactacatgatgccacccctcgaccgaagctggag

SEQ ID NO: 296400 - DNA, 95 bp, Homo sapiens
attgactcgagttgtcttttagaaacactagaaacatatctgcgaaaacacagaggtctcttcataattgaccccaatggagtcatcaagcattt

SEQ ID NO: 296401 - DNA, 78 bp, Homo sapiens
ttgttggcatcgaattcgcactgatgaaaatgggctttgtcctgcatgtagaaaggatgaaattgattctgcagtaaa

SEQ ID NO: 296402 - DNA, 75 bp, Homo sapiens
agtcggccagcctgagcaagcggaggacctacgccggcctggaggtggaggagacactgaagcgactgcagagcc

SEQ ID NO: 296403 - DNA, 96 bp, Homo sapiens
aggaaggaacgaggcaaggagctaaagcagcgtgcgttcagccctgggcatcaagatggtgctcatgtggaccagtggtgacgccttcaagacggc

SEQ ID NO: 296404 - DNA, 75 bp, Homo sapiens
aataaagctcatggcccaccagctagaaagaaaccagcccaaaagacttcctcttttgaaagagaaggatggtgg

SEQ ID NO: 296405 - DNA, 100 bp, Homo sapiens
acgaggaggcggatcccccggcgtcaggagtcccctccacatacaagggtctaccctgcccctatgcttcctgcatcttggcttccacctcccttctgac

SEQ ID NO: 296406 - DNA, 98 bp, Homo sapiens
gcggagggagaggctgcagagcgagggcaggaggtctggccgtgggcctgggcttcggggcactggcagaggtcgccaagaagagcctgcgctccgag

SEQ ID NO: 296407 - DNA, 99 bp, Homo sapiens
gtacgatttctggtacagttagatgactacagatcatggaagggaagtggttgctgtgtatgttactggtgcttggaactgctattgttgaggctcatg

SEQ ID NO: 296408 - DNA, 100 bp, Homo sapiens
tgccccgtctgtgtgagccccctggggtgtgacgacgacctgccctctctctgctgcatgcactattgctgtaaggccaatgagtgccaggagcgccctg

SEQ ID NO: 296409 - DNA, 100 bp, Homo sapiens
tattcctggtctacatcctgcgggtgcctttgaaaatcaacgacaacttgagcacagatgaggtggaaagtgagaaatggtacctgtctacagacttccc

SEQ ID NO: 296410 - DNA, 100 bp, Homo sapiens
ataaactgaaaaaccaaacatgagggtagcagacatcgctattgcggttccgaggcagtgggaagagatgcggcccctggacatcgtcgagctggcggaa

SEQ ID NO: 296411 - DNA, 98 bp, Homo sapiens
atgtacatcaaggcctccggcagctatgcagatttctccacccaggtgaactcctccctcacctccccgacggggcgaggctccatggctgccccctc

SEQ ID NO: 296412 - DNA, 100 bp, Homo sapiens
ccagtaaagctgaatgaaattgtcgggaatgaagacaccgtgagcaggctagagccgccaccggcaactaacctatgaccttctgacctctgaactcttc

SEQ ID NO: 296413 - DNA, 99 bp, Homo sapiens
atttgcttgatggcttagaactctccacagccatcactcatgtccataaggaggattgttttaagaaaatggcagacaaaccagacatgggggaaatcg

SEQ ID NO: 296414 - DNA, 90 bp, Homo sapiens
ctcggatgcccacctctggtccagtcaactgggattgggtctcagaagagaggggctggcttaccagaaatgagccgtcagactgctaca

SEQ ID NO: 296415 - DNA, 100 bp, Homo sapiens
agagttgtcccagctcggcccgcgggggagccccgggagccgcacggtcagttcaccgggacctggaggcccagattgcgatcgtgacggagaaccaggc

SEQ ID NO: 296416 - DNA, 101 bp, Homo sapiens
gcccgccatggctgcgtcggagctctacacaaagctgtcatcatgactccaactcgagaactggctttacagattactaaagagtgtaagaagttttccaa

SEQ ID NO: 296417 - DNA, 82 bp, Homo sapiens
ggacgcccgctgagcttggcgcacgggccgaccaggctgaaggtgatgtggccgccctcaaccgacgcatccagctcgttga

SEQ ID NO: 296418 - DNA, 75 bp, Homo sapiens
attgaagaggcctggagtcctcctgctgaaggtgaacagtctagtgacggagcccgcgcgcggcgccaccatgcg

SEQ ID NO: 296419 - DNA, 75 bp, Homo sapiens
tgctatagaaactgatgccatgatcaagtaattttatgcgtcaggagtgtttggattccagatttgtattcgata

SEQ ID NO: 296420 - DNA, 100 bp, Homo sapiens
tgaagatccaacccagtgctttctgctttttgccaaccaggaagactttgactcggagcagctgtctgtccttgcttcctgcctacaggagctcttcaag

SEQ ID NO: 296421 - DNA, 82 bp, Homo sapiens
cggggtccccggccggccaagcagggtgataaaagaaaatgtggctgaagttacccgaagttcagcttgcagtgtaattcag

SEQ ID NO: 296422 - DNA, 75 bp, Homo sapiens
ctgctgcagccagaatgggtgtgaaggcgtctcaaacagcaatggctgccatccggaagaaactggtgattgttg

SEQ ID NO: 296423 - DNA, 75 bp, Homo sapiens
gtcccgcccgcgccctccgccggccctcaggctctgataaccatgaggcttctcattctcacctgtcttgtggct

SEQ ID NO: 296424 - DNA, 83 bp, Homo sapiens
ccggctccctacggtgccgtgtgtgcgtgagagaagaccagtctttcctctaggatgctccagaccttgtatgattacttctg

SEQ ID NO: 296425 - DNA, 96 bp, Homo sapiens
ttgtttatgatgtctgcgatgatcaagagatccagaagaggctcgctgagcagcagcgcccgtggtccagcgtgtagggagccgatcgcccatgga

SEQ ID NO: 296426 - DNA, 98 bp, Homo sapiens
atgccacaggtgttcaagagctagatgaaggtagtgggcagcagtcagtgacaggtgtaacctctgtggatgacagcaacagttactggaggatacgg

SEQ ID NO: 296427 - DNA, 100 bp, Homo sapiens
gttaggatggaggcgggatttcctatggcaagtggtccagcggccctccaggcactgaagcgtaagaagaggtatgagaagcagctggcgcagatcgacg

SEQ ID NO: 296428 - DNA, 100 bp, Homo sapiens
cactggggaccgagacccggcaccacctcccggtccgccctccagccctggaagaaagcgggacttttcccctgttccttggagtcagtattttgagtcc

SEQ ID NO: 296429 - DNA, 73 bp, Homo sapiens
ggaagcccgggaccgtttaaaaaactggttgggggccgtcccgctcctaaggcaggaagatggtggccgcaaa

SEQ ID NO: 296430 - DNA, 87 bp, Homo sapiens
tgatgtgcgcaatggagggcagatccttatcgccgacctcagggggaacagatggagtcggataactgttcaggaggagatgatgac

SEQ ID NO: 296431 - DNA, 90 bp, Homo sapiens
cttaggattcgaagaccagttcattcttagtgtcttctgaaataaaattagatcatcacgaagtatgtatatgagctcctggaaaaggat

SEQ ID NO: 296432 - DNA, 50 bp, Homo sapiens
tgtcaaacaacctccgtgttctaagatgcagaggttgtggtaggaaccac

SEQ ID NO: 296433 - DNA, 90 bp, Homo sapiens
cttgagttcattaaatggtcagctgcagaacattctagtatgccagtagaaaaaaatatcactttagaaaggccttctaatgtaaatctc

SEQ ID NO: 296434 - DNA, 101 bp, Homo sapiens
acgaatgtgaagaaatgttgaaactatttaaagaggttgctagcttacagtttctgtagaaaatgtttcctgactgcaatgagggaaagcggagcacattg

SEQ ID NO: 296435 - DNA, 96 bp, Homo sapiens
cagctgtaccgccagttcaccaccaccgtgcaggtcgtcatcttcataggctcgctgctcgacagcaccagttgcccttgaagcagaaaacagagg

SEQ ID NO: 296436 - DNA, 98 bp, Homo sapiens
aaggagaaggtggacctggtgctgctgggcaaacaggaaacagagcaaatgcagcgttacaatcaaagacttattgaggaattgaaaaacagacagac

SEQ ID NO: 296437 - DNA, 98 bp, Homo sapiens
acctgcagaaggtctctggagacatcttcagcaggatcacagaagaactgcagcttcctggggagcagtttcacctccacaggcatcgcttcatactc

SEQ ID NO: 296438 - DNA, 50 bp, Homo sapiens
ccgagtgtcctcagtatatcaggtgggccgaggccctgaacgtgttccag

SEQ ID NO: 296439 - DNA, 100 bp, Homo sapiens
cctgaatctccatccgcacccggctgtgctgactccttagttgctgagatgagcttgtaaaaagcagctctgttgatcccagcagcggccagggcctccg

SEQ ID NO: 296440 - DNA, 74 bp, Homo sapiens
gtgggaacccaggccccgccgaggcggccagtgtctccagaacgctatagctatggcacctccagctcttcaaa

SEQ ID NO: 296441 - DNA, 137 bp, Homo sapiens
cttctcaataccccggcccctctgccgacctcttgcaatccaagtgacatgagccatgggtacgtgacagtaaagtttaaggaagaaatctctaaacgttttaaatcacatactgaccaacttgtgttgatatttgc

SEQ ID NO: 296442 - DNA, 74 bp, Homo sapiens
cagatgacagcatcacgcgggatgacaacattgcagcatttaaaagccctcttctgggtcacgctagaatcaga

SEQ ID NO: 296443 - DNA, 76 bp, Homo sapiens
ccgtcatgggcgcctcggccgccatggtcttcagcggagaactacgatgacccgcacaaaacccctgcctccccag

SEQ ID NO: 296444 - DNA, 96 bp, Homo sapiens
gagcggcgcagccggagtggggccgtgagaggaaccagactagcatttctcagtgggttccagtatgcagccgattgatacctgtgtctcctaccc

SEQ ID NO: 296445 - DNA, 75 bp, Homo sapiens
tgaaggggataacttctatgtgattgatcaaggagagacggatgattccagacagcattggaaaagacatagaaa

SEQ ID NO: 296446 - DNA, 83 bp, Homo sapiens
attacccctatctcagcagtgatggggagagccatagcgacaatgcagatcttcgtgaagactctgactggtaagaccatcac

SEQ ID NO: 296447 - DNA, 90 bp, Homo sapiens
ccaaaacaaaaaatggcatcacctgtcaaaaatggagttccacttctccccgcagacctagtgacaaagcataaatcatggacaccagag

SEQ ID NO: 296448 - DNA, 75 bp, Homo sapiens
atgtgactcagagaaaggagacctcattccaagttccaggattaattctggattcttctctaatacttgatgttc

SEQ ID NO: 296449 - DNA, 74 bp, Homo sapiens
aaataagaagaagcaactgtacaaaccatggatgaattgtaaaagcaacatcagcttgaccagtataaaattac

SEQ ID NO: 296450 - DNA, 90 bp, Homo sapiens
ctgaggaggggccccagcagcccccgaaggccctatcaggacatggagtatgaaagacggaccctgatgctcccataagacagaaaatgc

SEQ ID NO: 296451 - DNA, 75 bp, Homo sapiens
gaactcgcgcaggtcctgcccccagatactctgcccaaccgcacggtcaccctattacgtgtgaaaatgaacttg

SEQ ID NO: 296452 - DNA, 100 bp, Homo sapiens
atgaaaggaactattttgttcgtgataaactggatcctgatatggctctttgccgaaatgctagagaaatgggtgtcaaattgagaaccaggtagatccc

SEQ ID NO: 296453 - DNA, 98 bp, Homo sapiens
gaccattaatggacaaaaacatgagtcaatatgtattgtggcattcaaatcctagcactctgggagagttcggaggaaatcatgtcttgtgaaggaag

SEQ ID NO: 296454 - DNA, 50 bp, Homo sapiens
gtgacaaatgttgagtacattatcaggtacaggtttgcagattccgccag

SEQ ID NO: 296455 - DNA, 80 bp, Homo sapiens
ataacgagcaggcttggaaggagattttgaagtgggaagcccttcatgctgcatggggacccagagcctgctcttgggaa

SEQ ID NO: 296456 - DNA, 75 bp, Homo sapiens
ctggccaaagcctgcccagacggctcacctgtgcgggatggaacaaaaggcgttggagaccagggccagccctgg

SEQ ID NO: 296457 - DNA, 96 bp, Homo sapiens
ttaatacagcaagaaagaccatcaagtttaccacgagcagctgatgcagctgtacagtgcgcgccagcggcggcggctgaaccggggcctgcggcg

SEQ ID NO: 296458 - DNA, 80 bp, Homo sapiens
ctcccaccctcagcccctgccactagtgagatgaccacgatgtatgtccctgggaagctgcatgatgtggaacacgtgct

SEQ ID NO: 296459 - DNA, 139 bp, Homo sapiens
ctgcacttcgcattttggcattgacatttaattttagggtcctttatatagaagggagaatgcctgaaaacttcatgcctcctgttcccatcacatcaccaatcatgaacccgttgggtgacccccagtcacaaatgct

SEQ ID NO: 296460 - DNA, 82 bp, Homo sapiens
agtactcgggcaagaccaccttcgtcaacgtgatcgcggtctattctggataagcaggttttgtgaagacatttattctttc

SEQ ID NO: 296461 - DNA, 140 bp, Homo sapiens
cacctcttcggatatcgtccttatgacaagaacattagcccccgggagaatatcctggtttcacttggagctgtggactcagcccgcctgcacccaggtgaaatatacagccttgttgctcacacaaagcctgtttggtg

SEQ ID NO: 296462 - DNA, 78 bp, Homo sapiens
cctccaaaaccagtcatgaccactagacccacagctgttaaagcaacagctgatcttgcatctttaatggataaaaca

SEQ ID NO: 296463 - DNA, 74 bp, Homo sapiens
tcagagacatcaaaacctggaccttctggattacaggccaaattagcaagtagttagaaacaaacctgtggcaa

SEQ ID NO: 296464 - DNA, 100 bp, Homo sapiens
gtccctgaaagcattaccgggttcgctaggctcacaggtctctaattaacagaagatggcaaagcccagccacagcagctatgtccttcagcagctaaac

SEQ ID NO: 296465 - DNA, 83 bp, Homo sapiens
tgtgaagctcaccgagacggcgatccgggcgctcgagacttaccagagccacaaggagtgtacacatttctgtccagcaccct

SEQ ID NO: 296466 - DNA, 100 bp, Homo sapiens
gtaatagatgtctgacaaactaaagaaagacttgtgttacacttaattcagtgcacaaatgagatgaatgtgaacatcccacagttggcagacagtttat

SEQ ID NO: 296467 - DNA, 80 bp, Homo sapiens
cctcaactttctgggcgttcatgatcctggccagcctgctcatcgcctactgcagttttaaaatcaaagatgggaaaatc

SEQ ID NO: 296468 - DNA, 80 bp, Homo sapiens
aattctttggtttctttttttgatgcatctctacctggaactttgccggtatcaatataagtgatgaggattttcttttg

SEQ ID NO: 296469 - DNA, 101 bp, Homo sapiens
tgtcctcaaatacgtatattactcttccatggatgccccttgataacagagagagatcatcattgcctgaatttagctttgtgactgcaagagcaagacca

SEQ ID NO: 296470 - DNA, 75 bp, Homo sapiens
aacgaatcatccacgcacctgcagctctgctgagagagtgcaagccgtggggagagattaaacagattctagaaa

SEQ ID NO: 296471 - DNA, 114 bp, Homo sapiens
gggagcaagaggtgtcggaggtctcatctttgaactactgccggagcttctgccagcaaaatgatgcttcaacacccaggccaggtctctgcctcggaagtgagtgcttctgcc

SEQ ID NO: 296472 - DNA, 96 bp, Homo sapiens
aaaagaagacggtgggatcaggagatgatgtaaagcaattatagatcagtttggtcagagaataatctctgagcatttcctcgtggaggacagtta

SEQ ID NO: 296473 - DNA, 98 bp, Homo sapiens
agttcttgcctctccttccaaacctcctgcaagaccacagcaccgggaagtccagtcagcggcagatggtgttcggggtggtcaccgccattgacttg

SEQ ID NO: 296474 - DNA, 75 bp, Homo sapiens
tggagcctcagttggaagcagccgatccagcctgcggagcctgtggggcaggaatgctttgtgtggaaagcttca

SEQ ID NO: 296475 - DNA, 82 bp, Homo sapiens
tctggtgtaccaggcgaagctggccgagcaggctgagcgatacgacggccagcatccttcagaaaaagcatccccgaggagg

SEQ ID NO: 296476 - DNA, 75 bp, Homo sapiens
ctcaccctgacagatacggagcacgaaaacaagtccgacagtgagaatgttccgaaagacccgaaaccccagtgg

SEQ ID NO: 296477 - DNA, 75 bp, Homo sapiens
cgaggatttgtcatcagctggggacattactgagaccttctctgggggctacgtgcacgtgctgaagggtgtgct

SEQ ID NO: 296478 - DNA, 75 bp, Homo sapiens
aacttcgaaaggcgatgttggaaaaagacggacggagtttaagagagctgtgaaagtagcaacaggacaagaact

SEQ ID NO: 296479 - DNA, 50 bp, Homo sapiens
tgtccttcatccgcctgctgctgcatgcgtggagtggcagtgctaacggc

SEQ ID NO: 296480 - DNA, 83 bp, Homo sapiens
caacgcctggctcggagcagcagcctctgagaaggtagaagatagcaccatgccgattcgtcgaactgtgaattctacccggg

SEQ ID NO: 296481 - DNA, 90 bp, Homo sapiens
ttatcgacgtagttaaagcccactagcctaaagccgggcggactgcgtttggaaattttagcattcaggtgccaggaatgcagatgggac

SEQ ID NO: 296482 - DNA, 99 bp, Homo sapiens
cccattctggatggcacccgaggtcatcaaacagtcggcctatgactcgaagaaatcaacgaccgggagcagaagttgcatgcccttaaggaggtatta

SEQ ID NO: 296483 - DNA, 83 bp, Homo sapiens
gatgtttacagtgcagtcttatcgaaggatgtgcatgaaggacagcctcttctcaatgatgagtgatgtgtctgcaggaggag

SEQ ID NO: 296484 - DNA, 50 bp, Homo sapiens
atgctggaactgggttttagcaagggagcatttagtgggtggaaggttat

SEQ ID NO: 296485 - DNA, 99 bp, Homo sapiens
aaggatgactgaaaacatcctggaatcaaatagtgttacggcaacaagctaatgggaatgacagcaagaaatttaaacgagatagacctccctgttcgc

SEQ ID NO: 296486 - DNA, 100 bp, Homo sapiens
gtatttacctacggagtcagattcctgaaaaaggttctccccatgacaccacctgaacgtctcttcctcccaagggtgtgtggcaccaccctacacctcc

SEQ ID NO: 296487 - DNA, 75 bp, Homo sapiens
taatccacagcaagctcccttatattccacctggaaggccgctgtggtggaaggatgtttgactgcagagatgtg

SEQ ID NO: 296488 - DNA, 74 bp, Homo sapiens
caactctttgatgtactactataatgggaaagcgctaatgggaatgacagcaagaaatttaaacgagatagacc

SEQ ID NO: 296489 - DNA, 74 bp, Homo sapiens
tcggatcgcctggagaggcactcggacctgtgttatagttttgccgctggactcttccctcccttcccccaccc

SEQ ID NO: 296490 - DNA, 83 bp, Homo sapiens
cttctttgacgtccagaagaccaagtacctgcagatcctgacctctctgatgagatggatcgaacagtgcaaccctgaaactc

SEQ ID NO: 296491 - DNA, 100 bp, Homo sapiens
aagagtggcatcaaatgtcagccctggagttccatgataccacacgaacacaggcccggaggctgtttgatgtcctgcacgagcccttcttgaaagtacc

SEQ ID NO: 296492 - DNA, 100 bp, Homo sapiens
atgcgccggaacaccattcttcgccaggccaggaatattgatgactacagcatggttcgatttttaccttacgatcagtcagatgaagaaagcatgaaca

SEQ ID NO: 296493 - DNA, 74 bp, Homo sapiens
atcgattgttggtgccagttggaaagaaccttttccagtttgaagatgccgcatttggattggatgaattccaa

SEQ ID NO: 296494 - DNA, 49 bp, Homo sapiens
ccccagacctgtcggcgaaagggcaatttcagaactggtcagcccagac

SEQ ID NO: 296495 - DNA, 104 bp, Homo sapiens
gggaacatgacgcaggtgcaggtgtctcttctcgccctggcggggaagatcaggatcctcatgaccagccaaagagaagaagaattaggaagcataaatcaaag

SEQ ID NO: 296496 - DNA, 98 bp, Homo sapiens
cctctaactggtgtgatggcgtgtcacactgccccggcggggaggacgagaatcggtgtgttttgaatcaggaaattgaagcgttcagtctgtccgaa

SEQ ID NO: 296497 - DNA, 99 bp, Homo sapiens
ctcgttccagttccagagaacgttcgagatctcgtgggtcgaaatcaagatactattcgttacttgtccttgcatgacaacaaatacatcagatacttt

SEQ ID NO: 296498 - DNA, 75 bp, Homo sapiens
cccgagaaaccgcagcactacacttcccagtgacctgacagcagaggagcgtcaagaactggagaacatccgacg

SEQ ID NO: 296499 - DNA, 50 bp, Homo sapiens
ctacagatgtagcctcccgtgggctagggcactgtccggggagccacggg

SEQ ID NO: 296500 - DNA, 98 bp, Homo sapiens
gctgatctatttaccaagtggaaggccgattcaacagtcattgagaagtggatggatggcgtgaaagacttcttaatgaaacagcaggctgcccaagg

SEQ ID NO: 296501 - DNA, 105 bp, Homo sapiens
aggaggaaccccttccaccattggctctggtaccctttacagaagaagaacagctcaaagaaattctcgaatgttctcacctattaacagttattaaaatggaag

SEQ ID NO: 296502 - DNA, 99 bp, Homo sapiens
acactgcagaaaggctatctgaagaaaagtagaaggaaaaacagaacgttgcaaactctggaaaaaaacttggtcaagctacaacttcaagcagaagag

SEQ ID NO: 296503 - DNA, 131 bp, Homo sapiens
caaccattgacgccatgtcgggttattcgagtgaccgagaccgcggccgggaccgaggagagaagaagaaggaggttcctgctgtgccagaaacccttaagaaaaagcgaaggaatttcgcagagctgaag

SEQ ID NO: 296504 - DNA, 98 bp, Homo sapiens
cggcgaggccctcatgtaccacacgactttgaataatgagatgagtacagatgaagacaatgaatatgcagaagaaaaggatagctacatctgtgcag

SEQ ID NO: 296505 - DNA, 83 bp, Homo sapiens
ctgggccggagcaggcgaggtggccggagccgtgtggaccaggaggagcgctgtgctcttacagcctgttccaagtgtggctt

SEQ ID NO: 296506 - DNA, 51 bp, Homo sapiens
gagagcgcgaatatcgtcatcgttagaaggagagcgggaagctatccagaa

SEQ ID NO: 296507 - DNA, 50 bp, Homo sapiens
acccggtgcagctagaagtccatatcgaattcttccatctctatgacaac

SEQ ID NO: 296508 - DNA, 96 bp, Homo sapiens
ctgggcggccggccgacccttcctgtcgctgacggcgactgcgggaggccaggtaaggagagctgctttgagagaattgtgtcaaggtttggaaag

SEQ ID NO: 296509 - DNA, 100 bp, Homo sapiens
agggaccccgcggcccgccccggtgctcgtgatggggctgatcttcgccaaactgtggagcctcttctgtaaccaaggggataaaaacattcagatggca

SEQ ID NO: 296510 - DNA, 50 bp, Homo sapiens
aaggattccaagtaactcttatttggaagggaggcaataataagttaata

SEQ ID NO: 296511 - DNA, 75 bp, Homo sapiens
aatgagaaagtgacccagtcagacctgtttggtgcacctcgatttggaggaagtagggcagggcccttatctgga

SEQ ID NO: 296512 - DNA, 74 bp, Homo sapiens
tcatgcccctcctggagaatttaatgaggttttcaatggtcggtgcccactttctggaggcagtggtgaggaag

SEQ ID NO: 296513 - DNA, 98 bp, Homo sapiens
cctcccaagtggctgggattacaggccttcctggatgctctgcagaaccaggctgaggccagcagcaagatcatcggccagtttggagtgggtttcta

SEQ ID NO: 296514 - DNA, 75 bp, Homo sapiens
acctctacctcctgcgaggcctcccgggctccgggaaaactacactggccagaaatgagccgtcagactgctaca

SEQ ID NO: 296515 - DNA, 48 bp, Homo sapiens
ggagatttcttctataaaccaaaccagttggaccctgggcgtttttta

SEQ ID NO: 296516 - DNA, 100 bp, Homo sapiens
cccactccgcggcgttcggggaaatggctgcgagaccctagaggcctgcggcctgcggttggtgttcgaggaagagacattgttgttcttggtgtggaga

SEQ ID NO: 296517 - DNA, 82 bp, Homo sapiens
gagaacgcctccagcggggatgacacagaagagttgtctgctggttctcagcttgaagaagattctgcagtccttattgatc

SEQ ID NO: 296518 - DNA, 100 bp, Homo sapiens
gcctgcggcagccggtaccagcagccccccgaatccaagcccaacttcacccctctcgccatcttggcccatgttctcggcgccatccagccctatgccc

SEQ ID NO: 296519 - DNA, 100 bp, Homo sapiens
ctgagaccgtgcacatcttcaaactcgagactgtgaaagaaaacactgactcatatattgaagtccttgatggttcccgtgtccaccctgagacttatga

SEQ ID NO: 296520 - DNA, 87 bp, Homo sapiens
ttgaccatgagcagtcccgacgcagcaaaggcaaacttggaaagagcaagatcggcagccctaaactatgaaacccacgtagtcgaa

SEQ ID NO: 296521 - DNA, 74 bp, Homo sapiens
gccccacagagaaagatgccactggatgacagccctagactggagctggttacagacggaagaagaagagcaca

SEQ ID NO: 296522 - DNA, 75 bp, Homo sapiens
atgaagtgttagacatcgagatcaatgaacctttagatgaatttacacttggatttacactgggcaacgtggttg

SEQ ID NO: 296523 - DNA, 100 bp, Homo sapiens
gagcgcatcagtcatagttatgcagaaattgaacagaccattacactggatcatagtgaagggtgaagcagctgaccgatgaggaggagtgttgtatctg

SEQ ID NO: 296524 - DNA, 87 bp, Homo sapiens
gggggctcctcctcgccctcttgccccccggagccgcgagcacccaaggtgaagtgtccggacgcaccctcatcgacattggttcag

SEQ ID NO: 296525 - DNA, 96 bp, Homo sapiens
gctttggattttatgtgctacagtctgcggaacggagcagtatttcaatgtggagaaccaggaagacagcgcttccagcaacccgtttgcactccc

SEQ ID NO: 296526 - DNA, 97 bp, Homo sapiens
tgggagaaggtgcctatggagagtatccaaaatgttgaaagattatgactggattaatgcagagagacacctctttggccaacccaatagtgcctat

SEQ ID NO: 296527 - DNA, 75 bp, Homo sapiens
gcgctttatcaagattatcgagctcctgtccaaatatgacccccagaaggaggcagagctccgcacctggatcga

SEQ ID NO: 296528 - DNA, 98 bp, Homo sapiens
caattcaccagggaccagatgctgctgttaccggccatataagaattcgtgcaaagagccaggctctttgtcccttaagagatgtgccttctcacagt

SEQ ID NO: 296529 - DNA, 86 bp, Homo sapiens
aagccgctggcagccgcggatctcaccgccgctcaggccggtggctgctggcagcggaatcccccagatcaagtgcttcctcaacg

SEQ ID NO: 296530 - DNA, 83 bp, Homo sapiens
ctcacaatgaggctccctgctcagctcctggggctgctaatgctctgggtctctgatgtcaagccctccaacatcctagtcaa

SEQ ID NO: 296531 - DNA, 96 bp, Homo sapiens
gggcaagccagggaagcggccagggacggccgcagaaggcttcttcaccctggacgggcagcccaggagcatgtcctgcccctccacgggtctgac

SEQ ID NO: 296532 - DNA, 125 bp, Homo sapiens
gcgaatgctgctgcagagctcggaggggcgctgtgtgtacatcacccccatggaggccctggcagagcagttaagtgggcagaccaacatccacctcagcaaaaacttcttcctgacgaatcgcg

SEQ ID NO: 296533 - DNA, 96 bp, Homo sapiens
cagcagagactgatctttgctggcaagcagctggaagatggacgtactttgtctgactacaatattcaaaaggccatccgggatggtgtcattgag

SEQ ID NO: 296534 - DNA, 90 bp, Homo sapiens
gaggtcagcaacagggacatcgtggagacggtgctcaacctgaaataagcgggttttgaaaacaaaaaaaagaaggagtggaagaggggg

SEQ ID NO: 296535 - DNA, 75 bp, Homo sapiens
ggacagccccgaagacgccgacctcttccactccgaggaaatcaagccccaacaagcgaggcccacccacgtaca

SEQ ID NO: 296536 - DNA, 83 bp, Homo sapiens
caagatggcggacaaaacgccaggcggatctcagaaggccagttcaaagctgtccctttccccccaacacatcgcttgacatc

SEQ ID NO: 296537 - DNA, 98 bp, Homo sapiens
caagagaaatgataaaacatttagaacgatgtgaacatcgaatcatggaatcccttgcatggctctcagaacttaaaaggagtctagaaaatccagca

SEQ ID NO: 296538 - DNA, 100 bp, Homo sapiens
aacctatgttgccctgagttacataaatagatgtattgctgtccttgaatattagcccatttgaaaacgcctgggaagttcagccatcagtatgtccaag

SEQ ID NO: 296539 - DNA, 98 bp, Homo sapiens
gcgcggaggctgagggacccgccgcggcgctgtcgccggagagggagggcaccgctgtcgtcgccctgggcgctgcctatggcacagccaagagcggt

SEQ ID NO: 296540 - DNA, 83 bp, Homo sapiens
ccagcttttcggaacagcagagacacagagggcagtcatgagtttggtgccctggttgtcagatgttggaaagcagtaggacg

SEQ ID NO: 296541 - DNA, 103 bp, Homo sapiens
tcctaagtccctcggtcttgggttcccggagaggtctacaggtccaactgctgccactggcagtaatcgaagacttcagcagacacaaaatcaagtagatgag

SEQ ID NO: 296542 - DNA, 100 bp, Homo sapiens
gcggtgtggtttactccatgcagttgtcaggaggcttgatccagatggaagctgtgaaagtgaaaacattaaagtctttgacggaacctccagcaatggg

SEQ ID NO: 296543 - DNA, 76 bp, Homo sapiens
cggagcgcggcgccgagcgcagggatacggcgcccagcgggcatgtagagcgcatgaagtacaggacaataaagct

SEQ ID NO: 296544 - DNA, 100 bp, Homo sapiens
tagaaggacaaatgaacttcaatgcagattctagccaacataaaggtcttcatcctccaggtccacctttagcaagacctattctcccccgagaacgagg

SEQ ID NO: 296545 - DNA, 100 bp, Homo sapiens
gtcccccgggggcccgtactgcacatcgtggtggtcggatttcaccacaagaagggctgccagatgagctttgatccaaaccttctccacaacaatggac

SEQ ID NO: 296546 - DNA, 75 bp, Homo sapiens
aatgtttcagagaaagttacgtggagcgtgggcgtttcgcagactcctaaggtcctgggaactccaacaagggag

SEQ ID NO: 296547 - DNA, 90 bp, Homo sapiens
caacaagcagcctattatgcccagacaagtccccagggaatgccacagcatcctccagcacctcagggtttttaatgaccacaacaagca

SEQ ID NO: 296548 - DNA, 97 bp, Homo sapiens
gtgcagccactcggccctgcgccgcgacaagtacgtggccgagttcctcgagtgggctccaccgggggacggctacgtgcaggcggacgcccggggc

SEQ ID NO: 296549 - DNA, 100 bp, Homo sapiens
cttgtacagagatgtgatgttggagaactatagcaatctggttttcttgggtgatttgaagatattaaagctagaaattggaactagaaaatcaaaagaa

SEQ ID NO: 296550 - DNA, 75 bp, Homo sapiens
cgacaggctcaggttggcagttggaaggcggcttacagggagaacacagttggcctccaccgtttctgccccaca

SEQ ID NO: 296551 - DNA, 98 bp, Homo sapiens
ggaagctgagctgcagagttagccggcatctgacagaaaaattgccaccatggcaactgcaccatacaactactcttacatctttaaatatattatta

SEQ ID NO: 296552 - DNA, 100 bp, Homo sapiens
aaatgagcagctgtcctcatgtctctccagcaggatcctcctttgtatttggaactggaccctcagcaccatctgccagtccagcatttggtgctaacca

SEQ ID NO: 296553 - DNA, 98 bp, Homo sapiens
acgggggcggccagaacagagaactaccgaggcgaaggagcgagaacccgagcagcgccatgagcaacactaccgtcgtccccagcactgcaggtccg

SEQ ID NO: 296554 - DNA, 98 bp, Homo sapiens
ttcgggtctcacccttcggcctccgcacttctccatatggcagcagcctggacctcagcactggcaggtgtgattcccttcagtacggcggcaccgtg

SEQ ID NO: 296555 - DNA, 83 bp, Homo sapiens
ttataatatgctttctgatgatgcccgtctcttcacagaggaatctgtcttgaactatcgtttcgatcctctcggcattgttg

SEQ ID NO: 296556 - DNA, 50 bp, Homo sapiens
tgggaaccaaacttggagagctgccaagaagcttgagagaagaaaaattt

SEQ ID NO: 296557 - DNA, 100 bp, Homo sapiens
cagctcagcttggagatgccagaaaccatgtgaaaaggcaccttgggatgagggaatacaagtgtcatgtctgtggtccaagtggtaagaagttcagaag

SEQ ID NO: 296558 - DNA, 51 bp, Homo sapiens
cgctgctcaagttccagatttgggtggcattgtgtgtcccagagtgccgga

SEQ ID NO: 296559 - DNA, 50 bp, Homo sapiens
tgaggcagagctccagtgaacagtgcagatatggaatgtgcagatgtccc

SEQ ID NO: 296560 - DNA, 76 bp, Homo sapiens
cagacgcctcacttaggacaaatctcccttgagtttagaaatctggctgagaaataccaaacagtgattgccgaca

SEQ ID NO: 296561 - DNA, 100 bp, Homo sapiens
ttccctcaacagagaggttgagcaagcctcattgctacgatttcagagtaccctggtaatagctgagcatgcaaatgattccctagcacccattacttta

SEQ ID NO: 296562 - DNA, 85 bp, Homo sapiens
agtgcctcctttctcatcaggaaaccacacactgagagcctagagttgcaggtgccttatgcccgctcagaggcccacctcacag

SEQ ID NO: 296563 - DNA, 82 bp, Homo sapiens
tctgctgggccaagcactcttagggccgaggggcactgcagctgacaagagagacaagaggagcagcagcggcaccgcccct

SEQ ID NO: 296564 - DNA, 74 bp, Homo sapiens
gtttgatgacattggagatgatgatgaagatattgatgacgtatatgatgatggaaagtatgtgtatgtagtaa

SEQ ID NO: 296565 - DNA, 83 bp, Homo sapiens
ctggatttccaaggaagaatttcctctgaagcaccggtctggccgtgggcctgggcttcggggcactggcagaggtcgccaag

SEQ ID NO: 296566 - DNA, 74 bp, Homo sapiens
cggctgaggcggcgcggcagcggagggacggcagtctcgcgcggaggaacatatgcagcagaaaaaagaggagg

SEQ ID NO: 296567 - DNA, 100 bp, Homo sapiens
tgtgaccagaacggcacggccatctgtgtgtctgggcagtgcaaggacagagcgggatgccaccagcttgtccaaagggaagttccaggagctcctggtg

SEQ ID NO: 296568 - DNA, 100 bp, Homo sapiens
gttggagaactacagaaacctcgtctccctggttgctgatcccacaccctttcatattcaagctgaagtgacgatgaaaacaaatttctttggtacccga

SEQ ID NO: 296569 - DNA, 85 bp, Homo sapiens
ggcggcgccatggcagggcttgcagtattgcctaagtgtaatcttgaacatgggcggtgctgtgagtgctggtgaagacaatgat

SEQ ID NO: 296570 - DNA, 90 bp, Homo sapiens
aagaccaagtgggcaagtttgattggacggcccccaagttacatgaactacctgctagactcacaccccagcaaaaatattgatgtcccc

SEQ ID NO: 296571 - DNA, 83 bp, Homo sapiens
gcatataatcgaatagttgatgccctaaatgaattcagagttttggaggctggaaaggcaaatgttattttaccaaaaagttc

SEQ ID NO: 296572 - DNA, 100 bp, Homo sapiens
gggcgtggctgttccagcatctaacaatcttagcaaagcaatgtctcaagatggtgcttctcagttccaagaagtcattcggcaagagctagaattatct

SEQ ID NO: 296573 - DNA, 98 bp, Homo sapiens
tgtggaggctgaggaggcggcggcggagatctggtgagcaagaagaacccatcaggtgattgtcaggcctctgagcccaagctaagccatcatatgcc

SEQ ID NO: 296574 - DNA, 76 bp, Homo sapiens
atcccaatgctgaagtaagattgtcttggaaatactaagttggcacttttccagccattaactccaggctctcgag

SEQ ID NO: 296575 - DNA, 103 bp, Homo sapiens
cgagcacagagcctcgcctttgccgatccgccgcccgtccacacccgccgccagggaaagcaggcaggatgggagagtcgccgatagaaccacctcttccctg

SEQ ID NO: 296576 - DNA, 101 bp, Homo sapiens
cctactcagatatggctgctggatcagaggagctctcttttgggcgtggctccacggcacctgtaggaggcggggctttccctaccatcgttgagagagag

SEQ ID NO: 296577 - DNA, 88 bp, Homo sapiens
gaagcagtcacgaccattgctgcatattggcatgggacccagctggaagaagaaagatctgtgctcaataatcagttgttagaaatga

SEQ ID NO: 296578 - DNA, 100 bp, Homo sapiens
cttcggcattggccgccgcgatgtcagctcagtgctgtgcgggccagagttcaagctgaagaagatgtggaaaagtcccaatggaactatccggaacatc

SEQ ID NO: 296579 - DNA, 100 bp, Homo sapiens
cctgagcctgaaggttgtgccgcgggtgggcaacgggaccctgtgccccaactctacttccctctgctccttcccaggaacacaatgcacaacatccgtg

SEQ ID NO: 296580 - DNA, 80 bp, Homo sapiens
gggtgagagatgtgatcactggtttcgtggcctgaccaaggacctccaaggtggcgacatgtctaagaatgtgagccagt

SEQ ID NO: 296581 - DNA, 100 bp, Homo sapiens
ttgcctggacgctgcacagcggaatctatatagggatgtgatgttagagaactacagaaacctgatcttccttggaagtgctcctgtcctctcagctgtg

SEQ ID NO: 296582 - DNA, 80 bp, Homo sapiens
tgctggcggaggacgagctccgggatgctgtactccttgtctttgcaaacaaacagattcttctgatgtagagcgactgg

SEQ ID NO: 296583 - DNA, 100 bp, Homo sapiens
cctcgaccgtgacaccagtccccgggcaggagaagggctcggccctggagggcagggccgacaccacaacgggcagggcagcagaagaagcctttgtaaa

SEQ ID NO: 296584 - DNA, 75 bp, Homo sapiens
ggtgcagcttcaagcttaggaccacccaccatgcctatccagagatggggttttgccatgttgcccagactggtc

SEQ ID NO: 296585 - DNA, 83 bp, Homo sapiens
gaaattctgtgtggcttcaagagactgatcaaattgtgagaggaaaacagcctacccgaatcattgcgatgatgagtccagag

SEQ ID NO: 296586 - DNA, 91 bp, Homo sapiens
atcaaaaggagcggggtcgacggtccccactttcccctgagcctcagcacctgcttgtttggaagctgcagaaccttggcctgaaaatgct

SEQ ID NO: 296587 - DNA, 82 bp, Homo sapiens
gcgcggcgctctggctctggctgtgcgcgctggcgctgagcctgcagccggccctgccgaagtccattggaatattaagccc

SEQ ID NO: 296588 - DNA, 100 bp, Homo sapiens
ccagaatgtggctctggccatagcagggaataatttcaatttgaaaacaagtggaatagtgctgtcttccttggaccagttacagaagtggatccgcggt

SEQ ID NO: 296589 - DNA, 90 bp, Homo sapiens
cgcggcgacctccggcggcgggaggcccggcctgggcaggatgccccagtgaagttgtgtgactttggatttgccaagattgaccaaggt

SEQ ID NO: 296590 - DNA, 74 bp, Homo sapiens
gtctctctgctgcggcgcggggaccgctgtgctctcggctccacataaacacggtttccttgaaggccgccatg

SEQ ID NO: 296591 - DNA, 90 bp, Homo sapiens
agcagagccgcccagccctgccagctgcgccgggacgctggggcgaatggagtgagccgctgtggtgtcgcggcggcgcctacctagtgg

SEQ ID NO: 296592 - DNA, 100 bp, Homo sapiens
ggaaatttggtgagcggcctccacctaaacgacttactaggggatggagtgttagatctctctacaaagaaaaccagcataaaatctgaagagtcatcca

SEQ ID NO: 296593 - DNA, 51 bp, Homo sapiens
ttttcatctgcactgccaagactgagtggatgaagatataacacttcagat

SEQ ID NO: 296594 - DNA, 75 bp, Homo sapiens
aaccgccagatcaacctggagctctacgcctcctacgtttacctgtccatgatacttggatgatattgatgatga

SEQ ID NO: 296595 - DNA, 76 bp, Homo sapiens
cccagggggcagccgcctcatcggccaccacggcgctgaggacgccacggacctggcctgggccgtcagctactac

SEQ ID NO: 296596 - DNA, 82 bp, Homo sapiens
tggccatggggctccgaatcaagttccccacggtggtggcagggtttgacctggacagtcattttgtttactcattcagccc

SEQ ID NO: 296597 - DNA, 80 bp, Homo sapiens
ccgagaggccgtgcgggacgcgggcgccaggaccggccgaacgcagaggtgtggccgacgacgatgccctcgctgaggag

SEQ ID NO: 296598 - DNA, 75 bp, Homo sapiens
ttatccttttctgggtgctatgggtgatcattccaagaatatttggagttcttacaacatggcagacattgacaa

SEQ ID NO: 296599 - DNA, 90 bp, Homo sapiens
ctaggcgacgagacccagtggctagagatggacagagacgtatgtgcgttggtctcctaagggcacctacctggctacctttcatcaaag

SEQ ID NO: 296600 - DNA, 97 bp, Homo sapiens
aagtgaaggtgatggagctgaaattgcagaaaaatttgttttcttcattggcagtaaaaatgggcacccacatgcaggatctccaggaggtgaccca

SEQ ID NO: 296601 - DNA, 100 bp, Homo sapiens
aagcaccatgacgtccatccatttcgtggttcacccgctgccgggcaccgaggaccagctcaatgacaggcgaagctgctctcaggggagaacccagaat

SEQ ID NO: 296602 - DNA, 138 bp, Homo sapiens
gttcgttcccgggtcccgcgcgagctttcccgggataagtagctttagcgatcgggagacagccgggcgctgcaaggattatttatgaggatggcctgtgcaaaaagacacccagagatttcatgctgttgattcaca

SEQ ID NO: 296603 - DNA, 96 bp, Homo sapiens
gcagatcttcaacaagaggacccaggagaaattcgccctcaaatattctaccttgtaaatactgttatttgtatatactgtaaatgatgacatcgg

SEQ ID NO: 296604 - DNA, 75 bp, Homo sapiens
ctggtgtctgagtggatggggacctgcctgctggccatcgaagacggcaatttggaggaaatggaagaggaagta

SEQ ID NO: 296605 - DNA, 96 bp, Homo sapiens
ccaccattcccattgctccagatatgagaggacagatattacaccaccatattgcctcagtagagaaacttgctttgactacttctggatgccccc

SEQ ID NO: 296606 - DNA, 100 bp, Homo sapiens
ccacaggtatgggctctacgtgtgcttcttgggcgtcgttgtcaccatcgtctccgccttccagttcggagagattcagaatggacagtttagaagaacc

SEQ ID NO: 296607 - DNA, 82 bp, Homo sapiens
cgccgtcatgggcgcctcggccgccatggtcttcagcgtgcctccggagccagcgtggtggccatagacaacaagatcgaac

SEQ ID NO: 296608 - DNA, 83 bp, Homo sapiens
gtgcgggaagagaagatcatcgagcatttcaaacggtgaaatgacaatggatgctctgttggctcgattgaaacttctgaatc

SEQ ID NO: 296609 - DNA, 100 bp, Homo sapiens
agagaaaaccagcgtggttctgagcacacggttaatttcaaagcttttcccatggaggcatttattaatacagcaaaagaaatttatgaaaaaattcaag

SEQ ID NO: 296610 - DNA, 100 bp, Homo sapiens
accgtatgcagtcccccaggatacagggtcaaaggagagcacaaccatcgcagttggaagcccatggggcagggcttactgaagaaacatgaagcttttg

SEQ ID NO: 296611 - DNA, 83 bp, Homo sapiens
cggtgatccagctcaccaccaagacgcaggaaaacgaagccccctcctgtattgacagctgggaattgtggagtccaccgtcc

SEQ ID NO: 296612 - DNA, 100 bp, Homo sapiens
accggtggatcctgtccttcatgcagtctctcattggcttctttgagactgaaatggcaggaaatcacattctgcctgatgaagatctggcttcctttca

SEQ ID NO: 296613 - DNA, 100 bp, Homo sapiens
accaggagttgttgtccatgggccgccgcgaggccaagctggacacggagaacaagcggctgcgggccgaactgcaggttcactggtgggaggctgagcc

SEQ ID NO: 296614 - DNA, 75 bp, Homo sapiens
actgagaaccaagtcaacccggccacctttgggaagaagctccaccatgaggcgaggtggatggaggaagcgagc

SEQ ID NO: 296615 - DNA, 75 bp, Homo sapiens
caaggatgcgaattgtgaatcgcttctccaaacacttctgcagaaagccgtcattacacctgattttgaaaaaaa

SEQ ID NO: 296616 - DNA, 75 bp, Homo sapiens
gctgttagaagaattcatgctcatccgggtcctctcagggtgcgccatcattgtccgaggtcagcctcgtggtgg

SEQ ID NO: 296617 - DNA, 100 bp, Homo sapiens
ctgggcctcggcttttggtggggagataaaatccattgctgctaagtactccggttcccagcttctgcaaaaggttctgggttgacaaatatcaagacgg

SEQ ID NO: 296618 - DNA, 82 bp, Homo sapiens
tgaagatgccgtccctgcagcccgtggtgatgtgcgtcatgaagcacctgcccaaggtcccgttcaagaagttcttccagtt

SEQ ID NO: 296619 - DNA, 89 bp, Homo sapiens
cggacacctatgaagaccagcagtggagggtgtgtccgcagccggccaggtggtatccctgaaggtgtggctgattgacgacattctag

SEQ ID NO: 296620 - DNA, 82 bp, Homo sapiens
cataggcggaccatgataatttccccagagcgtcttgatccttttgcagatggatcaaaatacttgctggatggtggactca

SEQ ID NO: 296621 - DNA, 98 bp, Homo sapiens
gttgaaggttgtgaccggacatttgtatggccagctcactttaaataccacctcaagactcatcgttatgcagaaggggttaaaagataactttgctg

SEQ ID NO: 296622 - DNA, 100 bp, Homo sapiens
atttcattgagatcaacctgaatgaccaggtgtaaagtgcaagagtaatatgctatgactgagagagctgtagtacacatggatgaacgacgagaagaac

SEQ ID NO: 296623 - DNA, 100 bp, Homo sapiens
ctagtccatcagatttctttaaaagccatagttatgaaatgggtcctgatgaatatgaagagatggaagaagaggaggaggaggaagaggaggaagacga

SEQ ID NO: 296624 - DNA, 51 bp, Homo sapiens
aaacctttattctgatgatattcctcatgttgtatcacggactgattcacc

SEQ ID NO: 296625 - DNA, 101 bp, Homo sapiens
ttacttaaaacaccacgatgaaaagaaatacctgtgatttgctttctcggagcaaaagtggttacattccgaaaagcaaatgggagatggacacatctgag

SEQ ID NO: 296626 - DNA, 101 bp, Homo sapiens
ggaagccaagggagattataccaggtactaggttttgacaagcttgcatcatgcgtgagtataagctagtcgttcttggctcaggaggcgttggaaagtct

SEQ ID NO: 296627 - DNA, 100 bp, Homo sapiens
gagtgatgtggaggaaaacaacttcgagggcagaaatttggaggttttggttcagttagtggaaaaattgaaatagaaatcaagatcaaccatgaaggag

SEQ ID NO: 296628 - DNA, 100 bp, Homo sapiens
gcttcatctctaaaggtccttctaggagagaggtgaaaggcttgttgattggtgctggctgtgccctctaccccttgggctgggacagtgaggaagtccg

SEQ ID NO: 296629 - DNA, 98 bp, Homo sapiens
cagcaactagttcctgaatataaggaaaaacagacacctgaaagtcttcctcaaaataacaatccagtttttggcaaaatgctggcaattcccaggaa

SEQ ID NO: 296630 - DNA, 100 bp, Homo sapiens
ttttattaacattgaggagatcaaagagattgtcaaaaggttgcagcatcacaggacatggccccctcagccacctagctggggcccatctaggagtggc

SEQ ID NO: 296631 - DNA, 100 bp, Homo sapiens
ggacacttctctgtcgtcacagttagggaagaggaagaacgtctgagaaataaaattcgagctgatcatgagaaggccttggaagaagcaaaagaaaaat

SEQ ID NO: 296632 - DNA, 74 bp, Homo sapiens
ggagaaaaactggatgttggtagaaaaagcaagagtttgttatatagcagcacgtctgagaatggtggatgtgg

SEQ ID NO: 296633 - DNA, 120 bp, Homo sapiens
gcacgggtcgcaacatccggcagctcagcctggacgtgcggcgggtcatggagccgctcactgccagccgtctgcaggtgattgtgatgtcagctacgatggatgtggacctgttctctc

SEQ ID NO: 296634 - DNA, 80 bp, Homo sapiens
gttcgcgtctctctgctgcggcgcggggaccgctgtgctctcggtatcgagaaccttccctgcgaacttcagaggaactt

SEQ ID NO: 296635 - DNA, 74 bp, Homo sapiens
tgcatcttctcaacaaccctaggagaacttggagcgtgatgcccagaagtgtgtgaactggtctgtgaccacaa

SEQ ID NO: 296636 - DNA, 78 bp, Homo sapiens
tcaacaaccacgggaagccgcggctctccaagttctaccagccctacaacccttaggagaaatcttgagagtggacag

SEQ ID NO: 296637 - DNA, 75 bp, Homo sapiens
tggccctgttacccagtggaaaggaaccgttctggaccagtctcccatcaaaggacgtgcacagccttatgatcc

SEQ ID NO: 296638 - DNA, 51 bp, Homo sapiens
tgggatattcacaatgtatggaaacagagtgttcggtgaccagtgacttgg

SEQ ID NO: 296639 - DNA, 74 bp, Homo sapiens
ggagaagttgaaccagctgtgggagaaggcccagcgagttgccaacttggcctgttccatctcaaataatgaag

SEQ ID NO: 296640 - DNA, 80 bp, Homo sapiens
tcttcctccctgtgtactttccatttgccttcctggataatgagtgtgtatatggcaactaccctgaaatacctttggaa

SEQ ID NO: 296641 - DNA, 97 bp, Homo sapiens
atcagataagattcctagtgaagatcaccaagtactttataggcatttcattcagagtttatccaaagctgtgcgtgttacaaaacccaaaatccca

SEQ ID NO: 296642 - DNA, 51 bp, Homo sapiens
ggagcataggaggaaaattcatcatctggttgtatcagagtaagatggacg

SEQ ID NO: 296643 - DNA, 88 bp, Homo sapiens
gaggcgctcatccacagagccacatctgttagctcctagagtggcctcagctaggtaaccaacgggagtcgacttatctatgccaggc

SEQ ID NO: 296644 - DNA, 98 bp, Homo sapiens
catcatcatctacttcacaggaattgccatttctttcagcttatgtggagaagtcgctgtgaagccacctataaatccatttactgaatttatggaga

SEQ ID NO: 296645 - DNA, 82 bp, Homo sapiens
aaagacgctaaacgtgccctactctgccccgggggagagtaatcaagatgattaccaactggttcgaaaacttggtcgggga

SEQ ID NO: 296646 - DNA, 101 bp, Homo sapiens
cctgacatcgctgtccctggagcatcctccgctggagctggagcttgacagaatcaggagtcagctctgacaatgaagatgatgatgatgaagaagatggg

SEQ ID NO: 296647 - DNA, 83 bp, Homo sapiens
cctacgtgcatgaagatggacgaggtcctgtacagcatcgccgagaaggtttgatgatcgtggacggagtgattacgatggca

SEQ ID NO: 296648 - DNA, 75 bp, Homo sapiens
gttaaggattccaagtaactcttatttgaaacatgatcaagtccttctatactgcaagtcttttgatagatgtca

SEQ ID NO: 296649 - DNA, 82 bp, Homo sapiens
ggctgggccagaacagcccaagatggccgacttcgatgatcgtgtgtcggatgaggagaagagccatcatcaaccactttaa

SEQ ID NO: 296650 - DNA, 100 bp, Homo sapiens
agcaacagcatcaagaacaacaggctcttcagcaaagcaccacggcaaaacttcgagaagctcagatgtggaagatgtgaaatttgtcatcaattatgac

SEQ ID NO: 296651 - DNA, 82 bp, Homo sapiens
gagccacacatccccgaccacttgcggcctgagtatggtgtggacactgccagcggctgcagccgacttggaatgacctggg

SEQ ID NO: 296652 - DNA, 90 bp, Homo sapiens
atcactggcgtcaccatgggggctgtgctgggtgtcttctccctcgccagctgggataccatggccaagcggaatacagtgataggaaca

SEQ ID NO: 296653 - DNA, 75 bp, Homo sapiens
tttcacagctgattcctgggagcacatccatttcattggcaaggtccgactgcagacacagccaccgagtttgcc

SEQ ID NO: 296654 - DNA, 75 bp, Homo sapiens
cgagccacctgagcaagctgagccagagcccacagaagcatggaaggttacccatgcagttgttactgtaccagc

SEQ ID NO: 296655 - DNA, 100 bp, Homo sapiens
gaaggcagcacaggacctggaaaaattacatatttctctatgaatcatcatcaagaactctgggagaacttttgaattcataaccaagccaacatctcca

SEQ ID NO: 296656 - DNA, 101 bp, Homo sapiens
cagtgacatgttgataaaaaatgatggtttttcgttggaatatacgttgcacatttatggcgattctgagtgtgagggcagacttctgccaggctcagcac

SEQ ID NO: 296657 - DNA, 100 bp, Homo sapiens
gcccaggaagttgctggttccacgtctgccaagacagcatgtctgtttttggctttcacccccaaccagtgaccaaagacttgaccactcaaagtccagc

SEQ ID NO: 296658 - DNA, 87 bp, Homo sapiens
gcggcaaaggagcagccatgagggccgggcccagtcaccgaccgccaccagcttgggctccccacggagggcagcaagtgggacttg

SEQ ID NO: 296659 - DNA, 102 bp, Homo sapiens
cttttttgtttttaaaattaaaagttaaacccaggaagctttggatcagacttttgtgttgcagttcggatcctgcccggcctgtacatcggcaacttcaaa

SEQ ID NO: 296660 - DNA, 96 bp, Homo sapiens
gctcggagatcatttgggagatccaagagattcagtatcactcgctcccttgatgatcttgaggcagctgttgtgctgtgtatggacgtgggcttt

SEQ ID NO: 296661 - DNA, 79 bp, Homo sapiens
cggggacccggcccgggaccggcggcgcgcggcggccgaggccagggtgaggtggctttgaccccgggttgcccggcca

SEQ ID NO: 296662 - DNA, 90 bp, Homo sapiens
gacaacatcaaataccagcctaaaggggggcaggcgcttgaagaggctcagaaagctatccaacaactctttggcaaaatcaaagatatc

SEQ ID NO: 296663 - DNA, 83 bp, Homo sapiens
gcacagaaggctggatcgctccagagatgctgagcgaagactgtaaggagaaccctgtctttcccgcggtgacttcccttggg

SEQ ID NO: 296664 - DNA, 82 bp, Homo sapiens
tgcgaggctcggagaaacaggcgccgcgggctccgcgcccggccggacccgggcccgaggtaactaggatttctacctcaac

SEQ ID NO: 296665 - DNA, 83 bp, Homo sapiens
gaggcggcgggctggagacatggaccgcggcgagcaagaaagctacatccatattggaattttaccgggaacttggattgccg

SEQ ID NO: 296666 - DNA, 80 bp, Homo sapiens
gtgtttgctgcgcccgcactgcggtgtgactgcacagaaaagttacaaaacaaatttgactttttgcgctcacagttgaa

SEQ ID NO: 296667 - DNA, 74 bp, Homo sapiens
agctcttgccaaaaacctttggacagtccaatgtcaacattgcccagcaagtgtgtactaatggtcacttgatg

SEQ ID NO: 296668 - DNA, 98 bp, Homo sapiens
gcagacgcttctcggaaacgaccatttcgccaggatggagtggtttaataattataaaagatctcttgctacttatatgaggtcactgggaggagatg

SEQ ID NO: 296669 - DNA, 102 bp, Homo sapiens
ctgaacagatgcgtctcgctcaagtgatctttgataagaatgattcagattttgaagctaaagttaagcaggtgacttaagagattaaaattaatttggttg

SEQ ID NO: 296670 - DNA, 75 bp, Homo sapiens
ccccgaccagacggccccagcagtgctactgaaggaactggcccaaataaggaaggaggaaaaagagaagaaaag

SEQ ID NO: 296671 - DNA, 82 bp, Homo sapiens
aactcgggcgccgacgagatcgggtgcgcgcggagccatggttatcatgtcggagttcagcgcggaccccgcgggccagggt

SEQ ID NO: 296672 - DNA, 75 bp, Homo sapiens
ggcctccatcttcggcaccgagaaagacaatgcaggtaggtagatcgctgaccacatttgctcatttctggatta

SEQ ID NO: 296673 - DNA, 145 bp, Homo sapiens
agcctccgcctggagaaagagcagctcatcgagatggggaacaggctccgtgcagagctgggccgacccgaaagccaagactaaggggctgcagagcggggtggacattggcgtcaagtactcggagaagcaggagcggaatttc

SEQ ID NO: 296674 - DNA, 51 bp, Homo sapiens
tggaaccagttccgatacagcacaatgctccaaattgcttttcacatgtgc

SEQ ID NO: 296675 - DNA, 100 bp, Homo sapiens
aggcggaggcagaggtggaggcgctttgaaagaactttcaactgggctctgtccatgggaggtaaagttcctgtttctgagggattggaacactcagact

SEQ ID NO: 296676 - DNA, 75 bp, Homo sapiens
ggattgtcacctttgctgcaaaaaattacggctttgtgctgatgaacatggtcaccttgaaaggtgtgttgaata

SEQ ID NO: 296677 - DNA, 80 bp, Homo sapiens
gcagagattaaatgcggtttccaagcacacgggtactccaaagattcaggtttactcacgtcatccagcagagaatggaa

SEQ ID NO: 296678 - DNA, 75 bp, Homo sapiens
aagcacagctggaagctcagagctgcagtcccaggtcctggggcgggatgtagctcattttgggatacgagtctc

SEQ ID NO: 296679 - DNA, 100 bp, Homo sapiens
gaaagctttaggagttcacagtattttacccagtgatggaaaagatcaattttcttgtggaaattcagtggctgaccaagccttccttgattctctctca

SEQ ID NO: 296680 - DNA, 100 bp, Homo sapiens
ttgggggtcgagcacataacggggttcgggtgtctcgtgtgtgaacatcacaggttactcactataaacaatatccacccaacacaagcaaagtttattc

SEQ ID NO: 296681 - DNA, 100 bp, Homo sapiens
gcagagctgggcaggagaggcctgttgctgccgtctcgactcgtggatgaatacagattctgttcatcttgctctgaaattaaataattctgaactcatg

SEQ ID NO: 296682 - DNA, 100 bp, Homo sapiens
aggttaaagagacccgttcagagtcctacagtggcagaagcaaccgtgacaagtggtgcccgaccagggacctgaacgaggaaggtctgccagagcagag

SEQ ID NO: 296683 - DNA, 75 bp, Homo sapiens
gatactttcagataccaccttatggctatgcagaattttcagggccagcaccttctctctaaagcccaagaggag

SEQ ID NO: 296684 - DNA, 90 bp, Homo sapiens
cctcacagtttgctctgctcttccaacaccagtggaagatgatcacatcccagtgcgtcagcatttatcccgtttgccaaccattgatcc

SEQ ID NO: 296685 - DNA, 100 bp, Homo sapiens
gcgccgggagcccttggctgcgtcgcccggcagccgcggacccttgaacatctgtgaagaaatgactattctgcatggaggcttcttgctggccgagcag

SEQ ID NO: 296686 - DNA, 75 bp, Homo sapiens
tctacgaggtggatgtgacccaaggagagtgctacccggtgtactggaaccatcttatgccttcattcatccggc

SEQ ID NO: 296687 - DNA, 96 bp, Homo sapiens
caacaggaaagtctaagggatatggctttgtctcctttttcaacaaatgggctgtgtttgatgtggacaagaagaaagggttgactctgattgagc

SEQ ID NO: 296688 - DNA, 101 bp, Homo sapiens
aaatatggttccatccctaaacttatacgttaaagtattgcacaatcagctggtccttttccacaatgccattgccgcttactttgctgggaatcagaagc

SEQ ID NO: 296689 - DNA, 98 bp, Homo sapiens
gatgatgtatggcctatggacccccatcctagaaccagagaggacaatgaaggccagggatgtaccgcctacgacgtagctgtcaacagcgacttcta

SEQ ID NO: 296690 - DNA, 119 bp, Homo sapiens
cccctgggcatcaccaacatagccatcgacttcggggagcagatatcttgaatgaactcttccaacgggagaacagggtattgcattactggaccatgaggaagagacggctggaccag

SEQ ID NO: 296691 - DNA, 83 bp, Homo sapiens
ggccgccgccgcctctccttgctgcagccatggagccctgagcctgtgcaattatttcgagagtcaaaatgtggatttccgag

SEQ ID NO: 296692 - DNA, 99 bp, Homo sapiens
ctgtgacttcagagacactgccaagcagccttagccctagtgtagaggagctcaaggtggctctgtggccagggcaattttggagagcaaaaaatttgc

SEQ ID NO: 296693 - DNA, 75 bp, Homo sapiens
cttgcagcaaagccattcgggttggagtaattgcatcccagccatcactcttccacctgctccttagagaaggga

SEQ ID NO: 296694 - DNA, 75 bp, Homo sapiens
gtcttttcccaaaagacaggctcttcacctgaaggtcctgggaactccaacaagggagcaaatcagagaaatgaa

SEQ ID NO: 296695 - DNA, 80 bp, Homo sapiens
tgtcctgaaggagttccaccaggccgggaagcccatcgggaagctcttcgtgggcggtcttgactggagcacgacccaag

SEQ ID NO: 296696 - DNA, 100 bp, Homo sapiens
cgtacccggcgcagccagagccaccagcgcagcgctgccatggagcccagcagcaagacaatgcagatcttcgtgaagactctgactggtaagaccatca

SEQ ID NO: 296697 - DNA, 100 bp, Homo sapiens
gccggaagtgccccttagcgggtgggggaagctggtaggcacgggcggctccgcagtgaccggactcgggggagggggagtgcgtgccagatacacacgt

SEQ ID NO: 296698 - DNA, 90 bp, Homo sapiens
ccgccgcccatcgagtcgaagcaccgcagcctggtgcagatcatctacgacgagaaccgggtggcagtagagaagagcatcacagaagtt

SEQ ID NO: 296699 - DNA, 89 bp, Homo sapiens
tgtatcagaactttggctgaagtggagttagtgctgagggtgctgtactatggccggcaaaattttatggaagacagcagagcccagca

SEQ ID NO: 296700 - DNA, 95 bp, Homo sapiens
cgagagcacttattactggccagacaggttttgttagagcacgaggtggtggtgacattcgggacgttaacacaaactctgagaattgggctgtc

SEQ ID NO: 296701 - DNA, 100 bp, Homo sapiens
tgggaggacaacttccactgcaagctgagccgccacgccctcaagaagggcagccacgtcaagaagtgcaccaataccccagatcagctatgcctccaca

SEQ ID NO: 296702 - DNA, 134 bp, Homo sapiens
ctgaatgacatctacctccatcaggaccccagatgtctgacagccctgtgtgacaccaagataagtaacagtcatgtgctgttcctggggcttggatgatgtaggggaagcaaggtgaaagtggtatcccgtgg

SEQ ID NO: 296703 - DNA, 82 bp, Homo sapiens
accagcgcccgcaggatgcccaggtcagcccaaggccaaccccactgtcactctgttcccgccctcctctgaggagctccaa

SEQ ID NO: 296704 - DNA, 75 bp, Homo sapiens
ttcggcagctatggaactctgacggcaccgaaagcgaaggaagctcctgctcctcctaaagccgaagccaaagcg

SEQ ID NO: 296705 - DNA, 100 bp, Homo sapiens
ctggagatggagttcgactgcgagggcctgagacggctgcttggcaaggtgccgacgccaccgccgagcccatgatcctggaacagtacgtggtggtgtc

SEQ ID NO: 296706 - DNA, 90 bp, Homo sapiens
aaagaaacagaagcttgccaaggagagagctgggctttccaaggatactgaggaagatgaggaggaagatgagaaggacaaaggaaaact

SEQ ID NO: 296707 - DNA, 100 bp, Homo sapiens
ttctggggcagtatcaacggagtctccgggctgaagaaaaggtgactggtctcatgagccctgaagaatgaactcagaggaggttgtttacatgaggttc

SEQ ID NO: 296708 - DNA, 83 bp, Homo sapiens
gcaaggtctcctgccagtcagtctcctcctctctgttgcagaattaaacaaccaccatgtcgagcaaaaaggcaaagaccaag

SEQ ID NO: 296709 - DNA, 100 bp, Homo sapiens
ggactcagaggagtacttcgccacttactttaatgagaagatctccattcctgaggaggaggtcttgtcaacggaaaggggtccctatccagaccccaag

SEQ ID NO: 296710 - DNA, 96 bp, Homo sapiens
agctagagttgccatttcgctgggatttttgggtggtgcaaagattcccagttctcaatcttccttcctccttacaagatacaagcaaccttcaac

SEQ ID NO: 296711 - DNA, 75 bp, Homo sapiens
acagtccactttggaaagaagatttctcagccatgactgacaatactaatgtcaactatgtgcggtacaagggtg

SEQ ID NO: 296712 - DNA, 88 bp, Homo sapiens
gtcgctggtgctgcgctactgcgagaacaagtttaacgacaagcacatcaccactctgcaggtgatcatggagctcagcttggtctcc

SEQ ID NO: 296713 - DNA, 98 bp, Homo sapiens
ggcggatctggacacccagcggtctgacatcgcgacgctgctcaaaacctcgctccggaaaggggacacctgcattttgaaagcgaagcagaagccgt

SEQ ID NO: 296714 - DNA, 97 bp, Homo sapiens
tggagaattacccgaaaaacaaccacactgcttcgatcctggacaggatgcaggcagatttacaggcccaaaaactgcgactggcatacacaaggag

SEQ ID NO: 296715 - DNA, 100 bp, Homo sapiens
agctgggagacggcacaggacactaaaccagggtctccatctgttgtccaaggctggagtgtagtagtgctatcacagctgactgcagcctcaaccttcc

SEQ ID NO: 296716 - DNA, 100 bp, Homo sapiens
aaatcagcctggtcaccagcttttcggaacagcagagacacagagggcagtcatgaggtggtatcacggcaacctcacacgccatgctgctgaagctctt

SEQ ID NO: 296717 - DNA, 75 bp, Homo sapiens
acagttcctctttctgaagatcaggagctgggaatcccaagtgcaaaattgcaattgttttgggaagaactcaaa

SEQ ID NO: 296718 - DNA, 90 bp, Homo sapiens
ccgcctcgatgcaggaggacgaacagccaaaattgcctggaaaagagcagtgagaggagtccgggagatgtgtgatgcatgtgaagcaac

SEQ ID NO: 296719 - DNA, 50 bp, Homo sapiens
cgcggcccgggcagccgcgctttcccagtcaaaatgcagatcttcgtgaa

SEQ ID NO: 296720 - DNA, 75 bp, Homo sapiens
tcatgaactccaagccaaaatcacagctttgagtgagaaacagctctattatcaagtcctaaattttggaatgat

SEQ ID NO: 296721 - DNA, 73 bp, Homo sapiens
tatccctgtaaaggagagcattgaggaacccagtgctaaggaatgtgtttactgtgaaaacaaggaaaaaggt

SEQ ID NO: 296722 - DNA, 100 bp, Homo sapiens
ggaagcgagactcatacgcaacctcaatgcagcaatgcagagtccctggacaggctcctgccacctgtgggcactgggcgctctccccggaagcggacca

SEQ ID NO: 296723 - DNA, 100 bp, Homo sapiens
cccgggatcgctccgtcgcacccaccatgatggaagacgacgggcagccccggactctgtacggaatggccacatcaaaagaatcactgataatgacatc

SEQ ID NO: 296724 - DNA, 105 bp, Homo sapiens
ctgctttttgaccctatatcttcaaagcacataaaaacactttctgaagctcatgaagactgtgtaaataatatcaggcaagacatctgtatagattctgcttca

SEQ ID NO: 296725 - DNA, 75 bp, Homo sapiens
tgagcactacagacctcacagtgccaaatggagctggaagcagtccagtggggatcgaaaattgtacaatttggg

SEQ ID NO: 296726 - DNA, 98 bp, Homo sapiens
gaccactgcctgtgtctcgtcttgtatctctaattggaagcatttacaccccgccactcctgagcaccgcacaccggcttcctcccagtccctcatct

SEQ ID NO: 296727 - DNA, 76 bp, Homo sapiens
ctgctcgttggaggctgtgcagcagaaggtgccgtgagcgatgtggagatgcaggaacactatgatgagttttttg

SEQ ID NO: 296728 - DNA, 71 bp, Homo sapiens
ctttaagttgttatatgacttggcagatcaactacatgctgcaggtctctctgcaatgcaatcaatgttta

SEQ ID NO: 296729 - DNA, 76 bp, Homo sapiens
tcagcgcctggaaacttgctcacgttttttattggcacctcagtctcaacattttcttttcggattcatgaggaaa

SEQ ID NO: 296730 - DNA, 82 bp, Homo sapiens
acctttcgaccacaacatagtcaatttgcttaccacctgtagcaccgtcactctacatgacatgatcctgaaaaatatcgag

SEQ ID NO: 296731 - DNA, 100 bp, Homo sapiens
actatccgtttgttcaggaaccaccagtgacagatgtcttctacaaatgcttctgggaactggaggacccagttaaccatagggctgtcggattacgaga

SEQ ID NO: 296732 - DNA, 101 bp, Homo sapiens
aataagcaggcttttttagatgagctggatgaactggacctcacagacaaacacagagaagccatgtttgcacttccagctgagaaaaaatggcaaatata

SEQ ID NO: 296733 - DNA, 82 bp, Homo sapiens
ccaggatctcgggctcggaacgagactgcacggctatcgagactcatttgatccgcaagtctagcagcggactaacttatat

SEQ ID NO: 296734 - DNA, 82 bp, Homo sapiens
tgcccgcctgccctgaggagtccccgctgcttgaacatgttcttcaagtatacatggaataactttttgcatacacaagtgg

SEQ ID NO: 296735 - DNA, 100 bp, Homo sapiens
ggttaatagtggcatggaagatccatttgatatgagccccagactgacatcccgcctgacgtggatactgaacaggaccgagttttcttcattaaggcaa

SEQ ID NO: 296736 - DNA, 100 bp, Homo sapiens
ttcacgactactagaaggggaggggagtggaaaggctctcagtgaaaaagttttccttccagcagggtggatggggagcatcgctggctgacaggctggt

SEQ ID NO: 296737 - DNA, 75 bp, Homo sapiens
agctgcccagccaccagcaaccccccaggtccagtggcattgcagagcacggatggttgcaggagccaactttta

SEQ ID NO: 296738 - DNA, 99 bp, Homo sapiens
acgtgaaacatgtgaacactcaagtgaagcaaaagccttccatgattacgactgcttcaccagtttttctactggctccttctttgaactggatggacg

SEQ ID NO: 296739 - DNA, 82 bp, Homo sapiens
cacggccggaatggcagcaagctcagatgagttttgatcatcctgagaaaaatgggccttggcctgcagacccaataaacct

SEQ ID NO: 296740 - DNA, 75 bp, Homo sapiens
tctctctttctggcctggaggctatccagcatgcatcactgtaagcgataccgctcccctgaaccagacccgtac

SEQ ID NO: 296741 - DNA, 75 bp, Homo sapiens
cccaaacactaacttgtttccctgggaatttggaggtgggttcgaaaaagatttggtgctatggagaaatttttg

SEQ ID NO: 296742 - DNA, 96 bp, Homo sapiens
tggcgctggaggcagcggtgcacgtgcaggtagaacgtcatgacatgaataccttaagcctgcccctgaacatacgccgaggggggtcagacacca

SEQ ID NO: 296743 - DNA, 83 bp, Homo sapiens
attgaaagcaaaatccaaccaggttctcaacaggctgactttcttcagattattaaggaatcccagcagcagcatggtttacg

SEQ ID NO: 296744 - DNA, 100 bp, Homo sapiens
tccatcattgtcaccctggccctcgcggtggctgcctttagtgctggagaatctggtaaaagcaccattgtgaagcagatgaggatcctgcatgttaatg

SEQ ID NO: 296745 - DNA, 82 bp, Homo sapiens
cgcggatctcaccgccgctcaggattattcagagctgggagagcttcccccacgatctcctttagaaccagtttgtgaagat

SEQ ID NO: 296746 - DNA, 107 bp, Homo sapiens
cttggcagatgccagtggatccatacaactgctccgcctggtggaatctgagagcactacaaacaccactggtttcccgaaaagccgtccaagggctccggctaccg

SEQ ID NO: 296747 - DNA, 82 bp, Homo sapiens
gcaaagctcaagatggcggacaaaacgccaggcggatctcagaaggccagttcaaagcggttgtggaacaggaaatgaaaaa

SEQ ID NO: 296748 - DNA, 50 bp, Homo sapiens
caagttcagcatccccaagcagggggagaagacttgcactatctgccaga

SEQ ID NO: 296749 - DNA, 50 bp, Homo sapiens
agccccacgcgcggggccatgcagaatcagcatgattcttcagaggctct

SEQ ID NO: 296750 - DNA, 73 bp, Homo sapiens
cttctacagttataattcagttctggctattgctcgaacaagacggagctaatagatctgtctacagtagatg

SEQ ID NO: 296751 - DNA, 88 bp, Homo sapiens
cggagctgcggtggcgtctccacacgacaatgcagatcttcgtgaagactctgactggtaagaccatcaccctcgaggttgagcccag

SEQ ID NO: 296752 - DNA, 98 bp, Homo sapiens
agcaggcagcgtctgcaaagtagcgctggcaaccacaacagagaggccagcaacaggaggagcaggaggagcgtactcccgagttcatggcgcccgag

SEQ ID NO: 296753 - DNA, 95 bp, Homo sapiens
gccagcgccgttgctgcgggggattgtgggagtctccgcgtcccgctcgctgggagagagcctacaacacagcagtcccctcaggatgagcagga

SEQ ID NO: 296754 - DNA, 83 bp, Homo sapiens
gggagtcggggatagtgtcatcggttcggtcgcgtggggcaggcagtggcgctgcgggccaaggccttcggcttcaacgtgct

SEQ ID NO: 296755 - DNA, 99 bp, Homo sapiens
ctgagaaattttggagagagaatgctgtgaggttaaatgagaagaattatgaactcttgaagtatggctgatggcaagcattgtacttttccacatctg

SEQ ID NO: 296756 - DNA, 49 bp, Homo sapiens
gaaacatccctcacattgaaatatgtgttctaagaacggaagcatctgg

SEQ ID NO: 296757 - DNA, 100 bp, Homo sapiens
atgccctccaggacccgttcgccttgtcatcggccggcaccctaatccaaagggagagtcccgtattctcagagtaaaagttgtttctggaattgatctc

SEQ ID NO: 296758 - DNA, 74 bp, Homo sapiens
aaggtcggggctgtcggccggccacagggatgtcttttactatagagtttatgtggccgaggcagacaagtgga

SEQ ID NO: 296759 - DNA, 48 bp, Homo sapiens
aaattggcttcctgaatgacaagtgattacagtggcgagatcttgaac

SEQ ID NO: 296760 - DNA, 75 bp, Homo sapiens
agggagccatgaagcattacgaggacctgaaggagaagaaggagaaggtggaggagaaggcaagccggaaagagc

SEQ ID NO: 296761 - DNA, 75 bp, Homo sapiens
ctaaggacattttctataagaactccttgttccgacatcccaaacagacttgggatgtagctttatcacggactg

SEQ ID NO: 296762 - DNA, 90 bp, Homo sapiens
gaagatctctatgagcttttgaaacttgttaagcagagcatcctggccagaacaagccaaggagccaagacgagagggacacacggacaa

SEQ ID NO: 296763 - DNA, 100 bp, Homo sapiens
gttcgataaaagtgtgcagaccaagtgagaaagatcagtctaaagaaaaggagaagaaagtgaaaaaaacaattccttcctgggctaccctttctgccag

SEQ ID NO: 296764 - DNA, 100 bp, Homo sapiens
caggacagaagacttcagctgccctgtccacagtgggctctgccatcagcaggaagcttggagacatgagatccagagacaatggccccgatgggatgga

SEQ ID NO: 296765 - DNA, 100 bp, Homo sapiens
cggcgatggagctgttatttttagatacttttaaacacccgagcgctgagctgaactgtcccaagcaataaacagtggtacattgttatcaaaaccgtcc

SEQ ID NO: 296766 - DNA, 51 bp, Homo sapiens
gaagaagctgaggatgaagaagatggtgaccttgcaacttcatggatgacg

SEQ ID NO: 296767 - DNA, 97 bp, Homo sapiens
tggggatgggtctctgcgcatgaaatgctggagtttccgaagagctggagagttgacagcctcactggtgtctgacttccagcaactgctggcctgt

SEQ ID NO: 296768 - DNA, 71 bp, Homo sapiens
gctgatcgtcggagcttgggagcaggaagatgtcgaatgaacttgagtggtgcagagccggagccggagcc

SEQ ID NO: 296769 - DNA, 75 bp, Homo sapiens
gcgctgctcccgggggcgacgggaaaattgcctaagaattatgacccaaaagttaccccagatccagaaagatgg

SEQ ID NO: 296770 - DNA, 100 bp, Homo sapiens
gctcagagcttggagacagacgagtggccaaatcaatgaaggtccctgtatatgagaccccagctggatggagattcttctcaaatctgatggactcagg

SEQ ID NO: 296771 - DNA, 74 bp, Homo sapiens
ggatatcagctacagactttcctgagtcagatcctgataacttaagtgactctctcttttccggtgatgaagaa

SEQ ID NO: 296772 - DNA, 75 bp, Homo sapiens
ccaaagcttcaagttcttggaacaaattcttgtgcaacttgctttggtgtttgctgttttattgccacagatgac

SEQ ID NO: 296773 - DNA, 100 bp, Homo sapiens
aatcatcaaaagagccaatgagggttctccaaaaaatgtggaatcctttgcatctatgctgagacattctcctcttacacagatgggacctgcaaaggat

SEQ ID NO: 296774 - DNA, 74 bp, Homo sapiens
acttgcagggattggatggaaaacctatcattgcagctcctgtgtttacaaagtgggcttaaaattgaattcag

SEQ ID NO: 296775 - DNA, 82 bp, Homo sapiens
cgacgaggagccggctttgagcaggctccaggaacactcggaggtgtctggcttccttctggagtgtgacagctcggtgcag

SEQ ID NO: 296776 - DNA, 101 bp, Homo sapiens
tctcaagagtgctgctgctaacgcggtccccggcacgcaccatctgttgccatcccggccggccgaggccattgcagattgtcagaagcttcagttctggt

SEQ ID NO: 296777 - DNA, 111 bp, Homo sapiens
ctcacactaagtgaagcttctccattctgtaagctttccgggaacatccaaggcaagactggcacccagcacagcaggtttttcgttggaatatacgttgcacatttatgg

SEQ ID NO: 296778 - DNA, 75 bp, Homo sapiens
tgtggtcgtcaggagcacagcagtcccgagtgcagaaatacccgcagcccaaagggcagaagaagaagaagatcg

SEQ ID NO: 296779 - DNA, 90 bp, Homo sapiens
gagattctcagtgaaggaaatgaagtcccccctgatgagcagtccatatggaacgtcacggtgctccccaacagtaaatgggccaacatc

SEQ ID NO: 296780 - DNA, 75 bp, Homo sapiens
tcagcgttctgtggttgtcaacagcaaccttggccatggaccagccggctggcctgcaggtggactacgtcttcc

SEQ ID NO: 296781 - DNA, 50 bp, Homo sapiens
tcagagggaagatctttttcctcaattgaaacctctgtagaggagcagga

SEQ ID NO: 296782 - DNA, 100 bp, Homo sapiens
gaatggtggtgcctcgctcttctctgctctggccacggtgctgtgtgaggccgggggtccaggggcaagttcatcctactctcgagtctaatgatgatgc

SEQ ID NO: 296783 - DNA, 100 bp, Homo sapiens
cagctatgaagaccagggggttcagctttccaagacaaaggtccttatgtcgtcagaagatcgagaagctcaggaggatgaattgctggccctggcaagt

SEQ ID NO: 296784 - DNA, 88 bp, Homo sapiens
accatgaacctcggaggcagccttaccagacaggcaaatgaagaggattcttccagttctctagtgaaggatcacctttttcagcaag

SEQ ID NO: 296785 - DNA, 50 bp, Homo sapiens
tatcatggttgggagcctgcagagcaataatggatgcacttgagccgacc

SEQ ID NO: 296786 - DNA, 100 bp, Homo sapiens
cctgcggggaagaacgtgctactgctggtgatgtcttggcattgcccattttcaagcaggaagattccagccttccattggatggtgaaacagagcaccc

SEQ ID NO: 296787 - DNA, 76 bp, Homo sapiens
cgcgcaggtgctagcggccccttcgccctgcagggccgttgctccagggagaactgcaaatatcttcatccacccc

SEQ ID NO: 296788 - DNA, 94 bp, Homo sapiens
ttcctttaaatccggagggggaaaaaatcccaaggtctgcaaagatcttggcatatacagaagggctgcatggaaaatggctgttcacagagat

SEQ ID NO: 296789 - DNA, 75 bp, Homo sapiens
atgaggctgatatctacctcaacataacggtccctgagtgccagaggtggtggtgttgcttatcttctggaaccc

SEQ ID NO: 296790 - DNA, 97 bp, Homo sapiens
aagcatatacttttgaaggtgcaagatactatataaatgtgttgttggtggctgcaatgccagctttgcttctcagggagggctagctcgtcatgta

SEQ ID NO: 296791 - DNA, 75 bp, Homo sapiens
gctgtacgccgagcacccaggcgactgcctcatcttcaaggtacactgaggaggggacggctccgtcttcacatt

SEQ ID NO: 296792 - DNA, 73 bp, Homo sapiens
tctctgcattctcctcctgggagtatgatgggatcatccttcctggcaaataaattcccgtttctatccaaaa

SEQ ID NO: 296793 - DNA, 74 bp, Homo sapiens
tacctccgagggaaacaagaaaacatcaaagaggtctagcaaaggaagaagccatggatttaataaatagagaa

SEQ ID NO: 296794 - DNA, 78 bp, Homo sapiens
atggaactttcagaacctattggcagcacagcattctcagaagcagtctactgagctcttccagtgcatgtacttcaa

SEQ ID NO: 296795 - DNA, 100 bp, Homo sapiens
tggaaaccgcaagaacctaaagcacaatgccgtgcccacggtgttcgcctttcaggaccccacacagagagtcacaccccaaagcctctttattcttttc

SEQ ID NO: 296796 - DNA, 100 bp, Homo sapiens
agacagtggttctttgtgtaggttgttcaacagtgttgtgccagcctacaggaggaaaggccagactcacagaagcaacattgaaggaactcatctcaca

SEQ ID NO: 296797 - DNA, 75 bp, Homo sapiens
ggaacagaagcggaacagccacagcagcctcccaaggagtctgcaagttgggctgttgataatcaggtgtatgtg

SEQ ID NO: 296798 - DNA, 135 bp, Homo sapiens
actttacagacgtcaaggcaaatttgaagctgcagaaacgttagaagaagctgctatgaggtctcgtaaacagcaaaagcggcgccaggaaattgaacaaaaacttgaagttcaggcagaagaagagagaaagca

SEQ ID NO: 296799 - DNA, 98 bp, Homo sapiens
aattcctctttgactctgactggagaggcctgagagtgcagaggatgcatcttatcgactacctgctcctcctgctggttggactactggccctttct

SEQ ID NO: 296800 - DNA, 100 bp, Homo sapiens
tctggtgacaagtggttctccctggaattcttccctcctcgaactgctgagggagctgtcaatctcatctcaagtcctggaaagacaagcatcatgcctc

SEQ ID NO: 296801 - DNA, 100 bp, Homo sapiens
gacctaaagctggagtattttgagattggagaattaagttcccagtgacctgacagcagaggagcgtcaagaactggagaacatccgacggagaaaacag

SEQ ID NO: 296802 - DNA, 82 bp, Homo sapiens
tgctgtttgcggatgctgatgcagatcagcttgaacgggtctttttacgacttggccatgctgaaacagatgaacaattaca

SEQ ID NO: 296803 - DNA, 100 bp, Homo sapiens
ccgacctcgacgtcttgcctgtgtcccacttgttcgcggcctatagataatggcatcagctgctaaggaatttaaaatggacaacttttcacctaaagct

SEQ ID NO: 296804 - DNA, 82 bp, Homo sapiens
ccctacaagtactgaaaaggcacagggcaactccaacaacattgccaccgtggacatctccgcaggcttcgtgggcttagac

SEQ ID NO: 296805 - DNA, 75 bp, Homo sapiens
ccaatggagagccggtgccctgcctgctcttggccaacaagttgaagattcctgtctctggatccaaatcagagg

SEQ ID NO: 296806 - DNA, 75 bp, Homo sapiens
gagagaagcagcggatcagcagaggccacggcgtatgcctccgaggacggggtcctgaccgaggccatgatggac

SEQ ID NO: 296807 - DNA, 75 bp, Homo sapiens
aggacagtgaggagctgggtggtcccagcctggagctgtgccagcctgacatggatggagtctcgctctgtcacc

SEQ ID NO: 296808 - DNA, 100 bp, Homo sapiens
aaaacagaaggaaattgaaggaacttggagttaatggtctaatttatgataggtatattactcgaggggtttttaaatattgtcaggaaaaagaaggaag

SEQ ID NO: 296809 - DNA, 97 bp, Homo sapiens
gacacgccaactcttcgttcgattattagctttagtgaaatgggctaataatgctggcaaagtggaaaaatgtgcgctaccaagtcaggattgttac

SEQ ID NO: 296810 - DNA, 100 bp, Homo sapiens
agaagaagagtctaaatttgaagaaatgaagaaaaagcatgaaaatcaccctaaagttaatcacccagctgctgctcagtgttacattgatttaattatt

SEQ ID NO: 296811 - DNA, 87 bp, Homo sapiens
catccaaatgagacccttcctggagaaccgggcccagcagcactgggggctctctttacctatgaaggcaacagcaatgacatccgc

SEQ ID NO: 296812 - DNA, 96 bp, Homo sapiens
agcgtctgatccaccatgtaaaggactatgatgatggatatggcactgcttatgatgaacagagttatgattcctatgataacagctatagcaccc

SEQ ID NO: 296813 - DNA, 100 bp, Homo sapiens
cagcaagttttttgactcccaaggacagggacttaagtcacaacagattatctttcatcaaggcaagttccatgagccaccttcaaagccttcgagaagt

SEQ ID NO: 296814 - DNA, 82 bp, Homo sapiens
ctccatggcaccgggctgagcggcacgagtacacgagacaggattgagaaaggagagattcaaattgtgacttcagattcaa

SEQ ID NO: 296815 - DNA, 74 bp, Homo sapiens
tgtcgagggaatgcagaaagagttaaggaaggcagatatggtgtaagatacttcttcaagattggacagctggg

SEQ ID NO: 296816 - DNA, 100 bp, Homo sapiens
gtcgaccattccaaaaaaatcgtgaagacctaggaaaggacgttgaatttgaagttgttggtgatgccccggaaaaagtggggcccaaacaagctgaaga

SEQ ID NO: 296817 - DNA, 100 bp, Homo sapiens
gggagctgctggagcagcaggcggcctcggagcagcgcggccgccagcagcgggaacaggaacagaggtgccatgcagccccgggtactccttgttgttg

SEQ ID NO: 296818 - DNA, 101 bp, Homo sapiens
ccacctccaggatcaggatgcagagttcagacactgatacgtgactgtcaagttatcagagagactaaagaagaccagattgcagagctgaaaaagatatg

SEQ ID NO: 296819 - DNA, 50 bp, Homo sapiens
tgggcaccttgcgcttcttgcagtcgatcctgatggccagtgctacggtg

SEQ ID NO: 296820 - DNA, 96 bp, Homo sapiens
gatcgacagcatcgaccgttctgtaactccttaaatttaagagctgcagcatcaacaacagcaacttgtgattggcggtgaccggatattcagttg

SEQ ID NO: 296821 - DNA, 98 bp, Homo sapiens
ccacccgcgcctgggaccatggccactgactcatgggccctggcggtggacgagcaggaagctgcggctgagtcgttggagtgcctcaagcttattgc

SEQ ID NO: 296822 - DNA, 100 bp, Homo sapiens
gagagctggctgcagtaaaaatcattaaattggagcctgctgtcaccactgactaaagaagagaaaactgcggcagagcaattcaaatttcacatgccag

SEQ ID NO: 296823 - DNA, 125 bp, Homo sapiens
gctgcctcgggcccttcctgctcagcgccgcactgctggttctggtgctcaaggcccctacggtgagcgggacgaccagcaagtgttcatccagaaggtggtgcccagtgccagccagctcttcg

SEQ ID NO: 296824 - DNA, 99 bp, Homo sapiens
ccctaatggaggtctccagtttcggttgaaatcacaaagattagacacctttttagataggtgttcttcagcaccactgacaacacggttctgacagta

SEQ ID NO: 296825 - DNA, 83 bp, Homo sapiens
cccgacccagtgccgcgcagctgctggagagctcaggccccggggcctccagcggcaccagcggagaccacggtgagctcgtc

SEQ ID NO: 296826 - DNA, 51 bp, Homo sapiens
gcagtggttcagcacactttgtctcttgcatggcaccaagaatgttaccaa

SEQ ID NO: 296827 - DNA, 98 bp, Homo sapiens
actgtcccgggtgggaagaggaacagcctatgtgggcttccacggagcatacatcaagagagtgatcgcacacccatccttccataatatcaatttca

SEQ ID NO: 296828 - DNA, 103 bp, Homo sapiens
ggatcaaaaacaagcaggctttgtgtcaagacgtggcacgtgtcagagaatttgacgtgggccgaattcattttgttttcctgcctcctgctggtgatctgcc

SEQ ID NO: 296829 - DNA, 96 bp, Homo sapiens
gccggggcaggggcggaggcggaggcagaggtggaggcgctttgaaagctgggagtgtccactcgccttccaccagcatggcaacgtcttcacagt

SEQ ID NO: 296830 - DNA, 100 bp, Homo sapiens
cggcgcccagcggtagccctccttgcgcctccgattcccagagaaagagatgacttgatgtctgcactagtttccgtaaggagcagcttggcagatacgc

SEQ ID NO: 296831 - DNA, 92 bp, Homo sapiens
cttgaatgttgaagatgtccttaccagctttgacaatacaggaaatgtttgtgtggtcactcacctgtctaccactcccgtgaaatggcagc

SEQ ID NO: 296832 - DNA, 50 bp, Homo sapiens
caataacaggcggagggtcggcgtagttcacccatctcaggagcctggct

SEQ ID NO: 296833 - DNA, 75 bp, Homo sapiens
agatgagctgtggcttgtcatgaagctgctaagtggaggtgattggcgaggacaacgtggcagtcccctcacacc

SEQ ID NO: 296834 - DNA, 100 bp, Homo sapiens
gaggaggaagtgttcagtcaagaatgggattctgaccatctcacatgccacactgaccatactccctggagccttctcccgaggtgcgcgggtgaccttg

SEQ ID NO: 296835 - DNA, 75 bp, Homo sapiens
atatttgagtcatttccttcgtacccacagtgcttcatgagagaaacgcttcgttaagggactcaggcagtacgg

SEQ ID NO: 296836 - DNA, 101 bp, Homo sapiens
ctcggggccccagaggccgcggacaccgacctggaggtggttctggaatggagccgagatcaataccatgttttgtttgattcctatagagacaatattgc

SEQ ID NO: 296837 - DNA, 98 bp, Homo sapiens
gcaaaacccacaagtatgtatatgaatgatggctatgcaccacctgatatcaccaactggcccagcctgctctcccagagtgcacttcagctcaattc

SEQ ID NO: 296838 - DNA, 97 bp, Homo sapiens
aaatcatattatagatggagtaaaggttagcatggcctcattgaaagaactagatcaaagactctttgaaaattacatcgagttgaaagcagatccc

SEQ ID NO: 296839 - DNA, 98 bp, Homo sapiens
acgctctgctgcccgctgtgagggaaaaggttccagcaacagatagaaatgctttaagttcactctggggaaagctggcctctgaaatcttaatgcag

SEQ ID NO: 296840 - DNA, 76 bp, Homo sapiens
cagctgtctcgatgcacacactggtatatcccatgaagacctcatccaggtgaagtgtccggacgcaccctcatcg

SEQ ID NO: 296841 - DNA, 75 bp, Homo sapiens
gcagaagctccagagcccagacttgcaggtgtgatgaatgcagactctgctaccattttggctgtttggatcctc

SEQ ID NO: 296842 - DNA, 122 bp, Homo sapiens
tacacgctcaagaaaaccaccacttacacccagggggtgccccccagccaagatcatcatggaatatggtgaggaagtattagaagaaataaaaaattcgaagcataacacaccaagaaaaa

SEQ ID NO: 296843 - DNA, 51 bp, Homo sapiens
gtgctcctgctgggcctcaaggaccgcgagaaacttgaactggatcgattt

SEQ ID NO: 296844 - DNA, 74 bp, Homo sapiens
aggagcttcggagggttcgttctggagtcatgagtgaaaaggaagaggcagaaatccaggcagaacttgaacgt

SEQ ID NO: 296845 - DNA, 60 bp, Homo sapiens
gcaattgcactcatcattggctttggtatttcagagatcttgaaaggaggggtcttgatc

SEQ ID NO: 296846 - DNA, 75 bp, Homo sapiens
gctgccggtgcctgccagtgggggggggccctcagcctcttggccttgaacgggctgttcatcttgattcacaaa

SEQ ID NO: 296847 - DNA, 100 bp, Homo sapiens
ggcctatgccaatcagcatttcacattcctcatggttggttcaaagaacaaaatccagtctcatagcagaggagaatataatgtttacagcaccttccag

SEQ ID NO: 296848 - DNA, 100 bp, Homo sapiens
tgtcggaagattttgatgggaaaatgcatgatggggagcttgaagaacaaggaacaggatctggacttggcacatttcttttaaaggtgcttgaagacga

SEQ ID NO: 296849 - DNA, 50 bp, Homo sapiens
cggccatggtccaaccttgaagctggagaagcgactggaggagtggttgg

SEQ ID NO: 296850 - DNA, 100 bp, Homo sapiens
cagacctaagtggggagctccagagaggagaccagatcctatcgtgtcttcattggctgctctggcatggagctgatatcacacacgtaacaacgagagg

SEQ ID NO: 296851 - DNA, 75 bp, Homo sapiens
ctttagaagatggccagaccttggggaccaagaaaagcagcagatcactactcttggaatcaaagataaatccaa

SEQ ID NO: 296852 - DNA, 100 bp, Homo sapiens
cctgcttcaacatccagggcggcttccgctgcctggccttcgagtgccctgagaactaccgccgctccgcagccacagatagaatctcactatgttgacc

SEQ ID NO: 296853 - DNA, 82 bp, Homo sapiens
aaagctgcaggcatgaacatggaggaagaggaggaactgcagcagaatctgtgggattgagaggatccagaatccagatctc

SEQ ID NO: 296854 - DNA, 120 bp, Homo sapiens
gtcggtcttggaccaagattacagtggtatttgaagttaaaatcctggtgggctacaaattacgttgctccttgagggcaggacagttcttatggctttatccgttgcgtaagcacagag

SEQ ID NO: 296855 - DNA, 100 bp, Homo sapiens
attcaatcaattctttgtgactcctcgatcttcagttgaggcctagaatatcctgcagtggtagagtttgctccattccagaagatagccaaaaagaagc

SEQ ID NO: 296856 - DNA, 90 bp, Homo sapiens
gatgattacagttcttcctaaaaaagagaaagcttcttgctatctacctccaccatgatgaaagtgtgttaaccaacgtgttctgctcac

SEQ ID NO: 296857 - DNA, 75 bp, Homo sapiens
aactgcagagccaggaaaactttgaagccttcatgaaggcaatcgttcaacaatgtggaattcacagtaaacaag

SEQ ID NO: 296858 - DNA, 74 bp, Homo sapiens
gccgcggtcgctatggaggagccggagatgcagctcaaggggaagaaaggtcgcagcagttgtggtagaaattt

SEQ ID NO: 296859 - DNA, 51 bp, Homo sapiens
gaagggccgagcacagcaatgcaagtgggaagtgagtgatgaccctgaagt

SEQ ID NO: 296860 - DNA, 75 bp, Homo sapiens
tttaacatttcctgaagaactgtctcctggaattacattgaatatacagggctgacaggacaactggatcagttt

SEQ ID NO: 296861 - DNA, 51 bp, Homo sapiens
gatgatgcagaagaggagtcctttaggaagaccagaagctttgtatgcagc

SEQ ID NO: 296862 - DNA, 83 bp, Homo sapiens
ttggaatgaatttggaatcttcccttgaagaggaaaatgtttataggaggccttagctgggacactacaaagaaagatctgaa

SEQ ID NO: 296863 - DNA, 73 bp, Homo sapiens
gcgctcaaccagggtcaagtctggattggaggcaggatcacaggctcgttctttccaaatggcaatgcatttg

SEQ ID NO: 296864 - DNA, 82 bp, Homo sapiens
tttcggaagggcttcaggagggggtttggtgcacctcgatttggaggaagtagggcagggcccttatctggaaagaagtttg

SEQ ID NO: 296865 - DNA, 83 bp, Homo sapiens
ctttttcagaaatgcgcagagcaaacatctttcaaaggagacgaaaccagacagagggtcaagtttacagatgaccgtgtctg

SEQ ID NO: 296866 - DNA, 121 bp, Homo sapiens
ccgagatgtctcgctccgtggccttagctgtgctcgcgctactctctctttctggcctggaggctatccagcactcagcccacctgcacccaggtgaaataaacagctttattgctcacac

SEQ ID NO: 296867 - DNA, 75 bp, Homo sapiens
gctcgggccccgcccggcagtcgcccgttgccatggaaactgcatccacaggatgcctttgtggaactgtacggc

SEQ ID NO: 296868 - DNA, 101 bp, Homo sapiens
ccttggcctaatttggacaattatcctgcactttcatctccgtatactattatcacgttcccttttctatttgctgtgatgtttggagacttcggtcatgg

SEQ ID NO: 296869 - DNA, 100 bp, Homo sapiens
cccacaaattgctatctgtctagattgtttacgaaataatgggcaatcaggggacaatgtagtaaaggttggatgttgatataactgaacttcacagctg

SEQ ID NO: 296870 - DNA, 101 bp, Homo sapiens
tctggccccgctccgctcacagagtcagatggcggcggccgagctgacggccccggcccagatcctgcactggatggatcagcggacaacacacagaccgg

SEQ ID NO: 296871 - DNA, 71 bp, Homo sapiens
gcttcccggttcatcattatattcgagcaggatggggatagtgtgatggtccttccaaccatccctgaaga

SEQ ID NO: 296872 - DNA, 98 bp, Homo sapiens
tccgcccagggccacctaaggagcggaccccgcatcttcgccgtctggaaaggcccggcagccatggcggtggaaggaggaatgaaatgtgtgaagtt

SEQ ID NO: 296873 - DNA, 82 bp, Homo sapiens
cgcgccccctccccctcgccatgaagagtgaatccccgcctggaggctgggacactaaccaagaagtggcacatggcatatc

SEQ ID NO: 296874 - DNA, 100 bp, Homo sapiens
ttggcgacagaccatctagccttttctgagatgagtatgatgtatgtgccatttgtttggatgagtatgaagatggagacaaactcagaatccttccctg

SEQ ID NO: 296875 - DNA, 100 bp, Homo sapiens
tgctataggggggcacgatgctcccgcatccaacttgacttccagactctcagactgtgtggaaagatgcatcactgtaagcgataccgctcccctgaac

SEQ ID NO: 296876 - DNA, 102 bp, Homo sapiens
ggctatgacccttatgcaaacccccccaactatggcaaccctgaccccttcgtcatcaacaacacacagcggttacatggacacagaacagtatgaagaagc

SEQ ID NO: 296877 - DNA, 98 bp, Homo sapiens
tttcccaagcctggaagaactcgtcatgctctttgtagcgtggtgcttctgttgctcacaggctggacaggaagcacggcagcatctactcggcttct

SEQ ID NO: 296878 - DNA, 76 bp, Homo sapiens
cgcaggaaacatggcggcggcgggtgttgtgagcgggaagaatgagctgaaagccagtggtggcgaaatcaaaatt

SEQ ID NO: 296879 - DNA, 100 bp, Homo sapiens
gacattcttggaagccttaccgggagagacaaaggcagcgctgccctcgggggagtattggccctggcggaacgcagcaaccacgagggatccagccaga

SEQ ID NO: 296880 - DNA, 82 bp, Homo sapiens
aactactcattgagccgggagctgctcatcaagctcgagcccagaaaactatcctctaagaccagacgtgacaaggagaagc

SEQ ID NO: 296881 - DNA, 83 bp, Homo sapiens
tacatcatcttgtttgcctacatctacttctccacgcatggcctgatatgaaggagtcacgcctcccgcctcccggagctgcc

SEQ ID NO: 296882 - DNA, 100 bp, Homo sapiens
atggcatcttctgcctcgtcctgacacccaccaggtgtggccgacgacgatgccctcgctgaggagcgcatgcggagaggccagaacgccctgccagccc

SEQ ID NO: 296883 - DNA, 98 bp, Homo sapiens
gaggtgttaccggaacggcggcgacaagggtgttcccgaactagagtggttcgagcatcagacaagcggatagcttgtgatgaagaattctcagattc

SEQ ID NO: 296884 - DNA, 103 bp, Homo sapiens
aggagaggagcgtcaacagcagcaccatggggagaagatgtcaaccggacactagaaggtggaaggaaacctcttcattatgcagcagattgtgggcagcttg

SEQ ID NO: 296885 - DNA, 98 bp, Homo sapiens
gctcagcccaggagaggaaggagcggctgcggcgcgcgctggaagaaactggcgatggaatatgagaggagccctctggaaagaaaaggacagaccct

SEQ ID NO: 296886 - DNA, 51 bp, Homo sapiens
cccggatgtccttcggctgtgggaggcgggctgcgtgcacttcccccacac

SEQ ID NO: 296887 - DNA, 90 bp, Homo sapiens
gggacctaccctgactacgggagttgggaggacccgggacaccgcacagccgggaaatgtatggtttgaagtggtgaacatggatttttc

SEQ ID NO: 296888 - DNA, 75 bp, Homo sapiens
ccggggagaggcacccgagacccacggagaccgcgtctcacaagaatcttttcttatctaagttgcaacatggaa

SEQ ID NO: 296889 - DNA, 100 bp, Homo sapiens
tgacagcaagttccacagcaccatgcattatgatgggcatgtccgcttcgaccttcccccacaaggtgcatctgcagacgcagcaggaggtgaagctgcg

SEQ ID NO: 296890 - DNA, 75 bp, Homo sapiens
gcgccgccgcctcccgccgcgccccgccatgccgctctactccggtacacaggcacccccacttcacacagctac

SEQ ID NO: 296891 - DNA, 83 bp, Homo sapiens
atcggagcgtgtggatttgagccgccgcattttttaaccctagatctcgtttttcagaagaagtgaagtcaagatgaagaacc

SEQ ID NO: 296892 - DNA, 82 bp, Homo sapiens
cgggaagtttggatcctggttccgtccgctaggagtctgcgtgcgagagttcaagctgaagaagatgtggaaaagtcccaat

SEQ ID NO: 296893 - DNA, 100 bp, Homo sapiens
gtcggtgggtcggggatcggtcgcctgagaggagctgctgctcttcctccagaacctgcccacagcccactgggatgatgaggacatcagcctgttgctg

SEQ ID NO: 296894 - DNA, 80 bp, Homo sapiens
aagaggaccttctgattagtccacagtcttcctctatagttgaccatagtcggattaaactacatcaagaagataatgac

SEQ ID NO: 296895 - DNA, 96 bp, Homo sapiens
aaggtgctaagaaagagaatgtaagacaggaaaataattaaatattcttaccgaggcgcttcctcccatcaacacagtcggcggagacaaggttgg

SEQ ID NO: 296896 - DNA, 101 bp, Homo sapiens
taaagagaacgtctctgaaatcaagtccggatgaagaaatggtggagtcaatgaagaaagtagcagggatggatgtggagctgacagttgaagaaagaaac

SEQ ID NO: 296897 - DNA, 90 bp, Homo sapiens
aacaaaaccaaaggccgaagtacaagatctaaggctcttgtctggaactcttaggaaagaatattgtagaattctgtcatcctgaagacc

SEQ ID NO: 296898 - DNA, 98 bp, Homo sapiens
tgaacttcaccatcctacagatcttccctttcacctatgaaagcaaacgtatgggcatcatcgtgcggatgatgaggagtctgatgaggaagctgtga

SEQ ID NO: 296899 - DNA, 100 bp, Homo sapiens
gacttttggggggaaactaggtcgatggtcggcggcgcccggatgggcagctgaggccagagtggagccgggaataactgggccaagggccactacacag

SEQ ID NO: 296900 - DNA, 83 bp, Homo sapiens
tggacggcgagcgcgagcggcgcgagaaagccggcgaccaccaggggcctgaggatgaagccaagtctgctgtgccggcccct

SEQ ID NO: 296901 - DNA, 87 bp, Homo sapiens
gttctgatgaagtgaaacgtgccatgaacaaatcctttgtatgtgacgcattcccagactcttcagccaactgagcatcagcttctt

SEQ ID NO: 296902 - DNA, 90 bp, Homo sapiens
agaccctagaggcctgcggcctgcggttcatcaatgccagaagacgaattcttcagccaatgttggattcaagttgttcagagaccccca

SEQ ID NO: 296903 - DNA, 75 bp, Homo sapiens
aatcgggctgaagcgactgagtccgcgatggagacccaacatgagtgaagtttcctgcaagaaacgggacgacta

SEQ ID NO: 296904 - DNA, 101 bp, Homo sapiens
tctttgtggctgtgcttgccaggcctggctccaaaatgagccgtcagactgctacagcattacctaccggtacctcgaagtgtccaccatcccagagggtg

SEQ ID NO: 296905 - DNA, 100 bp, Homo sapiens
gtccccctggtcccgaaggaggaaagggtgatgctggtgcccctggagctcccggtagccagggcgcccctggccttcagggaatgcctggtgaacgtgg

SEQ ID NO: 296906 - DNA, 99 bp, Homo sapiens
aaaaacgaaagcaactggagctcaggtgtccttaagtttgctcgcttggtcaagtcctacgaagcccaggatcctgagatcgccagcctgtcaggcaag

SEQ ID NO: 296907 - DNA, 98 bp, Homo sapiens
gaacggctcccacagccgggcgttgggggaaagggattgccatggaaagcataactgtgtatcagacagttgcacacccaggaatccaagggaacctg

SEQ ID NO: 296908 - DNA, 82 bp, Homo sapiens
cagagagaggaagccgaaaacaccctgcaatctttcagacaggtggtcgagatatccagtctgacggagcacttgctgacgg

SEQ ID NO: 296909 - DNA, 83 bp, Homo sapiens
cgaaggtttcctttaagatcacgctgacgtcggacccacggctgccgtacaaagtgcactacaagggcccccagggatggaga

SEQ ID NO: 296910 - DNA, 110 bp, Homo sapiens
gatgggaagaagcgttagagcgagcagcactcacatctcaagatgcctgtgaggagccaccaacatttgaagctatggagctcattggtaaaccaaaaccctactatgag

SEQ ID NO: 296911 - DNA, 98 bp, Homo sapiens
cggccggccctgcgcctcccgccgcgcccgggatgtattcgtccccgctctgcctcacccaggataaacatcacgatgctgctcatgaaatcatcgag

SEQ ID NO: 296912 - DNA, 83 bp, Homo sapiens
atgaagaagaagattaacctggagttaaggaacagatccccggaggaggtattgggagagttgctgctacatctttaggaaat

SEQ ID NO: 296913 - DNA, 96 bp, Homo sapiens
cgcgcgtggatcctgctcaccttgggcttggtggcctgcgtgtcggcggagtcgtccaatatcagatggaaatgatgcggagccttcgccatgtaa

SEQ ID NO: 296914 - DNA, 83 bp, Homo sapiens
ccgcgcgcagggcctgcagcgggagctggacggcgagcgcgagcggcgcgagaaagtgaatgttggatgtgtacccaaaaagg

SEQ ID NO: 296915 - DNA, 100 bp, Homo sapiens
cgttcgcaccggaaaatgtagcttcccggttaagacctagaggatcaagacataatgggagcatttttagacaagccaaagatggaaaagcataatgccc

SEQ ID NO: 296916 - DNA, 75 bp, Homo sapiens
gcgacgaaccttggagagaggagaacgaacatcttctggacctttgtccaggaatcaaacattttaagtccagtg

SEQ ID NO: 296917 - DNA, 100 bp, Homo sapiens
gccacaagctccacctggactacatcgggccttgcaaatttaccgtgcagacggtctacgtgcagcaccccatcacctttttggaccgccctatccaaat

SEQ ID NO: 296918 - DNA, 51 bp, Homo sapiens
cactgttgaactctgtggtgcgcttaaggtggaacaatccaaagttttaat

SEQ ID NO: 296919 - DNA, 100 bp, Homo sapiens
ccgtcagctgccatcttagttgtctacctggatcgggcccaggatcttcctatcttcgagtacttccgcagagacacagagaagcgggacttcgtctccg

SEQ ID NO: 296920 - DNA, 75 bp, Homo sapiens
cccagtgggaaatatagcagcaatttgggcaactttaattatggctgtggaaaatctctgttctcacaaagtctc

SEQ ID NO: 296921 - DNA, 75 bp, Homo sapiens
cgagaggcccgggagcggcgcgcagagcagcctccggccgccgccgcgcaggtgacgccttctgggccccatctg

SEQ ID NO: 296922 - DNA, 75 bp, Homo sapiens
agataggcggccatggtccaaccttgaaggttccagcaacagatagaaatgctttaagttcactctggggaaagc

SEQ ID NO: 296923 - DNA, 100 bp, Homo sapiens
cctaaatcataaaactttgtaagtggcagaacaaggatttgaagctggcagtctggttccaggtctcctctgagcctccggcctccataagacccaaaac

SEQ ID NO: 296924 - DNA, 101 bp, Homo sapiens
tgtggtgccggcactgcggccatcttgcagttcctctgcaaagagacgagttgtactgctgtcacaggaaatggacgctggattacaagcatggcagctca

SEQ ID NO: 296925 - DNA, 75 bp, Homo sapiens
ggggaccttgccttgcccggggtatgaggatacatgggctgcacttcacagaagagccaaagactgtgcaagtgc

SEQ ID NO: 296926 - DNA, 100 bp, Homo sapiens
gctgatggaacgcgtgatgatggagtttgtgagggaaacctgctcccaggagttgaagtgtgatccctcacatccacaaatctctgattggaaagaaggg

SEQ ID NO: 296927 - DNA, 135 bp, Homo sapiens
gagagagcgagctgagtggttgtgtggtcgcgtctcggaaaccggtagcgcttgcagcatgatgatgatgtgcctgcagatatggttgcagaagaatcaggtcctggtgcacaaaatagtccataccaacttcgt

SEQ ID NO: 296928 - DNA, 100 bp, Homo sapiens
ctacagaatgctttggagacatgctttacccttatgttgaagaaatgtcctggagtttgaactacggaaagccaaggagaccattcaggccctccgagcc

SEQ ID NO: 296929 - DNA, 83 bp, Homo sapiens
cggcggcgctggaggagcgaggcagctgtactaggactgggaacgggtactataagatctccgtggtgctcatgtgctttgtg

SEQ ID NO: 296930 - DNA, 75 bp, Homo sapiens
ccggccgagctgaggcggtcgcggccatgaagagacctgcgatggacttcacagatttgtccaggctgcccctgg

SEQ ID NO: 296931 - DNA, 74 bp, Homo sapiens
cctcttgccctcctaacatcatgaccacaagttatgtgaaattacctccagagaaatttgcacctaagaaacag

SEQ ID NO: 296932 - DNA, 74 bp, Homo sapiens
tctagacaatggtacaatctcaatcactaaggaggaagagcgagagaagaagttttctagaaggctaaatcaca

SEQ ID NO: 296933 - DNA, 100 bp, Homo sapiens
ccttcccggcatcaccagggtggctgtggacaaccagccccgagacatcggactgcagcttactttgcaaagaaggaagatggttgtttccgaagtggac

SEQ ID NO: 296934 - DNA, 101 bp, Homo sapiens
taaagaatcaacatgtattcacaggttctggctggctgtccaagatcttaagaaacaacccctacaggatgtggccaagagggtagaagaaatctggcaag

SEQ ID NO: 296935 - DNA, 75 bp, Homo sapiens
tgaggctgaggactgactggggttctgagactccctgtcccggaccgcaggcccccgacagctgctctcgggagc

SEQ ID NO: 296936 - DNA, 111 bp, Homo sapiens
cgtttccccaaattgctccaatacagttcaagagaaaacattcaacaaagatacagtgattatagtctaaaagatggcggcaaggcagcccaggcaaatgtaagaataggc

SEQ ID NO: 296937 - DNA, 51 bp, Homo sapiens
ttctcatgttttggctttggggctagggaacaagcacatcatgattgactt

SEQ ID NO: 296938 - DNA, 100 bp, Homo sapiens
ctgtttgagaaaaggcctaagaattttggcattgggttttggccaaattgggcgagggcacaaaataaccacttaccccttctcaccgaggaagagcggg

SEQ ID NO: 296939 - DNA, 82 bp, Homo sapiens
gggagtgcgcggcggccgcagctgccacaaaccagactatgtcagagagtcacaatgaccttgcacaataacagtacaacct

SEQ ID NO: 296940 - DNA, 75 bp, Homo sapiens
ccggcacacgcgcagccccggcctctcggcctctgccggagaaacaggccagaagcggactcctagaagagggga

SEQ ID NO: 296941 - DNA, 75 bp, Homo sapiens
cccaaattcttcgttctgtgcggcgacctcatccacgccatgccagaaatgggatttgaccgatacaaaatggtg

SEQ ID NO: 296942 - DNA, 98 bp, Homo sapiens
cttccactcaagaatcgtaggccaggctgatggagagctgaacattactcttccagaagagattgctcatttagaaagtggatgtgtgggataacatg

SEQ ID NO: 296943 - DNA, 100 bp, Homo sapiens
caccaattccctattcacaaaaacctgccccagaaggatcttgcactacagatgctagagaccgttggatggcagcttaaccttcagatggctcactctg

SEQ ID NO: 296944 - DNA, 76 bp, Homo sapiens
tggctgtggtcggtgctggcggcggcgcttgggctctgacccttcaaagttgtacaagaaagcagatgatgttgca

SEQ ID NO: 296945 - DNA, 90 bp, Homo sapiens
ctccataaccgagtccgaaagggcagaatctatgggggtctctctcctcctgggcgagccgttcttcactaccagcctgctgccgtggca

SEQ ID NO: 296946 - DNA, 100 bp, Homo sapiens
cgcattttggcattgacatttaattttagggtcctttatatagaagggagagtagttaccttatcccatatcacacaactggtcctcagccataacaagc

SEQ ID NO: 296947 - DNA, 73 bp, Homo sapiens
ccgcgccgagccggaggccgcgtggacccgaaagccgctgggaaaaacaatgcagatcttcgtgaagactctg

SEQ ID NO: 296948 - DNA, 75 bp, Homo sapiens
tacgacgtgatcgtgctgggcaccggcctgacgattgtcctgggtcacataatgccagctgagcgtaaaaagcca

SEQ ID NO: 296949 - DNA, 97 bp, Homo sapiens
tccacggagtgtatgaccacaaacagccatcaagacttcaaatctcaacctgagccatccccagttcttagccagttgagccagcgacaacagcacc

SEQ ID NO: 296950 - DNA, 100 bp, Homo sapiens
ctacaggatgggcgcgaacaatggcaaacagtacggcagtgagggaacgggaggatgaaattgctactatggagtgcatcaacaatggcaagtccatctt

SEQ ID NO: 296951 - DNA, 90 bp, Homo sapiens
agccgcgggccttgggcccgtaatctcacgacctccgcctgcggcctcctcgcaaaacaaggtggaaccgtcccaaaatgtcccttgctc

SEQ ID NO: 296952 - DNA, 87 bp, Homo sapiens
ccaatcagcatgctgtgtctagctcaagattttaggtgatgggcaagtcagaaagtcagatggatataactgatatcaacactccaa

SEQ ID NO: 296953 - DNA, 83 bp, Homo sapiens
gtttttgcggactggcgctttctgatttcagagactctccgcaacagaaccatctcaagctggacggcagtctggaaacgacc

SEQ ID NO: 296954 - DNA, 75 bp, Homo sapiens
ctggccacttgcttgggatcctttatcctggtcatcttctatttccaaaagtgaaccagaggaaatgcctccaga

SEQ ID NO: 296955 - DNA, 100 bp, Homo sapiens
gggggctgtcgcccgaatgcaggaagaccgtgatgggagctgcagcacagtcgggggtgtaggttatgggggttgctacaagcctcaggaaaaatcagat

SEQ ID NO: 296956 - DNA, 80 bp, Homo sapiens
gccaggcggtgatgaagaatccccccgaaaggaccccccagggccaattcctgtccccccagcagcatggcatcgtgtgc

SEQ ID NO: 296957 - DNA, 100 bp, Homo sapiens
ctctgagctgctgcacatgttagagtcccccgagtctctccgctccaagtttggtcagatgaagactgggtggagaagtttgctgggaagaggataaaga

SEQ ID NO: 296958 - DNA, 82 bp, Homo sapiens
cagaaagtgctcgcttcccttcgggggctttcgcgaatcccgaggcaatctcggaggcggcattgtttccaagtcgtacgag

SEQ ID NO: 296959 - DNA, 75 bp, Homo sapiens
ggatcccaatgattcagatgtggaggagaatatatcctctaaatctgattccaaacaggagctttacagaaatgc

SEQ ID NO: 296960 - DNA, 75 bp, Homo sapiens
catcagcatgtatttggttaatggctccggtggacattgcatctgggatggccattgaagggatgtgctatgccc

SEQ ID NO: 296961 - DNA, 76 bp, Homo sapiens
ggaaagcacccgtcgtatgctgcaactggttgaagaggaagctcttcgtgggcggtcttgactggagcacgaccca

SEQ ID NO: 296962 - DNA, 98 bp, Homo sapiens
ctggatcttaccttgcccaccaacttcagagatttgtccaagagcccaaggcggtgtttgccaaggagcagccagcgagcagggaggtgcaggctgag

SEQ ID NO: 296963 - DNA, 100 bp, Homo sapiens
cagcaacggcatctttgatcttcagaaaacttcccttggaggggatgcaccagaagagccagagttggttgaatctggcgatgtggaacccatggatatg

SEQ ID NO: 296964 - DNA, 85 bp, Homo sapiens
tgtcatgaggagacgtattgctaccccagaagaagttcgtcttcccctccaacatgggaaggatggcttcctggccttccaaact

SEQ ID NO: 296965 - DNA, 82 bp, Homo sapiens
cgctaacaactgcccagctttgaggaattctcaagaaatttgaggaagaagatttggatgacattttaaggaaaagattgaa

SEQ ID NO: 296966 - DNA, 75 bp, Homo sapiens
gaaggagctggcggacatcactttagaccctccacctaattgcagccatcactggtgcaagctatatttaacgga

SEQ ID NO: 296967 - DNA, 51 bp, Homo sapiens
gtaaaagccccgcctctgccttcggatagaatgattcagtggtggctggtg

SEQ ID NO: 296968 - DNA, 100 bp, Homo sapiens
catggattaatcaaccttagaaagtttcaatgtgcactttacaggtccccgatgaaccaagagaaccctccaccatatccaggccctggtccaacggccc

SEQ ID NO: 296969 - DNA, 97 bp, Homo sapiens
ggagaggctgaagcgtcgctacgggcccaaggacgtgctgagaagcaacctggtgcaggtgaaggtggagaaagaggcttcctgtgatgagagtgat

SEQ ID NO: 296970 - DNA, 58 bp, Homo sapiens
ggcccgtcaagctgcgcctgacaggtaacaaatatactctggagactagaccaaacca

SEQ ID NO: 296971 - DNA, 75 bp, Homo sapiens
aaaatatattcacaaagaaacggtgtctaaatgagccaggcccagacatgtccgtccttgtaagttaaaagcttc

SEQ ID NO: 296972 - DNA, 95 bp, Homo sapiens
ttgtactcatagattgtgtaggcgttggtcttctgatagcaactttaatgtgtgctcgccagaaacccagagctaattatttagaagaccgaaaa

SEQ ID NO: 296973 - DNA, 74 bp, Homo sapiens
tcagtgcttcggggcacttagcacagcgcctggcgcaaggtgatgctgaacacagagcggctgatcaagcatgc

SEQ ID NO: 296974 - DNA, 98 bp, Homo sapiens
gccgtgcatggggctgctccccaggacctgagcaggaacctggagttttcaggtgtaaagcaggccctctggctcaccaagaccaagttaatagaagg

SEQ ID NO: 296975 - DNA, 55 bp, Homo sapiens
atattccgggtggtcccattcatatcagatcctccatgaaatgatggaagaaatt

SEQ ID NO: 296976 - DNA, 51 bp, Homo sapiens
acagaattacttttgatgctttcccaggtccagtggcattgcagagcacgg

SEQ ID NO: 296977 - DNA, 100 bp, Homo sapiens
taaacagtcactactaggaaaactcaaatctttggcaaccaagcctctgcaagcacgtatgtgccaacggtgtgcaatgggcgggaagtcctcgactcca

SEQ ID NO: 296978 - DNA, 100 bp, Homo sapiens
cgagcgccgcgaacttggtggccagcgccgcgcccggggccgtgcgctctcgggccactcggccgcaggatatcaatgcttacaattgtgaagagcccac

SEQ ID NO: 296979 - DNA, 96 bp, Homo sapiens
ggcttccagtggaggcattttggggcagaatacagagatatggaatcagtttctctgcaggtggatattgttcccagccagggggagatcagcgtt

SEQ ID NO: 296980 - DNA, 75 bp, Homo sapiens
gctgggtcttcgcccaggtggccggcgcttcagatgtgtcttgctgaatcagggctctcttatccctgccatcga

SEQ ID NO: 296981 - DNA, 100 bp, Homo sapiens
gcacgacctccgactactttctccttcaaggggctcccacaggatcagaggctggggccaactggaaccattggcagctgcacgctcattactaccctcc

SEQ ID NO: 296982 - DNA, 98 bp, Homo sapiens
agaaagtctgtctgcatcttctaaagctctgtttcctagcacagcacaaattctggatcagactggggtcagggaatttatcttacacacagtcaggg

SEQ ID NO: 296983 - DNA, 97 bp, Homo sapiens
agtggaaccatcacacaaaagcacacaaagacctcctcctccacaggggagacagagttttcaaattgctgcaaacctcagcatggaacgctatgcc

SEQ ID NO: 296984 - DNA, 94 bp, Homo sapiens
gaaaaagatgctatggacgtatggtgcaatggtaaaaaattggagacagcgtgtggcaaaggagcagagaactttgacaagttcttcacacgag

SEQ ID NO: 296985 - DNA, 105 bp, Homo sapiens
cgggatttgggtcgcagttcttgtttgtggatcgctgtgatcgtcacttgtaagactttgaccccgacgcaggcttcagtgattgccgcggatcagaagcctgag

SEQ ID NO: 296986 - DNA, 101 bp, Homo sapiens
ttagcgctagccctgcagacagaggtgtgctgacgacctgctacaacagaaacaatgcagatcttcgtgaagactctgactggtaagaccatcaccctcga

SEQ ID NO: 296987 - DNA, 119 bp, Homo sapiens
ggagttcaagaattcccagaagaggcagcatgcggaaggcattgctgggagcctgaaaactgtgaatgcctgatcctgcctgaagatggtgccactggtggctgtggtatcagggcccc

SEQ ID NO: 296988 - DNA, 100 bp, Homo sapiens
acgaaatgaggggctacgcggagaagtgtttgggaaatgggaagtaatgacagctggcacctgaactaagtacttttataggcaacaccattccagaaat

SEQ ID NO: 296989 - DNA, 74 bp, Homo sapiens
taaacctgtgaccacccctgaagaaattgcacagtgctgaacttcagactctcttgatgaatcagttaacagta

SEQ ID NO: 296990 - DNA, 88 bp, Homo sapiens
cagggtccctgaagagggaagacacgcggaaacaggtacttctcccagcagctggtctcttacagttacaggatgtgaagaagacttg

SEQ ID NO: 296991 - DNA, 98 bp, Homo sapiens
gtggctggagaacgactctacaatgttgtagtagacacagaagtcagggccaaaactggaaccaaggatttaataactattatgatcaaggatatgga

SEQ ID NO: 296992 - DNA, 75 bp, Homo sapiens
caccagcgctttccctctatcagtgaagaaaagattaggcagaatctgaaggaaaagcatgctcgacacatagca

SEQ ID NO: 296993 - DNA, 98 bp, Homo sapiens
ccaagtcctctccatctgatcccatgaccacctccagagctaatcaggaactgcaagcacatgttgaccagataactgaaatggcagcagtaatgagg

SEQ ID NO: 296994 - DNA, 102 bp, Homo sapiens
gggaggactgttggaattgttggcaaccaacctaaggtggcctcagttgaaatggatgcagtcagaactgaatgttgaagaagtggtaaatgacaggagctg

SEQ ID NO: 296995 - DNA, 98 bp, Homo sapiens
ggcgctgagccagcggggccggtcctggctataagtcaccatggcacagcaagctgccgataagtatctctatgtggataaaaacttcatcaacaatc

SEQ ID NO: 296996 - DNA, 99 bp, Homo sapiens
ctgccgggaagagcgatgagagagatgctgcaatttgtcagtaatcaagtgggagagttccctgacttgttttcagaacagctgtgtagctcctttcct

SEQ ID NO: 296997 - DNA, 89 bp, Homo sapiens
gcagccgcggcggttaagtatgcggcgccaggagctatgctggctatgagtttgacatctgcttcacctcagtgcagaagagagcgatc

SEQ ID NO: 296998 - DNA, 74 bp, Homo sapiens
ccgacccgaagtcatcgctgggagtactggttgccctttcctcaggtgacctcacaaagttcggccgtggggat

SEQ ID NO: 296999 - DNA, 71 bp, Homo sapiens
acagcctggaggccgagcgcgagcagttcgacaagacccagaaaatgaagtgccagccccagccccacccc

SEQ ID NO: 297000 - DNA, 100 bp, Homo sapiens
cgtgattgccgtccactcacttatcaagctgccatacctgagttgagaactccgagacgctctcctggtctgtgttctgactctttggaaaagagcttaa

SEQ ID NO: 297001 - DNA, 75 bp, Homo sapiens
ccggctacttctcggcgctgccgtctctggaggagtactggcaacagagaattcggtcaacagtggatgaaaaag

SEQ ID NO: 297002 - DNA, 102 bp, Homo sapiens
aaatccaaccagctcttcaggagaagcacgccatgaaacaggattggccctgtgtactcctctgtctcgtctgaagcaagaagtagcaacattcagtcaaag

SEQ ID NO: 297003 - DNA, 95 bp, Homo sapiens
tcacaacagataggtgatagttgggaatggagaccatcaaagatttgaaaaatgtgtgagtgctaaggaagctttggagactgatctttataagc

SEQ ID NO: 297004 - DNA, 80 bp, Homo sapiens
ctcggctcctgtcgtccgttctctcaggctcccgttcaggctctgggcgtggggaggctgagacacgggagtgcatctac

SEQ ID NO: 297005 - DNA, 82 bp, Homo sapiens
cacagagatccctgccgactaccagcggatatgcaagatgctctactatctgtggatgtgttatgggcacgctgcacctggc

SEQ ID NO: 297006 - DNA, 101 bp, Homo sapiens
aggtcccggttggtagagggtttgagtccgcatcgccacagctgaaggctgcgagggactaagagcagaccctgtatgatgagattcgtcagtttcgcaag

SEQ ID NO: 297007 - DNA, 75 bp, Homo sapiens
tataccatcatcacagtggattcctgcaaaggcttgagtgacatccaccacagtttgaaggatgacctctaggaa

SEQ ID NO: 297008 - DNA, 96 bp, Homo sapiens
gcagcgtcaaggaccgcaagaaagccgtcctgtccgacatcggtgtctcggggagacccttgtccccggccaatgtccctgctctgcctggcgaga

SEQ ID NO: 297009 - DNA, 96 bp, Homo sapiens
agaaactgcgtggtagcggtgttgctgttgaaacaggaacagtctcttcaagtgatgtacaaacccgtagtgctgatgaaccaatgacaacatttg

SEQ ID NO: 297010 - DNA, 50 bp, Homo sapiens
gagacctgccatttccaggccttctggacggagtcttgctctgtcgccca

SEQ ID NO: 297011 - DNA, 96 bp, Homo sapiens
ctaatcttgtacttcaagaggaggaatcacgctcggaaacaatgggaccgccggggtcctgcttgtcctggggcagccacgagggagccctcgtca

SEQ ID NO: 297012 - DNA, 99 bp, Homo sapiens
atgccagctcctcctttggctggttgtctctggatggtgatcctacaacaaagagcgtgggccagcccgaggaggcaagcccggaggagcagccagagg

SEQ ID NO: 297013 - DNA, 100 bp, Homo sapiens
ccatcgtggattccaagacatccctgctgagagagccaagggaagctatgcgaaattatttaaaagagcgaggggatcaaacagtacttattcttcatgc

SEQ ID NO: 297014 - DNA, 100 bp, Homo sapiens
attttgacatttctgctgtatgcaagttttcacttatctcgaaagcctatcagcatagttaaggccaccagcccctcgggttccaagatgcagctactgg

SEQ ID NO: 297015 - DNA, 80 bp, Homo sapiens
tatttttggacctgaaacagaaattctggaacacctatatgcaaattgtggctactaatttgccccctgaagatcaagat

SEQ ID NO: 297016 - DNA, 95 bp, Homo sapiens
ctgggatgacctgtaccacaagaggctaactccacccttcaacccaaatgtgattctacttgacacacctggcattatcagtcctggtaaacaga

SEQ ID NO: 297017 - DNA, 75 bp, Homo sapiens
acaaacctgccaacgtccagccttattacctctatggatccaaggtggacccccaaaagtacaagggcatattta

SEQ ID NO: 297018 - DNA, 99 bp, Homo sapiens
gcgcggccagccccgcatcccccccggagccgggaggagcgagctgggctggaggcctcactcctggcatgccaccaagttctctgacagccaccccga

SEQ ID NO: 297019 - DNA, 100 bp, Homo sapiens
ggctagtggtcctctggtcttccctgaccccgcggccggacgacccaagcccgctgagcaggatgaggggcttttgttgtaacaccctgactttaaaagt

SEQ ID NO: 297020 - DNA, 83 bp, Homo sapiens
cagagagggaagagattcagccagcacactcctcgcgagcaagattaactgctgaagtactgatcgagttctgcatttcttca

SEQ ID NO: 297021 - DNA, 98 bp, Homo sapiens
gaaactaacccaacagcagaaagcggatgctgagccccacttataagcagcgtaatgaggacttccggaaactgttcagcaaactccccgaagcagaa

SEQ ID NO: 297022 - DNA, 123 bp, Homo sapiens
tccagcgagatccgggccgtgaacgaaagcagtgacggaggagcttgtaccaccggcgaggattaaatccaccacacagggtgaaatctatctccatgacaacattcacacaacaggaaattg

SEQ ID NO: 297023 - DNA, 100 bp, Homo sapiens
ctgcatggtgttccacatcattgacttactgctttgtgagattcaacctagaatgacactgagcaaattgcctcttcaagcaaatgtctatcccatgacc

SEQ ID NO: 297024 - DNA, 75 bp, Homo sapiens
gtaggcctgatagactgattaaaccacaggtgttgctctcttgccattcgtggatgagcgaaggctacgagctgc

SEQ ID NO: 297025 - DNA, 100 bp, Homo sapiens
ctgacttcaagaatgaagccacggacccttgcgcctttatcctcctcttctacctcgttttttatgggttcctcaccgccatgttcaccctcaccatgtg

SEQ ID NO: 297026 - DNA, 98 bp, Homo sapiens
gtggaagtccaagtcaaacgcagaaggactgcctcactgagcaaccaagagctcctggaatcccagctgcagtcacagaagaggagccatgagaatga

SEQ ID NO: 297027 - DNA, 111 bp, Homo sapiens
agaaggtccttttctacaaatatcagagccatggctcagaagaagcctgggaagtttataaacagataaagacgcaacatgaaagacttgtaagttaagtctcatctttct

SEQ ID NO: 297028 - DNA, 90 bp, Homo sapiens
agtggaacaatcttttgttggattgaaacagctaatctacagtgctgtggataccaatccactttctctgtatgtcatgcatccattctg

SEQ ID NO: 297029 - DNA, 100 bp, Homo sapiens
ctccctccagaacatacacttacatctctagataacagtctgcactttcacccgtttcaggatgcttatagaattttatgagtcaccagatccagaaaga

SEQ ID NO: 297030 - DNA, 99 bp, Homo sapiens
ttcggctgcagctgggcagtctgggcagtggaggcagaggttttactctggacaccggtcccctcacatcccgtataagttgctgcacctggtgtggac

SEQ ID NO: 297031 - DNA, 100 bp, Homo sapiens
cagagttttcttgaacttttagaatatgaaaataagagccctgaggatccacaggtcttggataacgggtccatatggaatatttgctggtagggatgcc

SEQ ID NO: 297032 - DNA, 82 bp, Homo sapiens
ggagggcggagctggcgcggcccctagctttctccttctggtgtggggcccgaggtcatcatcagatttgaaatatttaaag

SEQ ID NO: 297033 - DNA, 87 bp, Homo sapiens
ccaggcggtggtgggcgccgtgaagagccttcaggcgctgggcgaggtctcacactctgaggatgactgtctagctttcaaagttca

SEQ ID NO: 297034 - DNA, 97 bp, Homo sapiens
gaatttctgcaaacgaacacagcaccgggagctctgcagacctgtgtcggcgcggaacccggactgagacatgcagcatcctggccagaacaagcca

SEQ ID NO: 297035 - DNA, 82 bp, Homo sapiens
gtctaattctgctaacctgaaagtaatgcccaaggatatatcccctggggcagctggtggggctgaagatggtttctttgtg

SEQ ID NO: 297036 - DNA, 75 bp, Homo sapiens
gatctgtgactcatcagagtgtgggggttgtgaaagacacacaaactcgggccacttctaagagtctcttacctg

SEQ ID NO: 297037 - DNA, 83 bp, Homo sapiens
ctggctttattacttctccaaatttattgagctattagatacgtttctatttttgaggccgggtgcagtggctcactcctgta

SEQ ID NO: 297038 - DNA, 98 bp, Homo sapiens
ggcgctctccgggctcttctctagctctcagcggctgcgaagtctgtaaacctggtggccaagtaagcacagacacctccagcttgcgaagggcagat

SEQ ID NO: 297039 - DNA, 82 bp, Homo sapiens
ctccaggagttcgtctcttacgtctgcggaagtgcagctgcctcagttcttagcgcagttggttgaatctggcgatgtggaa

SEQ ID NO: 297040 - DNA, 100 bp, Homo sapiens
gccccagccaggacgagaggatgcggagcccgcagaacctccacagtcaagaggacgttccctgaatgtggtttctacggaatgtatgataagatcctgc

SEQ ID NO: 297041 - DNA, 82 bp, Homo sapiens
ctcgcctcacagcgaaacgccgcgcactcggagccggcacggctcggcgtggccgcaagaggaagaggacgtggaatgggac

SEQ ID NO: 297042 - DNA, 100 bp, Homo sapiens
tttcaggagtagatttcgaacttgtgggcactggctataggctttccttaataaagaagcggtttgctactggtgtcgtgaaaactacccctaaaagcca

SEQ ID NO: 297043 - DNA, 90 bp, Homo sapiens
ccggaccccccgattcaccaacgagccctagctacagatgcacatgttgaatggagctcttctggcattgctgtttcctgtggtaaacac

SEQ ID NO: 297044 - DNA, 98 bp, Homo sapiens
tttgaatatgttcaggtccagttcagactcttgatcccacagccacttcttgagtgaggagcgagaacccgagcagcgccatgagcaacactaccgtc

SEQ ID NO: 297045 - DNA, 96 bp, Homo sapiens
gtggataagacagtcccacagtccagagatgtggtatggtgtattcctgtgggcactggtgtcttctctcttctttcatgtccctgctggattact

SEQ ID NO: 297046 - DNA, 113 bp, Homo sapiens
ttttatctttggagaagatgctgaattcctgccagacccctcagctttgcaggactctcaaattgcagacatactgtcaacatctgggactgtagttactattacaatcatgc

SEQ ID NO: 297047 - DNA, 100 bp, Homo sapiens
ctctcatctccggccctctcggcgtccgccagcgatggcacagtttcagaagctatctcctgagcagtgtgtaattctctcctggctgtttgatggtaat

SEQ ID NO: 297048 - DNA, 98 bp, Homo sapiens
caagccccgctccggccaacaagccgtcaccgatgggttgtatatactactgaaatgaatggcaaaaacacattctgggatgtggatggaagcatggt

SEQ ID NO: 297049 - DNA, 75 bp, Homo sapiens
tcatcaaggagagcgaagtcaaggccctgtgcgctaaggccagaggttgacggatatattcagacgttacgacac

SEQ ID NO: 297050 - DNA, 76 bp, Homo sapiens
caccatgcatctcctcggcccctggctcctgctcctggctcctactccaatgtggccagatgacctgcaaaaccac

SEQ ID NO: 297051 - DNA, 74 bp, Homo sapiens
atcctacaagttgaaaattcctaagaatccagaacttgtgccacagaactacaaaactcccatcaagactgaag

SEQ ID NO: 297052 - DNA, 100 bp, Homo sapiens
cacgaccatctcgcactaccctgactacagctggagcgcccagaggcgagccctggtggaggaagaggtccactggtgtgtcctccccttccgagtgctg

SEQ ID NO: 297053 - DNA, 100 bp, Homo sapiens
caaagggggctgctgaccgagagagctcactcagccaggatgactttgacaacgatgtggatgctctgctggaagaaggcctttgtgcccccaaaaagag

SEQ ID NO: 297054 - DNA, 100 bp, Homo sapiens
accggaatgtctacagtggcatgaacggaagtcctggctgagcaaggttggaagccctagttctcgcattgaccgcacaaacttttctaatgaaaaaacc

SEQ ID NO: 297055 - DNA, 75 bp, Homo sapiens
atcaagaatgttcagaagaatgatgtaaatgtggaattttcagaaaaagaggggtttgttaaagttgttaagaat

SEQ ID NO: 297056 - DNA, 82 bp, Homo sapiens
cggtgctgcagacggcgagacctcctgcacaggaacgaatgcaggaatttgggaactgagctgtgcaagtgctgaagaagga

SEQ ID NO: 297057 - DNA, 100 bp, Homo sapiens
ccactttttggctgttctgaagagtgttactgtgaacattcatgcacaaatttttatgtggagacttaattcagtgcacaaatgagatgaatgtgaacat

SEQ ID NO: 297058 - DNA, 100 bp, Homo sapiens
ctgccatatctttgcatccttcaatgacacttttgtccatgtcactgatctttctggcaagaactgtgtgaaccacagagctactgccctatgcatcatc

SEQ ID NO: 297059 - DNA, 100 bp, Homo sapiens
tggaagccatgaggccaaaggcagttgtattgattgtagaaggcatgaaacaaaaaatgtggagtattgaaaatattgccttcggttctggtggaggttt

SEQ ID NO: 297060 - DNA, 82 bp, Homo sapiens
tccagcaaggtcggcagagcaaggggcttacgcagaaggacctggccacggtttggtgcacctcgatttggaggaagtaggg

SEQ ID NO: 297061 - DNA, 97 bp, Homo sapiens
gcggcgagtttccgatttaaagctgagctgcgaggaaaatggcggcgggaggtcagcccaaggccaaccccactgtcactctgttcccgccctcctc

SEQ ID NO: 297062 - DNA, 97 bp, Homo sapiens
tctgtgcggcggccggcgggaccataagggcttaactcatatatttaacccccctccaaaaagcgttactacaaggagacctctggcctgatgctgg

SEQ ID NO: 297063 - DNA, 51 bp, Homo sapiens
gcccagtcaccaagtgctctccagcaggctttcttcgagagtcacccagct

SEQ ID NO: 297064 - DNA, 96 bp, Homo sapiens
tgaactcactggagatgcaaagaaaagtgtggagatggagacaccccaatcgactcgccagacgaatctagaacatgatgtctatgaaagacttac

SEQ ID NO: 297065 - DNA, 100 bp, Homo sapiens
aaacatgcatccaagttccagtttgtggcctcctaccaggagctcatggttgagtgtacgaagaaatgatttgcttgtaaatgcatcacgaagaggcagc

SEQ ID NO: 297066 - DNA, 97 bp, Homo sapiens
tgacagcacaggtcacagtaaggccaaaaatgtgcatactcacagagttagagagagggatggtgagccccaacggtaaactgactgatttcctgag

SEQ ID NO: 297067 - DNA, 75 bp, Homo sapiens
actagtgcaaccagtaagttgatccatccagatgaggatatatccctggtttcccaaaccactccttatgatcca

SEQ ID NO: 297068 - DNA, 80 bp, Homo sapiens
attccggccagcttcacgaagtcagagaggaacaagatcactcaaggtgaaggataatctactaataccagcactttgaa

SEQ ID NO: 297069 - DNA, 73 bp, Homo sapiens
tgtgatgttggagaactatagcaatctggttttcttggataaaccgagactactccttccttgactacatcct

SEQ ID NO: 297070 - DNA, 100 bp, Homo sapiens
aggagctgtcgccggcggagggtgcatgtttgcgaggaagccgccgggcgccgcgcctttggtttaagtgctgtggggctgctaactacacagattggga

SEQ ID NO: 297071 - DNA, 90 bp, Homo sapiens
cttccacttcgtgttcttcctagcttccctgtatgtgatgatgaccgtcaccaactggttcaagcatacaagaattaaattctgaataag

SEQ ID NO: 297072 - DNA, 100 bp, Homo sapiens
cggcgcggggcacaggatccggagctggagcccccaggtacgtgaacacactcctgaaactcatcccgctggtgctgggtctgcaggaacaactgcggca

SEQ ID NO: 297073 - DNA, 100 bp, Homo sapiens
cggaaatgcccttacagcagcaggtgtcgtgaaaactacccctaaaagccaaaatgggaaaggaaaagactcatatcaacattgtcgtcattggacacgt

SEQ ID NO: 297074 - DNA, 73 bp, Homo sapiens
aaaattccaagtaaagaactgagggtcagattgacactgcccatctctaagataagaacctggaaaggggact

SEQ ID NO: 297075 - DNA, 74 bp, Homo sapiens
agttcaatctggaaacatcaatgctgccaagttccgatgaagttaaattccgtcaagatttaatgaatattgcg

SEQ ID NO: 297076 - DNA, 101 bp, Homo sapiens
cgtcgcaaaaaaattggatagtggtgaagcagtattttccaatttgaagattcatttgaaggtggctcctgccacctgctaatagcagttcaaactaaatt

SEQ ID NO: 297077 - DNA, 100 bp, Homo sapiens
ctccttcacgcacgccctgcgcctggtgaaccaagatctcagtctgtggtagaagctgggaccctgaaacatgaggagaagggagagaatgagaacaccc

SEQ ID NO: 297078 - DNA, 100 bp, Homo sapiens
gagcaccggctaccccatgtgttactgctgcagctgggaacaactttcttcaaactctcagagagtggcaacagtgtgaaaagactgaaaccggaccctg

SEQ ID NO: 297079 - DNA, 75 bp, Homo sapiens
caagggctgtatgagctctcagcaagcaactttgagctgcacgttgcacaagctatgttgcaggcagatgatgaa

SEQ ID NO: 297080 - DNA, 83 bp, Homo sapiens
cgtgcacatccaggctggtcagtgtggcaaccagatcggtgccaaggttcagcttgttggtttagatgaggagagttcagagt

SEQ ID NO: 297081 - DNA, 99 bp, Homo sapiens
tgaaggagccagtttggctgaaaataaaaggagtttggatcataatacaagagaagcacagggcaaagacactgcataacctcaagaactaagaatgga

SEQ ID NO: 297082 - DNA, 100 bp, Homo sapiens
ctcggctcttccagccaccccctctccagtctgctcagctcctggaatgaggccgcccatgggaggccatatgccaatgatgcctgggcccccaatgatg

SEQ ID NO: 297083 - DNA, 50 bp, Homo sapiens
gccggaaggagctagacggcggtcgggaatgtatcctgtcaggtataatg

SEQ ID NO: 297084 - DNA, 100 bp, Homo sapiens
ggcgcggcgggaaggagcgggcgacccggtgtgtgggccagcggagctccgtgagatacatgtttattcaaacacaagataccccaaatccaaacagctt

SEQ ID NO: 297085 - DNA, 74 bp, Homo sapiens
tgggcttcaccatggacaagctggtgcagaacattgcgcggcagaaaatgatgcatcctgttgccagcagtaat

SEQ ID NO: 297086 - DNA, 75 bp, Homo sapiens
gactgctgaagagatggcggccaatctaacagcactgccagtgaaagatgtagaagataaacctgaacaacaaac

SEQ ID NO: 297087 - DNA, 100 bp, Homo sapiens
cagtacatgctgaggaggccagccttggaagactatgtagtattgatgaaaagagggactgccataacattcccaaagagacagggtttcgccgtgttgg

SEQ ID NO: 297088 - DNA, 88 bp, Homo sapiens
gatcctgatggtgaacatgccaggagagcaatgcaaaagcttcctgcctgacacagctcacttcaagaagtgcacaatgtcagaacgt

SEQ ID NO: 297089 - DNA, 88 bp, Homo sapiens
agctactaaccagagccggctctttctcgttgtatcacggactgattcaccgagcccaaccgtactcaactcacatatttctacccca

SEQ ID NO: 297090 - DNA, 100 bp, Homo sapiens
gcctgccgctttcaagaggatcaggagatggctcgagacctcgtagaatggaggcaacctgctgtgtgcagtggatgaatccaatgatcacatgctctcg

SEQ ID NO: 297091 - DNA, 82 bp, Homo sapiens
gtgtacacttttggccaggggaccaagctggagatcaaacctgtcggaaaaggtaacagaagatggaactcgaaatcccaat

SEQ ID NO: 297092 - DNA, 100 bp, Homo sapiens
ctctggactggcactcaggaagctcggggacagagtgcagctcctaaacctgctggtgacacgactcagacagaagagacggggtttcatcatgttggcc

SEQ ID NO: 297093 - DNA, 100 bp, Homo sapiens
agagaccagggctcctgtggctcctgctggtatggggacaccacacacaccctggtggagaagatgaactacatcggccaattcttgcctggatatgagg

SEQ ID NO: 297094 - DNA, 76 bp, Homo sapiens
gttcaagatggcggagctcgaccagttgcctgacgagatattggtaaaggttttcaaggtgtcatgaaaagatggg

SEQ ID NO: 297095 - DNA, 82 bp, Homo sapiens
aggcagaggtggaggcgctttgaaagcttccccgggcgctgcctggacaggcctgcctgcgtgctgggacatgtctggcctc

SEQ ID NO: 297096 - DNA, 98 bp, Homo sapiens
agctagcagtggcgatgacagctgtaaagcacgaacaggaatacatggaagtccgggagagaatacacagagccaatggagtctcgctctgttaccca

SEQ ID NO: 297097 - DNA, 74 bp, Homo sapiens
ttgggaggtggtacttcctggacagcatattccttaaacaagggcagaaataatatgtttcatacattgttgat

SEQ ID NO: 297098 - DNA, 101 bp, Homo sapiens
atctgatcggtcaccaggattctgacaaaagtactctccgaagaggaattgacataggatgtcaagttcccaaaccagaagtcatcttcagcttggaacaa

SEQ ID NO: 297099 - DNA, 82 bp, Homo sapiens
tctcttcgcctcgcctcgggacccgcggtccccgctcttgctgatcatggaagggaagtggttgctgtgtatgttactggtg

SEQ ID NO: 297100 - DNA, 89 bp, Homo sapiens
cttaatttcatccacaaatcaaatctggatggaacaaatcggttttcccatcatatgattcccggtcctcctggtccccacacaactgg

SEQ ID NO: 297101 - DNA, 74 bp, Homo sapiens
tattatatcatttaaaccacatggctatctaaagagattccagactccatcatttctcgtggtgttcaggtgct

SEQ ID NO: 297102 - DNA, 100 bp, Homo sapiens
caagatccggacctaatatatatgaactcaggtcttaccaactccgagaatgtatcctgtcaggtataatgtcagtgaatggcaagaaagttcttcatat

SEQ ID NO: 297103 - DNA, 75 bp, Homo sapiens
gggagatgaacccaacctagtgggtgtaatacatcatgaactgcagggaagctgaatatggtgggcatgatcaga

SEQ ID NO: 297104 - DNA, 100 bp, Homo sapiens
cggacagggactggaagagaggacgcggtcgagtaggcaggtgatgcttttccggaagagtccccaggagctgctgtgtggggccagcctcatcagtgac

SEQ ID NO: 297105 - DNA, 98 bp, Homo sapiens
ggacaaggctccggcctgcgaggaggtatcattggaacatttcaagatcatcaaatcaaattccacagggattggtgaccaaccagaaggctcagaca

SEQ ID NO: 297106 - DNA, 100 bp, Homo sapiens
cagccgagttgcgtctccctcgcgcgagagaggaggttcagatgagcccctgctgacttgagagagacagagagaccacgccgattgctgagaggaactg

SEQ ID NO: 297107 - DNA, 100 bp, Homo sapiens
tgcacctcgaaggctgacaagtcatctgggaaccaaggatgagtgcagtgaatttcgaaactatataaggaacaatgaactcatctgccctagagagaat

SEQ ID NO: 297108 - DNA, 98 bp, Homo sapiens
gcagctacctgcccctgctcactaagctgggcagcctccacccacagagcctcaactgccagtgtctcctgcgtgggactttgcctacgtagctcgtg

SEQ ID NO: 297109 - DNA, 80 bp, Homo sapiens
ggatggttccatcatggcgtcaatgcagaaaccaatagagccatggcgactccctctgctgccttcgaggcccttatgaa

SEQ ID NO: 297110 - DNA, 50 bp, Homo sapiens
ctcgatatattgccataacaatgatgaagctgtgcaaccatattgcttct

SEQ ID NO: 297111 - DNA, 50 bp, Homo sapiens
gggagttcaagaagaacactccagaggccaaatagttgcatcacatgtat

SEQ ID NO: 297112 - DNA, 75 bp, Homo sapiens
gacgggtccatccatcgcataagagcaaagaatactattgttgccacagggttatgaagacagtatggagtttcc

SEQ ID NO: 297113 - DNA, 100 bp, Homo sapiens
gccggaggatgagtcgagagggctgagcggagagtgtggtcctcggcggctggagagaatttggatggagagacccggaactgccggaagtgattcagat

SEQ ID NO: 297114 - DNA, 100 bp, Homo sapiens
ggcggccaccgcgactccggctctgcgctcggctgcctgacttcttcctgctgctgcttttcaggggttaccccacagcctatccagcagctgcccctgc

SEQ ID NO: 297115 - DNA, 75 bp, Homo sapiens
aaggtgcttccggaaagcttcaagcgttgtagaatgaatgaagacactggcactgattatataacaccttggcag

SEQ ID NO: 297116 - DNA, 74 bp, Homo sapiens
gattgcttcagcccaagttactgaagggtcagcggctggaagagtccttggaatatcagcagtttgtagccaat

SEQ ID NO: 297117 - DNA, 100 bp, Homo sapiens
tacgaaatggaagatgggaaagttattgaacggctgggccagagcgtggttgctgaccagttgaaagctctagccggcccggtccttggactgaaagaat

SEQ ID NO: 297118 - DNA, 90 bp, Homo sapiens
tccccacaagacaacactgtccccttgtcctgcagttttcagttcaagttgattatggaagattcccacaagagtaccacgtcagagaca

SEQ ID NO: 297119 - DNA, 100 bp, Homo sapiens
ggctgcggtcgaagaaggggacgccgacaagagttttatggacgaggagccccctacaatgccttgacggggaaggactccactagaggggtagccaaga

SEQ ID NO: 297120 - DNA, 83 bp, Homo sapiens
agccaaccatgctcaacttcggtgcctctctccagcagactgcggagtacttgattcttcagaaaacctccaaagtagatgtg

SEQ ID NO: 297121 - DNA, 100 bp, Homo sapiens
ggagaagaggacagaggcgcggtcatcagatgaggagaatgggccggtcttccactttcgccttggtgcctgtcttcgcccacctgagcatcctccagag

SEQ ID NO: 297122 - DNA, 75 bp, Homo sapiens
agagtagatctggagaaaccaacagctgtgttgaagaaataatccggagtgcagcagctgccccgagccccgtgc

SEQ ID NO: 297123 - DNA, 100 bp, Homo sapiens
gtgagctgcggaagcaaaaggcagactttttgatattcagagccttggaagtcaacactgtcatacctgtttgaaaatggtagaatagataacattttta

SEQ ID NO: 297124 - DNA, 98 bp, Homo sapiens
tcgcccgccaccctgcgctgccgccgctctgaggagttaaaggggggacacagcgattgccacgcgccattggaatgtccctggccaaggagctcata

SEQ ID NO: 297125 - DNA, 113 bp, Homo sapiens
cgcagggaggatgtcgggacaccccggaagctgggaaatgtatcggttttatggagaacctgtaataaaagcatgtattgaaaatggagccagttgtatcgacatcagtggag

SEQ ID NO: 297126 - DNA, 100 bp, Homo sapiens
gccgtcctccgccaggccccaagaacggctgttactttgggggtctcagccaatttcttctccagtcatcctccagtttggtcatgcagagactcttctt

SEQ ID NO: 297127 - DNA, 83 bp, Homo sapiens
cagattcgcagtggtcgcttcttctccttgtggactgctgggacgggcccgatgggaagccggtcatctaccatggctggacg

SEQ ID NO: 297128 - DNA, 100 bp, Homo sapiens
ctcctcgcccctcgttcccttgggaaccgcctgggaactccgccatgtcatccacttcgcccaacctccagtgagaaggcaaccaaagtgcaggacatca

SEQ ID NO: 297129 - DNA, 74 bp, Homo sapiens
ctggatcatcaagtagccgaagcagaagatggctgtgccacccacgtatgccgatcttggcaaatctgccaggg

SEQ ID NO: 297130 - DNA, 82 bp, Homo sapiens
cagaaagcaggcgaacccgcggcgcaataacggtgaggcggaaccaaccctcctggccatgggaggggccgtggtggacgag

SEQ ID NO: 297131 - DNA, 100 bp, Homo sapiens
tcacttgggttcattctattcaggtagcacaggcggagtgcagcggaggcccctgccgctgccgtcatgccgttcccgtttgggaagtctcacaaatctc

SEQ ID NO: 297132 - DNA, 50 bp, Homo sapiens
gtttgcttccccttccaccatgattctcactgttaatgaagcggctgctc

SEQ ID NO: 297133 - DNA, 100 bp, Homo sapiens
gcgggtacctgcggccaattcggtggaacgaggacgcggactgcgaaggcaggcctcaggcccaggcccaaggccaagtgagagagcccaggccacagga

SEQ ID NO: 297134 - DNA, 75 bp, Homo sapiens
caattggaccaagagaacaatgggaaccagtctttcaaaatgggaagaagatgctgcatacaggatggaatatcc

SEQ ID NO: 297135 - DNA, 100 bp, Homo sapiens
cacaccactgaagatgaggttgaaaaacctgacttttatcatcatattgataatctcaggagaactctatgcagaaggccaaagaggtgctgaaaaaata

SEQ ID NO: 297136 - DNA, 100 bp, Homo sapiens
ggcatcttcttcgtgaggctgctcttcgagcggtcatttatagcaaatacactgacctggttccaaaggaggttatgaatgcagatgatccagacctgca

SEQ ID NO: 297137 - DNA, 75 bp, Homo sapiens
caggacttccaaggagagcatgtcggaggctgatcgcgcccagaagatcactgagacccagaggctgggcctggc

SEQ ID NO: 297138 - DNA, 75 bp, Homo sapiens
ccagacactggaaaactggatgctgcagacactgaacgaggagccagtgtccctggtgatttgggtaaccaactg

SEQ ID NO: 297139 - DNA, 82 bp, Homo sapiens
gccttcagacagttttggggtggtctttctcagattgcttatgggagatgaacgtgtaaagaatggccttaatttcatgtat

SEQ ID NO: 297140 - DNA, 50 bp, Homo sapiens
tgaaaggcttcaaagctagcaggagacttcctgtgatcagagtgaaggtt

SEQ ID NO: 297141 - DNA, 90 bp, Homo sapiens
gaatcaactgaggcgcctgcaggacatggagagacgagctgcctgcagtatctggacgcccgcaacacgcccctgctggaccactcggcg

SEQ ID NO: 297142 - DNA, 75 bp, Homo sapiens
taccgagcggagaggagatgcacacggcactcgagtgtgagggaaaatttcatggaaatccaatgcatgtagctg

SEQ ID NO: 297143 - DNA, 75 bp, Homo sapiens
tcggcccctgcgccggcctcggccaccgagatcctgctgacgccggctaggagtcccctttacttggtaaatcac

SEQ ID NO: 297144 - DNA, 74 bp, Homo sapiens
gaacaggagttccgatcgacccggtaccaagaaggggagtgcccgcggcaggtggtttgaagtgtcctgtttgc

SEQ ID NO: 297145 - DNA, 75 bp, Homo sapiens
gaatgcacattaattagttccttgaaactcttccctcattaacttcagctatctttcagatcattcagagcataa

SEQ ID NO: 297146 - DNA, 83 bp, Homo sapiens
ccgggcggctggcctcaccgcccactgggttaaacccatccagagtaatggctgcggccttacccaggaccctgggggagttg

SEQ ID NO: 297147 - DNA, 73 bp, Homo sapiens
tttacagaggagggcactgcggctcagaggctggatatgagggaaggcaccattggagatatggctatcctgg

SEQ ID NO: 297148 - DNA, 75 bp, Homo sapiens
cgagcactgtggccgaggcccacctgctgacatctacctgccagcgctcctggttgcagccagaatgcatgactt

SEQ ID NO: 297149 - DNA, 100 bp, Homo sapiens
tggttacctatgtacctgttaccactttcaaaatggccctgttccagtattggttatgagtcttctgttcatcgcttctgtatttatgttgcacatttgg

SEQ ID NO: 297150 - DNA, 120 bp, Homo sapiens
tgcagaactacctgtacaacgtgctggagagaccccgcggctgggcgttcatctaccacgctttcgtgtgataagaagtacatcatggggcccaagctttccactcttgacgccactgtc

SEQ ID NO: 297151 - DNA, 100 bp, Homo sapiens
agcctctgcgccgccggcaccatgaggggaggagcgcccccgggactccccgggcccggcggaggcccaggcaccggccggggtggaggccggcgggaga

SEQ ID NO: 297152 - DNA, 51 bp, Homo sapiens
tttgaattcacgcttatggtagtggtgatggaatggggagaagatattaaa

SEQ ID NO: 297153 - DNA, 75 bp, Homo sapiens
ccctgggccgggccccaccggacggttcgtgctggccgtgggcagcgccgtctttgatgccatgttcaacggggg

SEQ ID NO: 297154 - DNA, 98 bp, Homo sapiens
cgggtggctggtgcagccgaggtcttcgggaattccagcgagggtatgcatcggtttggtcctataccccttggttccttgggctggaagacagttaa

SEQ ID NO: 297155 - DNA, 97 bp, Homo sapiens
accagacaagaacgagaggaggcgttggtcagaggagtcttcatgaaggtggtgaagcccaagcctgattacatcaaccccagagccgtgcagctgg

SEQ ID NO: 297156 - DNA, 75 bp, Homo sapiens
gtgagtgatcactctcaatcccgggagttcaaagaaggacgcagagccagccacacagccccacaggtcctcttt

SEQ ID NO: 297157 - DNA, 83 bp, Homo sapiens
gtcgtctcagcagtgctcgggcgcaggttcttctgtgtggcagttcagaatgatggatcaagctagatcagcattctctaact

SEQ ID NO: 297158 - DNA, 75 bp, Homo sapiens
attcaggagaactggtcgccatcaagaaagtattgcaggacaagagatttaaggcaatgaacaccagggaaagtg

SEQ ID NO: 297159 - DNA, 90 bp, Homo sapiens
gtcttccggacagactatggtcagattttggatttagtaaaggggacacattaccaggtagcctgtcaaaaatactttgagatgatacac

SEQ ID NO: 297160 - DNA, 96 bp, Homo sapiens
atatgatctgtcctgaatgtggcttggttgtagaaaatttttactactggagatgtcaacaaagatgggaagctggattttgaagaatttatgaag

SEQ ID NO: 297161 - DNA, 50 bp, Homo sapiens
aaggagccagcagagtcgtctttcaggtacccaagatattgtatttggag

SEQ ID NO: 297162 - DNA, 100 bp, Homo sapiens
cagatatgaccatgtatttgtggcttaaactcttggcatttggctttgcctttctggacacagaagtatttgtgacaggatgaagatgcatcagggggcg

SEQ ID NO: 297163 - DNA, 100 bp, Homo sapiens
catcgttaaagtctctcttcaccctgccgtcatgtctaagtcagagccaagctagcctttatgggaagcgcagaagtcagaaagaggaagatgagcaaga

SEQ ID NO: 297164 - DNA, 83 bp, Homo sapiens
gggaggcccgacgcgactgggcccctcaggaaaaatatattcagggggaagagatgtaatagatttcacattatggcagttac

SEQ ID NO: 297165 - DNA, 75 bp, Homo sapiens
atgttacacacggagtatcaaactctgctgccaagccaagtgcaagatctgtgaatgggcgtttgaaagtgagcc

SEQ ID NO: 297166 - DNA, 100 bp, Homo sapiens
aaacagtgagaaatacggagatggatacaggtgttacacataatattgcattacttcgagaggtgataatcaactcacgctttgtaaaaggagacatcag

SEQ ID NO: 297167 - DNA, 82 bp, Homo sapiens
ccaagctcctggccctggccctgatcatcctgctgggcttcgtccagatcgggaaggattatacccaacaagcaacccaaag

SEQ ID NO: 297168 - DNA, 80 bp, Homo sapiens
tggagatcaactcctctctgttaatggagtggtgatgatgaacagtctacacagatggctgcaagttgggaagatgataa

SEQ ID NO: 297169 - DNA, 87 bp, Homo sapiens
cgtcctacgtagataacagcttccgccaggcggtgatgaagaatccccccgaaaggaccccccagatccaagtattttagaacatgc

SEQ ID NO: 297170 - DNA, 75 bp, Homo sapiens
gccgctgctacctgcagcgccgtgtggcacgacacaaaaatcagttctgaatgcagtgatggggaatggtctgct

SEQ ID NO: 297171 - DNA, 78 bp, Homo sapiens
caggaatgaaagccatcatgatggcctctcaaagtcttatgtgtggacatcagttttctggatatgccgcagaaggat

SEQ ID NO: 297172 - DNA, 100 bp, Homo sapiens
ctcccattcacaaggcagctcgctctgggagcctagaatgcatcagtgcccttgtggcgaatggggctcacgtcgagttcgagaaatggctgctactacc

SEQ ID NO: 297173 - DNA, 82 bp, Homo sapiens
cagggcgttggctatgtgcccatcacaggtgtccctggccagtgtccttccacctgtccacaagcatggggaacatcttcgc

SEQ ID NO: 297174 - DNA, 100 bp, Homo sapiens
ccgccttccggcagaagctggtcagtcaaatgagatggtaacctgcacctcaatgtgacggcggaggccttcagcccctcgctcctggctgccctggagc

SEQ ID NO: 297175 - DNA, 98 bp, Homo sapiens
ccaagcagtggcgaagggaatcgcaaggctcttccctgaccattttctactgtccctgcgcgagactatatcatcatgtacatagaaaaatccaaagg

SEQ ID NO: 297176 - DNA, 82 bp, Homo sapiens
tgtgaaatttgttctcaagcacaagtgaatcagttcagacagctgtattccaaagtcatcaatgataagcatgatgatgtca

SEQ ID NO: 297177 - DNA, 73 bp, Homo sapiens
ggagatgaagcctaagaatatgatcagagcaagatgagacaggccttaggatttgccaaggaagccagagaga

SEQ ID NO: 297178 - DNA, 74 bp, Homo sapiens
ggaagccagagactcatcgccacatttccaggtgtattccgaacttaagtaccacccagagatgagattcttcc

SEQ ID NO: 297179 - DNA, 90 bp, Homo sapiens
gagcaagatttaccagagcaaccaatttaaagacttgtattgcaagtactactcagactattgaacagatgtactgcgatcctctccttc

SEQ ID NO: 297180 - DNA, 84 bp, Homo sapiens
ctgcgtcgccgggaccctcgcgcgcgaccgccgaatcgctcctgcagcagagtttggtgccctggttgtcagatgttggaaagc

SEQ ID NO: 297181 - DNA, 100 bp, Homo sapiens
taaaaatccaagcagcaaaatttaatattgatgggaataatgagatggtgggcagtggtggtgctggctgcgttcccctccctaggggcaggtggggaga

SEQ ID NO: 297182 - DNA, 101 bp, Homo sapiens
ggagttcgtctcttacgtctgcggaagtgcagctgcctcagttcttagcgcaggtgtgatcccctgggcccgtttgttgtcgggggagaagacttagaccc

SEQ ID NO: 297183 - DNA, 140 bp, Homo sapiens
ggagaagaggattggaggtgtcagtgttaaaggaacctctacaacgaaggtgaagccacggaagataagggacaggagagagtggcaagagtacgtttatcaagcagatgagaatcatccatgggtcaggatactctgat

SEQ ID NO: 297184 - DNA, 74 bp, Homo sapiens
agaagggtgtttggggtgtgttttacaaagatttgataatgggctgcattaaaagtaaagaaaacaaaagtcca

SEQ ID NO: 297185 - DNA, 100 bp, Homo sapiens
cgaaggtctcagagctttacgatgtcacttgggaaggagctgactgctgggcaggaacgtctctcaggagaaagagtggaagagaaaattgtgaactaag

SEQ ID NO: 297186 - DNA, 101 bp, Homo sapiens
gtggcggccccggcctcccacactcctgagccaggaacagatcaaggaatccctttgcccacgtccagctgaagccgacagtgaccaacgacaggtctgcc

SEQ ID NO: 297187 - DNA, 90 bp, Homo sapiens
ggccgaggccctaatgtcaccgactctctgacaaacagatcactcattgtcaccacagtgctggtggggaccaatgccatggacagcccc

SEQ ID NO: 297188 - DNA, 100 bp, Homo sapiens
gagccggggccgtggctgacatggagcagtaatctatgccagcaattatgacaatgttagcagaccatgcagctcgtcagctgcttgatttcagccaaaa

SEQ ID NO: 297189 - DNA, 100 bp, Homo sapiens
acacaggtgactgaacttcctcctggccccgaggacccagggaagcacctctttgagatcagcccagtgataccaagaagaagcaggggatgaagaagag

SEQ ID NO: 297190 - DNA, 100 bp, Homo sapiens
agaaactagagcaaataaccgttttgaaattgtcagcccaaggctgccccctcggtcactctgttcccgccctcctctgaggagcttcaagccaacaagg

SEQ ID NO: 297191 - DNA, 96 bp, Homo sapiens
gaaggacatcgataaagtatggaataacctaatcggcttcatgtcactcgccacactcacactccttcgagaactcatagaacggaagaccagctc

SEQ ID NO: 297192 - DNA, 75 bp, Homo sapiens
gccgggggctcagagatccaagtgcgcgccctggcgggtccggaccaaggtcctaggcctacttacaagcctcca

SEQ ID NO: 297193 - DNA, 100 bp, Homo sapiens
ttaagaatgtcaacgattagtcatgcaataaatgttctggttttaaaaaatacatatctggttttgtggacatttgggagcaataaaaataagaagaaag

SEQ ID NO: 297194 - DNA, 100 bp, Homo sapiens
ttctgggacttaggagggcaggaagagctgcagtctttgtgggacaagttcatggcctcccacgggaacgacgccgcgagagccaggtttgagtccaaag

SEQ ID NO: 297195 - DNA, 96 bp, Homo sapiens
aggacagctgttccttggccatcccaaagctattctgggggcaacagaggtaagtggagaaagagttgaagggaaagtgttgggatttggacatgg

SEQ ID NO: 297196 - DNA, 74 bp, Homo sapiens
agccgatcgccgcggggcagttcgggccggctgtcctggcgcgcctagtgtgttaattgtaacctacaaggagc

SEQ ID NO: 297197 - DNA, 71 bp, Homo sapiens
ccagcaccctcttcttcgtgttcaccccgcagggccccggaccccggcttccaggagcgcttcttccagca

SEQ ID NO: 297198 - DNA, 98 bp, Homo sapiens
tttgctgcgccctctcagcttcccaagaaagttccctgtattgaacactgatatacaaggaatgaatagaagtcaagaaaaacagacctggtgggaaa

SEQ ID NO: 297199 - DNA, 73 bp, Homo sapiens
ccattcagggcctttgcctttgttacatttgcagatgatcaggcagcctcagtcagagcaccctgaagttttt

SEQ ID NO: 297200 - DNA, 100 bp, Homo sapiens
ggtcttcgtgctgtccctctcggccatcccggtcacctatgtcttcaaccacctggcggcccagcatgaggtgatttcacctggaacagcatgtcaggcc

SEQ ID NO: 297201 - DNA, 50 bp, Homo sapiens
tttatgttgtgtcatttcgaaggacacttggcatttcacctgaagaaaaa

SEQ ID NO: 297202 - DNA, 87 bp, Homo sapiens
tgggcgcggattcgccgaggcaccgaggcactcagaggagcgccgtgccgtccctgcagtgacaccgaggtgctcctagccgtctgc

SEQ ID NO: 297203 - DNA, 98 bp, Homo sapiens
ggaacctggaggaggtggagttctgtgtggaaggagggctccccgaggactttctgaactccctggagaagatggaggacggcaagttgaaggtcacc

SEQ ID NO: 297204 - DNA, 50 bp, Homo sapiens
ctccggagtaggacttttgacaggaagtttatctcgacaatgctagttgc

SEQ ID NO: 297205 - DNA, 100 bp, Homo sapiens
agaaaatcataccatatcagatgcctcgcagagcaccaggcccaccgtgaaaggtaatagttaacctcttctgtgagaagtcagaaggtgatctctttaa

SEQ ID NO: 297206 - DNA, 100 bp, Homo sapiens
agtcccaggagtcctgaccagagagcaggattgaaagaaggtggcaagaggaagaagcagaagcagagagaggagtcgaagaagaagaagtcgaccaaag

SEQ ID NO: 297207 - DNA, 135 bp, Homo sapiens
ttggcaacgggaagtccgtggacgacgtgctttcccattttgctcagcgactgtttgatgacgtcccgcaggagcgggacggtatgcgggccatcctggggtcctacgacagcgagctgaccccggccgagtact

SEQ ID NO: 297208 - DNA, 100 bp, Homo sapiens
aacagagggtgcatcaattcttcgacaggaaaaaaatttgctggatattgatgcgccagtcactgatatgctttcttcatcagcaagcagtcctgctcct

SEQ ID NO: 297209 - DNA, 100 bp, Homo sapiens
ctgggacacacctccattggatttaaaagacagtcctcgtcagcactgactttcagctatggaatcgacgagctggagccggtggtgcaggatgggcaga

SEQ ID NO: 297210 - DNA, 80 bp, Homo sapiens
acgaaaacatgtactacagccagtcttctatgtttccacatcggtcagaaaaagatgaaatgactataccctggtgctta

SEQ ID NO: 297211 - DNA, 82 bp, Homo sapiens
gtctgggccagccacctggtgtccggcaacgccctgctgcggcggctggtccgcattggggtgctggatgagggcaagatga

SEQ ID NO: 297212 - DNA, 89 bp, Homo sapiens
tatgtacagtctgcacagctgggttggactgatagctgtcatatgctatttgttacagatggctattcatatgaaaaggaagcaatgga

SEQ ID NO: 297213 - DNA, 100 bp, Homo sapiens
gccccgtccgttgagggcccgcgccgcatggaggccggctgaggagcgccgctgcctcgcctcgtgaagatagtgatccggggagacaggaacacgggca

SEQ ID NO: 297214 - DNA, 100 bp, Homo sapiens
tctgaagaaatccgaccctacaaaaaagcttgcaccacagaagctcacaaacagctctcaaaggtctatggccctgtgttcactctgtattttggcctga

SEQ ID NO: 297215 - DNA, 50 bp, Homo sapiens
ctcaaacgagagtcagcctttaacggtggataattactgtaccttcctca

SEQ ID NO: 297216 - DNA, 90 bp, Homo sapiens
tcaacttctgctgcctgggcttcatcgccttggcctactccctcaaactgcttccagctgccatggtgatgccaccccagcccgtggtcc

SEQ ID NO: 297217 - DNA, 100 bp, Homo sapiens
ttggattcacccacagcggggcggcggcggcggcggctgcggcccaatataggaatgctgtctctgcaatttgagaggaggtgctcttaagcaaacgaag

SEQ ID NO: 297218 - DNA, 75 bp, Homo sapiens
cagtggcgggcgcaggagcccggccccggagccaccggtctcctctgagcctccggcctccataagacccaaaac

SEQ ID NO: 297219 - DNA, 100 bp, Homo sapiens
ggcagcagcagcggcgggaggagcctccgggctcccaactctacctcttgccccactgaggaaagctggtggtcggggctggtgatcatcattgccgtat

SEQ ID NO: 297220 - DNA, 50 bp, Homo sapiens
ggaaactgtacattgaagcagagggttttgtctccacaattatccgttta

SEQ ID NO: 297221 - DNA, 83 bp, Homo sapiens
cacgcaaccccagatccatttacactttacactatgaaacccacgtagtcgaacaccgtgatgcttctcctgcagggcgtgtg

SEQ ID NO: 297222 - DNA, 73 bp, Homo sapiens
acaaatactatgaagacaacaagcaattttttgctggtggtagattggttagagagtattgccaaagatgaaa

SEQ ID NO: 297223 - DNA, 75 bp, Homo sapiens
gtcagactccagcagccaagatggtgaagcagatcgagagcaagttgatattcactgatggactccaaagaatca

SEQ ID NO: 297224 - DNA, 100 bp, Homo sapiens
tgatggcatgcctgtaaagaacttgcagttgaaggagtataacacagacatttgggcctggacctggtgcctcggaaggactttgaagtagtggactcgg

SEQ ID NO: 297225 - DNA, 83 bp, Homo sapiens
tgccgctgtcgtctttgcttcagccgcagtcgccactggctgcctgaggaaacccagcgtttgctggcagaaccagttcctgg

SEQ ID NO: 297226 - DNA, 100 bp, Homo sapiens
ggaactggaagactgcttcttcactgctaagactacctttttcagaaatgcgcagagcaaacatctttcaaagacaaaaagtaaccttcctgaagaggac

SEQ ID NO: 297227 - DNA, 100 bp, Homo sapiens
ccagaacacatgagttttgaggaactgctcaaggtcttctgggagaatcacgacccgacccaagggctcctcgcacctaccccagcaactcaaattcacc

SEQ ID NO: 297228 - DNA, 100 bp, Homo sapiens
cggaggctgcctcggcggagcagaggaaccacacgctgatcatgggtgtcttttatgaataatcaaaagcagcaaaagccaacgctatcaggccagcgtt

SEQ ID NO: 297229 - DNA, 80 bp, Homo sapiens
aagctacaaaatatgctcgatggatagcattcactggaattttctggatatgccgcagaaggatccgtgccagaagcaag

SEQ ID NO: 297230 - DNA, 75 bp, Homo sapiens
tcgtggtctaaagcttcggcacaagggcccaactggaattccacttacgggccgccatggcatcagatgaaggca

SEQ ID NO: 297231 - DNA, 97 bp, Homo sapiens
tttccgcatccggctccggacgcttccggtcttagctggacccgtctgggagaagaaaggtgagcagccaacaggccagcagcggcggaaacaccag

SEQ ID NO: 297232 - DNA, 80 bp, Homo sapiens
tacaagactctcttcgctctttgcatcttaactgcagaggttgacggatatattcagacgttacgacacggatcaggacg

SEQ ID NO: 297233 - DNA, 74 bp, Homo sapiens
atttggtcaacaaaatccacgtcaggctgctgatactttggctgtgaggcaaaaaaggagaatttatgatatca

SEQ ID NO: 297234 - DNA, 90 bp, Homo sapiens
gcagtatttatgggagtatgggctttcaccaacaatcaccagtggtttacacaacattgcaaggagcattgaaactcgaaactactcaga

SEQ ID NO: 297235 - DNA, 75 bp, Homo sapiens
cggcagcagccccagcctcaaggccaggcaattgctggctactttgatatatattttgagaagaattgccacaac

SEQ ID NO: 297236 - DNA, 100 bp, Homo sapiens
cgagtgcatttgctttataagtgaggaaaccaccatcatgggttcgggtcccatagaccccaaagaacttctcaagggcctggacagcttccttaaccga

SEQ ID NO: 297237 - DNA, 83 bp, Homo sapiens
caaagctgcgatcacctccttggacctcagccccaacggcaagcaacttggttttgggatttgagattgacgcggtgaactct

SEQ ID NO: 297238 - DNA, 98 bp, Homo sapiens
tcaacaagaaatatttatggttaaagaatgtaaacattgtaacatcgttgcctactttgggagttatcttagaatttcagaatgcatggatagtgaag

SEQ ID NO: 297239 - DNA, 90 bp, Homo sapiens
aactcctttacatcatacttggacatatcaagcattggtgcacgatgtactgggccgcgttcgcaccaaaaccgtgaagaaggcggcccg

SEQ ID NO: 297240 - DNA, 82 bp, Homo sapiens
cccaggtggccaagctgaccgggcactcctaccgcgtgctgtacctgggacaggctggcctgacatggaaggtgaaacaagg

SEQ ID NO: 297241 - DNA, 75 bp, Homo sapiens
aagaaaaagaatggcgtccgtttcaggggcgagaggtcaatgatcttaaaagaaaatctccttcagatctttgga

SEQ ID NO: 297242 - DNA, 105 bp, Homo sapiens
atgaacagacctagtgggcgttgcctttagacccaggtcaaaatgcagatcttcgtgaaaacccttaccggcaagaccatcacccttgaggtggagcccagtgac

SEQ ID NO: 297243 - DNA, 100 bp, Homo sapiens
actattttctccagtttaacaagcccagaagaatcagtgcggtttctgtggcagagcgagttgcatttgaaagaggagaagagcctggaaaaagctgtgg

SEQ ID NO: 297244 - DNA, 75 bp, Homo sapiens
ccaggtgaaggccagtgctctcaagtgttctaagaacggaagcatctgggctggatggaatttagcatcaagcag

SEQ ID NO: 297245 - DNA, 98 bp, Homo sapiens
gtttcaagcagtattaagagtaaatgagaacactgctccctagaccatcggaaaaccagtcccacaacgtttgttccttctccatcctgtctaactct

SEQ ID NO: 297246 - DNA, 76 bp, Homo sapiens
gtcgcctctttgctgcaccaggtgtcctggagacaggtgtccatacactccgtgtggctggggaacagcatcacac

SEQ ID NO: 297247 - DNA, 75 bp, Homo sapiens
atgagaacagctctgacggccggtatgtgaaggagaactgcaaacctctgaagaaacctgctcctccaaagccag

SEQ ID NO: 297248 - DNA, 100 bp, Homo sapiens
cactgtggtagatgcagttacattttctccaaaagctgtgaccaagtgattacagcaacataaaggcagcatatgaggccatgaagaatgtggcctgtct

SEQ ID NO: 297249 - DNA, 88 bp, Homo sapiens
ggacagggcaggagaagaggaacctgcaaaggcatcaagcatgatggaaccatgtgtgatacctgccgccagcaaccaatcattggca

SEQ ID NO: 297250 - DNA, 51 bp, Homo sapiens
gctcagattcggaagtggttggacaagaaccctctggatattgatgcctcg

SEQ ID NO: 297251 - DNA, 100 bp, Homo sapiens
atgtgggagaggagagtaaaaagaacttcctggagaaactgaagcgggacgttgaggtgctggagaatctggtaaaagcaccattgtgaagcagatgagg

SEQ ID NO: 297252 - DNA, 98 bp, Homo sapiens
cagacgccagagagcctggatttcctcaaggtcccggaccagggagctgcaggacagcaaatcacccaccttgaggtcataaaggagctggaagctgc

SEQ ID NO: 297253 - DNA, 75 bp, Homo sapiens
tgggcaaaaacttgtgagggcgaaggtcgtattgaatggtgttgtaggattaaactgcaaatatctcatgaagct

SEQ ID NO: 297254 - DNA, 100 bp, Homo sapiens
cgttaaattgtgaaggcgctggaattacatgaacataccaccctagtaaagccatctcttcctgtactctataccctgtctagccaggctacacatgaag

SEQ ID NO: 297255 - DNA, 52 bp, Homo sapiens
gtctgtgccgagccctgagcaaaatggtgtcaacctccaacaacaaagatgg

SEQ ID NO: 297256 - DNA, 128 bp, Homo sapiens
gggcacctgcccacggggatacacggcgcccgccgcctcctgcctctgctctggctctttgtgctgttcaagcaggaacgaatttcatatacacctccagagagcccagtgccgagttacgcttcctc

SEQ ID NO: 297257 - DNA, 82 bp, Homo sapiens
ggggtcccgaagccccctgcaggaactctacaacccaatccagatgaagctactgaatctttacatcaaacgtgcacaaaca

SEQ ID NO: 297258 - DNA, 100 bp, Homo sapiens
gggaggggacggccgccggagccgcgaggccaaccttgccaacattccactaacccccgagactcagcgggaccaggagcggcggattcggcgggagatc

SEQ ID NO: 297259 - DNA, 50 bp, Homo sapiens
ggagtgtaggtcatatcgccgcgacttctgcctggtgtcgaaggtggtgg

SEQ ID NO: 297260 - DNA, 84 bp, Homo sapiens
gggactgttgaggtgtgaacgtggaccctgagtttaatggctatgctgggagcctcttctcaagtggaccctacgagaaagatg

SEQ ID NO: 297261 - DNA, 96 bp, Homo sapiens
ggtggactacagcgccacggtggatcagcgcctacccgagtgtgcgaagctagccaaggcattccgcgagttatccaatgtaaatttagacttccc

SEQ ID NO: 297262 - DNA, 82 bp, Homo sapiens
tccagcaccctcatcgccctggccgacaagcacgcaaggttttggccaaattgggcgagggcacaaaataaccacttacccc

SEQ ID NO: 297263 - DNA, 100 bp, Homo sapiens
catcctagcagccttctccaaagccacatgctgagttggctgtcattcttaaatttgtgctggaccatgaggacgggctaaaccttaatgaggacctaga

SEQ ID NO: 297264 - DNA, 95 bp, Homo sapiens
gaaccagatccgggagcacgtcatctccatcgaggctgatgttctaatcatgtcagataaagatgatattgagactccactgctaactgaagcag

SEQ ID NO: 297265 - DNA, 76 bp, Homo sapiens
aagaagacgccacagacagcagcgcagtaccaccttccagagatgggctttgttatgcacctaaagccatattgga

SEQ ID NO: 297266 - DNA, 94 bp, Homo sapiens
gcttcataccagctgaagagcgacaagccgctggcagccgcggatctcaccgccgctcaggctgtttgcagacaaggtcccaaagacagcaggt

SEQ ID NO: 297267 - DNA, 49 bp, Homo sapiens
gcgcactggtcgtcccgggagaggggtgctgctgttggaattccactca

SEQ ID NO: 297268 - DNA, 100 bp, Homo sapiens
gaaaagaaaagagaagttgcctcaggttacgaggtcttggcacaattatatgtgtaatgatcccctaacaacagtgagagagcaatgcgagcagttggag

SEQ ID NO: 297269 - DNA, 100 bp, Homo sapiens
aggactccaagatttacttccttccctttccagcagaattacctgagacgagttgcagtccatgagctgggaaaggaggcagtgctcttgggagaaacag

SEQ ID NO: 297270 - DNA, 100 bp, Homo sapiens
catgtacacagcacatccactaccaattggacgggatagggtttctgatctcattaaggagtgcaggcagtctcttgcagaaagcctttttgcctgggct

SEQ ID NO: 297271 - DNA, 75 bp, Homo sapiens
cccgggagcccccgcccggaatgaagactggcccatttgcagagcactccaaccagctgtggaacatcagcgccg

SEQ ID NO: 297272 - DNA, 75 bp, Homo sapiens
gtaaggtccctcaaagcgggaaatgcgtcaaaggatgaaatctgtaagtacagacctgagaattctgttgctaat

SEQ ID NO: 297273 - DNA, 49 bp, Homo sapiens
gaagaagttccagcttttggggactatgctgagaaggaaaataccatag

SEQ ID NO: 297274 - DNA, 100 bp, Homo sapiens
cacgaggcaggggcttttgtatttcctgcctctgccccacccccaaactgctgcacaggttctggaacctctggcggtctcagattgagcagaaaaagga

SEQ ID NO: 297275 - DNA, 96 bp, Homo sapiens
aaagttccatcctgagaatatttcacaaagaatttccttaagagctggactggctgcagaaccttggcctgaaaatgctacattatatcagcaatt

SEQ ID NO: 297276 - DNA, 75 bp, Homo sapiens
gagacaggaggcagtagccaaacacccaggttgttatggagttgatggagagagtgactctattatgagttcagc

SEQ ID NO: 297277 - DNA, 82 bp, Homo sapiens
gagcgcgagcggcgcgagaaagacgagcctgtggagtgggagacacctgacctttctcaagctgagattgagcagaagatca

SEQ ID NO: 297278 - DNA, 100 bp, Homo sapiens
caatgctgaagttcttctcaataatgaaattgattggcttaaaagaattaggattgaaagtatccagctgatgatggacagtgaaactggtcgatccaag

SEQ ID NO: 297279 - DNA, 100 bp, Homo sapiens
ttgagtttgatacccgggacaaccccaagggtcagccctgacaaaggtcagctagccccttgaggacatcagctttggcctcagggtcctaatggcagca

SEQ ID NO: 297280 - DNA, 95 bp, Homo sapiens
gtggcacctgcgcgaagctggccaaagcctgcccagacggctcacctgtgcgggatggaacaaaaggcggagtttcgctgttgttgcccaggctg

SEQ ID NO: 297281 - DNA, 75 bp, Homo sapiens
gccatggcggagcagacctactcgtgcaaacggggattcagcgtccgatcctttggaacagggactcacgtgaag

SEQ ID NO: 297282 - DNA, 98 bp, Homo sapiens
ctcccctccccggccgcctccgacgcgggcgtcctggagagcgcgccccattgtgcggggccggcggggaggtcggagctcttaggcctgctgaaaac

SEQ ID NO: 297283 - DNA, 117 bp, Homo sapiens
ggctcagcaagtgccatgctacagcccctgcttgacaaccaggatgtcttccaagcgaccagcctctccgtatggggaagcagatggagaggtagccatggtgacaagcagacagaa

SEQ ID NO: 297284 - DNA, 75 bp, Homo sapiens
gatttgtcagcagttagagagatatatgggccacatgcagtttctctcaggaaccttgggtaatgtggaacatgg

SEQ ID NO: 297285 - DNA, 85 bp, Homo sapiens
aagaatatcatcttcaacttgtagacacagccgggcaagtgtgaatcatggcaatacagtgaaagacagtgatttactgcttttg

SEQ ID NO: 297286 - DNA, 83 bp, Homo sapiens
cacaaagtgaccaagaacgtgagcaagcccaggcacagccgacgccgcggggtgctcttacagcctgttccaagtgtggctta

SEQ ID NO: 297287 - DNA, 75 bp, Homo sapiens
gttgtttcctccatttgctaaaggaatagtgtttgatgcctgtgaggagccaccaacatttgaagctatggagct

SEQ ID NO: 297288 - DNA, 100 bp, Homo sapiens
gtcgggagagcgcgcctagccggctcgcgagattatcgagattgcagcctgtcactccacacacacgtctgcggccaagacgcagggtgggcacgtgtac

SEQ ID NO: 297289 - DNA, 100 bp, Homo sapiens
tcaaagaactggatctttatctggcttactttgtccacactccggctcttttgtgacagggacggcttgttgcgggcacttctcacccctgagaatctgg

SEQ ID NO: 297290 - DNA, 75 bp, Homo sapiens
cggtgagcggacggcggcgcgcgcagcggttcaagctctacgttcgtgacatcaaacctcctgttgggccatttc

SEQ ID NO: 297291 - DNA, 80 bp, Homo sapiens
ctgggattcgcgctgctgggcacccacggagcctccggggctggcttgggcactgtttaaaggaaagttccgagaaggca

SEQ ID NO: 297292 - DNA, 75 bp, Homo sapiens
ccagacgagttataatcattctgaacggggagaggaaaggtcctccaaaagctggggaaagctgatgagacaaaa

SEQ ID NO: 297293 - DNA, 90 bp, Homo sapiens
gggaagggcctcggcactggtaccctttacatcgctgagagacttaattcagtgcacaaatgagatgaatgtgaacatcccacagttggc

SEQ ID NO: 297294 - DNA, 100 bp, Homo sapiens
ggggtttccggctgcagggcggtaaggatttcaacatgcctctgacaatctctagtaattgcaccatgccaaactacaaactcacttattttaatatgag

SEQ ID NO: 297295 - DNA, 101 bp, Homo sapiens
gaatatttaatggaaaatcgcttggttaaaacctgacacttttaacaggaaactactaaagttcctggggaagcaaagtagaatttcataagaacaaaatg

SEQ ID NO: 297296 - DNA, 82 bp, Homo sapiens
ggaaaaagcaagctgaagacatcaagaagatcttcgagttcaaagagaccctcggaacgttgacatcatggacatatgtgag

SEQ ID NO: 297297 - DNA, 74 bp, Homo sapiens
gtggaggttcgcggctctaacggggctttctacaaggttcttctgtgtggcagttcagaatgatggatcaagct

SEQ ID NO: 297298 - DNA, 95 bp, Homo sapiens
gcagccgcgaggaggcgcgggaggtgttcgagaacgaccccgagacgttacagacgttccacgttccgtctccctgtgccagccctcaggacctg

SEQ ID NO: 297299 - DNA, 75 bp, Homo sapiens
cagcggcaaggtctccaagtcccagctcaagatttcagccttccaagttctgatgtaacaaacaacttaaaaccc

SEQ ID NO: 297300 - DNA, 90 bp, Homo sapiens
ccacagtggttcgtcctcccaaacaactgcttcctgaatctacccctgcaggaaaccaagaaatggaagagagaagggcacagttaccta

SEQ ID NO: 297301 - DNA, 100 bp, Homo sapiens
gagtatgtgttgagctcatccccgggcgattcctgtctaagaaaaggaggatttgggtttaaagccaatttgtctctcttgaggaggcctggagagaaaa

SEQ ID NO: 297302 - DNA, 96 bp, Homo sapiens
cgcgcctcccgggcggattccagccccgagcgggacagcgcggcggggagcgacgagtcagtttgctgagaacgaaaccaatgaggtcaattttag

SEQ ID NO: 297303 - DNA, 74 bp, Homo sapiens
gccgggagatccgagagctcttcagcgccagcagccctgtggtggcgacgacgatggaccaggagccagtgggc

SEQ ID NO: 297304 - DNA, 101 bp, Homo sapiens
gttcaagataaagtgattttttgcctttgttgattaactggacaaattcagaacccgagcaacttcccgagaagagaagaacctccaaggctttctggaac

SEQ ID NO: 297305 - DNA, 100 bp, Homo sapiens
gaaacagaaatgaaacttctcaaatgagccaacctgagtcacaaggtaacggaaggccattggaaatggggcggcgtcacagtccaagtgaacagtgcct

SEQ ID NO: 297306 - DNA, 100 bp, Homo sapiens
gggggcgccctggaggagtccctgaagatctatgctcctctgtacttgtggcaccctgtgctgcgcacactaaagaaccgcattgaagagaacactggcc

SEQ ID NO: 297307 - DNA, 90 bp, Homo sapiens
gggttggggccgtcttcctcatccttccttttctcggggctcccgtgggttccagcagcactgatgtgaaggaaaaccgcaatctggaca

SEQ ID NO: 297308 - DNA, 99 bp, Homo sapiens
ctgctcagcccccaacacctgagctcccagcattcgcaacgacaggcgcctcctctgccaaccggtttgtcagcatcggaccccgggacggcaactttc

SEQ ID NO: 297309 - DNA, 100 bp, Homo sapiens
tgccaccctcccatccgtccgcgggtccgtggagctggagcagatcccccagccggctgagacaggtgagccctattcccagaggcaggtggtgctgacc

SEQ ID NO: 297310 - DNA, 51 bp, Homo sapiens
gtacctttatgaaccagtgtatcccaaaatcatttgctgtttcaaatagag

SEQ ID NO: 297311 - DNA, 100 bp, Homo sapiens
gggagattcagccgtgaagcaagtgcagatagatggccttggaagcaatgttatggaagatcaggatttgttggaaattggaatccttaattctgggcac

SEQ ID NO: 297312 - DNA, 100 bp, Homo sapiens
cttcgtgctgtgcgggatcgacgcggacagcgggctggagcctgacgagctggcggaacccttaggagaaatcttgagagtggacagcaattgtgaagat

SEQ ID NO: 297313 - DNA, 88 bp, Homo sapiens
gccccgctggaggagctccccagctggtggctggagcgaccccttgttctttggtggcgctgacaagttggatggcttgaggactggt

SEQ ID NO: 297314 - DNA, 100 bp, Homo sapiens
aagccgactgctgcctggtctgcaaagaagtcctttcaagtctctaggactggactcttcctaagcaagtccgggcacctttcacagccagcaggcattg

SEQ ID NO: 297315 - DNA, 90 bp, Homo sapiens
aatattgcatccctagagaaggacctggaagagcaagacggccacgacctgggagcagcaggttttagctaaagaagatactgaggcagc

SEQ ID NO: 297316 - DNA, 100 bp, Homo sapiens
cgaagctgtacgacatcctgggcgtcccgcccggcgccagcgagaacgagctgaagaaggatgcagtgatgacacgaaagaagatcatgaaacagaagga

SEQ ID NO: 297317 - DNA, 75 bp, Homo sapiens
cgagcttttcctccaggcctttgagaactctccagaaagagcaacagtaatggagtacatgagcactggaagtga

SEQ ID NO: 297318 - DNA, 101 bp, Homo sapiens
aaaagccaagaggaggacagttcgctacacagcaatgcatcgaggttccaatgattcttgttggtaataagtgtgacttggaagatgaaagagttgtaggg

SEQ ID NO: 297319 - DNA, 138 bp, Homo sapiens
cggatttccagccagagctgagcggcgcgggctccagactcgccgtggtcaagttcaccatgagaggttggggaatggcggtcaatgtgtattctacctcgataacccaagagactatgagcagacatgacatcattg

SEQ ID NO: 297320 - DNA, 75 bp, Homo sapiens
gtgacaccaagataagtaacggtgccaaagagtttttagtaccatccagggaacctggaaagttttattctctcc

SEQ ID NO: 297321 - DNA, 98 bp, Homo sapiens
aagggctctcctgatactaacagttttacgatttaaaacttcgccagaatttaagtagcagtggtagcagccgccaagaaagtccttcagttccatct

SEQ ID NO: 297322 - DNA, 98 bp, Homo sapiens
aatttgagatggaagaaagagcagacacattggcggcaagctaatgagaagctagataatctattatcctcccagtccacaacgctgaaccgtggctg

SEQ ID NO: 297323 - DNA, 75 bp, Homo sapiens
cccaaacagatgttaagacattcttggaagccttaccggcacctgaatggacagaagaggacctcagccaactga

SEQ ID NO: 297324 - DNA, 96 bp, Homo sapiens
tccatacaatggagataatggcagcacccactgcttgctcctgacccctgaggattaccagcgatttctagacctgggcatctccattgctgaaaa

SEQ ID NO: 297325 - DNA, 105 bp, Homo sapiens
aggacagccatttcctcagcagccttcggtaaaggcaacagattctgacggtcacctgtctgtgtgcccagtttgaagccgtcctgcagcatggcttgaagagga

SEQ ID NO: 297326 - DNA, 74 bp, Homo sapiens
agcggccaggacgtggagcggggcacattcaggttggatggcaagcatgtggtgtttggcaaagtgaaagaagg

SEQ ID NO: 297327 - DNA, 100 bp, Homo sapiens
caaagaaagaaagtcatcaagaggcagaagtcactcaagatctaggtctcgtgaaagtctgcgctcctcagaccaccggcaggtgaacagcctgatgcag

SEQ ID NO: 297328 - DNA, 82 bp, Homo sapiens
agaacatgatgttgacacgggctgggcgcccccagaagcccgggaacaaacaagtccattggaatattaagcccaggagttg

SEQ ID NO: 297329 - DNA, 51 bp, Homo sapiens
accactttggaaaataatgaagaatgtgtgaatgacaactactggtttggg

SEQ ID NO: 297330 - DNA, 96 bp, Homo sapiens
ttcaagtagtatttgtggacagcagcagatttattaactccaaggcaagaagcagttcctgttgtctctttaccggcacccagtttttctcatgaa

SEQ ID NO: 297331 - DNA, 75 bp, Homo sapiens
gccgtccttctccactttcgccagcccgtgccgcgagcgcggcctgcaggagtgttttaactcaaatgggtgatg

SEQ ID NO: 297332 - DNA, 100 bp, Homo sapiens
tgagatcttgaaagtgggcgagttgcatggtgatggaatttcctgataatgtgttaaatctcgatggacatcagaataatggtgcacagctaaagcagtt

SEQ ID NO: 297333 - DNA, 90 bp, Homo sapiens
ccgagagatgaggccggagcccaccaagttctgggaatttcactgttacatgccttgaagtgatgaggaggtttctgttactatatgcta

SEQ ID NO: 297334 - DNA, 100 bp, Homo sapiens
gtgggcccgggcggcgggcggagacgtgggcgccctccccgccaaggcccgtgcgagttcctctgtgacgagggtgcaggtatctctggggactacatcg

SEQ ID NO: 297335 - DNA, 100 bp, Homo sapiens
ccgagttctccagcctgctgcgcaggataaaaggcaaactcttcacctggtaccatctacctgttcatgtaattggacaccatgctgtgagtccttactc

SEQ ID NO: 297336 - DNA, 90 bp, Homo sapiens
tcctggggggagctgatgaagtccaagtactcagacatcaccatcatgtttgaggatataatcacagatccatttaagcttgcagaagag

SEQ ID NO: 297337 - DNA, 90 bp, Homo sapiens
gtgaacgaagaaggcgtcccggcatcgggggggagttaacaaaatgttccacgggatccaggactacgaggaaaacaaggcccgggtgca

SEQ ID NO: 297338 - DNA, 51 bp, Homo sapiens
ctcgcctcctcgcagcagcgccatgtgacaaccatgagtggaaaaaactaa

SEQ ID NO: 297339 - DNA, 100 bp, Homo sapiens
ggaccttcagttccaaagatgatgaatctgaaaggaaatccggaattatcacagagtcctcagaatggttggaatgaccctccagctttgaacagagtac

SEQ ID NO: 297340 - DNA, 100 bp, Homo sapiens
ctgccatgctatctgctctgctcagcgactgaaggtgcccgcatcccagctctgccaggaagcaaagtgaagctgtggtctaccaatctagacaactcag

SEQ ID NO: 297341 - DNA, 100 bp, Homo sapiens
cgcgagccccgcactctctcgatgagtcggagaagtcccatctcccttgagtttagaaatctggctgagaaataccaaacagtgattgccgacatttgcc

SEQ ID NO: 297342 - DNA, 86 bp, Homo sapiens
ctcgaggccaaaaccggcgtgaacaggagcttcatcgctcttgacaatgcagatcttcgtgaagactctgactggtaagaccatca

SEQ ID NO: 297343 - DNA, 100 bp, Homo sapiens
ggcagatcaacgacatccagttatccagggacatgaccatgtttgtgaccgcgtccaaggacaacacagccaagctccgggttgacaaatggtggggtaa

SEQ ID NO: 297344 - DNA, 74 bp, Homo sapiens
tccacgcctaccgcaagctcttggagggcgaggaggagaggctttctcggtatcagcagtttaaagattttcaa

SEQ ID NO: 297345 - DNA, 90 bp, Homo sapiens
agatggtcaggtctggagctcgaccgggccagtgtcctctcgcatggcagagcaagtgggaaggcccagaagatcccttacaatacctga

SEQ ID NO: 297346 - DNA, 100 bp, Homo sapiens
aaaagcaaaaaaatgctcttgggtcaaggtcagcatctcctcgacgatcaagatctatctctcttcgtagatcaagatcagcttcactcagaagatctag

SEQ ID NO: 297347 - DNA, 76 bp, Homo sapiens
acacgaagagctgccgtcgctgcagagaccccgctatggctgtgctggagaatctggtaaaagcaccattgtgaag

SEQ ID NO: 297348 - DNA, 100 bp, Homo sapiens
tgcgagcagttttaccgcgacctccggaggccggcgtgacaggctctgtcactaaaatagacctgagtttgggaggtgtccttttatttcctgttgatga

SEQ ID NO: 297349 - DNA, 75 bp, Homo sapiens
gtcagagtgccggaccccagcacacagaagccgagacgatatgcaatatgatgaggatgatgatgaaatcacccc

SEQ ID NO: 297350 - DNA, 82 bp, Homo sapiens
ccacccctcctttcaggtcaaggagaacgtatttaccgggcagtcaaagatctattcctacatgagcccgaacaaatgctct

SEQ ID NO: 297351 - DNA, 98 bp, Homo sapiens
agcgctgtttctgttcataccttttaatcccctggccgaaagtcatcctttaatagacgagaaagcgtggatacccatcaacgaagttttgatattgg

SEQ ID NO: 297352 - DNA, 78 bp, Homo sapiens
acctagaacaggtgctccgcttgctaaattatcctgaagaggtggactgtgtaggacaaatttacatgtattggagac

SEQ ID NO: 297353 - DNA, 99 bp, Homo sapiens
accatcaatgaaaggtgaccctgttaactacattctgcaggtattggttggaagagaatctgagtacaaacagtatcctaagaaatccggtaaccaata

SEQ ID NO: 297354 - DNA, 100 bp, Homo sapiens
atggtgcagaaataccagtccccagtgagggtgtacaaatacccctttgaattaattatggctgaacaggagtacagctgtgtagtaaagatgccttctg

SEQ ID NO: 297355 - DNA, 100 bp, Homo sapiens
tggatttggctacacacttatagatcttctgcactgtttacaggcacaggccggatcacctcaacagtcacgtcagacaagtgcactcaacagaacggcc

SEQ ID NO: 297356 - DNA, 83 bp, Homo sapiens
gaagcccttcgcctgcacctggccaggctgcggctggagtgtcaacagcatctccaccctggagcctgtgagccggtgccagc

SEQ ID NO: 297357 - DNA, 82 bp, Homo sapiens
ggcggcccgagtgctggtagacggagaagagcacgtcggtttccttaaagttacttcagttctgcataaacatttggatggc

SEQ ID NO: 297358 - DNA, 100 bp, Homo sapiens
aaagtcattcaactcaagcagatcaaagttgttttgaggcccaaaacatgctgaagaaggtggaaggcttggaggatctgagcaatctcaccaccttgca

SEQ ID NO: 297359 - DNA, 75 bp, Homo sapiens
tgaagcaaaagttgcagtcatacaagatctctcctggagggataagccagtgcatgcaagatatgggaaatacta

SEQ ID NO: 297360 - DNA, 96 bp, Homo sapiens
gatcgtgtgtctgtgatgcgtccacagccaggagacacgatgttccagcctatcattttacttattctcattcttgtattattttcatcactttct

SEQ ID NO: 297361 - DNA, 82 bp, Homo sapiens
gaaggctgtgctgctgggagccacattcctcattcaagagtgagccatggagctacgtgtggggaacaagtaccgcctggga

SEQ ID NO: 297362 - DNA, 119 bp, Homo sapiens
tgttccttcagccaaagaaacaagccgtggaataggtgtatcaagtaatggtgcaaagcctgaaaaccctcggcctcaggaaagtcggacagtattcagtggctcagtcagtattccat

SEQ ID NO: 297363 - DNA, 122 bp, Homo sapiens
ggcggatggccccaggtgtaagcgcagaaagcaggcgaacccgcggcgcaataacgggtgttttgaatgctgtatcaaatgcctggggggcattccctatgcctctctgattgccaccatcc

SEQ ID NO: 297364 - DNA, 75 bp, Homo sapiens
aagtacttgtggaacaacatcaaaaggtggcaggcttcaagctcaacaagaagctgtacgagctcatcatcaccc

SEQ ID NO: 297365 - DNA, 99 bp, Homo sapiens
gtcatgtatccacatttaatggaaggcttcttaccattcagcaatttagttactcatctgtatataatgaccagtggcagaacaatggaatctacaaag

SEQ ID NO: 297366 - DNA, 78 bp, Homo sapiens
cggggctccaatggcgctttctacaagatcttacagactctttcagcacctacgaaaaatttagaacagcaggtgaat

SEQ ID NO: 297367 - DNA, 75 bp, Homo sapiens
ccagaatgcactgcacaatattaaaactttacctggggcaggagtagggctgattggagccattgtacagtgtcg

SEQ ID NO: 297368 - DNA, 75 bp, Homo sapiens
cgaggaggcagccaagctcgtagcctgccactccgtgcgccaccagcccctcgggttccaagatgcagctactgg

SEQ ID NO: 297369 - DNA, 75 bp, Homo sapiens
actgatggctactaaaaagcagagcatttctggtggttccttaaaaacagttattgctcaagatgaaaacctccc

SEQ ID NO: 297370 - DNA, 100 bp, Homo sapiens
actcagaagtaattgtggaccctatacagcccgacggccatggaggctgaagagacgatggaatgccttcaggagttccctgaacatcataaaatgatcc

SEQ ID NO: 297371 - DNA, 100 bp, Homo sapiens
gcagaatccaaaacatcagaatgaattgagaagggaagaaaccaaagctgaggctacggaaacaggccgagaagaacgtggagaagaaaattgacaaata

SEQ ID NO: 297372 - DNA, 88 bp, Homo sapiens
gaagtctcacatcagaggtgtcaaggcttgagtttgaagaaacagaagaacctgattttactgcattatgtcagaaattaaagatacc

SEQ ID NO: 297373 - DNA, 96 bp, Homo sapiens
ttgcggtggcgttggtgctgtttgcggatgctgatgcagatctctcagccccagtgaatggcgaggccacatcacagaagggggagagcgcagagg

SEQ ID NO: 297374 - DNA, 90 bp, Homo sapiens
ggacggggccaccggctggagcggatcccacacctccggaccgagggacgcggttggttagtctgctgctaattggaattgctgcgtggg

SEQ ID NO: 297375 - DNA, 100 bp, Homo sapiens
aaagagaaaaagtctgaagctctgaatatcagaggtgtcatggagaaactccagctgggcccagagattctgcagcgggaaaatccaaggcttatttatg

SEQ ID NO: 297376 - DNA, 88 bp, Homo sapiens
gaaggaacgaggcaaggagctaaagcagcgtgcgttcagccctgggactgtgccctgtccacggtgcctcctgcatgtcctgctgccc

SEQ ID NO: 297377 - DNA, 137 bp, Homo sapiens
atcaagtgaacagaagaaaaaacaaattgaagcactccaaggagagcttaaaattgctgttttacagaaggaaacccagcgtttgctggcagaaccagttcctggcatcaaagccgaaccagatgagagcaacgccc

SEQ ID NO: 297378 - DNA, 74 bp, Homo sapiens
cggcggagactgcgggcccgtagctgggctctgcgaggacctgagagtcagtatactaagactgcccaggagat

SEQ ID NO: 297379 - DNA, 83 bp, Homo sapiens
aggcgctggcgtccggcctgatccagaatgacagggtccagaaactggcgagccacgagggacatgtgtaggtatcggcacaa

SEQ ID NO: 297380 - DNA, 100 bp, Homo sapiens
caggttacttcttcctcaacaccagcaccgcagatgttgtcaaggtggcctaccaggaggccaggggtgtcgccatggctattcaggcagctatcagcca

SEQ ID NO: 297381 - DNA, 100 bp, Homo sapiens
cttcaaaaacaagtaactcccagcatggaaacaggactcagtggcttttgaggatgtgtctgtgagcttcagccaggaggagtgggctctgctggctcct

SEQ ID NO: 297382 - DNA, 58 bp, Homo sapiens
ggaaacatctgaatatgctcaaggaggagatactcatttcaaagaacttccaactctt

SEQ ID NO: 297383 - DNA, 87 bp, Homo sapiens
agaatgtcactgatgtctccttagggatctcttcaaatgagcaggaccaaggtgtttggagaagagggattgaccctgaatcttgaa

SEQ ID NO: 297384 - DNA, 96 bp, Homo sapiens
gggtcctctggctgttgttcttttcttttccatgatatcattatatggacagtttaggaaatgaagctgttgtcatttctggaaggaaactggccc

SEQ ID NO: 297385 - DNA, 75 bp, Homo sapiens
tggagacgtgcatgattaaccaggcccccattgccgtgcggctgggcaaagtagccattgaccgaggaacggagg

SEQ ID NO: 297386 - DNA, 96 bp, Homo sapiens
atgaaacattcggatcaaatattccaaagcagtttgtgcctgctgtagaaaagtatgactatgaatatgatgaaaatggtgacagagtcgttttag

SEQ ID NO: 297387 - DNA, 75 bp, Homo sapiens
atgcacaagctgcacttcctgcacaggagaacccatacgtcatgcgccggcccaacttccaggccctgtcgggga

SEQ ID NO: 297388 - DNA, 75 bp, Homo sapiens
acttagacttccggaaggactttggcgagggccaaacctgaggacactttaaacctgtgccagcttttaaacaac

SEQ ID NO: 297389 - DNA, 100 bp, Homo sapiens
ctgggacctcagtgacattgacaaggatgggcacttggatcgagatgagttcgctgtgattcagaatggacagtttagaagaacctcagaaaaaagtctt

SEQ ID NO: 297390 - DNA, 74 bp, Homo sapiens
caccacgatgaaaagaaatacctgtgatttgctttctcggagcaaaagtgtttgttacagaaggagaaagtggc

SEQ ID NO: 297391 - DNA, 97 bp, Homo sapiens
ccccgacctcgctgtgggggctcctgtttctctccgccgcgctctcgctctggccgacgagtggagaaaacgcaaacatgcagatctttgtgaagac

SEQ ID NO: 297392 - DNA, 100 bp, Homo sapiens
gacgccagcctctcgggcatcgggcaggaactgggcgccggcgcttacagcatgagctgccccagagcacatcagctatgtgccccagctctcaaacgac

SEQ ID NO: 297393 - DNA, 100 bp, Homo sapiens
tttaatggccagtttaaaacttatgctatctgcggggccattcgtaggatggagtgtacaccttaaacaatgagaagcagtggataaataaggctgttgg

SEQ ID NO: 297394 - DNA, 100 bp, Homo sapiens
ccaaggagaagagaatggatcttggaacagatatcagttttagagaatgtggcgtggagaaattctcaaggaaagagtaaaatgctggtgatgtgctgag

SEQ ID NO: 297395 - DNA, 82 bp, Homo sapiens
gactactctcagcctactatctgtctggagaagagatatgaggccccaggattcctggcgaggtcctcctccccttttccag

SEQ ID NO: 297396 - DNA, 82 bp, Homo sapiens
tcctgaagcagttctgtgtatccaacattaatcagaaggtgaagtttcagatgtcatttgtcagagtgaaccgctgtggtcc

SEQ ID NO: 297397 - DNA, 82 bp, Homo sapiens
cttcgaccagcgcgcgcgcgaggagttccgccccaccatctacagcaacgtgatcaaaggcactggtgaggtggattgatga

SEQ ID NO: 297398 - DNA, 100 bp, Homo sapiens
gccccccttccccgcagacgtggcggattccacaggcacgcactccctctacaccacataccaggaccacgagatcatgttccacgtgtccacgatgctg

SEQ ID NO: 297399 - DNA, 76 bp, Homo sapiens
gggaataggagctggggagcccttctgcgccacagggagtgagttttccgggagtccctacagccaccctcagtat

SEQ ID NO: 297400 - DNA, 82 bp, Homo sapiens
aggaggagaagctcagcgcagccctgcaggccaagcgcagcctccaccagggttgggtttggcactcaacttccagccctcg

SEQ ID NO: 297401 - DNA, 75 bp, Homo sapiens
agagttctgcgttttgccagtcacctctcaactgtgtgccaaagcacccatttgtcaggagtgccaaaggagtgt

SEQ ID NO: 297402 - DNA, 75 bp, Homo sapiens
aagcgcacgggcctcgccgccagaacgacgcaaacatgcagatctttgtgaagaccctcactggcaaaaccatca

SEQ ID NO: 297403 - DNA, 100 bp, Homo sapiens
caaagtcagccacaaagcagactagccagccggctacaattggagtcagagtcccaaagacatgggtagttttggatgttgggtgtggaactggaattct

SEQ ID NO: 297404 - DNA, 100 bp, Homo sapiens
gggggcgccgggggggcccaagcgtcagcggcccgcgcctgtcgggctgaactgaggggctttgttatgcacctaaagccatattggaagctccagaaga

SEQ ID NO: 297405 - DNA, 100 bp, Homo sapiens
gtgtatatcaaacggcaagatgtccagtaatgtcccggcggatatgggcgccaatgcttcggcattagagaaagagattggtccagaacagtttccggtc

SEQ ID NO: 297406 - DNA, 96 bp, Homo sapiens
agcttctgctgtccttctttgtggagagcaaggaattacgtatggaaattgcaaaacaagaattaatcgctcatgcccgggaagcagcatccaggg

SEQ ID NO: 297407 - DNA, 75 bp, Homo sapiens
tcgccaagatgaagggctacccacactggccggcccggatgaaggatttgggggcagagcacttggcaggtcatg

SEQ ID NO: 297408 - DNA, 100 bp, Homo sapiens
tggacgtcttcaccgccccacactggcggatgaagcagctggtggggctctactgcgacaagacctttccagctcacccccagggccttatggtcaagaa

SEQ ID NO: 297409 - DNA, 82 bp, Homo sapiens
cagtagcagcttatgaggatgatcttgtagaaaatttcagctgtagcccttggactagaagctgaaataacagaagctgtgt

SEQ ID NO: 297410 - DNA, 120 bp, Homo sapiens
aagattacaacagactgagaagagaagtggagcaccaggagactgcctatggtgctgtccttattcccagcccagtcaagagctaccggggctggctagtcatgggggagcccagtagag

SEQ ID NO: 297411 - DNA, 100 bp, Homo sapiens
tgagagcacaaacaaatctagagagttgagaattgccgaaatcacccatctacagcaacaattacagggggcttggagtacccataatacagtgagccca

SEQ ID NO: 297412 - DNA, 74 bp, Homo sapiens
atatcctccaggaatactggccaggttggatggcaagcatgtggtgtttggcaaagtgaaagaaggcatgaata

SEQ ID NO: 297413 - DNA, 100 bp, Homo sapiens
tcaggcgttgctgtttcttgtcttccaagtcaagtggttactctggtaatggattgcctctctccgagtataaaggtgcacatgtaaagccaggatttgc

SEQ ID NO: 297414 - DNA, 50 bp, Homo sapiens
ccagagggcgccactaaactgggactggcattgcggactgacctccaggg

SEQ ID NO: 297415 - DNA, 100 bp, Homo sapiens
ggttacagctgtttccacgtgcggtgctcgtcgggagtgatcacctaccctacaggttaaagatcgaggtccggaagccactaggagattttttaattgg

SEQ ID NO: 297416 - DNA, 82 bp, Homo sapiens
aaggaacggctgaaggccctacgggagaaaaccgggcgcaagctacctgaacgacctggagcgtattgcacagagtgactac

SEQ ID NO: 297417 - DNA, 75 bp, Homo sapiens
ggtgactgggaaagagcccactcggagattctccaccattgtgggccataaaattttgagtagaaaaatccagaa

SEQ ID NO: 297418 - DNA, 107 bp, Homo sapiens
cctccattggatttaaaagacagtcctcgtcagcactgactttcagctatggaatcggattttttatcaagcagaaatgcatcgaacaacgagaatcaagatcactg

SEQ ID NO: 297419 - DNA, 100 bp, Homo sapiens
tgtcattggtcgaagagttgaagttaatggagaacatgcaacagtacgttttgctggtgttgtccctcccgtggcagacattagaccagctcccactcac

SEQ ID NO: 297420 - DNA, 100 bp, Homo sapiens
gggtcctctatcccaatgacaatgctgccacctaaaagactttggagatttgagttttactccagtccccaaagatgatctctacaacaacctgatagtg

SEQ ID NO: 297421 - DNA, 76 bp, Homo sapiens
tttcacgaaggcaccgacgtcatcatgctgaccaccaatcagatccgtaagaacccagcgggtgccgcttctccac

SEQ ID NO: 297422 - DNA, 98 bp, Homo sapiens
actaatgctctgcgtgttccgagggagaatatggaggccatttcacctctaaaaaatgggatggggcattcttcttgagcaccgagaaaaagaatttg

SEQ ID NO: 297423 - DNA, 85 bp, Homo sapiens
agaaagttcgaaaagttcctccaggtttgccatcttcagagcatgtatcccgtttggaaatcttttctcgagggaacaatgcagg

SEQ ID NO: 297424 - DNA, 83 bp, Homo sapiens
ctcattcacttctagacgacaaaatgcaaaaaaggaggccaaagactttattttgaaggaagacatggaaatgaagcgtcaaa

SEQ ID NO: 297425 - DNA, 96 bp, Homo sapiens
gaaattctgtgtgctccctccggcgagagactttgtcagctcccgcacagtaacatcctcgtccctcccaagatgttgtttacacgaggggcttca

SEQ ID NO: 297426 - DNA, 74 bp, Homo sapiens
agcgacgtctccaagctcctcccgtccctggccaaggctcaggtggacccaagtggagagattgtggaactggc

SEQ ID NO: 297427 - DNA, 75 bp, Homo sapiens
cctggctaaggaaaccctattacctccagggagttgaccacatttggccatttcccagaagggccccaccccaag

SEQ ID NO: 297428 - DNA, 82 bp, Homo sapiens
gaagaaggtcagtgtgcttgcttggagatcaggacgcaaaggttggtcaaagaaaaagtgatgtatgaaaaagaggcaaaac

SEQ ID NO: 297429 - DNA, 75 bp, Homo sapiens
cccgggggccgccgccacccgcctcccaccatggctctgaagagaatccacaagagacagggtctctctttgttg

SEQ ID NO: 297430 - DNA, 100 bp, Homo sapiens
agaagacaaaaacaattttggtgctgaacctccacatcagaatggccctgggaggagcggggacactgaggacctctctccaaattggcctctcaactca

SEQ ID NO: 297431 - DNA, 75 bp, Homo sapiens
ggaaggatgactatgagtatgagctattatagaaaccatgggtcatcacactgaaacggtgttcaaccgggtttt

SEQ ID NO: 297432 - DNA, 82 bp, Homo sapiens
gacaagccgctggcagccgcggatctcaccgccgctcagggagaagaaggaagttgtggaagaggcagaaaatggaagagac

SEQ ID NO: 297433 - DNA, 100 bp, Homo sapiens
aagaagtcaccttgtgtggatggattcagtaccgaagggtggacatctcagacacgctcatgtatgtctatgagatgttgggggccgagctgctcagcaa

SEQ ID NO: 297434 - DNA, 75 bp, Homo sapiens
gaagatggaactctttggcggagacaaacacccaaactcctttatccccttgggtcccctcctaaccgcaagcgt

SEQ ID NO: 297435 - DNA, 75 bp, Homo sapiens
cacagtgcctctgaccagcatcgtctgtaaagatcctggtgtatagcctggaagcaggacgccgcctcttgaagc

SEQ ID NO: 297436 - DNA, 91 bp, Homo sapiens
gcatgaacccccgccggcgggcagcctcctgtacagcccgccgcccctgcagctgtgccacgaccgtggctatctggtgacccaggacgag

SEQ ID NO: 297437 - DNA, 100 bp, Homo sapiens
caactctgaaagcaaaaattccacctcctttgccaccaaaggaagagagaagggcacagttacctaagtatcaacgtaatcttcctcggccaggacaggc

SEQ ID NO: 297438 - DNA, 100 bp, Homo sapiens
tgtatgcagttttatccttttctgtacaacatcacttcttctgtttgcagtggaatggcggcgctagatagtaaggcatcagggaagatgggaatgcgag

SEQ ID NO: 297439 - DNA, 75 bp, Homo sapiens
ccttggatatgaaatcttgtgccacattctcctcttctcacaggttctgcggcatgaggaatttgaagaaggctg

SEQ ID NO: 297440 - DNA, 82 bp, Homo sapiens
gtcttcatctttacagaggaatagtctacaaaggaagacttgtaacctggagaagagggtgcttcaaggatgaccgcatcgt

SEQ ID NO: 297441 - DNA, 101 bp, Homo sapiens
gacactttgcgttcgggctgggagcgtgctttccacgacggtgacacgcttccctggattggctgctccaatgaaaacgtccataaagagttcaagaaagc

SEQ ID NO: 297442 - DNA, 100 bp, Homo sapiens
gccgcgccgcgctccaaccgcctcctcctcctcagtaacgcggggagaccaaattttgaggaaggtggaccaacatcagtagggagaaagcatgaattta

SEQ ID NO: 297443 - DNA, 100 bp, Homo sapiens
ccaagactcagtataaccaagtaccaagtgaagactttgaacgcactcctcagagtccgactctcccacctgctaaggatgcacgctatttttctacgag

SEQ ID NO: 297444 - DNA, 75 bp, Homo sapiens
aggatcaaccctctgcatacagtaaatcctggaatcaagatgtgagaccaagaaattatttctgaagaaagaaat

SEQ ID NO: 297445 - DNA, 83 bp, Homo sapiens
acgaaggtactcgcagcacttggagcgcagaaccggccgcgcccgtgtttcacctgtctcggaaagtaacatctctggtccct

SEQ ID NO: 297446 - DNA, 74 bp, Homo sapiens
gggcccaagaaaaagcacctggactatattaataaggcagcggaaagaagaaatatgaatacggctccatcaag

SEQ ID NO: 297447 - DNA, 51 bp, Homo sapiens
agctaaaaccttcctcaccgtgtactctggcgtgcggccaggatgggcagc

SEQ ID NO: 297448 - DNA, 82 bp, Homo sapiens
gcagtgtgtctggtcttatgagttcgtgtttagtaggagcacagtagctgtttggggaacgaccttaagtgaatagatgtct

SEQ ID NO: 297449 - DNA, 75 bp, Homo sapiens
ggattcgttacagccagagattggtgctgatgtatggacagccgtatcgtgttaccttagagcttgagctgccag

SEQ ID NO: 297450 - DNA, 105 bp, Homo sapiens
gcgccttcctcaacgacgcggacatggtcatgagctttgtgaacctggatgtccagctcgccgctgtccaagaaacgtcgcgtgtccgggcctgatccaaagccg

SEQ ID NO: 297451 - DNA, 100 bp, Homo sapiens
cgtggttcacccgctgccgggcaccgaggaccagctcaatgacaggaaaatatttgcaatacctgccacgtccaaggttcagctgaggccaatgtaaagc

SEQ ID NO: 297452 - DNA, 87 bp, Homo sapiens
atgacatgcaagttggacagacgggaaaaatagtagcaccatgttttccaagcagtgaagcacttgccgtgttgaactgaatgcact

SEQ ID NO: 297453 - DNA, 75 bp, Homo sapiens
gcttcccaggcgccggcggctgcagaccaagatcactccatggatgaaatgacagctgtggtgaaaattgaaaaa

SEQ ID NO: 297454 - DNA, 100 bp, Homo sapiens
ggattttcaagccttggaaatggaggaagaagaaaagcgaaaagttcaaacacacgtcagcagtcctcaaccactgaagaagaagcttgatgcttggctg

SEQ ID NO: 297455 - DNA, 82 bp, Homo sapiens
cagtctaaacctgtgaccacccctgaagaaattgcacagctgatgaacttattagtcctaaagacattgatcctgtccagcg

SEQ ID NO: 297456 - DNA, 76 bp, Homo sapiens
ggaaggccccgagatcccaggcactgagtgactgcatacttgatggaatggggagaagatattaaagcagtttcaa

SEQ ID NO: 297457 - DNA, 82 bp, Homo sapiens
gcgtccagcacctacgtcccgctgccgtcgccgccgccaccatgcccaagagaaagatcctgataacttaagtgactctctc

SEQ ID NO: 297458 - DNA, 72 bp, Homo sapiens
atgaaaggagattccaacctacttcaggtcctctctgatgacatgaagaagctgaaggcccgaatggtaatg

SEQ ID NO: 297459 - DNA, 75 bp, Homo sapiens
ccgggcccaggtcccttcctccgtgtcagttgtacccgaggcgttctcagcagcagcaagtacctgtggtggatt

SEQ ID NO: 297460 - DNA, 100 bp, Homo sapiens
atgaaatccaaaggtgaatcttttggttggtgattttgatgatagccacaaagcaagcagggtcaggaataaattagatggtcagtattatgcaataaaa

SEQ ID NO: 297461 - DNA, 82 bp, Homo sapiens
ccggcggcccggagtggggcggcggttacagaatgtctgaaggggacagtgtgggagaatccgtccatgggaaaccttcggt

SEQ ID NO: 297462 - DNA, 51 bp, Homo sapiens
acagaaccaagtctcttcactaatggagtctcactccgttgcccaggctgg

SEQ ID NO: 297463 - DNA, 71 bp, Homo sapiens
accccatcggtacacgctcaggccaggtggaggtcaatatcacaggaaagaccacagcaagattctttcat

SEQ ID NO: 297464 - DNA, 100 bp, Homo sapiens
gcctttttgcctacccaaccctggaaagtttgcagaagtggaaggagcagaacgtgagggtgtaacttacaaaaaggtcaacaacggttccagcctcagg

SEQ ID NO: 297465 - DNA, 100 bp, Homo sapiens
aacttcttgacaatttgcttgcgcttataaggttccaatacatatgaagaggcagctgcctatattcaatgccagtttgaagatctgaacagaagaaaag

SEQ ID NO: 297466 - DNA, 75 bp, Homo sapiens
caaaagtgaaattttacgaactcaggaagctcctcagggtgctcccactgccgagtgagaactggggagctctag

SEQ ID NO: 297467 - DNA, 50 bp, Homo sapiens
ctggagacgggctgatgcacgaggtggtgatctttgtgaagtctgtgcag

SEQ ID NO: 297468 - DNA, 74 bp, Homo sapiens
cctttttggcctggcttgtttgcaaagtaggttcagctgcagcccggaaagaaatcataagaaacaaaattcga

SEQ ID NO: 297469 - DNA, 97 bp, Homo sapiens
gatatttatcattgtgcccagtttctacaaataaaagatgggtggattattttctcgatggagggattcgctaaatattgtaatggatcaaggagat

SEQ ID NO: 297470 - DNA, 75 bp, Homo sapiens
gctgctccacacctgcgtcccaggcctccccaaagccagtcctgtgtcaccaatcaaaggaaaggaagccgtcag

SEQ ID NO: 297471 - DNA, 80 bp, Homo sapiens
gttggaattggtgacaaaatcagaggcatactttatagtgagaaagatcagtctaaagaaaaggagaagaaagtgaaaaa

SEQ ID NO: 297472 - DNA, 74 bp, Homo sapiens
gttttgtgaaactcactgaagtactaaacagggtgctggagatctagaagacccatggtagccttaaaaacctt

SEQ ID NO: 297473 - DNA, 96 bp, Homo sapiens
cgagcctgggaggccggccggtgccagcacctttcggcttctgagacggcggcagcagcggcattcaggaggccactgtctgcagctcccgtgaag

SEQ ID NO: 297474 - DNA, 100 bp, Homo sapiens
tcagcgcaggaggaccggctgccgccgccgccgccgccaggcaacagcattattgagaaaagcccttacagaagagtgtggccgtaggtcagctattcac

SEQ ID NO: 297475 - DNA, 82 bp, Homo sapiens
cttcgatcgcagctacgacaagggcctcgcttggtaccgtcgtcctcttgagttctggcgccttgactactgggaagatgac

SEQ ID NO: 297476 - DNA, 89 bp, Homo sapiens
gtgctcatcttgttctcgagttttctctgccatgttgctattgcaggacggaatttatcatagaatccccgactcagacccatcttcta

SEQ ID NO: 297477 - DNA, 145 bp, Homo sapiens
ccgcgcagggtcgcgatgctgcccggtttggcactgctcctgctggccgcctggacggctcgggcgctggaggtttttggcgcattctcacagacttagatgaaactgtgatggccaccgcagggggcaggtgctgacatcgtcc

SEQ ID NO: 297478 - DNA, 96 bp, Homo sapiens
cctgaacgtgcgcctcagcctgcgggagcccccggccggccctgagcctgtgcaattatttcgagagtcaaaatgtggatttccgaggcaagaagg

SEQ ID NO: 297479 - DNA, 80 bp, Homo sapiens
gttccccctccctcagcttccgccccaaaaggttttaagaagaagcagtgatgaagaaaaagttctttgtttggtccggc

SEQ ID NO: 297480 - DNA, 75 bp, Homo sapiens
aattggagtccttataggaaaaggtcttgtgataatggtcactgtatgctgaatggaacacatggtccatcttca

SEQ ID NO: 297481 - DNA, 100 bp, Homo sapiens
ggaatgacctccttttctgcttgcgctgcaccaggtgtgattcagggctcaaacttccagattttcaggattccatttttgagtatttcaacactgctcc

SEQ ID NO: 297482 - DNA, 75 bp, Homo sapiens
gctcttctgcctcttgatctccgccaccgtcttcaggccagagcaagaatatgatcctggaccaagcctttaaat

SEQ ID NO: 297483 - DNA, 100 bp, Homo sapiens
gtcatcttcataggctcgctgctcgaactgccattggatgtccagaatcccctgtagttgataatgttgggaataagctctgcaactttctttggcattc

SEQ ID NO: 297484 - DNA, 75 bp, Homo sapiens
tactataaatcccggttttggctgcttaaactgctggaaaatctggagagctgaagagttggagctattcacgag

SEQ ID NO: 297485 - DNA, 100 bp, Homo sapiens
caggctcgcctcgactccaaatggttgaaaacagatatacaggtgattttacaacgagatgctgctctccatagggatgctcatgctgtcagccacacaa

SEQ ID NO: 297486 - DNA, 100 bp, Homo sapiens
ggggcctcttccaggacttcaacccgaggcaatgaatcgctccctggctaatgtgattcttggaggctatggcaccacttcaacagctggtggaaaaccc

SEQ ID NO: 297487 - DNA, 75 bp, Homo sapiens
catttaattttagggtcctttatatagaagggagagacaaagcagttccaattccagagaaaatgagtgaatggg

SEQ ID NO: 297488 - DNA, 96 bp, Homo sapiens
cagactgacaccccacatcgacaatttggaggtggcaaacagcttcgcagtcactaatgcttctttgtgacaacaaactgtgctctgcagttttca

SEQ ID NO: 297489 - DNA, 102 bp, Homo sapiens
ccgagaccgtgaccgagagcgtgaccgagagcgcgaatatcgtcatcgttagaaggagacggtggctcagggagtaaaggaaggccagttgagcaaacagaa

SEQ ID NO: 297490 - DNA, 100 bp, Homo sapiens
ccgcactgaaggcgggacgctggcgccctgcgtccggcagaggaggcgagcatcccgctcaggtgatgaggaacccctcgcgcacccagcgcagaaggct

SEQ ID NO: 297491 - DNA, 100 bp, Homo sapiens
cttggccaccttcgggttccccatctcatgctgactccaattccagggtttcagaaccgcatcgcagcatctttcctgaaatgcactcagactcagccag

SEQ ID NO: 297492 - DNA, 82 bp, Homo sapiens
aaagatccccgttcctggagattctgattgagggcaaaataacatggcagccagacgaattacacaggagacttttgatgct

SEQ ID NO: 297493 - DNA, 90 bp, Homo sapiens
gcggggcgccctccgccacgcagccggccaccgccgagacccagcacatcgccgaccagaaggaagaggcccagcagaagggactcgctg

SEQ ID NO: 297494 - DNA, 96 bp, Homo sapiens
gtggtccctcacctgactgagtggcgcagtcagagataaatggaacaggcagcctggcatcctcgctacaacctcattgttgtgggccgataccca

SEQ ID NO: 297495 - DNA, 101 bp, Homo sapiens
aataacacaccggagacttttggggggaaactaggtcgatggtcggcggcgcccggatgggcagctgagacacgatgaggcgagtggtacgacagagcaag

SEQ ID NO: 297496 - DNA, 50 bp, Homo sapiens
cttcggtgacctctgcggcagaatgggtaccacagaccatgtcatcgtcc

SEQ ID NO: 297497 - DNA, 78 bp, Homo sapiens
ctgggacacagcggggcaggagcgcttccgcaccatcacctccactgacctgaccaacggtgcagatgggatgctggc

SEQ ID NO: 297498 - DNA, 74 bp, Homo sapiens
gatggctataatgggtatggaggaggacctggaggcaaacatcctgggtctcgccgccggccagcgctgtggcg

SEQ ID NO: 297499 - DNA, 100 bp, Homo sapiens
ccgcccgccgaggatgcgacgcaccgcagacggaatcagtccccaatgcctggaaattcctcattggattactgtgttttaaacagaatttcgtgaacag

SEQ ID NO: 297500 - DNA, 75 bp, Homo sapiens
gctgtcttcacttgtttttcagctggggaagaagattgcgcagtctctttgtggagaggacttgatcattaaagg

SEQ ID NO: 297501 - DNA, 98 bp, Homo sapiens
tggcttacaggatattgacaagtgcagacagcagcttcatgatattactgtaccgttagaagtttttgagtactaggttttgacaagcttgcatcatg

SEQ ID NO: 297502 - DNA, 75 bp, Homo sapiens
aacttctccctgcgactgcggatcttcaacctcaactgctgtgagaaggcaaccaaagtgcaggacatcaaaaac

SEQ ID NO: 297503 - DNA, 100 bp, Homo sapiens
ttatgttactttgccacttcttcacggaccagtttcagttcgccgatgggaaacccggagaccaaatccttggttaatgtgtgaaactgtgagatatgag

SEQ ID NO: 297504 - DNA, 97 bp, Homo sapiens
ccggcaacatggtgcggtcggggaataagtgcaagatgtctctgaacgggcagcgtggggagtgctggtgtgtgaaccccaacaccgggaagctgat

SEQ ID NO: 297505 - DNA, 75 bp, Homo sapiens
tatcggggcctttatttctcgtcggcggcgccctgcaccgcgcctcgcaaagtgcagcagtaccgcgtcgccatg

SEQ ID NO: 297506 - DNA, 75 bp, Homo sapiens
gccgagctggacccggaccggttttgggcctgtccacctcattccccatcgatggcaccttcttcaacagctggc

SEQ ID NO: 297507 - DNA, 115 bp, Homo sapiens
cgcgctacacaagtggagctccttttcctccacctaccttcccgagagcagatgtctcaagtattagatgccatgtttgaaaaattggtcaaagatggggagcatgtaattgatc

SEQ ID NO: 297508 - DNA, 100 bp, Homo sapiens
gtccagtgcgggccatcaagtgctgtttgtatgcacgacttgaagacacgcacttatcattcagtggatgtgttttcgcattataacaaggacctgttga

SEQ ID NO: 297509 - DNA, 100 bp, Homo sapiens
ggattagcaactccaagctcttctggcgggcgctggccatgctgcagatcgtgttcgacgagtgtcacaaagccaagaatgccggctccaccaagatggg

SEQ ID NO: 297510 - DNA, 101 bp, Homo sapiens
ggctttcaaagataattcgcagtgatgtgaaactggcctcccaagccctgataacatctacaaatctgaaggacaaaacatggttcaagcatctgggcaca

SEQ ID NO: 297511 - DNA, 90 bp, Homo sapiens
gtacttgcaagaaacctcaggacttgagtaacagcaacatgacaggggcaagtgtccgagtggtgaatcagctacttacagagatggatg

SEQ ID NO: 297512 - DNA, 75 bp, Homo sapiens
cttaaccaatacttcggctactcgggagccttcaatgacatctgccatgagctgttgggacatgtgcccttgttt

SEQ ID NO: 297513 - DNA, 90 bp, Homo sapiens
gagtggtgggactcttacataatccccaatggctttgatctcttctcaataggtttggcatggacaagatctatgaaggccaagtggagg

SEQ ID NO: 297514 - DNA, 109 bp, Homo sapiens
tgctgataatagccgagctcaagattcagctgcctatgccattcagacagagggataaattggaagaaatcttgcggggattaactccaaggaaaaatgatattggaga

SEQ ID NO: 297515 - DNA, 101 bp, Homo sapiens
gtcgcgatgggggcgcaggaccggccgcagtgccacttcgacatcgagatcaaccgggagccggactggtgatgtacatcgagagagacagcagaaagacc

SEQ ID NO: 297516 - DNA, 100 bp, Homo sapiens
tcctctggcttcgacggtgccatccagctggactgggccaggcccctggccatctgtcgggcctcagtgtgccctgccccctgcccagccccccagcggg

SEQ ID NO: 297517 - DNA, 75 bp, Homo sapiens
gttccgaggtcaggaggatgcaagtcctgacagattcagcaacactgaagcagatgaagccaccctggcccgtct

SEQ ID NO: 297518 - DNA, 90 bp, Homo sapiens
ggctgagtgctaaactgtgtggggcgcggatgggatccagctgttagtcgggtaggcatagcagcagccgctcttctaaaacattcaaac

SEQ ID NO: 297519 - DNA, 75 bp, Homo sapiens
ccggctccggagcgagaacgcgcaggctgggaggcggcagaatgcagccagaggagggcacaggctggctgctgg

SEQ ID NO: 297520 - DNA, 80 bp, Homo sapiens
tgcaggtgtctcttctcgccctggcggggaagcttcctcatcgtcctggtctgcctcatcttcagcgtgctgtccaccat

SEQ ID NO: 297521 - DNA, 75 bp, Homo sapiens
ctcctaccctgcaaacagacctcagctccgcggaagttgcggaaaccactgattgcttgtgtggagaaacagcta

SEQ ID NO: 297522 - DNA, 100 bp, Homo sapiens
ctggacccgacggaggagacggttcgccgtcggtgccgagaccccatcaacgtggagggcctgctgaatatgcttttaaggctattaaccagggtggcct

SEQ ID NO: 297523 - DNA, 99 bp, Homo sapiens
gggagatatttacacacaacttaaaaatcttgttcgaactttcaggagatgcctacatagaagagtgacagcagctagactaaatgtttaactgctgaa

SEQ ID NO: 297524 - DNA, 83 bp, Homo sapiens
ggaagaccgcgcgcagggcctgcagcgggagctggacggcgagcgcgagcggcgcgagaaaatgtcctaaacgatgctatatt

SEQ ID NO: 297525 - DNA, 50 bp, Homo sapiens
aatgagattggtttcattccagatggaatgcagagagcaaccaatgtcac

SEQ ID NO: 297526 - DNA, 83 bp, Homo sapiens
gatgcacctcctttccaactgggcaaaccccgcttccagcagggaacggcaggagcagctgatgggatatcggaagagagggc

SEQ ID NO: 297527 - DNA, 143 bp, Homo sapiens
gcaggcggacgaggcggaagaccgcgcgcagggcctgcagcgggagctggacggcgagcgcgagcggcgcgagaaagctcacagaacatttcctgcctgttgctcacactctgttgtccacagcatacccgcaccctagatgg

SEQ ID NO: 297528 - DNA, 83 bp, Homo sapiens
gacaagacacctccaggagcccagctcacagccaccggtaccttcttccaggagcctcctcaacaagcccaagagtgagatga

SEQ ID NO: 297529 - DNA, 82 bp, Homo sapiens
ggaagctttggatcagacttttgtgttgcagttcgggacgagcctgtggagtgggagacacctgacctttctcaagctgaga

SEQ ID NO: 297530 - DNA, 100 bp, Homo sapiens
tgttggtgaactcgatgaacaccgtgaaagagttgctgccagttctcatttcagatggcgattttgctgacagctgccaagaaaatgcttcactcaacag

SEQ ID NO: 297531 - DNA, 75 bp, Homo sapiens
ccacccctgaagaaattgcacaggcaccaatttgatcttctactactttgcagacatctcttctgcaaacaccag

SEQ ID NO: 297532 - DNA, 85 bp, Homo sapiens
gctcccagcgtgagcgacgcagaagacgggtgatttctgcatttccatctgagagtcctcgaatgccaccttgctgaccaatgca

SEQ ID NO: 297533 - DNA, 75 bp, Homo sapiens
ccgcaattcgagaatcaaagggccgggagcgatggaaagaccacagcaagattctttcattcgtctcctcctagc

SEQ ID NO: 297534 - DNA, 75 bp, Homo sapiens
tataatatttgtcacctgaactacttcacattttccccaatatatggtcacagtgtccatgtaactaactcctgg

SEQ ID NO: 297535 - DNA, 83 bp, Homo sapiens
cggagaccctcgaagtgcgcaaacttgacactcaccctgaccgaaaccaaggtgtatgttggtaacctgggaactggcgctgg

SEQ ID NO: 297536 - DNA, 97 bp, Homo sapiens
tgcctgtcgcttgtcttctattcaccatggcttcttctggggactcattggcgccccctgaggtggactttgacaggctgctggccagcctgcagga

SEQ ID NO: 297537 - DNA, 75 bp, Homo sapiens
cagaggaggcgggagagtgagagaaaggctggaagacgaggatatccgacatgaagccagtgacttcccatgtag

SEQ ID NO: 297538 - DNA, 101 bp, Homo sapiens
gccgagatgtctcgctccgtggccttagctgtgctcgcgctactctctctttctggcctggaggctatccagcttcaaaaggtgatgacctatcaacagcc

SEQ ID NO: 297539 - DNA, 100 bp, Homo sapiens
ctgtgctcgctgctcagcgccgcacccggaagatgaggctcgccgtgggagccctgctggtctgcgccgtcctgggaatgggtaccacagaccatgtcat

SEQ ID NO: 297540 - DNA, 82 bp, Homo sapiens
acctgcctctgaaacatggcaggctcggatgctggaggataagatcaatgccctcattaaagcagccggtgtaaatgttgag

SEQ ID NO: 297541 - DNA, 52 bp, Homo sapiens
gcttcagcaagctctctccaacggtgcggattgatgagtacgattactccaa

SEQ ID NO: 297542 - DNA, 90 bp, Homo sapiens
ctttggagaagatgctgaattcctgccagacccctcagctttgcaggccatcgaagacggcaatttggaggaaatggaagaggaagtacg

SEQ ID NO: 297543 - DNA, 96 bp, Homo sapiens
ctggacgcagcaagcggggcgctgtgtccccaagctccccgtcctcggggttcccagcaccatgagggcctggatcttctttctcctttgcctggc

SEQ ID NO: 297544 - DNA, 83 bp, Homo sapiens
gaagaatgaaaccggcttgttgtcttcaattaaaaaatttattaaaggaagcacacctaagcttttcaggatgtccagcaaag

SEQ ID NO: 297545 - DNA, 75 bp, Homo sapiens
caccacatttacccatattcttcctcacaagacgatgtctgtgctgagacctataaccctgatgaggaagaggaa

SEQ ID NO: 297546 - DNA, 51 bp, Homo sapiens
attggaaaggccttcactgcacagatttggcatttgaagaatgggaaagag

SEQ ID NO: 297547 - DNA, 74 bp, Homo sapiens
attgaaaagaagaaacttgattctcggttgaatacactacagaatcagcagactatgtcttcagcagtggtgca

SEQ ID NO: 297548 - DNA, 100 bp, Homo sapiens
cgggacagagcggtcggtgacagcctcaagggcttcagcaccgcgcccatggcagagccagaccgagagattcacccaggatacacaacctcactatatc

SEQ ID NO: 297549 - DNA, 83 bp, Homo sapiens
aagagtttctacaggggaagtgtggatgtcatttccatgagcaattctgtggtgttcttggtcacacatttatggagtttctg

SEQ ID NO: 297550 - DNA, 75 bp, Homo sapiens
ctacctcctcctttaccccagaacctcctttacacagtatcagaacttttagaaagagcgttttcgctacgtaaa

SEQ ID NO: 297551 - DNA, 75 bp, Homo sapiens
cggcccctggatgcacagccccggcgctggtattatcgggggacccacggggtcattgtggtttacgacgtcacc

SEQ ID NO: 297552 - DNA, 74 bp, Homo sapiens
cctcctacgtttacctgtccatgtctgctccatctggacacaagcatctgacggtagaagagttatttggaacc

SEQ ID NO: 297553 - DNA, 82 bp, Homo sapiens
agatatgaagaaatccttgatgtgctgctctccctgcgcattttgctactgatgaagcccagtgtgctatcccgagtcagcc

SEQ ID NO: 297554 - DNA, 82 bp, Homo sapiens
attgttttacagtctgttccacatgatcattgtaataagggtcctgcagttctgagcttgggttccctttgcctggacacca

SEQ ID NO: 297555 - DNA, 100 bp, Homo sapiens
acggtttttggaacaaggattttggatgaagaagtttttgagcatgcagcagattggaataaatatgatgaccgattgatgaaagcagcagaaagggggg

SEQ ID NO: 297556 - DNA, 100 bp, Homo sapiens
ctgctgctacggctgttgccatgaggcgaggctagggaggacctcacttccccggggtgtaataatgttaactgaggacattcatcttcaaagaaatctg

SEQ ID NO: 297557 - DNA, 90 bp, Homo sapiens
atgaacaatctcacccaattactctgctcagacattgtatgcaaacctgttccattctttcttcgtggacaacccattccaaaaagaatg

SEQ ID NO: 297558 - DNA, 100 bp, Homo sapiens
gccttttctggcggcggtagatttgaagcgcttcaaaggaccggacccagagaagaggaaaactctaccggtgcagattctcagcgctgattttgagatg

SEQ ID NO: 297559 - DNA, 100 bp, Homo sapiens
tccacttatccagacccaatggaacatcagcaatgcttctggcatctccttggaaacaatgccatctttgaatgtgagagataaacctagtttcagcatg

SEQ ID NO: 297560 - DNA, 82 bp, Homo sapiens
atcggctgcggcaacttcggggagctccgcctagaagccatgcagtgacacccgctaagacttgttggtagccatgtcggag

SEQ ID NO: 297561 - DNA, 74 bp, Homo sapiens
cagagtgctataaaaagtatggaaaaatgtggggaggtcatgacgccagtcagatcacactagccttgggcaca

SEQ ID NO: 297562 - DNA, 75 bp, Homo sapiens
cttcatccgagacagcctggagaagagcgaccagctcactaagaacatggacgccaagagtgccgaggatgaggc

SEQ ID NO: 297563 - DNA, 88 bp, Homo sapiens
accatgggacccccctcagcccctccctgcagattgcatgtcccctggaaggaggtcctgctcacagttggattggatgctgctggca

SEQ ID NO: 297564 - DNA, 100 bp, Homo sapiens
tgaatctcaggagagagcagccagagtgggcggcgactggcggcgcgatggacctgaccgggctcctgctggacgaagaaggcaccttctccctcgccgg

SEQ ID NO: 297565 - DNA, 51 bp, Homo sapiens
gcgagcagaactacggcgagcgggagacaaggacggcagcaaggtgacaac

SEQ ID NO: 297566 - DNA, 100 bp, Homo sapiens
cccatgggaaaaggtcgctgctggacacctggatcgggtctgtcatacacggaggaagcggctgttctacatgcccccatgagtccagaactgcctaagc

SEQ ID NO: 297567 - DNA, 100 bp, Homo sapiens
tgaaattacctccgagggaaacaagaaaacatcaaagaggtctagcaaagtgctgggcctaaaggagataacatttatgaatggagatcaactatacttg

SEQ ID NO: 297568 - DNA, 74 bp, Homo sapiens
cgaatctctcaggctgcatcaggatgaatgatgacccaagtatggaatgatacgggaacaacacctccagagag

SEQ ID NO: 297569 - DNA, 78 bp, Homo sapiens
gagcacccaggcgactgcctcatcttcaaggttatgaagacagtatggagtttccagaccatagtagacatttgctac

SEQ ID NO: 297570 - DNA, 103 bp, Homo sapiens
gacccggttccccggcccacagtgggggtgtgcaaacccgagagaactggtgcaccaattccagctggacatcactgtgaaaatgggacgggataaagtccga

SEQ ID NO: 297571 - DNA, 95 bp, Homo sapiens
ggtccgggctcctggacttcgcctttcccgagccctggaggtggggagaaaagactccaagaatgaaaaggctctgggccgcaaaataaactcct

SEQ ID NO: 297572 - DNA, 100 bp, Homo sapiens
cttggagcacttcctattccactggattgggaaagaccatggcaggccctggattattgtcacagcatgggaattatgcacagagatgtcaagccccata

SEQ ID NO: 297573 - DNA, 111 bp, Homo sapiens
ccgcagccttgggcctcgcgccggctatggccgtgccctggggctgagccctcagggaacggcaggagcagctgatgggatatcggaagagagggccgaagcccaaaccgc

SEQ ID NO: 297574 - DNA, 75 bp, Homo sapiens
aacccgggactgacttctaggtggaaaaaatacatcgctgtaagaaaaccggcctgtcagagagttttccatgcc

SEQ ID NO: 297575 - DNA, 100 bp, Homo sapiens
ctggatgttccctatatgcaaacaaaatcacaacggaattctttgatcctctctttgttgagcaaaagaaagaccacagcaagattctttcattcgtctc

SEQ ID NO: 297576 - DNA, 51 bp, Homo sapiens
gtaatcccagcacttcgggaagccgaggcgggtggatcacttgaggtcagg

SEQ ID NO: 297577 - DNA, 75 bp, Homo sapiens
tgggttcagtggtttatgctcacagcaagcttagcagtgtctgcaaaaacgaatcttttcctacaacctgttaac

SEQ ID NO: 297578 - DNA, 82 bp, Homo sapiens
gctgttgctcttctccgccgcggcactgatccccacagtgtggacgaatgtggaacctcgctctgtggctgtgttcccttgg

SEQ ID NO: 297579 - DNA, 82 bp, Homo sapiens
tgcctatgtattccctggggatggcgcatcacacaccaaagatgtggacgagtgctcactagcagaaaaaacctgtgtgagg

SEQ ID NO: 297580 - DNA, 50 bp, Homo sapiens
agcaggagaacacctaaagtttcgtgtctgggatgtccggccatttgccc

SEQ ID NO: 297581 - DNA, 100 bp, Homo sapiens
aaatgttatgaggatcatcaacgagccgtgtcatggagaaactccagctgggcccagagattctgcagcgggaaaatccaaggcttatttatgccaggct

SEQ ID NO: 297582 - DNA, 90 bp, Homo sapiens
tggaacccgaagaagaaaggattcgttacagccagagattggctgaagccgacgtagcttctctgaacagacgcatccagctggttgagg

SEQ ID NO: 297583 - DNA, 100 bp, Homo sapiens
tgcttggagccatgatgctgctggaatctcctatagatccacagcctctcaggacatccataaaaattcatcagagagcattttactactgagctgcaaa

SEQ ID NO: 297584 - DNA, 100 bp, Homo sapiens
gcccagcgccgccccgtcgtcgtctgccttcgcttcacggcgccgagccgcggtccgaccaaaagaatgcaatggtgtaaagattccagttgatgccagt

SEQ ID NO: 297585 - DNA, 82 bp, Homo sapiens
ttcagtttacagttcattttttgcttggtttggaaaaatttcattagaggcctatatgaacccaatagcaatggcgagatca

SEQ ID NO: 297586 - DNA, 50 bp, Homo sapiens
ccacatagagaaagtgatggggtcagtttacgttgcgagacatgtatgag

SEQ ID NO: 297587 - DNA, 75 bp, Homo sapiens
gccccgccgctgagccgtcgcggagccgcgcagccctcggagcacgaacctgcaaccatggtcgtgccactagcc

SEQ ID NO: 297588 - DNA, 75 bp, Homo sapiens
gtccgggccgaggagggacagtccacgccgagcagtgactcttcgagaagacagtgccaagaggttggagaggag

SEQ ID NO: 297589 - DNA, 100 bp, Homo sapiens
ccatcatcaccaaggccagcatcaaggacgtcctggacagcgaagggagagaagggcccctcctccagtgccaaagaagccggcgaagggccccgcgccg

SEQ ID NO: 297590 - DNA, 98 bp, Homo sapiens
agagcttcaaggacgcagccacagaggaaaagaagcccatctgtgtccagagatcagaatagaagatacgaccaaagggaagaaagagaggaatattc

SEQ ID NO: 297591 - DNA, 83 bp, Homo sapiens
ccggacggcgaatggagcaggggcgcgcagggggatatgagactttctactcggaatatcctgagtgttgcgtggatgtaaaa

SEQ ID NO: 297592 - DNA, 90 bp, Homo sapiens
ctacggggtggtgctcacgccgcccatgaagatgcagacataaacgtgacccaaaaaagcttcaattttgccaagaagttctccctgccc

SEQ ID NO: 297593 - DNA, 50 bp, Homo sapiens
agagcgtggaagagccgacccagattcctaagcggctgtacaaggccctc

SEQ ID NO: 297594 - DNA, 100 bp, Homo sapiens
tagccaatgaaaactgggatttgaaagaagaaataaatattgcttgtattgaagctaaacaagcaggtatccaattggtttggcaacaaacgaatcaggt

SEQ ID NO: 297595 - DNA, 82 bp, Homo sapiens
atcttctaattttcattccttcaaaggacactcatgaggaccatgatacttccactgagaatacagacgagtccaaccatga

SEQ ID NO: 297596 - DNA, 100 bp, Homo sapiens
tcctgggggaagtacaacctttggcagtcatcatcttccaaataggggtcctggaggaagccgagttctacaacatcggcccgctgatccgcatcatcaa

SEQ ID NO: 297597 - DNA, 90 bp, Homo sapiens
gttagtttctgcgacttgtgttgggactggtggagatacactacgccttgacacacttatagaatggtggagagaaaagaatggttcctt

SEQ ID NO: 297598 - DNA, 100 bp, Homo sapiens
gaccctgcggagttcttcgtgctgatggagcgttaccagcactaccgccagaccgtgcgcgccctcaggatggagatgaagatgaggaagctgagtcagc

SEQ ID NO: 297599 - DNA, 101 bp, Homo sapiens
gtcaatggctatgcagaaaatttatcaaacatttgtagctttagcggcacaacttcagtctattcatgaaaatgtaaagttaccgagaaggaggtccagca

SEQ ID NO: 297600 - DNA, 100 bp, Homo sapiens
ttcatttccatttctaccttgtatgcctcaatttgctggatttaagcactgctgcactttatgaggtggaattctactaagtatcagtcggccctacaag

SEQ ID NO: 297601 - DNA, 75 bp, Homo sapiens
ggcaagtgttcctgcaatgctggctatgaagaaagaggttttatgtgccaaggtcacagggattatggacccaga

SEQ ID NO: 297602 - DNA, 100 bp, Homo sapiens
aaaagagatcggggtccaaaatcatgataagatcctgaaggacacgcaggtgactcgacaggccttaaatgagatctcggcccggcacagtgagatccag

SEQ ID NO: 297603 - DNA, 74 bp, Homo sapiens
tgacatgacaaggagccgtcgtcgttagatgatgataattccgaagaaggcttccacactattcattcaggaag

SEQ ID NO: 297604 - DNA, 100 bp, Homo sapiens
tggcacagaaatggtatcaagaaaccccgatcacaaagatacgaatctcttaaggggattcgggaactggagcctctcctctgtcacagtgacaatccat

SEQ ID NO: 297605 - DNA, 75 bp, Homo sapiens
tccagctctcaggacaagaacaaagtgtgctggtttttagaacttcagccataaaaatgggcagaattttccttg

SEQ ID NO: 297606 - DNA, 75 bp, Homo sapiens
ccccagacccactccaaccgcatctatcgcatgatcaagctaggtctaggaggagatgttaaagtaacccatctt

SEQ ID NO: 297607 - DNA, 100 bp, Homo sapiens
accgctctcgcttcgtcctacacttgcgcaaatgtctccggactccctggaggaaaagcggaagcggcagcggtctgaacgcctggaacggattttccaa

SEQ ID NO: 297608 - DNA, 100 bp, Homo sapiens
cctgaagatttacaactgaagaatgcaagtgagaaagatcagtctaaagaaaaggagaagaaagtgaaaaaaacaattccttcctgggctaccctttctg

SEQ ID NO: 297609 - DNA, 50 bp, Homo sapiens
ggggtccagtgggtctgagcaaaagccctgtatgatgagattcgtcagtt

SEQ ID NO: 297610 - DNA, 82 bp, Homo sapiens
gcaccggacccgttaacgcgttgattcgttccgtgctgctgcagaaatctcccaagcctaagaagaagaagcacaggaagga

SEQ ID NO: 297611 - DNA, 75 bp, Homo sapiens
accccgcggccggacgacccaagcccgctgagcaggatgaggggaaatcctcattgacgattcaatttgttgaag

SEQ ID NO: 297612 - DNA, 100 bp, Homo sapiens
aacctggactcactggtgaccaggcctgccccaccagcccagtccctcaaccctttcctggcaccaggaggagatgttaaagtaacccatcttgcaggac

SEQ ID NO: 297613 - DNA, 100 bp, Homo sapiens
cttccattgaacttcccagcactcgaaagggaccgaaatggagagcaaagccgtgctatcaagactaatcaggaccttctcccagaaactccatggacgc

SEQ ID NO: 297614 - DNA, 74 bp, Homo sapiens
gcctcctgagtagccgggactacagataaagacgcagagcctcagagaagttaaatgattgatcctatgtcagg

SEQ ID NO: 297615 - DNA, 110 bp, Homo sapiens
accagctcatcctatccaagcttctgagggaggaggacaacaagtactgcgccgactgcgaggccaaagaagcatcaagtgtacctgatttgtgaacctatcttgcttca

SEQ ID NO: 297616 - DNA, 96 bp, Homo sapiens
ttttttctcatggatgttcttcttcgagtatttgtagaaggtccacctctggaggtatgaaggaggctatccagccctcacagaagtcatgaataa

SEQ ID NO: 297617 - DNA, 100 bp, Homo sapiens
aaggtcgccctcaaggccatgatcaaaacgagccagagtgacccctcgacctgtcagccatgggggagatggagcaactgcgtcaggaagcggagcagct

SEQ ID NO: 297618 - DNA, 50 bp, Homo sapiens
cgtgacttcccggacgctgggaaatgccttccagaggccgaggtggctcc

SEQ ID NO: 297619 - DNA, 82 bp, Homo sapiens
caaagtgcccggacccaaaacaggaagtgtcgtgaaaactacccctaaaagccaaaatgggaaaggaaaagactcatatcaa

SEQ ID NO: 297620 - DNA, 100 bp, Homo sapiens
atgatttataccatgaaatgattgaatctggtgttatcaacttaaaagatgccacctctaaggtaatgcatgccaggactgtgcaaagaggaagttagaa

SEQ ID NO: 297621 - DNA, 75 bp, Homo sapiens
gcgaacgcggagagcacgccatgaaggcctcgggcacggggggcatgtgctctgtgtacctgaaggacagtgaga

SEQ ID NO: 297622 - DNA, 95 bp, Homo sapiens
gcggggctgaagaagcagttctacaaggcgagccaggttttaaaatcaaagatgggaaaatcggagaaaattgcccttccccatggccagcttgt

SEQ ID NO: 297623 - DNA, 98 bp, Homo sapiens
acaacatctcctgctattccttgggctgcctttcctgcagctcaaagttatgaagtttcaggatgaattggaatctgggaaaagacctaaaaaaccag

SEQ ID NO: 297624 - DNA, 82 bp, Homo sapiens
gagccgtctgcaaagtgtccccggcaagaaggtttggtgcacctcgatttggaggaagtagggcagggcccttatctggaaa

SEQ ID NO: 297625 - DNA, 98 bp, Homo sapiens
tgaggggcaggacaagaaccccgaaatgtgccgagtgctgctcacccatgagatcatgtgcagggcccaggagacaccagcgggggctgccgctgcag

SEQ ID NO: 297626 - DNA, 101 bp, Homo sapiens
atcctcacctcgaaattcctgaggcgctgggagccgcaccacctaacgctggccgacaacagcctggcgtccgccacggtactccaaagattcaggtttac

SEQ ID NO: 297627 - DNA, 51 bp, Homo sapiens
gtcttccccactgcaggagctgggtgtgtgtaactggtgtgtgcaccgttt

SEQ ID NO: 297628 - DNA, 101 bp, Homo sapiens
ctggaaacagacccggcgcccagcggtagccctccttgcgcctccgattcccagattattgctcagttgtaactattgtggaccagacaaatgtaaaacta

SEQ ID NO: 297629 - DNA, 82 bp, Homo sapiens
ggcgagtggtgtgagagggcagcacgcgctgtggggctgttgataatcaggtgtatgtggccacagcctctcctgcccggga

SEQ ID NO: 297630 - DNA, 90 bp, Homo sapiens
tgcagagtgaagaaagctggtaatagatgtctgacaaactaaagaaagacttgtgttacgccaggaatagttgctgaacaccccaggcct

SEQ ID NO: 297631 - DNA, 100 bp, Homo sapiens
agacgcggctgccgtacgtggccctcgatgtgctctgcgtgttgctggtctgacactggaggagcctttaaaggttttaaaggtttggtggtaccttctg

SEQ ID NO: 297632 - DNA, 100 bp, Homo sapiens
ataaatcaactcagtgatcctgattatattaatcagtatgtcatatggatgggctatggttctgatggtctaaagttgttatcacatgaagaaagtgtat

SEQ ID NO: 297633 - DNA, 88 bp, Homo sapiens
tatcctgggtagcctctaggaagcgctagacacatgttagcactctacgtatatgaatatctgctccatgtaggagctcagaaatcag

SEQ ID NO: 297634 - DNA, 96 bp, Homo sapiens
tcaccactggacctccaaggaagccacgtgcagacatctacaaccttcgatctcctgacgaggtctcgctctgtcacacaggctggagtgcagtgg

SEQ ID NO: 297635 - DNA, 100 bp, Homo sapiens
cgcagtggtcgcttcttctccttggcagctgtgtcaatgttgaaacaagactataaagaaggagaaatgaccttgaagtcagcacttgctttagctatca

SEQ ID NO: 297636 - DNA, 90 bp, Homo sapiens
agggcacaccaaactccatctgctggaagagcctgtattgtcctcacaatagtatagaagaattcaagagaggagagagagacagcaccg

SEQ ID NO: 297637 - DNA, 100 bp, Homo sapiens
ttttgcttctccataacgagatggtgtctggagtgtacaagtccgcggagcagggggaggtgaataagaaagccttgagttttgtgaaaaaccggagaag

SEQ ID NO: 297638 - DNA, 90 bp, Homo sapiens
cggcgagcagaactacggcgagcggattacctctctagtgacccttcagctgttaaccctggttggccatgacgatcagcttgatggacc

SEQ ID NO: 297639 - DNA, 75 bp, Homo sapiens
cacataacggggttcgggtgtctcgtgtgtgaacatcacagatactgaacggctgtattcagtggtgtttcaaga

SEQ ID NO: 297640 - DNA, 90 bp, Homo sapiens
ttccgacattcagagttgtttcctccatttgctaaaggaatagtgtttggttccagagagattcctggaagttgctcagatcacattacg

SEQ ID NO: 297641 - DNA, 82 bp, Homo sapiens
gacatttcctgctcggaaccttgtttactaattataacgaaggaggcccaacttcattcaataaggagcctgacggatttat

SEQ ID NO: 297642 - DNA, 82 bp, Homo sapiens
gccgacttcgatgatcgtgtgtcggatgaggagaaggaaatctggcattttttaaagtttgcgccccacaaagaggaaatat

SEQ ID NO: 297643 - DNA, 90 bp, Homo sapiens
ggaggaccagtatttcccatggaggataagtatgctgtgcgcttcatccctcgggagaatggcgtttacctgattgacgtcaagttcaac

SEQ ID NO: 297644 - DNA, 100 bp, Homo sapiens
gtcagacgcagccgtagacaccagctccgaaatcaccaccaagcttcgttccagagcccagcatgaatggatacgcggaatttccgcccagccccagtaa

SEQ ID NO: 297645 - DNA, 100 bp, Homo sapiens
gaattgatctcgccaaaaaggacatctttggagccaggcaaggcactgacgtttcttctgctacagcctccaagccccaaacttcctccacacagcacta

SEQ ID NO: 297646 - DNA, 82 bp, Homo sapiens
tcagttggaagcagccgatccagcctgcggagcctgtggggcaggcaacgtgttggaccttccggagcttctcagaagacag

SEQ ID NO: 297647 - DNA, 98 bp, Homo sapiens
aatgggattatacatatgcaaacatgacctttcaagttcagtggctccatgagccagagcgaggaaggctaactccctcaccagacatcattgttttg

SEQ ID NO: 297648 - DNA, 97 bp, Homo sapiens
ggggaagaggcccaccctggagtaaccctcactggagaatccagagccgctgccatggcccagacactgcagatggagatcccgaacttcggcaaca

SEQ ID NO: 297649 - DNA, 128 bp, Homo sapiens
ctcgcatctgcttgcctacttcttcacggagctcaaccatgaccaagtgcagaaggaatcaacagtgagacaattatgaaaccagcttcaatttcagaggaagaattgttgaatttaatcaataaact

SEQ ID NO: 297650 - DNA, 100 bp, Homo sapiens
ggcggactcctcggccaatcagcctcgtaacaacatgctgtaccccaaggaagacaaggagaaccgcattctgctctacgcggtgagcgccggggtcttc

SEQ ID NO: 297651 - DNA, 100 bp, Homo sapiens
ctgaaagtcacgattaggactgacaataaggatagagcctcctcaaatccaaatgctaccagctccagctcccaggatccagagagtttgcaagacagag

SEQ ID NO: 297652 - DNA, 75 bp, Homo sapiens
tgggggaccacaagatcctcatcgacagcccgttttacggagaagacttttactgtgaaattcctcggagctttc

SEQ ID NO: 297653 - DNA, 75 bp, Homo sapiens
ccaaagaggagctggaggaggagcagagcgtcatctccagcagtattcagctgctggttcaggatctggatgctg

SEQ ID NO: 297654 - DNA, 90 bp, Homo sapiens
tgccctgcagtacctgcagaaggtctctggagacatcttcagcagcccctttgatgccaagaatccgttcctggctgcagtcaccaccaa

SEQ ID NO: 297655 - DNA, 100 bp, Homo sapiens
agggatcaaagagcaaacagattcagtggcctgcattgtctcacaccattttgctggtacagcctaccaagaggccagaaggcagaacttatgctgacta

SEQ ID NO: 297656 - DNA, 100 bp, Homo sapiens
aaacaggacatacctttcgtagagcatcatggcagaacaggatgtggaaaacgatcttttggattacgatgaagaggaagagccccaggctcctcaagag

SEQ ID NO: 297657 - DNA, 74 bp, Homo sapiens
aacattccagttttttaagaagggacaaaaggcgtaatagattggaactcagtgaagacacagatgttcctgtt

SEQ ID NO: 297658 - DNA, 100 bp, Homo sapiens
ccaacgtggaggcctcacgcagctccacagacagccccagctcggtgttcctcagctctctatcaatatcagctcacatcattgaaaagataattttgaa

SEQ ID NO: 297659 - DNA, 75 bp, Homo sapiens
cagcagttgatggatatggttaggtgtcagcagcggaataaaagccgccctcattctaggggagaatataatgtt

SEQ ID NO: 297660 - DNA, 90 bp, Homo sapiens
ttttgtgaaagtgtataactacaatcacctaatgcccacaaggctgaacataacttctttttttcaaagttccctgtgttgtgaactgag

SEQ ID NO: 297661 - DNA, 50 bp, Homo sapiens
ctgcaaggctgagggacgagaacgagatcctcagtttgtggtctgccagc

SEQ ID NO: 297662 - DNA, 51 bp, Homo sapiens
tcaagtatgtcccaaacgtctggaccagttactctccacaagaaaattcac

SEQ ID NO: 297663 - DNA, 100 bp, Homo sapiens
tttgacctataaaaaggcagatactgatctggacattgtgacaaatgtttcccccagaatcatccggggaaccacctctggccccatgtatggccctgga

SEQ ID NO: 297664 - DNA, 111 bp, Homo sapiens
gaacatctgggagaatatttaatggaaaatcgcttggttaaaacctgacacttttaacaggaaaaccagtagattcccagacatcgcgaagtgaatctgaaattgtgccaa

SEQ ID NO: 297665 - DNA, 82 bp, Homo sapiens
ggacaagtatgtggaaatagcgcggctgtgcaagtacctgccagagaacgacctgaaggtcactgctgaaactcaagagaaa

SEQ ID NO: 297666 - DNA, 75 bp, Homo sapiens
gaaaaggagagctcggctgttccagccagggtttctcagtttgggtgcagatcatttgctttgctttttgatgat

SEQ ID NO: 297667 - DNA, 98 bp, Homo sapiens
tgcttccagtgccaaaccaaactggagctggtgcagcaggaattgggatcgtgtcgctgcggtttaagttactgagccaggaggaaggcgagtacttc

SEQ ID NO: 297668 - DNA, 100 bp, Homo sapiens
ggaaagggagacggcgagacgcgcagcgccggcgcccgggagacccaggaggagcccgcagcatttggaaacagagccctgggctccagctggcttggtg

SEQ ID NO: 297669 - DNA, 95 bp, Homo sapiens
aaggagtttgattctacaaaagaaaccaaacatcagaaatacatccagcatggctggagccaaaccctctgcccccgtggtatcgggccctgcgg

SEQ ID NO: 297670 - DNA, 117 bp, Homo sapiens
gcggggtcggcgggagccagcgagccacgggagcgagccaggtctcggcgcggaagatggccggcggcgtggacggccccatcgggatcccgttccccgaccacagcagcgacatcc

SEQ ID NO: 297671 - DNA, 101 bp, Homo sapiens
tgtgcgggcgggcggtgagcgcccatatgggggttctggagagcggggtgtgggaacccagcgggtgccgcttctccacccgaggcttccacctccaacga

SEQ ID NO: 297672 - DNA, 80 bp, Homo sapiens
gggtctggagacgccgtggcagcctgaacggagtgtgcgacggattgggagcaattctgtggtgttcttggtcacacatt

SEQ ID NO: 297673 - DNA, 82 bp, Homo sapiens
tggaagagcaacagcgccggcaccgcgagcaccctaaagtcaacgtgcctccggagtcagagtggtggctacagtgaccgga

SEQ ID NO: 297674 - DNA, 90 bp, Homo sapiens
tagaaactcacatgagacaaatgcgctcagcttcaattgataagccaatggacacgtcagtgttatctgaagaaggaggagagccttttc

SEQ ID NO: 297675 - DNA, 75 bp, Homo sapiens
aagacagcacgctaataatgcaattactgagagacaacttgacagaagacaactgttagttttgtggcttactgc

SEQ ID NO: 297676 - DNA, 82 bp, Homo sapiens
cgaggggctccgggtcttccagagcgtgaagatcaagatcgactgcatcaacaagtatgggtctccgtacaccaaaaactca

SEQ ID NO: 297677 - DNA, 100 bp, Homo sapiens
tctacaatggaatctggtccaaacaatcatgggaatttccaaggggattcaaacttcaacagaatgtggcaaccagatcgtcacagctacctgtctctgg

SEQ ID NO: 297678 - DNA, 50 bp, Homo sapiens
cttccaagtcatcaccagaaagccccagcatgagaccagatgtaagctct

SEQ ID NO: 297679 - DNA, 100 bp, Homo sapiens
tttctcacgacgggccgagcctgccactgcaaagcgaaggctggagctaggagaaagcggtcatcagtacctctcagatggtttaaaaacccccaagggc

SEQ ID NO: 297680 - DNA, 98 bp, Homo sapiens
ttgttaccgaacatctcataaataaggtggaacggccgccttctccattctccatggccccacaagcttcccttcccccggtgccaccacgacttgac

SEQ ID NO: 297681 - DNA, 83 bp, Homo sapiens
cttcggcagtccacccaccgccgccgcctcccagagctccacgcaggagatcggtgaggagctgatcaacggagtcatctact

SEQ ID NO: 297682 - DNA, 50 bp, Homo sapiens
aagttcacacagttcctaagccagttgatcatggccttgccaggttggtg

SEQ ID NO: 297683 - DNA, 75 bp, Homo sapiens
gagcaggggccgagcccaggcgacggcaggatcccggctactcaacagaaatgaaggaggaatctgtaaagaaac

SEQ ID NO: 297684 - DNA, 129 bp, Homo sapiens
aaaccatttcttccctttcctcttgacactgcagctgcagtcaacctcttccccaatttcaatgcgattttaccaaatgttgcaagaactctggagttcttatggtagtaaaatgccggaaagaaaatt

SEQ ID NO: 297685 - DNA, 87 bp, Homo sapiens
cgcccatgcactaccacctgcgggagatcatcatctgcacctaccgccaggtgaccattgtgaggtagatattttgttctaattttc

SEQ ID NO: 297686 - DNA, 100 bp, Homo sapiens
gtctacgagctgtttctcatctttatactcttccagttggctagagatttactacatccgtccttggaagaggaaaagaaaaaacataaaaagaaacgcc

SEQ ID NO: 297687 - DNA, 100 bp, Homo sapiens
tttcgacaaagacgcaatcaggagaagccaagcacgctgacgaggttctgtgagagcatgtgagaagaaatttgtttgtccagaatgttcaaaacgcttt

SEQ ID NO: 297688 - DNA, 75 bp, Homo sapiens
acatctacgaggacatcatcaaggtggaggtgcagcagcccatgccgaacgaccctgtcaccaacatttgccaag

SEQ ID NO: 297689 - DNA, 86 bp, Homo sapiens
taagcctgcacagccgcggcggcagcagcagtgagaggaggtgcgggagacgcggcggcggcacgagcggcgcctggtggaggtgg

SEQ ID NO: 297690 - DNA, 75 bp, Homo sapiens
caggtgagaggcggatctacagacataggtggctgaagccatactattttatagaattaatggaaagcagaaaag

SEQ ID NO: 297691 - DNA, 100 bp, Homo sapiens
agataataccagagaagaattcacttagacagggtcagtatagaccttctgatttgctgtgccctgagacatatgtttgggtacccattgagcaatgcct

SEQ ID NO: 297692 - DNA, 101 bp, Homo sapiens
agccagactcagggatcaaagagcaaacagattcagtggcctgcattggctatgcattcctgctgtttcaagatgaaagctctgtgcaggctctcattgat

SEQ ID NO: 297693 - DNA, 100 bp, Homo sapiens
cagttaacagtgccaccggtgttccaactgtttaaagagtctcaggagcaggggctgcggcagaggctgctggacgagcagttcgcagtgttgcggggcg

SEQ ID NO: 297694 - DNA, 82 bp, Homo sapiens
ttacgcagaaggacctggccacgagacgtctcccacaacctgctccgggcgctggacgttgggctcctggcgaacctctcgg

SEQ ID NO: 297695 - DNA, 75 bp, Homo sapiens
agaaaattcactagcagagtatcatagcagatggagtcccctgtttccacaccagcagtgctgccaatacacctt

SEQ ID NO: 297696 - DNA, 83 bp, Homo sapiens
gcctttagtttcaaaaagttgctggatcagtgcgagaaccaggagctcgagactcctgaggaagaagagattttaaacaaaaa

SEQ ID NO: 297697 - DNA, 73 bp, Homo sapiens
aagagcagcggaaaatgatccagtcacagacactgaggatgctagtgaaactgacctggcaaagcatgatgaa

SEQ ID NO: 297698 - DNA, 50 bp, Homo sapiens
gggtttccaccgttcgttcaaggtgaaagaaaatggcccgaaccaagcag

SEQ ID NO: 297699 - DNA, 100 bp, Homo sapiens
ctgactgccaggctaggatgtgacacttaaggaagtcctggctgagcaaggttggaagccctagttctcgcattgaccgcacaaacttttctaatgaaaa

SEQ ID NO: 297700 - DNA, 83 bp, Homo sapiens
cgcacctccgtagctgactcgatggagaaggaggagacaacccgggagctgctgctgcccaactggcagggtagtggctccca

SEQ ID NO: 297701 - DNA, 50 bp, Homo sapiens
gacagtgcctggataccttcgaataggagttcgaaatttgagcaacccag

SEQ ID NO: 297702 - DNA, 83 bp, Homo sapiens
cagagcctcgcctttgccgatccgccgcccgtccacacccgccgccagacaccattcgcttttcacccaagatgatttgatgt

SEQ ID NO: 297703 - DNA, 75 bp, Homo sapiens
gtgacatcagcatcccatgccactataaatacccgtttcaggacagtcattttgtttactcattcagccctgttg

SEQ ID NO: 297704 - DNA, 75 bp, Homo sapiens
tgcaggcccaagttccaaatcagacctgtccaagttcgatacaagaggctgttttcctagcgtggcttgctgcct

SEQ ID NO: 297705 - DNA, 98 bp, Homo sapiens
aagagattaaagatgcagtacgccacggggccgctgctcaagttccagatttggggccaccttatcttagttccagaatttagtcttcctttggaata

SEQ ID NO: 297706 - DNA, 75 bp, Homo sapiens
cagccttctcgcggccccttagcgcggtcaggccgccctccttttccagcatcgatttcttccctgtgaaaacaa

SEQ ID NO: 297707 - DNA, 83 bp, Homo sapiens
attctgaaaagaacggagcttgaagcaaagctgcaggttttaaagaagctccaccatgaggcgaggtggatggaggaagcgag

SEQ ID NO: 297708 - DNA, 101 bp, Homo sapiens
agaagagaagctttactggtgttccagccctaaggttatggaggttttgatgactatggtggctataataattacggctatgggaatgatggctttgatga

SEQ ID NO: 297709 - DNA, 101 bp, Homo sapiens
aggattggaggtgtcagtgttaaaggaacctctacaacgaaggtgaagccacggaagataaggttcctgggtggagctacccatgaacagcagcaatggca

SEQ ID NO: 297710 - DNA, 90 bp, Homo sapiens
gcatctgcccctcggccttccgacgtgggcggtgggccccagccccacagaccagcccagcattcaggtcaaaatgcagatcttcgtgaa

SEQ ID NO: 297711 - DNA, 99 bp, Homo sapiens
ggctatacctgtaaatggtggtctagcagccagacatatctgaagagatggattaagaatgctttggattaaggattgtggagcacatttcaatcattt

SEQ ID NO: 297712 - DNA, 100 bp, Homo sapiens
gagtgatatcagacaccgagcttcagcaagctctctccaacggtaatagcctgcagctggtgttttgagaagccctactgctgaaaacttaacaattttg

SEQ ID NO: 297713 - DNA, 73 bp, Homo sapiens
gtcatcgacggcttcgccatcgccagcttcagcaccctggaggccctggaggccatcagcatcagcaaagcca

SEQ ID NO: 297714 - DNA, 95 bp, Homo sapiens
acaacttgactggctccttttaactggatattggtgtccgcaaagcccaaggtgcataatcgtcaacctcgaattaactcctacgtggaggtggc

SEQ ID NO: 297715 - DNA, 82 bp, Homo sapiens
ttgtacccgcagacattatgaaaggtggaatgaatcttacttgttgaatatcttctggttactagttggattcatttgtgaa

SEQ ID NO: 297716 - DNA, 87 bp, Homo sapiens
gcagcggcggcggcgcggcgcaggcaccggcccggggagaggcaccatgagcgacaccagttggcgctccgaggcaacctttcagtt

SEQ ID NO: 297717 - DNA, 75 bp, Homo sapiens
cttttgtcctcccacctgtccccccatttcagagaggctttgttggctgagatgggagttgccattcgggaagat

SEQ ID NO: 297718 - DNA, 75 bp, Homo sapiens
agctgagggcacgtgtttgcggttcagccctttgatgaccgcagcaggaatccatacctgttttgtatgtaagca

SEQ ID NO: 297719 - DNA, 74 bp, Homo sapiens
gcagcggcgccattttgcccaaaccggtgaaagcatgttatttgaaagcaattgagacgcaaccgaactttgca

SEQ ID NO: 297720 - DNA, 88 bp, Homo sapiens
caaaactctatggcatctttccccaaggccgactggagcagttcatcccgcgtggtaccatgcgacgacgctatgaagatgatggcat

SEQ ID NO: 297721 - DNA, 107 bp, Homo sapiens
agcagccagagtactggtttgctgttcctcgggagagaatcgggaccagtattcacatctgctaagtgatcattttctgccataccaaggtcataattccttccgtg

SEQ ID NO: 297722 - DNA, 83 bp, Homo sapiens
cctggaggtgccatttccctctctgttgaagcaaaggccggggcagacctcctagaatgtatcctgtcaggtataatgtcagt

SEQ ID NO: 297723 - DNA, 88 bp, Homo sapiens
cgcgaagctggccaaagcctgcccagacggctcacctgtgcgggatggaacaaaagcttaccctcttctccacctgctccccggctgc

SEQ ID NO: 297724 - DNA, 83 bp, Homo sapiens
tggctctttctgctgggcctgcccttcaccctctacatggtcttgccccagaagctgcgggcacatccacgcctgaaatgcgg

SEQ ID NO: 297725 - DNA, 100 bp, Homo sapiens
cctatgtgaaactgctttctaaaacaccagaactcaacctgggtgcagaagctggatacctaccaggagtacaaggaggctgcgtcctcttaccaggaag

SEQ ID NO: 297726 - DNA, 114 bp, Homo sapiens
ctgcgcggcgcggcggccgggccctcgagacggggacgaactgtcaagtaatccacctctggctaccatccttattcctcctcatgctcggattcaagcagctgcttcaacccc

SEQ ID NO: 297727 - DNA, 75 bp, Homo sapiens
ctcatggaggctgagcatttattcagggctccacgtgttccccacgtttgtggcgtacgagctcacggtgctggt

SEQ ID NO: 297728 - DNA, 82 bp, Homo sapiens
gacagcgccccagcatttgccatcttcaagtttgttcaggaggatacgaagcgttttcggcttcctgcccggagctgtgcag

SEQ ID NO: 297729 - DNA, 90 bp, Homo sapiens
agacaagacacttttcagaaagacaggtggcacctctgagcatgagaagctgtgccgggcccgggaccagtgccgggagattctcaagta

SEQ ID NO: 297730 - DNA, 75 bp, Homo sapiens
cgccggtcgagctgattctgagcgatggagacgcaggtgcccgcgctgctggaggccggcttccggagggagaac

SEQ ID NO: 297731 - DNA, 77 bp, Homo sapiens
gacgaggcacagcgtttcttgcaagaatgggaggatctaagcattgaagaacagtcagagtgtgctcaggatttcta

SEQ ID NO: 297732 - DNA, 112 bp, Homo sapiens
ctccgcctcccccggctcagcccccggccgcggcgggacccgagatgtgaaaggaccacccacccaccgtctgtcttgtggtcagtcaccctacaccgagacaacaacgtgg

SEQ ID NO: 297733 - DNA, 125 bp, Homo sapiens
gctggccggatggaaatcctaatgacagtctccaaattcgcctccatctgtaccatgggtaaagttctttacaaagttcgctggaaaggctatacatcggatgatgatacctgggagcccgagat

SEQ ID NO: 297734 - DNA, 60 bp, Homo sapiens
cgcaggacctgcagcatcccagagattccagttcttcagacaaacaatggtccaagtcta

SEQ ID NO: 297735 - DNA, 80 bp, Homo sapiens
ccaggagcaccgccgaggactccagcacaccgaggactcggtgaaatacctggagtgctcagctctcacccagagaggcc

SEQ ID NO: 297736 - DNA, 100 bp, Homo sapiens
cccggaatctttcttcagcaaactctataaagttcctcttgacaccacggaataccctggcaaatcctgatcctaactgttgtcttggagtatttgggct

SEQ ID NO: 297737 - DNA, 100 bp, Homo sapiens
gccgctgggcctgcaggtctctgtcgagcagcggacgccggtctctgttccgcaggatgggagggggctctgcttctgcgggaagtgccgctgccacccg

SEQ ID NO: 297738 - DNA, 100 bp, Homo sapiens
taagaacagaaaatcgtcttatagttgagaatttatcctcaagagtcagctggcaggtgaccaagaatatggcccaggtgaccaaagccctggacaaggc

SEQ ID NO: 297739 - DNA, 118 bp, Homo sapiens
cagggacaagttacaggaatgttctccaagcagcaatccaaaagagtctcaaggatccttcaaataacttcagggtgtttggagaagagggattgaccctgaatcttgaagacgttca

SEQ ID NO: 297740 - DNA, 81 bp, Homo sapiens
gttgaagagcctagcgacgaggagccggctttgagcaggcgggtgaaaatgaaagccggctgtagcatcgtggaaaagcca

SEQ ID NO: 297741 - DNA, 75 bp, Homo sapiens
tacttctcgcagtccccgcgcgtggtcatccaggtggtggcggtggcggcccgcgatctgagccgtgcgaaggag

SEQ ID NO: 297742 - DNA, 74 bp, Homo sapiens
tgaagggcatcatgcatcttactgaaggaattgactttaaaattaggaccatagagctcgatggcaagagaatt

SEQ ID NO: 297743 - DNA, 50 bp, Homo sapiens
ctgctcttccaagcaaggaagtcgacaggatgcctttgtggaactgtacg

SEQ ID NO: 297744 - DNA, 98 bp, Homo sapiens
tggtgagacggagctatcggcgccgcggcaagagccaggtacaccaggggttggaaaaaccacactaggcaaagaacttgcgtcaaaatcaggactga

SEQ ID NO: 297745 - DNA, 86 bp, Homo sapiens
tccagatggcgtcttccgtgggcaacgtggccgacagcacaggttcacaactacatgatgccacccctcgaccgaagctggaggga

SEQ ID NO: 297746 - DNA, 83 bp, Homo sapiens
aggaaccaagaatccagaactctcctaccagggccccagaaaccactggtcgaattgacaaatcttaccctacagtatgtggc

SEQ ID NO: 297747 - DNA, 82 bp, Homo sapiens
gcgaccgccaagaaaggcagcgaggtggagagcggcaagtgaaccggagcaaacgacttccgatccagtctgcgctgttgcg

SEQ ID NO: 297748 - DNA, 82 bp, Homo sapiens
gaggaggcagccacggggcccctgggtctgaaggggcgtctcgattacctgagctctctgaaggtgaagggccttgtgctgg

SEQ ID NO: 297749 - DNA, 82 bp, Homo sapiens
cggcgcgatgcccttcaggaaagacttgtgcaccatggacaattttgctgagggagatttcactgtggcggattatgccttg

SEQ ID NO: 297750 - DNA, 73 bp, Homo sapiens
gtggcaagtattgctgtgggtgctgggacttcccgtccgcggcgtggagggcattttttactgtctacagaaa

SEQ ID NO: 297751 - DNA, 78 bp, Homo sapiens
cagctcacagccaccggtaccttcttccagactcattctgatgaaggaaagagcgtccctgtgcagctgcgtgtcctt

SEQ ID NO: 297752 - DNA, 82 bp, Homo sapiens
ctcagagtaccgcttggagatcctagagtggatgtgtacccgactagacgcttgaagcaaagctgccatcccagaagacgac

SEQ ID NO: 297753 - DNA, 83 bp, Homo sapiens
ccgcttctacctggtgtttgagaagatgcggggaggtgcgggcggcacccagagactcacccgtgctgttgggaagtcgctgg

SEQ ID NO: 297754 - DNA, 100 bp, Homo sapiens
ggaggggcgagagggagccgcagctgatgtcagccctttctaaggcacaaaatgatgtgatggaaatgaagatgcagtcagagagactttcgaaagaata

SEQ ID NO: 297755 - DNA, 90 bp, Homo sapiens
cgcggggcgacgctggctgcagggacccggtgacagcgtgagagcttcagtatcagacacagcacagcagccatctgaagagcaaagcaa

SEQ ID NO: 297756 - DNA, 76 bp, Homo sapiens
caactattcaacatggaggcggaggtcgataagctggaactgatgtgaacagagtatctgccaagcccgggcttcc

SEQ ID NO: 297757 - DNA, 83 bp, Homo sapiens
gtttggacgccggcggagacgcgggcgaggctgaaggtgatgtggccgccctcaaccgacgcatccagctcgttgaggaggag

SEQ ID NO: 297758 - DNA, 83 bp, Homo sapiens
gcagagcggagggagccccagacacgtcatggctgagtacgggaccctcctgcaagacctgaccaacaacatcacccttgaag

SEQ ID NO: 297759 - DNA, 72 bp, Homo sapiens
acaacatcaataccaatgaatttcccaatattggatcctggtggtgaagcagcgcttgcagatgtacaactc

SEQ ID NO: 297760 - DNA, 100 bp, Homo sapiens
ggatggccgtaaccccgaaggaaattgagaaagatcagtctaaagaaaaggagaagaaagtgaaaaaaacaattccttcctgggctaccctttctgccag

SEQ ID NO: 297761 - DNA, 75 bp, Homo sapiens
agaactagcagattttgtaagggaacgaactgataaatttcaaacggaagagagtggcagcatttagaaagaatc

SEQ ID NO: 297762 - DNA, 75 bp, Homo sapiens
ctgcctccccacaccaccgaccaggacctggtgaagctctgtcaaccacctgtcatttactccatcctttatagt

SEQ ID NO: 297763 - DNA, 82 bp, Homo sapiens
gccagctccagcaggcagccgccctcaatgcccagctctcatgggaggttgaatggagcagctgaacttggctgacagtggc

SEQ ID NO: 297764 - DNA, 95 bp, Homo sapiens
ggaactggagcaattgaagctgactactaaggagaataaggaaagcagatggtggagctgaatatgccacttaccagactaaatcaaccactcca

SEQ ID NO: 297765 - DNA, 80 bp, Homo sapiens
ctggctggctttgataagtacaaggtatatttgcttacttaaactaccatgttcctcgaacgagacgagaaatcctggag

SEQ ID NO: 297766 - DNA, 75 bp, Homo sapiens
ggaaatctggtgtatgttgtcaactatccaaaaggttggaaaagagactgttcaaaccactgaggatcagatttt

SEQ ID NO: 297767 - DNA, 95 bp, Homo sapiens
gatcagttataaactctagagtgatcataggtatattgaactgttcctgaattcatgtccaaaaggaaaataagactctaggggctccagataat

SEQ ID NO: 297768 - DNA, 97 bp, Homo sapiens
tgcagtggaagatgaggacagcatggatgggctggagacaacagaaacagaaacgattgtggaaacagaccacgtgaccagagagaagctggaccgc

SEQ ID NO: 297769 - DNA, 74 bp, Homo sapiens
ccagggcagccgtgcccatttccccagggcatggagctggaaaacctcatgctggacaaagatggccacatcaa

SEQ ID NO: 297770 - DNA, 96 bp, Homo sapiens
ccgacagggcgattgcagtgcgttccggaatatatgcagaacatgtcctgcggcccaagaatcttggacttgcacatcagaggcaacagcaactac

SEQ ID NO: 297771 - DNA, 100 bp, Homo sapiens
aaataaacacagaaatagtccagaatgtcacaggtccagggcagaggaccaacatgggcattttgtttatgagcaaggatgttccttcaggaggaagcag

SEQ ID NO: 297772 - DNA, 100 bp, Homo sapiens
gttttcatctcttagggctggctgtgttataaagaaaatgaagctactgaatctttacatcaaacgtgcacaaacaggttctggaggagctgatcccact

SEQ ID NO: 297773 - DNA, 90 bp, Homo sapiens
cgatgatcgtgtgtcggatgaggagaaggaaacccagcgtttgctggcagaaccagttcctggcatcaaagccgaaccagatgagagcaa

SEQ ID NO: 297774 - DNA, 74 bp, Homo sapiens
cgacggcggcctacgagcagctgaagcttactatactggcaattgctggagaagattttgcaattgttgcttct

SEQ ID NO: 297775 - DNA, 75 bp, Homo sapiens
cgggggacgagctcggagcagcagccaggatatccgacatgaagccagtgacttcccatgtagagtggccaagct

SEQ ID NO: 297776 - DNA, 50 bp, Homo sapiens
agaaggttacctctacccatcacttcgcaagtctgttttcagcatcaggg

SEQ ID NO: 297777 - DNA, 100 bp, Homo sapiens
ttgagtcgggaaatggccgctgtgtggttgcaacggagataaattcccggaaccgcgattcggcgtgtcagatgtgccgtttgggggtgctaaagctggt

SEQ ID NO: 297778 - DNA, 78 bp, Homo sapiens
agactttgattcaaccagtacttctggagtgtatggataagaaactctttaagcctccagtgttagtatttgtggact

SEQ ID NO: 297779 - DNA, 108 bp, Homo sapiens
ctaacactgaggacatgtcactgtgtcatgctaaccgctcggcagccctcttccacctgggtcagtatgaggccatcatgcagaagggggatacaaacataaagccca

SEQ ID NO: 297780 - DNA, 100 bp, Homo sapiens
attattaatgcaatttatgaacctacggaagaagaatgtgaatggaaaccagatgaagaagatgagatttcggggccttggacaagttgttactgactat

SEQ ID NO: 297781 - DNA, 100 bp, Homo sapiens
ctttcacttatctcttctttaacttatcgtggaaataaaacagctgttttgcagattggactacaagaatgaagaacaaattttggtattttgagtttgg

SEQ ID NO: 297782 - DNA, 46 bp, Homo sapiens
agaaccgtcagtttgagccagatgaacacacatgcaggacttgaaa

SEQ ID NO: 297783 - DNA, 90 bp, Homo sapiens
ctgcctgctgacctggggaggccattggctctatggaaaacactgtgaaagctggtggaatgcgaattgtgcagaaacacccacatacag

SEQ ID NO: 297784 - DNA, 113 bp, Homo sapiens
ctgctcttccaacaccagtggaagatgatcacatcccaggtgaccaagaatatggcccaggtgaccaaagccctggacaaggccctgagcaccatggacctgcagaaggtctc

SEQ ID NO: 297785 - DNA, 75 bp, Homo sapiens
tcaggatcctctgggtggcctactatggttttggtgttgccagcctgagaacagtggcccggagagctgcctgta

SEQ ID NO: 297786 - DNA, 100 bp, Homo sapiens
gagccctgcattcgcggcgtgtgcagacaatggcgatgaccactcagaaggaggcctggtggagaaccacgtggacagcaccatgaacatgttgggcggg

SEQ ID NO: 297787 - DNA, 98 bp, Homo sapiens
ggaaatcgggctgaagcgactgagtccgcgatggagtggtatgtgtgcaacagagagaaattatgcgaatcactccaggctgtctttgttcagagtta

SEQ ID NO: 297788 - DNA, 100 bp, Homo sapiens
tggagcccctgctttccactgggagaagatgtcaaccggacactagaaggtggaaggaaacctcttcattatgcagcagattgtgggcagcttgaaatcc

SEQ ID NO: 297789 - DNA, 96 bp, Homo sapiens
ctcccaaagtgctgggattgcaggtgtgcattgagacgtacataagcagctgtcaccagcgtagcataaacactgctgtgcgggcaactctcagtc

SEQ ID NO: 297790 - DNA, 101 bp, Homo sapiens
aagagcgccgagcggtggcgtcgttgtcgccccctcctcgtcgggaagaatcgtttggtctcctgccgtgcccgatatatgcaagttgccgaaagacgaag

SEQ ID NO: 297791 - DNA, 100 bp, Homo sapiens
agcgcttcctgcagaaggccgagaagctctacccactgccctcggcccgcggacactgtaatttatgatcgactggcagagacgtcaaaatacaaagaaa

SEQ ID NO: 297792 - DNA, 88 bp, Homo sapiens
cggaggagccaggtccctgtctgagccaacaggccgacggtcgcaaggtcctacggtcaagcatccgggagtttctatgcagcgaagc

SEQ ID NO: 297793 - DNA, 75 bp, Homo sapiens
ccctgaagagggaagacacgcggaaacaggcagagaaaatcctgaaggagcaagagcggctggcctacataaacc

SEQ ID NO: 297794 - DNA, 100 bp, Homo sapiens
ggagcttttcgtaaagggaagtcatttctactggacttcatgcttagatacatgtataacaagacatgcacatgatggtgtccaagccagaacagtgggt

SEQ ID NO: 297795 - DNA, 100 bp, Homo sapiens
ctgagacgatcttcactgtgcctgaaaggagagaggcattttgctgaaagtgaaagcttttatctcagttatcaggagtgagacgttctgcaggaggaca

SEQ ID NO: 297796 - DNA, 101 bp, Homo sapiens
aaaccctccaaacccatccccaagccccgcgttagcattcgcaagtccgtgaaactggcagacctttcacttcgtatccaacaaattgaaacaactctcaa

SEQ ID NO: 297797 - DNA, 101 bp, Homo sapiens
tgctggcgctggtggccgtgctgctgctcgcagcgtgccacctcgcctcccgccgctaccgaggtcaaatgggctctctcattcttggagtgaaaggattc

SEQ ID NO: 297798 - DNA, 98 bp, Homo sapiens
gcccgaactgagccaccttcgcggaccccgagagcggcggcgcgactcaccgcggaggcgcccggacgcgtcaagcctcaggcccaggcccaaggcca

SEQ ID NO: 297799 - DNA, 100 bp, Homo sapiens
gtccaccagtgcagcagaatatgatgaactcggcttcaggtcgcactggggcagtgttgtctggtgggtactggagaccttccgtgtcactgctgctctc

SEQ ID NO: 297800 - DNA, 83 bp, Homo sapiens
gtcccagctggattcggtgcgggtctggctgggcaagcactacaagaaggttcaaatggtgaaagacgatgacccctcctgga

SEQ ID NO: 297801 - DNA, 90 bp, Homo sapiens
caaagccaaccgatacttttctccaaattttaaggaattgagtgatctacagcgcgatccacctgctcactgttcagctggacctgtggg

SEQ ID NO: 297802 - DNA, 100 bp, Homo sapiens
cctgtggctggacaacacggagaacgacctcaaccagggcattgctatggcaacaaaagaaaatatgacttcacagagaggaatgttgaagtcaattcac

SEQ ID NO: 297803 - DNA, 83 bp, Homo sapiens
acctgcacctcctaaaaagggactgctgcagagactcttcagtcgccaagattttttatcaagcagaaatgcatcgaacaacg

SEQ ID NO: 297804 - DNA, 98 bp, Homo sapiens
atcttcatgccctgggttctgcccgcacggacccccatcaaatcaatatgtgtggatcagaataaaccgctgtttatcacagcaggattggattcttt

SEQ ID NO: 297805 - DNA, 51 bp, Homo sapiens
attcagacccatttccagtcatgactgtgattgggttattatacccctgca

SEQ ID NO: 297806 - DNA, 82 bp, Homo sapiens
cagcgaggcactcatcctgcacgccggcgagtgccagcggagcaggacatcgagactttacatggctctgttcacgtcacgc

SEQ ID NO: 297807 - DNA, 82 bp, Homo sapiens
ggccgtggctaccccggatttgctccaagctatggctatcagttcccaggtgctgcgacaagagactttggacaaaaattga

SEQ ID NO: 297808 - DNA, 100 bp, Homo sapiens
tgtgctttttcaagggagctgataaagaacttcttcccaaaatgggccactcctcaggatagtcaggaaggaacctttgggtcagagcattcagcgtcac

SEQ ID NO: 297809 - DNA, 100 bp, Homo sapiens
ttcaaaaatgaaaagagaatcaagcttcagatttggttttgatgtggacaatggcacatctgcgggacggagtcccttggatcccatgaccagcccagga

SEQ ID NO: 297810 - DNA, 100 bp, Homo sapiens
caaattctgcccagctggttgtagagacgtagcaggagacatttctgggaatatggtagatggatatagagatgatatggaatattatcttgtaaaatgg

SEQ ID NO: 297811 - DNA, 100 bp, Homo sapiens
actgaagattgtcatgattgtttatcctaatcccaatgctgaagtaagattgtcttggaaatactaagttggaaaataaacagagttgtctttgttggaa

SEQ ID NO: 297812 - DNA, 75 bp, Homo sapiens
tggcagcggaaacgcagacactgaactttgggcctgaatggtgccgtgagcgatgtggagatgcaggaacactat

SEQ ID NO: 297813 - DNA, 50 bp, Homo sapiens
ctcccgctgtctcagcagtctacagcacgctgccgggccgcaagtacagc

SEQ ID NO: 297814 - DNA, 75 bp, Homo sapiens
cacctgttgctgcacgatcagacagtcattcgcaaaggcatgttggagacttgggcaatgtgactgctgacaaag

SEQ ID NO: 297815 - DNA, 80 bp, Homo sapiens
ggggtctgagtctcacagcttgtaaagaatcaggaaacccaggcccaacggcaggtggatgcaagaagaaatgttcccca

SEQ ID NO: 297816 - DNA, 83 bp, Homo sapiens
ctgctgttgcggccgctgccccagggctgcggggacggatgatcggctgaatgtaacagaggaactaacgtccaacgacaaga

SEQ ID NO: 297817 - DNA, 51 bp, Homo sapiens
ttgtagacacagccgggcaaatttctctatgaatcatcatcaagaactctg

SEQ ID NO: 297818 - DNA, 82 bp, Homo sapiens
tttgagtcctcgagtgaatgggcggatctcatatcttcacttggcaaactcaacaagaccttaacacgtgaacagaaagaag

SEQ ID NO: 297819 - DNA, 100 bp, Homo sapiens
tctgggagcacacccgttctctcggctggatgttctcatcgtccctgccaactttccaagtctggggatggccagagttgtggaaagtaaaaatgtagcc

SEQ ID NO: 297820 - DNA, 96 bp, Homo sapiens
cagcaactggtctattatatcatttaaaccacatggctatctaaagagagtgtgaacatggctacgcctcttcattcccgtccatgccgagccccc

SEQ ID NO: 297821 - DNA, 104 bp, Homo sapiens
aggaggctgcgaggagccggcgcggtcgcagtctccacggcgcaggcccacggtagcgcagccgctctgagggaaatcctcattgacgattcaatttgttgaag

SEQ ID NO: 297822 - DNA, 101 bp, Homo sapiens
ggaagagctgatgagaatgctggcggaggacgagctccgggatgctgtactccttgtctttgcaaacaaacaggattcactggcaaaatttgctggcagaa

SEQ ID NO: 297823 - DNA, 74 bp, Homo sapiens
tggtttgggtcatggcagcagtggtgctgtgcacagcacaagctgagatgagtgaactgagtgtggcacagaaa

SEQ ID NO: 297824 - DNA, 75 bp, Homo sapiens
catatttcaggtgccacgtccgtagaccagcgctccttgatcaactcaaatgtgttatcccagatcactgaagct

SEQ ID NO: 297825 - DNA, 83 bp, Homo sapiens
cgcagtggtcgcttcttctccttgtatttaaaagacccaactcagcccatcttagaggccttggacaaggacagctcaccaaa

SEQ ID NO: 297826 - DNA, 98 bp, Homo sapiens
ggggctcccttgcggcccaaactgaacccgaagaaagcccgtgcctacgggccagtgctacaaggtgagctgcctggaaatccctgggccctctggcc

SEQ ID NO: 297827 - DNA, 97 bp, Homo sapiens
cccaatcagctcgtacttacttggagagacatatgtctgaatttatggagtatgccccttggtgtggccactgcaaggctctggcccctgagtatgc

SEQ ID NO: 297828 - DNA, 75 bp, Homo sapiens
ctccggggacccttccgtatctgcctaggcattttgctgtctcctcctaatacgtgtggaaccatcagagaatct

SEQ ID NO: 297829 - DNA, 82 bp, Homo sapiens
cggtgctctgccatattgtgtcttccccggccggtccctcgcctcccggccgagctgacgatgccttcaattaagttgcaga

SEQ ID NO: 297830 - DNA, 83 bp, Homo sapiens
ctcaactggtgtcgagaagtccggaagcttgtggcgctgaaaacgaacgatcacaaaatttgtccaggatagacatagagcta

SEQ ID NO: 297831 - DNA, 75 bp, Homo sapiens
cgcggcggccgcagctgccacaaaccagccaggcccagacatgtccgtccttgtaagttaaaagcttccatggga

SEQ ID NO: 297832 - DNA, 100 bp, Homo sapiens
aaaatctcaggcataaaatttgttcagcatgatgctgtagagggaatcttaagtgctgaggagaaaatacttggagaatttagagatacttacaatccag

SEQ ID NO: 297833 - DNA, 98 bp, Homo sapiens
ctgaggagatgttcagggaggtcaagtattacgcggtgggcgacatcgacccgcaggccaccagcccctcgggttccaagatgcagctactggagaca

SEQ ID NO: 297834 - DNA, 100 bp, Homo sapiens
ttcagaaatatattccatgctatcagctttttagctttcaccaacaatcaccagtggtttacacaacattgcaaggagcattgaaactcgaaactactca

SEQ ID NO: 297835 - DNA, 97 bp, Homo sapiens
ggggagccgagctggagctgccgcggcgcagccaggacgagattgaggagctgcgggccgagatgctggagatgcgggacgtctatatggaggagga

SEQ ID NO: 297836 - DNA, 100 bp, Homo sapiens
ctggaaaattgaccacagcacagtacagagtatctaagagggacttttaatgttgaatgccttacaactgatcattacacaggcggcatgaagcaaaaat

SEQ ID NO: 297837 - DNA, 100 bp, Homo sapiens
ctcggtggtcatgctgctccaccacgtggtcactctcatcctcatcgtctcctcctacgccttccgaaaccagcctggacaccaagtctgtgtcagaagg

SEQ ID NO: 297838 - DNA, 115 bp, Homo sapiens
tgcttggtgtcgtttttccttgagctgaacgtcttgcaacagtggccgcacgcatagcagcagccgctcttctaaaacattcaaaccaaagaagaatatccctgaaggatctcat

SEQ ID NO: 297839 - DNA, 50 bp, Homo sapiens
ggatgagtccactctggccttccagcagtctattatcctcccagtccaca

SEQ ID NO: 297840 - DNA, 83 bp, Homo sapiens
tctgggccgcttcttcagctctgagaccaccgcagcccactccctagatgccgacaaaaggatcaaggtggcgaagcccgtgg

SEQ ID NO: 297841 - DNA, 100 bp, Homo sapiens
tttccacatcggtcagaaaaagatgaagggaaaaggccgaggcatcagcgtgtgaagaccgcaaagacgatcccgagtacagttgtgaacagcattgctg

SEQ ID NO: 297842 - DNA, 90 bp, Homo sapiens
tgctgatatgcatgcatgtaccgaccttctgaacaaggccaacacctatgcagcaactcttctgacctctgggactactgcaacagtagc

SEQ ID NO: 297843 - DNA, 99 bp, Homo sapiens
tctggcacctggccatcaccgacaggagcttcactacttgtttgcggccccctactactacggcttctacaacaaccggctgcaggcgtactgcaagca

SEQ ID NO: 297844 - DNA, 90 bp, Homo sapiens
gcatgccccgctacgagctggctttaatcctgaaagccatgcagcggagacacctatggctgccgatgaaggctcagcagagaaacaggc

SEQ ID NO: 297845 - DNA, 100 bp, Homo sapiens
caccaggccgattatgtccattgttctcttggagcagctggtcatcatgattctgaagactactttgaggtcaacattccaacagacctacgagcaaaac

SEQ ID NO: 297846 - DNA, 98 bp, Homo sapiens
ttcctgcccttcacgctccaggagctagaggagaaggcagagcccccccaggctatgaatgccctgatgcggttgaaccagctgaagccagggctgca

SEQ ID NO: 297847 - DNA, 100 bp, Homo sapiens
gccaccagctcgaccacagcaagctcctggggacagagcgggatgccaccagcttgtccaaagggaagttccaggagctcctggtgggcatcgttgtgga

SEQ ID NO: 297848 - DNA, 100 bp, Homo sapiens
aaggagctggatgcattgctgggggacctgcactgcgagatccgggtgccatctccctcttctacgagctctcggagaatgacttgaacttcatcaagca

SEQ ID NO: 297849 - DNA, 100 bp, Homo sapiens
cggtcggcaaggaagcggagggggccggagaagagagctctggggtcgacacgaagttgattcaagtcagttgagacgccagttgtgtggaggaagtcag

SEQ ID NO: 297850 - DNA, 96 bp, Homo sapiens
tcctatgtatgatgcttctcaagccctaaaaacaaaccctgaaaaaacagaagacgctctgcaaaaggttatcaactggcaaacatctcttcacat

SEQ ID NO: 297851 - DNA, 73 bp, Homo sapiens
gggagcaaggtgcaagagtccacaaagggacctgatgaagcgaagatcaagcaacacggaggtagtcacgttt

SEQ ID NO: 297852 - DNA, 75 bp, Homo sapiens
ccagggtccctgaagagggaagacacgcggaaacaggttggtgttcgaggaagagacattgttgttcttggtgtg

SEQ ID NO: 297853 - DNA, 82 bp, Homo sapiens
tatttgggaacccattttggaggaatctttgtctgaagtggaagaaaaatacaagaaagccatggtttccaatgcacagtta

SEQ ID NO: 297854 - DNA, 100 bp, Homo sapiens
cggtcgcggtcgaggcgctggagcagctgtttgttgtggctattgacctgttgtattggcgggacatcaagcagacgggcatcgtgtttgggagtttcct

SEQ ID NO: 297855 - DNA, 96 bp, Homo sapiens
aacgacggcctcagcaggcggggaagatgaaaggctgtgctgatcctgtatttcctgtatttcctgcactggaatgaagatacctccacatctata

SEQ ID NO: 297856 - DNA, 132 bp, Homo sapiens
gctgcacggacaaatgcatacaaatgcatttaagagcccacagaacaaggcgtggaaaagtctcccccacggcaaaaacaaagggctattgcaagacacgaagtccgagaaattgagcagcgacatacaatg

SEQ ID NO: 297857 - DNA, 75 bp, Homo sapiens
cacaaacccactggacaccttcgtcccctttgatccctgtgtgctgaagagataacacagcaggcgtgtacgccc

SEQ ID NO: 297858 - DNA, 100 bp, Homo sapiens
gaacagctgcttcagtctgcaagtatggagctcaagttcttaattattcagaatgctgcggttttccaagattgtggtggtgccatgcagcaagaatcag

SEQ ID NO: 297859 - DNA, 87 bp, Homo sapiens
ctaataaagtgaaattatggggcctcaacacagaatatgcaatcaggcctcatggaggaaagctaatctcacctgcaaaattgcaat

SEQ ID NO: 297860 - DNA, 50 bp, Homo sapiens
cgtcaacttcctcaagtcgcccaaaggcacgttgcccctggcctcgcagg

SEQ ID NO: 297861 - DNA, 102 bp, Homo sapiens
ccgatcctgcagctgctgctgcggctctcactgtgcgggctgctgctccagagggcggaggctacgactggcaaagatgagggaggctgaagcggcccaggg

SEQ ID NO: 297862 - DNA, 98 bp, Homo sapiens
aagaaagaggacgctttactctaccagagcaagggactctgacaccaccataccaatggacgaatcactgcagtttaactcctccctccagaaagttc

SEQ ID NO: 297863 - DNA, 75 bp, Homo sapiens
atcatcgatctctcagggtcgtcgggtgaaggtgtcagctgtgatgcatgtttaaaaggaaattttcgaggtcgc

SEQ ID NO: 297864 - DNA, 75 bp, Homo sapiens
attatgaaagatttggtttgccaggttgggctgtagcatctaggtcgttgaggacttccacatggagattggcac

SEQ ID NO: 297865 - DNA, 82 bp, Homo sapiens
aacattttgctctgagaactttcttccctgaggcatgttatttgaaagcaattgagacgcaaccgaactttgcagtagcttg

SEQ ID NO: 297866 - DNA, 98 bp, Homo sapiens
tctggtccttgccaatcccagaaggtttttagttcaacaagtgtcacggcatacaagcaggaccctgatgctcccataagacagaaaatgccccttga

SEQ ID NO: 297867 - DNA, 49 bp, Homo sapiens
ctattttaaagagccaagcctcagagacattcctctgaatattgatttg

SEQ ID NO: 297868 - DNA, 101 bp, Homo sapiens
gtggaagccaatggaacacagccagcgcaggaggcaagattttgaaatctatggttcatatccagctttcagagtggcaccgtgcaatttttcttccacag

SEQ ID NO: 297869 - DNA, 82 bp, Homo sapiens
ccgcgccgcatggaggccggctgaggagcgccgctgcctcgcctcgggcagttgggtgagaagcagcttccatcttcaacct

SEQ ID NO: 297870 - DNA, 75 bp, Homo sapiens
gatcataatttggggttcaagattccagattactgattttgggcactccaagattttgggagagacctctctcat

SEQ ID NO: 297871 - DNA, 98 bp, Homo sapiens
gcattgcctgcaagctctgcgaggccatctgccccgcccagcctcactctctatgtggaagtagcctgcaatgggctcctgggggccgggaagggaag

SEQ ID NO: 297872 - DNA, 80 bp, Homo sapiens
cttctctgaggcggcgagagatggtcaggtctggagctcgaccgggccagattggtttatcttggaagctaaagggcatt

SEQ ID NO: 297873 - DNA, 75 bp, Homo sapiens
cgggagtgttcgttgtgccagcgactaaaaagaggtaatgcaggtggtgaaggagcaggttatgagagcacttac

SEQ ID NO: 297874 - DNA, 103 bp, Homo sapiens
gtttggcaaaagtgaagatgagcattatcccctttgctcaactacagaacacctacactctgaaagcctttactgttggatctaaatgtgttgtgtggtcaag

SEQ ID NO: 297875 - DNA, 83 bp, Homo sapiens
cttggccaccctggtccagcgaggtcagcccaaggccaaccccactgtcactctgttcccgccctcctctgaggagctccaag

SEQ ID NO: 297876 - DNA, 97 bp, Homo sapiens
tctgcgccgatctatgcacgcagatgctggagaagtccccttatgaccagcagttgcaccaccagcaccaccttccagtagtcagctctgccgttac

SEQ ID NO: 297877 - DNA, 98 bp, Homo sapiens
catcctggctaaaggagcagaggaaatggagacggtcatccctgtagatgtcatgaggcgagctgggctggttatattctgggcactaaatgaaggcg

SEQ ID NO: 297878 - DNA, 51 bp, Homo sapiens
tgcaagtgccagtaaatgatttaaatgcagagaccgtccaggctggacttg

SEQ ID NO: 297879 - DNA, 109 bp, Homo sapiens
gcgcacccagcctgggcggcctgactggagcaagagcccctcttcttgggcctgcgattcctcacctggaagggagaagagtggacttcctgcctagagaacaccttgg

SEQ ID NO: 297880 - DNA, 100 bp, Homo sapiens
gggacggctgcgcgggacggctctgtaggaaggaacttggttccccctccctcagcttccgccccaaaagcattttctgcattagcaaatatcgacctgg

SEQ ID NO: 297881 - DNA, 88 bp, Homo sapiens
tacagagactgaagaggactcaggagcaaatcagtaatgttcactaccttatggttctgtctgccaactgggcctatgtgaaagacgc

SEQ ID NO: 297882 - DNA, 90 bp, Homo sapiens
ggaacatctgttgagaagaaaaacgctttttgcatacaagcaggaaaatgagatgttatccagattttggaaccagtactagcagtggag

SEQ ID NO: 297883 - DNA, 50 bp, Homo sapiens
tcatagtcaactgcgtggaagagaagaaagctgatgtcctgaccactgga

SEQ ID NO: 297884 - DNA, 97 bp, Homo sapiens
tggtggtggatgcggccaactccaatgggcctttccagcccgtggtccttctccatattcgagcaacatggccaatctttcctaagctgctcagctt

SEQ ID NO: 297885 - DNA, 100 bp, Homo sapiens
gcgccgaggtggcgcacttcatgaacgccctgcgctacgatgccatggtggagctgacaggcagcagtgtctttgactatgtccaccccggagatcacgt

SEQ ID NO: 297886 - DNA, 100 bp, Homo sapiens
agaaccgctccccgccggctgtccgcaacctccgccagcgtcggtccctgggcaggactggactcgggccatatccgtggtgccgtcaacatgcctttca

SEQ ID NO: 297887 - DNA, 100 bp, Homo sapiens
tccccacctgaatcctcaggatactctgaagaactatgtaccttcttatgacccatccagtccacaaaccagccagggagaagcctccagtggagtagga

SEQ ID NO: 297888 - DNA, 82 bp, Homo sapiens
agcctagagacatgtcaaaaattagaacctcttcgccaaagccttaatttatctgaaaggcctgaaagtaagcaggagccag

SEQ ID NO: 297889 - DNA, 100 bp, Homo sapiens
gctggagctggagctgtcggaagctgtgccccataaaatcggacgcatcattgatgggagtcctgcagatcgctgtgcaaaactaaaagtgggagaccgg

SEQ ID NO: 297890 - DNA, 83 bp, Homo sapiens
gtctgagcatttcctcctgacggctgtacttgagcagtcacctggcacagggcagctgcaatgactctccgcacggtattatt

SEQ ID NO: 297891 - DNA, 75 bp, Homo sapiens
gcatagagaatgagatagccgtcctgagaaactacttcttggaagagcagtggagagaaaaatattgtttctttt

SEQ ID NO: 297892 - DNA, 75 bp, Homo sapiens
gcctttttggcctggcttgtttgcaaagatgatccagtattcctggaagaagcagggaaagcagaaaaaattgtg

SEQ ID NO: 297893 - DNA, 80 bp, Homo sapiens
atggggccctggatgagggggaagggcctcaaagccagaagacacagggaatatggaggttctgcacctgtatggaagtg

SEQ ID NO: 297894 - DNA, 75 bp, Homo sapiens
cacaaattgatgcacaaaataagctggaaaaatctgaggtgtttggaaaaaatgacgtatggttctgggtcatct

SEQ ID NO: 297895 - DNA, 74 bp, Homo sapiens
aggcactaggtcggcgctgccgggagatcgagcaggtggtgaacatcccgtccttcattgtccgcctggattcc

SEQ ID NO: 297896 - DNA, 100 bp, Homo sapiens
gacaaaggtggcagctttggagcaagtggagagccagaaaaggatccagaactggagtggaagccctccaagccacaaaactgtggtgaatggaaaagaa

SEQ ID NO: 297897 - DNA, 101 bp, Homo sapiens
gaagaagatgtgtctggtgaacctgaagcttcaccgagtgcagatacaactatactgtttgtaaaaggagaaggtccctgcactcctagaaaatcaagtgg

SEQ ID NO: 297898 - DNA, 100 bp, Homo sapiens
cagctgagttacaagcccaggaaggattgtctaatgatggagaaacaatggtaaatgtgccacatattcatgcaaggtttgcccaaaggaccagccaaaa

SEQ ID NO: 297899 - DNA, 82 bp, Homo sapiens
tacaacaaaaagaaccctcaattgatgaaaggatctaagcctttcccacgttatggttataaaccctccccaccgaatggat

SEQ ID NO: 297900 - DNA, 100 bp, Homo sapiens
cctggctcaactgtatcaccactggggttccgtggactcccacttccaagaggtggctcagaaattccaagatccggggatttctttcacggtttgataa

SEQ ID NO: 297901 - DNA, 125 bp, Homo sapiens
ctcggagcaggagaggacgggactgccaagagacatgttagaaggacaagagaggccccctttcatccctgaaggagtggtggctcgcaggaagaggatggaaactgaggagtccaggaagaaga

SEQ ID NO: 297902 - DNA, 50 bp, Homo sapiens
gtcaaccccttcctcccgtatatcagtggcctgattccaccaagagaagg

SEQ ID NO: 297903 - DNA, 83 bp, Homo sapiens
gctttggaaacgacgtcatgtgttaggaattgaaagatgttggccatcgtgatcagatggctgcagctagaggaatcctgcag

SEQ ID NO: 297904 - DNA, 97 bp, Homo sapiens
agtcgtgcaggatctgaaggagcacagaagagatccccttgaagattttagctcataataactttgttggacgtcttattggtaaagaaggaagaaa

SEQ ID NO: 297905 - DNA, 74 bp, Homo sapiens
gaacctgctccgccgctacaaccagagcgaggctggtcttcgatgccaagaacatgatggctgcctgtgacccc

SEQ ID NO: 297906 - DNA, 75 bp, Homo sapiens
cgctggacagcgccgacgtccgggtgcacgtgccacgcacggaagcggggagaggtggtgagagatgacccctgt

SEQ ID NO: 297907 - DNA, 96 bp, Homo sapiens
gccatgctgaagcggaggcggccgctgctcgagttgggcagatgtacagagtcagctcaggcacatagaagcagcatttgaccaggaggctgcggc

SEQ ID NO: 297908 - DNA, 100 bp, Homo sapiens
ggtgagggagatcgcgcaggatttcaaaaccgacctgaggtttcagagcgcagccatcggtgcgctgcaggaggcactggctacaattaggcttctcgac

SEQ ID NO: 297909 - DNA, 100 bp, Homo sapiens
gccagccccacacagtgcacccccattgaatttgacagcaaaggtggtctgagctcggcctatgggggcctcacaagccccggcctcagctacagcctgg

SEQ ID NO: 297910 - DNA, 101 bp, Homo sapiens
tggatttttggctgtatgttcagaagctaaagtaagtacaaggtggactgtgcatgcctcaaagaaaacccagagtgccctgttctaaaacgtagttctga

SEQ ID NO: 297911 - DNA, 100 bp, Homo sapiens
tgtattcccttaaaaagacggacagcccatcgtgtgaactatagagtttgtggacagatttatattgggaactcaatggcaacaacatcactcggatcca

SEQ ID NO: 297912 - DNA, 90 bp, Homo sapiens
cctgaatcagcagcagaagctgtaaaattggcattccaacagaaaccaccacctccccctaagaagagttgttgcctgcaatctctatcc

SEQ ID NO: 297913 - DNA, 83 bp, Homo sapiens
cgctccctctgctcttcctcccttcgctcgcaccatgtgccctctggtggtcagaagatgctgtgctgtctcgttaggatgaa

SEQ ID NO: 297914 - DNA, 100 bp, Homo sapiens
ttttgtggtagaccgtctaagagaaggaccgcagctgaatgcacagctagaaggttggctttcacaagtacagtctacaaaaagacctgctagagccatt

SEQ ID NO: 297915 - DNA, 100 bp, Homo sapiens
gcttcagagtgtgaagtcaaatgcatgccaacattccagttttttaagaagggacaaaagttgtggaagaaggactctgggaaaatggcctttcctatga

SEQ ID NO: 297916 - DNA, 83 bp, Homo sapiens
ccgtgtcatcttcctggagaactaccgagtctcactggccgagaaagatcgcaccccctccctccctggcggagcccctgaag

SEQ ID NO: 297917 - DNA, 125 bp, Homo sapiens
accagatcatgtcagagagagagcttggttaacttgggagaaagtttcatctgtggatggagtattggttaatttggagtggcccctggagtcagtttcctacaccatccgaggccccacccagc

SEQ ID NO: 297918 - DNA, 82 bp, Homo sapiens
ccgtctctggaggagtactggcaacaggatgaccgagtgggagacagcagcaccagcggtggcagagaccccagacatcaag

SEQ ID NO: 297919 - DNA, 82 bp, Homo sapiens
ccagccaagcccagccaagccccgccgatcgcgggcaccggagccagccccgcagcggatcgccggggagtggcctgtacag

SEQ ID NO: 297920 - DNA, 100 bp, Homo sapiens
gcggttggaggcttcgcccggctttgcagcggggacttcggcggcggcgcctcaggcacctcggcccggagacagcctggagctgttgcccaaagaattg

SEQ ID NO: 297921 - DNA, 75 bp, Homo sapiens
gacgaggagtcggaggagccgcgggcggcgcggcccagctcgttccagaccatggtgaatccgggcagcagctcg

SEQ ID NO: 297922 - DNA, 129 bp, Homo sapiens
cgccagaaggaagatggcggatctggaggagcagttgtctgatgaagagaaggttttcccaaatagtgcaccccttgaaggagggacaaggctgaccatatgtggctgggactttggatttcggaggaa

SEQ ID NO: 297923 - DNA, 75 bp, Homo sapiens
ggaacaggcttcggcgaacacaaagatgtcatttgtcagagtgaaccgctgtggtccccgagttggtgtaagaaa

SEQ ID NO: 297924 - DNA, 83 bp, Homo sapiens
tcttctccactgttcctggaggaatccgagaagagcagagcggagggagccccagacacggagccctctggcacaaatggaag

SEQ ID NO: 297925 - DNA, 51 bp, Homo sapiens
cttcgtcgcgctgcaacccccggctcggacatgccaatatttggtttctgt

SEQ ID NO: 297926 - DNA, 100 bp, Homo sapiens
ctcccctgctatccccaacaagaggaaagacacacctaccaagaagccagtcaagcggccagatatcaaagctcagctctttgaaacatccagcaagaca

SEQ ID NO: 297927 - DNA, 100 bp, Homo sapiens
actcagacgtagcaggtctccaagaagaagaagcagatctcctcggagaaggtgacagagctgaatgaacctctctccaatgaagatcgaaatctcctct

SEQ ID NO: 297928 - DNA, 82 bp, Homo sapiens
cagaaattgagcaagcagcaagtcggctttcagatcagactttatattcagagcaccaatcaaattaagcaagcctggggaa

SEQ ID NO: 297929 - DNA, 78 bp, Homo sapiens
ggaccagggggagagtttggagtgaagtttaatgttgccaatggaggctggaaagaaaccttcaaatccagccttctg

SEQ ID NO: 297930 - DNA, 96 bp, Homo sapiens
tcaattcaccccgcaacctggccatggaggcaacctacatcaaccacaatttctcccagcagtgcttgagaatgagcctgctcagcctgccggtct

SEQ ID NO: 297931 - DNA, 80 bp, Homo sapiens
ccgggagttcaagaagaacactccagagttccaggaccgtctgcagccctaacaacaatgcagctcttctccaagcaaaa

SEQ ID NO: 297932 - DNA, 88 bp, Homo sapiens
gaatcgcaaggctcttccctgaccattttctactgtccctgcgcgaggaggaaaaggcttctcttttacatcgtactcaggaagaaag

SEQ ID NO: 297933 - DNA, 75 bp, Homo sapiens
cacttcctgaaatgctgcaacaccaccaaatgcaacgagggcccaagagcgcaggccctggagtgctacagctgc

SEQ ID NO: 297934 - DNA, 75 bp, Homo sapiens
tggaacttcatcatcatctacttcacaggaattgccatttaaactcagccacctgtgacaaatttgagtgtctct

SEQ ID NO: 297935 - DNA, 100 bp, Homo sapiens
ggtagatggagacttcctcagtgacaccccagaggccctcatcaacgcgggagacttccacggcctgcagacctctgtgagtgaaagccttcagagggaa

SEQ ID NO: 297936 - DNA, 101 bp, Homo sapiens
ctttttctccaaacaccatttcaagggtaatacctgcctggagaatggatctttcttactgaactttacaggctgtgcagtgtgcagtaagcgggatttta

SEQ ID NO: 297937 - DNA, 97 bp, Homo sapiens
gacttccttcagggtttaggagaagcactgttgttttccacacagtactcccctagcatgacaatgagcgtgtgatccattaccaagtctcctcatg

SEQ ID NO: 297938 - DNA, 101 bp, Homo sapiens
gaaggattttgcctggctggaatcattctcaccttgtatgctttacgttgaaaggattgttgacaaaaggaaaaataaaaaagggaagacagagtatttgg

SEQ ID NO: 297939 - DNA, 50 bp, Homo sapiens
gaagaacacacagcggtggaaaaggtttttctaaagagtgaccgagtggc

SEQ ID NO: 297940 - DNA, 96 bp, Homo sapiens
tttcaggctgccgctgcattaggggcttcctgaggaagcgcgggcggacgacagaggatgccgaaccactccaaaccatccgggtatggctgaaaa

SEQ ID NO: 297941 - DNA, 83 bp, Homo sapiens
ttaaaccttctagacctccaagaccttcacgaccaccaccacccaccccacgtagaccaggtgatgagaccactgtgtggcag

SEQ ID NO: 297942 - DNA, 97 bp, Homo sapiens
gccaaggaaaaactggagagcttcatcaaaaatagtgatagctttgataagtggacccaagagccatatcagtgctagcaaaatggcagaattcata

SEQ ID NO: 297943 - DNA, 90 bp, Homo sapiens
ttacttggtgcattactgcggatggaatgtgagcacttttctgtagaaggtcagttggaattcagggcattgctatttattcctcgtcgg

SEQ ID NO: 297944 - DNA, 100 bp, Homo sapiens
tcttgaatgactggaaactgattggaaactctttgggaaagccactcgaaaagaatctacctgttactcgtattttggacaatcttatggagatgaagtc

SEQ ID NO: 297945 - DNA, 51 bp, Homo sapiens
agttgttcctcttacagcatgtatgtcttactgaaagaaagaaacatgctt

SEQ ID NO: 297946 - DNA, 83 bp, Homo sapiens
tgaactatgataagctgagcagagccctgcgatactattatgacaagggtgataaaagaaaatgtggctgaagttacccgaag

SEQ ID NO: 297947 - DNA, 50 bp, Homo sapiens
caaggcccaaactgcactgcacatgctgtgggtgagcgtggaggatgctc

SEQ ID NO: 297948 - DNA, 76 bp, Homo sapiens
tttcattgaagtgttcttcgttccctcagcaatatgattcttttgtctggccctctgagccccaatgagagtttcc

SEQ ID NO: 297949 - DNA, 76 bp, Homo sapiens
tggaactgtctatctggtttcagacaagaaagccaaacgaggagaggaatttgtttcctgaggttataggcgggtg

SEQ ID NO: 297950 - DNA, 135 bp, Homo sapiens
aaaaatgcaaaagactgctaaagtgagagtgaccaggcttgttctggatccctatttattaaagattatggattggatatgtctacttctggatgcaaattttactgttgttgtaatgatgccagaagcaaagag

SEQ ID NO: 297951 - DNA, 100 bp, Homo sapiens
ttatcaacgagtacgtgaacctccacaatgagctgcggggcgacgtcattccccgagggtctaacttgcgcttcatggagttgatccccctcatattgtg

SEQ ID NO: 297952 - DNA, 75 bp, Homo sapiens
ctggagttcacgactctgagtgctggggcgtggttgctctccagaccctacgaaaattagttgaacttactcaga

SEQ ID NO: 297953 - DNA, 82 bp, Homo sapiens
gccgctctgccacggtctgcccacccaacgcgaagacggtaacccgtgtgactttgactggacaaatttacatgtattggag

SEQ ID NO: 297954 - DNA, 100 bp, Homo sapiens
tccggactcagccaagttccccaacggctccccgtcgtcctggtgctgcagcggtctcctctgagcctccggcctccataagacccaaaacagatgacac

SEQ ID NO: 297955 - DNA, 99 bp, Homo sapiens
gaccacttaatagtgagtcttccaaccagagcttgtgtagcgtcagatccttgagtgataaaggagtagagactgtgaatgaaagctggaatgccttag

SEQ ID NO: 297956 - DNA, 90 bp, Homo sapiens
tgggagatgggcctactcgcccgccaccctgcgctgccgccgctctgaggagttaaagctgctgtgttgaaatatgaaaacaatgtcatg

SEQ ID NO: 297957 - DNA, 83 bp, Homo sapiens
cgagcctgcagccccggcgtccggagttctgggtgagaagccctaccactgcaactgggacggctgcggctggaagtttgcgc

SEQ ID NO: 297958 - DNA, 100 bp, Homo sapiens
tatgtgaacgttgtcagcctaggtcctaaaggggatccaggtcagactataacccagccggggaagcctggcttgcctggtaacccaggcagagatggtg

SEQ ID NO: 297959 - DNA, 100 bp, Homo sapiens
gagcatggtcaacagtttgcccaccttccctacagatatcaagaatacttcagtcaccaacgtgccaaatatgatattaacctggctgcagagccaaaag

SEQ ID NO: 297960 - DNA, 100 bp, Homo sapiens
cgcttcgcgggccctgtcggtcccggttcatgaaccatcgagctccagccaatggccgctacaagccaacttgctatgaacatgctgctaactgttacac

SEQ ID NO: 297961 - DNA, 100 bp, Homo sapiens
cttggtttcaggcccgcactcgacagccaccgccgcccccaacgtccatgcctgagtatcaatataagtgatgaggattttcttttgctggagcttttgc

SEQ ID NO: 297962 - DNA, 75 bp, Homo sapiens
ttgatacagcagagacgtcatacttggaaatggctgcaggttcagagttgtaaagctctctgaaatagtgacctt

SEQ ID NO: 297963 - DNA, 90 bp, Homo sapiens
ggacgaggaagagctgagtgggacaaagatgtccaacatcacagtcacatacagagatggccgagtggcacagctggagcaggtatacat

SEQ ID NO: 297964 - DNA, 101 bp, Homo sapiens
tgaccgagaccgcggccgggaccgaggtgagctttctcttaagtgtgccaagctgccatccaactttcttgagcattttttctcatgggaaatgatcaagt

SEQ ID NO: 297965 - DNA, 100 bp, Homo sapiens
gtcagccttcccagtagctggaactacagccagacgaggacagccggctgctgcccctgctggtctgcctgcggttcctgttcgtgcccctcttcatgct

SEQ ID NO: 297966 - DNA, 83 bp, Homo sapiens
gtggattcactgtctccagcgcctcttctttgagaaccaccctgcctccatccctgccaagatttctaccactccaaacgccg

SEQ ID NO: 297967 - DNA, 87 bp, Homo sapiens
acaaggagaagatcgctgatgtggtgttgctgcagaagctgcagggtgtgggccgaagatatgctcatgtggtgttgaggaaagcag

SEQ ID NO: 297968 - DNA, 50 bp, Homo sapiens
acggaggctgttatctatggcaggagccgtgccgctcttggccaccgaaa

SEQ ID NO: 297969 - DNA, 90 bp, Homo sapiens
atctgcccaaactggaacttatgctgtagacatttctttgtggtttatctaaaaaccaaagtactatactggcaattgctggagaagatt

SEQ ID NO: 297970 - DNA, 96 bp, Homo sapiens
ctgtcagacacctgtccttccttctacagaccatgctggacttcttgtcggatcaggaaaaattggaagctccaccacccaccccaggacagctga

SEQ ID NO: 297971 - DNA, 98 bp, Homo sapiens
gggtgttggacaagttggtatggcgtgtgctatcagcattctgggaaagaatttcagcaagtaaacattactccatcaaaatttattttgaagccaag

SEQ ID NO: 297972 - DNA, 97 bp, Homo sapiens
cccagatgaaatcggcaactttataattgaggagtgtgaggaagaggctgtctgtgtcattatgtgtgcgtcggtcaagtataatatccggggtcct

SEQ ID NO: 297973 - DNA, 83 bp, Homo sapiens
ggacaagctggaatgcatccaagagaatccctcaacatgctggagtggagtcaacatatcaatggagcaagtcacagtcgtcg

SEQ ID NO: 297974 - DNA, 83 bp, Homo sapiens
ttcacctctttctggaaaccagacaggggcaagtgtccgagtggtgaatcagctacttacagagatggatggtctggaagcac

SEQ ID NO: 297975 - DNA, 83 bp, Homo sapiens
gtgatgcctgcagagctgtggcttaccagtctctagtgatccctgaaaagttccagcatattttgcgagtactcaacaccaac

SEQ ID NO: 297976 - DNA, 100 bp, Homo sapiens
tactggaggttttggctctgcgtgagtgtggtctacgagctgtttctcatctttatactcttccaggctggacgactgtggcctcacggaagcacggtgc

SEQ ID NO: 297977 - DNA, 90 bp, Homo sapiens
gctatcaggggaagatatgcatcagttccatcgagccattactacaggaccaggagctgcattatctattctagacaaatttcttgaaga

SEQ ID NO: 297978 - DNA, 100 bp, Homo sapiens
tttggtttgtctaccagtttttgtctccagagacccagataaaagaatcagagtgtctcaacccttgacaagaggaccaagtgcctttattccagagaag

SEQ ID NO: 297979 - DNA, 100 bp, Homo sapiens
caagattgaaagcaaattattagctaagaaagcagaggttaatacaatccctggctttgatggagtagtcaaggtcgatgaaacaggtgtagaagttaag

SEQ ID NO: 297980 - DNA, 74 bp, Homo sapiens
acaacacctacagccgggagctgtttgaggagattacgtctattttgagaactcttccagcaatccttacctgg

SEQ ID NO: 297981 - DNA, 100 bp, Homo sapiens
gaaagataaggaagcttgcgtccacaagatattacgtcaacagcagcaccacattaaataccagcatttgctgaagaagaaatatgtatgtccccatccc

SEQ ID NO: 297982 - DNA, 100 bp, Homo sapiens
ggaggagctgctcagctcccaggtcacccaggaactgaggctgtggtccaaggccatttttgctggctataagcggggtctccggaaccaaagggagcac

SEQ ID NO: 297983 - DNA, 90 bp, Homo sapiens
cgtgaacatccttttaccacagcctcagccacaagccccccaagatgaacccagtggtggagccactgtcctggatgctgggcacctggc

SEQ ID NO: 297984 - DNA, 50 bp, Homo sapiens
caacatagagctgacattaactgtcagtgtaaacaggaacatcgataagt

SEQ ID NO: 297985 - DNA, 100 bp, Homo sapiens
gcagcctcaacgagaactcggagggcaccggaggcaccatgcggcccgtgcggcgcaacttctacgacccgtcgtcggcgccgggcaagggcatcgtgtg

SEQ ID NO: 297986 - DNA, 76 bp, Homo sapiens
gttttcaggaccaaaattgtggaaaagtcactctggggatatcattttcaatgcccaatacccagaactgcctccc

SEQ ID NO: 297987 - DNA, 75 bp, Homo sapiens
cattgatgaaatttatggcattcagaacatgggtaattccagaattgattggccataccattgtcactgtattac

SEQ ID NO: 297988 - DNA, 96 bp, Homo sapiens
tccggcacgccatgaacctggaggccgtgaacacctacgaaggtgattgaaatctctgaatatcgaacccagctctatgaatatctacaaaatcga

SEQ ID NO: 297989 - DNA, 100 bp, Homo sapiens
ggtgctggtggcggcggcgctttcggcgcgggcccgggccccgagcgcccgaacaggaggaagaagacctggcggcaggtgtgggccgcagccgagttcc

SEQ ID NO: 297990 - DNA, 100 bp, Homo sapiens
ggcaaatcaagcctagtgcttcgttttgtgaaaggccaatttcatgaatttcaagagagtaccattggggggatgtcagagacgcccatgctcccatcct

SEQ ID NO: 297991 - DNA, 51 bp, Homo sapiens
gggatgcactcaaagccgaccgggcaggcatcagtgtttttctgaccgaag

SEQ ID NO: 297992 - DNA, 98 bp, Homo sapiens
caaaacccaacagaccaccaaatgttgacctgacgaaattccacaaaacctcttctggaaacaaatgttggctcaattaagaaacatcagggagataa

SEQ ID NO: 297993 - DNA, 99 bp, Homo sapiens
ctcacgagggaagtgtaccgctcctaccgccagctgcggacccagggctttggagtgatgctcctgcgggctgtcccaggtggggctggagatgcctca

SEQ ID NO: 297994 - DNA, 75 bp, Homo sapiens
gcgtgcaggcacagatggctaaggagatatctgaagagattataggatcacccatcccagaacctaggcaacgct

SEQ ID NO: 297995 - DNA, 100 bp, Homo sapiens
ctcctgctgaggaagatgaagacggtgacatctgttcccgagctgttcctgactgcagtgaagctcacccatgatgacacaggagccaggtatttacacc

SEQ ID NO: 297996 - DNA, 82 bp, Homo sapiens
ccgcggcggttaagtatgcggcgccaggagcttgttccttgcctgtatctccccttggttcaatagctaccagatttttgga

SEQ ID NO: 297997 - DNA, 74 bp, Homo sapiens
cactgacctgcctgagaggttccaggctcaggaagaggccaaagaagcagaaatgagcagaaaggagttggggc

SEQ ID NO: 297998 - DNA, 83 bp, Homo sapiens
ggggggagcgcggggcgacgctggctgcagggacccggtgacagcgtgagagagatgccctgtatccaagcccaatatgggac

SEQ ID NO: 297999 - DNA, 75 bp, Homo sapiens
cgggagtcgctgggtgcgtggggctgcctcgccgcgtctcgccacgactggaatcagccattttaccaagaaagt

SEQ ID NO: 298000 - DNA, 100 bp, Homo sapiens
ctgcctacaacttaatacataccattctgtttggattcttggcattgagtacaatgaggaaggtgtcttgctgcaggtaactaatgaagaagtggtcaac

SEQ ID NO: 298001 - DNA, 85 bp, Homo sapiens
gcagtaaaattcttaaaaagatgcagaaagatggatttttgcatgagatgcttctggacaggcgcattctacattctaaagggga

SEQ ID NO: 298002 - DNA, 119 bp, Homo sapiens
tgagtttgcggagaggtcagtaactaaattggagaaaagcattgatgacttagaaggcctactgaacttgacgcactggtatttggccatctatacaccattcttaccacacaattgac

SEQ ID NO: 298003 - DNA, 74 bp, Homo sapiens
gcaggggcggcggcggcgacggccggaggtgtacggcctggcgcaagcgctggtttgtcctccggcgaggccgc

SEQ ID NO: 298004 - DNA, 83 bp, Homo sapiens
ctcagaatcgaatctcttctccctccccttcttggttgttgatcattatgaaaatcctagaaacgtggggtcccttgacaaga

SEQ ID NO: 298005 - DNA, 100 bp, Homo sapiens
gccgacttcgatgatcgtgtgtcggatgaggagaagatgtctttggtggacttgggaaagaggttgctagaagcagcaagaaaaggccaagatgatgaag

SEQ ID NO: 298006 - DNA, 82 bp, Homo sapiens
gcagccctgaagttgcctcttctggtgtcaaagcttttggacattcctgggacaatgcagatcttcgtgaagactctgactg

SEQ ID NO: 298007 - DNA, 85 bp, Homo sapiens
tctcgtcggattgcccatgcacttgttgcagaaacagccaaggagagtgggcgctccctttctcttcctggaagatcagtcccac

SEQ ID NO: 298008 - DNA, 74 bp, Homo sapiens
tatcgcagtagttaaaaaactagatccaggttggaatcctcaggaaattgcccggcatttacgccctggaactc

SEQ ID NO: 298009 - DNA, 90 bp, Homo sapiens
tagccgccgtgggagggagccatgaagcattacgaggtgagaagccctaccactgcaactgggacggctgcggctggaagtttgcgcgct

SEQ ID NO: 298010 - DNA, 87 bp, Homo sapiens
acatcaaaacctggaccttctggattacaggccaaattagcaaagcccatggatttcagaaaattatctacattcagagaaagtttt

SEQ ID NO: 298011 - DNA, 97 bp, Homo sapiens
gctttaactgccgcctcacctgtggagctctgggtacaggtgtcatggagaaactccagctgggcccagagattctgcagcgggaaaatccaaggct

SEQ ID NO: 298012 - DNA, 82 bp, Homo sapiens
gatgcctggcagccccgctctctgcaatttcttcgccaagcgcaagagatcagcgcctgagaagtcgtcgggcgatgtcccc

SEQ ID NO: 298013 - DNA, 74 bp, Homo sapiens
ggacgctggcaaagcggggcagaccctgaagactcactgctcagcccaggccgctacctgtctgaggaacccga

SEQ ID NO: 298014 - DNA, 82 bp, Homo sapiens
gccgatccagcctgcggagcctgtggggcaggaaggatcagaatgttctctctccagtcaactgctggaatctcctcttaaa

SEQ ID NO: 298015 - DNA, 98 bp, Homo sapiens
aggaatttcagcagctctatgtgaagatttaaggaccatagtacagctatggatactgaaccaaacccgggaacatcttctgtgtcaacaacaaccag

SEQ ID NO: 298016 - DNA, 96 bp, Homo sapiens
ttgtttatgggagattatgttgacagaggatattattcagttgaaacagttacactgcttgtagctcttaagcagcaagatgaagagcgacgtcgg

SEQ ID NO: 298017 - DNA, 100 bp, Homo sapiens
ctgtatcgaattcatccctgtataatcctgcccttacacctgtgctcctatacaagattaacattcagacatgtgcaaagctgccactgagtcagtaccc

SEQ ID NO: 298018 - DNA, 74 bp, Homo sapiens
gagcctcacatgcaagctctagtgactggactccaaggccacggatagctgaatgcaatatccatacatctcct

SEQ ID NO: 298019 - DNA, 130 bp, Homo sapiens
cagccagagctgagcggcgcgggctccagactcgccgtggtcaagttcaccatgagagggtgaaagaaaagatgttgtcccggttaagagtagtttccaccacttgtactttggcatgtcgacatttgca

SEQ ID NO: 298020 - DNA, 96 bp, Homo sapiens
ggaagctgctttgaagacttagcagaggaatctttgtctgaagtggaagaaaaatacaagaaagccatggtttccaatgcacagttagacaatgag

SEQ ID NO: 298021 - DNA, 75 bp, Homo sapiens
ctgtaatcccagtactttgggaggccaaggtactatcgtggtgcagtgggggccctcctggtgtttgacctaacc

SEQ ID NO: 298022 - DNA, 80 bp, Homo sapiens
cctttatatggccaaggagaactcccccagtgtttctgcaggcacaaagcagacattcgtagagaaacatggatgaaaca

SEQ ID NO: 298023 - DNA, 75 bp, Homo sapiens
gcgcggctgcggctccgagtgctgggaccctatgtactcggaactgggcttatcttgtacgctttatccaaagaa

SEQ ID NO: 298024 - DNA, 100 bp, Homo sapiens
cgagcagatcctggtcctcgatccgcccacagacctcaaattcaaaggtgaaggcatcattttattacagcctggaaaacatgaatttccatttcgcttt

SEQ ID NO: 298025 - DNA, 98 bp, Homo sapiens
acagaactgccccatcgatgtgcggcgtccgctgtataagaatgaaatgaatgatgtgcctttctttgatatccaactgccttacgaattggcaatca

SEQ ID NO: 298026 - DNA, 99 bp, Homo sapiens
cgagaggagctgagcgagcgcggaaggtgacagagctgaatgaacctctctccaatgaagatcgaaatctcctctctgtggcctacaagaatgtggttg

SEQ ID NO: 298027 - DNA, 100 bp, Homo sapiens
ccgagttctcacgtgcccatcagtgacagcaagtccattcagaaggcaattgaaggaacagactaaaaatcgtgtcctggaaggaaactacaggtactac

SEQ ID NO: 298028 - DNA, 83 bp, Homo sapiens
ccgggtcccgccctggggccggcgatgtgccaccgaggctgaggatgatggtagattgccagctcaccatggatgatgatatc

SEQ ID NO: 298029 - DNA, 80 bp, Homo sapiens
ttctggatccctatttattaaagggggcttctggcttggtgtggaccaggagggggcagaaggcaccctgtcgtggctgg

SEQ ID NO: 298030 - DNA, 50 bp, Homo sapiens
gggattctctctgaaagtatgaagcagggactgctgagatgtcctctatt

SEQ ID NO: 298031 - DNA, 100 bp, Homo sapiens
aagaaactgaatactccttccttcctccccacccattcctttaaatccggagggggaaaaaatcccaaggtctgcaaagaaaaacacaccttgactttag

SEQ ID NO: 298032 - DNA, 100 bp, Homo sapiens
tctctgagacccggaggaggttcgaagctgagtatgtgacaggaggaatgcaggctcaggttggaatgccaggaagtggaccagtgtccatggaacgggg

SEQ ID NO: 298033 - DNA, 100 bp, Homo sapiens
tatccctcgggaggcgcctggccagagcctggtcgagccggaggaagccaccagatggaagtttactgttctgattttcatgctgaaagagcagcgagag

SEQ ID NO: 298034 - DNA, 100 bp, Homo sapiens
attcaaaccctagtgaataaagccaagagagaccttggagtaattcgtcgacagctgttcgggggtcttgtctggattttggttgcctcctccaatgttc

SEQ ID NO: 298035 - DNA, 129 bp, Homo sapiens
ctggagggagacaaagcagcgcccgtctgcttcgggcctctggaatttagcgctcgcccagctagccgcaggtgctggagaatctggtaaaagcaccattgtgaagcagatgaggatcctgcatgttaa

SEQ ID NO: 298036 - DNA, 100 bp, Homo sapiens
acagataacccagcacattgcaggaatagccaggccagaagaaggaaggcctgtggtgagtgggacaggaaatgacatcaccaccccaccgaacaaggag

SEQ ID NO: 298037 - DNA, 75 bp, Homo sapiens
gccactgctgctccgtggagatcgtcccgcgcctgccgtctgcgctcctcagaccaccggcaggtgaacagcctg

SEQ ID NO: 298038 - DNA, 75 bp, Homo sapiens
gtatgtggaccgagcccggtactcagccttttaaaaactggaggtgctggagaatctggtaaaagcaccattgtg

SEQ ID NO: 298039 - DNA, 99 bp, Homo sapiens
tggaacaggaccttaaggagaaggaagatactattaaacagaggacaagtgaggttcaggatgctgatatgctaactggtgatgagcaagtatggaagg

SEQ ID NO: 298040 - DNA, 50 bp, Homo sapiens
tcatccaaacctgtcaacatgttgaaacactcttgcactcctgtaatgag

SEQ ID NO: 298041 - DNA, 83 bp, Homo sapiens
gccttagctgtgctcgcgctactctctctttctggcctggaggctatccagcgtccagggagtcggtagtaagggatggcggg

SEQ ID NO: 298042 - DNA, 74 bp, Homo sapiens
ggaggatgggctttattcctctcccactagctgttttagaaactgttgtgactgaatatctaaatagtggaaat

SEQ ID NO: 298043 - DNA, 75 bp, Homo sapiens
caacggagaactcaaggtcttcatagaccagaaccttagtcccgggaaagatgtggacgagtgctcactagcaga

SEQ ID NO: 298044 - DNA, 83 bp, Homo sapiens
cacacctccggaccgagggacgcggctagtgagacctgcaacgacttccacccgatgttcttcacccacgacagatcctttga

SEQ ID NO: 298045 - DNA, 75 bp, Homo sapiens
ttccgctgacgtcattacggcgacacgtggatccaagatggcgacggcgatgaaactggcgatggaatatgagag

SEQ ID NO: 298046 - DNA, 75 bp, Homo sapiens
tcaacactgtagcagagatcactgggagcaaatatccagaacaggtgccaggggagagcaagaaacagtggaaac

SEQ ID NO: 298047 - DNA, 75 bp, Homo sapiens
tgcccgtggaccacaggccctcgttgcccagatgatgacttgaaagtagggcatccttcacccatctgaagggag

SEQ ID NO: 298048 - DNA, 96 bp, Homo sapiens
gcccctgcactatgcctgtttttggggccaagatcaagtggcagaggaggaatttggctacaatgcagagacacagaaactactatgcaagaatgg

SEQ ID NO: 298049 - DNA, 98 bp, Homo sapiens
gggcgtgagcggaaatgaggaggagatggtggaggaggctgaaggtggcccatcccctgcacccctgcaccccaaacgcagcccgacgagcacggggg

SEQ ID NO: 298050 - DNA, 100 bp, Homo sapiens
gacagctgcaaggaggccgtcaccttcaaggccgtcagacaaggaccaagaatcgccttcagccctgtctggtgcatccttggcagaaagtgaggaggaa

SEQ ID NO: 298051 - DNA, 87 bp, Homo sapiens
gctaccgttcggactatttgtagtcatgtacagaacatgatcaagggtgttacactgggcagctgcaatgactctccgcacggtatt

SEQ ID NO: 298052 - DNA, 98 bp, Homo sapiens
cagatatgcctgctaacatggataagcatgccctgaaaaagtatcgtcgagaagcctatcatcgaatgtactcaagactgatcttctaagttcactgg

SEQ ID NO: 298053 - DNA, 82 bp, Homo sapiens
ttcggcctagtgcgccagggcctcaagtgcgatggatatggaccctccacatcccttccccaaggagatcccacacaacgag

SEQ ID NO: 298054 - DNA, 51 bp, Homo sapiens
gcggcggcagcagcagtgagagactctgtagctacatccagagtccaggac

SEQ ID NO: 298055 - DNA, 80 bp, Homo sapiens
gaataaagctcgagccgaaggacatatggatattgtacctgtggatgcatcttatgaagtaaaagaactatatgtgccag

SEQ ID NO: 298056 - DNA, 96 bp, Homo sapiens
tgaagagattcagagtggacaagtcatcaatgggcagcatgttccggcaacagtccatcgaggacaaggaggacaagcccccaccaaggcagaagt

SEQ ID NO: 298057 - DNA, 100 bp, Homo sapiens
ggagagagacagcgatcgagagagaccggagaggtggagagacccatcctcatgccaacaaactacccttgaaggattctttcacttacgaggactacag

SEQ ID NO: 298058 - DNA, 89 bp, Homo sapiens
tacaattcggatgtttactgacctcaaccttgtgcagaacttccagatgaaacatgagtgtgtgctgtatttgtgggccttgaaaattc

SEQ ID NO: 298059 - DNA, 75 bp, Homo sapiens
cgagtccgcgacggtcgccgcccacggcgagactgcatcaacccgacattcctttcttataccaatgtgaaattt

SEQ ID NO: 298060 - DNA, 75 bp, Homo sapiens
agacaagccatcaaaactgccttcagaagcaaaaggatttctctgcctcttccaaacttttcctccctgaacctg

SEQ ID NO: 298061 - DNA, 101 bp, Homo sapiens
tgggaaacctgtagggtatggtccagctgtgccgcaccgaggcgagcaggagcagggaacagatgtatcctccactcctcgctggccaccatcctgctgcc

SEQ ID NO: 298062 - DNA, 89 bp, Homo sapiens
acgagatctactttggaaaaacaaaggatatcgtcaatgggctgaggctgcaggggacagcgctggaccgtacagacctgcctaacatg

SEQ ID NO: 298063 - DNA, 100 bp, Homo sapiens
gttgcctcaaaccagtcagagatggagttctcttcacttcaggacatggcagttaatagtatcatatctatcgtttttggtactcgaagaattgcctggg

SEQ ID NO: 298064 - DNA, 75 bp, Homo sapiens
tcaaaacttaaaattgaagacataaaagaagccaacaaagcattgcaggtgtatgtggaatttgatgatcttgaa

SEQ ID NO: 298065 - DNA, 78 bp, Homo sapiens
taatctcctcagaaatcactaaatactactctgaggggcttagaaattaacaggtatcgtcgtcctccccgcagtcag

SEQ ID NO: 298066 - DNA, 100 bp, Homo sapiens
tgcctccccacaccaccgaccaggacctggtgaagctctgtcaaccatttatcagcgatgctggttagtattcaagaaagcttcaagcaaaggtccaaaa

SEQ ID NO: 298067 - DNA, 83 bp, Homo sapiens
ccgtaatgagcgtcaaaattatccgaaaccgcctcactgggtgagccagccatgagagggtatcttgtggccatattcctgag

SEQ ID NO: 298068 - DNA, 100 bp, Homo sapiens
tcctaggtgcgcgggtggatataattcccggcttctcgagaagacactacagcctcaaggaggttcaagaagacgtggaagctgcgggctctgaaggaag

SEQ ID NO: 298069 - DNA, 76 bp, Homo sapiens
ctgaaagtgtgcatcgtgggctcggggaactgagggctgtgctgaagtttgctgctgccactggagccactccaat

SEQ ID NO: 298070 - DNA, 99 bp, Homo sapiens
accagttggtggcctgggcagcctgctggaccctgccaagaagtcgcccatcgcagcagctcggactttccaggacctgtccaaacaagtggaaatgtc

SEQ ID NO: 298071 - DNA, 74 bp, Homo sapiens
tttgtgtccattgatctcttggagcagctggggatcatggatagcagtgagattcacttcaaagtgaaaatgac

SEQ ID NO: 298072 - DNA, 75 bp, Homo sapiens
gccccgcagcgcatcccggcgtgtcggacagatccacattgtttgaagttattgtgagtgcctcgaggaccaagg

SEQ ID NO: 298073 - DNA, 100 bp, Homo sapiens
aagccccagccacccatcaaatcagagagaaggaatccaccttcttacgctatggcagctgcaccacctcgtgagcgatgacgtctgcctgaaggtggtg

SEQ ID NO: 298074 - DNA, 75 bp, Homo sapiens
ccgaagccccctgcaggaactctacaacccaatccagtagaaaacccctttggtgaaacatttggaaaaatacaa

SEQ ID NO: 298075 - DNA, 82 bp, Homo sapiens
gggaaccctggtcaccgtctcctcagttccagggtcacccccgagaggacaacaggcatctggaagtgctctctcgccactc

SEQ ID NO: 298076 - DNA, 101 bp, Homo sapiens
tgctgcctcttttggaaaattaataagatcaatttttatggggctacgaaccaggagattgggcactaggtatgctccagaatcactgacagagagcaagt

SEQ ID NO: 298077 - DNA, 83 bp, Homo sapiens
gtggagatatggcgcaactgcggcgcccctgggcgctgcctatggcacagccaagagcggtaccggcattgcggccatgtctg

SEQ ID NO: 298078 - DNA, 74 bp, Homo sapiens
acatgagatggtagccaacccctcagcaacttgagttggtggaaccaagtggctggattcatgttcccttaact

SEQ ID NO: 298079 - DNA, 82 bp, Homo sapiens
aacgaggcaaggagctaaagcagcgtgcgttcagccctgggagtaatcaagtcagaggattatatgacttttatctgcctag

SEQ ID NO: 298080 - DNA, 80 bp, Homo sapiens
tgaactacttcctcggtggctgcgccggaggcctgactctgggagcacgcaggcccggcctgccccgcacctgagctgcc

SEQ ID NO: 298081 - DNA, 100 bp, Homo sapiens
ccgccgccgctgccgccgtcctcccctgtctacccggagctgtctcgagctgagccccctaccgggccggatcccgagttggattggatgctgctggcaa

SEQ ID NO: 298082 - DNA, 75 bp, Homo sapiens
aaccggccagaggacgagtgtgatattgctatcaatcgcagtagtctttcccctgtgtgaggctgaagcctcaga

SEQ ID NO: 298083 - DNA, 83 bp, Homo sapiens
cccgccgccgccgccgcccctgcctgcgcctcccgcctcctgccgcagcccgaaagaagcttccggttctgaggtcctggagg

SEQ ID NO: 298084 - DNA, 97 bp, Homo sapiens
agggcagaagggcaagctctcggctggcagaattcctccctggattgacttctaaagactcttggtacgtgaggaagaaacccggaagaggaagagg

SEQ ID NO: 298085 - DNA, 75 bp, Homo sapiens
cggaatgcctgaaccaactgttttgagagccgagactgtctgaagctgggcccacctgctgagggagaagtcgtc

SEQ ID NO: 298086 - DNA, 90 bp, Homo sapiens
gaccaggacttaataaagcacaacttgttgagatgttcaggcggttgcttatgaggaaccaaaacactggtgctctattgtctactatga

SEQ ID NO: 298087 - DNA, 90 bp, Homo sapiens
ctgtgtatgtgacatcagtaaagaaaacaaggaagttattcaagagctgaataattgccagttccatgccattgcagtgtcaactaggcc

SEQ ID NO: 298088 - DNA, 100 bp, Homo sapiens
tggggctgtgccgggaggctgagccccactacatggtgctggaatatgtggatctgggagaccccggcaggcctggattcagctacccaggaccccgagg

SEQ ID NO: 298089 - DNA, 100 bp, Homo sapiens
gcgggcccaaggcgtgaggcgccgcccgggtgtccccgcggcgcaggaggcggtggagcgcagagcgggcgagcgcgcggacaaggcaaaatctcagcaa

SEQ ID NO: 298090 - DNA, 98 bp, Homo sapiens
ctgtctatgagggtcatgtttcctgtgtgaaattgcttctgtcaaagccccattgacaaaccttcagattctctcagtatagggaacggtgataattc

SEQ ID NO: 298091 - DNA, 76 bp, Homo sapiens
tgccattttcttatggagaactgtccttgttaatcctgaggttggcttgaagcctgtgtggtatagtcccaaagtt

SEQ ID NO: 298092 - DNA, 88 bp, Homo sapiens
gctgcctttttatatggtcttggtttggtctacttccattataatgcatttcagtggattaatacccctcgaagacaaggaggacttg

SEQ ID NO: 298093 - DNA, 50 bp, Homo sapiens
acttggaatggatttgaccaaggcaaagccaaagctaattgagccactcg

SEQ ID NO: 298094 - DNA, 83 bp, Homo sapiens
gaacattccgaaactgtcaagattggcaagaaatctcccaagcctaagaagaagaagcacaggaaggagaaggaggagcggac

SEQ ID NO: 298095 - DNA, 105 bp, Homo sapiens
ggccgagcgggcggcttcctggcctgggcgctccggtggcggcggagggtttccaggcctgaggtgcccgccctggccccaggagaatgaaccagccgcagagga

SEQ ID NO: 298096 - DNA, 100 bp, Homo sapiens
cactatcgtgatgctgacggaggtgcaggagagagagcagggctaagacagtgcctgtccctgaaaagtggaccactcctcaagagataaaacaaaagat

SEQ ID NO: 298097 - DNA, 101 bp, Homo sapiens
gccggggatcgacaagctgcccatcgaggagacgctggaggacagcccgcaggtaaaccggagcactgctcttctgaagagcttgtctgctgaacgtgaac

SEQ ID NO: 298098 - DNA, 97 bp, Homo sapiens
gataaatcagacagaacagttaatcctcaatttaagcctgatctaacccctagaaacaggtttcctcttctactaccacgtccacaaccggcctccg

SEQ ID NO: 298099 - DNA, 83 bp, Homo sapiens
tgattttgactatcttcttagtggccggctaccaagcagtttctcgaagagattaacaagtggacagttcagtacaatgtttc

SEQ ID NO: 298100 - DNA, 98 bp, Homo sapiens
ttcattacagtggttcaaccaggccttggaggacaagagcgacgcagtaaaacgcaggactcttcccgcttggattcgcgaaggtcttgaaaaaatgg

SEQ ID NO: 298101 - DNA, 75 bp, Homo sapiens
ccttagtgccccaggatcagggaggactgatccaggatgccagaaaccatgtgagccaagccatttacctgctta

SEQ ID NO: 298102 - DNA, 95 bp, Homo sapiens
gtccccaagacccttgtgctcgttgtcgccgcggtcctgctgttggttggtgacagcgtcccaagctggtgacagacccactctgtaactttcag

SEQ ID NO: 298103 - DNA, 101 bp, Homo sapiens
aggaccctacggagctcgccccccagcaggtgccaggtttttcgttggaatatacgttgcacatttatggcgattctgagtgtgagggcagacttctgcca

SEQ ID NO: 298104 - DNA, 90 bp, Homo sapiens
cgagctcaagctgctgctgctcggtccgcgggagagctgtggggcttggtgagtgtttcgtggcctctcgggttggtcagcacccccagc

SEQ ID NO: 298105 - DNA, 90 bp, Homo sapiens
ttgacaagctcatccggctggtaaatgcgcagtcttactactttgaccgcgatgatgtggctttgaagaactttgccaaatactttcttc

SEQ ID NO: 298106 - DNA, 82 bp, Homo sapiens
tgtgggaagccgcacttacctatgaggccagcaagcggaggtgctgggagcgagttggctgaagtccattggaatattaagc

SEQ ID NO: 298107 - DNA, 100 bp, Homo sapiens
agtcagacctcggataacaatgccctgacacctgagagcattggctgtgatgactacttaggctccgacaaagtcgtggacaaatgtggggtgtgtggag

SEQ ID NO: 298108 - DNA, 100 bp, Homo sapiens
ggagcataagaagaagcacccagatgcttcagtcaacttctcagagttttctaagaagtgctcagagaggtggaaggcccctgactcggatgctgagggc

SEQ ID NO: 298109 - DNA, 100 bp, Homo sapiens
ggcggccttcgaggaggtcatgaaggacctgagcctgacgcgggccgcgcgggtgctgctgcatgaggaggcgggtgattctggctttgtcagtctctct

SEQ ID NO: 298110 - DNA, 95 bp, Homo sapiens
tgtttcccgggagctcttcttcatcaacatgtggcagaagcttttgtctggtcctctgagccccagtgagagtttcctgaggtacctcacccttc

SEQ ID NO: 298111 - DNA, 75 bp, Homo sapiens
gattataggcgtgagccaccgtgcctggctgaagtttaccaagtactggacagaatcaaatggggtggaatctaa

SEQ ID NO: 298112 - DNA, 83 bp, Homo sapiens
cggaatgctggagtcagtggaagacggagctggtcggcccgaagatgagcgggatcgtgtgcagaagaaaaccttcaccaagt

SEQ ID NO: 298113 - DNA, 97 bp, Homo sapiens
ctgcttgaaaggagaagacttggattctcagctccgccgcatgcaagagatgattgcaaggatgcaggcgcagatgcagatgcagatgcagggcggg

SEQ ID NO: 298114 - DNA, 51 bp, Homo sapiens
attcatatgaccatgctcacaagcagtcctcctgcatatgcccaagaggat

SEQ ID NO: 298115 - DNA, 75 bp, Homo sapiens
cccggctcgaagcctggatgaaatagatctctcggctctgaggcttcaaggttactgactttttatgatgtttgg

SEQ ID NO: 298116 - DNA, 75 bp, Homo sapiens
ctttttgcttgcagcgtccatgaagcagtgtttgaggcacgagagcagaaggaacgtcaaggtcgtgggaaataa

SEQ ID NO: 298117 - DNA, 95 bp, Homo sapiens
gcagccttgaacgtctggactctagggaccctgctgaatagctggggctacaggcgtgtgtcactgcgcccaggagtacttgattcttcagaaaa

SEQ ID NO: 298118 - DNA, 50 bp, Homo sapiens
cctgtacagcctgcagaactcaattcatgatgaccaataaactggacacg

SEQ ID NO: 298119 - DNA, 98 bp, Homo sapiens
tgaaggtgaaaaaggagaatggggatttaaagcactgaaacaaatgattaagattaacttcaagttgattggtggaacgagaatgcctacacgcagcc

SEQ ID NO: 298120 - DNA, 75 bp, Homo sapiens
ctcacatgagacaaatgcgctcagcttcaattgtgggggcccctgaagccactgatggaagccacactaccgggg

SEQ ID NO: 298121 - DNA, 100 bp, Homo sapiens
cagcatgacggtgcgccggctgtcactgctgtgccgggacctctgggcgctgtggctgctgctgaaggccggcgcagggatatgggattagaactgttta

SEQ ID NO: 298122 - DNA, 100 bp, Homo sapiens
cgacaagcacacactatggcgctgaaacggattaataaggactttgcctcccgggccaaactggcagttcaaaaactagtacagaaagttggattttttg

SEQ ID NO: 298123 - DNA, 96 bp, Homo sapiens
agcagacccgctggctcccagtgtccaaagccagcctcatcttcatcttcaccttgttcatggtgtcctgtaagatggagtctagctctgtcgccc

SEQ ID NO: 298124 - DNA, 83 bp, Homo sapiens
cctaaccatgaagacttgaacttaatacagcaagaaagaccatcaagtttaccagacactcatgaggaccatgatacttccac

SEQ ID NO: 298125 - DNA, 100 bp, Homo sapiens
ttagaaagatctatagcactctggctggcaccaggaaagatgttgaagtgactaagggaaaaccgtcttcagatacagtccctaagcccaagagagcccc

SEQ ID NO: 298126 - DNA, 97 bp, Homo sapiens
gaaaaggtttgaatttccaaattctcttatccaatcacagaacattaaccaggtggtatttgttggaaatttcttgagaattaatacgatcgccatg

SEQ ID NO: 298127 - DNA, 100 bp, Homo sapiens
cgcagaagctcctcaatggccagcgccagctgcagccccggctgcccactcgcctcacctgagcctgggccggagcctcaacagaaagctcctttagttc

SEQ ID NO: 298128 - DNA, 100 bp, Homo sapiens
ggaaaacaacttcgagggcagaggattttatattggaagacatggatcttgctgccaacgagatcagcatttatgacaaactttcagagactgttgattt

SEQ ID NO: 298129 - DNA, 96 bp, Homo sapiens
gtttgatgtgaatgccattgtcgcccatgttctcttgccatggtaggggaggagtgtgtaggtgccatcgtttgcaagttggatatgcacaaaaag

SEQ ID NO: 298130 - DNA, 51 bp, Homo sapiens
cttcatcaccaagcacgacctgcagatatatgcttaaaggaggtaacgtcg

SEQ ID NO: 298131 - DNA, 100 bp, Homo sapiens
ggcggcggcgcgcagcgtgtcaggcggagagacccgccgccagggaactctaatgatccaggacaaagaagttaccctggagtatgtatcaagcctggat

SEQ ID NO: 298132 - DNA, 75 bp, Homo sapiens
gtggacacattttcttccaatgatttcagagacaactgtctgaaccctgccaccccttccctcctcagccaggag

SEQ ID NO: 298133 - DNA, 88 bp, Homo sapiens
ccaggcctgcgtccgagtctccgccgctgcgggcccgctccgacgcggaaggctctccaatccagtgttgaatagaagtgatgatagt

SEQ ID NO: 298134 - DNA, 98 bp, Homo sapiens
aggcattgacacagaccttcaacaacaactggtcctatgaagcctctactcttcatggatcttttggatgaaagaacactcgtggcagtagaacggcc

SEQ ID NO: 298135 - DNA, 75 bp, Homo sapiens
agaaagaagttgtcattctttgcacgctatcatggtgaacttacttcagattgtgcgggaccactgggttcatgt

SEQ ID NO: 298136 - DNA, 98 bp, Homo sapiens
agaacggctgcctaatttacagcaaccatgagaagtatggagcagtgggatcactttcacaatcaacaggaggacactgatagctgctccgaatctgt

SEQ ID NO: 298137 - DNA, 96 bp, Homo sapiens
aagctatctgaagacattgacctgctgaaatccaggatagagagtgagactctggatgggcacatggtggtgcgtagccatgcccgtgtgtcgtcg

SEQ ID NO: 298138 - DNA, 83 bp, Homo sapiens
caatcgcttgtacaaaggagagtttaaacagccaaaacagttcattcatattcagcgtttgggccccatggtatccctgtgac

SEQ ID NO: 298139 - DNA, 75 bp, Homo sapiens
aaagaattatactacaggcacatatatgccaaagtcagtgtctataatgacggatctatactacctcagtcagac

SEQ ID NO: 298140 - DNA, 75 bp, Homo sapiens
ctcatcaggaagcgcggggcggcggcgaaaggacgaaaaggtactttgtggactatcggagagtgcttgtctgtg

SEQ ID NO: 298141 - DNA, 100 bp, Homo sapiens
ggaagcttcctgaggccaccccagagtcagaagccgctatgcttcctggacagcttgcagaaccgcaggatgacgcaaaacacggtgattgtgaatggag

SEQ ID NO: 298142 - DNA, 51 bp, Homo sapiens
catcggcatcactgaacccttccaggtatgatgccgggcgggacggcttca

SEQ ID NO: 298143 - DNA, 131 bp, Homo sapiens
cgttgctcctgctgctgcccctgctctcagctctggtcgcggcggctatcgacggccctgagcctgtgcaattatttcgagagtcaaaatgtggatttccgaggcaagaaggtgatcgaactgggtgcggg

SEQ ID NO: 298144 - DNA, 90 bp, Homo sapiens
gctgtgctcgcgctactctctctttctggcctggaggctatccagcatatccttggaacagaagatcttattgtggaagtgacttccaat

SEQ ID NO: 298145 - DNA, 90 bp, Homo sapiens
tattcctggtctacatcctgcgggtgcctttgaaaatcaacgacaacttgagcacagacttcagctacgggacggacgagtacgacggag

SEQ ID NO: 298146 - DNA, 97 bp, Homo sapiens
ccccatcccagacacaaaaccggacttgaaagaggagattgatattcgactctccagggttcaggatatcaagtatgagccccagctccttgcagat

SEQ ID NO: 298147 - DNA, 100 bp, Homo sapiens
gaaggaaactgaggtccaccgagttggagaaacctactcaacaccagggacttgccatgaggtgttgaagccttgtttcactgagttggagagactggac

SEQ ID NO: 298148 - DNA, 100 bp, Homo sapiens
agagactggcaggcctcggcctaaaggaatttaaactttgggataatgagctgcagtatgtggaccaacttctgaaagaggatgtgagaaataactctgt

SEQ ID NO: 298149 - DNA, 80 bp, Homo sapiens
aagatggtgaagcagatcgagagcaaggcatctccttggaaacaatgccatctttgaatgtgagagataaacctagtttc

SEQ ID NO: 298150 - DNA, 89 bp, Homo sapiens
cgcctatgacatcgaggtcaacacccgccgagcacaggctgacctggcctatcagcttcaggttggtgttcgaggaagagacattgttg

SEQ ID NO: 298151 - DNA, 100 bp, Homo sapiens
ctttatatagaagggagagtaggcttcgcaaggcatggtgggtcagctggcggcacggcgggcggctggcgtggtgctggagatgatccgggaagggaag

SEQ ID NO: 298152 - DNA, 100 bp, Homo sapiens
ggagtggtgcgtgatgtggctaagatgctgccgactctgggcggcgaggaaggcgtctcccgggaaagaacagcagtgtttcaggaattttcacattcca

SEQ ID NO: 298153 - DNA, 100 bp, Homo sapiens
ggaggaagaaggcgagaagcacagcaaatgcagccctgaggatttggctactgcatataacaacagggggcaaatcaagtacttcagggttgatttttat

SEQ ID NO: 298154 - DNA, 100 bp, Homo sapiens
ctgggagatgggcctactcgcccgccaccctgcgctgccgccgctctgaggagttaaaggtatgatctcgtgaaaccttgagagaaactgaatgacgaat

SEQ ID NO: 298155 - DNA, 100 bp, Homo sapiens
catgagcaagctgctggatggcattcagatctgcgagtgaagagggacgagggaaaagaaacaaagccacagacgcaacttgagactcccgcatcccaaa

SEQ ID NO: 298156 - DNA, 117 bp, Homo sapiens
gttcgagcgctgttctcgctccggagccgctgcacatttcgagtgatcagcagctggactgtgccttggacctaatgaggcgcctgcctccccagcaaatcgagaaaaacctcagcg

SEQ ID NO: 298157 - DNA, 75 bp, Homo sapiens
tgctggagaattataggaacctggtctccctggtgcctggtccctgtgaccatgaagacctcctggacggtgtca

SEQ ID NO: 298158 - DNA, 82 bp, Homo sapiens
ccgcgcggggggcgagtaagccagcggcaggaccagcgggcgggggcccacgaatgtgcactcccagcaacacccctgccac

SEQ ID NO: 298159 - DNA, 75 bp, Homo sapiens
tatgacaactgaaatgagacatgcacataatatagagacgagttgtactgctgtcacaggaaatggacgctggat

SEQ ID NO: 298160 - DNA, 75 bp, Homo sapiens
gggcagacggattcatttagagctgcggaacaggacgccctctgatgctgagggtaaaaagctgggattggtagg

SEQ ID NO: 298161 - DNA, 80 bp, Homo sapiens
tggtcttcctgctggggctcatgtttgagaacccagcttagactagaaagtctagaagacacacacataatgaaggggga

SEQ ID NO: 298162 - DNA, 83 bp, Homo sapiens
ggggaaaagcgagcgatcgagcgagcgcgcgcgcgaaaactccgggcaggtattagaaaactactcggatgctccaatgacac

SEQ ID NO: 298163 - DNA, 76 bp, Homo sapiens
ggcatgcccctggccatcttcacaaagggatgttctgttcttgaaggactgtgtaggcccagaagtggagaaagcc

SEQ ID NO: 298164 - DNA, 117 bp, Homo sapiens
cacggcgtacgccctcatggggaaaatctccccggtgactttcagaacccttaggagaaatcttgagagtggacagcaattgtgaagatcgccagagagttctgtgtttcatcaccg

SEQ ID NO: 298165 - DNA, 100 bp, Homo sapiens
ggccggggcctggggctgcctgccgggcggccgggcgcggcgagcccaggtgcagtagacattgttgcaatcatgatcggcaatctgaaaggcacaaaaa

SEQ ID NO: 298166 - DNA, 74 bp, Homo sapiens
ccgaaggccctatcaggacatggagtatgaaagacggttttgcacactagggaccaagaagccctcggggacac

SEQ ID NO: 298167 - DNA, 100 bp, Homo sapiens
gtcgcagccccggcgccccgaagcgggaaaaaggctgggtgccgccgtcccccagctgcgcaaccctaggaactctcggatctggacgttggtggttggc

SEQ ID NO: 298168 - DNA, 99 bp, Homo sapiens
aagctgagccagagcccacagaagcatggaaggatgataatgaagataattcaaatgatgggacccagccatccaaaaggaggcgaatgggctcaggag

SEQ ID NO: 298169 - DNA, 100 bp, Homo sapiens
agagatgaagaaagtggctcgtcagcttgggatggctgctgctgagtcagacaaggactctggcttttcaggtttaccgacaagactgtgaaactttcgg

SEQ ID NO: 298170 - DNA, 75 bp, Homo sapiens
gagatcgccccgatagtttgagagtaaatgggttaccagaggaagagctaaggaatcccgttctgcttccagaag

SEQ ID NO: 298171 - DNA, 71 bp, Homo sapiens
gagttgaaacgctgcctggaaaggaagtaccaggacttgcacagactctggacattaatgtgaaggcccca

SEQ ID NO: 298172 - DNA, 97 bp, Homo sapiens
gggtcccggcggcactcaccacacccggcatcagacctggcactacttgtccaagacgtactggtggcgagtgactgagatgctggtaaatgtcctc

SEQ ID NO: 298173 - DNA, 75 bp, Homo sapiens
atctagagctggccaacacagtgctgctgttttttcaaacgaaggaaaaggaaaaccatacagcgccacaaatga

SEQ ID NO: 298174 - DNA, 98 bp, Homo sapiens
actcggccatgagtccttctactggcagctgccggagacataccagggagacaaggtccttgaatgggcaagagggcacatgaagtacggcgtcctcc

SEQ ID NO: 298175 - DNA, 129 bp, Homo sapiens
ttgacctcacctcaagcacacccaatggacagcatgcctcaccaagtcacatgacaagcagaaagaccacagcaagattctttcattcgtctcctcctagcctgggggaccaggctcgaactgaccctg

SEQ ID NO: 298176 - DNA, 100 bp, Homo sapiens
gccccgcgaccactggcacattcttgctgacaggcctatatgaacccaatagcaatggcgagatcaaggggtccaatccagtcttcagggccaacaatac

SEQ ID NO: 298177 - DNA, 100 bp, Homo sapiens
ctgggattttgttgaagccacacaaagaacaaattgcagttgtttgagccctctgcccgaggagatgctcagctacgcccgggatgacacccattacctg

SEQ ID NO: 298178 - DNA, 82 bp, Homo sapiens
ccatcacatcctgcccaagtgcaagctggccagggacctcaaggaagcttatgacagtgacatcctataccccaaggactcg

SEQ ID NO: 298179 - DNA, 82 bp, Homo sapiens
acaagttttgtgcagattgccagtctaaaggctctcaaaattagagagatgtgtaattgtccaccactgtctaatccagacc

SEQ ID NO: 298180 - DNA, 83 bp, Homo sapiens
gcgacaagccgctggcagccgcggatctcaccgccgctcagggcgtccgagctgggccacagcctgaacgagaacgtcctcaa

SEQ ID NO: 298181 - DNA, 100 bp, Homo sapiens
gctggggaaaacaggcattgctgggagccgagagattaggcatcttggctggcttgcagaaaagttgccaaaacaaaggggatttggtgatggaggcttt

SEQ ID NO: 298182 - DNA, 90 bp, Homo sapiens
gaggcagcgcgggatcccagcctcaggcgtgcgcggacggtgtgcgggtaatggaactgctggtccatctgaataaacgtataaaaagcc

SEQ ID NO: 298183 - DNA, 100 bp, Homo sapiens
tggagccgctggggtcccttttgcctcagatactattttgaaggcctatgagagctacaagaagaaggactacacccaggtggactacttaatcaacggg

SEQ ID NO: 298184 - DNA, 100 bp, Homo sapiens
cgatggcagccgggacgagctgttccgccggagcccccggcccaagggcgacttctccagccgggcccgcgaagtgtatcagatgtagaaggtggtgatg

SEQ ID NO: 298185 - DNA, 75 bp, Homo sapiens
aggaccagattgctctggtggagaggggtcctctgcccctttgctcagatgctgacagtgaaaccgtgaaggcag

SEQ ID NO: 298186 - DNA, 75 bp, Homo sapiens
cattgtttcccgcggtgcctcgactccttaacaggatctacgataagcttgaacagatggatttggaagtccgag

SEQ ID NO: 298187 - DNA, 100 bp, Homo sapiens
gagaagaggattggaggtgtcagtgttaaaggaacctctacaacgaaggtgaagccacggaagataagggtcctggcggcagagaccacgtcccagcagg

SEQ ID NO: 298188 - DNA, 112 bp, Homo sapiens
gatgcggggacagcggcctggctaactcctgccaggcagtgcccttcccggagcgtgccctcgccgctggagtcgttcacgcctactgaggagcatgtgttggtggtgcgcc

SEQ ID NO: 298189 - DNA, 99 bp, Homo sapiens
cagagctgcaaatatgttcaagatggctaaaaattggagtgtggattgggccgtggaacaggcccacttcgccctgttcttcaaccagggccagtgctg

SEQ ID NO: 298190 - DNA, 100 bp, Homo sapiens
tcccaagcaaggttccttggaagaagatgtctgcagagtataagccacccgcacttaaaaagtcaaattctcctggaactgcatcatcaggatcttcacg

SEQ ID NO: 298191 - DNA, 51 bp, Homo sapiens
ccgggtggttaaacttcgcaaaatgggcattttgtcagtgatgctgatctt

SEQ ID NO: 298192 - DNA, 97 bp, Homo sapiens
gctgccccaatccccggcagctctctcaggtaaatttggaaggcaaagccagccctctgtcacttctacaaatggcctccccaagtggcctgtgtgt

SEQ ID NO: 298193 - DNA, 100 bp, Homo sapiens
aataattccaggtggaattgctgatagacatgggggcctcaaacgtggagatcaactcctctctgttaatggagtggcccccgatttctacgttgagatg

SEQ ID NO: 298194 - DNA, 100 bp, Homo sapiens
gagtctgcggacccggcgccgaggcggccacccgagacgcggcgcgcacgctccggcctgcgtaatctatgccagcaattatgacaatgttagcagacca

SEQ ID NO: 298195 - DNA, 100 bp, Homo sapiens
cctgctggaggagcgcttccgggtcgcagcagttgtggtagaaatttctgggttagtggactctcttctacaaccagagctacagatttgaagaatcttt

SEQ ID NO: 298196 - DNA, 100 bp, Homo sapiens
aatgcctgtttattcaccatcaacaaagaagaccacacactgggaaacatcattaaatcgtgcggtcgacaccatcttctccctgcagggagactccagc

SEQ ID NO: 298197 - DNA, 99 bp, Homo sapiens
tttaacaccaagatggcggacggcccggatgagtacgataccgaagcgggctgtgtgccccttctccacccagaggtatttaccttgctgtggattgct

SEQ ID NO: 298198 - DNA, 71 bp, Homo sapiens
acgatttcatcagtatggatcccaaggtgcagaccatgaattacgtggggcagttagccggccaggtgttt

SEQ ID NO: 298199 - DNA, 95 bp, Homo sapiens
gtcttgtctcgtcccagccaccagcgtggctgtccgcagagggacctgctgtgccatcaacaaggcagcgcccggttaccacatggccaagctga

SEQ ID NO: 298200 - DNA, 82 bp, Homo sapiens
atcttgtacttcaagaggaggaatcacgctcggaaacaatggcaattctgtggtgttcttggtcacacatttatggagtttc

SEQ ID NO: 298201 - DNA, 100 bp, Homo sapiens
cagctgaagcagttggagtgaagattggcaatccagtgccctataatgaagatgagacaaaaggacccagtgaaaggaatgacagcagatgactaaagcc

SEQ ID NO: 298202 - DNA, 100 bp, Homo sapiens
agagaacttcccagcatacctgagaattgctgtccccggcataggtccatctctgcagaagccatttcaggagtacctggaggctcaacggcagaagctt

SEQ ID NO: 298203 - DNA, 97 bp, Homo sapiens
ggagatttgtgtggctgcagccgagggagaccaggaagatctgcatggtgggaaggacctgatgatacagaggctggagtgcagtggcgcaatctcg

SEQ ID NO: 298204 - DNA, 100 bp, Homo sapiens
ctcagaccatgaccgacttcataccttggtaactgaacactgttttccagtggacccaagtggagagattgtggaactggcgaaaggtgcatgtccctgg

SEQ ID NO: 298205 - DNA, 90 bp, Homo sapiens
ggcgacgaaccttggagagaggagaacgaacatcttctggacctttgtccagggcagccgatgaagtgcaaccttcacatgaatgggaat

SEQ ID NO: 298206 - DNA, 89 bp, Homo sapiens
tatggagcctcaagtaaaacaagtttttcaaagcctaccaaaatctggatttgagagcacctccagaacaaggaaagatttttattgca

SEQ ID NO: 298207 - DNA, 100 bp, Homo sapiens
ctgagagatctccaagaattacaggttccagtgtgtgttccaagtgctgccaaagtgcctcagcccagagacacccctgcctagcgtgctgctggctgtt

SEQ ID NO: 298208 - DNA, 74 bp, Homo sapiens
caagtcccggaagatcgcgatcctgggctaccggtctgtggaggctaagaatattgtacacaaagattcttgat

SEQ ID NO: 298209 - DNA, 100 bp, Homo sapiens
gggaattgtgaggcggactgcgagggaaagggggccttgttgagtccgccagtgatcagggccaaagcggtcagtgagaaggaagtggactctggaaacg

SEQ ID NO: 298210 - DNA, 74 bp, Homo sapiens
aaaaaggctaagcaagcatctaaaaagactgcaatggctgctgctaaggcaccaagatgataccctgtgacttc

SEQ ID NO: 298211 - DNA, 100 bp, Homo sapiens
cgcggatcccagcttcctgcagccaggtgctggagaatctggtaaaagcaccattgtgaagcagatgaggatcctgcatgttaatgggtttaatggagag

SEQ ID NO: 298212 - DNA, 100 bp, Homo sapiens
gtcagatttcaggttcagtgacatcagaaaatgtgtccagagattacaagatgagctttgatccaaaccttctccacaacaatggacataatgggtaccc

SEQ ID NO: 298213 - DNA, 89 bp, Homo sapiens
cagggagatcacattttaaatcagtcttaagagagatggcagaaacggtggacacaagcgaaatggtcaacggcgctacagaacaaagg

SEQ ID NO: 298214 - DNA, 100 bp, Homo sapiens
gctccgctcggatcccatgcaacagccacgatgtgaagcggggcagagccgggggagcccagcccagccagcctccagctggtcagtgagaaggtcggag

SEQ ID NO: 298215 - DNA, 88 bp, Homo sapiens
tggtgtgccgtgcacgtgcagatcgcctggcagatctaccgtcaccagcagaagataaagatagttcactgtttaattggtgagtttt

SEQ ID NO: 298216 - DNA, 141 bp, Homo sapiens
ttctgctccattttttctgattatggattctgttcagaaggaagccgaattttaagtcatcgttctaggatagggatatcagtatgaacaacattactcagttgccagaagatgcatttaagaactttccttttctagaag

SEQ ID NO: 298217 - DNA, 75 bp, Homo sapiens
attttttctcatggatgttcttcttcgagtatttgtagaaggatagcctgggctggaagctcttctacgtcacag

SEQ ID NO: 298218 - DNA, 96 bp, Homo sapiens
acctctggagtgcccccagcccagagcccgctggtcctgccattcccacctctaattcttactctaagaagactcagagtaacaacgcagaaaata

SEQ ID NO: 298219 - DNA, 75 bp, Homo sapiens
ccgacgcccgcaggtcctcgcggtgcgcaccgtttgcgacttgtgttgaatatgaaacattcgatatattggagg

SEQ ID NO: 298220 - DNA, 100 bp, Homo sapiens
gtccagactcacgggagaggaagtcaacagctgtgtggagtgtctttggtgcaacactaacaaggcttgtctggactacccagttacaagcgtcttgcca

SEQ ID NO: 298221 - DNA, 98 bp, Homo sapiens
cgccttctaggtttgccaggactgccggccctgcagctgccttctgccccaggtaaaaagatggcctatcagaaggtccatgcagatcaaagagctcc

SEQ ID NO: 298222 - DNA, 74 bp, Homo sapiens
gttcgaggtggtgggactcaccgctctggccagggtgcttttggaaacgttgccatcttcctgggcagagccgc

SEQ ID NO: 298223 - DNA, 75 bp, Homo sapiens
ggggaaccgggcacctgcacccgcctctgggaggtggtcagtctgaccaaggatacgggtctaaggatgaactta

SEQ ID NO: 298224 - DNA, 50 bp, Homo sapiens
cggcggcgggtgttgtgagcgggaaggagtggagtcaacatatcaatgga

SEQ ID NO: 298225 - DNA, 75 bp, Homo sapiens
tgaggagccattttgagcaatggggaacgctcacggactgtgtggcctgcacccccatgttccgggagtactccc

SEQ ID NO: 298226 - DNA, 82 bp, Homo sapiens
gagcagccccgggcccgcccgcccgcatccaggttgaaatcacaaagattagacacctttttagataggtgttcttcagcac

SEQ ID NO: 298227 - DNA, 80 bp, Homo sapiens
tcgaacagtatcttcttcttcgctccctagcttagaagaggcaacgcggtaaaaatattgcttcggtgggtgacgcggta

SEQ ID NO: 298228 - DNA, 82 bp, Homo sapiens
gggcgacccggtgtgtggcgcgcccagagccccgcgtttcagccctagggaaggtgaatgaaaactttgccattgatttgat

SEQ ID NO: 298229 - DNA, 90 bp, Homo sapiens
ccagaatcttctgatggattattgacggtggagcagtgctaaggaaattcctgaagatgtagatatggaagaagaaaaagaaagtgaaga

SEQ ID NO: 298230 - DNA, 90 bp, Homo sapiens
gatctctctcatctcgctcggctgcgggaaatcgggctgaagcgactgagtccgcgatggagcttagagctttcacagacaacagagacg

SEQ ID NO: 298231 - DNA, 101 bp, Homo sapiens
caagaagtgatgtctttacataagcaacttcagaatgctggtggcaagaattattctcctgctgttgacttcaggactatgaaccaagcacattataccag

SEQ ID NO: 298232 - DNA, 100 bp, Homo sapiens
cggcgatgagctaagacgctgtttcagagcgtttgggtcctctgaggccccttgaccagggtaaaggacatgttcagttttgaaattccagagcatcatg

SEQ ID NO: 298233 - DNA, 82 bp, Homo sapiens
tgagagctccccaggggagttctctgtgtctgtgaatacctggagtagaacagaaaaattattatgtctgtgttcccttggg

SEQ ID NO: 298234 - DNA, 110 bp, Homo sapiens
ccgcggagcagcttccccccgcgcctctcttcgcctcgcctcgggacccgcggtccccgctcttgctgccgtgctatcaagactaatcaggaccttctcccagaaactcc

SEQ ID NO: 298235 - DNA, 96 bp, Homo sapiens
aactgctggaaggagactggatgatagaattaatgtatgacaacatgtccacaatggtgtacataaaggaagacaagttggagaagcttacacagg

SEQ ID NO: 298236 - DNA, 75 bp, Homo sapiens
ttccggacgacgaggaaccgcccaacatggcctcggaggaggagataagcaaggacctcagagccacactgaacg

SEQ ID NO: 298237 - DNA, 100 bp, Homo sapiens
atgaagacagatgcaccaacgaggtcgttgaggacttccacatggagattggcacaggaccagactcaagacacacaactcataacagttgatgaaaaat

SEQ ID NO: 298238 - DNA, 74 bp, Homo sapiens
actatcacgacgggaagctgtgggttcttgatagtccacaatgggtgaaccacagcaagtgagtgcacttccac

SEQ ID NO: 298239 - DNA, 83 bp, Homo sapiens
aaagagaaaaggcaacatcctgtcacaggccatgctctggcaaaaacggttttggccaaattgggcgagggcacaaaataacc

SEQ ID NO: 298240 - DNA, 100 bp, Homo sapiens
ttgaagccctgaaccaagccagcaagatcaccctcttggagcagtcggagtggcagccaacaaacgtggatgggaaggggtacctactcaatgaacctgg

SEQ ID NO: 298241 - DNA, 90 bp, Homo sapiens
ctgccagcaagggtgcatccagctatatgtcagaatggttttcaagctggacgagcaactggaacagatccagaaggagctaagtgtttt

SEQ ID NO: 298242 - DNA, 87 bp, Homo sapiens
aacttcagttgcttgactcgtttggatcacaaccgagctaaagctcaaatgatgtcagaagtgggatccaaagtagagcttataatg

SEQ ID NO: 298243 - DNA, 100 bp, Homo sapiens
gcgcgaggccgcagagctaaatgggggcctctccagggagtgctctgttcacggctccatcgctgttaagtattgggaaagggtcgttgtggtgcataga

SEQ ID NO: 298244 - DNA, 83 bp, Homo sapiens
gttttaatcacatcacaaggctatgaacaaatatgcaaatgggggactcaaggagatttcaccaccacccatcctcggcctgt

SEQ ID NO: 298245 - DNA, 87 bp, Homo sapiens
aagtatccccgttcgccaccaattatgggagggctggccaacttctgctacagacgactcagtagttgatgtcacttggcgatattc

SEQ ID NO: 298246 - DNA, 100 bp, Homo sapiens
cggctccgcggcgatggcgctctataacccctaccgccacggcctagttccccgagagcgttcagacagtgggggctcaagctcagagccatttgaccgt

SEQ ID NO: 298247 - DNA, 75 bp, Homo sapiens
aacaaacttcagctctgaaatagaagatcttgcaaggtggtagagctttgtgttcagtatggacagaatgaggag

SEQ ID NO: 298248 - DNA, 100 bp, Homo sapiens
gcgcggccttcacacatcccagccggtgactgcagtgagaatcccaaggactgcagcaaagccaaaaagctggtgtgtaatatcaacaaaggctgtggct

SEQ ID NO: 298249 - DNA, 100 bp, Homo sapiens
ctgaaatacatccaggaaagacatggagattctcttaaaaagggatacttgactttcagagatgtggctatagagttctctttgctggagtggaaacgcc

SEQ ID NO: 298250 - DNA, 101 bp, Homo sapiens
ctgcacaggccggagagagccgtaggcaggaccccgggacaccctggaagccaggaaatggtttttctattgggaaagctactgatcggatggatgctttc

SEQ ID NO: 298251 - DNA, 82 bp, Homo sapiens
aactctcagatgaagatgatgagatagactgggagctccatgaggtccgagacaacctgaagacgcccagctcagcagagac

SEQ ID NO: 298252 - DNA, 98 bp, Homo sapiens
gcttccacacaactccagtgctaactcaacaggtggcgctcgtgtttccgaatagtgaccctgtgatgttcatggttgcattttatgggtgtctcctg

SEQ ID NO: 298253 - DNA, 50 bp, Homo sapiens
taaaacctgacacttttaacagatttaccaacagcatgaatcaagaaaag

SEQ ID NO: 298254 - DNA, 75 bp, Homo sapiens
gatccagacacttgccaccaatgctcaacaggttacctgtgcatgacagatgagtggttctctgagtatgtctac

SEQ ID NO: 298255 - DNA, 86 bp, Homo sapiens
gccgccgccgcccccgccgccagcagagccaagcacagtgggaactttcagaaagcactggttgaaggaacgctggaatccctggg

SEQ ID NO: 298256 - DNA, 75 bp, Homo sapiens
gaaaaattaccgagccagccagcaggaaatacagcattatccatatattcctgcacatattacaaagcctaagga

SEQ ID NO: 298257 - DNA, 82 bp, Homo sapiens
agctcaccgacagtgccctgagggccttcgagagctaccgcgccagacaggtgccagaaccctgtggagcatcatgaactgg

SEQ ID NO: 298258 - DNA, 51 bp, Homo sapiens
tcctcctggccaccgactcctacaagaaatctctgcccctgttagaaaatc

SEQ ID NO: 298259 - DNA, 75 bp, Homo sapiens
cagttaaaacatccaaagtgccttattgtggattttagcaaccctgagatggagttttaacattgaatgcggaga

SEQ ID NO: 298260 - DNA, 98 bp, Homo sapiens
ccaactccgctgcctttgccgccaccatgcccaaaacgggctgccggggagcgctatcgcagggagatgctggcccacggtggaggcagggagcccat

SEQ ID NO: 298261 - DNA, 100 bp, Homo sapiens
ccccagccgaccttgagctccaggagttcgtctcttacgtctgcggaagtgcagctgcctcagttcttagcgcaggtgtccaaagacaggaggtggtctg

SEQ ID NO: 298262 - DNA, 83 bp, Homo sapiens
cttgcattggcctccggcaggcgccccccgggggcgggaagctggtgcgttgtagaagacaagaactcaaaggtggcctggtt

SEQ ID NO: 298263 - DNA, 75 bp, Homo sapiens
ctggatgtccttgagttcaaccaggcacttcctggccctgcggggtgccctgtctctggctggagctgatgagcc

SEQ ID NO: 298264 - DNA, 74 bp, Homo sapiens
tcccctttacaagaagctccgcctgtcgacaggagagaagtggatgggccctatacctccagccgtgaatgcca

SEQ ID NO: 298265 - DNA, 100 bp, Homo sapiens
gccgcgcccgccgcgcggagcgccccttcgcgtcccctgcaccatgagctggggcaccgagctctggagtccctgcaggaagcatcacccaggctggcag

SEQ ID NO: 298266 - DNA, 75 bp, Homo sapiens
ttactgtcaagacatttcttcggcattctgcaacagcaccgacagtaaatggttcacggccgacatcatgtccat

SEQ ID NO: 298267 - DNA, 90 bp, Homo sapiens
tgtgtctccattcctggaaggtcttgaagaaagaccacagagaaaggcacaggtgtattgtacgagcattgaaagatccaaatgcatttc

SEQ ID NO: 298268 - DNA, 98 bp, Homo sapiens
acgtgacctaaagctggagtattttgagattggagaattaaggtctggatgtaccgactgcttttggaataaaaagattcccaggatgtgagcaacac

SEQ ID NO: 298269 - DNA, 75 bp, Homo sapiens
ctctgagataaaagggcccctttcgactagcctctgctgaaagggcagccccgagaaccacaggtgtacaccctg

SEQ ID NO: 298270 - DNA, 51 bp, Homo sapiens
tccacaatcaagttccaaatgaagaagatctccaagaaggagaagcttctc

SEQ ID NO: 298271 - DNA, 103 bp, Homo sapiens
agacaagatggacaccgcggaggaaggccgaatacatcaagcaatggtaacatctttaaatgaagataatgaaagtgtaactgttgaatggatagaaaatgga

SEQ ID NO: 298272 - DNA, 117 bp, Homo sapiens
ccaacagcgccccggcaccatcaagcatggatcggcgctggacgtgctcctctccatggggttccccagagcccgcgcgactgcctgcgggcctgtcaggagcagatcgaagctgca

SEQ ID NO: 298273 - DNA, 87 bp, Homo sapiens
caatggtcccggctgccggtcgacgaccgccccgcgtcatgcggctcctcggctggtggtcatcatcagatttgaaatatttaaagt

SEQ ID NO: 298274 - DNA, 98 bp, Homo sapiens
tggcataaggaactctatcccaggaatacagctttgcattagatggcaagattattttatcataaaccccagtttgccattttggatgaatgcacaag

SEQ ID NO: 298275 - DNA, 100 bp, Homo sapiens
gatgcacaagttccaaggttacgtttcaatttcagagacaactgtctgaaccctgccaccccttccctcctcagccaggagttcctggagataatcgccc

SEQ ID NO: 298276 - DNA, 75 bp, Homo sapiens
cgtttctctccggccggtcagggcaagagccagactgctctccagaatgttgagattgcccgagaagtgacccca

SEQ ID NO: 298277 - DNA, 74 bp, Homo sapiens
tgtgttcctcaatgaatcaccacttttcaggattagaagaggctgtgtatagaaacatacaagcttgcaaggag

SEQ ID NO: 298278 - DNA, 74 bp, Homo sapiens
gccgtcgcgccactcctccgagttttatgacttacctagtggagcctttatttacagaatgggccaggttttcc

SEQ ID NO: 298279 - DNA, 82 bp, Homo sapiens
ggagcttgaacccattgtcacccctccggttttgggatttgagattgacgcggtgaactctgtccagttttcaaaccacaca

SEQ ID NO: 298280 - DNA, 100 bp, Homo sapiens
cagaatgtcaaacttctgttggtacattgttagccaaaatgaagacctgtgttgatacctataccaaccgtttaaggtttgatctgtggatgaaatgaat

SEQ ID NO: 298281 - DNA, 98 bp, Homo sapiens
tgggactacagatgcaccaccatgcatggctcacagaacatttcctgcctgttgctcacactctgttgtccacagcatacccgcaccctagatggctg

SEQ ID NO: 298282 - DNA, 83 bp, Homo sapiens
ctcttttccagtgtccttcaggagatctgtgatgaggatgaggaagagtccttgaatgaagtagggtatgatgacattggtgg

SEQ ID NO: 298283 - DNA, 60 bp, Homo sapiens
tggtgctttcccgaatctcagaatgccgtaaagagaaatgtgtatgaccttacaagtatc

SEQ ID NO: 298284 - DNA, 100 bp, Homo sapiens
ctaaaaacaagactggggctgctcccatcattgatgtggtgcgatcgatataccagtatattcagagtcgcttttatcggtctccagaggtgctactggg

SEQ ID NO: 298285 - DNA, 75 bp, Homo sapiens
gcttaaatgatgtattttgtgatcgcagcgatgaaaggatcccatgacagattctgttgtcacgtctccttacag

SEQ ID NO: 298286 - DNA, 100 bp, Homo sapiens
gcggaaggggcaggggacgtggcttttgtgaagcacagcacggtactggagaacacggatgggaactctaatgatccaggacaaagaagttaccctggag

SEQ ID NO: 298287 - DNA, 100 bp, Homo sapiens
acggaggccattaccatgtatatattaaagatgttgatcatttgggaaactggcagtttcaagcccagaggcagagctacacaaccatggaatccaaatt

SEQ ID NO: 298288 - DNA, 82 bp, Homo sapiens
ttatggcggcgctggagagggggcgctgagctgttggggtaagtaaggaggtctctgtaccatggctcgtacaaagcagact

SEQ ID NO: 298289 - DNA, 100 bp, Homo sapiens
gttaaactcctgctctgtttactgtggattggatattctcaaggaaccacacatgtattaagatttggtgacagtggatagtggaaacaggagatcgtgg

SEQ ID NO: 298290 - DNA, 96 bp, Homo sapiens
tgggaaagacagtgattgttataatcaaaagggcagtggaagcatgagaggaggaggtgggggcaatgccagagagtacaaaattaaaaaagtcaa

SEQ ID NO: 298291 - DNA, 97 bp, Homo sapiens
gagatttgaagatcaccgatgtcatcatggccttccaggcgatgtgtcgtggctacttggccagaaacatcggcgtgtcataagatccatcacagct

SEQ ID NO: 298292 - DNA, 100 bp, Homo sapiens
cagcagcagcttcagtagcgcagaggcggcggtggcgagaggtgcggcgaaggaggcagaggcacttatgcttgtcagatcgaatggagctgttagaaat

SEQ ID NO: 298293 - DNA, 75 bp, Homo sapiens
attaaaaaggaagctattcaccattgagaatttgaaagacatattggctgacctgatacctaaggagcaggccag

SEQ ID NO: 298294 - DNA, 96 bp, Homo sapiens
tcagaactcagtgggctgatcccaatggattgcatccacattccagagagcatcatcaaccgaaaatgagagcacacctattcagcaactcctgga

SEQ ID NO: 298295 - DNA, 83 bp, Homo sapiens
cggggtgcgccggcagaggatccagtgttcaccatcctggccccggaagcaatggctgccatccggaagaaactggtgattgt

SEQ ID NO: 298296 - DNA, 78 bp, Homo sapiens
tatcaggaatttgaagagatgctggaacatgcagagtctgcacaactggggccacaactttggtgaagaaggatatat

SEQ ID NO: 298297 - DNA, 51 bp, Homo sapiens
ccctggtgcagggagtggccatattagtgtgactctggatccagatacagc

SEQ ID NO: 298298 - DNA, 97 bp, Homo sapiens
ggcgtacgccctcatggggaaaatctccccggtgactttcagacagaaccaagttgtattgttagacacactggaacaagagatttcaaaatttaaa

SEQ ID NO: 298299 - DNA, 82 bp, Homo sapiens
cgggacgcgaggaccatggctgcctccgagcgccgcgccttcgcgcacaagatcaacaggcaccatgactcctgtgaggatg

SEQ ID NO: 298300 - DNA, 83 bp, Homo sapiens
gggatgtggacgaaggggccgacctcctaggactccctggaggaaaagcggaagcggcagcggtctgaacgcctggaacggat

SEQ ID NO: 298301 - DNA, 96 bp, Homo sapiens
ggagaagagcggagcagtggtcggagatgtggcgaccgacagccgatcgccagtacatggagggcttcaacgacgagctggaagccttcaaggagc

SEQ ID NO: 298302 - DNA, 82 bp, Homo sapiens
accgcttaccgcatctggctggagccctgcattcgcggcgtgtgcaggcagcctgcttctgcaaagtggtacgatcgaaggg

SEQ ID NO: 298303 - DNA, 75 bp, Homo sapiens
gtttgctttctccaatgctctatgcctttctgacgccacaggtcatcatctggatcatcccattctggttcccgt

SEQ ID NO: 298304 - DNA, 83 bp, Homo sapiens
caggatggtacctggccccaaaaggaatcctggagaggaggacagtgacaacaggatccagaagttgccacggctgctagttg

SEQ ID NO: 298305 - DNA, 50 bp, Homo sapiens
tggaggaagtacagccagcaataatgtcactgcatcccagatacatctct

SEQ ID NO: 298306 - DNA, 98 bp, Homo sapiens
accatcggcaccgtgctggtgcccatcctgctggtcaccctggtcttcaccaagaacttcgcagggaagaaggagaaagggccaacccctgaagaagc

SEQ ID NO: 298307 - DNA, 100 bp, Homo sapiens
ggttggtgtgattagcttcgcagtctggaaagctttaggagttcacagtgttcaaaccttgtactactcagctgatcacaagctgcttgatgggaaccta

SEQ ID NO: 298308 - DNA, 100 bp, Homo sapiens
cagatagccgtcttcagcttgagccccatcactagggcgccctgcgtccggcagaggaggcgagcatcccgctcaggtgatgaggaacccctcgcgcacc

SEQ ID NO: 298309 - DNA, 51 bp, Homo sapiens
cgtggcaagcgagcccggggtagagctatttgtcgtagatgtccagacaag

SEQ ID NO: 298310 - DNA, 100 bp, Homo sapiens
tggagattttgatgtggatgatgccaaagttttattagaatgtgacagtgatgataacatgggtgccaaaaatacttcaataggagaagaatttatatcc

SEQ ID NO: 298311 - DNA, 90 bp, Homo sapiens
gcagattttggggtagcaggtcaacttacatgcacactggtttttggctgttgtttgtttccccggtttggaaaaaccaaagtatgaacc

SEQ ID NO: 298312 - DNA, 75 bp, Homo sapiens
agtgtctgaatcagagaccaccagaaaacccagacactgatgtagcaggtaccatgaagctggaattggctcagt

SEQ ID NO: 298313 - DNA, 75 bp, Homo sapiens
atccgtagggaggacaccgtgacttcccggacgctgggaaatggttcacgcaaagaatctgctccacaagttttg

SEQ ID NO: 298314 - DNA, 88 bp, Homo sapiens
gggctgcggtcagcgcttcgatcctgagaccaattccgacgacttaattcagtgcacaaatgagatgaatgtgaacatcccacagttg

SEQ ID NO: 298315 - DNA, 83 bp, Homo sapiens
accatcatcactttcattgtctcggacgtgcggggcctgggcctcccggtccgcaagcaggaacaagatcactcaaggtgaag

SEQ ID NO: 298316 - DNA, 50 bp, Homo sapiens
gtaacccagcctgtttcacttcttgatgactttgggaaattgctgctggc

SEQ ID NO: 298317 - DNA, 100 bp, Homo sapiens
ttgatcaagtcctgtgagttggctgtggacctagcagcagtgactgaatgtccgacattgcctaagatactgagccatatcgccccagcattttgcatga

SEQ ID NO: 298318 - DNA, 100 bp, Homo sapiens
attccaagtaactcttatttggcatgatgggcccacctcctggtatgagacctcctatgggtcccccaatggggatcccccctggaagagggactccaat

SEQ ID NO: 298319 - DNA, 100 bp, Homo sapiens
ttttgtgcggccgtcctccaccgtttcctccaggacagcacctagtcgtggccggaggagtctcagagctgtcagaaagtttcctccagcttatggaggc

SEQ ID NO: 298320 - DNA, 100 bp, Homo sapiens
cgagaaccgccgcggagccctcatccctaacggtgaaagggcaagtgtccagagaatggctgggatgaaagtacacttgaactctttttacatgaacttg

SEQ ID NO: 298321 - DNA, 82 bp, Homo sapiens
cgcgggtctccggccggcggcggcggcggcggcggcggcggcgcagcatattcctctgcagacactattgaagttcatggtg

SEQ ID NO: 298322 - DNA, 50 bp, Homo sapiens
cctggataatgattgagccacctgtccagaagccatgcagtgacacccgc

SEQ ID NO: 298323 - DNA, 82 bp, Homo sapiens
gaagatcctggtgtcgccatgggccgccgccccgcccgttggtttacccaaggtccagcctagcccctaggcaccatgtcgg

SEQ ID NO: 298324 - DNA, 100 bp, Homo sapiens
cctacatgaagaagagagaagaggagatgcgtgataccaacgagaacaccttctgcagtggggaccatgtgtcctggcacagccctttggataacagtga

SEQ ID NO: 298325 - DNA, 75 bp, Homo sapiens
gactttctgaagctgagaaccatgctcatgcagagtggcatgattccgactggatactctcagtgccagccaaat

SEQ ID NO: 298326 - DNA, 51 bp, Homo sapiens
caaggatgaccaggaatgggaaagccccagcgcctagaagcctgcagctcc

SEQ ID NO: 298327 - DNA, 75 bp, Homo sapiens
aaaaattcaagaagttgaaaaacgcttttcacgtcacctggagagatgcacaggattgttaaaatgagtcttcgg

SEQ ID NO: 298328 - DNA, 99 bp, Homo sapiens
aaaaggaagtcaccaccgtggcctgcgacgttttctgaatttccagatcccatgtggggttcagattatgtgcagttgtcaaggacaccaccttcatct

SEQ ID NO: 298329 - DNA, 50 bp, Homo sapiens
ctctcttcctggctgcgtccctaggcagagtggcatgattccgactggat

SEQ ID NO: 298330 - DNA, 75 bp, Homo sapiens
cagctcggcccgcgggggagccccgggagccgcacgggactttgaacatgtcggggatcgccctcagcagactcg

SEQ ID NO: 298331 - DNA, 83 bp, Homo sapiens
cccgcctgccaggcgctcgggggccgaactggccctggactacctctgcagatgcagtgagtgaggggggggccatggcggag

SEQ ID NO: 298332 - DNA, 75 bp, Homo sapiens
tgccgggggagcggggccttccacaccccctccgtgggtgtgtggttgtggcagcactgcctgaaggtatgagac

SEQ ID NO: 298333 - DNA, 75 bp, Homo sapiens
gacagaacagttaatcctcaatttaagcctgatctaacccctagaaacagggctctctaaatacgtacagattct

SEQ ID NO: 298334 - DNA, 75 bp, Homo sapiens
ggggattctcgacctgctaacagaactggaccttttcggtcctcagaatggttggaatgaccctccagctttgaa

SEQ ID NO: 298335 - DNA, 100 bp, Homo sapiens
tccagaagtccagagctgaggactgcctgtttgcaggagaatgaagtttctagattagaagacataatgcagcatttaaaatcaaagaagcgggaagaaa

SEQ ID NO: 298336 - DNA, 100 bp, Homo sapiens
ccctgcccggcttcctcatcgtggccgagatcgtacttcgtactggatttcgaggctggcatcctgcagtattttgtgaatgagcaaagcaaacaccaga

SEQ ID NO: 298337 - DNA, 73 bp, Homo sapiens
ccggtctcaggtccaagatggccatccagaccctgctctcagcggcccacgaggtggagttgcagcggcagaa

SEQ ID NO: 298338 - DNA, 80 bp, Homo sapiens
gagtgaccaggcttgttctggatccctatttattaaagtactctttccattccttaccccagtttttgaagcattaaatg

SEQ ID NO: 298339 - DNA, 75 bp, Homo sapiens
ctgaggaactgaaacccgaggcaggtgacaaggagccctgtgcacatcccaactctcgattttgtgccccggctc

SEQ ID NO: 298340 - DNA, 90 bp, Homo sapiens
atgactgtttggagtgaagaagtagaaattgaaagagaagtgctcttagaaaagaataactgaagtgaagtgatggactccgatttggag

SEQ ID NO: 298341 - DNA, 76 bp, Homo sapiens
ctgagactggatctgatgatgtcacccaccggtctgaagaggaggatgagagacaaagaaaaaagttgtctggctg

SEQ ID NO: 298342 - DNA, 101 bp, Homo sapiens
ggtcgacatgttccaggtcccggatagcgagggcggccgcgccggctccaggctgaccggttccctgatgtgttacctgcttctgctactgatccaaactg

SEQ ID NO: 298343 - DNA, 100 bp, Homo sapiens
gaagagcgacaagccgctggcagccgcggatctcaccgccgctcaggcggtcttgcgagtggctggttccctgcagaagagcacagaagtgatgaaggcc

SEQ ID NO: 298344 - DNA, 75 bp, Homo sapiens
gggaaggtccggggaatcatcgatgagctccagggcaaggcgctcaagaaaaggtgtgagcggtactgggcccag

SEQ ID NO: 298345 - DNA, 80 bp, Homo sapiens
cgacctacccactacaatacctcttgggactgggctcgatttgagtcaccaggagactaaagtccatcaaaaacatccag

SEQ ID NO: 298346 - DNA, 100 bp, Homo sapiens
ggaactgaaatgcgcacagttgctgaaaaggctaatgtaatgcttgaatatgatattgatgaagctcaggcattgttggaaaagaatttatcgactgcca

SEQ ID NO: 298347 - DNA, 90 bp, Homo sapiens
attggcatcaacttggtggagaatagaaggcaaatggtaattggtacgcctcagagaccggcagcgtcaaacaccctggtggtaggaagc

SEQ ID NO: 298348 - DNA, 75 bp, Homo sapiens
aaggacagcctcttctcaatgtgaaagaacttacggtatcggctggagataacctaattataactttacccgaca

SEQ ID NO: 298349 - DNA, 49 bp, Homo sapiens
agccaggtcaccagcaccaagaaaattgcaggtgctgcagtgtctgaaa

SEQ ID NO: 298350 - DNA, 104 bp, Homo sapiens
gagagtccgccgccaacgcgcaggtgctagcggccccttcgccctgcaggaccccgcagggatctttgaattggtggaacttgttggaaatggaacatacgggc

SEQ ID NO: 298351 - DNA, 75 bp, Homo sapiens
cgggtctggagtgcgtgggggaccggctgttggcgggtgcgcgcggagccatggttatcatgtcggagttcagcg

SEQ ID NO: 298352 - DNA, 75 bp, Homo sapiens
gcaatgaccgtgaactgtacagttacctccgtgtgtcacaggaagactcttgagacaaagcttttgttgatttcc

SEQ ID NO: 298353 - DNA, 100 bp, Homo sapiens
ccagctgccatgagcgagcgcctccgtcccaggccaagtcctgtatctgccatgtctgtggcgtccacctcaacaggctgcattcctgcctctactgtgt

SEQ ID NO: 298354 - DNA, 83 bp, Homo sapiens
ccttcgcgtcccctgcaccatgagctggggcaccgagctctggtccacaggtcctggctaccctgggaagagacaagaagtaa

SEQ ID NO: 298355 - DNA, 100 bp, Homo sapiens
gagaaccaaacctgcccaccccaatgaccagtaaatcggcatcagtgtttctgaaagatctatccagcactccgatggccagcaacaacaccgccagcat

SEQ ID NO: 298356 - DNA, 50 bp, Homo sapiens
cctcggacaccttcgagggttgggttgcactgctgtgatccatcctcatc

SEQ ID NO: 298357 - DNA, 123 bp, Homo sapiens
gacagtttcttgtcagaataatatatgatgactccaaaacttatgatttggttgctgctgcaagcaaagtcctcagcccatcaaactccagagaagagagtgaatactggagaagaaaggagg

SEQ ID NO: 298358 - DNA, 84 bp, Homo sapiens
aaaatgtgcagcttccttgagtggcgagatctgaagattgtttacaaaaggtgtatatcatagcacatgttccagtggggtatc

SEQ ID NO: 298359 - DNA, 103 bp, Homo sapiens
ggaggaaggaacgaggcaaggagctaaagcagcgtgcgttcagccctgggagtgcctggtgaagaatgtgatgggatcactagcatgtctgcggagagcggcc

SEQ ID NO: 298360 - DNA, 75 bp, Homo sapiens
ggaacaccaatggaccaaaatgaacacagtcactggggatgttttagaagaatgtatgtctcttcccaagctatc

SEQ ID NO: 298361 - DNA, 75 bp, Homo sapiens
gggtcatgcaggacatcgtgtataagctggtgcctggcttgcaagacacaggttcaggagaagtggcacctggtg

SEQ ID NO: 298362 - DNA, 76 bp, Homo sapiens
cctcctcagtagctgagactacaggccagctaaataaagacatgacctatgcgcagttgtactccttcctgaactg

SEQ ID NO: 298363 - DNA, 97 bp, Homo sapiens
aaattcaacagaacttagcataaatgctgaagcctctactcttcatggatcttttggatgaaagaacactcgtggcagtagaacggcctctggatga

SEQ ID NO: 298364 - DNA, 100 bp, Homo sapiens
atgtcacgaatgcttgaagacagagatttattcgtaatgcgactcaaagctgcacggcagtctgtttatgagttgtagagtataaaattgcggatatggg

SEQ ID NO: 298365 - DNA, 100 bp, Homo sapiens
ccacttccagcccccggcctggccttggctttgaccctgactatgttggccagacttgcatccgcgggaaatctgaaatagagtactatgctatgttggc

SEQ ID NO: 298366 - DNA, 74 bp, Homo sapiens
tgctgatggagaagagtttttgggaggaggcggagctgccggcggagctagaaaatattctctttggaatggga

SEQ ID NO: 298367 - DNA, 100 bp, Homo sapiens
ctgctacccatgatgaggcggtgcaggtcctcaagaagacaggcaaggaggtggtgctggaggacccagacacttttgaaccccaaaaattcttccagac

SEQ ID NO: 298368 - DNA, 100 bp, Homo sapiens
agagcctggcaccaagtggaatattacagggcccactgatgatggtgaagaagagatggaagaagacacagtcacaaacgggtcctgagcagtgaggcag

SEQ ID NO: 298369 - DNA, 98 bp, Homo sapiens
cagagctgagggagcaagaggtgtcggaggtctcatctttgaactactgccggagcttctgccaggatatccgacatgaagccagtgacttcccatgt

SEQ ID NO: 298370 - DNA, 98 bp, Homo sapiens
gtgcacctcagcactatcccaagactgctggcaacagcttcacaggataatgcagctggctgtggttgtatcagaagtacttgagaatggttcctcag

SEQ ID NO: 298371 - DNA, 100 bp, Homo sapiens
tggacctggatgtgagggtgaaggctgtgctgctgggagccacattcctcattgaagaggagcaggacttggatggtgagaaggggccatcatcggaagg

SEQ ID NO: 298372 - DNA, 82 bp, Homo sapiens
gaacccgcctgcgatggggcgagaaaggtcccactgcagccctccaagcagagtgccagctgatgaagacggagcggccccg

SEQ ID NO: 298373 - DNA, 74 bp, Homo sapiens
ccaaaggaaaatctgtggcaaatcaacccccagcatgagaccagatgtaagctctcctccatccagctcctcaa

SEQ ID NO: 298374 - DNA, 82 bp, Homo sapiens
gggatccttcacccgtgtctgaccaaatacacgctgatcgatgagcaggacatcccgctggtggagagctactcctttgagg

SEQ ID NO: 298375 - DNA, 82 bp, Homo sapiens
cgcgcagggcctgcagcgggagctggacggcgagcgcgagcggcgcgagaaaacccctctgccatgaaccagtccatcccag

SEQ ID NO: 298376 - DNA, 75 bp, Homo sapiens
gctttttcccggtgctgagctgtctggctgtgctggcggggatctgatgagcttctttcttctggcatcattaac

SEQ ID NO: 298377 - DNA, 90 bp, Homo sapiens
gttgaaaggatgctctctgctcgtgcctcaaacgcttggattctacagcaacatattggatcactactcttggaatcaaagataaatcca

SEQ ID NO: 298378 - DNA, 98 bp, Homo sapiens
cgccctggcgctggagatcagctcattacccagcatgccacaatctgattgctgacctggatggaacagagtgaaataaatgatttacaaagagatat

SEQ ID NO: 298379 - DNA, 74 bp, Homo sapiens
cgctcccgccgactggcctgagaacgaggtcttgggcgtctttggtactggcttttttaggggtctgcctgggg

SEQ ID NO: 298380 - DNA, 82 bp, Homo sapiens
ccgacatcgacgccgcctggcaggccctgcgcaccaggtttgcctgcaatgagatttcattctctacatttaaaggacatcc

SEQ ID NO: 298381 - DNA, 50 bp, Homo sapiens
caagtgctgcctcccaaaatgctgcagatagcaaggatgaagaagtcaag

SEQ ID NO: 298382 - DNA, 100 bp, Homo sapiens
caaaaggaaatgcatctttatgtcagaaacacaaagcagcccaaccaaaggacaatccatggacacaagggaccaatcactgcagtggcttttgctcctg

SEQ ID NO: 298383 - DNA, 100 bp, Homo sapiens
ctgggatgatacaccttttccacagggaattgagttgtctgcaaaatgaatgttcaccgtcgatgtgagaccaacgtggctcccaactgtggagtggatg

SEQ ID NO: 298384 - DNA, 75 bp, Homo sapiens
gggagggagccgcgcgcctttgtgcgcgcgccgaggccagaacacaaagcgtgaatccggaagaaaagttcaatc

SEQ ID NO: 298385 - DNA, 100 bp, Homo sapiens
ccgcctgagcccagcccccagaaaggattgtgacatatcgttggacccagaattgagttgctgatcttatctgaagcagcagatcagtgggatgagggag

SEQ ID NO: 298386 - DNA, 53 bp, Homo sapiens
tccccgcggacgccacagcgctgtgtctttcctgaagactatcttcccgtctc

SEQ ID NO: 298387 - DNA, 90 bp, Homo sapiens
ctttccagggagggaacaaagcccacagcaccgggtggccgtgagccgcacccaggacacccctgccttcgggccagctctgcctgctgg

SEQ ID NO: 298388 - DNA, 87 bp, Homo sapiens
gatcacatacatacttctctgtggattcccaccattccgaaggttgcagatatcaagaaagtcaacaacttcatcagagaacaagac

SEQ ID NO: 298389 - DNA, 74 bp, Homo sapiens
ttcaaccgggaacagagaatgtttaagattcctcatggtgcaaaatggccattccagctccatccagccatcac

SEQ ID NO: 298390 - DNA, 50 bp, Homo sapiens
agcagatgtgtttcccaggcttttcaaggcattctgtgaaactttagaag

SEQ ID NO: 298391 - DNA, 98 bp, Homo sapiens
gtcgaccccatctcccatgacctgcttgtgaacctggcccgggacctgcagtgccccaagaagatccggcactccacccagagcctctttgagtacat

SEQ ID NO: 298392 - DNA, 75 bp, Homo sapiens
ccgtcggcagcaagaacagagagagaggtggacagatctgagagatactgagaatttgccattttcagtggaaaa

SEQ ID NO: 298393 - DNA, 100 bp, Homo sapiens
atttattaacacctcttgccactcagctgacatatgaaggactcattgatgaaatttatggcattcagaacaattctgaaaaagagttccacgtcctccc

SEQ ID NO: 298394 - DNA, 100 bp, Homo sapiens
cacctggcgcccagcgcgcccgtggccgctgccgcctccgccccagaatgattacggacctgaagccaaagaacaagatgcgctagtggacagattgctg

SEQ ID NO: 298395 - DNA, 83 bp, Homo sapiens
agggagaatgacagaagttaaaaacaaccaaacaaaagccaggttgaggcctctagctcagttcctacccccggttgcgagag

SEQ ID NO: 298396 - DNA, 100 bp, Homo sapiens
ccccctcgtgcagcaacccccacacccagcaccagatcgaggtagacatcttcgagcctcagggaatcagcatgctggatgctgaggcctctttcatcac

SEQ ID NO: 298397 - DNA, 100 bp, Homo sapiens
agcttcccttgcccagcatccctgcctggactggtcctgagattcctgaatcaggtatcttggagatggccgcttccatctggagtctgtcatgattgcc

SEQ ID NO: 298398 - DNA, 100 bp, Homo sapiens
cgggtcacagtgaagcatctcgaagagattgtagagaagctaaaaggagaacttgaaagttcggaccagcttcttggacacttaatgattgttggcaaga

SEQ ID NO: 298399 - DNA, 100 bp, Homo sapiens
ccgtggttgcgggcgcagcgggcagtgtcggaggccagcggggccggaagcggcggcgcagcagcagccgctcttctaaaacattcaaaccaaagaagaa

SEQ ID NO: 298400 - DNA, 100 bp, Homo sapiens
tcttacatgaatttttggagagtgattatgagtaaagaagacgtgtgctgaatctgacttcgtgtgcaacaatggccagtgtgttcccagccgatggaag

SEQ ID NO: 298401 - DNA, 100 bp, Homo sapiens
tagctattgccttattttttctcatggatgttcttcttcgagtatttgtagaagggaacctcgagccggttactcagctgtatgtcagtgtggatgccag

SEQ ID NO: 298402 - DNA, 94 bp, Homo sapiens
gccttcacctacagcatcgtgggcgccggctcccagtttggcgtccagaggaccagaggttaatttattctgggaagctgttgttggatcacca

SEQ ID NO: 298403 - DNA, 75 bp, Homo sapiens
cgcggcgccagttctccggcgggaaggaaaaccgcgcagagagtactatactggcaattgctggagaagattttg

SEQ ID NO: 298404 - DNA, 100 bp, Homo sapiens
attagatattccaagtcagttcagaagtaagcgctctaagaatcaagaaaatggaccagtttgttcgttacgagtgtaatgaacaagtctggggtgaatc

SEQ ID NO: 298405 - DNA, 92 bp, Homo sapiens
ccgaccagtctgggggcgctggcggcctgcgcagccacctcaagatcttcgtgaagactctgactggtaagaccatcaccctcgaggttgag

SEQ ID NO: 298406 - DNA, 95 bp, Homo sapiens
gacctgttgaaaaaaatctgggaggttgaacttattaatgtgtcaacattgcatacttgaatactggcatcggaggacacaaaggccccagtttg

SEQ ID NO: 298407 - DNA, 74 bp, Homo sapiens
ccgaaaatggtttcagcacctgtgtcaggtgttgtggatggagctccatattccatgatttctgacttcccttg

SEQ ID NO: 298408 - DNA, 100 bp, Homo sapiens
gcgccgctgcatcccgcgtccagcacctacgtcccgctgccgtcgccgccgccaccatgcccaagagaaagctacaaaagaccccacagctgtagagaga

SEQ ID NO: 298409 - DNA, 90 bp, Homo sapiens
cgacaaagtagagaggagctgataagaaggggagtgcttaaggaattgcctgatcaagctgtgttccagatcatctccctggtaatttac

SEQ ID NO: 298410 - DNA, 83 bp, Homo sapiens
cagaccgcgcagcgcgggaggcaggttccgcacggtgaaaggtgtagcagtcactcggcctacacccacagcatcgaccttgt

SEQ ID NO: 298411 - DNA, 75 bp, Homo sapiens
aatgagatcaagaaagagaatggagaagtaaagattttgctgaaaactcaaggagaaattgaagccatagtcgtg

SEQ ID NO: 298412 - DNA, 90 bp, Homo sapiens
agccatagtatcattgggcctttctttttatcagcctccagaaggggataatgcacagtgtggaaggagaacaccatgagaaagctgtgg

SEQ ID NO: 298413 - DNA, 75 bp, Homo sapiens
tgagatgtttgacaaggatgtagtaatgcttcagatgagcaccatgccaggactgcccacccggccctgctttta

SEQ ID NO: 298414 - DNA, 125 bp, Homo sapiens
gttatttaatggaccttataaattttttgagaagcatctttcaagtgtttactcatttgcctagtcgggatataagcccagaagagatagatttaaagaatgaaccttggtataaattcttttcg

SEQ ID NO: 298415 - DNA, 96 bp, Homo sapiens
tggtgtggacatctgctgccggaaggggtcccgaagccccctgcaggaactctacaacccaatccagagtgttgttcgctgcctgtggcatccaaa

SEQ ID NO: 298416 - DNA, 75 bp, Homo sapiens
gagacctcctgagggaacagcactgcaaagagagaaaggtctggacatctatctcatcattggcatatgtggagg

SEQ ID NO: 298417 - DNA, 51 bp, Homo sapiens
gatgtcgtgcgtcaagttatggttttgggatttgagattgacgcggtgaac

SEQ ID NO: 298418 - DNA, 75 bp, Homo sapiens
cagtatctcacctccctaaactggttaatagtggcatggaagatccatttgaacatgccgagtttttgcactgca

SEQ ID NO: 298419 - DNA, 101 bp, Homo sapiens
accgagagcgcgaatatcgtcatcgttagaaggaggaggttccaagatacccaaataggaacagctccagtctgcagctcccagcatgagcaacacagaag

SEQ ID NO: 298420 - DNA, 75 bp, Homo sapiens
gcgggctgctgctccagagggcggagaaaggtggtggcgccctcctgcactcagtcaaggccaagacccaaccag

SEQ ID NO: 298421 - DNA, 100 bp, Homo sapiens
tgctgcagagggagaaggacaggcagtgtcgtggcctggagctcattgcctcagagctccccttccaccccccggggaactgaagattgtcctggccgcg

SEQ ID NO: 298422 - DNA, 75 bp, Homo sapiens
gtttggtctcctgccgtgcccgggcatccgcttcgatcctgaaattccgcaaacactacgactagagtttgctaa

SEQ ID NO: 298423 - DNA, 82 bp, Homo sapiens
gcaagttggacagacgggaaaaatagtagcaccattcctctgtgacgagggtgcaggtatctctggggactacatcgatcgc

SEQ ID NO: 298424 - DNA, 99 bp, Homo sapiens
gtaaagcagctttcagaaatagtgattgaaaatcttcaagagcagcttagagacaaggaaaagcagatgagcagcttgaaagaacgggtcaaatccttg

SEQ ID NO: 298425 - DNA, 100 bp, Homo sapiens
ggatggcccccggtgcaagaggcgcaaacaagccaatcccaggaggaaaaacggaaacatgccctgaactgtcacagaatgaaaccagcgctcttcagcg

SEQ ID NO: 298426 - DNA, 82 bp, Homo sapiens
caccgggacacccgcgaggccggaaaatggcctccccatggccacccatggaccagtcggcattcacttcctcccttctgcg

SEQ ID NO: 298427 - DNA, 101 bp, Homo sapiens
attgtggacagcccaagaaaggacatcttatctttgatgcttgctttgaaagtgggacaggagagagtggcaagagtacgtttatcaagcagatgagaatc

SEQ ID NO: 298428 - DNA, 83 bp, Homo sapiens
ggtgggctggttcggacgtgggtcgaggctgtagcaggactccagggtcctaaaaaggtggggacgctgtggcgagaagccgg

SEQ ID NO: 298429 - DNA, 75 bp, Homo sapiens
gtgggatcccttcaagatgcgctagaagaaaactatgtgcaagctgtggaggagttccagtcctgccttaacctg

SEQ ID NO: 298430 - DNA, 96 bp, Homo sapiens
tggctgtgtccgagcccgaggccagcgccgcgggtgcaacaccggaggatttcagcaacctcccacctgaacaaagaaggaaaaagctgcagcaga

SEQ ID NO: 298431 - DNA, 75 bp, Homo sapiens
gtgagttcaacatgatagagcagagtggaccaccccatgaacctcggacactgtctcagtgcatcgcccaggctt

SEQ ID NO: 298432 - DNA, 100 bp, Homo sapiens
cgcgaatatcgtcatcgttagaagctcgcagacctctgaagagagtgccattgagacgggttccagcagttccaccttcatcaagagagaggacgagacc

SEQ ID NO: 298433 - DNA, 100 bp, Homo sapiens
ttttgggagccaggaaatcatgactgagaaagatatggaattatttcgtgatatccaagaacaagcactgcaggcattcaaaagtgcggcagaagagtga

SEQ ID NO: 298434 - DNA, 73 bp, Homo sapiens
gatgtcacaggatctcttgaaggctcacgacttatttagatgtacagcggtgcctggaatatttgggctatct

SEQ ID NO: 298435 - DNA, 50 bp, Homo sapiens
cccggacatccgcgccacactcccgaaccgacagccacaagtggcgcccg

SEQ ID NO: 298436 - DNA, 97 bp, Homo sapiens
ccaggaagtggcatggaaaatggaagagatgaagaggagaatttcttcaagcgtcttggtggtggtatcatggatacagaaatgtctgaagatatag

SEQ ID NO: 298437 - DNA, 100 bp, Homo sapiens
gtgcccgggcctgcaccatgagcgtcccggccttcatcgacatcagtgaagaagatcagttgtcacaggtagtactgatggaattggaaaatcatatgca

SEQ ID NO: 298438 - DNA, 100 bp, Homo sapiens
catctgggggccacaaatgctccttctcctggagacgcaactcaagttggagtgcctcaagcttattgcctctcaaaaatttacagacaaacgcattggc

SEQ ID NO: 298439 - DNA, 96 bp, Homo sapiens
gttgaaagatctaaaggagctgtcagatggagaaataaaagtggccattagtactgtgagcatgaaccttgaggctcatgcacaattagttcgaga

SEQ ID NO: 298440 - DNA, 75 bp, Homo sapiens
taaagaaaaaccacagcatcattctttctgcaccaaacccggaaggaatttggtgccctggttgtcagatgttgg

SEQ ID NO: 298441 - DNA, 50 bp, Homo sapiens
tacgtctagaagccaaaagcaagcttatgtccctgatgccaaaaatgcac

SEQ ID NO: 298442 - DNA, 73 bp, Homo sapiens
ggcggcgtgtcaggtggttgcggagctggtgctggagaatctggtaaaagcaccattgtgaagcagatgagga

SEQ ID NO: 298443 - DNA, 100 bp, Homo sapiens
agcactgtggacactctttgtcatctcaatggctggggaaggtgctcaattcccatacatgcactagaggcatcctctggtatcacgattccaaaacccc

SEQ ID NO: 298444 - DNA, 83 bp, Homo sapiens
ccactgccctttgggactctgggagtacacaagggacaggcattagagcccaaacaggatgctttccaaggccaagaagcagc

SEQ ID NO: 298445 - DNA, 82 bp, Homo sapiens
ccccggcgccgccgtggctcgacggagaccagctagggctgaccccgcactacatctacccaccagccatcgtgcagcccag

SEQ ID NO: 298446 - DNA, 83 bp, Homo sapiens
acggtacggccagcgagcccagcgagaaggccaagccctgggcgctgcctatggcacagccaagagcggtaccggcattgcgg

SEQ ID NO: 298447 - DNA, 120 bp, Homo sapiens
tgaaaaccgaagaagaggcccggactcatacagagattgaaatgttccttagaaaggagcagcaggccatttcataattctgaatcatgtctgataacggagaactggaagataagcctc

SEQ ID NO: 298448 - DNA, 100 bp, Homo sapiens
ggcgaagctggccgagcaggctgagcgatacgacgtttctcttcagcaacgggtagcagaattggaaaaaattaatgcagaatttttacgtgcacaacag

SEQ ID NO: 298449 - DNA, 75 bp, Homo sapiens
ggcggaggaggggagtggcaggtgatcctcacaggcagaagtcaattcatctggaaagactatctctgagtcaga

SEQ ID NO: 298450 - DNA, 97 bp, Homo sapiens
aggacagaaatgaccaacagataactgaggacaatggacctgcctgggcatagacttccttaagatattgatttgccaaatgaacaagcaagattag

SEQ ID NO: 298451 - DNA, 115 bp, Homo sapiens
tccccgccaaccgcaaccattgacgccatgtcgggttattcgagtgaccgagaccgcggccgggaccgagggaatcatattgacaggtcatgaaaatgagaccaaaagatctctg

SEQ ID NO: 298452 - DNA, 82 bp, Homo sapiens
ccaaggccatctccaagaacgtgctcttcgctcacctggatgacaacgagaggagatgccatggacaatattaccaggcaga

SEQ ID NO: 298453 - DNA, 75 bp, Homo sapiens
cccatgctcacatcagtgaacaagctgtctgggctctaggaaacattgcagggaggagtctgctactagtcttat

SEQ ID NO: 298454 - DNA, 97 bp, Homo sapiens
ctttagtgcactcttctccttcacagtaaagtggctgtggaaagaggcaaaacctgatgaattaatggattccaaattgagatgcgtatttgaaatg

SEQ ID NO: 298455 - DNA, 100 bp, Homo sapiens
tgaacatgaagaccagcacagcctagatttgggtggatcatccatgccatggagtatgaacttcagatccgtggcggagacaagccagccttggacttgt

SEQ ID NO: 298456 - DNA, 82 bp, Homo sapiens
gaaggattcaccacctccaggaaaagaggttggaaagaaccatgactgtattcaggaaggcacatgaactgaagcttctgtc

SEQ ID NO: 298457 - DNA, 76 bp, Homo sapiens
gatttggtggtcagcttgcctgaggagacagtgggagtagctcaccgttacccaagtatgcttcatctcccaaacc

SEQ ID NO: 298458 - DNA, 95 bp, Homo sapiens
tatgctcaatccagctaatgtccccacccatctgctgctcatgtgttgtgtactccgggattaatgaaaatcaagttccatcctcagacaagagg

SEQ ID NO: 298459 - DNA, 51 bp, Homo sapiens
atccgtctcaagactgtgaaaccagtactgtaagattgatgttaaaggcat

SEQ ID NO: 298460 - DNA, 90 bp, Homo sapiens
gcaatattactcactgtcatgatgtctatcttcggtgtttcaattggcattctggatacaggcatccgtgtcattctggaccttactccc

SEQ ID NO: 298461 - DNA, 100 bp, Homo sapiens
tgtggtccacaagaggtgccatgaatttgttactttttcttgtccgggtgcggataagggacccgacactgatgtgttctgggactcagtgttagaagct

SEQ ID NO: 298462 - DNA, 74 bp, Homo sapiens
cctcaatttaagcctgatctaacccctagaaacagatggatgccaattcaaaagacaagccccctgaaaccaag

SEQ ID NO: 298463 - DNA, 50 bp, Homo sapiens
cgcagccatcggtgcgctgcaggtggaagtttagctgatgctataagtga

SEQ ID NO: 298464 - DNA, 83 bp, Homo sapiens
agatggcaggtgggggcggcgacctgagcaccaggcccgacaacaagctcaaatacgtcaccaaatggcagaggacagcaaag

SEQ ID NO: 298465 - DNA, 75 bp, Homo sapiens
ggcaccaaggacctccaagacagatgtgaagttcatttccaatccgccctccatggtggcagcggggagcgtggt

SEQ ID NO: 298466 - DNA, 100 bp, Homo sapiens
tttacgcgcacgttggaaccgaagagagctctgttgttgcaaactgataaatttcaaacggaagagagtggcagcatttagaaagaatctaattgaaatg

SEQ ID NO: 298467 - DNA, 49 bp, Homo sapiens
gcctgcggagcctgtggggcaggtttccacttgagcggcacagtgacag

SEQ ID NO: 298468 - DNA, 90 bp, Homo sapiens
atctgggatgtggcggattatgtgataccagctcagagaatggatcttggagaatgtctgaaagtccatgacctggctttaagagcggat

SEQ ID NO: 298469 - DNA, 101 bp, Homo sapiens
tttccagcagcaaaggtttgacaggtatgattatcgggaaatgctgcacaatgccactttctgtctggttcctcgtggtcgcaggcttgggtccttcagat

SEQ ID NO: 298470 - DNA, 100 bp, Homo sapiens
cctcaagctgctgcaccgcggcgccgacatcaattacgccaatgtggacggactcactgccctgcaccagtctgctccatctggacacaagcatctgacg

SEQ ID NO: 298471 - DNA, 75 bp, Homo sapiens
aagactcgaacgccaacaaaagaaaaagcgtttattagaaatgaagactggaattacatgaacgacagccttcgc

SEQ ID NO: 298472 - DNA, 75 bp, Homo sapiens
cgaccacagccaaagcgggcattcatgatgttgctatcaaaagttgagaaattgtcagaagaaatcatggagata

SEQ ID NO: 298473 - DNA, 75 bp, Homo sapiens
ctgaacagttcgagattgtcgtcatcctagaaggcattgtggaaacaactgatgctggctcgtgatttcttagat

SEQ ID NO: 298474 - DNA, 80 bp, Homo sapiens
gtcccacttgttcgcggcctataggcggctatgagaggttttcctccgagtacccagaattctgttctaaaaccaaggcc

SEQ ID NO: 298475 - DNA, 100 bp, Homo sapiens
cgatggggaagggccgaagccccgccagcccagctaaagcagacggctcgcactgcgacccgaagacaatgcagatcttcgtgaagactctgactggtaa

SEQ ID NO: 298476 - DNA, 120 bp, Homo sapiens
ttcgtcaccccgctcctgctgctgccactcgtcattctgatgcccgccaagtcagaaccttcaggaaggggagagtggctcatgggctgagtggataaaccacaaaatgggtaatatact

SEQ ID NO: 298477 - DNA, 51 bp, Homo sapiens
tggtgctgaaggacaaattccaggaacccatggatacagatcaaggtaata

SEQ ID NO: 298478 - DNA, 75 bp, Homo sapiens
gttttcacttatctcgaaagcctatcagcatagttaagataaactcaagccatggagggattactgcattacatc

SEQ ID NO: 298479 - DNA, 75 bp, Homo sapiens
gtcccatttcgcccctcgcgtccggagtccccgtggccagacctgcctagagctggaacgttacctccagagcga

SEQ ID NO: 298480 - DNA, 98 bp, Homo sapiens
tgaaagtttgatgattacccccttcttgcctgttgtagcatttggacgaccattaccaaaattaactccacattatagggatggcccaggtaatcctc

SEQ ID NO: 298481 - DNA, 100 bp, Homo sapiens
ggtctggccgtcggctgcggcgccatcgaaatgcattcgatttaacccggatgccacagtgtgggttgcaaagcagcggatcctgtgtacattaacccag

SEQ ID NO: 298482 - DNA, 75 bp, Homo sapiens
aatgagagaaccgaggaacgaagaaacagacattcaacatgattgcatttgaaagcagaaagaccatgggtttga

SEQ ID NO: 298483 - DNA, 100 bp, Homo sapiens
agacaatctcatccgaaaccacacaggatccctggctgtagcgaacaacaacccaaccattactgaaagagctatctggtcacaaaaatattgtgggcta

SEQ ID NO: 298484 - DNA, 100 bp, Homo sapiens
acacagctttcctcttcctctccaaaccacctcgaagcagggttatcaatactctggctgaccatcatcatcgtgggactgactttggtggaagtccttg

SEQ ID NO: 298485 - DNA, 90 bp, Homo sapiens
tggaaacaaaacctacacagcttacgtggacctggaaaaggactttgctgctgagggttccaaaaggtcccaggtgtcctctccgtgcag

SEQ ID NO: 298486 - DNA, 100 bp, Homo sapiens
cgccattgtcggctactgcgacgccaaatacgtctgggcagccacggccgggggcgtctttcagagcattacggtgaaaggtgtagcagtcactcggcct

SEQ ID NO: 298487 - DNA, 99 bp, Homo sapiens
agagcagaggcggcggctggaggaggaagttggtgaaccatctaaagaagagaaggctgtggccaagtatcttcgattcaactgtccaacaaagtccac

SEQ ID NO: 298488 - DNA, 75 bp, Homo sapiens
ccgccgccaagagtgagcgagcggacccgcgatggtggattgtattacacagagcatgaatatacttctttaggt

SEQ ID NO: 298489 - DNA, 50 bp, Homo sapiens
gacctcctggaagccaaaaatggttggatggcaagcatgtggtgtttggc

SEQ ID NO: 298490 - DNA, 100 bp, Homo sapiens
ctctgccgagtctcaatatctgtcttcggtggactccttcggcagtccacccaccgccgccgcctcccagctcccggagccctgcctgttccctgtccat

SEQ ID NO: 298491 - DNA, 75 bp, Homo sapiens
ggcaggaggccgagcaacttaagaaccagattcgacttggtgttgtggttgccccacatacattaaagttaccag

SEQ ID NO: 298492 - DNA, 75 bp, Homo sapiens
gccgtgagaaaggatttcagatgcagtggtttgtttacgaacctatgagaaccccaaagacattaaagattgctg

SEQ ID NO: 298493 - DNA, 82 bp, Homo sapiens
ggagacacagtgtcagaattacaagatgtctgtgatcatgatctgcatgtttctggtggcatggtccccttattccatcgtg

SEQ ID NO: 298494 - DNA, 83 bp, Homo sapiens
aagcgggagttcaaggaggtgctgaagagcgaggaggaaatccaggagctgcaggctcagattcaggaacagcatgtccaaat

SEQ ID NO: 298495 - DNA, 97 bp, Homo sapiens
ggggagagaataaaactccagcgagatccgggccgtgaacgaaagcagtgacggaggagcttgtaccaccggtgctcctgacctctgataaagctgc

SEQ ID NO: 298496 - DNA, 100 bp, Homo sapiens
cttccttgaagaaatacagcttggtgaagagttactagctcaagggcggcgactggcggcgcgatggacctgaccgggctcctgctggacgaagaaggca

SEQ ID NO: 298497 - DNA, 83 bp, Homo sapiens
cttcaggaatcttcacccctaacttgaacttcataacactggagagccatcactggtgcaagctatatttaacggagatcctg

SEQ ID NO: 298498 - DNA, 82 bp, Homo sapiens
atgaagtatttgtggaggcagaatctgaagggtatttcagaccgaacaaaagaatcttttcaggctggaaatggacatggta

SEQ ID NO: 298499 - DNA, 100 bp, Homo sapiens
cccacccgctccgcgccgagggctggaggatgcgttccctggggtccggcatggtgcctgtgtaaatgcaatggacttgtggcaattcactcctcttcat

SEQ ID NO: 298500 - DNA, 80 bp, Homo sapiens
atggcttggagcacttcctattccactggattgggaaagaccatggcaggtgcatctgcagcttctatgttgatttttat

SEQ ID NO: 298501 - DNA, 100 bp, Homo sapiens
ttccatccgtctcagcgaaccccttttgaagttgaggccaagaaaggatcttgtagagactcaaggcacaggagggaagaaagtcattcagactgatgag

SEQ ID NO: 298502 - DNA, 83 bp, Homo sapiens
ctccaatgggaataccaagggatgtcatgtggcctgtgttttggaccgtggttcgtacctatgctccttatgtcacattccct

SEQ ID NO: 298503 - DNA, 74 bp, Homo sapiens
aacactattcacaaagattgcctgcagtttattgcactattcctgatcagagaactccagttgcttcaacacac

SEQ ID NO: 298504 - DNA, 82 bp, Homo sapiens
acttcatcatctgcctggggggagacgggacgctgctgtacgcttcctcgcttttccagaagtggtccaaaggcaaagttcg

SEQ ID NO: 298505 - DNA, 75 bp, Homo sapiens
atggtcttttaccagatgacaagcttacattattttgtgagacatcaactagtcaggcagtcttccgtctccagt

SEQ ID NO: 298506 - DNA, 82 bp, Homo sapiens
tatactcctcccagtgacgggtctggagtgcgtgggggaccggctgttggcggagacctgtcggccatggagcctaatgata

SEQ ID NO: 298507 - DNA, 100 bp, Homo sapiens
gatgtggatgatgccaaagttttattagatgtcatcgcaacagataaagaagacgttgccttcaaagacctggatgtggccattcttgtgggctccatgc

SEQ ID NO: 298508 - DNA, 97 bp, Homo sapiens
cggggcgccggcgccgccgcccccgggctcgcggcctgcagatcttatgccttcattcatccggcatggtccaacaattccaagacgaactgatatc

SEQ ID NO: 298509 - DNA, 74 bp, Homo sapiens
gaagtgatgctggaaaatctcaggaatctggtctcattggctagaacaacagaggcagcagttgcttactgaac

SEQ ID NO: 298510 - DNA, 115 bp, Homo sapiens
tgcgaggctcggagaaacaggcgccgcgggctccgcgcccggccggacccgggcccgagacaatgcagatcttcgtgaagactctgactggtaagaccatcaccctcgaggttga

SEQ ID NO: 298511 - DNA, 82 bp, Homo sapiens
ccatggccgccgccgatgccgagacctgtgttgcgtggtgggtctgctgccgccacttctaatcctcatcatgacaacgtca

SEQ ID NO: 298512 - DNA, 51 bp, Homo sapiens
gtgcaagaagtatgctgaactggccaggacgactggaatgggaccaggccg

SEQ ID NO: 298513 - DNA, 75 bp, Homo sapiens
cttacagacgctgccagcatcgccgccgccaggaaaactttattctcaagagatttctcattccgcagaaataag

SEQ ID NO: 298514 - DNA, 98 bp, Homo sapiens
cggcgacctgaggggagagggaacgcagctgaaagcgtgaactgacatggatttgattgacatactttggaggcaagatatagatcttggagtaagtc

SEQ ID NO: 298515 - DNA, 88 bp, Homo sapiens
aggaggtggcccaggtgcccgccgtcgtcagcggggccgcttgatgcgacgcctgactcacactatcttctcactgctgggagtggac

SEQ ID NO: 298516 - DNA, 87 bp, Homo sapiens
ccgcgatcgtggggcccgcgaggcgggcagccggggcgtccaggccatcgatgatgactgtaaccagacagggcagatgacagctgg

SEQ ID NO: 298517 - DNA, 83 bp, Homo sapiens
tcctggtcatcttctatttccaaatgtactaatggtcacttgatgtgcgctggctgttttatccacctactagcagatgcccg

SEQ ID NO: 298518 - DNA, 100 bp, Homo sapiens
agacgccctggtgctcaccaagcaaggtcgcctgcgaggccgctggccaggcctgagcctctgccaccatggccattgtgcagactctgccagtgccact

SEQ ID NO: 298519 - DNA, 100 bp, Homo sapiens
tcgtgtgcctgatgatcacgcagctggctggcttcagtggaccatatcgatcaggatgggatcctcatagaggggcagataatgtttctactaaatcttc

SEQ ID NO: 298520 - DNA, 98 bp, Homo sapiens
ctcgctccgtggccttagctgtgctcgcgctactctctctttctggcctggaggctatccagcgggtcatgtctgcgtacgccatgtgtgtccgctat

SEQ ID NO: 298521 - DNA, 101 bp, Homo sapiens
attcattggacccctggaaaccatgcatctcaatgcagaaggtagggtgcagcctgaggcttgttcagcagaacaggtgcaagccacattgttgccaagac

SEQ ID NO: 298522 - DNA, 98 bp, Homo sapiens
ttgtggtcactgatgagtggaccaagtgaaggctggaggagattgatggattctttgcgagaaataacgaagagtacctggctctgatctttgaaaag

SEQ ID NO: 298523 - DNA, 49 bp, Homo sapiens
gaggatgatgtttttggtgaagggaagccgtggcggacggagcagacgg

SEQ ID NO: 298524 - DNA, 50 bp, Homo sapiens
ttgcttcagagtaatccatatgtaaagaatcaggaaacccaggcccaacg

SEQ ID NO: 298525 - DNA, 100 bp, Homo sapiens
ctcaggagagagcagccagagtggatccaaactactggatacaggtgcatcgcttggaacatggagatggaggaatactagaccttgatgacattctttg

SEQ ID NO: 298526 - DNA, 75 bp, Homo sapiens
tcagagttgctcatggaggtgcacggaaatgggaagaggcccagtccagagagactaagaaaaatggctttgtca

SEQ ID NO: 298527 - DNA, 88 bp, Homo sapiens
ccctaaacacctcaacgatgacgtggtcaaggttattctggtacaagttaacccaggagaagcatttacaataagaagagaagatgga

SEQ ID NO: 298528 - DNA, 100 bp, Homo sapiens
ggcaggggtcgagcaggtgccatcaggcacatgaacggtggagtcttcaaaggtgtcttggctgggcatgacaaccgcgtcagctgcctgggcgtgactg

SEQ ID NO: 298529 - DNA, 100 bp, Homo sapiens
cagcagatggcggatgccctgcagtacctgcagaaggtctctggagacatcttcagcagttatgtgtctcggtaccacgtgaaagactcctcacgccacg

SEQ ID NO: 298530 - DNA, 75 bp, Homo sapiens
gctcccccggctgtgagaaagtgccaataaatacatcatgcaaccccacggtgaacagtggtatagcagccactc

SEQ ID NO: 298531 - DNA, 100 bp, Homo sapiens
atcttgacgaggctgcggtgtctgctgctattctccgagcttcgcaatggctgccgcgggcggacacgccagaggaggaggccggggaatggccgcggtg

SEQ ID NO: 298532 - DNA, 101 bp, Homo sapiens
cttcagaccgtggacaatgtgctctttgcccctattatggagaaaggtgttccctaggttgcagctggaagctggatggacagatgcaaattttggaattt

SEQ ID NO: 298533 - DNA, 90 bp, Homo sapiens
gcggtacctgcactccaaaggtgtatttcaccgcgacctcacatccaagatgctccagaaaacctagatgagcagattaagaaagtgtcc

SEQ ID NO: 298534 - DNA, 82 bp, Homo sapiens
ctggaacagaatcaacccagaacggatagctccctcctggaaaagtccagttacaacacagggatcacaacaaacacaaccg

SEQ ID NO: 298535 - DNA, 101 bp, Homo sapiens
attcaccttgaagaggaagacggggcggaagaccaagatcatcgagatgcaacagaagaaccttgaaggctatgtgggatttgccaatctcccaaatcaag

SEQ ID NO: 298536 - DNA, 98 bp, Homo sapiens
cacgccgcccagcccggccccgcccgcgccggaagagccacgccgggcgccctgcgtccggcagaggaggcgagcatcccgctcaggtgatgaggaac

SEQ ID NO: 298537 - DNA, 100 bp, Homo sapiens
catgcccaacttctctggcaactggaaaatcatccgatcggaaaacttcgaggaattgctcaaagtgctggattcaagtcaatctgaaagtcccagccag

SEQ ID NO: 298538 - DNA, 90 bp, Homo sapiens
tggacaaaccaaatgaccaatcttcaagatggtcttcagagagcaactatcctccccaggatttacttcatttgggtcactaggtcacgg

SEQ ID NO: 298539 - DNA, 83 bp, Homo sapiens
atctgggggagcgcgggagccctggaggggaaggtctcggcgcggaagatggccggcggcgtggacggccccatcgggatccc

SEQ ID NO: 298540 - DNA, 100 bp, Homo sapiens
gttctcaaggcggattaattagcccaagaaacattatattcatgaaactttgagggaaattttgagtcactggaccttgcggaatttgctaagaagcagc

SEQ ID NO: 298541 - DNA, 90 bp, Homo sapiens
ctccgctggagcgactctgggattcagacaccgcaagctgctttcggaagggcttcaggaggggatgtatcctccactcctcgctggcca

SEQ ID NO: 298542 - DNA, 130 bp, Homo sapiens
cacggggcaacaacctcaccgtgcaccttcgcaagaagcaccagttcaagtggccctcagggcatccccgttttcggctggatctccagaactgttctctggaggaccctggtccaaactttcatcaggc

SEQ ID NO: 298543 - DNA, 82 bp, Homo sapiens
gaagcagccgatccagcctgcggagcctgtggggcaggtgtctgtgacctttgaggatgtggctgtgacattcacccaggag

SEQ ID NO: 298544 - DNA, 75 bp, Homo sapiens
cccagccagcgggcagccagtctggacacgagaggccctgtttgtgctcttcgtcctggcctacatccacatcgt

SEQ ID NO: 298545 - DNA, 100 bp, Homo sapiens
ggtgcgcttccggatcgggggcaagcggaaggtgatgcccaagatggaccagaacactctgctccagccaaggtggtgagggcagctgttcctaaacagc

SEQ ID NO: 298546 - DNA, 100 bp, Homo sapiens
aaaccggaagggcctgatagccgccatctgtgcaggttttaaaatcaaagatgggaaaatcggagaaaattgcccttccccatggccagcttgttcatgg

SEQ ID NO: 298547 - DNA, 83 bp, Homo sapiens
cgcccgggaggaaggaacgaggcaaggagctaaagcagcgtgcgttcagccctgggttaccagatgtatgctactcatggtgg

SEQ ID NO: 298548 - DNA, 98 bp, Homo sapiens
ttcggagtacctgcgctatgaagacacgcttcttctggaagaccagccaacagactcgagttgccgcgtcgggctgggcgcgccgccgggtcccatgg

SEQ ID NO: 298549 - DNA, 75 bp, Homo sapiens
gaggagaggcgcccccgccggccgccgcgccgcccggcagcctcggcaggtcactacaggaaaagatatcttcat

SEQ ID NO: 298550 - DNA, 50 bp, Homo sapiens
agaataccttgtctcagctgctgaagctgtggacttggttacttatataa

SEQ ID NO: 298551 - DNA, 49 bp, Homo sapiens
aagtggacaaagagaggagtcagatgtccggtctgtgctacgacagcaa

SEQ ID NO: 298552 - DNA, 90 bp, Homo sapiens
tgactactgaggattctgtggcagtgcccagattatcttagaagacctaggactccaaaaatgtttcccctgaaggacgctgaaatggga

SEQ ID NO: 298553 - DNA, 75 bp, Homo sapiens
ttgggacgagtgctgtgactgtgttgatcaatgaactgagccatgttcaaatccctgttatgttgatgccagatg

SEQ ID NO: 298554 - DNA, 90 bp, Homo sapiens
atcaatctgaactacaaagatttgaacgacagtcattttgtttactcattcagccctgttgcaggtcccaataaactcttcataaggttg

SEQ ID NO: 298555 - DNA, 75 bp, Homo sapiens
tggtgtcaacgtgaatgctgctgatagtgatggatggtccacaaaaggtggctccgattcctccctttctgagcc

SEQ ID NO: 298556 - DNA, 75 bp, Homo sapiens
cgcaagcatgctcagaccttcattgctctgtgtgccaccgacgccaaattccagcgaaacagctgatgccagcca

SEQ ID NO: 298557 - DNA, 75 bp, Homo sapiens
gcatgagatccaaaggcagggcaaggaaactggccacaagattgacttctaaggactcttggtacatgaggaaga

SEQ ID NO: 298558 - DNA, 75 bp, Homo sapiens
ggaggacggagccctaaccgcaacccgcgccgcgccgcgccgcgccggtgtcgtgaaaactacccctaaaagcca

SEQ ID NO: 298559 - DNA, 51 bp, Homo sapiens
ctgagaactaccgccgctccgcagccacaaaaatggctacaaacttcctag

SEQ ID NO: 298560 - DNA, 100 bp, Homo sapiens
cctcagcccccgcaaggatggcctttcctaccagatgtcagtattgaatatggtggtgaggcgtgaccctggcaacactgaacctgtgaaagccaaggaa

SEQ ID NO: 298561 - DNA, 89 bp, Homo sapiens
gtggatgtggtgtttgccaaccgcccggaccccaacaccccgatggaaggaatgggtaccacagaccatgtcatcgtcctggcgtccac

SEQ ID NO: 298562 - DNA, 75 bp, Homo sapiens
cagcgactttggggcccgtcaccctcagggccaatgcaggaaaccatctatgacttctggaggatggtgtggcac

SEQ ID NO: 298563 - DNA, 82 bp, Homo sapiens
caccatcaagttcttcaggaatggagacacggcttcccccaaggaatatacagggtgcagtgtctgggtcagtgcaagcttc

SEQ ID NO: 298564 - DNA, 76 bp, Homo sapiens
aaaagggcaggaccagcaccctcttctacggaggaaggaacgggcacagcaggaggttctgggggaagagaagctg

SEQ ID NO: 298565 - DNA, 73 bp, Homo sapiens
gcagatcagggaccggctgctgcaggccatcgacccccagagcaacgtgaaatgacaatggatgctctgttgg

SEQ ID NO: 298566 - DNA, 107 bp, Homo sapiens
ccacctacagaaacaaaatgtcaacaaattgatggattttgtggaagtataatactttgtcattatgagatgtcgtctctcggtgcctcctttgtgcaaattaaatt

SEQ ID NO: 298567 - DNA, 83 bp, Homo sapiens
caagctcgctatggagaattacgttttaattgactatgacaccaaaagttttccaagagataacttcaccaagatgtccagtg

SEQ ID NO: 298568 - DNA, 51 bp, Homo sapiens
ccgtccagcccagcgattctcagtcagaaactccccaacttttaaatcatt

SEQ ID NO: 298569 - DNA, 75 bp, Homo sapiens
gaaagtttcatctgtggatggagtattggaatcagagatcattgatttcttcctgggggcctctctcaaggatga

SEQ ID NO: 298570 - DNA, 90 bp, Homo sapiens
gcgaaatgcaggcgaaatgtggaaaatttcctagaagcttgcagaaaaattggtgtacctcaggaaatgctggggctctctaaagtacca

SEQ ID NO: 298571 - DNA, 100 bp, Homo sapiens
ttccagttggaattgaagaatattcccaagtccttcacccgggcggcttacagggagaacacagttggcctccaccgtttctgccccacagaaaacgtag

SEQ ID NO: 298572 - DNA, 100 bp, Homo sapiens
aaatcccaaagattgatgtctacctctatgaggtagatattaaaccagacaagtgtcctaggagagtgaacaggttgatctcctatcaagagtttttggc

SEQ ID NO: 298573 - DNA, 114 bp, Homo sapiens
ttcaagggagctgataaagaacttcttcccaaaatggttcctggtccagaactttacacagaaaaggtgctcaaaggatatttgtttaatgaatgtggtatgctgacatttaaa

SEQ ID NO: 298574 - DNA, 90 bp, Homo sapiens
aatagctcaaggaaacctttccaacacagatgtccaagctgccaagtccaacgagcgctcctccaagcggagccttggagggcacggccg

SEQ ID NO: 298575 - DNA, 90 bp, Homo sapiens
actgcaagcattctgtggtctgcccggccagctctcgcttctgcaagaccacgaacacagatgactctggggacgacgacgaggctacca

SEQ ID NO: 298576 - DNA, 90 bp, Homo sapiens
cagaaatctggaaacatgatacaatctgcaaatgatgacacccccaaccatggttgtgaagatgctagcgacacatcgctgttgggagtt

SEQ ID NO: 298577 - DNA, 75 bp, Homo sapiens
tggcaagcggtcctgcagacacaggcaagaaatgggaaattgccaagcccctgaaacacaagcaagtagatgaag

SEQ ID NO: 298578 - DNA, 97 bp, Homo sapiens
gaccggatcccaggccccgtttgcaagtacgctgggagcggactcttggagctattgtaagacaaaagaatcacccaatgactcctgaggcagtcaa

SEQ ID NO: 298579 - DNA, 96 bp, Homo sapiens
tgcagatttgtggtgcgttctgagccgtctgtcctgcgccaaggctgatatccccaataggtttgaaatgaaacttcacagaaataacatatttga

SEQ ID NO: 298580 - DNA, 100 bp, Homo sapiens
tttttggttgcagttttaagcacagagaacatccagtcatggataaaaatgagctggttcagaaggccaaactggccgagcaggctgagcgatatgatga

SEQ ID NO: 298581 - DNA, 109 bp, Homo sapiens
acaaagagcagaagataatgaagctaaatggaaaagagaaatatatggtcgaggtcttccagaaagaatctgtcactgcgaaggggatgaagagagccccctcatcaca

SEQ ID NO: 298582 - DNA, 100 bp, Homo sapiens
gggtgccggtgctcttcatcaccttcgtggtcgtctggtcctactacgcgtacgtggtggagctctgcgtgtacctgaaagatgtctgaaaattccagtg

SEQ ID NO: 298583 - DNA, 97 bp, Homo sapiens
tcgtgctattcctggtctacatcctgcgggtgcctttgaaaatcaacgacaacttgagcacagacttaattcagtgcacaaatgagatgaatgtgaa

SEQ ID NO: 298584 - DNA, 90 bp, Homo sapiens
attactgtcccgtttgattttggagaaaagcaaaaaaatgctcttgggaaattgaacttgaatgtggaacccagctttgtcttctgtttc

SEQ ID NO: 298585 - DNA, 51 bp, Homo sapiens
ggatgtgaaaactctgttactgaagtatttcgtcccatatctgctaatgcc

SEQ ID NO: 298586 - DNA, 136 bp, Homo sapiens
tggtctgctggtgggactcaatgttctcgatgccaatctctgcttgaaaggagaagacttggattctcaggaagagagaagggcacagttacctaagtatcaacgtaatcttcctcggccaggacaggcccccatc

SEQ ID NO: 298587 - DNA, 74 bp, Homo sapiens
cccctacccacgctgaacgagagggacacggagcagaggagaaggcagagcccccccaggctatgaatgccctg

SEQ ID NO: 298588 - DNA, 83 bp, Homo sapiens
gggcgagaacgtccactgcgggccggcgaaagctgaccatggtgaatccgggcagcagctcgcagccgcccccggtgacggcc

SEQ ID NO: 298589 - DNA, 50 bp, Homo sapiens
gtgcgtcaaggactccccgcgcttcagcattgtcccagatatagccgttg

SEQ ID NO: 298590 - DNA, 90 bp, Homo sapiens
ttcataatgaataacacaggagaatggataaggcaaaacggaggctggagcagcccgacggccatggaggctgaagagacgatggaatgc

SEQ ID NO: 298591 - DNA, 100 bp, Homo sapiens
cagctgcccggtgcccgaggaggcagccaagctcatggcctgccactgcgtgcatgatgtgctgactaaagacgcgggtgagtgtgtgatctgcctggag

SEQ ID NO: 298592 - DNA, 51 bp, Homo sapiens
gtccagcacagccccacagggctcaggtgctggagaatctggtaaaagcac

SEQ ID NO: 298593 - DNA, 98 bp, Homo sapiens
ttgtcacagagatgaacctcatagaccgcaaggagctagagcctttgtccaaaagaaactcttccttcaaaacctgtgaagaaagagaaggaacagag

SEQ ID NO: 298594 - DNA, 106 bp, Homo sapiens
tctctcttaagaaaggaaaatatcccaaggactaatctgatcgggtcttccttcatccatcactggtgcaagctatatttaacggagatcctgatgaagttcgagc

SEQ ID NO: 298595 - DNA, 102 bp, Homo sapiens
ccaggaacacaacctcaccttgatcagctgggaaaacggcaatggattaataacaagaaattaatggtgaagtggtgacgaaaattctacattgcttagaaa

SEQ ID NO: 298596 - DNA, 74 bp, Homo sapiens
atggggatttaaagcactgaaacaaatgattaagattaacttcaagttggtggaacttgcagaaatctgtgcca

SEQ ID NO: 298597 - DNA, 75 bp, Homo sapiens
gcagctcgggaacatggccctggagcggctctgctcggtcctcaaagatggtgatgacgacccacaactctcctg

SEQ ID NO: 298598 - DNA, 100 bp, Homo sapiens
gttaccttcgactttcagataaccccagggagaaactgcctacatccgggttaaagttgatgggcccagaagtccaagttatggaagatctcgatctcga

SEQ ID NO: 298599 - DNA, 82 bp, Homo sapiens
accaagatcgagcccagcgtcaacttcctcaagtcgcccaaagttggagaccttccccagacgcctccaggggctgtcccag

SEQ ID NO: 298600 - DNA, 78 bp, Homo sapiens
aggtctccactctggtcagcaagtatccagacatcagggcgaccattgacgaggtggagacggacgtggtggagattg

SEQ ID NO: 298601 - DNA, 87 bp, Homo sapiens
aaggacgggcacctactcatggatggcggctacatcaacaatctgccagggttccccactgaaggacttggtccagctgtctggcag

SEQ ID NO: 298602 - DNA, 98 bp, Homo sapiens
catggctctcaaagaaccagcggacctgagtcttcaatgaaaggtggtaataagctgcagtcaacaggaaataaagcagaagacataaaaggaaccga

SEQ ID NO: 298603 - DNA, 75 bp, Homo sapiens
gtcatccttggcatgggctacaaggaaaacgatcacaaggtttacatctggcacaaacgtagtgaactgccaatt

SEQ ID NO: 298604 - DNA, 100 bp, Homo sapiens
gacaccacctcctgttgaaccaggctgagtacaacagtgacctccatcaattttttgagtttctgtacaaccatgggattggaaccctgtcatcccctct

SEQ ID NO: 298605 - DNA, 83 bp, Homo sapiens
cgtggagtgaaggtcgcaccgcggcgatgacagacaaccttctgtgccttcatcaagctggttgtgtacccaccatgtccctg

SEQ ID NO: 298606 - DNA, 82 bp, Homo sapiens
catctgggcttggcttccggctccccccatctggctggaacacacatcagtcacgtggccccaatgtcagtgtatgcttgtc

SEQ ID NO: 298607 - DNA, 96 bp, Homo sapiens
agaagaaggagagtgttcagcaagactaaggacaacaccatcgacttcctggagtacgtggcagctctgaatctcgtgctgaggggcaccctggag

SEQ ID NO: 298608 - DNA, 99 bp, Homo sapiens
tgtatgtccaccacagttactttatcccttcatctgtggatgggcagattcacaatgacatcctttcaagaagtcccattgcagacttccaactttgcc

SEQ ID NO: 298609 - DNA, 100 bp, Homo sapiens
cggaccatttataaccgcgacttcaagatcaggtatgggcactaggaaaagacttcttccatcaagcttaattgttttgttattcatttaatgactttcc

SEQ ID NO: 298610 - DNA, 100 bp, Homo sapiens
cgacaagcacccggattccaccacgctgtgcctcatcgcggccgaggcaggcctttccgaggaggagacccagctatcagttgagggatttgcagttgat

SEQ ID NO: 298611 - DNA, 83 bp, Homo sapiens
gtttaagccagcaatgccaagatctgttgtgaccatagtcttgagtttacttatgaggtcaattggaaataagaacaccattt

SEQ ID NO: 298612 - DNA, 90 bp, Homo sapiens
cctcgacctgctgctggagacctggatctcgcgccacaaggagatgctgcctgtggaggaaccgattgtgtccacagatgaggtcatctt

SEQ ID NO: 298613 - DNA, 75 bp, Homo sapiens
cggagagccccggagtgagcggagtagcgagtcggcaacccggaggaaggatgataaagactatgctttaaaaca

SEQ ID NO: 298614 - DNA, 98 bp, Homo sapiens
aggacaatcgcactttataccacctgcgattactaaacgatggaaagaactttctaaggaagacttatctcctgcctttgatcattcaccaaacaaaa

SEQ ID NO: 298615 - DNA, 100 bp, Homo sapiens
tgggcaagctccagagcctgccggaaggctccctcggtcgcgagtatctccgtttcctggatgtgaacataccgcgtggtggtggagggtgagcggggca

SEQ ID NO: 298616 - DNA, 73 bp, Homo sapiens
tggagccttcctgtggcaggagagacaacaaagcgctattatcctaaggcccagagcaagagaggcatcctca

SEQ ID NO: 298617 - DNA, 74 bp, Homo sapiens
gaatatcgatacaacaccaacaggttatacagtggttgctggaagaaaaattgtgtgcgctgcagtgtgctgta

SEQ ID NO: 298618 - DNA, 75 bp, Homo sapiens
aagaggaaagtggactgtccggggccgggctcaggagcagagaggagcaggagcggcttcgcttggagcaggagc

SEQ ID NO: 298619 - DNA, 83 bp, Homo sapiens
ctgcaccatgagctggggcaccgagctctggctacccgtacagtgaggacgcccgccagggtgagcagtacatgaacacccgg

SEQ ID NO: 298620 - DNA, 90 bp, Homo sapiens
acgccaggatttcctggaagcagagaaatggtttattcttcagtccaaggaagcaattcacagtcagctgttagagaagcagaaaatagc

SEQ ID NO: 298621 - DNA, 100 bp, Homo sapiens
ctttatttacatgttaggaaattttaacatgagcttttcaagaaatggaattgaaaagtccagaggaagagtttggcttcattaactatgaagtaggaga

SEQ ID NO: 298622 - DNA, 100 bp, Homo sapiens
atctttctacagactacggtttgagctcagatatcgggctgaacggtcaaagacattcacaacatggatggctgaagagattctgcagacatacttgaaa

SEQ ID NO: 298623 - DNA, 113 bp, Homo sapiens
tcagacctcccggctcgacaggcggcgcgggcggcgattgctcatttagaaagtggatgtgtgggataacatgtccaatgtgtccgaggagagaagaaaaaggcagcagaaca

SEQ ID NO: 298624 - DNA, 82 bp, Homo sapiens
aaaagcccaaggaaaaagcaaagaatagcaaaaaaaagggggccaagaaggaaggcactggcttactcgggtgctcttacct

SEQ ID NO: 298625 - DNA, 100 bp, Homo sapiens
aagtgaagaagtctgtaaaagcaatatataattctggtcaagctcggtcaaggagtgtgatgactggcgagcagatggctgccttccatccatcgtccac

SEQ ID NO: 298626 - DNA, 95 bp, Homo sapiens
agggccaggagaggagcactttgaggacatggcctccgacgaggacatgtgtctcccagtctgctaaagccctaaggccatcaccatggacttcc

SEQ ID NO: 298627 - DNA, 75 bp, Homo sapiens
gaataaggagaaggataagtcgaaggggaaggcgcctgaagaggacgaagatcaacaggcggtccttcgggtcgg

SEQ ID NO: 298628 - DNA, 100 bp, Homo sapiens
cggcgaggatcaaaatcttcgaaggaggccacttccggctcctgcgtcgctccggaagcctgcgagttccggaagccttggtaatccagattcggctagg

SEQ ID NO: 298629 - DNA, 100 bp, Homo sapiens
gccagaggtggtagcatgccaggatgctgctggcaaggtgctggaccgctgggccatcatgtctcgagaagaggaaatcatcacccttcagcagtttctg

SEQ ID NO: 298630 - DNA, 74 bp, Homo sapiens
gccagttctgtgatgttcgacttcaggtctgtgacagcaacaggcactgctactgtgaggagggctgggcaccc

SEQ ID NO: 298631 - DNA, 75 bp, Homo sapiens
gtaaacatcaaaagaagacggtgggatcaggagatggtttacccagggttgatgataaccgctggccttattcat

SEQ ID NO: 298632 - DNA, 100 bp, Homo sapiens
tgaagttatcaacatacaagccacccagactgcatccaggtggatccccccgagcggccccctccgccccccagcgacgatctcaccctcttggaaagca

SEQ ID NO: 298633 - DNA, 76 bp, Homo sapiens
cagtcatgagtcgcttcaagtttatcgttcaagcaagtttgctgctgttggatttcataaaactttgacagatgaa

SEQ ID NO: 298634 - DNA, 50 bp, Homo sapiens
ttggaggcgagcctgctgcgggaggatgaagagactcggcacagccttga

SEQ ID NO: 298635 - DNA, 75 bp, Homo sapiens
gtgaagagaaagaatggcctcctcacacacagccttggtatccagaaggagtccaatgtgctgattgctgctaac

SEQ ID NO: 298636 - DNA, 50 bp, Homo sapiens
gaactgtaagctggctaccagggccaaggaagaaaacaggcagattttgg

SEQ ID NO: 298637 - DNA, 80 bp, Homo sapiens
gttggcgtgtccctgcagcgaaggatcctgttcttcctgctgctgctgctggtgttcctgctggaggccaccatcgccat

SEQ ID NO: 298638 - DNA, 75 bp, Homo sapiens
aaaacaagtttttcaaagcctaccaaaatctttggatgaaaaatctgacaaacagtatgctgaaaattatacaag

SEQ ID NO: 298639 - DNA, 98 bp, Homo sapiens
ttgtggagagctcgaattccagaatgatgaaattgtgtgtctgatgatttgtgagcctcaagtgactactctgtggaatcatctgtccttgcctttga

SEQ ID NO: 298640 - DNA, 100 bp, Homo sapiens
gccccggcgactccccggactcggggtgccgggccaacctccccgccgaggcccacccgccgtcgctatggttgcagagcctgaggcctgtgatcagatg

SEQ ID NO: 298641 - DNA, 109 bp, Homo sapiens
catgttcacgcacgggatccagagcgccgcgcacttcgtcatgttcttcgcgccctggaatactcccccagttgcaagaggcgcaggaccgtggaagacttcaacaaat

SEQ ID NO: 298642 - DNA, 100 bp, Homo sapiens
tgcctgcctccgggagctggacaagagcaacagccccctcaccatggctctgtgcggctccaaagcatcagaagagctaacaattgctggaatgaccttt

SEQ ID NO: 298643 - DNA, 74 bp, Homo sapiens
cagaaatgcgcagagcaaacatctttcaaaggatatagcagatccattctttgcttattgtaagcaacatgcag

SEQ ID NO: 298644 - DNA, 90 bp, Homo sapiens
aatggagacgccgccgctgcctcccgcttgtctgagggaagtcaaaagcatgcaagcctacagaaaagcattgagaaagctaaaattggc

SEQ ID NO: 298645 - DNA, 75 bp, Homo sapiens
atggcgacagattatgactgctggaaggagcacgaggaagcagttttaaatgcacagagagcaggatacaaggca

SEQ ID NO: 298646 - DNA, 100 bp, Homo sapiens
ctgcgtcaccgccgcccccccagacaagatggacaccgcggaggaagaagctccaccatgaggcgaggtggatggaggaagcgagctgaaaatgatggct

SEQ ID NO: 298647 - DNA, 100 bp, Homo sapiens
gatgttggagaactacagaaacctggtctccctaggtgtggccgacgacgatgccctcgctgaggagcgcatgcggagaggccagaacgccctgccagcc

SEQ ID NO: 298648 - DNA, 76 bp, Homo sapiens
gtcgctgggaggtggcattcaaaggtcgagtcccagacaccagaagtctgaatttggagaaggctggggtagatac

SEQ ID NO: 298649 - DNA, 90 bp, Homo sapiens
aatggtctttttgttcaagataaagtgattttttgcctttgttgattaactggacaaattcaggatattattgctggattcctatatacc

SEQ ID NO: 298650 - DNA, 75 bp, Homo sapiens
ggagaaagaagacagccatcatttgaaaggtactccaaagattcaggtttactcacgtcatccagcagagaatgg

SEQ ID NO: 298651 - DNA, 99 bp, Homo sapiens
aacgcacgtctgctcggagatcatttgggagatccaagagattcagtatcactcgctcccttgatgatcttgagcgggtattcccctacatctcagcca

SEQ ID NO: 298652 - DNA, 75 bp, Homo sapiens
ctgctcttcctgctcttcagcagccttcgagctgattgggaacctatttggccaacaccgttcgaccatcatcac

SEQ ID NO: 298653 - DNA, 121 bp, Homo sapiens
tgccacaaatttgaaagacaagagttctttagtttcatctctctataaagttatccaggagccacaaagtgagacatatctgaagagatggattaagaatgctttggattaaggattgtgg

SEQ ID NO: 298654 - DNA, 76 bp, Homo sapiens
ccaccctggagtaaccctcactggagaatccagagatttcattcatacctgtgaaaagctctgccatgaaggagac

SEQ ID NO: 298655 - DNA, 75 bp, Homo sapiens
tacaatggcgagatccccttgaaagacaagacgctgattgagagattaatgattcatcaagggatagttgtactt

SEQ ID NO: 298656 - DNA, 100 bp, Homo sapiens
ttggagaaggtgtatctgaagaacagtgtcatggagctgattgcaaatctgaagagaaggcgcgggaggcagagagcaaagctcggacattagaagtacg

SEQ ID NO: 298657 - DNA, 100 bp, Homo sapiens
aagtttgccataaaagttgatggagattacctttggatcaatgagctgagcaatgttcctgttcctgtcatgctaatgccagatgacttcaaagcctaca

SEQ ID NO: 298658 - DNA, 100 bp, Homo sapiens
cttggcacctgcaggaaacaagctcctacttccagaaaaagtgctcctgggactccaggataccagaacttaacatcctttaagtttctggggaaaaatg

SEQ ID NO: 298659 - DNA, 82 bp, Homo sapiens
cggccctgtgtccagccagggatacatgccctacctcaacaagtacatcctggacaagctctacaagtttcacgctgtttaa

SEQ ID NO: 298660 - DNA, 90 bp, Homo sapiens
agcaagagcaagatcaccgtgacatccgaggtgcctttctccaaaagattgtcctgggtcacataatgccagctgagcgtaaaaagccag

SEQ ID NO: 298661 - DNA, 75 bp, Homo sapiens
cagccgcggatctcaccgccgctcagggaagccattaatttgctagaaccaatgacaaacgaccccgtgaactac

SEQ ID NO: 298662 - DNA, 83 bp, Homo sapiens
caggacctccttcttcaggagagcgccccagggcaagccccgctccggccaacaacaattctgtggtgttcttggtcacacat

SEQ ID NO: 298663 - DNA, 75 bp, Homo sapiens
aagccgaacagttttactgtggcgacactgaagggaaaaaggcagaggaccgaggaaatggactgatggagcact

SEQ ID NO: 298664 - DNA, 100 bp, Homo sapiens
gcgcagtaccaccttccagagatcaaaccagtccagctacgggggcccagccagccagcagctgagtgggggttacggaggcggctacggtggccagagc

SEQ ID NO: 298665 - DNA, 75 bp, Homo sapiens
agtcatgtacagaacatgatcaagggtgttacactgtttccaacatggctagatccatcagaaactgaagccgtg

SEQ ID NO: 298666 - DNA, 99 bp, Homo sapiens
tatgcagttttatccttttctgtacaacatcacttcttctgtttgcagtggaaatgggtcctgatgaatatgaagagatggaagaagaggaggaggagg

SEQ ID NO: 298667 - DNA, 100 bp, Homo sapiens
tttgtgatgagccacatgtgtttcaaaatggccctatgcttagggcaatgaatcgctccctggctaatgtgattcttggaggctatggcaccacttcaac

SEQ ID NO: 298668 - DNA, 83 bp, Homo sapiens
ccaagatcgagcccagcgtcaacttcctcaagtcgcccaaaggtcaaaatgcagatcttcgtgaaaacccttaccggcaagac

SEQ ID NO: 298669 - DNA, 51 bp, Homo sapiens
ctggattgaactcagagaagccgggttgcttctgcaggaagcctttttggt

SEQ ID NO: 298670 - DNA, 132 bp, Homo sapiens
ccgtcggccccgcttacctctcacggtgccctttccacccacctgggctgaggaccctgggccagcctatggagatggtgctggagaatctggtaaaagcaccattgtgaagcagatgaggatcctgcatgt

SEQ ID NO: 298671 - DNA, 90 bp, Homo sapiens
tggcagtttccaactccctggaggtcatctggagttcggggaacttatagaaatgctggcaatttcaagaaaccaaaagttgttacaggc

SEQ ID NO: 298672 - DNA, 75 bp, Homo sapiens
actccctacagttgtgccatgcatactctggatgaatattttgaatatgatgcagaggagttcttggtctctttg

SEQ ID NO: 298673 - DNA, 90 bp, Homo sapiens
gttttctccttcggaacgggagcgtctagatgctggtttttcagcagcagacagagaagccagtctggagcttattaaactggacatttc

SEQ ID NO: 298674 - DNA, 75 bp, Homo sapiens
caccatgtgcttttgcacatccagtctgtggctcaggacatccccaagctgcagaaactaggcatcacccatgtg

SEQ ID NO: 298675 - DNA, 100 bp, Homo sapiens
acggccaagaggcagacctaggaaatggctgggatctagcaattgggaggcagcagacttgggtaatgaagagagaaaacaaaagttcttgagacttatg

SEQ ID NO: 298676 - DNA, 75 bp, Homo sapiens
ggagctggaaaacatcgtggccaacacggtcttgctgaaagccagggaaggtgtcaggcccttgaaaggaaaaat

SEQ ID NO: 298677 - DNA, 50 bp, Homo sapiens
ggcccgggggtggtgacagcaggtctgagcctgatgaagtcctccgatat

SEQ ID NO: 298678 - DNA, 98 bp, Homo sapiens
cgcattaaagcagagaaggccgaaatcacgaggttcttccagaaaccaaagactccacaggcccccaaggtgacgcattgctggatgccggcgagtcc

SEQ ID NO: 298679 - DNA, 75 bp, Homo sapiens
gccagggtccctgaagagggaagacacgcggaaacagccttcacagttgttgatcacatagcatggtcatccact

SEQ ID NO: 298680 - DNA, 100 bp, Homo sapiens
agcaccttgtccaggcgggcctcccgtttctggctccgggctgagcttcctggagaagaggaaggatcgaacctgcaagcacttatagacagtactcggg

SEQ ID NO: 298681 - DNA, 50 bp, Homo sapiens
ctatggagaagaccagtccaatggaatggccttgatgaagatgacaggca

SEQ ID NO: 298682 - DNA, 76 bp, Homo sapiens
gccagccgctgttttgccggaggagcccctcaggccccgtgctggtatagaggactctaagaagtggggcatgctg

SEQ ID NO: 298683 - DNA, 75 bp, Homo sapiens
agagagggctaccttgtgaagaaggtctacatgttcaagtgcgtgtggcggtgctacagattgatcaagtgcatg

SEQ ID NO: 298684 - DNA, 101 bp, Homo sapiens
cttcctgcgcaagttcggctccgacaagggccatccaggagagcctcctcaccagcacagaaggcctgtgccccagcgccctgagcgagacaagccgtttt

SEQ ID NO: 298685 - DNA, 75 bp, Homo sapiens
agcctatttacccagaagtagtccatatggttcaaaccttgtactactcagctgatcacaagctgcttgatggga

SEQ ID NO: 298686 - DNA, 98 bp, Homo sapiens
agccgcgggtgatcgtagctcggaaatggcgggcagccctgcaagttgggggccatggagagaggctacaccagtgtcgagaagtcatgcttctaact

SEQ ID NO: 298687 - DNA, 73 bp, Homo sapiens
gatgctatagcattgtcagtaggactactgagcccagccaggctgtatgccattgctgccaaagaaaaagata

SEQ ID NO: 298688 - DNA, 97 bp, Homo sapiens
aagtataaaaaaattccgtgacgaggccagaaggctagaagaatcagacgtgctccaggaggccagaaggaaatacatactggaggagtctctgtgt

SEQ ID NO: 298689 - DNA, 98 bp, Homo sapiens
aaagaagaactcgcaaaagctcagagggtgggagaatctccacaagtgtcttccagacttcagaatttgagactgaataatttaattcccaggcaact

SEQ ID NO: 298690 - DNA, 60 bp, Homo sapiens
tagaggctggataccaaatagcagtggaaaccgattgtggtggtgccatgcagcaagaat

SEQ ID NO: 298691 - DNA, 80 bp, Homo sapiens
tatttcttcactgagtctgagggctttgctggctccagaaagacatccggctccgggttcgagcagagtactgcgagcat

SEQ ID NO: 298692 - DNA, 75 bp, Homo sapiens
cggctgcagacttggccaaatggacgggactattaagactccctgagaaatgtttcctcagccggtcatggcccc

SEQ ID NO: 298693 - DNA, 83 bp, Homo sapiens
acttcaggaatccaggtgcacccaattcaaggcctgccgttggctatagcaaatgccccagcacttgcacctcctgcgccgcc

SEQ ID NO: 298694 - DNA, 87 bp, Homo sapiens
ctgttggtctcagatctcctgaacctgtttctgctcagattgaggaaacaatggaagagtcccaacatggccaacacagtcaatgct

SEQ ID NO: 298695 - DNA, 75 bp, Homo sapiens
atgctattgtggttgaacaatggacagtcctggaagctttccttaaagtttcccatgtctcaatggactcctgaa

SEQ ID NO: 298696 - DNA, 75 bp, Homo sapiens
acacacttatagatcttctgcactgtttacaggcacagtactatactggcaattgctggagaagattttgcaatt

SEQ ID NO: 298697 - DNA, 88 bp, Homo sapiens
gcattgtctctttttcttggatggttgggagcagatcgattttaccttggataccctgctttggatgtcaagccctccaacatcctag

SEQ ID NO: 298698 - DNA, 75 bp, Homo sapiens
acttcactgcccaaacaggaagtctatgatgagtacaaaattgcggcgagcagtaagaagcagcgtgtggaaaag

SEQ ID NO: 298699 - DNA, 96 bp, Homo sapiens
ctctctccgctcgattttgtcaccgttatgtgggaagcgaatccacttttgaacttctcagatagaggaaccccagtgaagactgatcagttctta

SEQ ID NO: 298700 - DNA, 82 bp, Homo sapiens
ttccagacaagcaggctaatactgatagctgcattcatccgggtcgtgggctcggagtttgtacagaagtatctgggtgagg

SEQ ID NO: 298701 - DNA, 51 bp, Homo sapiens
ggatccctaacaggtttttgagagtcctctgtgatgtcggtctgcttcgcc

SEQ ID NO: 298702 - DNA, 100 bp, Homo sapiens
tcaagcatttcaacgtgcgtgtcacccacgcagacatcttcagccgctgccagaggtattgtggccagtattttggttttcttatgttttggagtcacac

SEQ ID NO: 298703 - DNA, 50 bp, Homo sapiens
gaggaatacacttatttatgaacttgttctaaagacgaaggggaactccc

SEQ ID NO: 298704 - DNA, 100 bp, Homo sapiens
gaaggaggtccccgaggagtattccgagcgcttttccccgcaggcccgctcactttgctcacagctgctggagatcgtgggccgggagggggtgtctctg

SEQ ID NO: 298705 - DNA, 75 bp, Homo sapiens
tacagagactgaagaggactcaggagcaaatcagtaatcatcttcatgatacagttaagaggaatcttgacagcg

SEQ ID NO: 298706 - DNA, 83 bp, Homo sapiens
ctcttcggctgcggaccctgccattccggaggaggtaaaagagaacctgctttcatgcaagatgctgctgcactgcaaacggg

SEQ ID NO: 298707 - DNA, 100 bp, Homo sapiens
ctcagagtaaaagttgtttctggaattgatctcgccaaaaaggacatctttggagccaggtaagaatgattgatgttggctgatattggagtgctcattc

SEQ ID NO: 298708 - DNA, 100 bp, Homo sapiens
caggcgcccgggagatgcggagcctccgctgcagcgcgatctgcgcgaccagaccggcccccccgagactgcagagagatcctgcttcccatgatgaccg

SEQ ID NO: 298709 - DNA, 78 bp, Homo sapiens
gaaaatgctactatgactcttcctggaatacacccacctaccttgaaccagtgacctgtgtaattatgcagaagaatg

SEQ ID NO: 298710 - DNA, 96 bp, Homo sapiens
ggctgagcccccatcattgggagaaatccccactcctccaagaaccaacccccaaattggctgggacagctggagtcacatcagaagccgcgcaga

SEQ ID NO: 298711 - DNA, 100 bp, Homo sapiens
ctgaggcggaacccgcagcaggactacgaactcgtccagagggtcggcagcggcacctacggggacgtctataagaacgcgtatcacaatgtgactgcag

SEQ ID NO: 298712 - DNA, 100 bp, Homo sapiens
cttagtttcaggactcatttgggtttaattcaagttccactgaaagtaaaagacatccctgaattgttgcaggagaaataacaaggcattgaagaatggc

SEQ ID NO: 298713 - DNA, 87 bp, Homo sapiens
actccaaaaacaaaagggagatactccagcttcagcaacagctcgagcagcacctaaaatagccaatggtaaagcagccagtagcag

SEQ ID NO: 298714 - DNA, 75 bp, Homo sapiens
aagcagtcctaccatgtcagccttcccagtagctgggaccacagaccctgtgttgggctatttgatgaaaggcct

SEQ ID NO: 298715 - DNA, 100 bp, Homo sapiens
ttgaggaagagaacacgagcttgaaggaatggaagttggatacactttgtgacttgtacgagacactgaccattacacaggctgttatttttctcaatac

SEQ ID NO: 298716 - DNA, 100 bp, Homo sapiens
ccatgctcatggcaaaagggaagctgaaaccaactcagaatgcttctgagaaggaaggatttgatgccctggatccctttattcccatcctggtttccaa

SEQ ID NO: 298717 - DNA, 82 bp, Homo sapiens
ccgctgctgtcctgcgaccccaagcaggttctgttgcaaaatgtgaaaatgaaggtgaagtcctccagattccatttatcac

SEQ ID NO: 298718 - DNA, 75 bp, Homo sapiens
gccgccccctccggcgtgttcatgcccccgggaataatatgtggattcgagaccatgaggatagtgggtctgtac

SEQ ID NO: 298719 - DNA, 87 bp, Homo sapiens
ccgctaaagtgttggctttacttagtgattatgggagtgctattgagacactggtaactgcaatttctttaattaaacaatccaaag

SEQ ID NO: 298720 - DNA, 75 bp, Homo sapiens
gccccctgcaggaactctacaacccaatccaggtcccttatttcgcgtgagtctttggcgtccacgaccttgagt

SEQ ID NO: 298721 - DNA, 96 bp, Homo sapiens
cagcccagcagccgtgcgggcaccgggcgaggcaggcccactcctcccgagagcgtgggccagcccgaggaggcaagcccggaggagcagccagag

SEQ ID NO: 298722 - DNA, 83 bp, Homo sapiens
taaggatttttaccagtttacttttaattttgcaaagaatccaggacaaaaaggattagtcaaaaagtggatagaacgcaaac

SEQ ID NO: 298723 - DNA, 80 bp, Homo sapiens
aaggaccagaagaaactgcaccggaaatgtgcctaccagtgtaaacaggaacatcgataagtagtgtaaaaacttgcaca

SEQ ID NO: 298724 - DNA, 100 bp, Homo sapiens
gaaccactcattcacttctagacgacaaaatgcaaaaaaggaggccaaagactttgaagtgggaaaactcttgcctttgccatcccaatgattcatgcgg

SEQ ID NO: 298725 - DNA, 90 bp, Homo sapiens
ggccaggacccagacagagacacacggtcactgcagctgaagccgctgcccctgctacaggtttctgagtcccttcaacatgatcctggg

SEQ ID NO: 298726 - DNA, 101 bp, Homo sapiens
tgaagacttcctcactagtctggtggccatcagcaagcccaggtctatgatataattggtgattacaactttcctctataaattaactcttgacactcctt

SEQ ID NO: 298727 - DNA, 100 bp, Homo sapiens
tagaatacttgggtgacatctgcctgagagatctccaagaattacaggtatgcagagaaggagaagaaaaatcttagatacgtcagtggcatatgtgcgg

SEQ ID NO: 298728 - DNA, 90 bp, Homo sapiens
caaagatctttcggaatgaccgaacaaagaactttgagtctggcaaggcttataagacaacatggggagatggtggagaaaactcacctt

SEQ ID NO: 298729 - DNA, 100 bp, Homo sapiens
tacagctggctccttccgctgcctctgttatcagggctttcaagccccacaggatgggcaagggtgtgtggctccctgtgctgtcaggaatctacaggac

SEQ ID NO: 298730 - DNA, 100 bp, Homo sapiens
gctccacctccctaggacaagattttttgggttccgagtctgaggaagacataaccttgtgcctgcctgcccacctctctctctggtcctgttcatctct

SEQ ID NO: 298731 - DNA, 50 bp, Homo sapiens
gcccagattccaaaacttatgtcaacgaatgctgatgtcttaaaggcgat

SEQ ID NO: 298732 - DNA, 101 bp, Homo sapiens
gatgttcggtgcagctgccagatccgctgatctagtgcttctcgaaaaaaaccttcaggcggcccatgggtgctggagaatctggtaaaagcaccattgtg

SEQ ID NO: 298733 - DNA, 100 bp, Homo sapiens
cgggtcacagggaggaggtagagggcgtgggggatatgacaaggatggaagaggtcctatgacaggatcaagtagtattattgattccacagaatacagc

SEQ ID NO: 298734 - DNA, 75 bp, Homo sapiens
agaggatccagtgttcaccatcctggccccggaagttatggctgcagcttcgattgccaatattgtaaaaagttc

SEQ ID NO: 298735 - DNA, 90 bp, Homo sapiens
gataaatcaggaatagattctcttgaccatgtgacatctgatgctgtggaacttgcaaatcgaagacttaattcagtgcacaaatgagat

SEQ ID NO: 298736 - DNA, 82 bp, Homo sapiens
cagcaggaagcttggagacatgaggtccgcgggagagctgtggggcttggtgagtgtttcgtggcctctcgggttggtcagc

SEQ ID NO: 298737 - DNA, 75 bp, Homo sapiens
gcccgtgccgcgagcgcggcctgcaggaggtgtgaaagcctggtggacatttattcccagctacagcaggaggta

SEQ ID NO: 298738 - DNA, 90 bp, Homo sapiens
gtctacgctgacatcaaaactgttcggacttccccgttagaactcgcgtttccacttcagagatctgaaatgggcaagttcatgaaacct

SEQ ID NO: 298739 - DNA, 100 bp, Homo sapiens
ggccctggctgctacaaggccatgtccggacccacactggcaaggcccgaggcttcttcaagaagggagatgtggtcattgtgctgaccggatggcgccc

SEQ ID NO: 298740 - DNA, 112 bp, Homo sapiens
tttgaagaaaaaattggagtcctatttagacttaatgccgggtatctgtgcagatcaagtgaaagttttcagctatcatcgctaccaaagagtagaaatgaatgaaaatgca

SEQ ID NO: 298741 - DNA, 96 bp, Homo sapiens
atcgatgaccttggacacctccatgttatggacacggtctttcttattcagtcttgccacttgcctagtgaggcttttccgaacctggaaggagac

SEQ ID NO: 298742 - DNA, 82 bp, Homo sapiens
gtaccaggcgaagctggccgagcaggctgagcgatacgacgcctacagacctggtacctggatttttgcccgagatgattcc

SEQ ID NO: 298743 - DNA, 83 bp, Homo sapiens
cttagctgtgctcgcgctactctctctttctggcctggaggctatccagcggtggtgaaggaggagatctttgatgacaatgc

SEQ ID NO: 298744 - DNA, 98 bp, Homo sapiens
gctgtccctggcctactctgtcacccagctcctgggcaacgtgctggtctgtgtgctggcccatcactttggcaaagaattcaccccaccagtgcagg

SEQ ID NO: 298745 - DNA, 82 bp, Homo sapiens
ctggaagcacgcgggcaagcaggactacaaccgcgaggaggacgccgcgctcttcaaggtgatccgcaggggctggctgacc

SEQ ID NO: 298746 - DNA, 75 bp, Homo sapiens
cagctattggaaagtttttttaatgtggttggaacaactgaggtggtactatgacagcctgagccgcggagaggc

SEQ ID NO: 298747 - DNA, 75 bp, Homo sapiens
acgaatgtccataatggaccgtattctccaaatagcagagtctattatcctcccagtccacaacgctgaaccgtg

SEQ ID NO: 298748 - DNA, 90 bp, Homo sapiens
agcaggagcggggccggaactggagccgaggcgcaggtggcgctggatcaggatcctcatgaccagccaaagagaagaagaattaggaag

SEQ ID NO: 298749 - DNA, 75 bp, Homo sapiens
cgttccatctgtggaaggacctaccaaccagattcatgatgttgctatcaaaagttgagaaattgtcagaagaaa

SEQ ID NO: 298750 - DNA, 98 bp, Homo sapiens
gctctgtcttcggaacttcctgtggtcatctccctgacaacccagataacaggccaagcagatagaacttcagttcactattggcgaagccattacca

SEQ ID NO: 298751 - DNA, 98 bp, Homo sapiens
ccgaaacatcgcctccatctgtaatatgcaaagttccaatggtcctgtaaagaagtccatgcgtgagaaggctgttgagagaaggagtgtcaataaag

SEQ ID NO: 298752 - DNA, 100 bp, Homo sapiens
atgatggcaataatttgcttgatggcttagaactctccacagccatcactcatgtccataaggaggttataactcgaaacgaactcatgctggaagaaac

SEQ ID NO: 298753 - DNA, 76 bp, Homo sapiens
tcatggggaaaatctccccggtgactttcagcgggacgaccctgggacagtctccactggggcagatccagctgac

SEQ ID NO: 298754 - DNA, 100 bp, Homo sapiens
ctcggctcctcccactcctcgcgggctccgtgctttccgcgggtctgtccgggggctccggaccctcggcgcagccgttgccgagagatggatgagcaga

SEQ ID NO: 298755 - DNA, 124 bp, Homo sapiens
attcttgcgctccatccgtccagataacatgtcggagtacagcaagcagatgcagagattggtgtttggccagttcgccttctttcacacggccctcaacgacgtggtggaggttcacgacggc

SEQ ID NO: 298756 - DNA, 75 bp, Homo sapiens
gaggagcagcagcggaggcggctgcttcagcggcgggcgggcgccagaaagtggagcccacagtgaccatctccc

SEQ ID NO: 298757 - DNA, 114 bp, Homo sapiens
atggatcctcttccaaaaccacaaacttgcctacgtcagtaacagccaccaaggtggcgacatgtctaagaatgtgagccagtcacagatggcaaaattgaaccaacaaatggc

SEQ ID NO: 298758 - DNA, 50 bp, Homo sapiens
ctcggattctcgtagctgtgccggtgatgtccttgcattgcccattttta

SEQ ID NO: 298759 - DNA, 51 bp, Homo sapiens
gcaccctctgcttaccacagccaggtaatgaaagcatgggatgctcatgtg

SEQ ID NO: 298760 - DNA, 75 bp, Homo sapiens
gtcaggctctaaacaaaattctggaagagtctaacctgtctctgcaagctcttgagtcccgccaagatgatattt

SEQ ID NO: 298761 - DNA, 88 bp, Homo sapiens
gccggcagaggatccagtgttcaccatcctggccccggaagctgataggaagatgtcttcaggaaatgctaaaattgggcaccctgcc

SEQ ID NO: 298762 - DNA, 90 bp, Homo sapiens
gagaatatttaatggaaaatcgcttggttaaaacctgacacttttaacaggttcagattctggagatgccctccaagacgtcagtgtgcg

SEQ ID NO: 298763 - DNA, 98 bp, Homo sapiens
ggacagcagcctcgggtgcaatcctggagccccccagtgaggaagaagctcattcacacagaagacccatttaatgatgaacatcaggagaggcaaga

SEQ ID NO: 298764 - DNA, 100 bp, Homo sapiens
cttcggcaccatcggcatgcggcccaacgccaagaacaacgtgaaaggtgtagcagtcactcggcctacacccacagcatcgaccttgtgaacccagcga

SEQ ID NO: 298765 - DNA, 100 bp, Homo sapiens
ctttgagcatacaccgagagagtgaggagccagacgacaagcacacactatggcgctgaaacggattaataaggctgtggaaaatctctgttctcacaaa

SEQ ID NO: 298766 - DNA, 90 bp, Homo sapiens
actttttcaagtctatggatcaggatttcgggtccaggtgcaggtacagcagtctccgcaacaggtctcggctcagctctccccacaact

SEQ ID NO: 298767 - DNA, 75 bp, Homo sapiens
agtaccctgatggagtcccttgcaggtcccacgagtcatcctgtggctgatggtggagttggctatcatcggctc

SEQ ID NO: 298768 - DNA, 86 bp, Homo sapiens
aagcgggaaccaggtggccacccggtgtcgttaatatgatcctctgttgaagcaagaagacaaactgtatggtggagaaagaagtg

SEQ ID NO: 298769 - DNA, 100 bp, Homo sapiens
acgacgacgaggaagaggaggtttctgagactaatagggatgccaaaggaaaaatatgatcctccagatcctcgcagaatttataccatcatgtcagcag

SEQ ID NO: 298770 - DNA, 51 bp, Homo sapiens
gccatcgttgctgccttcttcgtcaagaaacagtgtctcactatgttgccc

SEQ ID NO: 298771 - DNA, 98 bp, Homo sapiens
cggtttccctcggcgtgctactgtgcgctcgatccagcaccatggggaagcgggacaatcgggtggcctgtctcctccctcctacacatttccagctc

SEQ ID NO: 298772 - DNA, 75 bp, Homo sapiens
gattctgaagagggtctggaggagccttctcaagaacagaggctcccacatcaggacgagaaggagccctcgagt

SEQ ID NO: 298773 - DNA, 100 bp, Homo sapiens
aaagaagatgatacaaatgaatttgttagtgctgtgtgctggagggcactaccagatggggctttcattaaagatagaaccagggacaagcaccccacgt

SEQ ID NO: 298774 - DNA, 83 bp, Homo sapiens
caaaaccgacctgaggtttcagagcgcagccatcggtgcgctgcagggactggtgattgcagctggaagtgcccatgaccgag

SEQ ID NO: 298775 - DNA, 88 bp, Homo sapiens
cggccggcgcttacctctgctacaggcaagacttcaaggactgcattcgtaggcaaaggttgacccaatcaaagataaaagaaaatcg

SEQ ID NO: 298776 - DNA, 75 bp, Homo sapiens
tccaaagacatgggaaccacagatagtgggccttattttgagaagcttatttgcactaatcttgatgaactcagg

SEQ ID NO: 298777 - DNA, 100 bp, Homo sapiens
cgactgtgctcgctgctcagcgccgcacccggaagatgaggctcgccgtgggagccctgctggtctgcgccgtcctgggcccagccccagcccaggggac

SEQ ID NO: 298778 - DNA, 100 bp, Homo sapiens
ggaagatggcggatctggaggagcagttgtctgatgaagagaaggacagagcgggatgccaccagcttgtccaaagggaagttccaggagctcctggtgg

SEQ ID NO: 298779 - DNA, 75 bp, Homo sapiens
cctgttacttgggcaccccgaggatgcagtgaccagcctttgctttggccggtacgggcgggaggacaacaccct

SEQ ID NO: 298780 - DNA, 73 bp, Homo sapiens
aggaaattgcagaagcctaccttgggaagacagcctgtcaggatactgacgaggaggaggaagaggaagatga

SEQ ID NO: 298781 - DNA, 82 bp, Homo sapiens
ctcgccggcgccaggcagtgggaagtcaggttcttccgccacctcccagccaggttttggctacgggcctccacctccaccg

SEQ ID NO: 298782 - DNA, 95 bp, Homo sapiens
agcaaagttaccggacagcaattaaacacagaaggaaatacccagactgttactacaacctcgggcgtctggctggagtgcaatggcgcgatctc

SEQ ID NO: 298783 - DNA, 100 bp, Homo sapiens
gtttccgtctcccactttgacttgcacgaggagatgctgtgggtggggagccacggggtagcaacacaagtcggaatagaatggaacctgtcccctgttg

SEQ ID NO: 298784 - DNA, 51 bp, Homo sapiens
ccggacccaaagtgccatgtctttaattgaaggtggtgtttttaaggctca

SEQ ID NO: 298785 - DNA, 89 bp, Homo sapiens
acctcccgcacccagttcaacagcctgcagcagctggtggcctactactccagttacatccactaccagcctgcccaggaccggctgca

SEQ ID NO: 298786 - DNA, 96 bp, Homo sapiens
tcagaccagtctctgcaagatttccaggagactgacaaggcgtggcatgggggatgtctggcgctggcagagctgggcaggagaggcctgttgctg

SEQ ID NO: 298787 - DNA, 90 bp, Homo sapiens
ctcaccccccaagcggatactggtcttctcgtcggattgcccatgcacttgttgcagaaacagccaaggatgttctgctgcttagccagt

SEQ ID NO: 298788 - DNA, 101 bp, Homo sapiens
ctgggacacacctccattggatttaaaagacagtcctcgtcagcactgactttcagctatggaatcgagtaaagccaatcccagctgaaggaatcaagtca

SEQ ID NO: 298789 - DNA, 87 bp, Homo sapiens
ccgctccccagggagggagtccgcagcctgagcttctatatacctttgagaaagacttgcaagttttcagttgctctgtcaacagtg

SEQ ID NO: 298790 - DNA, 75 bp, Homo sapiens
cccggggccggtaaagggacccagggagttcccattagacttgaagttgggccacgtgatatgaagagctgtcag

SEQ ID NO: 298791 - DNA, 101 bp, Homo sapiens
acgagctgtttctcatctttatactcttccagctgttctccatagtggtgttcggctccatcgtgaacgagggctacctcaacagcgcctccgagggggag

SEQ ID NO: 298792 - DNA, 48 bp, Homo sapiens
ccatcgttgctgccttcttcgtcaagtttcaccagtgatcattaaaga

SEQ ID NO: 298793 - DNA, 75 bp, Homo sapiens
gtagtgtctccactgcatctgaagaccaaattgtgatataaaccacagtacttcaggatcccattatgaaaattc

SEQ ID NO: 298794 - DNA, 80 bp, Homo sapiens
ctcaagaagacctagagtacaagttgaagggattaattgacctaaccctggataagagctggaatttaccatgcaagaag

SEQ ID NO: 298795 - DNA, 98 bp, Homo sapiens
gccaccacgtcggccgagatcgagctgccggacgtggagcccgcagccttcctggcgctgctgaggccatcaagaagccatagcagtgtgcttacata

SEQ ID NO: 298796 - DNA, 90 bp, Homo sapiens
aaaggcaaatggaagcctcctatgattgacaatcccagttaccaggtggacattgaagtggacctaattcggttttccttttaaaagccc

SEQ ID NO: 298797 - DNA, 82 bp, Homo sapiens
acctggatcttcgaacttttgacacggctttggaaacgacgtcatgtgttaggatgtaatccctgttcattactacttaata

SEQ ID NO: 298798 - DNA, 100 bp, Homo sapiens
aagagaaaggaggctgtgaagaaagtgattgctgctatgaccgtggggaaggatgttagtttggaatctgtgagtgcaacgtgtaaacagctgagccaag

SEQ ID NO: 298799 - DNA, 90 bp, Homo sapiens
tctcttacgtctgcggaagtgcagctgcctcagttcttagcgcaggtgttgacagctcttctaccacaagcagtgcttctccaatgccca

SEQ ID NO: 298800 - DNA, 87 bp, Homo sapiens
gctccctctcagcacctgggcggacgggtctcctatggacagaagtgcgggcaaggagctttgttcctccccgatgtcaccctccca

SEQ ID NO: 298801 - DNA, 76 bp, Homo sapiens
cactccaacgcctgcacaagctggctgagctaagaaaggaaactgtatgacatctcgagatctggcgtgttttata

SEQ ID NO: 298802 - DNA, 80 bp, Homo sapiens
caggtcgctgcctgtgccccagctggtgatagccatccgagcttgtttcctggggtttgtgttcggctgcggcacgctgc

SEQ ID NO: 298803 - DNA, 88 bp, Homo sapiens
aagttccctgatgatcagactcagaaaattttggaaagagaagatgctcggctgatgggcagcacattccccctgttcccaggtgggt

SEQ ID NO: 298804 - DNA, 74 bp, Homo sapiens
gaagactattgtggaagaagcatccattaagtactacgacatttctgccaaaagtaactacaactttgaaaagc

SEQ ID NO: 298805 - DNA, 100 bp, Homo sapiens
tggtgctgcaccaggccaccatcctgcccaagactgatccgagtgaatgcagtaaaccccacagtggtgatgacgtccatgggccaggccacctggagtg

SEQ ID NO: 298806 - DNA, 51 bp, Homo sapiens
agtgaaccctctggattatcacatgaagatagtgtgtgtaccatatcagtg

SEQ ID NO: 298807 - DNA, 75 bp, Homo sapiens
ttgaaaaccctgctgatgtcagtgttatatcctccaggaatactggccagacccatggggaaatgagaaagaacc

SEQ ID NO: 298808 - DNA, 76 bp, Homo sapiens
cgctgttttgccggaggagcccctcaggccatgaggaaactgaggatcagagggattaagtacttcccaaaaccat

SEQ ID NO: 298809 - DNA, 112 bp, Homo sapiens
gtaagcggcgcggtagcgaaggccgccgaacctgcctggctagccggcgacttgagtgacgagtccagatggctgtggaggccaagtttgtccaggacaccctgaaaggaga

SEQ ID NO: 298810 - DNA, 100 bp, Homo sapiens
ggcaggtggtgctgaccctgtaacccaaaggaggaaacagctggctaagctcatcattgttactgatgccatggacaatattaccaggcagaaccaattc

SEQ ID NO: 298811 - DNA, 75 bp, Homo sapiens
tggggagcccttctgcgccacagatgtcctaaacgatgctatatttgatgaagatcatgatgagatggtgattgt

SEQ ID NO: 298812 - DNA, 80 bp, Homo sapiens
gcggccacccgagacgcggcgcgcacgctccggcctgcggtggtgatgatgtccagcaactctgtgaagcaggagaagag

SEQ ID NO: 298813 - DNA, 100 bp, Homo sapiens
gctgggaataagcaaaagaaacgttatttttcaacctgtggcagagctgaagaagcaaacggattttgagcagctgctcccaaccccagaacctttgctg

SEQ ID NO: 298814 - DNA, 75 bp, Homo sapiens
cggctgctgtctgcgcttgaggacttggaggtcctgtctagacccctgaggagttggatgactctgactttgaga

SEQ ID NO: 298815 - DNA, 100 bp, Homo sapiens
acagggatgataattgggcctccaagactgaagaaatcaggggagaaacccctgcttggtggaagcctgatggaatatgcaatcttgtctgccattgctg

SEQ ID NO: 298816 - DNA, 100 bp, Homo sapiens
atgagacatgcacataatatagaaaccagcctggacaccaagtctgtgtcagaaggccacctcaagaggaacatcgtggtgaagaccgtggagatgcggg

SEQ ID NO: 298817 - DNA, 88 bp, Homo sapiens
ccaaggggccggacacgctctgcttcgacaaggacgagttcatgaaggatgctgacagacagcaccaagaagtaattgcaatttatcg

SEQ ID NO: 298818 - DNA, 74 bp, Homo sapiens
aaacatttcttttaatttttaaacttggtttgaaaggcaacagctgaagctaataatcttgctgcagtagcagg

SEQ ID NO: 298819 - DNA, 100 bp, Homo sapiens
tccggacctattcctgctagtgcaggcctccaggtgaaaaaccatttcgctgtgatgaatgtggtatgagattcatacaaaaatatcatatggaaaggca

SEQ ID NO: 298820 - DNA, 90 bp, Homo sapiens
gaggcgtttgttgcagctacctgcacttctagatgtacttggattatggagaagagaattggaagaaacagacatctcagtgcttgaaga

SEQ ID NO: 298821 - DNA, 100 bp, Homo sapiens
gaaaacccgaccttggaatcagaagcctggggctcctctagggggtggctggccccccgggaggccagaggagcgtccgtctccaagagagtatgaagag

SEQ ID NO: 298822 - DNA, 98 bp, Homo sapiens
tattgttctctatgccttggacagagacccaacagcttatgcattagctgaacatctttcagagttgtatccggactcctttccatttgatcaacaat

SEQ ID NO: 298823 - DNA, 83 bp, Homo sapiens
gcttctgagacggcggcagcagcggcattcagaacctaaaggcagacccagaagagctttttacaaaactagagaaaattggg

SEQ ID NO: 298824 - DNA, 82 bp, Homo sapiens
cgagaggcggcgagaggcgggctgaggcggcccagcggcggcagctacgagttccagggagctctgtcctggtgaccgtgcc

SEQ ID NO: 298825 - DNA, 49 bp, Homo sapiens
ctatcccaggaatacagctttgcattagtgctatgctggaaaatgagaa

SEQ ID NO: 298826 - DNA, 125 bp, Homo sapiens
gaatctggttatagatggacaagagacgatcattctgcaagcaggcaacctgaatacaggtgactctgacatcattagaagcatgccagaacagactggtgaaaagtaaaccttttcacctacaa

SEQ ID NO: 298827 - DNA, 100 bp, Homo sapiens
ctagcaacaagttgtaccatatgaggacggccgctgagattaactgctgaagtactgatcgagttctgcatttcttcaatgaggaactacaggctgatct

SEQ ID NO: 298828 - DNA, 71 bp, Homo sapiens
ttccaaatttccttttccaactaagaccttcacggcatggtgcaactcccacctgcggaaggcaggcacac

SEQ ID NO: 298829 - DNA, 82 bp, Homo sapiens
gtttggagccccggagtggggtgtcggcgcctcattcgggtggagctgagccggagacaggccagctgcgggccgtccagcg

SEQ ID NO: 298830 - DNA, 75 bp, Homo sapiens
gttggtagaaaaagcaagagtttgttatatagcagtgcagctcagtggaagatgatgacaaccagaagacatgag

SEQ ID NO: 298831 - DNA, 100 bp, Homo sapiens
cggaggcagagcggctgccatgtaagcccagaggtctccaccccacgggaggaaggctgaggccaagaccccggaagagatggaccgcgtgaccagatac

SEQ ID NO: 298832 - DNA, 100 bp, Homo sapiens
ctttttggctgttctgaagagtgttactgtgaacattcatgcacaaatttttatgtggaggttgaagcactggacaatgccacatactttgtggatggtg

SEQ ID NO: 298833 - DNA, 83 bp, Homo sapiens
aacttgtccacgacaccggctacttctcagctttaccatccctggaggagacctggcagcagtgagaaggcaaccaaagtgca

SEQ ID NO: 298834 - DNA, 85 bp, Homo sapiens
tgcccttgaaatgaagctggacttggaggaagcatgagtgggaaaagcatgggacctgcgccgcccaggtggatgcgctcaactc

SEQ ID NO: 298835 - DNA, 82 bp, Homo sapiens
cggagagtacatccccaccgtgtccctggtgctgaaccgcctgcgtccagttgccagcgggggtgggaaagcccaaccgggc

SEQ ID NO: 298836 - DNA, 82 bp, Homo sapiens
ttaccgggttcgctaggctcacaggtttgagtacaagctcagcttcaaaggcccaaggctggcattgcctggggctggaata

SEQ ID NO: 298837 - DNA, 99 bp, Homo sapiens
agacacaattatgcgtgttttgacaacggttacgaaggtgagaatctgatgaaaattctaaaagacattgaaaacagcacagaaatcatgttggacagg

SEQ ID NO: 298838 - DNA, 82 bp, Homo sapiens
ggagctaaagcagcgtgcgttcagccctggggtgctgactgggttacttttttaaacactaggaatggtaatttctactctt

SEQ ID NO: 298839 - DNA, 82 bp, Homo sapiens
gctacttagaaaaggacggctccttatttcactccactaacagatcaactcctagcaatcatgatcggatacagcgtctgag

SEQ ID NO: 298840 - DNA, 100 bp, Homo sapiens
catcaccttcaatccgctctactggaatgtgggcagcgaggtcacaggccccacctttgctgatggcgagctcatccccagggaacccggcttttttccc

SEQ ID NO: 298841 - DNA, 100 bp, Homo sapiens
agggccgtgccgcagatgcccaccggaatggagaaggaagaggagtcgatgatgtgatgccagccacttactgtgaaattgatttagataaagaaaagag

SEQ ID NO: 298842 - DNA, 98 bp, Homo sapiens
agagctttgcttttacagcagttgcaagcatcccagccatcactcttccacctgctccttagagaagggaagatgagtgagtcgagctcgaagtccag

SEQ ID NO: 298843 - DNA, 114 bp, Homo sapiens
ctccactccgtcccccgcgggtctgctctgtgtgccatggacggctgtgagccgtgagctttgaggcggtgggatgtgtcagcagaatgtctcctgcccccgagagcgaccccg

SEQ ID NO: 298844 - DNA, 49 bp, Homo sapiens
tcctataaatctcgcccaaacaggaaagccaagcccagcaaaagaatgg

SEQ ID NO: 298845 - DNA, 98 bp, Homo sapiens
tcctggacccggcctgggagaagcagcagagaaaggtctctaattaacagaagatggcaaagcccagccacagcagctatgtccttcagcagctaaac

SEQ ID NO: 298846 - DNA, 97 bp, Homo sapiens
gagagtctgtgccgacaagatggcggacggggagctgaacgtggacagcctcatcacccggctgctggagggtctggtgagctgtaccttctttctg

SEQ ID NO: 298847 - DNA, 50 bp, Homo sapiens
ccagctccgaaatcaccaccaagagtcggatggcagagagcttgcgcctc

SEQ ID NO: 298848 - DNA, 75 bp, Homo sapiens
gtttttttgaagaagcaggatgctgatctaaacgtggaaaaactctcaagaggcagaatttatataataatcctt

SEQ ID NO: 298849 - DNA, 100 bp, Homo sapiens
cgttcactcaggaagtgatggttcgcattaaggagcttgcctcgtgcaatccagttgtgtttgagaagtcccccctgcgggtgaagaacttcgggatctg

SEQ ID NO: 298850 - DNA, 100 bp, Homo sapiens
caggtgaatttaaaggagcagccctggtgtcacctatcagtaaaagtcttaggaaaagtcctcagtgctgtgggcagtgcccagctactgatgtcccaga

SEQ ID NO: 298851 - DNA, 88 bp, Homo sapiens
caaagtctggcgtgatcaacattttgttaagattcaggtcaaagacagggattgtcgatcagtcacaacaagcataccaagaagcttt

SEQ ID NO: 298852 - DNA, 77 bp, Homo sapiens
tagctagggagtgatggagcccagatccgaatccagttgtgcatgcctaaagggctatctttcaggacacaaacgga

SEQ ID NO: 298853 - DNA, 83 bp, Homo sapiens
atcggaatgtgatcacagagcctatttacccagaagtagtccatatggtcagcccaaggccaaccccactgtcactctgttcc

SEQ ID NO: 298854 - DNA, 90 bp, Homo sapiens
agtcgcctctgtgctcgtgagtgcatggggtataagatgccggtgcagctgacgacagccctgcgtgtggtgggcaccagcctgtttgcc

SEQ ID NO: 298855 - DNA, 75 bp, Homo sapiens
atctctttctccacccatcccgagaacagtcagcgttgaagttttggtagagtatcctttttttgtgtttggaca

SEQ ID NO: 298856 - DNA, 75 bp, Homo sapiens
cccgcgcagtcccagcgccaccgggcagcagcggcgccgtgctcgctccagtggtgccaccgaacatcgcagaac

SEQ ID NO: 298857 - DNA, 100 bp, Homo sapiens
gaggtgagagagtccgggagcccgagcttgaggactttccttatcccagttgattgtgcagaatacactgcctgtcgcttgtcttctattcaccatggct

SEQ ID NO: 298858 - DNA, 113 bp, Homo sapiens
ggagaccatggctgactacctgctgtacaccctcaacaaacaccagcgctttgggattttttatcaagcagaaatgcatcgaacaacgagaatcaagatcactgagctaaatc

SEQ ID NO: 298859 - DNA, 119 bp, Homo sapiens
caaagactggcaaaagcacaaggattctcgctgtgacagagacaacaccgagtatgagaatccaatatcagatggaaatgatgcggagccttcgccatgtaaacattgatcatcttcac

SEQ ID NO: 298860 - DNA, 90 bp, Homo sapiens
atggctggagcatctcttgataaaggtggagccgccaccaaaatgcagattttcgtgaaaacccttacggggaagaccatcaccctcgag

SEQ ID NO: 298861 - DNA, 83 bp, Homo sapiens
tggcccgaagccttcctttatcgctttcaggtcagggaagtcaaagatgcatccctgagttcttcctagcaggcaagcagccg

SEQ ID NO: 298862 - DNA, 50 bp, Homo sapiens
gccatggccgccgccgatgccgaggtcagccatgtcatctgagcctcccc

SEQ ID NO: 298863 - DNA, 75 bp, Homo sapiens
cgaagccgttagtcccttaatacaaagggccagtcccttcctgattccctgatgcagtttggaggagccacccca

SEQ ID NO: 298864 - DNA, 75 bp, Homo sapiens
ctccctccgccaggacccgcacagacgcaaacatgcagatctttgtgaagaccctcactggcaaaaccatcaccc

SEQ ID NO: 298865 - DNA, 105 bp, Homo sapiens
aacagagcagcagcagcagagatgataacatgtttcagcatgcaatgatgctacctgttctgacccatcatatccgctaccaccaatgcctaatgcatttggaca

SEQ ID NO: 298866 - DNA, 100 bp, Homo sapiens
ccaaggcagacagcggcgccttcctgctgctcttcctgctcgtgctcactgtcaccgagccgctgcggccaggcaagccgattttttcagttgatattca

SEQ ID NO: 298867 - DNA, 143 bp, Homo sapiens
gtgcaggagggccgtcaagatcctcaagaagaagaagttgcgaaggatccccaacggggaggccaacgtgaagaaagcgcatcagcgaggaggtggggctgctgcagctccttggggaccccccgccccagcaggtcacccag

SEQ ID NO: 298868 - DNA, 78 bp, Homo sapiens
tgaattttccccccaaactgcaataagccgccttccaaggagcatcagatccatgctgctgctgactcggagccccac

SEQ ID NO: 298869 - DNA, 97 bp, Homo sapiens
ccctctgccccttttggggaaccttctgcagatggacagaagaggcctactcaaatcctttctgagggttgtgcacagggacctgaagcccagcaac

SEQ ID NO: 298870 - DNA, 100 bp, Homo sapiens
caggaggaagcttcaagcacctgcatgctttccagcctcagtcagatgtatcggcaagcagtgtaaacggaggacttggggaaaaaggaccacatagtcc

SEQ ID NO: 298871 - DNA, 100 bp, Homo sapiens
gagcgtgccctacttcaaggataagggtgacagcaacagctcggcgggctggaagggtcctgtattaataggaagttcacatggtggtgtcaacattgaa

SEQ ID NO: 298872 - DNA, 90 bp, Homo sapiens
cttttaaatcctgaatagtttgtggcagctggagatcacctagtccaccactgtccaacatggcaatgttgcctgctaataaagatgcct

SEQ ID NO: 298873 - DNA, 123 bp, Homo sapiens
gtcatttgtgcattttgggtgtacaggcatcacaagatggcctaccctcctgtacttgttccaactcaagaacatcatttacagcgagcaatttcagcacagcaagtgtttagagaaaaaaaa

SEQ ID NO: 298874 - DNA, 100 bp, Homo sapiens
tgaagaagcagaagaaccgggcagccgcccagcgaagccggcagaagcacacagacaaggcagacgccctgcaccaggaagaaatacccctggaaagcca

SEQ ID NO: 298875 - DNA, 100 bp, Homo sapiens
ctgcagcctctctgacaagtggcaccacctacctatgatgccgtggtacagatggagtaccttgacatggtggtgaatgaaacactcagattattcccag

SEQ ID NO: 298876 - DNA, 74 bp, Homo sapiens
cagaaagagtcaacagcagtggcaacaggtcctgggaactccaacaagggagcaaatcagagaaatgaacccaa

SEQ ID NO: 298877 - DNA, 75 bp, Homo sapiens
gaattaaatgccgagaaggccagtacgatgcttgctttaaatcgagtaacagcatcgcacccatttatgactgcc

SEQ ID NO: 298878 - DNA, 75 bp, Homo sapiens
ctctggtggaggcgctcttcctggtgtcccgcccaatcctgataacttaagtgactctctcttttccggtgatga

SEQ ID NO: 298879 - DNA, 100 bp, Homo sapiens
ccagaatccgcgcgcaccgcggtgtatgcaacagcgttattgcaacaggctaacgaaaacagacaaaattcaactggaaaagcatgttttggcaccttcc

SEQ ID NO: 298880 - DNA, 75 bp, Homo sapiens
caggaacgtggccgacgacaccagttcagagaagccgaactgggattaccatgcagaaatacaagcttttggaca

SEQ ID NO: 298881 - DNA, 98 bp, Homo sapiens
gagaggcaccgggatcgtgaccgagaccgtgaccgagagcgtgaccgagagcgcgaatatcgtcatcgttagaaggaaattcacagtatggccaacag

SEQ ID NO: 298882 - DNA, 83 bp, Homo sapiens
caggcagctcgaggacccgcggccccgccccggctcggcctggcagtcaccaggagactaaagtccatcaaaaacatccagaa

SEQ ID NO: 298883 - DNA, 75 bp, Homo sapiens
cggcgggagcgcccccgatccggacaaagaaacgagcgctcgttatgtgtctcggtaccacgtgaaagactcctc

SEQ ID NO: 298884 - DNA, 108 bp, Homo sapiens
cggagttctacgtgtcccccgaggatctggaggcacagctgcagtctgacgagaggggtgaaaggtgtagcagtcactcggcctacacccacagcatcgaccttgtga

SEQ ID NO: 298885 - DNA, 98 bp, Homo sapiens
cgggcttggcttcggctccttgaggagttggcggcggcgcgacccggggaaccggcattgggtggtgctggtgttgcgggaacgctggcatttctgcc

SEQ ID NO: 298886 - DNA, 80 bp, Homo sapiens
ccaagtgcgagcccagcgggagaaaatcaaggagtacaaaattggacagctgtacatgatcagcaaacacagccatgaac

SEQ ID NO: 298887 - DNA, 75 bp, Homo sapiens
agggacaccatgtagagaattttggtctcgattcagtttgcagaaaaaacttcagcatgtgccaggaacacaacc

SEQ ID NO: 298888 - DNA, 50 bp, Homo sapiens
caggactgctcatggtaattgcacttgtgtgccggtccaacaaaagccct

SEQ ID NO: 298889 - DNA, 74 bp, Homo sapiens
gacgggctacatgctgagatgttccctgtctcacgccatcactctgaatatttctcttagaagatgacatccat

SEQ ID NO: 298890 - DNA, 90 bp, Homo sapiens
gtcggatttcaccacaagaagggctgccaggataaaagaatcagagtgtctcaacccttgacaagaggaccaagtgcctttattccagag

SEQ ID NO: 298891 - DNA, 100 bp, Homo sapiens
gtttgttgaacttgaagagacatatggacaatgaatctgcaaagcagacatccccccatccccaggaaatatccctaccacccatccactgatggtgcgc

SEQ ID NO: 298892 - DNA, 100 bp, Homo sapiens
tagtagaaaaagttcttgggacaaacttcatttggcttgagtacagtggcgtgaccacggctcactgcagctttgacctccttggctcaggtgatccttc

SEQ ID NO: 298893 - DNA, 101 bp, Homo sapiens
atccacaccatccttctcgctgcaggtggaaagaggccagaagatcagtgagcagattgtcattggcacccctgggaccgtgctggactggtgctccaagc

SEQ ID NO: 298894 - DNA, 80 bp, Homo sapiens
gggggaggcgacgctaagttgctgatcgtggcggcctcagaagccacaggaacatggcctaggcatggctcagccagcag

SEQ ID NO: 298895 - DNA, 100 bp, Homo sapiens
cctggaccttgcagccgcaatgagaatgcaagatggagattgaagacaaaaagcaggagctccttgaaatggatcaggcacttaaagagagaaattggga

SEQ ID NO: 298896 - DNA, 96 bp, Homo sapiens
ggggccgcggccggaccgagcgcctcgacctcggtctgagttctaaggacatatggaattggctatggataattcatatgctttcaatcaacgaag

SEQ ID NO: 298897 - DNA, 75 bp, Homo sapiens
tctctgttattttcttctttcttatcatcagtgtgttagctttccccaatgtggtttatcagatactatcatttt

SEQ ID NO: 298898 - DNA, 100 bp, Homo sapiens
gcggcagagccggtagcggacggtccttgcattggcctccggcaggcgccccccgggggcgggaagctggtggggaagaaaacatgacagaaacagatgc

SEQ ID NO: 298899 - DNA, 100 bp, Homo sapiens
ccgcggaggaagacagcgccgcccgcgcaccgccagcgacctccgccgcagagtcccaccgccacagggggggccctcagcctcttggccttgaacgggc

SEQ ID NO: 298900 - DNA, 50 bp, Homo sapiens
ggctgcctaatttacagcaaccatgagaacgacctgcagcaataccattg

SEQ ID NO: 298901 - DNA, 91 bp, Homo sapiens
cagcgcgaacatggacgccgtcaacgccttcaaccaggaggtctaccctgaactgcagatcaccaatgtggtagaagccaaccaaccagtg

SEQ ID NO: 298902 - DNA, 82 bp, Homo sapiens
ccccgctcccgggaaccgttcccgggccgttgatcttcggccccacacgttggaatcgaagcctcttaaaatggcagatgac

SEQ ID NO: 298903 - DNA, 97 bp, Homo sapiens
agccaaaagatgactaaagaaatacaagttaaggtatctggcattggaggtgatccttttaatggaacagattttattgactgcctcgaaatctttt

SEQ ID NO: 298904 - DNA, 96 bp, Homo sapiens
ccattgtggctgaccatccaggtataggatgatcctagtgctccccacaaaatccaggaggttctcaagtcctgcctgaaagaggaggagtcattt

SEQ ID NO: 298905 - DNA, 99 bp, Homo sapiens
tgtggtcgcgtctcggaaaccggtagcgcttgcagcatgggcgaagctgtgctcaggcccgggctggacgcagagccagagctgtccccagaggagcag

SEQ ID NO: 298906 - DNA, 90 bp, Homo sapiens
catgatcaagggtgttacactggtggggatagcagtgcaacagaaagctgggatgaggagctttctccttccactgtgttgtatacagca

SEQ ID NO: 298907 - DNA, 82 bp, Homo sapiens
cactatcctcagaatatagaatggaacccttttgatcaagatgcggtgaacatgaaacaggtgggtgagatgaaattacaac

SEQ ID NO: 298908 - DNA, 51 bp, Homo sapiens
gtgctctttgggcctcctctctatcagcggtttgagtgctacgtttgcaga

SEQ ID NO: 298909 - DNA, 88 bp, Homo sapiens
gcccatctgcagggacgcgtacgagctgcaggaggttatcggcaaggtgaccgttctggatgctagagtgagtgtgcccacctgcgta

SEQ ID NO: 298910 - DNA, 76 bp, Homo sapiens
aacatcaagggagttttccggggccctctcagcaagaacgggaacaaaactctgcctacacgcttgaatgtgttca

SEQ ID NO: 298911 - DNA, 98 bp, Homo sapiens
tttcagtcactggtttgcagagtccagtcctggtacctgggctagcttggttcctttccaagtgtcaaataggacacccatcttaccggccaatgtcc

SEQ ID NO: 298912 - DNA, 100 bp, Homo sapiens
gccgcaaggcgagagctgcaaagacctcaggatatcattgtgtttgtaattggaggagccacctatgaagaggctctaacagtttataacctgaaccgca

SEQ ID NO: 298913 - DNA, 96 bp, Homo sapiens
caatatctgtcttcggtggactccttcggcagtccacccaccgccgccgcctcccagaacaagttgaaatcatcgcagaaggataaagttcgtcag

SEQ ID NO: 298914 - DNA, 50 bp, Homo sapiens
cctggctccccatactagtcgccggcatgctgaggtgatgaagaaaatca

SEQ ID NO: 298915 - DNA, 83 bp, Homo sapiens
tgaaggaatttccccgtaccgcagcccccgggcacgacctctcggacacggtgcaggcagaacatccagtcatggataaaaat

SEQ ID NO: 298916 - DNA, 100 bp, Homo sapiens
ctggtctcctactcccagatgcatccgtgtcaaaaggaagctgttgaagttattgaagtacctgttgctatattctaagaaattaaaatgtccagaaatc

SEQ ID NO: 298917 - DNA, 51 bp, Homo sapiens
gccaccatggaggcgcaggcacaagacaggtgctctagttcacagctatag

SEQ ID NO: 298918 - DNA, 100 bp, Homo sapiens
tggcgaatggggctcacgtcgaccacttccggctcctgcgtcgctccggaagcctgcgagttccggaagccttggtaatccagattcggctaggaaaaga

SEQ ID NO: 298919 - DNA, 83 bp, Homo sapiens
cacgcagtgacgagcggccgaagcagctttgcggtgctgaaggtcgccatcctggctgagaagtacgcggtggactacacctg

SEQ ID NO: 298920 - DNA, 75 bp, Homo sapiens
ataatggaatatcttggtggaggctccgcactagatctaaaaactttagaaactgttcctttggagaggaaaaag

SEQ ID NO: 298921 - DNA, 82 bp, Homo sapiens
ctgaaactgctcctgcagcgagagctcacggaattcctctcggagggaattgtcgagaatcttttcaaatgggcccgagagg

SEQ ID NO: 298922 - DNA, 83 bp, Homo sapiens
taaaggacaaacaagtgaaatacttcatacattacagtggttggaataaaaatcttgccacttgcctagtgaggcttttccga

SEQ ID NO: 298923 - DNA, 83 bp, Homo sapiens
cggacagggccgcctgtcgccggggaacccgagcgtcatgttagggtgaagcagaggacctcagtgctgaacatgctaaggag

SEQ ID NO: 298924 - DNA, 97 bp, Homo sapiens
cccacccccctggggctgcaggagaccatcgcagagtttttgtacattgcccggccgctgctgcactatcgtgttcgacgagtgtcacaaagccaag

SEQ ID NO: 298925 - DNA, 100 bp, Homo sapiens
ggtcctaaaacaggatcagtaaagaaggaaaaagcagtaaagccagaggaagctgtttttggaaggaagaaagatggaaagcggtgcagttctgctggaa

SEQ ID NO: 298926 - DNA, 50 bp, Homo sapiens
cagcagtggcggcagcgcccgagagagagataattgacgaccttgccaac

SEQ ID NO: 298927 - DNA, 82 bp, Homo sapiens
ccttctacagtgacggggagatcagcatttgcatggaacacatggtgacaccggaaactggtactcaagtgatgaggatgag

SEQ ID NO: 298928 - DNA, 130 bp, Homo sapiens
cagaagtttatcaaggctgtcacacatcaagttaaatttggtcaacaaaatccacgtcaggtaaacactacacgtgaagagtggtgaaagggaacattgattactgaagtgccctggagagggaaagcac

SEQ ID NO: 298929 - DNA, 90 bp, Homo sapiens
gtctgacttccagttccagcgtacgaggcaagaagttccacatgagggcgatttggatataatttttcaggatggtgcaactaaaacccc

SEQ ID NO: 298930 - DNA, 100 bp, Homo sapiens
cgaacagtctcgttgctgcctctgtgtacgctgaggggggaggtgtaaagcaggccctctggctcaccaagaccaagttaatagaaggccttcccgagaa

SEQ ID NO: 298931 - DNA, 90 bp, Homo sapiens
cgggacagcggccccctggagggggcagtcccgggagaacctgcggcggccggagcgtgttcagactgcatcacagtgcttccgatacaa

SEQ ID NO: 298932 - DNA, 51 bp, Homo sapiens
tagcactcgcagagaaatatgggctcacgaggcccagggaatcctctggac

SEQ ID NO: 298933 - DNA, 80 bp, Homo sapiens
gagcctcagttggaagcagccgatccagcctgcggagcctgtggggcagttgatattcactgatggactccaaagaatca

SEQ ID NO: 298934 - DNA, 100 bp, Homo sapiens
tcacatcgtgatgaagagtgataaggaaattgttggtactcttctaggatttgatgactttgtcaaaatccctcactttaaggaggttatcatcatggct

SEQ ID NO: 298935 - DNA, 74 bp, Homo sapiens
gattcgcagtggtcgcttcttctccttggctgtgtggttccaggtgctggtgccgtggaagtggcaatggcaga

SEQ ID NO: 298936 - DNA, 83 bp, Homo sapiens
cacccacagcggggcggcggcggcggcggctgcggcccaatataggcaccaggatcatctacgaccgaaagttcctgctggag

SEQ ID NO: 298937 - DNA, 90 bp, Homo sapiens
gcctcttgaaagtcagaatttttctcctgtggtgagagatggtctggtggttccagtcatcaggaatgtggaagctatgaattttgcaga

SEQ ID NO: 298938 - DNA, 96 bp, Homo sapiens
cagatcagcaaccaaataggaccaatggaggctcagtagatgaaggcgtttctgagggcttgcctacacttcaaagcacgtctagcactaatgctc

SEQ ID NO: 298939 - DNA, 100 bp, Homo sapiens
agaactccgagatgctctgctcctgatttttgctaacaaacagtgtcagaataaattatcacttattggaactgaaacactcaccgattcaaatgctcag

SEQ ID NO: 298940 - DNA, 100 bp, Homo sapiens
gcaacttcgcggtggtcaagcgggccacgcacctcgtcaccaaggccaagctccttcgagaactcatagaacggaagaccagctccttggatcccaacga

SEQ ID NO: 298941 - DNA, 75 bp, Homo sapiens
gcggggaccgctgtgctctcgcttccccgggcgctgcctggacaggcctgcctgcgtgctgggacatgtctggcc

SEQ ID NO: 298942 - DNA, 74 bp, Homo sapiens
ggggagctcatcggcactctgaacgcggccaaggtgccggccgacaccggtgacgccgcagccgccgggagccg

SEQ ID NO: 298943 - DNA, 90 bp, Homo sapiens
caaagtttttgaacacaacatgtggtccaacctaaacatgtgaaggaagctttccggttactgaataaatcaatcatccgtgtggaaaca

SEQ ID NO: 298944 - DNA, 88 bp, Homo sapiens
gcgcgaggagtcgctcgggcacttattgagcgccgactgtctacgggcggccgggggttggtgacagcgtcccaagctggtgacagac

SEQ ID NO: 298945 - DNA, 50 bp, Homo sapiens
agcagcgtgcgttcagccctgggggagaagatgtcaaccggacactagaa

SEQ ID NO: 298946 - DNA, 75 bp, Homo sapiens
gaaggagaacctcttcatcctggaggaggagcagcggatcaggctggataaagataaagtttctctaaccaagac

SEQ ID NO: 298947 - DNA, 75 bp, Homo sapiens
gagccaggtccctgtctgagccagatgaagcctgctgggagcgtgaatgacatggccctggatgccttcgacttg

SEQ ID NO: 298948 - DNA, 75 bp, Homo sapiens
caaccttgtgggatgtgaaaactctgttactgaaggaaaccactgattgcttgtgtggagaaacagctattagga

SEQ ID NO: 298949 - DNA, 83 bp, Homo sapiens
cgtctcttacgtctgcggaagtgcagctgcctcagttcttagcgcagcagcaagatgaagagcgacgtcggcagctgagagag

SEQ ID NO: 298950 - DNA, 82 bp, Homo sapiens
ttcacccatctgaagggaggaaatagtggcaggtgacagtctgcatgtgcagttttcaggccttgtttgtatgaagtccagc

SEQ ID NO: 298951 - DNA, 87 bp, Homo sapiens
gtaacatacttcaacaagccagatatagatgcctgggaattgcgtaaagaagattaagattgcggccctgcgcatgtatactagctg

SEQ ID NO: 298952 - DNA, 51 bp, Homo sapiens
caggcccaacagacttttatagctagcttttgcacagcatcaggctgaagt

SEQ ID NO: 298953 - DNA, 75 bp, Homo sapiens
tgatgaaaatgagcaccagttatctttaagaacggtggataattactgtaccttcctcatggaaaaagttttatt

SEQ ID NO: 298954 - DNA, 75 bp, Homo sapiens
cagaaccaccccagtgcacctccctggcctggtctgctgatggccagagcttaatgattaagagagagttggcaa

SEQ ID NO: 298955 - DNA, 100 bp, Homo sapiens
tcccagcattctgattgaatttattaacatgtttttattcccagccagtaaaacaagtggcctttacacagggcagctaagcgtgtgtcactgagaaccg

SEQ ID NO: 298956 - DNA, 95 bp, Homo sapiens
aagctcccaagagggagaagtcggctccggagccgcctccaccagatgatgtgatgccagccacttactgtgaaattgatttagataaagaaaag

SEQ ID NO: 298957 - DNA, 131 bp, Homo sapiens
tcaatatctgtcttcggtggactccttcggcagtccacccaccgccgccgcctcccagaacatccagtcatggataaaaatgagctggttcagaaggccaaactggccgagcaggctgagcgatatgatga

SEQ ID NO: 298958 - DNA, 83 bp, Homo sapiens
tgcgtgccctacttcaaggataagggcgacagcaacagctctgccggctggaaggacataagcagctctatgaccaatagcac

SEQ ID NO: 298959 - DNA, 96 bp, Homo sapiens
ggaaaccctcttgacactgtgttaaagaatccacattcatctcaatggaaggatcctgccttaagtcaacttatttgtttttgccgggaaagtcgc

SEQ ID NO: 298960 - DNA, 100 bp, Homo sapiens
gctcgatctgctcttcgtctgcttcttcctcttcagtcaaggatgctccaaagtgacctgcatcagcttgacccgggaggcctccattaaactgtcaccc

SEQ ID NO: 298961 - DNA, 75 bp, Homo sapiens
tggaacgttctgcgccagcgcgtggactcctgttcctatgacctggaccagaaacctgctcctccaaagccagag

SEQ ID NO: 298962 - DNA, 75 bp, Homo sapiens
ccgcgtgctgagtggaaagttccgcatcccattttttatgtccacaggtactccaaagattcaggtttactcacg

SEQ ID NO: 298963 - DNA, 82 bp, Homo sapiens
cgcgccgggcgtggacggtgtggggcggtcccggccccgcagactccgtgggaaggaggcttgtttaaactacggatgcttt

SEQ ID NO: 298964 - DNA, 98 bp, Homo sapiens
ctgccgccgctctgaggagttaaagatccttgccagcacattacagaatatttttgttgaaccttcttgagaattcagagaaactgctgagtgaccac

SEQ ID NO: 298965 - DNA, 95 bp, Homo sapiens
agctagattctgggatagattaccggaaaagggaacttcctgctgcaggaaaactctactacctagttgatctctctaatgtattagatcttcat

SEQ ID NO: 298966 - DNA, 100 bp, Homo sapiens
tttttctcaatacgaggcgcaaggtggactggctgactgagaagatgcatgccagagacttcacagtttctgctctgaggaggaggtggaggaggaggag

SEQ ID NO: 298967 - DNA, 75 bp, Homo sapiens
gacatcctggaagctgggaaaagatgttcagaaaatcattggtaaagatgtttgaagataaaggattagactgca

SEQ ID NO: 298968 - DNA, 100 bp, Homo sapiens
gcttacccagcttaaagagctccacattcaggggaaccgcctcaccgttctgcccccagaactagccacagacccctttgcttctgtttttgggaatgaa

SEQ ID NO: 298969 - DNA, 75 bp, Homo sapiens
gctacatccccttcttgctgagcgcccagaggcacccacctgtgggagttcatccgggacatcctcatccacccg

SEQ ID NO: 298970 - DNA, 88 bp, Homo sapiens
aaggctaatggcacaactgtccacgtaggcattcaccccagcaagaacctggggtctctgttctccatccgtgttgtgggactctctg

SEQ ID NO: 298971 - DNA, 100 bp, Homo sapiens
aaattgtttatgccaaatcaactgccttacaggtatataaagaacaggttttagaacctatgctaaatggaacagataaaacaccagcattaatttctga

SEQ ID NO: 298972 - DNA, 100 bp, Homo sapiens
tacccgtcttgaggaatgtgagatatttggccttgacattaaaggcagagactgtggcaatgaggcagctaagtggttcaccaacttcttgaaaactgaa

SEQ ID NO: 298973 - DNA, 82 bp, Homo sapiens
caggaactgtctttatctgctgtcaaggatcttgtgtgctccatagtttatcaaaagagctctcagcatggcggctcctcta

SEQ ID NO: 298974 - DNA, 50 bp, Homo sapiens
gcccgatcccagcaggacattgaaaggtacttcaaaggctcatcaagtcc

SEQ ID NO: 298975 - DNA, 100 bp, Homo sapiens
ctacacaatgcgttgcctggctccacgccctgctgggtcctacctgtcagagccccaaggttgaaatcacaaagattagacacctttttagataggtgtt

SEQ ID NO: 298976 - DNA, 100 bp, Homo sapiens
gcaagaggcgcaaacaagccaatcccaggaggaaaaacggactaatttattattgtgcaactgccagtcctgcgcattccagctacgctaagcgccctgc

SEQ ID NO: 298977 - DNA, 55 bp, Homo sapiens
gacgggctcccccgggatgatctacaggatcttagaaatgaagttgaaaaattac

SEQ ID NO: 298978 - DNA, 51 bp, Homo sapiens
cgttctcaaggagaaggcagacctgggttggatttggtctagggagtccca

SEQ ID NO: 298979 - DNA, 75 bp, Homo sapiens
gatacttttagttattagacctcctgtcattgctggccaaataggctttatatgaattggttaaatgcaattttg

SEQ ID NO: 298980 - DNA, 82 bp, Homo sapiens
ccaaatcttgcggcaacgcccccgggacatgcatcgtcccctggactctctcaagtcaaggaagctgatccgctgagtaatg

SEQ ID NO: 298981 - DNA, 98 bp, Homo sapiens
ttttttgctctccctcgagaagctccagatggcgtcttccgtgggcaacgtggccgacagcacagctgtggccagaagagctccgaagagacaggcga

SEQ ID NO: 298982 - DNA, 98 bp, Homo sapiens
tccagcagatggcggatgccctgcagtacctgcagaaggtctctggagacatcttcagcagacttgctatggagagactctatgcagtttttacagat

SEQ ID NO: 298983 - DNA, 100 bp, Homo sapiens
tcaccagccaggaaaacctttgttggggatgaagattcttgacgttggctgtggtggtgggctgttaactgaagaccccagccatgataggctgctcgtt

SEQ ID NO: 298984 - DNA, 74 bp, Homo sapiens
tagggctgagtctgggaccgagctccttcgagaactcatagaacggaagaccagctccttggatcccaacgatc

SEQ ID NO: 298985 - DNA, 100 bp, Homo sapiens
gtccctcctgacgctcagaaggatgccctgggctgctgcgtggtacaggagtaaacatggaagtactaacttcattccagaacaatttttggatgacttc

SEQ ID NO: 298986 - DNA, 80 bp, Homo sapiens
ggcgtccgcagctgctggctgctcatttgccggtgaccggagggggatatgagactttctactcggaatatcctgagtgt

SEQ ID NO: 298987 - DNA, 100 bp, Homo sapiens
ggcgggtgttgtgagcgggaagtgggtaggagccaaacagcatgaattacaagtgaactcaatgcagctgctgtactaccaggctccgatgtcatctgcc

SEQ ID NO: 298988 - DNA, 80 bp, Homo sapiens
gggaaccctggtcaccgtctcctcagaacagatctcggcccctttccaaacactcctgatgcctcatttgcctctcgcct

SEQ ID NO: 298989 - DNA, 96 bp, Homo sapiens
ttataatgctcgcagataagcatgctagaccgcagctgaatgcacagctagaaggttggctttcacaagtacagtctacaaaaagacctgctagag

SEQ ID NO: 298990 - DNA, 90 bp, Homo sapiens
tctctctttccggattctgcctccctccgctaacctccgagcgtttcccaaagtgtattctgcggaactagcacctactgtgttctcaac

SEQ ID NO: 298991 - DNA, 74 bp, Homo sapiens
cgcagtggtcgcttcttctccttgctgcggcatgaagctgaacctggactatctgctggagatgctttgggagt

SEQ ID NO: 298992 - DNA, 100 bp, Homo sapiens
cactatggcgctgaaacggattaataaggattggtccaaaggaagattttttccattgtttgaaatgtaacttatgcctagctatgaatcttcaaggaag

SEQ ID NO: 298993 - DNA, 87 bp, Homo sapiens
cgaggcaaggagctaaagcagcgtgcgttcagccctgggagccccccaagatgaacccagtggtggagccactgtcctggatgctgg

SEQ ID NO: 298994 - DNA, 50 bp, Homo sapiens
tgaagacaaggttaataaagctgccaagatggcccactgcgtgaccttgg

SEQ ID NO: 298995 - DNA, 50 bp, Homo sapiens
caggcaccttcgggccctcctgccttcgtctctggacctctgactgacac

SEQ ID NO: 298996 - DNA, 98 bp, Homo sapiens
gatgacctcattagcatgggatccaacgacagtaagtacaggtttttagaacttcagccataaaaatgggcagaattttccttgatcatatcggtggt

SEQ ID NO: 298997 - DNA, 75 bp, Homo sapiens
acccgtgccggccagcgcaccaggttcaaggatggggaggtgattggagtgaacaccatgaaggtcacagctgga

SEQ ID NO: 298998 - DNA, 100 bp, Homo sapiens
gaggtggaggaggcaaacaagtgtaatcgtttatacatacccacaggtgacattgcattccggttccttaattatgttcagtcccagcatcagagaaaac

SEQ ID NO: 298999 - DNA, 126 bp, Homo sapiens
cgctgccgactgcatttcctcagtcacgggcctagaactccaaggagaaaggcggcggaggaatgccagctcctgagcaggcctcattggtggaggaggggcaaccacagacccgccaggaagctg

SEQ ID NO: 299000 - DNA, 100 bp, Homo sapiens
tcctggaagatctccgcactctggagcataatgtatggatatcagtattgacaaatagcaaagaagaggccctaaccatggccttccgtggagagcagag

SEQ ID NO: 299001 - DNA, 100 bp, Homo sapiens
caaaactccatcgtaactgaaagaggaaatcttctacaaattccaggtatatgaccgggtatcagtggaagctgtgttgccaatggacaaacgactggac

SEQ ID NO: 299002 - DNA, 98 bp, Homo sapiens
gagaccctagaggcctgcggcctgcggtggcacaagatctctgtaaagtagcaggcatagcaaaagttctggtggctcagcatgatgtgtacaaaggc

SEQ ID NO: 299003 - DNA, 82 bp, Homo sapiens
tctcgcttcgtcctacacttgcgcaaatgtctccgatggagttttaacattgaatgcggagaacactaattatgcctatcaa

SEQ ID NO: 299004 - DNA, 98 bp, Homo sapiens
tgtcattcacaaccccctgaaagcgactcacaccacccggcaagaactgctcactacggctccctgccccagaagtcacacggccggacccaagatga

SEQ ID NO: 299005 - DNA, 100 bp, Homo sapiens
tgaaacacacaggcaccatcccaggggcacaaggactgatgaacagttccctccttcatcagggttgtctcctcacagactatgagctccttgaaagagg

SEQ ID NO: 299006 - DNA, 96 bp, Homo sapiens
agcgtttcgtgcccctcggacccggccacgcagtccccaggggcccggcccggggcgcgttgaagggttctccaaaaaatgtggaatcctttgcat

SEQ ID NO: 299007 - DNA, 75 bp, Homo sapiens
aaaaactaggatccctttttgttaaacacgcctgctgaaaatgactgaatataaacttgtggtagttggagctgg

SEQ ID NO: 299008 - DNA, 87 bp, Homo sapiens
gacaaaaagcaatgcaagagtcgctttgttacacctttcaagtgtctcggcagagatcctacaagaatccaggatgatgatcccaga

SEQ ID NO: 299009 - DNA, 73 bp, Homo sapiens
acacattcactgacaaactctcacgctcacaccgggtcatctgattgtgattttacaacgagatgctgctctc

SEQ ID NO: 299010 - DNA, 97 bp, Homo sapiens
ttataaatacagaagaaagagcaacccaccaaacctaacaaggacccccgaacactttcatactaagactagcagcccgacggccatggaggctgaa

SEQ ID NO: 299011 - DNA, 98 bp, Homo sapiens
ttgaagaaagcatctcacagctccgacactattgcgagccatacacaacctggtgtcaggcaccgtataaacttgagttcagacttcctgattactcc

SEQ ID NO: 299012 - DNA, 100 bp, Homo sapiens
ccaggaagatcaagaaagtgggaaccactgagaaggaacatgaagcagtgactcttcgagaagacagtgccaagaggttggagaggagggcacgccgcat

SEQ ID NO: 299013 - DNA, 95 bp, Homo sapiens
aaactaacccaacagcagaaagcgggtcatcgtattgaggaagttcctgaacttcctttggtagttgaagataaagttgaaggctacaagaagac

SEQ ID NO: 299014 - DNA, 73 bp, Homo sapiens
ccgctcgctgggagagaggtacctctccttttccctctccctttccctaagtacagtgctgtggataccaatc

SEQ ID NO: 299015 - DNA, 80 bp, Homo sapiens
ccaagatggtgaagcagatcgagagcaagcagcctcccgcgacgatgcccctcaacgttagcttcaccaacaggaactat

SEQ ID NO: 299016 - DNA, 97 bp, Homo sapiens
gcctcctcagtgcgaagaagctgcagccgcacctggccaagggtttccatgttgctgaggccatggagattcccagagctggtcacaccgaccgctc

SEQ ID NO: 299017 - DNA, 97 bp, Homo sapiens
ggacgcgtcacacacagcgaggatttgaggagggaagcgccttccagagttcctgagttggaggtagaagaagaaacccaagttcaagagatgactt

SEQ ID NO: 299018 - DNA, 100 bp, Homo sapiens
cgctggccggatggaaatcctaatgacagtctccaaattcgcctccatctgtaccatgcctggcacctgtgtttgctctgtttgtaccattttactgctc

SEQ ID NO: 299019 - DNA, 50 bp, Homo sapiens
taaatcatgactgatcttgtagcgggtttgttaaagttgttaagaataag

SEQ ID NO: 299020 - DNA, 74 bp, Homo sapiens
gaataataaaagttaaaacaattgctgcacgaaacactgaaattttggcaggtccccaggtgcatccaattttt

SEQ ID NO: 299021 - DNA, 82 bp, Homo sapiens
agccgcaccatgccgctcctaagcctgcacagccgcggcggcagcagcagtgagaggacaaatatacgtgtatgttcactta

SEQ ID NO: 299022 - DNA, 99 bp, Homo sapiens
cctcaatctctactcgaagaagaaagagaagaaacgttttctcaggttcagcagactgtacaggatctttttggcagagccccaagtaaagctgtcaat

SEQ ID NO: 299023 - DNA, 75 bp, Homo sapiens
tggatccattcctcccattcatgtgcctccaggttatatctcacaggagattatttggtagcaattgaagagaaa

SEQ ID NO: 299024 - DNA, 97 bp, Homo sapiens
gaaaaggatagcttcagaaatcagaaaaacatttgggaggtgtctagcccagtggaccttctgaagtatgaatctgatgaacaagaaaagagtgcct

SEQ ID NO: 299025 - DNA, 98 bp, Homo sapiens
gcaacattaagaaggagctgtttaaggtgaaaggtgtagcagtcactcggcctacacccacagcatcgaccttgtgaacccagcgacctgactgcctt

SEQ ID NO: 299026 - DNA, 87 bp, Homo sapiens
gaccgtccgtcccgagcgcgcagccgcggcaggaacaagatcactcaaggtgaaggataatctactaataccagcactttgaatgaa

SEQ ID NO: 299027 - DNA, 100 bp, Homo sapiens
gtgggggagccgggccctcccctcaggaacgtgtcccggggccgacccggcccgtagtgtggaagcagcttcagccaaaactggacaagccaaggcatct

SEQ ID NO: 299028 - DNA, 50 bp, Homo sapiens
catgtggtttggcacccaagtcaggaggccctggccaacgtcaacattgg

SEQ ID NO: 299029 - DNA, 90 bp, Homo sapiens
tgaaaatacagccaagatcttggcaaagcttctccctcagtatttagaccagtggtggacttgctttgtgaagagacagttcatgaacaa

SEQ ID NO: 299030 - DNA, 98 bp, Homo sapiens
tcagagacatgagaagattcatactgacactgtgcatcttagccaacatagcggatgggacaacagcaaaagatcttattatgaccaatgatgatatc

SEQ ID NO: 299031 - DNA, 100 bp, Homo sapiens
aaaattacagtgtgggacataattgtgtttattctatagcagttccaaaggagtttgaccaaacggaccctgtgagcatggggctgccagtgaaaggagg

SEQ ID NO: 299032 - DNA, 50 bp, Homo sapiens
ccctaataaagcgactcattgagcaggataaggaagcctgtgtgggtacc

SEQ ID NO: 299033 - DNA, 90 bp, Homo sapiens
gcagcttccccccgcgcctctcttcgcctcgcctcgggacccgcggtccccgctcttgctggtgacagattgactgggatcccctcgcac

SEQ ID NO: 299034 - DNA, 82 bp, Homo sapiens
cagcgagttcaaggagttcaccacacgcacgcaggcccctgagccaagccccccgagaggcccctgctcgtcgggccccatc

SEQ ID NO: 299035 - DNA, 50 bp, Homo sapiens
gagaagccctcgagcatccccacagagttccacaaacatgtggagtttga

SEQ ID NO: 299036 - DNA, 90 bp, Homo sapiens
ccaaccaaagaaggaggatatggccttaaatcctatcagcctctaatgagattgcgacataagggtggttctcttcccaaagtggaagcc

SEQ ID NO: 299037 - DNA, 100 bp, Homo sapiens
tgcacgagaacatggactcatcttcatggaaacgtctgctaagactgcttccaatgtagaagagctccatacacataagcaacctggaaccagagctgag

SEQ ID NO: 299038 - DNA, 51 bp, Homo sapiens
ggactccctggaaacctagaaatgggacagagcagaatgggctgatataga

SEQ ID NO: 299039 - DNA, 83 bp, Homo sapiens
acattgatgaaaatgcatatgcaaaggtctgcctttatctcaccagatctattccagaggggagcttcaccacttcattgacg

SEQ ID NO: 299040 - DNA, 96 bp, Homo sapiens
gtcgccgccgcggccgcctggaattgtgggagttgtgtctgccactcggctgccggaggccgaaggccttgaaccggggcattgctgctgtcaagg

SEQ ID NO: 299041 - DNA, 82 bp, Homo sapiens
agctttccagctggtggaactgggcccaggtaggggaaccctcgtgggagatattttgaggttgatacaccaaaatcggcaa

SEQ ID NO: 299042 - DNA, 83 bp, Homo sapiens
gccgcgagcgcggcctgcaggaggtggcagtagagaagagcatcacagaagttgctcaggagctgacagagctggtggaacat

SEQ ID NO: 299043 - DNA, 50 bp, Homo sapiens
attgcatcttcctctggctctacagcgtgcctccggagccagcgtggtgg

SEQ ID NO: 299044 - DNA, 75 bp, Homo sapiens
tccttctggtgtggggcccgagcattgcagtgtcgagatggctatgaaccctgtgtaaatgaaggaatgtgtgtt

SEQ ID NO: 299045 - DNA, 88 bp, Homo sapiens
tggagtcgaaggccgtgaggtatttttctaagacgtccttctatggccgcttcaggcacttcttggatatcatcgaccctcgcacact

SEQ ID NO: 299046 - DNA, 90 bp, Homo sapiens
ctcagtttgcacaagggaggcgacagagacagcagcagccatccaacatattctttacaatggatgatgtggtcaaggttggagactttg

SEQ ID NO: 299047 - DNA, 75 bp, Homo sapiens
ttggacttgggagtatctccgtattctggagcagtatttcatgaaacgtttaaggaatcctgtcttcaattctac

SEQ ID NO: 299048 - DNA, 97 bp, Homo sapiens
cccggccggagctgggtctggagacgccgtggcagcctgaacggagtgtgcgacggattgggagccggcacagtcttcactaccgtagaagaccttg

SEQ ID NO: 299049 - DNA, 75 bp, Homo sapiens
gacgttcggccaagggaccaaggtggaaatcaaacgtattgaagcccctgggtgataatttgatggaggaaaaca

SEQ ID NO: 299050 - DNA, 100 bp, Homo sapiens
atgcttttgtgcgagaagaccttgcccgccgggtgaacctcaccgaggcgagagtgcagatagaatgagtccatttaagtcccaggacggtggaaactag

SEQ ID NO: 299051 - DNA, 101 bp, Homo sapiens
caaaacctcgctccggaaaggggacacctggatctaagcctttcccacgttatggttataaaccctccccaccgaatggatgtggctctccactgtttggt

SEQ ID NO: 299052 - DNA, 100 bp, Homo sapiens
cctgtgattgttctatgacctcttattctggaaaccagtgcaatgatcattgccatcacgaaagccaaagtggatttctccagtgtggtgtgcctgcccc

SEQ ID NO: 299053 - DNA, 96 bp, Homo sapiens
actctgcagaagttggttcttctagctcaatctgaaattgaagtgtctgtctctgcaaggaatatcagaaggctactaagtttccagcgatatctt

SEQ ID NO: 299054 - DNA, 97 bp, Homo sapiens
tcatttggctgattcacttgttacaggaatcacagctctcaatagcatagagggtgtttatagggtgaaacttcctacatccgagtttatcctgaga

SEQ ID NO: 299055 - DNA, 83 bp, Homo sapiens
tccaaattcagctaatacccaaggaaattcaacaccaaatcctcaggcccctctcctacccagataccgatgttatactgatg

SEQ ID NO: 299056 - DNA, 78 bp, Homo sapiens
aacgtcaatgcacaaaatggatttggaaggactgcgctgcaggtctctgacattgacagagcctggacgttggaggaa

SEQ ID NO: 299057 - DNA, 83 bp, Homo sapiens
gctggggcttcacagtggtgcatgagacagagaaacatgagaagcagcagtggttgaaatcacaaagattagacaccttttta

SEQ ID NO: 299058 - DNA, 101 bp, Homo sapiens
cagcaagctccagtgctacgtgtccctggcattttaggtgtcggttgggtaggtgctggagaatctggtaaaagcaccattgtgaagcagatgaggatcct

SEQ ID NO: 299059 - DNA, 75 bp, Homo sapiens
tcaaagcaataccaggatagctgttgtttcagagaaagacttcaccataagggaaagaagagagccttgttggac

SEQ ID NO: 299060 - DNA, 75 bp, Homo sapiens
gacaagtggctcagctggccaagaaggattacctaggcaaggcgacgactgacttccttttggtagtactgcgtg

SEQ ID NO: 299061 - DNA, 83 bp, Homo sapiens
ggcggtgctgaggcacctggagaccttcgagcaccccaacgtggtcagagtatggtgtttgcgaaaacttgcggaagctggag

SEQ ID NO: 299062 - DNA, 90 bp, Homo sapiens
gccgagcggatcctaataaggggaaaatgggtccccagccccaccccagccccaaaggaggctgttcgagagggacgtcctccggagcca

SEQ ID NO: 299063 - DNA, 100 bp, Homo sapiens
tgacttggctggcaactctgaagtcatcctgccagtcccggcctcatcgtctacctgggcatgatggtgggagccttcctctggggaggtctggctgacc

SEQ ID NO: 299064 - DNA, 73 bp, Homo sapiens
gcctcttgcgctacgccctggatgagatggctttcctcggagacgggtggcatggggagcagctagaacaatg

SEQ ID NO: 299065 - DNA, 99 bp, Homo sapiens
cacgcaggaacggctccagcatcaagatccgtctgacagattatctttctcaaggaatagatctttctggaatagaagtgatagaaaatgatctacttt

SEQ ID NO: 299066 - DNA, 80 bp, Homo sapiens
gatcatcaactcgcgggtcctcgtggatcagactacagctgagcgggctttggacaccatgaactttgatgtgattaagg

SEQ ID NO: 299067 - DNA, 51 bp, Homo sapiens
cagcattgcagccgccaagacgatgaggtttatataactttccaagacaag

SEQ ID NO: 299068 - DNA, 75 bp, Homo sapiens
taagcaagagatgaagaccaattacgagacccttgattccctggtgcagtcattggagaaatcgatgaagaaaca

SEQ ID NO: 299069 - DNA, 83 bp, Homo sapiens
aatcctgcggcagaagccgagttcaacatcctcctggccaccgactcctacaaggaagttctactacatcaccctgctacgag

SEQ ID NO: 299070 - DNA, 98 bp, Homo sapiens
ttggctaccaggctcctcaggtggcagcgcttgcagtcgggctacggaggccgggttgccagattacggtttcagactctctggctcaatctgtagtt

SEQ ID NO: 299071 - DNA, 75 bp, Homo sapiens
ggctcggccgccccgccgcgagcgccccgggatgccgtctggagcccggatgccccaccagggggcgcccatggg

SEQ ID NO: 299072 - DNA, 100 bp, Homo sapiens
caggaggtgcatgtcctgaatctccgcactgcaggccaggggcctggccagctacagagagaggtgtaccttcagttgaatttttagaatctcccattac

SEQ ID NO: 299073 - DNA, 96 bp, Homo sapiens
aaatgagagaaatgcttacacacagaaatggtgtcatggagaaactccagctgggcccagagattctgcagcgggaaaatccaaggcttatttatg

SEQ ID NO: 299074 - DNA, 100 bp, Homo sapiens
cacagggggattggccggctttttcggagccggcggagcaggttactcgcacgcggatttggctggcgtcccgcgatattaatgcacacgcctgtgttac

SEQ ID NO: 299075 - DNA, 75 bp, Homo sapiens
aggtcgatgaggactcggagcctgagcgggaggtgcgaggattctttctgaactaccttttttcgggaatggatg

SEQ ID NO: 299076 - DNA, 50 bp, Homo sapiens
gcgggagcccttagcggtctggagaaggccttacgaccggatatgggcta

SEQ ID NO: 299077 - DNA, 75 bp, Homo sapiens
gggatccagacccatttgatgatcgacatcctggtctgtttctgtcgactgtggaccacttatgtgcgatccgtg

SEQ ID NO: 299078 - DNA, 100 bp, Homo sapiens
tgaatatggagtagttttctctagcaaaggacttcgtcttctatgctccccggctgcggattaacaagcggatcttggccttgtgcatggggaaccatga

SEQ ID NO: 299079 - DNA, 120 bp, Homo sapiens
aatgagctaagtaaaaactgcataaacaacagaggactcaacatatttgcagtagaagtgggacccaaatctacaatgatgcatagctctcttaggtcccttcgtaatagtgcagctaag

SEQ ID NO: 299080 - DNA, 100 bp, Homo sapiens
tttgccaccgtttacaaggccagagataagaacaccaaccaaattgtcgccattaagaaaccgaatttgccacatacctgaatttctgccgttccttgcg

SEQ ID NO: 299081 - DNA, 90 bp, Homo sapiens
actcctggtcctgctcggggctctgttcccaggcattgaagttgatatcgatgtggagcacggagggaaaagaagccgcctgacccccgt

SEQ ID NO: 299082 - DNA, 82 bp, Homo sapiens
ggaaatggctgctgttgcttctgggccagaggaagagaatgaggttttgggatttgagattgacgcggtgaactctgtccag

SEQ ID NO: 299083 - DNA, 82 bp, Homo sapiens
tgggaagttaatgtttacggcgaagtctactcaacgtttccaaggtagtaaacctattgatggcaattttgctgactgtgga

SEQ ID NO: 299084 - DNA, 100 bp, Homo sapiens
cgcaaagttcctcacagtttaggtctcaaggcaagcctattgagttaacacctctgccgctgctaaaagggtgcttatttgagaaatgatatatttgaag

SEQ ID NO: 299085 - DNA, 100 bp, Homo sapiens
tatcaagatgatgcagaacttgccacacgtgcaatccctgaactgacaaaactgctaaatgacgaggaccaggtggtgaacatcccgtccttcattgtcc

SEQ ID NO: 299086 - DNA, 118 bp, Homo sapiens
gcaagaccgaattcagaaggatatcgacgtcgtgatccagaagtccagagctgaggactgcctgtttgcaggacatgaccgataatagcaacaatcaactggtagtaagagcaaagtt

SEQ ID NO: 299087 - DNA, 80 bp, Homo sapiens
aaggatgacatatttttggacctgaaacagaaattctggaacacctatatgaattcagaaggagctggcggacatcactt

SEQ ID NO: 299088 - DNA, 101 bp, Homo sapiens
agaatttatagaggaatgttatgaaaacctggccttcctggatttgggaatggatgatgaaggagatgatgacccagttcctctaccaaatgtgaatgcag

SEQ ID NO: 299089 - DNA, 75 bp, Homo sapiens
agaatggcctaattggaaagaatttcaggatcaccggtttctcctgcttcatatttggagcaagaggtggtggtg

SEQ ID NO: 299090 - DNA, 75 bp, Homo sapiens
gacaatgaagactattactcgttgctgaacgtgcgcagggaggtaatccacgacttcttattctccttgaaggaa

SEQ ID NO: 299091 - DNA, 101 bp, Homo sapiens
ggcgagccacatccttactgcactgagggagaagcaggctccagagctgagcttatctagtcaggatttggagcattaataataagctacagcagccggag

SEQ ID NO: 299092 - DNA, 83 bp, Homo sapiens
aaacaagacagttctgtctgcagaagcccattatggctgtaactggagatgacacagagagatcgatgtcttattgtgatgag

SEQ ID NO: 299093 - DNA, 100 bp, Homo sapiens
gtctgccgctgccaccggcgcgcccgagctgcttctgatgcttggaagatatcctctcagccacaaagatggtaataaatctttgcctcccacagttcag

SEQ ID NO: 299094 - DNA, 80 bp, Homo sapiens
gtcaaatgcactgtccagacggagatccggccttgcagtgagagaatttctttgtttggatgatccaccgggtccatttg

SEQ ID NO: 299095 - DNA, 100 bp, Homo sapiens
tatggcgctatctctgccctcagtatcaacaatgattgctcaagacttctttgtggctttgctaaaggacagtgtgcaacttgctttggtgtttgctgtt

SEQ ID NO: 299096 - DNA, 75 bp, Homo sapiens
gacatcgacgccgcgtggcaggcgctgcgcacccgcaatgggtagaaggcctgagatcaatcatacacaacttca

SEQ ID NO: 299097 - DNA, 100 bp, Homo sapiens
aaagcaagttcatgggcatgtccgtgggggtctctatgataggggaagactaccaaaaggaagcgtggctacattaaaaataagctggtttttaagaaag

SEQ ID NO: 299098 - DNA, 100 bp, Homo sapiens
gctatcagaactgctaaaggagagaagtttgtcatgcaggaggagttctcgtatttattacagtatcaggagccaataccttgtgagcagttggttacag

SEQ ID NO: 299099 - DNA, 100 bp, Homo sapiens
gttaagtattttctaccaagctgggacttccaaagctgggaatcctattttttattatgttgcacggagagttacatccatatgggagaatagtctccag

SEQ ID NO: 299100 - DNA, 100 bp, Homo sapiens
atcgatctctccatcccttccgaggcccgacttcgggagcctgcacacatgatcctgaccgtcggaaacaaggcagatggagtcctggtgggaacagatg

SEQ ID NO: 299101 - DNA, 50 bp, Homo sapiens
ggaaaatctccccggtgactttcaggtgcatggaggactgcaacagagga

SEQ ID NO: 299102 - DNA, 83 bp, Homo sapiens
cgaggactcggagacgtatttctatccctgcccatgtggagataacttctccatcaccaagctgtatgcaggagctattcttg

SEQ ID NO: 299103 - DNA, 98 bp, Homo sapiens
gtacagagatgtgatgttggagaactatagcaatctggttttcttggcactgctcagcacgcaggcatgtgaggaagctgggcttaaaggagactcca

SEQ ID NO: 299104 - DNA, 83 bp, Homo sapiens
tgggaacgaatgagacatacaggaactgagaaaatggcatctgaaagctcacgaggcccagggaatcctctggaccatcagat

SEQ ID NO: 299105 - DNA, 82 bp, Homo sapiens
ggccatggcaagacttcccgcaacatccactccttggaccacctcaacctggagtactcgggtactttgagttcagtggctc

SEQ ID NO: 299106 - DNA, 89 bp, Homo sapiens
ggaacggtaggaagctgagctggactctctgccacatcgttcggttcccacaacagcctgatcaagaagctactctagaagtcggagca

SEQ ID NO: 299107 - DNA, 100 bp, Homo sapiens
ggcgccgagcaaccgccctctcctgcatccaccagcagccaggaatccaagaccagcatctcagacatgtcgaaaaagatgttttgatccctaaaataat

SEQ ID NO: 299108 - DNA, 98 bp, Homo sapiens
caggacagcagcttcctctcctctcttagacctttcctcatgtattaatctctggagaagacacatccacagttagcactttcttcagatgctgacgc

SEQ ID NO: 299109 - DNA, 100 bp, Homo sapiens
accaccaataggccaggactgtcctgtggacagacggggtgagcctcttcttgtgtctggagattctgagtttttggattcaaagcataaaaaccattac

SEQ ID NO: 299110 - DNA, 80 bp, Homo sapiens
ggagtgttcgttgtgccagcgactaaaaagagacaggggcaagtgtccgagtggtgaatcagctacttacagagatggat

SEQ ID NO: 299111 - DNA, 87 bp, Homo sapiens
gtattaccatgcacagtgcaagctgaccggttccctgatgtgttacctgcttctgctactgatccaaactgcagaacttctcattca

SEQ ID NO: 299112 - DNA, 74 bp, Homo sapiens
ggatatccacaccatccttctcgctgcaggatgaccaatttgcagatcaaggaagagaaagtcaaagcagatac

SEQ ID NO: 299113 - DNA, 75 bp, Homo sapiens
gggaaacccgtactctgacctgggtaaccataccacatgcagggatgtattcttggcctgggtagcctctagaaa

SEQ ID NO: 299114 - DNA, 100 bp, Homo sapiens
cgccaccactttgagacactgactgagtccccctgcagagacagcacccaagaaaacctcatttggctcgctgaaggatgaagaccggattttcaccaac

SEQ ID NO: 299115 - DNA, 76 bp, Homo sapiens
ggccggccagaagcgggcggcgcgggggagatggaagcaaatgtcacccttatagtgattggacagtcatcctacc

SEQ ID NO: 299116 - DNA, 109 bp, Homo sapiens
gatctacgagctgtatgacgatgtggaacccagagatgactccagccccagccccaagggcagaggaaactactttgcttcgcactttttcatgggaggagagaaattc

SEQ ID NO: 299117 - DNA, 100 bp, Homo sapiens
ttggaaaccagctgcacatgctaaccaacaggcacgacaagtttctggacactctccgagaggtgaaggcaagcacgaggagcggcaggacgagcatggc

SEQ ID NO: 299118 - DNA, 78 bp, Homo sapiens
gacgccatgtcgggttattcgagtgaccgagaccgcggccgggaccgaggctaactttggagacctaccaagaatggt

SEQ ID NO: 299119 - DNA, 90 bp, Homo sapiens
gccggcattggtgggacttttcagtttggctataacctctctatcatcaatgccccgaccttggtcagcacttaagcgatgcctttgccc

SEQ ID NO: 299120 - DNA, 75 bp, Homo sapiens
cagattcgcagtggtcgcttcttctccttggactttctgtctcttctgaaggcccttctcaaagacttggaacac

SEQ ID NO: 299121 - DNA, 98 bp, Homo sapiens
ggcctagacctgaactcttcagataatcagagtggaggaagtacagccagcagaaaactcaatgtgagtagtgacactgtccagcatggtgtggaagg

SEQ ID NO: 299122 - DNA, 100 bp, Homo sapiens
attcagtacgacctttagccacattgtcatatgctagtgatctctataatggttccagtatagtctctagataatttgcggtaaaagcctttcagtgaat

SEQ ID NO: 299123 - DNA, 74 bp, Homo sapiens
accctcagtggaactcggagtggtttaaatttgagatggatgacccctctgtgggccccaagatcccccaggct

SEQ ID NO: 299124 - DNA, 51 bp, Homo sapiens
gtcgtgagcaaggtctccgtggagtttccagatgtcttggaatgcactgta

SEQ ID NO: 299125 - DNA, 75 bp, Homo sapiens
attcgtctcggaaaccccgcctcttacagtcacgagctgagatctgtatctgtggacctgaatgttgatccctcg

SEQ ID NO: 299126 - DNA, 75 bp, Homo sapiens
ctgctgtcctgcgaccccaagcagggatacccacccaccatcccagggtctacaacatccacagccggaccgtca

SEQ ID NO: 299127 - DNA, 88 bp, Homo sapiens
ccgagttgctgcagcagcaggaggaggaccgcagcaaggtgattttacaacgagatgctgctctccatagggatgctcatgctgtcag

SEQ ID NO: 299128 - DNA, 83 bp, Homo sapiens
cgtagacaccagctccgaaatcaccaccaagcgggctgacgcacgaggcacacaggaaggaggtggagcaggtgtatctgcgc

SEQ ID NO: 299129 - DNA, 100 bp, Homo sapiens
gattccaagtaactcttatttggtgatgacacatctccacgtgattgaagaaaggaggaaccaaagcctctctctgctctacaaagtaccttatgtagcc

SEQ ID NO: 299130 - DNA, 98 bp, Homo sapiens
cggacccagtggcctcggcgattatggacccggccgaggcggtgctgcaagagaaggcactcaagtttatgtccaatatcagatggaaatgatgcgga

SEQ ID NO: 299131 - DNA, 100 bp, Homo sapiens
caaaagatggctacgagggtaacatgttcggaactggcgctgaagaccctggggacagatggcctttttctcttttcctccttggacactgacggggata

SEQ ID NO: 299132 - DNA, 82 bp, Homo sapiens
tcgccttggagagcccaggagcaggggagacatggagtacgaccccagcaaagcgacctttgtgaaggtggtgccaaccccc

SEQ ID NO: 299133 - DNA, 50 bp, Homo sapiens
gccaaccccttcgagcaagacgtgggagtggcagaagctcaactatgata

SEQ ID NO: 299134 - DNA, 82 bp, Homo sapiens
tcagccaggcctgcgcgggcccgaggccggaggaacccggactccggcgtagcggtaagaagagttcctgggtcaagtggtc

SEQ ID NO: 299135 - DNA, 83 bp, Homo sapiens
gcagggcctggtagtgtggagcttcagcggcctggaggaggacgaggcgggcgaggggacggcaaaacagaacagaaaggcgg

SEQ ID NO: 299136 - DNA, 80 bp, Homo sapiens
gggaagatctttttcctcaattgagcttactcacatagcatattggtatatcaaaatgaaatgcaaggaaccaaaaataa

SEQ ID NO: 299137 - DNA, 74 bp, Homo sapiens
gcggcataaagcaattgagaattcaggagtatagcatcgtgatccagcagctctcaaatggcaaatgggtcccc

SEQ ID NO: 299138 - DNA, 100 bp, Homo sapiens
agggttattaccgccgggctgccagcaacatggcactgggcaagttccgggccgcgctgcgagactacgagacgttccggaactttaagatcatttaccg

SEQ ID NO: 299139 - DNA, 100 bp, Homo sapiens
acaagcacatcaccactctgcaggttactataacaacagtaccaaggtggctgtgaaaaccctgaagccaggaactatgtctgtgcaagccttcctggaa

SEQ ID NO: 299140 - DNA, 100 bp, Homo sapiens
ctgacttctgtgagctcattgcgcgggactagggagggttcagtttggcaaagacttggtgcagatgtgacagcagttgaatttttaggtcatgtaggtg

SEQ ID NO: 299141 - DNA, 98 bp, Homo sapiens
cgagccgccaccgcaggtcgaggacggtcggactcccgcggcgggaggagcctgttcccctgagatcgtaaagctgaaaattgaaatcatgaaagtag

SEQ ID NO: 299142 - DNA, 100 bp, Homo sapiens
ctgggagccacattcctcattgcaccgggagcctggccgctgcagtggagacagcctcgggacgccaggccctggtggtgggcaagcccagcccctacat

SEQ ID NO: 299143 - DNA, 101 bp, Homo sapiens
aagttttactaaaaatactgacctttctctagaagacctgagtttgggaggtgtccttttatttcctgttgatgataaagaatcaagaaacaaagggcaag

SEQ ID NO: 299144 - DNA, 75 bp, Homo sapiens
gcgcccctcggacggccacgagactcggaaatgcactcggtgatggaaagagagccactattctgaagaacactt

SEQ ID NO: 299145 - DNA, 100 bp, Homo sapiens
ccagacggctcacctgtgcgggatggaacaaaagggcttctatttcgaccgcgatgatgtggctctggaaggcgtgagccacttcttccgcgaattggcc

SEQ ID NO: 299146 - DNA, 100 bp, Homo sapiens
tggtccagaaaacattgtaatggccatcgctggaaacaagtgcgacctctcagatattaggcgcctgcccccgcaaccgattcgaccactccctagattt

SEQ ID NO: 299147 - DNA, 99 bp, Homo sapiens
tctcctgggatcggcccaaggccagttctccgcagggcagcccaatggatccaatggtgatgaagagacctcagttgtatggcatgggcagtaaccctc

SEQ ID NO: 299148 - DNA, 100 bp, Homo sapiens
cacgccctcgccggagcctgttgacaaggacttctactccgagtttgggaacaagaccacagccgcagcaatggcgctgagttcctctgctggagttcat

SEQ ID NO: 299149 - DNA, 75 bp, Homo sapiens
tcaaagatcatggaatccttcaaaaacatggtccctcagtctctggatggtcgtcagatccgtgtggatcatgca

SEQ ID NO: 299150 - DNA, 99 bp, Homo sapiens
tctacaacagcttcctggagcagctgcgtaaaacatacaggccggagcttatcaaagatattaataaggcagcggaaagaagaaatatgaatacggctc

SEQ ID NO: 299151 - DNA, 100 bp, Homo sapiens
ggataatttatcaagagacagcaacagagattgcacaaatgaactgtctaattcttgcaagtaatagttatgcacgagtgcgagctgtggtgatgacccg

SEQ ID NO: 299152 - DNA, 97 bp, Homo sapiens
aggagttcgtctcttacgtctgcggaagtgcagctgcctcagttcttagcgcagtgagaaggcaaccaaagtgcaggacatcaaaaacaacctgaaa

SEQ ID NO: 299153 - DNA, 90 bp, Homo sapiens
cgggatggcctgtttcgttccccagtgaggagctgacatggacccaaatcctcgggccgccctggagcgccagcagctccgccttcggga

SEQ ID NO: 299154 - DNA, 135 bp, Homo sapiens
aaaccccaggcagagacgggggaagcagcacgggatcccagcctcaggcctgcacggacggtgttggttgggggccgttgctccagggagaactgcaaatatcttcatccacccccacatttaaaaacgcagttg

SEQ ID NO: 299155 - DNA, 82 bp, Homo sapiens
gtgaactcgtggcgagagaaggaaaatgcgcgtcccgggcgcggatgagcgggatcgtgtgcagaagaaaaccttcaccaag

SEQ ID NO: 299156 - DNA, 101 bp, Homo sapiens
ggacagcatcctcaatcaatccaacagcatattcggttgcatcttctacacactacagctattgttagggaagaaggagaaagggccaacccctgaagaag

SEQ ID NO: 299157 - DNA, 82 bp, Homo sapiens
gcagggcctgccaggtggcgctcgatcagcttgaacgggtctttttacgacttggccatgctgaaacagatgaacaattaca

SEQ ID NO: 299158 - DNA, 100 bp, Homo sapiens
caggacaccgacatggaacagggactcactgggggcctggacagcgagtccgcctccagcagcatccgcttcagcaaggcctgcctgaagaacgtcttct

SEQ ID NO: 299159 - DNA, 83 bp, Homo sapiens
atgaagttcgagcactaatatttaagaaagaagatgttaactttcagaggttggaaagaaccatgactgtattcaggaaggca

SEQ ID NO: 299160 - DNA, 99 bp, Homo sapiens
cctctgcattgctgatcttgtacttggattcagcaaggaaccttccggtttggtgcacctcgatttggaggaagtagggcagggcccttatctggaaag

SEQ ID NO: 299161 - DNA, 100 bp, Homo sapiens
ctcatgaatagcaatcacagagactcggagagcatcactgatttgacttgaagacactgcctgtggactttgtggaatgcttgatgcggttcctaccaac

SEQ ID NO: 299162 - DNA, 83 bp, Homo sapiens
ttctctcgggcttcatctcttgtgtggggagtttcatcctagcggatatggctcgtggacagcagaaaattcagtctcagcag

SEQ ID NO: 299163 - DNA, 83 bp, Homo sapiens
ctcggagcccggagcgtgcctcggcggcctgtcggatactccaagtatcacagctaaattaattagtgaacaaaaagatgaca

SEQ ID NO: 299164 - DNA, 100 bp, Homo sapiens
tggtgccaaaggctttagaaggttatatcacaggccctgaagaggaaagtgaggatgactctcatctcgaaggcagggatcctgatatttggcatgttgg

SEQ ID NO: 299165 - DNA, 107 bp, Homo sapiens
gcgcttcgtgcaccggggcggtccgttgccaaagccagttaagtgggcagaccaacatccacctcagcaaaaacttcttcctgacgaatcgcgccagggagcgctca

SEQ ID NO: 299166 - DNA, 75 bp, Homo sapiens
tctaaattgtgtttctgcttccgtttcaggtcaccaaccaggcaacatcagatgctgacctgaaagaacatatgg

SEQ ID NO: 299167 - DNA, 100 bp, Homo sapiens
ttgcgagtggagtgtccgctgtgcccgggcctgcaccatgagcgtcccggccttcatcgacatcagtgaagaagatcagctctgctctacaagcctgtgg

SEQ ID NO: 299168 - DNA, 100 bp, Homo sapiens
cgcagctccacgcagcaagacccgcgccgccgggacccccaggacgacgtgtacctggacatcaccgtggacagtttgcggttgtgaagaaatgccgtga

SEQ ID NO: 299169 - DNA, 100 bp, Homo sapiens
catctggaagaaccagaactcgtggggcactggcgaagatgtgaaggttatattgaaaaattctcagggagaggagtggaagctggacacactatgtgac

SEQ ID NO: 299170 - DNA, 98 bp, Homo sapiens
gaagctcaagcagagcttacagtgcaagatgatgtcagaagtgggatccaaagtagagcttataatgacacctaggagtgctgagtgaccaagcaagg

SEQ ID NO: 299171 - DNA, 98 bp, Homo sapiens
aagatcttggcaaagcttctccctcagtatttagaccagctgttctccatagtggtgttcggctccatcgtgaacgagggctacctcaacagcgcctc

SEQ ID NO: 299172 - DNA, 100 bp, Homo sapiens
gaccatggctgactacctgctgtacaccctcaacaaacaccagcgctttgggttccttgtggagaagcactggtataagcagtgggaggcatacgtgcag

SEQ ID NO: 299173 - DNA, 75 bp, Homo sapiens
caatggcctaagcaagtgtctgcagtgccaaatgtgtgacccaggccatctggctgctgtgcacaggcgctcgtg

SEQ ID NO: 299174 - DNA, 75 bp, Homo sapiens
gataaatccaaatactgcatatcagaaacaacaggttcctctcctggctgaaatttatggtatagaaggaaacat

SEQ ID NO: 299175 - DNA, 101 bp, Homo sapiens
aagaaatatgtcaccctgtgtgacaatggcgtgctgacctatcatcccagtttacatcttcgttccagagcccagcatgaatggatacgcggaatttccgc

SEQ ID NO: 299176 - DNA, 82 bp, Homo sapiens
ccgtgctgcttatggcggcgctggagagggggcgctgagctgttgggctgagcgggctttggacaccatgaactttgatgtg

SEQ ID NO: 299177 - DNA, 75 bp, Homo sapiens
agctgctgctcgtcttctatgtcaagaaggtggccactaacacggacaccagccgaaatgccggaaatgcggtcc

SEQ ID NO: 299178 - DNA, 100 bp, Homo sapiens
ccacggcagcatcttcagctcttgggtttagcaaaagttcatctccttctgcatccttaactgagaatgagcaactgcttcgagaacgacagcagatggc

SEQ ID NO: 299179 - DNA, 100 bp, Homo sapiens
cattcagatgggatctttccggatcaatccagatggcagccagtcagtggtggaggaggaggcgtctccctattccttacttgatatctgcttgaatttc

SEQ ID NO: 299180 - DNA, 111 bp, Homo sapiens
cctggagcctcagttggaagcagccgatccagcctgcggagcctgtggggcaggtctgccatcatggatgttctcgcagaagcaaatggcacctttgccttaaaccttttg

SEQ ID NO: 299181 - DNA, 74 bp, Homo sapiens
ggaaaaggaatcgtatcgtatgtccgctatccagaacctccactctttcgggtgccagccgggccgccgatgac

SEQ ID NO: 299182 - DNA, 100 bp, Homo sapiens
gatcgttccactttatgatacccttggaaatgaagccatcacgtacatagtcaacaaaggcttgtgtagcctgccctcagagagaactatgatgatggac

SEQ ID NO: 299183 - DNA, 83 bp, Homo sapiens
cgacacacaaagaatagagttgagcctgtgggacacttcgggaacaagatcactcaaggtgaaggataatctactaataccag

SEQ ID NO: 299184 - DNA, 99 bp, Homo sapiens
tggcggatggcccccggtgcaagaggcgcaaacaagccaatcccaggaggaaaaacgcattactctactgactggcagagacaggagaggtagatgtcc

SEQ ID NO: 299185 - DNA, 74 bp, Homo sapiens
ctccaaggaagccacgtgcagacatctacaaccttcgatctcctgacgagcttaacagcattgcgcagtgatga

SEQ ID NO: 299186 - DNA, 88 bp, Homo sapiens
agaaatggttgttcaactactagatgactttaaaatatcaggagttaatggaacacgcatatccccccacgtccatgtccaggagccc

SEQ ID NO: 299187 - DNA, 75 bp, Homo sapiens
gcagctctcccggcagcacgaggcgcagctccacgagcacatcaaggtaattgatcaccctagacccagggacac

SEQ ID NO: 299188 - DNA, 78 bp, Homo sapiens
aaaactggagtcttctgcctgcgcagacttttcccaggtccctcgtatcaaaacattaagagtataatggaagatagc

SEQ ID NO: 299189 - DNA, 100 bp, Homo sapiens
cttttgcctctttctctcaggctttcctacaactcatgcccagcagcagcaagcaggttcttgggtgtctctggggagtccctgggccagaccttcctcc

SEQ ID NO: 299190 - DNA, 83 bp, Homo sapiens
ctgctggagtgtgaccacctgaggagtggggtgccaggtggaaggagaagaaaggtttcatggggaagggtatcgggaaggct

SEQ ID NO: 299191 - DNA, 80 bp, Homo sapiens
ggatgatcagaaggggacccccagcccttggaggagagacggcagcctcaggtacactgaggaggggacggctccgtctt

SEQ ID NO: 299192 - DNA, 115 bp, Homo sapiens
cactgaggaggccgagagatgaggccggagcccaccaagttctgggaagttctgactcctcaggagcaaaaaacataacctgaagagggaggaagtggatttggggttcaccatt

SEQ ID NO: 299193 - DNA, 97 bp, Homo sapiens
cgattccggggtacctcactgcagaggtgctggagctggcaggtttggacttctcccactgagcatgacaagcactcgaaaggctaaatcaaccaga

SEQ ID NO: 299194 - DNA, 90 bp, Homo sapiens
cgtcctcatgtggggggtaaaccactcgggtctcttgcaacgtgtgagctgcctcttgccaagagtgagtggcaaaagaaactaaccccg

SEQ ID NO: 299195 - DNA, 80 bp, Homo sapiens
gaacatacgatgatggagcaaccaaaaacattgctgaggctcttgtcagcaaaggtctagccacagtgatcagataccgg

SEQ ID NO: 299196 - DNA, 98 bp, Homo sapiens
tcctaacttaatcaacaacctggaaacattctttgaattggattatcccaaatactatggactacaaattttggaaaatgtgataaaaacaaggtgga

SEQ ID NO: 299197 - DNA, 74 bp, Homo sapiens
gcttccatccgccagctgccatgagcgagcgcctccgtcccaggagtgtttctcaggagctatcagaaactatc

SEQ ID NO: 299198 - DNA, 123 bp, Homo sapiens
tctacttcagtttgataaggctataaatgcagcactggctcagagggtcaggaacagagtcaatttcaggattggtggaacgagaatgcctacacgcagccacaggaatccagtttccatgga

SEQ ID NO: 299199 - DNA, 74 bp, Homo sapiens
catccgcaaacacgcgcagaccttcgttgccctctgtgccacagagacaagaggagcagcagcggcaccgcccc

SEQ ID NO: 299200 - DNA, 98 bp, Homo sapiens
ctccgcaaggataaggagcaacagaaggactcacctgtgttttgccgcttctttcacttcaggaggcttatatttggcaccctttaccctgcgtatta

SEQ ID NO: 299201 - DNA, 98 bp, Homo sapiens
aggcgttggcaagtcagccctgacgcttcagttcatgtatgacgagcagagagatgtgtgaccagcagaatgccttcaccatgtgtcccctgtgtgac

SEQ ID NO: 299202 - DNA, 100 bp, Homo sapiens
gggactgtagcgtgctgctggaggcgcgcggccgcgacgactgcctgctgttcgaggccggcacggtggccacgctggagcaccccaagatctggctacc

SEQ ID NO: 299203 - DNA, 100 bp, Homo sapiens
gatgaacacccagcccatggaggagatcggcctcagcccccgcaaggatggcctttcctaccagctggagccgagatggtcataaactcgtgagtgcttc

SEQ ID NO: 299204 - DNA, 90 bp, Homo sapiens
ctttacacttgtgtgcctgctggtagtccagcatccagctcgacgttagaagggcccccagatgccgacggccctctctacctcccctac

SEQ ID NO: 299205 - DNA, 95 bp, Homo sapiens
cgcagaatctaccaacttcgccaccctgcggtggattgactacggcaaagtggccactcaggcaattgaagatgaaggtggtaatcctgacgaaa

SEQ ID NO: 299206 - DNA, 100 bp, Homo sapiens
actgtgagaaccagccaatgcttcccattgtgctgtccccggcataggtccatctctgcagaagccatttcaggagtacctggaggctcaacggcagaag

SEQ ID NO: 299207 - DNA, 100 bp, Homo sapiens
agggctgctgctgctggggctgatcatcctcctgctgtggaagggtgtgctggcctccctggcctaccagcgctacaaggctggcgtggacgacttcatc

SEQ ID NO: 299208 - DNA, 76 bp, Homo sapiens
ggcaagcaaggtcttggacaagtcaaaggcggcagggctttgcaatttgctgatgtaattgtgttatttggtgcca

SEQ ID NO: 299209 - DNA, 82 bp, Homo sapiens
ctgttttagtgctttttatttttccccaattcagcagagaatattttcaaggggggctccccacaggtgcaggaagccgccg

SEQ ID NO: 299210 - DNA, 74 bp, Homo sapiens
gtggaccccaagtgcttttaacacgtcagttgagctgcctgtggaggaatgtatcctgtcaggtataatgtcag

SEQ ID NO: 299211 - DNA, 75 bp, Homo sapiens
tgataagctgagcagagccctgcgatactattatgacaagagagacaagagagacacctccaacttcgacaaaga

SEQ ID NO: 299212 - DNA, 123 bp, Homo sapiens
cttccaatgacgcaggctcagccaggtgtgaggagcaggagatggaagtcttttctctgcaggtggatattgttcccagccagggggagatcagcgttggagagtccaaattcttcttatgcc

SEQ ID NO: 299213 - DNA, 100 bp, Homo sapiens
gacaccttatcacccacacccacacgtgttcaatacacctcccacctgtcctcaggcatatcaaaggggtcggcaccaggaattattatagaaagatcgg

SEQ ID NO: 299214 - DNA, 101 bp, Homo sapiens
gtggcctcggcagtcctgtttccctgtaagtcccacaggatcacatgttgaatggtgtaaacagcttatagctgctacaatttctagtcagatttcaggtt

SEQ ID NO: 299215 - DNA, 98 bp, Homo sapiens
tgcgggatcctcgggtaccgggagcgaacgaggaggttctggctcaggacctgaaggagaagaaggagaaggtggaggagaaggcaagccggaaagag

SEQ ID NO: 299216 - DNA, 90 bp, Homo sapiens
ttaaacatcggggacctacaggttacaaagttccgccatggagtcatagttgcagctgactccagggctacagcgggtgcttacattgcc

SEQ ID NO: 299217 - DNA, 100 bp, Homo sapiens
cactccgatttaaggtgcccgagtccacgctgatggactgccgtagacacacactaaagggcaccactgaggatgacgtgttgacaggtcaggtggagga

SEQ ID NO: 299218 - DNA, 82 bp, Homo sapiens
ctcccagtgacgggtctggagtgcgtgggggaccggctgttggcgggtgggaatgatggttagatgctgccgaacatacgaa

SEQ ID NO: 299219 - DNA, 98 bp, Homo sapiens
ctgtcaaagagaaagtaacaagaatcattcttgcagcatttcgtatcttggagaaattcattcaaggcttttggatcacagaccagttattcaaggtg

SEQ ID NO: 299220 - DNA, 100 bp, Homo sapiens
atcatgagggaattccggtcagggtcaagtcgtgttctgatcactactgacttgttgggccaggaaggaatactgggagaatcttcggatagcctcaggc

SEQ ID NO: 299221 - DNA, 82 bp, Homo sapiens
ccagtcgcctccaggccaagagggatccttcacccgtgtctgacataaatgagcatattctgatgtactctttggatctgaa

SEQ ID NO: 299222 - DNA, 98 bp, Homo sapiens
cagctacaaggatttccattttatggtaaaccaatggctcctcctcagccatcctggccgtgctcagtcatctgaccagctgacctccgtgttccccc

SEQ ID NO: 299223 - DNA, 100 bp, Homo sapiens
agttctcgaatcattctttgtacagaaattgaaaggcttcaaagctagcagggggcaatggcggcttcctgtgttctactgcacactgggcagaagatgc

SEQ ID NO: 299224 - DNA, 75 bp, Homo sapiens
acccgctgccgggcaccgaggaccagctcaatgacaggttccatcataatgaatggatccaatatggcaaataca

SEQ ID NO: 299225 - DNA, 98 bp, Homo sapiens
aagtgcaacaagtcccacttccgaaaccacaagtttgccgatatgtctggcgataaagggatttctgccttccctgaatcagacaaccttttcaaatg

SEQ ID NO: 299226 - DNA, 100 bp, Homo sapiens
caagtatcaccaatgcccagaatcagtccctcccagtcggatgagatggtgagaacaagaccaagattggaaagccagcttcagaggagggaattacagc

SEQ ID NO: 299227 - DNA, 82 bp, Homo sapiens
aacaaagaccagccagctaaccctacagaagactgaaactgttgaggagcccatggaggaagaagaagcagccaaagaagag

SEQ ID NO: 299228 - DNA, 100 bp, Homo sapiens
accctgcttggagacggacttgcttccgatcctgggaagactctgcctgaagcccttgattattgcactgtttggctacagacagtgcctggagaaatag

SEQ ID NO: 299229 - DNA, 82 bp, Homo sapiens
ctcaggtcctcgggggcggcggccacgccaaggacgggttcaggaagatttgactgaagagaaaaaaagggaactggagcat

SEQ ID NO: 299230 - DNA, 100 bp, Homo sapiens
atgtggcagacctgcttcacgctctcgggcctcctctgggagctcatcaggactatgggggattgggcagaggttgcacagccagagaacaacacatcac

SEQ ID NO: 299231 - DNA, 90 bp, Homo sapiens
gaactgaaacggattgccagagaattggcagaagtcaccaggagactaaagtccatcaaaaacatccagaaaattaccaagtctatgaaa

SEQ ID NO: 299232 - DNA, 100 bp, Homo sapiens
gttcgaggccaacgacctgtttgagagtgggaacatgacgcaggtgcaggagccaccatgttggtgataccccccggactgagcgaggaagaggaggctc

SEQ ID NO: 299233 - DNA, 101 bp, Homo sapiens
cgcgaatatcgtcatcgttagaagatgtagtggaaccaaaggagaggggcaagctcctagccacccagacagcagctgaattgtctaaaaacttatcttca

SEQ ID NO: 299234 - DNA, 99 bp, Homo sapiens
cctggccctgatcatcctgctgggcttcgtccagatcgggaagggtccgctgccagccccaagccccccaccagccatgagctcctccagaaaggacca

SEQ ID NO: 299235 - DNA, 146 bp, Homo sapiens
cggctcccctacgacgttacccgcttcatgatcgagtgcgacgcctgcaaggactggttccacggcagatcagacctattgtgaccgcctggtgcaggacacgcctttcctgacaggccatgggcgcttgagtgagcagcaggtgg

SEQ ID NO: 299236 - DNA, 100 bp, Homo sapiens
cgacgtcgtgatccagaagtccagagctgaggactgcctgtttgcagagcaatggtggaacaaagcggcaaaagatatcccatcaaaattatatagccta

SEQ ID NO: 299237 - DNA, 100 bp, Homo sapiens
acagagtaaagattgtacagctgttactgcaacatggagctgatgtccatgctaaagataaagggagctgaagtgggaatcagtacatcgagaatccacg

SEQ ID NO: 299238 - DNA, 82 bp, Homo sapiens
caccagtgacgcagccgctgcatctccgccagtccgcgcagggaagagcatggaggaaatcaagaaggtgctgctgctggtg

SEQ ID NO: 299239 - DNA, 75 bp, Homo sapiens
actactagatgactttaaaatatcaggagttaatggaacacggcttggcaactcttgtgaaatttcatagatctc

SEQ ID NO: 299240 - DNA, 75 bp, Homo sapiens
gtgtctgtgtcccactggtttctctggaaacctctgtcagtggaagctgttgctgccctggggaacaaagtcgtg

SEQ ID NO: 299241 - DNA, 97 bp, Homo sapiens
gatcacagtgaccattatccatgagaaggggagcgagctccattggaaagatgttcgtgaactggtggtaggtcgagcccagtgacactatcgagaa

SEQ ID NO: 299242 - DNA, 74 bp, Homo sapiens
tcctcgtggaatttgaagattctacagataaatcaggaattacatgaacgacagccttcgcaccgacgtcttcg

SEQ ID NO: 299243 - DNA, 75 bp, Homo sapiens
caggcctcactttatcttccaagaatcaggaaacccaggcccaacggcaggtggatgcaagaagaaatgttcccc

SEQ ID NO: 299244 - DNA, 98 bp, Homo sapiens
ggccaggatgctatagcattgtcagtggtgttttgaatgctgtatcaaatgcctggggggcattccctatgcctctctgattgccaccatcctgctct

SEQ ID NO: 299245 - DNA, 75 bp, Homo sapiens
ttcatcacagcaatggagaagagaaagcacaaagcatggagaccctccctccagatcctgataacttaagtgact

SEQ ID NO: 299246 - DNA, 100 bp, Homo sapiens
gttgtaccttgtgacagaatatgccaaaaatggagaaatttttggatttaagcgagagcctcactggttcccaggacatcaacctgaactggatcctccc

SEQ ID NO: 299247 - DNA, 100 bp, Homo sapiens
aacactactcttcgttataagctctcgtctggggcaactcagaagaacactgatgatggagaagatgatctgaaaaaaggtacacagttattagaaatat

SEQ ID NO: 299248 - DNA, 103 bp, Homo sapiens
cggcaccgcggtgcgcaagcgcaaccgtcggtgggtcggggatcggtcgcctgagagggagtggagcttggtttcgggatctcggtgctgcagacggcgagac

SEQ ID NO: 299249 - DNA, 87 bp, Homo sapiens
caaggtggaagattcttccaaggaaccagtgcgaagtgctgggctttgacaaacttcctctgtggggtaccatcctcatctcggtgg

SEQ ID NO: 299250 - DNA, 74 bp, Homo sapiens
cggggtgtcagtgtggaggagactgaggtcacggtctagatcacattctcgatccagaggaaggcgatactctc

SEQ ID NO: 299251 - DNA, 100 bp, Homo sapiens
ggaaccgcacagagccgcgggccctttgcagctgcgattttcgccctacgttttcaacggaggggttatgtaccgaaggactctaccgtgtcagcgggaa

SEQ ID NO: 299252 - DNA, 98 bp, Homo sapiens
ggatcgtgaccgagaccgtgaccgagagcgtgaccgagagcgcgaatatcgtcatcgttagaaggttttacctcacaaaaactactacaagcaccaag

SEQ ID NO: 299253 - DNA, 51 bp, Homo sapiens
tgtccatggtctctagcagcctgaatccagcctcacttctaaccttctgga

SEQ ID NO: 299254 - DNA, 75 bp, Homo sapiens
tcagcaacatgctcctagcagaagcctatggatctggagggccgttgctccagggagaactgcaaatatcttcat

SEQ ID NO: 299255 - DNA, 75 bp, Homo sapiens
ctgcgagggtctgacccggctagtcgtccccgagcacccaccaaggctccggatgtgttccccatcatatcaggg

SEQ ID NO: 299256 - DNA, 50 bp, Homo sapiens
tcatctccagatgctagggttatggccacagtagaatgttacaatccaag

SEQ ID NO: 299257 - DNA, 100 bp, Homo sapiens
gaaaggcccacctgtgtcctggttgagggtctccagggttctttggggcccgaggtgccgtaacctctcatttcctgacagcctgccagaggtgagcatc

SEQ ID NO: 299258 - DNA, 75 bp, Homo sapiens
acctctgttgccatcagcaactgtgatggtctggcttgcattgatgacaatgttgatatggtgaagtttctggta

SEQ ID NO: 299259 - DNA, 75 bp, Homo sapiens
aaagaaccctggctggggaaaagggaagtgaaaagagatctgttttcaggaatcttttgggtgagttgtgaggct

SEQ ID NO: 299260 - DNA, 100 bp, Homo sapiens
tggtcggatggggcaggatggctgcgttgacacgtcttatttaatccacatcataggaattgaatgatctggcacgggaccctccagcacagtgttcagc

SEQ ID NO: 299261 - DNA, 51 bp, Homo sapiens
gcggcagcgacgagaacctggatcaggttatgaagacagtatggagtttcc

SEQ ID NO: 299262 - DNA, 100 bp, Homo sapiens
tgttcttcttcgagtatttgtagaaggggctctcgaaatatcggccagctagctcccgatctgctttaataccccagcactcagcaggctgtgacagcac

SEQ ID NO: 299263 - DNA, 103 bp, Homo sapiens
tctacctgcccctcacctcccacatcctccgcgccttcgtcaactctcagatccaagggcacaaggagatcccagctctcctgttggcttcgtgcttggggta

SEQ ID NO: 299264 - DNA, 97 bp, Homo sapiens
caaggacgccccggagcttggctacgccaaggagtctagcagtgagcagtacgtgcctgatgtgttttataaggtgggaccatccagttgcaggaaa

SEQ ID NO: 299265 - DNA, 87 bp, Homo sapiens
gcctccgaagatgggggatttctacgacccggagcacccgacccctgagccatttcataattctgaatcatgtctgataacggagaa

SEQ ID NO: 299266 - DNA, 76 bp, Homo sapiens
tggacgccactttccggggtgcacagcaagtggctggtgagctttttggaggcaaaagcagaaaacttacacagag

SEQ ID NO: 299267 - DNA, 74 bp, Homo sapiens
agtccattgactatgcagcctaatgagcaaatttttcagaacataaaacaagaatatagtcgttatcagaggtg

SEQ ID NO: 299268 - DNA, 101 bp, Homo sapiens
tgttgccataatcatagaggcaagtgggggaggagcgttccttgtcctccctctgcacaagcaaagaacagtctgaacttgatcaagatttggatgatgtt

SEQ ID NO: 299269 - DNA, 98 bp, Homo sapiens
cagtctcggttcgacgactccattttcctcggtgggggcttagcgcactggaggagcggcgggcttcagacagagtgatcagcagctggactgtgcct

SEQ ID NO: 299270 - DNA, 74 bp, Homo sapiens
cacagcacagttcctgggaaggtggagccaccagcctctccttgggaagctatgcgaaattatttaaaagagcg

SEQ ID NO: 299271 - DNA, 82 bp, Homo sapiens
gaacctgcctggctagccggcgacttgagtgacgaggggatatgagactttctactcggaatatcctgagtgttgcgtggat

SEQ ID NO: 299272 - DNA, 75 bp, Homo sapiens
agtcaagaccctccagcttgcctacaacacaggcagttctacataccggccaccccctcggacccgggaggtgct

SEQ ID NO: 299273 - DNA, 99 bp, Homo sapiens
tatgtgcccacagtgtttgagaactatgtggcagatatcgaggtggatggaaagcagaaaaccatgagctgttttccaagagcttcatctccatggaag

SEQ ID NO: 299274 - DNA, 90 bp, Homo sapiens
cctggtcaacaagaagaacgctctcatccggaggcaggaccagctgcagctgctgaacttgatactaaatttgggactctttgctgcggg

SEQ ID NO: 299275 - DNA, 75 bp, Homo sapiens
acaacaagcatcttgatctagaaaatataacgagatactggtgtaatggtaaaattatatccaaatatgactgcg

SEQ ID NO: 299276 - DNA, 97 bp, Homo sapiens
ggacgcgactcgagggtgacgctcgctccgctcgtcccgctcgtcatggcctacccgggatacggaggagggaagacgtgcgatgggacacatttcc

SEQ ID NO: 299277 - DNA, 74 bp, Homo sapiens
atggggaaaatctccccggtgactttcagaaatgaaaattggacatttgacatttgaacctctctcctgtgttt

SEQ ID NO: 299278 - DNA, 75 bp, Homo sapiens
catccacgcacctgcagctctgctgagagagtgcaagccgtggggtcagctacacaacctggatcttaccacagt

SEQ ID NO: 299279 - DNA, 100 bp, Homo sapiens
ggtcccaagctagatcttcgggaaaagggatcaaggaaatgactattcctccaaataaaatgtgtgatgaatgcagactctgctaccattttggctgttt

SEQ ID NO: 299280 - DNA, 95 bp, Homo sapiens
ccagagcgtggttgctgaccagttgaaaggcttatatttggcaccctttaccctgcgtattattcctacaaggctgtgaaatcaaaggacattaa

SEQ ID NO: 299281 - DNA, 82 bp, Homo sapiens
cgaaccctttgattctgataccaaggaaacagagcaaatgcagcgttacaatcaaagacttattgaggaattgaaaaacaga

SEQ ID NO: 299282 - DNA, 90 bp, Homo sapiens
ctgtcaccgagccgctgcggccaggaggagcgatgggcagaaccagcacttccctcaggcactagacctgtcacgagtgaacttagttcc

SEQ ID NO: 299283 - DNA, 90 bp, Homo sapiens
tgacacagagtgctataaaaagtatggaaaaatgtgggggcctgtttaaagaagaaaacccgtatgctagatttgaaaacaactaaagcg

SEQ ID NO: 299284 - DNA, 83 bp, Homo sapiens
agaccctggagcctcagttggaagcagccgatccagcctgcggagcctgtggggcagggtgcaaatagctatgggcaacttgg

SEQ ID NO: 299285 - DNA, 74 bp, Homo sapiens
cgggaaacgctgtttgaagcggccacatgaaatgaagatcacctctgcctatctacaggacattgagaatgcct

SEQ ID NO: 299286 - DNA, 76 bp, Homo sapiens
gggagaccatgcaagcaagcagatggttaaatttgctgccaaataatatcgtctactgcattatttttggctgcaa

SEQ ID NO: 299287 - DNA, 74 bp, Homo sapiens
gacgagtccggaggggctgccgcgggagcgagaattagaactgcagcgtcagcgtgacttgcataagatcaagc

SEQ ID NO: 299288 - DNA, 50 bp, Homo sapiens
taaggacctcaacccaggagttaaaaaggcaggtgattcgggccaccttt

SEQ ID NO: 299289 - DNA, 98 bp, Homo sapiens
gcgggtccttgcggcgaataggagtctggtcaggcgtcaggctagtccgacgaagagtggacactgccctctcggtgccaccagtgtgtgattgtcag

SEQ ID NO: 299290 - DNA, 90 bp, Homo sapiens
gacgtgtcagacgatggccgtgtgcaacacgaccgaccagctgggcatgttcacgcacaaggagtttgagcagctggcccccgtgctgga

SEQ ID NO: 299291 - DNA, 100 bp, Homo sapiens
gcctcctgcagaagtttgcagctcaggagttgattgaggaattgcttggattgctacatggaccccctgagactatcattattacctcctagggccagga

SEQ ID NO: 299292 - DNA, 50 bp, Homo sapiens
ggggaagggaagctgctgtgttgaagaaatatcttcccttccaacctggt

SEQ ID NO: 299293 - DNA, 100 bp, Homo sapiens
attatcctctgtttctctgctgcaccgacctcgacgtcttgcctgtgtcccacttgttcgcggcctataggcacagactgccaaggctgggggcaacata

SEQ ID NO: 299294 - DNA, 99 bp, Homo sapiens
tccactttcgccagcccgtgccgcgagcgcggcctgcaggaggctcccctggctccagccctaaggtgctctcccagccgtccgacctggatctccaag

SEQ ID NO: 299295 - DNA, 90 bp, Homo sapiens
tgcttttggacataaatctaatattagccttgtctttgattttatggaaactgatctagaggtgtctgctttttcaacgtgggagaagga

SEQ ID NO: 299296 - DNA, 75 bp, Homo sapiens
gggaaacctggagcggtcagagcagacctcctgccccccgaggtctgcagtctcctgaacccagcagccatctac

SEQ ID NO: 299297 - DNA, 100 bp, Homo sapiens
caacaactcctgctctgagataaaaatgaacaagaaaggcgctagaattgattttaaaggtttttgaccaatatctcaattttattactttggaagatga

SEQ ID NO: 299298 - DNA, 83 bp, Homo sapiens
gccggggcctgcgggcgcccagagccgcgccgtccgcgccgcccgttctggctaactcaggtgagatggagccgctatagtcc

SEQ ID NO: 299299 - DNA, 74 bp, Homo sapiens
gctccatgctgtggctccatactggaataatggagcagagacttcttggcagagatggggtttcgccatgttgc

SEQ ID NO: 299300 - DNA, 51 bp, Homo sapiens
aaagcatgcccatacgattaaacctgcgtggggaccaaggcatactgaaca

SEQ ID NO: 299301 - DNA, 100 bp, Homo sapiens
agctaaagacatagttcctggtgatattgtagaaattgctggagtccaacctataccttctcagggaggcaaactagaaatagctggcactgtggttggc

SEQ ID NO: 299302 - DNA, 96 bp, Homo sapiens
gagtctggggagatgagtgaatttggctacatcatggaattgatagctaaaggcaaggaaagaccacagcaagattctttcattcgtctcctccta

SEQ ID NO: 299303 - DNA, 51 bp, Homo sapiens
taattcagcctttggaagttttttgtttgcagctcaccttgtgaagatgaa

SEQ ID NO: 299304 - DNA, 75 bp, Homo sapiens
cgctggtgaccctgccgctggcgagcgccaccgcatgggccaaatagttgcatcacatgtatctaatccgagagt

SEQ ID NO: 299305 - DNA, 90 bp, Homo sapiens
ccggagccgtggccgctgggggttgcggcggcgctgagccagcggggccggttatgaagacagtatggagtttccagaccatagtagaca

SEQ ID NO: 299306 - DNA, 89 bp, Homo sapiens
cagcttcgaaggcgaccttccttgctttcagaatttcacccaggttctgacaggtcccgacatctgtggccctggcaccaagaaggttc

SEQ ID NO: 299307 - DNA, 100 bp, Homo sapiens
gcggaacctggaggaggtggagttctgtgtggaagatgaaggatttgggggcagagcacttggcaggtcatgaaggggtccaacttctcgggttgttgaa

SEQ ID NO: 299308 - DNA, 82 bp, Homo sapiens
gtggacggggccttccagagacgcggcgcgcccgccctgcagctgcccaagcaatcaggatcctcatgaccagccaaagaga

SEQ ID NO: 299309 - DNA, 95 bp, Homo sapiens
ggccatcctctttctcttccggatgtcccggagcaaggtgcgttcttcacaaaggtggtggatgtgggtgccacctctctgaagcttgagatctg

SEQ ID NO: 299310 - DNA, 85 bp, Homo sapiens
gccgctgctaaatatatccgtaggaatggagagggaccggatctcagcttggaactgcagttggctttttgctaccaccagtttt

SEQ ID NO: 299311 - DNA, 97 bp, Homo sapiens
atggaagaagatgaagatgcttacaagaaacagttctctcaatacataaagaacagcgtaactccagacatgatttcctttcctggatgaaaatgtt

SEQ ID NO: 299312 - DNA, 83 bp, Homo sapiens
ccagaagtactggaatcatacttcctttcagtttccaacatggctagatccatcagaaactgaagccgtggagaacgctctcg

SEQ ID NO: 299313 - DNA, 98 bp, Homo sapiens
ctgtgacctgcatgtactgggggattcgcagggaggatgtcgggacaccccggaagctgggaaatgttctcagcacagatattctacacctcacgcct

SEQ ID NO: 299314 - DNA, 98 bp, Homo sapiens
tggaagaagatgaagaggaactttttaaaatagcccagcattacatcaacatgcccgtgcagttcaaaccgaagtccgcaggcaaatttgaagctttg

SEQ ID NO: 299315 - DNA, 100 bp, Homo sapiens
gatgaccctcgtagtggctgcggcgcgggccgagaaggaagcaatacgaggattctctccaccacatagaatctgcagttttgaagaggcaaagggtttg

SEQ ID NO: 299316 - DNA, 100 bp, Homo sapiens
gctgtggtgtgactggggcaggaccatcagacatgcaagaaagcacttcagccaagcagaagggagccagctggacgaggtgcgccaggccatgggcatg

SEQ ID NO: 299317 - DNA, 75 bp, Homo sapiens
tgcgcttgctgctcaggagaaaaaatatggacctcttaaaattgtggtcttgggtggtgcctatgatgagttcat

SEQ ID NO: 299318 - DNA, 82 bp, Homo sapiens
acgcgactccccccgggcccaaagttactcactataaacaatatccacccaacacaagcaaagtttattcctactttgaatg

SEQ ID NO: 299319 - DNA, 75 bp, Homo sapiens
atcttgttggtgcttcctcatgtattgaagaattccaatcccagttcatttttggtgcagtacatgttaatgaca

SEQ ID NO: 299320 - DNA, 100 bp, Homo sapiens
accccgaagacttttgggagattataggagaactgggcgacggagcctttgggaaagtgtacaagaaggccaatgatgaggccaatcagagtgatacaag

SEQ ID NO: 299321 - DNA, 50 bp, Homo sapiens
tacagtatgtgtgtgaacagaataagcctgtgggccaaagctgaccaact

SEQ ID NO: 299322 - DNA, 100 bp, Homo sapiens
cgggtctcgggaactgccatggagtgaagtgttgaggatgacgatgtcgataccaagaagcagaagaccgacgaggatgactagacagcaaaaaaggaaa

SEQ ID NO: 299323 - DNA, 99 bp, Homo sapiens
ggagcaatgttcttccactggcgacgtgcagcggaggagggcaaggactacccctttgccaggttcaataagctgtttgacaaggccaacaaacaccac

SEQ ID NO: 299324 - DNA, 76 bp, Homo sapiens
attgactacgaggaatggcggcggctgccgcaggacctgcagcatcccagagagacggggtttcaccatgttagcc

SEQ ID NO: 299325 - DNA, 100 bp, Homo sapiens
cgcagagcggggaggaggcggtggccctgctggaggagctctggctggacccacaaaccgtggagaccaagaactggcacacggacgtgattgagatgaa

SEQ ID NO: 299326 - DNA, 100 bp, Homo sapiens
cagaaagagctgttaacacttcctagataacggtctacgcctgcaagctctcagaccgggaacatccactctacctgcgtttggtagcagggcccagaac

SEQ ID NO: 299327 - DNA, 98 bp, Homo sapiens
cagcagtccgggggttgctcggctcctgtgtgcagctaatggtcgtcgtcggcatcctcctggcctacctggcaggcgcattggagtgactgtctggc

SEQ ID NO: 299328 - DNA, 96 bp, Homo sapiens
cttgccctgtctcctcgcagatgagagctattaagaatggcaaaggattgcatagcaagaaggaagtgcctatccaccgtgttgcagatatatctg

SEQ ID NO: 299329 - DNA, 86 bp, Homo sapiens
taaacctgctggtgacacgactcagacagaaggtcgcaatggaagaagagatcgccgcgctggtcattgacaatggctccggcatg

SEQ ID NO: 299330 - DNA, 75 bp, Homo sapiens
gagaaatttgtgccacagcctgctgaggagcttttcttgtcaagttgaggaaggtcaaaccacaacttaactgag

SEQ ID NO: 299331 - DNA, 74 bp, Homo sapiens
aagacatgctctacagtgctcagtctttgagatgtcatttgtcagagtgaaccgctgtggtccccgagttggtg

SEQ ID NO: 299332 - DNA, 100 bp, Homo sapiens
acaatgataaagggctctgaaagctagaagaaaaggtgtacttgcaagaaacctcaggacttgagtaacagcaacatggatctagtgaaaagccatttga

SEQ ID NO: 299333 - DNA, 75 bp, Homo sapiens
ttccggatcaatccagatggcagccagtcagtggtggagctggtggaggccattgtcttgccaatgaaccacaag

SEQ ID NO: 299334 - DNA, 51 bp, Homo sapiens
cggaaatcagctctacagttcagccacaacaagttgttcagaagaagcctg

SEQ ID NO: 299335 - DNA, 75 bp, Homo sapiens
ccggaaggggtcccgaagccccctgcaggaactctacaacccaatccagctacaaggctttggcccaccaagtgt

SEQ ID NO: 299336 - DNA, 75 bp, Homo sapiens
ccgcctccctggccggggcgcagttcggaggttcagcatcaagatggtgctcatgtggaccagtggtgacgcctt

SEQ ID NO: 299337 - DNA, 100 bp, Homo sapiens
aagacgatctgcacttcgcattttggcattgacatttaattttagggtcctttatatagaagggagagtaggccgaatacatcaagcaatggtaacatct

SEQ ID NO: 299338 - DNA, 101 bp, Homo sapiens
gccagacgacaagcacacactatggcgctgaaacggattaataaggatattgtacctgtggatgcatcttatgaagtaaaagaactatatgtgccagaaaa

SEQ ID NO: 299339 - DNA, 83 bp, Homo sapiens
gagatcttccgcaacctggagaacgccaagcgcttcgccatcgacatagggccgcgatgggcctcttggaacattggtgtgtt

SEQ ID NO: 299340 - DNA, 51 bp, Homo sapiens
agccctccatcttgcagcccagaaggttaatgttgaagaaggaaaatgcgg

SEQ ID NO: 299341 - DNA, 100 bp, Homo sapiens
gatggcctactggggataacattcatgcagaacatcagacgaaatctcacaaaactgtcccttatcttcagtcacatgctggcagaaatcaaagcaatct

SEQ ID NO: 299342 - DNA, 75 bp, Homo sapiens
ccggattccagactcgtgggggaaaggctggactttgaagaatatcctgaacatagaacgaactttttcttacta

SEQ ID NO: 299343 - DNA, 96 bp, Homo sapiens
cgtggatccaagatggcgacggcgatgcggagctggagtttgttcagatcatcatcatcgtggtggtgatgatggtgatggtggtggtgatcacgt

SEQ ID NO: 299344 - DNA, 114 bp, Homo sapiens
ccgcccagagactgctgagcccgtccgtccgccgccaccacccactccggacacaggtgagaagccctaccactgcaactgggacggctgcggctggaagtttgcgcgctcaga

SEQ ID NO: 299345 - DNA, 100 bp, Homo sapiens
caaccacttctttttggtttagttggagcagaagtatctgtttcatcgcttgaatcaaatattgttggtgtcatggagaaactccagctgggcccagaga

SEQ ID NO: 299346 - DNA, 105 bp, Homo sapiens
ttttcccctgccttccttgcagaggccatggaggacgaggagagacagaagaagctggaggccggcaaagccaagccaacaagtcccaaatttggaaaagctgac

SEQ ID NO: 299347 - DNA, 75 bp, Homo sapiens
gggggctaagaagagccagggcctgtggagtgactactcagtgattcgcctttgccagtctcatctcgtgtctgc

SEQ ID NO: 299348 - DNA, 82 bp, Homo sapiens
cgccctcaaggccatgatcaaaacgcgatcagtgggtgaccgcggctgcgagggactttgtcatccgtcctccaggatctgg

SEQ ID NO: 299349 - DNA, 100 bp, Homo sapiens
tcgagaagctccagatggcgtcttccgtgggcaacgtggccgacagcacagtctgcagatctccaggggagcccaccagcctagtcaacatggcctcgga

SEQ ID NO: 299350 - DNA, 90 bp, Homo sapiens
cggcgccatgagtctgacttccagttccagcgtacgaggctcctcagtggttggaaagtgattcttgtcagaaatgtgagcagccatttt

SEQ ID NO: 299351 - DNA, 103 bp, Homo sapiens
agattcgcagtggtcgcttcttctccttggatcccaaaatggctgggcgaaaacttgctctaaaaaccattgactgggtagcttttgcagagatcatacccca

SEQ ID NO: 299352 - DNA, 101 bp, Homo sapiens
ggaggcggcgggcggaggcggcggggacctgacggtgtccaagccactgaatgtggagctgcctcggtcaatggtggaagttgtcacaagctggaacctgc

SEQ ID NO: 299353 - DNA, 100 bp, Homo sapiens
tcggcccaatggggtaatcctggaatatgaagtcaagtattatgagaaggctgatcccaaagaactaatcaagatggtcaccaggcatgtgactcgacat

SEQ ID NO: 299354 - DNA, 96 bp, Homo sapiens
tttatcactaatgagcgctttggggacctcctcaatatagacgatactgcaaaaaggaaatctgggtcagagcgaatgtctgcgacaacgagctcc

SEQ ID NO: 299355 - DNA, 98 bp, Homo sapiens
ctgtctctattctctcggcctgtcagcaaagagccaaaaacctgtatatcatctccgtgaaggggatcaagggacggctgaacagacttcccgctgct

SEQ ID NO: 299356 - DNA, 83 bp, Homo sapiens
ctgtggacatcagcgccatccccgagcagcggtggaagctggttgggcccgaaggcatcctgcagaacggggctgtggacgac

SEQ ID NO: 299357 - DNA, 75 bp, Homo sapiens
ccaccacgcagagaatccagcctgacatttttacaggaaggaatgcctacttctgcacgatgtgatgatttagaa

SEQ ID NO: 299358 - DNA, 100 bp, Homo sapiens
aacctctcgcacacgggccgcggcatcctcagcatggccaactccgggcccaacagcaacaggtctcaattgggatcccaacaagccctcaggattcaga

SEQ ID NO: 299359 - DNA, 100 bp, Homo sapiens
ctggtcctactacgcgtacgtggtggagctctgcgtgttactactgctaaagtgcagcagaggctgataggattcatgcgtcctgaaaacggaaatcccc

SEQ ID NO: 299360 - DNA, 75 bp, Homo sapiens
cgtttcctttttgcctctgtgatggctgataagatgaatacgttgccagcttgcatctgccatcatttgatgccc

SEQ ID NO: 299361 - DNA, 75 bp, Homo sapiens
tggacatcaagattaaaagagcgaataaagtttatcacgccgggcaccagcagacgtttttgaatcaactgagag

SEQ ID NO: 299362 - DNA, 100 bp, Homo sapiens
cagtcacaattcaacgtatatgagatatttgatcctgatgacctttattcaggggtcaatttctccaaggtactgagtactcttttagctgtcaacaaag

SEQ ID NO: 299363 - DNA, 83 bp, Homo sapiens
gccagatgaccagacaagcccggcgcctctacgtgggcaacatcccctttggcatcactgagatcatgtttgagaccttcaac

SEQ ID NO: 299364 - DNA, 75 bp, Homo sapiens
tgccgataatgtccaatactgtggctactgtaaataccattttagtaagctggattttttatcaagcagaaatgc

SEQ ID NO: 299365 - DNA, 74 bp, Homo sapiens
tcgcagtggtcgcttcttctccttgtcttcaggcagtgacagtggtgggagcagcagcagcagcagcagcagca

SEQ ID NO: 299366 - DNA, 75 bp, Homo sapiens
agtaaccctgccaaatacatcagcttgtaggagacagagtgtggcttcctgttgtggtgcatggccccgagccct

SEQ ID NO: 299367 - DNA, 96 bp, Homo sapiens
ctggagagccgggagtcgctgggtgcgtggggctgcctcgccgcgtctcgccacgctcccaacacagagacagagcccttgctgacctggaagaag

SEQ ID NO: 299368 - DNA, 99 bp, Homo sapiens
ctcgactccaaatggttgaaaacagatatacaggcttttattgagatggagacaagagaagatgcaatggcaatggttgaccattgtttgaaaaaagcc

SEQ ID NO: 299369 - DNA, 83 bp, Homo sapiens
agagaccttacctgtcaccttggctctcccacccaatggagatggctctaatgacaatgcagatcttcgtgaagactctgact

SEQ ID NO: 299370 - DNA, 120 bp, Homo sapiens
atagagattttaaccaattttcttcaggggaaaaaaatatcttcttggcaagggtaaaaaacttgttgctgcaagtcaagctgccttaggcttataacatcacatttaaaagcatctcag

SEQ ID NO: 299371 - DNA, 99 bp, Homo sapiens
tcttcccccttgggcaaaaaaacctgaagactttgtgcggatcaacaggatgaaatccctgcttggagctgcagaagggttgccttctgtaggtcggag

SEQ ID NO: 299372 - DNA, 75 bp, Homo sapiens
ctgcgcctcagtgtcagttacctccgggtgaagagcttcttccaaggacttcaaacaagtgtgaagaggctgtgt

SEQ ID NO: 299373 - DNA, 88 bp, Homo sapiens
tctcggagttggcaggaagccaggttgcagggtgtccgcttcctcaggggtccccacggagtctggaccatggaggagcgaggtctgg

SEQ ID NO: 299374 - DNA, 122 bp, Homo sapiens
tgtcgccgctgctgggagatgggcctactcgcccgccaccctgcgctgccgccgctctgaggagttaaagatttgggatgatgaaattgttgcagacttttacgtagctgttccagaaataa

SEQ ID NO: 299375 - DNA, 50 bp, Homo sapiens
cgcctgagtaacccggggcaagctggtagcagtgtttgatgagcaggatc

SEQ ID NO: 299376 - DNA, 96 bp, Homo sapiens
cctctatggcgctgtcaataaagaacggcagtttgaatcggtgctgaacaggtgtcatggagaaactccagctgggcccagagattctgcagcggg

SEQ ID NO: 299377 - DNA, 75 bp, Homo sapiens
tttctgtcggcctgcttagcaacagtggtgcaggtgacagagctgaatgaacctctctccaatgaagatcgaaat

SEQ ID NO: 299378 - DNA, 100 bp, Homo sapiens
gccaagctcatctctgagacccggaggaggttcgaagctgagtatgtgacaggtcaaactgtgctgaaaatatccgcaaacacattctgcatactggcaa

SEQ ID NO: 299379 - DNA, 100 bp, Homo sapiens
tagaacttgcaagaagatgggcattaagacagttgccatccacagtgatgttgatgctagttctattgatgctttgacagaagtggtggctgctgtaaag

SEQ ID NO: 299380 - DNA, 98 bp, Homo sapiens
gctgtgtggctgaaaagtgaaggcaagagctgatttggcctctgtgctcccctccgcaaggggatcgttttctccagtttctcaactcattggatgct

SEQ ID NO: 299381 - DNA, 90 bp, Homo sapiens
aatagagttgttcggaataaccttcgtgtacgcctaggggatgtcatcaggccatgggtgtatatggagccctcaccaaagccccagtgc

SEQ ID NO: 299382 - DNA, 75 bp, Homo sapiens
ctcagcctcctgagttgctgggattacaggagaggagaggcagcagcatggcgagtgtcctgtcccgacgccttg

SEQ ID NO: 299383 - DNA, 87 bp, Homo sapiens
tattattagcacaagagcaccatactttgagggaagaggatcacctagcccgggtagaagaggcaatcacccgtatgcttgtgtgtg

SEQ ID NO: 299384 - DNA, 100 bp, Homo sapiens
gcgcggatgggatccagctgttagtcgggtaggcatagatctatccatactaatggaaatgtaactggaactgactctgatgataaaatcaaggaccatc

SEQ ID NO: 299385 - DNA, 100 bp, Homo sapiens
attcacaccagtgtccagttccaagagttacttccagagtcttcaagagtgccaactgggaccaggaccccagaccacagccccccacaccgtcctggac

SEQ ID NO: 299386 - DNA, 100 bp, Homo sapiens
aactgaggcctggaatttgattaactcattcaaggttacccagttggatccggaaagtatggcagaggaggaagtgttcagtcaagaatgggattctgac

SEQ ID NO: 299387 - DNA, 126 bp, Homo sapiens
gatcctgaacaccaggaataaggcattctgggaaacccctgcctccatgtgggatgatatcaacaacgtcggactcagcgccaggctggtgagctggatgagtccgtgctggaactgacaagccag

SEQ ID NO: 299388 - DNA, 100 bp, Homo sapiens
cacaggagagccaggattcatgctctacatccccatagagccaagttctatagaaattttagagtattcatcagatagtgaaaaagaagatgatttggaa

SEQ ID NO: 299389 - DNA, 143 bp, Homo sapiens
cccgggctcagacagttggcaagaaaaccccgaggagccctgttccaaagcctcctggaccgtccaagaagatgacgctgtcagtatagaaagtggtacaaacactgaacgccctgatacacctacaaacacgccaaatgcac

SEQ ID NO: 299390 - DNA, 100 bp, Homo sapiens
ccggacccgcatgcaggcacaagggtctgcggaagagggagctgctgaaggagctgctaccagtcatcgggcagaacctccgattccagcgcctcttcac

SEQ ID NO: 299391 - DNA, 74 bp, Homo sapiens
agcttcgcggggatcctgctggactgcacgaaaaatgtgtgttttaatagaaaagttgtcactttccaaaatgc

SEQ ID NO: 299392 - DNA, 75 bp, Homo sapiens
cagaaggagaacaagccaggaaaaccccgaaaacgcaagaagcgtaccttgaagcatgacactgctgcagtcgat

SEQ ID NO: 299393 - DNA, 51 bp, Homo sapiens
tctcaaagatctcgtacaagatccttctttctgctctgttaaaagcgaaaa

SEQ ID NO: 299394 - DNA, 76 bp, Homo sapiens
gatttgccctgtgatctgagacatttgaacactgagccaatggaaagtttccctgagagacctccgtacttttaag

SEQ ID NO: 299395 - DNA, 97 bp, Homo sapiens
agtgttaagagaagaaatgaggacatatcagtatcgagggaatctggaaaaattgcaatcaaaacatcatttctctaagaaaattttgggtaaccga

SEQ ID NO: 299396 - DNA, 83 bp, Homo sapiens
cagcgccacatcagcagtcaaaagcacaagctgaaatgcagtccaggttcagcaagcatttgaaagtccggaggcaacagtcc

SEQ ID NO: 299397 - DNA, 75 bp, Homo sapiens
cagcttcctgcaggcccagagccggcatgaactctcccaacgagtcggcaggtcaatggccagcaaggagggggg

SEQ ID NO: 299398 - DNA, 75 bp, Homo sapiens
cacgaagaagttcagcaaccaggagaccagttacagcaattggaacttgcacagatacagcatagagacgctaat

SEQ ID NO: 299399 - DNA, 82 bp, Homo sapiens
cagcccgagagctccgctcttgccttctccacctcacactggtcaaaatgcagatcttcgtgaaaacccttaccggcaagac

SEQ ID NO: 299400 - DNA, 100 bp, Homo sapiens
agcacacccaccacaaaaccccagtggagtttggaacttgcacggaagggaacagcatgctacaagtgaaaactgatgagaaactgaatgtgtctgatga

SEQ ID NO: 299401 - DNA, 76 bp, Homo sapiens
gagaggacacccaaaacatgtgagggaccaaagcggatgttggatgctcaagtgcaaacagacccagtatccatcg

SEQ ID NO: 299402 - DNA, 83 bp, Homo sapiens
gacatgcggtgtcggactaccttctacacagcacttgggcgtctcctcatggtggatttagttgctctatatgcaatcagtgc

SEQ ID NO: 299403 - DNA, 90 bp, Homo sapiens
ggaagctattgctgggattttgaggagtattggtaaaggttttcaaggtgtcatgaaaagatggggatttaaaggccagcctgctacgca

SEQ ID NO: 299404 - DNA, 95 bp, Homo sapiens
gcagaaggattgctttctcattatttgccagatctgcagagatcaaaacaagccctccaggaactcacgttgactatagtcaatggggccaatgg

SEQ ID NO: 299405 - DNA, 99 bp, Homo sapiens
gcggatcccgtggagtgaaggtcgcaccgcggcgtcaagctacaacttcaagcagaagagagaggagttgtgtctatcaaaggagtgtgtgctaaccgt

SEQ ID NO: 299406 - DNA, 82 bp, Homo sapiens
accagctggtgctggaactgcagaaagttaagcaggaggtgaagagtgaaggacccaaactggtgccgttcttcaaggccac

SEQ ID NO: 299407 - DNA, 50 bp, Homo sapiens
tactcaagagtggaagttttcacaggtgttacagttcgagtgcctcaaac

SEQ ID NO: 299408 - DNA, 98 bp, Homo sapiens
caggctgagcgtcggcgccggggttcggtggcctctagtgagatctggaggtttttcgttggaatatacgttgcacatttatggcgattctgagtgtg

SEQ ID NO: 299409 - DNA, 96 bp, Homo sapiens
ctggtggcaagtattgctgtgggtgctgggacttcccgtccgcggcgtggaggagaatgtcaccaatggcacagtgggcggcacagcagagccggg

SEQ ID NO: 299410 - DNA, 141 bp, Homo sapiens
ggggctcccagagaatgtggaggaagccatcgaccacatcctcaatctggaggaggaatacttcgcaggacagatggcggctctgtgttcccgggatgacttcctcggcagcttctgtcgctaccacctcacagaacctgg

SEQ ID NO: 299411 - DNA, 83 bp, Homo sapiens
ctccagcaccagcttccagttagtggatatagcacaccatccccagccagaggaggcctcggtggtaccagaagaggaggggc

SEQ ID NO: 299412 - DNA, 100 bp, Homo sapiens
gtgacagactatggggcctttatcaaaatcccaggctgtcggaagcaagtctgtgcagataataatcatgtccggacgtggacagtaacacgattcagag

SEQ ID NO: 299413 - DNA, 96 bp, Homo sapiens
gaatcagcagatcctgaaagccgtgcggatgaggaccggagcggaaaaccttctgaacaggaggccactgtctgcagctcccgtgaagatgtccac

SEQ ID NO: 299414 - DNA, 97 bp, Homo sapiens
ttctctggggactctgaacttccctggtcgaacagttttttctaatggctattcaagttgtggaagaaggactctgggaaaatggcctttcctatga

SEQ ID NO: 299415 - DNA, 100 bp, Homo sapiens
cacagacagaatccctgctaccagtttcagtgtagctcagaagccatttggagccacgtatgtatggagcagcatcataaacactcttcaaacacaagtg

SEQ ID NO: 299416 - DNA, 80 bp, Homo sapiens
ctttaaatccggagggggaaaaaatcccaaggtctgcaaagtgtgccggtccaacaaaagcccttgggtctgtttgactt

SEQ ID NO: 299417 - DNA, 100 bp, Homo sapiens
tctgagggagggtccgagccagccgctgttttgccggaggagcccctcaggcctctttaacacctctgtgtgaagatgacaaccaggcacaggaaatcat

SEQ ID NO: 299418 - DNA, 100 bp, Homo sapiens
cacctcaagccacgcatatgataatgaaagccatttaagaagttcctggaataatattagtcagagtaatataggatctgcaggaagtgtctcaagatag

SEQ ID NO: 299419 - DNA, 74 bp, Homo sapiens
gagctttttccaacttttaaggatatcaggagagaaggatattcctggactgactgatactacagtgcctcgcc

SEQ ID NO: 299420 - DNA, 50 bp, Homo sapiens
cacatctttcgacttgaaaaaagtttccaggatggcttctgcatcaactt

SEQ ID NO: 299421 - DNA, 75 bp, Homo sapiens
ctattgctgcagcatttgccaaggagacatccctcttaggtatgataagtattatcagcaacataatagttctgg

SEQ ID NO: 299422 - DNA, 100 bp, Homo sapiens
tcagcttttagagcaggtgtatgatcttttggaggaggaggatgaatttgatagagagcctggttcacctggatctgtaattcctgctcaagcacacggg

SEQ ID NO: 299423 - DNA, 83 bp, Homo sapiens
gctcgtcctggagcacctgcagctggcgcctctgcagtgggacttcccaagtaagaagcggaagaggagccgctggaaccaag

SEQ ID NO: 299424 - DNA, 100 bp, Homo sapiens
ttccccagctctgcagccacatactatccgtttgttcaggaaccaccagtgacagattgcagtaccatgcaggactagcatctggccttttaaatcagca

SEQ ID NO: 299425 - DNA, 88 bp, Homo sapiens
cgatcagaagtcatttgcagcatccactttttagatggcgtggtacagacctttaaagttactagttgtggaaagtaaaaatgtagcc

SEQ ID NO: 299426 - DNA, 83 bp, Homo sapiens
aagaaatgcagagtgatcccatctcaggagcacctgaatgctgacatcctggagccctctccacacccagacatgctgtgctt

SEQ ID NO: 299427 - DNA, 75 bp, Homo sapiens
gcgcgccaagaccgctgcagccgctggctgagtcacatttagggcaggcaaaacataagggatatagccctcctg

SEQ ID NO: 299428 - DNA, 49 bp, Homo sapiens
cagggcggtccctcatcaagaaggtcaaagctcagattcacagttgcat

SEQ ID NO: 299429 - DNA, 97 bp, Homo sapiens
agggctcagggagcaggagcttcaggttgtccgagcatctgggaactatcatggtgaacttacttcagattgtgcgggaccactgggttcatgttct

SEQ ID NO: 299430 - DNA, 82 bp, Homo sapiens
ggaaacacgcgggagctctcaaaaagtcagatttccatgaaagagatacattttacatcttcaaccatgttgacatcaaaat

SEQ ID NO: 299431 - DNA, 50 bp, Homo sapiens
tgtttgagagtgggaacatgacgcaggttcgtgctggccgtgggcagcgc

SEQ ID NO: 299432 - DNA, 51 bp, Homo sapiens
ttgaagattaggatcaaggatagacaaggaaaggccattgctgctctggag

SEQ ID NO: 299433 - DNA, 75 bp, Homo sapiens
ggtagcagcagcatggccgcgatctatgggggtgtagagggatctgggcggaccccggcaaatacgccctgatgg

SEQ ID NO: 299434 - DNA, 100 bp, Homo sapiens
ggccttgaaaagcagaagacaatccaaaacaaacgctattcctctcacgtccacattggccaactgtattcaactgacaagctgatcattgagaatcgag

SEQ ID NO: 299435 - DNA, 76 bp, Homo sapiens
ctgccccgccggagcagcatcatcaagggcttgctttcagaaatcctccgaaaggaagaggaccccaagactgcat

SEQ ID NO: 299436 - DNA, 98 bp, Homo sapiens
gaaagtgagagcccagagaaccaaacagaaaaagaaagatggaaagctctaagttgctgatcatctgggctgtgatccacaaacccggttctttgtcc

SEQ ID NO: 299437 - DNA, 95 bp, Homo sapiens
agagattgagaatgtccatggatttgtttctcattctcatatttcaccaataaaggaagatttcgatgtcgatcattttgtgtctgactgtagga

SEQ ID NO: 299438 - DNA, 75 bp, Homo sapiens
atttgaagacgttccttgaggaggtttgaaaaagtatttatgagcctccatttcttatactactgcagtgaacca

SEQ ID NO: 299439 - DNA, 98 bp, Homo sapiens
catcctcccctgagtccggagctaccaaaaccatcctcctggaacatcatcttcagcgggctatttcagcacagcaggtgtatggcgagaagagggat

SEQ ID NO: 299440 - DNA, 74 bp, Homo sapiens
acatgctggattgtagaacttctctctctctctggaagagaaatggccccagttcatcacccttctctagccca

SEQ ID NO: 299441 - DNA, 76 bp, Homo sapiens
ttcgtggctcactccctttcctctgctgccgctcggtcacgcttgtctgcgctcctcagaccaccggcaggtgaac

SEQ ID NO: 299442 - DNA, 103 bp, Homo sapiens
gctgctgcgcctcttctaccaagtggctgagtacaccttccgccagagtccggcagcgtcttctcttgagggagcaatttggagaagagctggaacccagact

SEQ ID NO: 299443 - DNA, 75 bp, Homo sapiens
agaaggttcagttggcaaaccagatatatgacttggatcttctcttagaaatctacagaagtataggggagccag

SEQ ID NO: 299444 - DNA, 85 bp, Homo sapiens
tttctgttcaggccagaccctctgggagcttctcagccattttccacagatcagcgggctgacgcacgaggcacacaggaaggag

SEQ ID NO: 299445 - DNA, 100 bp, Homo sapiens
cccaggcacggagaggcggcgagaccgcaggctgtgggtgagcgtggaggatgctcagatgcacaccgtcaccatctggctcacagtgcgccctgatatg

SEQ ID NO: 299446 - DNA, 98 bp, Homo sapiens
cgctggtgaccctgccgctggcgagcgccaccgcatggagctcccagctcctccagcagccgacaggaggcccgtcaagatgcaggcaggcattgcca

SEQ ID NO: 299447 - DNA, 104 bp, Homo sapiens
gcctctctccctgatcttacgtgctcaagagactttagaagacagctttccatcgacactaggccctttagaccagcctctgaagggaatcctagcgatgatcc

SEQ ID NO: 299448 - DNA, 75 bp, Homo sapiens
agtggtgctcggaaaccagcttccagcaagtacaagctcaagacaatgcagatcttcgtgaagactctgactggt

SEQ ID NO: 299449 - DNA, 80 bp, Homo sapiens
cttctcgactcggtcctgtttcgacagcgaacatgtcgcggcctgtcagactgtgccctgtccacggtgcctcctgcatg

SEQ ID NO: 299450 - DNA, 103 bp, Homo sapiens
gacaagtaagtggatcacacgcgccggctgctgctactactaccactttgggctgatggcaactggtgtcatggagaaactccagctgggcccagagattctg

SEQ ID NO: 299451 - DNA, 100 bp, Homo sapiens
ttgcgaaaagtgctttttgagtatatgatgggtcgtgagactaaggagtggcaaaattctattcagaagaatgcaggccttgcttttatcgaacttgtca

SEQ ID NO: 299452 - DNA, 100 bp, Homo sapiens
acctgttcaccggggagtccctcgccacctgcaagagcctgcagcagtcgcttctccgcagatcctcgttcctagctgcctgccagcgtcctcggcccgg

SEQ ID NO: 299453 - DNA, 98 bp, Homo sapiens
ctgtcggatatgaagatcatgtcccaagatgccatgatgatcacggatgaggtcaagactggcacagcctccaggttggcgggctcatctgcgctggg

SEQ ID NO: 299454 - DNA, 75 bp, Homo sapiens
cctgacggggctcccgagcacgaggactaccccaatggcacctggctgggcgacgagaacaaccccgagatgcgg

SEQ ID NO: 299455 - DNA, 80 bp, Homo sapiens
gaaagtacttcattgaagccagtcccttgcccagcagttatccgggaaaaacaattactacaagggaagacataaattca

SEQ ID NO: 299456 - DNA, 87 bp, Homo sapiens
acaccccctccgtgggtgtgtgctggctgcaccttcgaggaggcaagtgacccagcagtgccctgcgagtacagccaggcccagtac

SEQ ID NO: 299457 - DNA, 100 bp, Homo sapiens
cgtcaaagcttctaggttctggtaacaccatctcttcccttttgttccccagccctaagttccgagagaaatatggggacgtcttcacggtacacctggg

SEQ ID NO: 299458 - DNA, 100 bp, Homo sapiens
gagcgtaggacgatgcttctcttctgtcagcctgcaactgagccaggattgaatacttggaccccaggttggatggcaagcatgtggtgtttggcaaagt

SEQ ID NO: 299459 - DNA, 100 bp, Homo sapiens
gtcttcaagccccaccgacacgaattggccttattaatgatatggatgaagatgcatcagggggcgatcaagatcaggaagaaagaagatggaacaaaag

SEQ ID NO: 299460 - DNA, 100 bp, Homo sapiens
ccagggtccctgaagagggaagacacgcggaaacagatcaaaatggactcacagatgacgaagcaggcgctgaatgagattgagacgaggcacaatgaga

SEQ ID NO: 299461 - DNA, 90 bp, Homo sapiens
gcctgggaggctgttccccatcacgaaaaagcttgtggtgaaggggggcaaaaaaaagaagcaagttctgaagttcactcttgattgcac

SEQ ID NO: 299462 - DNA, 82 bp, Homo sapiens
gcacgtcctcgacctcagttgccacgtgcacatgctggtgccttccaggaactgtggctgcaccatctgtcttcatcttccc

SEQ ID NO: 299463 - DNA, 80 bp, Homo sapiens
aatatgacccaagcattggtatctacggcctggacttctatgtgagaaccatggtgtggtgttggtaaaagattcagtac

SEQ ID NO: 299464 - DNA, 76 bp, Homo sapiens
tacagaaacctcgtctccctgggtgtgatttcataccaagacttggtgaagtgtttcacattgatcatccagagtc

SEQ ID NO: 299465 - DNA, 101 bp, Homo sapiens
ccagaaggggggctttcgcagctccttccgcaagctctttaaaaagaacatttgacattgtgcagcaaagaaatggttatggagaagcccagtccgctgct

SEQ ID NO: 299466 - DNA, 75 bp, Homo sapiens
aatcccagcactttgggaggccaaggacactcatgaggaccatgatacttccactgagaatacagacgagtccaa

SEQ ID NO: 299467 - DNA, 83 bp, Homo sapiens
ctcaggatggaggaagactcgatccgcctgcctgcgcacctgcgtaactataactacccaatattgcagccatggagtccatg

SEQ ID NO: 299468 - DNA, 98 bp, Homo sapiens
cggtccctggatgaacgtttgtggaactggattgaattaaacaagacgtgcaaagcaagtggttcacgaggtacatgtcccagagcaagcacacggag

SEQ ID NO: 299469 - DNA, 76 bp, Homo sapiens
gtaatcagctgaggccatgtcaggagacggagccacggagcaggtggtgaccatcgctatgtgaacaactacacga

SEQ ID NO: 299470 - DNA, 100 bp, Homo sapiens
ccggaagaagcgaccaaagcgcctgaggaccggcaacatggtgcggtcggggaataaggactcgggtcaagctggaaagcctggaagacgcctacattct

SEQ ID NO: 299471 - DNA, 100 bp, Homo sapiens
attatgcaggtggtctgtgaagccacacagtgtccagatacgaggggcaattgaaggaacagactaaaaatcgtgtcctggaaggaaactacaggtacta

SEQ ID NO: 299472 - DNA, 100 bp, Homo sapiens
ccatcgtcatcagaaactgaaggcaactttgtctatcgcacaggttcacctgcttccaggcgggcagggcgttgtattcatccctcgtcatgtctagtgc

SEQ ID NO: 299473 - DNA, 50 bp, Homo sapiens
acagtctgcatgtgcagttttcagacgaagcttcacaaaagatgtctaag

SEQ ID NO: 299474 - DNA, 99 bp, Homo sapiens
cttctgaaccgggttctggagcggcttgctggaggggctaccagggacagcgccgcctcagatgatgataggagcatcatgacagaacagttagaaact

SEQ ID NO: 299475 - DNA, 82 bp, Homo sapiens
gcgacgccaggagaccccaagctgcatcgccgagtgggtgtccctggccagtgtccttccacctgtccacaagcatggggaa

SEQ ID NO: 299476 - DNA, 74 bp, Homo sapiens
tgaacggatggatgtgatgcctgctagccaaaagggcttcctgttggataaaaaaattggagtaaatcaaccaa

SEQ ID NO: 299477 - DNA, 90 bp, Homo sapiens
ggacggcgcctcctacgaggcagaaatcagggagctggaggccctgcggcagactcatctttcaagaggactttagactaattgcagata

SEQ ID NO: 299478 - DNA, 75 bp, Homo sapiens
cttgccctggtcttgctcggccgatgaagtgcagaggtttttttctgagggtggttttcctgaagcagctggcta

SEQ ID NO: 299479 - DNA, 100 bp, Homo sapiens
gagggccgtcaagatcctcaagaagaagaagttgcgaaggatccccaacggggaggccaacgtgaagaacagcaatgcagagtccctggacaggctcctg

SEQ ID NO: 299480 - DNA, 75 bp, Homo sapiens
cctggaggaatccgagaagagcagagcggagggagccccagacacggttcctgcttggctcgagtttgagtttac

SEQ ID NO: 299481 - DNA, 99 bp, Homo sapiens
ccggctttacgttcacctcggtgtctgcagcaccctccgcttcctctcctaggcgacgagacccagtggctagcaaacggggattcagcgtccgatcct

SEQ ID NO: 299482 - DNA, 100 bp, Homo sapiens
aggtgaagtaggaccgaattcctgtgccgaagaggcctgcagtgggagagcaggcccttcctggatctggagagagcagctgctgctgccccaccacctg

SEQ ID NO: 299483 - DNA, 75 bp, Homo sapiens
tgggaaaaatggaccaacttctttggcaagtggacattttactggctcaagtgagagaacgccgagccgtcgccg

SEQ ID NO: 299484 - DNA, 90 bp, Homo sapiens
gttcggctactacttaataatgacaatctcctcagggaaggggcagcacaataagcatggattcctggttcattcttgttctgctcggca

SEQ ID NO: 299485 - DNA, 75 bp, Homo sapiens
tagcttcagagttctttgtggatggacttgattctgatgagaggcctccccatggccacccatggaccagtcggc

SEQ ID NO: 299486 - DNA, 89 bp, Homo sapiens
aaaatgtcaacaaattgatgggaattcctgcccctagaggagtgttactttatggtcctccaggtactggaaaaacaatgatcgccagg

SEQ ID NO: 299487 - DNA, 51 bp, Homo sapiens
gattcgcagtggtcgcttcttctccttgactatctgatcaacgtgatggat

SEQ ID NO: 299488 - DNA, 83 bp, Homo sapiens
ctcgcagggagccatccgatcgtgagtgcatctccatccacgttggccaggctggtgtccagattggcaatgcctgctgggag

SEQ ID NO: 299489 - DNA, 101 bp, Homo sapiens
ggggacgttattaaaccaatgtttgtcatcaatgagatgcggcttctccaccttcatctatggaagataaatcagatgttggttatggacgaagtatttct

SEQ ID NO: 299490 - DNA, 100 bp, Homo sapiens
ctgtgaggcctacagctctgccggggaggaggaggaggaggaagaggaggagaaggtggtgatctttgtgaagtctgtgcagcggtgcattgccttggcc

SEQ ID NO: 299491 - DNA, 60 bp, Homo sapiens
gaagtattgacggaaagcttgaattacctacatggtcttctggctcatcccccctacagc

SEQ ID NO: 299492 - DNA, 82 bp, Homo sapiens
tgggtttcccgggagatcccaggcggtgacagagtggagccatggctagaggtgcagtctttgcaagccacatttggaactt

SEQ ID NO: 299493 - DNA, 97 bp, Homo sapiens
tatgaatctctgttccaaatgctttgctggtgctggagaatctggtaaaagcaccattgtgaagcagatgaggatcctgcatgttaatgggtttaat

SEQ ID NO: 299494 - DNA, 100 bp, Homo sapiens
cccggtgcccgaggaggcagccaagctcgtagcctgccactccgtgcgtttgtccagaggggttgcgtttatccggtttgacaaacggtcggaggcagaa

SEQ ID NO: 299495 - DNA, 75 bp, Homo sapiens
agaatcgccgcgggggaccgcccttcgccttcgttgagttcgaggacccgcgtgcctccggagccagcgtggtgg

SEQ ID NO: 299496 - DNA, 100 bp, Homo sapiens
ccattgtttgaccacaacaagggccggattctcacccagacgcagaccaaactggagcatgcccgcattaaggagcttgaacagagcctgctctttgaaa

SEQ ID NO: 299497 - DNA, 75 bp, Homo sapiens
cagcaccctccagctccctacccatccgccaggagccctcttccttcagaacactatggctatgcatcctccaac

SEQ ID NO: 299498 - DNA, 101 bp, Homo sapiens
ggggaatcaagagacccggtttctaatccctgctctgtcactaacaagctgcgtgatcttcgtggaatgcagtagccctctgggcctgggatattgtggtt

SEQ ID NO: 299499 - DNA, 75 bp, Homo sapiens
ctcgctgcttcaggaggacctgcaggaggacgcagacggatgactcacaccacccggcaagaactgctcactacg

SEQ ID NO: 299500 - DNA, 100 bp, Homo sapiens
cctacatcctgggcgtcttcccaggctgtcatataactcctgagaatagtggttcttaactctgtgcagtagacattgttgcaatcatgatcggcaatct

SEQ ID NO: 299501 - DNA, 82 bp, Homo sapiens
atgaatgactatccaaaattcaagttgcaggaagaggcagaggaagaggaagaggaagaggacgtggccgtggcagaggaag

SEQ ID NO: 299502 - DNA, 100 bp, Homo sapiens
gacccagaaaagtattcttgctttgctttatttgtgaaatttggcaaagaggaggaccaacgacaactttatgcaatggcaaataccctggaagatggtg

SEQ ID NO: 299503 - DNA, 51 bp, Homo sapiens
caacctcagaggacaacgaagtgttcggactcagaattcatgattgaagaa

SEQ ID NO: 299504 - DNA, 75 bp, Homo sapiens
ctgcagtccctcgtccagccacccccagctttaactgagactccgaccagctcagactggcagtcgaccgatgcc

SEQ ID NO: 299505 - DNA, 106 bp, Homo sapiens
cgccaggacaatggggacccgggacgacgagtacgactacctattcaaagcaattctgtggtgttcttggtcacacatttatggagtttctgaagggcagtggaga

SEQ ID NO: 299506 - DNA, 99 bp, Homo sapiens
gcgtctagctggaggattgtaaatgcaccaatcagcatgctgtgtctagctcaagtgccccaccttagaacagtatgccatgagagcgtttgccgacgc

SEQ ID NO: 299507 - DNA, 100 bp, Homo sapiens
gggccatagacctggcgctcttgcagttcctgggggacgctgtgctgactccttagttgctgagatgagcttgtaaaaagcagctctgttgatcccagca

SEQ ID NO: 299508 - DNA, 76 bp, Homo sapiens
gcccaagccccagccccctgtggctgaggctacaccccggagccaggagggtagctacagcaagctgggtagcagg

SEQ ID NO: 299509 - DNA, 75 bp, Homo sapiens
caaataatagctgtttgtattttggctgctgcaggagccattttagaaccacgaagctgccctgagacgctcact

SEQ ID NO: 299510 - DNA, 100 bp, Homo sapiens
ctcttattcagaatgtcccaacaggaactcgaatcatttatgacagaaagtttctgttggatcgtcgcaattctcccatggctcagaccccaccctgcca

SEQ ID NO: 299511 - DNA, 100 bp, Homo sapiens
ggcttgggcagcccgcgggcgcctcaggggttccagggcatggcaggggccaggggcactagtggagagcgaggacctccagggaccgtggggcccacag

SEQ ID NO: 299512 - DNA, 83 bp, Homo sapiens
ctggaaattgcgctggaccgtcgccttgctcctcgccgcggcggggactgcagagcactccgctggtccaggcggcaacatgt

SEQ ID NO: 299513 - DNA, 75 bp, Homo sapiens
gcgggagaggcgagctcgcgatgagtggtctcggcaggctcttcgggaagggcgttacatagccatgtgccgcga

SEQ ID NO: 299514 - DNA, 96 bp, Homo sapiens
catttcagatgtgattcatctagctgagggtaaaaagctgggattggtaggctgggtccagaacactgaccggggcacagtgcaaggacaattgca

SEQ ID NO: 299515 - DNA, 75 bp, Homo sapiens
gtttgaaagtgcgattgtggaagctgctcgggttgacctgacagttcaagaaaaggagaaatatcttaatgtgtc

SEQ ID NO: 299516 - DNA, 143 bp, Homo sapiens
gcctttgccgccgccaagctcctggccctggccctgatcatcctgctgggcttcgtccagatcgggaagggacgcgcgggcggccatgcgccccttcgacccctccactctgctgcccacctgctgggattactggacctacg

SEQ ID NO: 299517 - DNA, 51 bp, Homo sapiens
tgcgagtcttcggagcgaccccggcagaaccttcaacaactagtactgctt

SEQ ID NO: 299518 - DNA, 138 bp, Homo sapiens
aggaggagatgaataagtgggttcgttgtatttgtgacatctgtgggtttaatccaacagaagaaggaacacactgtgaattgtacaaggatccctgcgctaacgtcagctgtctgaacggagccacctgtgacagcg

SEQ ID NO: 299519 - DNA, 50 bp, Homo sapiens
ccctcctgccccgtccatggctgtggtgctgggctttgacaaacttcctc

SEQ ID NO: 299520 - DNA, 89 bp, Homo sapiens
ccttgcactttcctaactcagaagtggtgcatgggcaagcatgaggcccagagacggaaagtacaaagactagtaaaatacatccttgc

SEQ ID NO: 299521 - DNA, 75 bp, Homo sapiens
ccaagaccagcgcgagggccctgggcaaggcccgacagggctggggagcagaataccaccgccaggatgttacta

SEQ ID NO: 299522 - DNA, 119 bp, Homo sapiens
gccacgccgcccaggagacccctctgctgcaccacttcatgggctcccactgcagcagctcgggggaccccgctgagtacaacctgcgctcgcgcaccgtgctgtgcgggacctgcggg

SEQ ID NO: 299523 - DNA, 100 bp, Homo sapiens
caaggggagtcgtggcgtcgtctgcgaccgctgccttctcggtgttctggacttggtgcctctttctgttatatgctttcctatttagttgggagaccag

SEQ ID NO: 299524 - DNA, 101 bp, Homo sapiens
tgatcgaccgcaacttacgggaggacggggaaaaagcggccaaagaagtgaagctgctgctactcgttctgtggctcctgatggatctgagaagatggacg

SEQ ID NO: 299525 - DNA, 51 bp, Homo sapiens
accaccgccctggccatctaccatgtggctgaccccgcactacatctaccc

SEQ ID NO: 299526 - DNA, 74 bp, Homo sapiens
atggagtaattcttgaacctcccaactatggcattgtcacagcattcgttcagtcagagagcataatagaagta

SEQ ID NO: 299527 - DNA, 101 bp, Homo sapiens
gagcttctcagaagacagagggttttcttttgagtctgcaaaatgaatgttcaccgtcgatgtgagaccaacgtggctcccaactgtggagtggatgccag

SEQ ID NO: 299528 - DNA, 98 bp, Homo sapiens
ggacacggcctacaacaccaagaggcctgtctcctccctcctacacatttccagctcctgctgcagttattcctacagaagctgccatttaccagccc

SEQ ID NO: 299529 - DNA, 75 bp, Homo sapiens
agagttgccatttcgctgggatttttgggtggtgcaaagggattaatgaaaatcaagttccatcctcagacaaga

SEQ ID NO: 299530 - DNA, 98 bp, Homo sapiens
ctccaaccagaacatgcagtccctgcttcctgccgacatcgctgccggctcccatgttcagcagaagcgacttcagcgtgtggaccatcctgaagaag

SEQ ID NO: 299531 - DNA, 75 bp, Homo sapiens
ggagcgtcaacagcagcaccatggatgccagaattccagaaaagttcagttcgaatcaagaaccctacaagagta

SEQ ID NO: 299532 - DNA, 74 bp, Homo sapiens
aactggttctacacgcgagctggtaccacaagagccaggccatctatctggagtcaaaggacaaccagaaactg

SEQ ID NO: 299533 - DNA, 100 bp, Homo sapiens
cccagaaatctacaggtcattcctggagatcctgcacacgtaccaggagatctataaggacaggcagaaattctcagaacaggttttcaaagtggcctcc

SEQ ID NO: 299534 - DNA, 75 bp, Homo sapiens
cgagcgcgccccaagcccgggcgccaccgctgccacctccgcgagtggaggccatagtggagtttgactaccagg

SEQ ID NO: 299535 - DNA, 75 bp, Homo sapiens
atcggggagcgtccggagctagctggatcctctaggcaggatgaagagactcggcacagccttgagtgcatccag

SEQ ID NO: 299536 - DNA, 100 bp, Homo sapiens
caagagggatccttcacccgtgtctggtgaagctttgttctaagaatatttgtttcatctagtttatgagtccaaatgatatagactgtaaatgtcacag

SEQ ID NO: 299537 - DNA, 100 bp, Homo sapiens
gtaatgaagtcttccaggacgagacatcactggctacacatttccagcaggctgcagatacgagtggacaagatcccaaagaatatcttccatttcttaa

SEQ ID NO: 299538 - DNA, 80 bp, Homo sapiens
cagaagacaaagtcaattccatcactgccagtgaaagatgtagaagataaacctgaacaacaaaccagaacaagagagac

SEQ ID NO: 299539 - DNA, 100 bp, Homo sapiens
actgcaaccttgatctcccaggctcaagcaatcttcccactacagcctccgaggcagctgagactacaggaaaactcctccttaacttggtagatcatac

SEQ ID NO: 299540 - DNA, 51 bp, Homo sapiens
ggaggaggtggcaggcctcggcgtacctaggtgctgatatggaagaatttc

SEQ ID NO: 299541 - DNA, 96 bp, Homo sapiens
agagatctcttctgttctccactgctaggtgtctgatgatttgtgagcctcaagtgactactctgtggaatcatctgtccttgcctttgaattagc

SEQ ID NO: 299542 - DNA, 75 bp, Homo sapiens
ttgtgaaacagagaaagataggcggccatggtccaaccttgaagccatcctgagaggcctgaagaagaaaggcat

SEQ ID NO: 299543 - DNA, 100 bp, Homo sapiens
tttagccgagagtacacagctgctgtagaagccaaacaagtggtttacatccacgtgttctctgccttgattgtgatcatcgctggggccttcgtcatca

SEQ ID NO: 299544 - DNA, 106 bp, Homo sapiens
cgcgccttcggaagcccgttcggcctggaggagccgcagtgggtcccggacaaggaggattttttatcaagcagaaatgcatcgaacaacgagaatcaagatcact

SEQ ID NO: 299545 - DNA, 82 bp, Homo sapiens
gaaggacatcagtggccggaagcttttctacgtccattacattgactgccaagcaaataaagtagccaaagaagctgctaac

SEQ ID NO: 299546 - DNA, 100 bp, Homo sapiens
gcatggagggccccgacgatagcgaggtcacctttgcattgcactcagatgggcttccccaaggatttattgacattgctacttgagtgtgaacagttac

SEQ ID NO: 299547 - DNA, 96 bp, Homo sapiens
cgccgccgccgccgccgccgctgccgctgccgctgccgcacctccgtagctgactcgacctgcgaccgcatcaagcagtccgccagcggaaccaag

SEQ ID NO: 299548 - DNA, 83 bp, Homo sapiens
tgcactcaacagatctttaccagatgttaggttagaaggagtcatcttagtgggatttggggaagcaacagggctgtgtgggg

SEQ ID NO: 299549 - DNA, 87 bp, Homo sapiens
agagcagctcatcgagatggggaacaggctccgtgcagagctgggccgacccgaaaagacacctatggctgccgatgaaggctcagc

SEQ ID NO: 299550 - DNA, 101 bp, Homo sapiens
tacacagagcacgcccatcaggtggtggtggccaagtatgcgcccagcggattctacattgcctccggaggttagagcagccagcgggtacagaatggatt

SEQ ID NO: 299551 - DNA, 82 bp, Homo sapiens
attggctggagtagcaaggatcttcaacactagaagatatttgctgcagcctttaggaagcaagatttccagatgtagcaaa

SEQ ID NO: 299552 - DNA, 100 bp, Homo sapiens
ggcgccaatggggagcagaaggactcggacacaggtaactaggatttctacctcaaccgcgagacctatgcaaggacggtgtggaccaactcgcgcccgc

SEQ ID NO: 299553 - DNA, 110 bp, Homo sapiens
ctgattcataaccatttggctctgagctatgacaagagaggaaacaaaaagttaaacaagcaagcctgccataagtgagaagtgggatggagtaggacctcttccagact

SEQ ID NO: 299554 - DNA, 100 bp, Homo sapiens
gatgaagcaaggcccaatgacccaggcgcaatgccaagtgagtacacctatgtgaaactgagaagtgattgctcgaggccttccctgcaatggtacaccc

SEQ ID NO: 299555 - DNA, 75 bp, Homo sapiens
ccgcctttttgttgtgcacctgctccccaagctccagcagctggctccccagttaaagatctcagatgaccggct

SEQ ID NO: 299556 - DNA, 74 bp, Homo sapiens
ttccttgcagagacagctcaacacggcacttccacaggtttgagtcctgctggccggccctgatgaaggatgct

SEQ ID NO: 299557 - DNA, 101 bp, Homo sapiens
ttttcaggaaacttgcagcaaagccattcgggttggagtaattggtcaatggctgtctgcttgaccctgtgcctcctgtcctggtgcggaagggatgccag

SEQ ID NO: 299558 - DNA, 100 bp, Homo sapiens
cctttgcagctgcgattttcgccctacgttttcaacggagggtccctccagctacaaggtgggcaccatggcggagaagtttgactgccactactgcagg

SEQ ID NO: 299559 - DNA, 73 bp, Homo sapiens
cctgcctgcgcgctgctgctgctgtttcccctcacggcccaggtggagttggcatgaacttaacagcagcaga

SEQ ID NO: 299560 - DNA, 95 bp, Homo sapiens
cctgatgcagaggaagattgaggactaaggggcttcatccacagcaccttctagccaccatggcaacctcatctgaagaagttttgctgattgta

SEQ ID NO: 299561 - DNA, 100 bp, Homo sapiens
gccggccaaccgcagccaggagaaggagttcgtgcaggcgtacgaggatgtgctggagcggtacaaagttgtcgagatgtccacagaaggaggatttggt

SEQ ID NO: 299562 - DNA, 100 bp, Homo sapiens
ttgaggctcggagccaccgccccgccggcgcccgcagcacctcctcgccagcagccgtccggagccagccaacgagcggattctgaaaccttccttgtat

SEQ ID NO: 299563 - DNA, 100 bp, Homo sapiens
tctagggttctaagtgatgtccaggaaggaggaggaataatatttatggagcatatattatggaacacagcaagcaccggaagcaccccggcggccgcgg

SEQ ID NO: 299564 - DNA, 101 bp, Homo sapiens
cctcgggatttcgagggcccgggggcgcgcgacgccatgggccggccgggcccagagctcctgtctctcagggaactgggaacagccaggtgccccaaagc

SEQ ID NO: 299565 - DNA, 100 bp, Homo sapiens
ctgaacgagtgcaagcagctgtccgagtcccaggtcaagagcctctgcgagaaggatctcactggcatcgaatctatggatcagtgtcgccataccttgg

SEQ ID NO: 299566 - DNA, 125 bp, Homo sapiens
aggcggaagaccgcgcgcagggcctgcagcgggagctggacggcgagcgcgagcggcgcgagaaagatgaccgagtgggagacagcagcaccagcggtggcagagaccccagacatcaagctctt

SEQ ID NO: 299567 - DNA, 50 bp, Homo sapiens
ccccgcctcggggagggcaccaggtgttggagcgggccggagagaagtag

SEQ ID NO: 299568 - DNA, 88 bp, Homo sapiens
actggttaatagtggcatggaagatccatttggcagagctgcaaccctcttgtcctctttgaagcagaaattgaaaagtactgcccag

SEQ ID NO: 299569 - DNA, 90 bp, Homo sapiens
aagaaaagtagtagtccctgggatccgtatgtccattaaacttcatcagggtgaaaggttgagccatgcagtaggctgtgcttttgcagc

SEQ ID NO: 299570 - DNA, 90 bp, Homo sapiens
gctggctcggcacatcctcactggtcgggaggacagtcattttgtttactcattcagccctgttgcaggtcccaataaactcttcataag

SEQ ID NO: 299571 - DNA, 95 bp, Homo sapiens
gttctatttctctagctattgccttattttttctcatggatgttcttcttcgagtatttgtagaaggcctcgtgcaagccgaatactggcatgac

SEQ ID NO: 299572 - DNA, 100 bp, Homo sapiens
ggatgtcatgtcctacttcaatggagcgatcgtcttctgatcaaaggaggtaaaattgttaatgatgaccagtcgttctatgcagacatatacatggaag

SEQ ID NO: 299573 - DNA, 83 bp, Homo sapiens
gctgctgctgctgctccacacctgcgtcccagacaatgcagatcttcgtgaagactctgactggtaagaccatcaccctcgag

SEQ ID NO: 299574 - DNA, 76 bp, Homo sapiens
tccggggacccttccgtatctgcctaggcattttgctgtctcctcctaatacgttggaggtccccctccccactaa

SEQ ID NO: 299575 - DNA, 98 bp, Homo sapiens
gggtaccggccgtggaagcggccaccgactactgtcagcagctgtgccaggtactccaaagattcaggtttactcacgtcatccagcagagaatggaa

SEQ ID NO: 299576 - DNA, 97 bp, Homo sapiens
aagagttggattctcttatcaaggctaccatagctgggggtgaaccttctgaggaaaggaggccatacagaaattgaacctcagcacttctgtcaag

SEQ ID NO: 299577 - DNA, 75 bp, Homo sapiens
tgttcttcttttgcatcctacgtaaccagaccaagctgtgggatccacattgtttgaagttattgtgagtgcctc

SEQ ID NO: 299578 - DNA, 82 bp, Homo sapiens
ctgggccttgctgccaggaagcttcggccccgcagctcggcttgctgcggtctcagatgtccagctcgccgctgtccaagaa

SEQ ID NO: 299579 - DNA, 82 bp, Homo sapiens
cagccagcacactcctcgcgagcaagattcttgagtatcagaacaccaccttctttggtggaacctgtatatccatgattga

SEQ ID NO: 299580 - DNA, 100 bp, Homo sapiens
gtccacaacgttaaggagctggaagtactgctgctaagggagaacattgagcaattcttcaccaaatttgtagatgaggggaaagccactgttcggttaa

SEQ ID NO: 299581 - DNA, 100 bp, Homo sapiens
cacaccagactcactaaacactgagcaaggcccagaatgttccctaaggcccaaccaaacagaagaggttcaaccttaaagtgcaattgcagattctggc

SEQ ID NO: 299582 - DNA, 50 bp, Homo sapiens
ggagatatggcgcaactgcggcgcgagaaagttctgccactaatgaaccc

SEQ ID NO: 299583 - DNA, 102 bp, Homo sapiens
cgcctcgtgaccatcatgctggccaacaatgagactggcattgtcatggaagcccgaaagatgagatcaatacaggaaaccctgggagagtctgggagttta

SEQ ID NO: 299584 - DNA, 100 bp, Homo sapiens
gcccaggtggaccccaagaagaccattcagatgggatctttccggatcaatccagatggcagccagtcagtggtggagggcacaagagactatagtcccc

SEQ ID NO: 299585 - DNA, 83 bp, Homo sapiens
ctcctttataagtgtcagctgtgagggaggagtctgctactagtcttatcagctcttaaaaacagaaactcatctgtccaagt

SEQ ID NO: 299586 - DNA, 50 bp, Homo sapiens
tggccatggcccgcaagctccaggacgtgtttgagatgaggtttgccaag

SEQ ID NO: 299587 - DNA, 82 bp, Homo sapiens
atggcgaccggagcgaacgccacgccgttgggcccgcgatgctcccagcccggtgagacctgcctgaatggcgggaagtgtg

SEQ ID NO: 299588 - DNA, 83 bp, Homo sapiens
cgagggccagctgacggagatggtgcagaagatggaggaggttctgcggggagtgtctccagccctgcctgcaggtgccatcc

SEQ ID NO: 299589 - DNA, 76 bp, Homo sapiens
aagcccatgcgggaccagatcatccgcgtgaagcgatgatgaataaggtatttggaggtactgtgcacaaaaaaag

SEQ ID NO: 299590 - DNA, 82 bp, Homo sapiens
gggcttcatctcttgtgtggggagtttcatcctagcgggaatagctattcagtcagacagaaccacttatcacgttttgcag

SEQ ID NO: 299591 - DNA, 75 bp, Homo sapiens
tcttctggaagagatggaccaaaagcctctccagcaataatccgaaacatgccctgaactgtcacagaatgaaac

SEQ ID NO: 299592 - DNA, 100 bp, Homo sapiens
tgatcgccatgcgcctggcacagctcagtgaggagaagaactcggctgtacttcgcagccgtgacctgcagctggcgggaacttctaatggattggggtc

SEQ ID NO: 299593 - DNA, 74 bp, Homo sapiens
gtacttcactggggaggccatagaagatgatgacaatgtggaagatgcaatgctgatgtttgataaaactacca

SEQ ID NO: 299594 - DNA, 90 bp, Homo sapiens
aaattaccaaaaggaagacagcatctggtagcagggcgccaagcagtgacttctgaccaacagagtgtggggagaagggatgtgtattag

SEQ ID NO: 299595 - DNA, 75 bp, Homo sapiens
ggtccctgaagagggaagacacgcggaaacagtttttgaatcagagccgacaggcacttgaattgaaaatggaaa

SEQ ID NO: 299596 - DNA, 75 bp, Homo sapiens
cacgaggaacccccaggacccagctggctcacaaccgcggtgtcaaattgagaaccaggtagatccccaccacct

SEQ ID NO: 299597 - DNA, 101 bp, Homo sapiens
tactttaccagattcttgatggtatccattacctccatgcaaattgggtgcttcacagagacttgctggaatgcttgctgattcctctgcacacttctaag

SEQ ID NO: 299598 - DNA, 100 bp, Homo sapiens
ctatgatatgctaagaaagaatcttgtcactttagccactgctactacagagaattttctctacatgtgcacccatttaaaggactcggcttcaagggaa

SEQ ID NO: 299599 - DNA, 90 bp, Homo sapiens
agttctggggagcgcctcgtcgacatgagtgatgtggaggaaaacaacttcgagggcagagagtctccccaggacagtgctatcacccgg

SEQ ID NO: 299600 - DNA, 75 bp, Homo sapiens
aaatcacacgcataatggatgaaaggaaccgacagggaacagaaagaacagcttcaaaagatgaaagacttcggg

SEQ ID NO: 299601 - DNA, 143 bp, Homo sapiens
ccagcaaactatcagttaacacaaactgctgcattgcagcaacaagccgcagctgcagcagctgcattacaacagttcttctcaccactaaatccaatacgagttcatattgatattggagctgatggcagagccacaggaga

SEQ ID NO: 299602 - DNA, 116 bp, Homo sapiens
caccgggatcgtgaccgagaccgtgaccgagagcgtgaccgagagcgcgaatatcgtcatcgttagaagacggaagctcctcagtcttagagagttctgaaggtggatttctcagc

SEQ ID NO: 299603 - DNA, 82 bp, Homo sapiens
ctcccctctcaggacaacccagatgtgcaacaaagtgcgatggaagccatcttcgacaagagcacagggaaggttgttttga

SEQ ID NO: 299604 - DNA, 73 bp, Homo sapiens
tccgatataagatccaggccaaagtgtgaagcagtattctggaaagtttttctaagactagtgaagaactgaa

SEQ ID NO: 299605 - DNA, 82 bp, Homo sapiens
aatgacaatgcttaacaagggctcaatacattctcagtcatcttcatttacaggagttcatgatcaagtgttgcccacacca

SEQ ID NO: 299606 - DNA, 80 bp, Homo sapiens
ctctcagtccacactcccaaaagggaaagattaacccttcctggaagaattgtagaaaatggaagtgagcaagggtccta

SEQ ID NO: 299607 - DNA, 90 bp, Homo sapiens
gggagaaaagcatgcagaacagatatgtacaaagtggtccttccatagtgacgccccccaaggacatctggaatgtcactggtgcccagg

SEQ ID NO: 299608 - DNA, 100 bp, Homo sapiens
gccaagaccaactccttacggaggcggaagctcgcctcctttctgaaagacttcgaccgtgaaggtaagaatgattgatgttggctgatattggagtgct

SEQ ID NO: 299609 - DNA, 89 bp, Homo sapiens
ctcttgctaaagaggtagcaagaaagaaaattagagtgaatgtagttgcaccagaaactcagccacctgtgacaaatttgagtgtctct

SEQ ID NO: 299610 - DNA, 100 bp, Homo sapiens
ggcggccccagtcagacgcaggcagccccaaagcctgaacaggcagggccagacccaggatcccttggttccagtaccccattatctatgacattcgggc

SEQ ID NO: 299611 - DNA, 75 bp, Homo sapiens
tgcttcggcgctccggctcctcagagagcctcggctagatttaagtaagtcttccccaacaccgaatgggattcc

SEQ ID NO: 299612 - DNA, 86 bp, Homo sapiens
taactgatgatgtgcgggttcaggaggtacccaaactgaagctgaacatctccttcccagccactggctgccagaaactcattgaa

SEQ ID NO: 299613 - DNA, 96 bp, Homo sapiens
gcttcgagtcggccaccttcctaggctacttcaagtctggcctgaagtacaagttcctgggcttcccgatggactcgagtttttactatgtgagca

SEQ ID NO: 299614 - DNA, 107 bp, Homo sapiens
ccagggagcaagtctgcatcgcagaggccaggaggtggggctggtgtccgagcacttctcgcaggccccgcagaggctgtccttctacagctggtacggcagtgcca

SEQ ID NO: 299615 - DNA, 144 bp, Homo sapiens
gccaggataatgcaaaggaaaagaggactggagtggtttgtctgtgatggctggaagttcctctgtaccagaaaatccattcctcgctgccgaagaattaacaggatgctctccaatgaatccctccatcctcctgccttcagc

SEQ ID NO: 299616 - DNA, 100 bp, Homo sapiens
cacacattacatatagattgtcataaatcttacatggaatcattacggttgaagctttatatcaaactacatacccagaatatctccagtacatttattt

SEQ ID NO: 299617 - DNA, 97 bp, Homo sapiens
aaagcctccttctggttccaaatggtgactctgacatcattagaagcatgccagaacagactggtgaaaagtaaaccttttcacctacaaaatttca

SEQ ID NO: 299618 - DNA, 75 bp, Homo sapiens
cggctgggagaacttcatgtgtgagaggctgggtgagcaacaaatctgacacgctgcccctggccactcggtaca

SEQ ID NO: 299619 - DNA, 100 bp, Homo sapiens
tgaccatgtatttgtggcttaaactcttggcatttggctttgcctttctggacacagaagtatttgtgacaggtattgcaggcaatgggatatccaacag

SEQ ID NO: 299620 - DNA, 82 bp, Homo sapiens
cttcgagcagctcatgaccgacctcaccctgtcgcgggtttgaattttgggaagattttgaagaagaccatgggaaggggag

SEQ ID NO: 299621 - DNA, 100 bp, Homo sapiens
ccttctcctcaggagcttgaggcctcagcacccaggatggtgcaaacccataggatggagctgtagttacaccctccagacctttaggggacaccctaac

SEQ ID NO: 299622 - DNA, 96 bp, Homo sapiens
ggaaggccctggtcgaccagagggagctgtacctgggcctgctctaccccacggaggactacaaggttcttgttaaacctttgggagaccgaggat

SEQ ID NO: 299623 - DNA, 100 bp, Homo sapiens
gaacatcaccgtggtgaagggcatccggacaacagcagttctgtagagagtttaaatatgaaggaatggcaggacgggctaagggcacttctacccaaca

SEQ ID NO: 299624 - DNA, 82 bp, Homo sapiens
agccaccatgagcaccaagcagatcacttgcaggtgccccctgataagtgccgatgtgccgtgggcagcatcctgagtgaag

SEQ ID NO: 299625 - DNA, 50 bp, Homo sapiens
ggcacaagattattccaagcaacagaattcaacgaaacggaatattccaa

SEQ ID NO: 299626 - DNA, 76 bp, Homo sapiens
acttttgcctcattctgaagccttggaagaatgtaaccaatttacctacaagtttgccgaagaaatcagaaggcag

SEQ ID NO: 299627 - DNA, 75 bp, Homo sapiens
ccctaacaagccgcaacgtaaaatccttggaaaaggctgatcttgcatctttaatggataaaacatttgagagaa

SEQ ID NO: 299628 - DNA, 100 bp, Homo sapiens
gtttattggtctatatggaaatagagtctttgggcatcaaaggatttatcagcccctcgggaggcattggcacagaccgtgctcgcagaagtgcccacac

SEQ ID NO: 299629 - DNA, 100 bp, Homo sapiens
ctagaaacatgccaagctgtgcagaacacattccagtttttattagaaaactccagcaaggttctgtacagagtaatgagatgtgtgacggctgcaaacc

SEQ ID NO: 299630 - DNA, 100 bp, Homo sapiens
ccaaaaagctgaaggtggaggcgccgcaagcgctgaggtcagtaacagatccaagagatggaaagagagtagcgctcaaaaagatgcccaacgtcttcca

SEQ ID NO: 299631 - DNA, 82 bp, Homo sapiens
tctggctctgaaggcgaacgcttcgctggccatttaggagctctgctcaaagccagacgggtttgaaattcctgatatagat

SEQ ID NO: 299632 - DNA, 100 bp, Homo sapiens
ttcatcgtttctacagtatttcacattgtatcatggaaaaagagccacttaaggttgctgcttttgctcagaggacatccatgaccctaatggtcttttt

SEQ ID NO: 299633 - DNA, 50 bp, Homo sapiens
tttcagatacatctgaaattgcaggacttgtcttacaaggaccggcactg

SEQ ID NO: 299634 - DNA, 75 bp, Homo sapiens
gaggccttcaagtactttttgcagggaatgggctacactggagggggttcctcatgcagccctgtcctttcaaga

SEQ ID NO: 299635 - DNA, 83 bp, Homo sapiens
ggaggaggagatccgtatcagatccgccgacgactgcaagcagtttcgggaggagttcaacgaatgggtaccacagaccatgt

SEQ ID NO: 299636 - DNA, 100 bp, Homo sapiens
gacccccaggcagctcgccgctccctagcaccttctccagtcgacactctcgcgcccggaggaagtgcattttcagctgagcacctcaaacttcaactcc

SEQ ID NO: 299637 - DNA, 80 bp, Homo sapiens
cgcggctcttcccgcccgccttccgccgtctcttcgagttcttcgtgctgctcaagggggggccctcagcctcttggcct

SEQ ID NO: 299638 - DNA, 100 bp, Homo sapiens
agaatgcgaagtctgtggtttatcattgtaatcagcttcttaccaaatacagaaggtatttactaccagggagcacccaattcttcttgagaacaccaac

SEQ ID NO: 299639 - DNA, 82 bp, Homo sapiens
ctggccagcagtggctccctggcccgtatcctgcagcacttccactctgagagcaccattgagacccagagcagcagttctg

SEQ ID NO: 299640 - DNA, 100 bp, Homo sapiens
gctgagtcctaagaattctaaaatcttgctcctaagaaatctcaagcttcttttgtggtgctgaccttaaggaaagagccaaaatgagttccagtgaagt

SEQ ID NO: 299641 - DNA, 100 bp, Homo sapiens
agcccagctcatccagggagggcggcttatcaaacacgagccaacgtgcagcggctgaaggagtaccgctccaaactcatcctcttccccaggaagccct

SEQ ID NO: 299642 - DNA, 49 bp, Homo sapiens
cgtacgccctgctgcttctcctgaaggggaaactgaggcccaaggaaat

SEQ ID NO: 299643 - DNA, 97 bp, Homo sapiens
cgtcacttgcctcccgggagtcgctgtggcaaaaggtcctggtgcttgatggtcgaggccatctcctgggccgcctggcggccatcgtggctaaaca

SEQ ID NO: 299644 - DNA, 82 bp, Homo sapiens
gagagcggagcgcgagcaggacccgcgtgtcgcccctcagcagtgggatcatcgtcttgctcttcttttatctcagtttgtg

SEQ ID NO: 299645 - DNA, 83 bp, Homo sapiens
ctccactccgtcccccgcgggtctgctctgtgtgccatggacgggtgcgcgcggagccatggttatcatgtcggagttcagcg

SEQ ID NO: 299646 - DNA, 80 bp, Homo sapiens
ttccgtcctctgaggcgacggccgcggctgcacagtgaaagcccctcagggaaaaaaccagaagtcctttgtcttcatcc

SEQ ID NO: 299647 - DNA, 50 bp, Homo sapiens
tgggtccgctgagcggggcgacccgagatccatatgctcatatctgtttc

SEQ ID NO: 299648 - DNA, 74 bp, Homo sapiens
tctctgcgtctgtagttcatttgaccaaacggtgtctttcctgaagactatcttcccgtctcaaaatggacatg

SEQ ID NO: 299649 - DNA, 74 bp, Homo sapiens
tcatgttctgcacctcaggagggaattcagcctcagtgatgtccatgaggtgggagtgtaagataaccttccag

SEQ ID NO: 299650 - DNA, 75 bp, Homo sapiens
aaagaaactggagccaccatcaagctgtctaagtccaaagatttttacccaggttcaaaatggaaagtatttatt

SEQ ID NO: 299651 - DNA, 120 bp, Homo sapiens
gccgcgcgctgcgcgccggacccgctgcccctgccggcccggccgggtcgggcggcccaggaaacttggctgtaacttcaaaagaagatttgattctttatttctggactgcatatatat

SEQ ID NO: 299652 - DNA, 100 bp, Homo sapiens
aaggcagttccttcccaatggcaactatgtttggatgttggatctacactttctcaagcactgtgatcttcaaatgtacaggtttgcagattccgccagc

SEQ ID NO: 299653 - DNA, 97 bp, Homo sapiens
gtgttttcatgtaaatggaattgtacagctttttctaaaggctcctgtgaacactgcagaactaacagatctcttaattcaacagaaccatattggg

SEQ ID NO: 299654 - DNA, 75 bp, Homo sapiens
cgcgtctctctgctgcggcgcggggaccgctgtgctctcgttgtcgccgtgatcctgaaggcgctgacctacgac

SEQ ID NO: 299655 - DNA, 100 bp, Homo sapiens
gcattttgtccacatgagaggattacctttccaagccaatgcccaagacattataaaccatctgacagatacgtctcatggtgtaagaaataagtgcctg

SEQ ID NO: 299656 - DNA, 98 bp, Homo sapiens
acgtcacctggagagatgcacagtgttctaagaacggaagcatctgggctggatggaatttagcatcaagcagagtcccctttctgttcagagtgttg

SEQ ID NO: 299657 - DNA, 100 bp, Homo sapiens
ataatagtgaggacgctgatgaaataattcagtgtgacaattgtggcattacagtccatgaagggggctcgaatggttcgtgaactctttgaaatggcca

SEQ ID NO: 299658 - DNA, 82 bp, Homo sapiens
ctgctgtggcaggtcttttgtaattgaccatcaggtgtctttaaaggattgccatttaatgccattcaagatctactaagca

SEQ ID NO: 299659 - DNA, 135 bp, Homo sapiens
ggaaggtgacatgaaaggagctcagacaatttctgtccagcaacatgacagcaagctcaggctgttgattatggaagattcccacaagagtaccacgtcagagacagcacctcaacctggttcagcagttcaggg

SEQ ID NO: 299660 - DNA, 75 bp, Homo sapiens
ggatctgcactgtaactgctggacccaaggacatggtggtcggatgggcactctggttttttaaaaatgataaaa

SEQ ID NO: 299661 - DNA, 100 bp, Homo sapiens
ccttaccattcaccttcctgcagcagtgctgcttaaggagatacatatccagcctcatcttgcatctcttgcaaggcggcgactggcggcgcgatggacc

SEQ ID NO: 299662 - DNA, 101 bp, Homo sapiens
ctccaccaccatcctccacctttccgaaagcttccagcgagtcctcttatctaagtatcctaccaaaggagtcggatggtcagggctgccctttctgtcgt

SEQ ID NO: 299663 - DNA, 51 bp, Homo sapiens
atatgttgtgccccaaatgtgttcacagggtgttgctgaaaatgtcagatg

SEQ ID NO: 299664 - DNA, 100 bp, Homo sapiens
gaggggattcaacttcaatttttctgcagtggctctgggtccagccccttacttaaaggactgcagcattccagaaatagagcttttcccacaatctgac

SEQ ID NO: 299665 - DNA, 51 bp, Homo sapiens
gcttgacctcctgcatcgaccagaagagcaagttagtaccttgtaccaaaa

SEQ ID NO: 299666 - DNA, 99 bp, Homo sapiens
gaagcctgtacctgttttatacttgcttttgcttcagcgttctgtggttgtcaacagatcatggaagggaagtggttgctgtgtatgttactggtgctt

SEQ ID NO: 299667 - DNA, 100 bp, Homo sapiens
ttttgaccacaagaatgaaactctaagtatatcactgatggtgagaccattctaaaaggcctccagtccattttccaggagcaggggatggcggagtcgg

SEQ ID NO: 299668 - DNA, 80 bp, Homo sapiens
ccccccggcaccgcgcctgctgccgggttgcgctccgtgcacctcttgcgggcctgaagctgcccagcaggcattccaag

SEQ ID NO: 299669 - DNA, 96 bp, Homo sapiens
ctacacatctcattatagtttgggatgctgacagtttcagcaaagtgcggcctccaggagaaaagccaaccatcatccgccccccagtgaggcccc

SEQ ID NO: 299670 - DNA, 108 bp, Homo sapiens
gggatattatcaaatctactactgttcatggcagggcctgctttcttccccgggcgatgtgcagagatctttgccaggggtcaaagcgtcgggaagcttggggtcctt

SEQ ID NO: 299671 - DNA, 75 bp, Homo sapiens
ctgtggaccgggatgcagtgtcaggcatgggagtcattgtccacatcatgatgcttaaatggcagaggccaagcc

SEQ ID NO: 299672 - DNA, 98 bp, Homo sapiens
taacccgcccccagcgggatgtgaaggactccgggtgaggccggccacgccccgcacggtgaaccttcgaaagtgtgacatacttgaactgaaaaccc

SEQ ID NO: 299673 - DNA, 83 bp, Homo sapiens
gccgatccagcctgcggagcctgtggggcaggtaacacaagtggcaagacagccgggaacccctaccccatccccttattcag

SEQ ID NO: 299674 - DNA, 75 bp, Homo sapiens
ctttccaagccaatgcccaagacattataaacattgctgagctgaaaagaggtgctgaaattattgtttgcacac

SEQ ID NO: 299675 - DNA, 50 bp, Homo sapiens
caagaacgggaacaaaactctggtgtctcaatgcttgtacctactgcaaa

SEQ ID NO: 299676 - DNA, 101 bp, Homo sapiens
gctcatagttcaccccagagcattttagatgatgttgccatggattccccacagccaccagctacacccctgccaaggagtcgttctctgagcggccttgc

SEQ ID NO: 299677 - DNA, 114 bp, Homo sapiens
cattccccttgtgaaaaagcactgtgatgactcattcaccccccaggagaagctgtggcagcagctcagaagaggacggaaatcaaggactttctgttcacagcccaatgaaag

SEQ ID NO: 299678 - DNA, 75 bp, Homo sapiens
ccctcgctgcctcctggagaccctgcgaatttactcactacgtgagccgcagacacccactaacgtgataatact

SEQ ID NO: 299679 - DNA, 99 bp, Homo sapiens
ccggggccgctgccgttgaggaggagacggaggagaccgacgttgttaggcagcgcccggttaccacatggccaagctgatcatcaagttggtcacctc

SEQ ID NO: 299680 - DNA, 100 bp, Homo sapiens
acactttggaagagcggatgaagagcacagaggtcctgcctgagaagacggatgctgtcaacgaagccctggagaaacctccacagctgttgagaaaaag

SEQ ID NO: 299681 - DNA, 83 bp, Homo sapiens
cccagagactgctgagcccgtccgtccgccgccaccacccactccggacacaggatgaaacaggcgcctatttaatcgacaga

SEQ ID NO: 299682 - DNA, 96 bp, Homo sapiens
gcgggtccgggagcgcggcggagacgatgcctgagatcagagtcacgcccttgggtcccgctcccggtcccctcggaggagagcccactcccctga

SEQ ID NO: 299683 - DNA, 100 bp, Homo sapiens
gagcccaaggcaattgatcccaagttgtcgacgaccgacagggtggtgaaagttgctgatatgtgttcaagatgagtgggatgggagaaaatacctctga

SEQ ID NO: 299684 - DNA, 83 bp, Homo sapiens
tgaacccaacctagtgggtgtaatacatcatgaactgcaggatgcgtctgttactagagtggagagtctaccttcgtctcaca

SEQ ID NO: 299685 - DNA, 50 bp, Homo sapiens
aggctctgctcagcgcagcttggcaggccacaccatggacccagactcag

SEQ ID NO: 299686 - DNA, 90 bp, Homo sapiens
tacaacatctacaatgttggctcaagattgatgaactcccagagggcgctgtgaagcctccagcaaacaagtatcctatcttcttttttg

SEQ ID NO: 299687 - DNA, 75 bp, Homo sapiens
cattgacatttaattttagggtcctttatatagaagggagagtaggctctttcattatcatcctcatcttgatat

SEQ ID NO: 299688 - DNA, 100 bp, Homo sapiens
atgaggatgaagattcaccaaataagctatatactttggttacctatgtacctgttaccactttcaaaagaaaggccattgctgctctggagctgtgtgt

SEQ ID NO: 299689 - DNA, 78 bp, Homo sapiens
tgctgcaggctggacagcccccagacctggagaggatccgcacacttctggaggccaacatagccgaggtagaggtct

SEQ ID NO: 299690 - DNA, 101 bp, Homo sapiens
ctcgactccaaatggttgaaaacagatatacagcacttgcacctcctgcgccgccgccccccatccaaggatatgccttcaagcctccacctagacccgac

SEQ ID NO: 299691 - DNA, 75 bp, Homo sapiens
cagttcagaagagccaaggaataaacatgcaatgaacccaaaaggttggaaatggaggatgaagatacaattgat

SEQ ID NO: 299692 - DNA, 100 bp, Homo sapiens
gcgccgcctcctgggaagatggcgctgcacttccaggtttattacccagaactctttgtctgggtcagtcaagaaccatttccaaacaaggacatggagg

SEQ ID NO: 299693 - DNA, 74 bp, Homo sapiens
gtatgtggaaatagcgcggctgtgcaagtacctgccagagaacgacctgaagacgcatcttctctccagactgc

SEQ ID NO: 299694 - DNA, 89 bp, Homo sapiens
accacagcagggactactagacaaaataaaagatgaacctgacaatgctcaagagtttcactgaccagctgcgtaaaatctctaaggat

SEQ ID NO: 299695 - DNA, 101 bp, Homo sapiens
aattccgtttagcagctgttgggccaactacacagaccttactccccttagaacagatctggcagaggacggaaattaagtggagaccaaataactttgcc

SEQ ID NO: 299696 - DNA, 75 bp, Homo sapiens
tctccagccgcgcagtcccgaagagtgtagctacagcaagctgggtagcaggcagatccaaaggatatcatgaag

SEQ ID NO: 299697 - DNA, 100 bp, Homo sapiens
cggcccacaaccaagccatggtgcactggtcgggacacaacagcagcgtttgccaagatggtggataagaatatttacatcattcaaggggagattaaca

SEQ ID NO: 299698 - DNA, 88 bp, Homo sapiens
actgcagcctcggcggtcagcagactaatagggatgccaaaggaaaaatatgatcctccagatcctcgcagaatttataccatcatgt

SEQ ID NO: 299699 - DNA, 90 bp, Homo sapiens
aagtccattatggcttcatcctgaaggcacagaacaaaattgctgagagcatcccatatttaaaggtgctcagattgatgacaacattcc

SEQ ID NO: 299700 - DNA, 100 bp, Homo sapiens
caaatacaatgaatggcagcaagtcacctgttatctccaggttggatggcaagcatgtggtgtttggcaaagtgaaagaaggcatgaatattgtggaggc

SEQ ID NO: 299701 - DNA, 83 bp, Homo sapiens
gtggcagcctgaacggagtgtgcgacggattgggaggtgagcgagtgctgtgctttcatgggcctcttctttatgaagcaaag

SEQ ID NO: 299702 - DNA, 83 bp, Homo sapiens
cagaaggcgctgctggagttccgcgacaccatcttcgacaacatcctcaagttttcaatggttccagcaggtcaacacgggag

SEQ ID NO: 299703 - DNA, 83 bp, Homo sapiens
tctgaggccacaggaaaggggccgtcggtcgccgccatgacagcgagcgaggcggagcattaaagggcagtatttaaagtcag

SEQ ID NO: 299704 - DNA, 83 bp, Homo sapiens
ctgtggataacacctctgtttttggcagggtgatgcagatagtactgtcaagatgataagcatggaataaagcttcagaaggg

SEQ ID NO: 299705 - DNA, 100 bp, Homo sapiens
accgggacacccgcgaggccggaaaatggagctagagttaatgccaaagacagcaaatggttgacacctttacacagagcagttgcatcttgtagtgagg

SEQ ID NO: 299706 - DNA, 100 bp, Homo sapiens
ccggcatgtagacgcccccgcaggcgcccgcggcagcgaacggtggctattatcatggaaaactaatttttcccagagaatttcctttcaaacctcccag

SEQ ID NO: 299707 - DNA, 100 bp, Homo sapiens
aaatggtttttctccagaatcatgtcagattttttttggaatcactgcctgcctttctcaggcctccctattccctgagacacaacagtattgaaattgg

SEQ ID NO: 299708 - DNA, 99 bp, Homo sapiens
cttttagcgccacagttaatgtaaccaccaagaaaacgctgttttccaagcagtgaagcacttgccgtgttgaactgaatgcactactggagaatgttc

SEQ ID NO: 299709 - DNA, 100 bp, Homo sapiens
ttgcatgatggaaacaccatggctgcggcggcccagctctctctgacacaggttggacgtgataagtatgagcctgcagctgtttcagaacaaggtgata

SEQ ID NO: 299710 - DNA, 74 bp, Homo sapiens
gcagcttcaagcttaggaccacccaccatgcctatccagggtcctcactgagcagcgagtcgtcccccgtgtcc

SEQ ID NO: 299711 - DNA, 100 bp, Homo sapiens
tgacagctgaggaagtctgcatccacattgcacataaagttgacttcccaagtaagaagcggaagaggagccgctggaaccaagacacaatggaacagaa

SEQ ID NO: 299712 - DNA, 50 bp, Homo sapiens
tggtgaacgcaggatgcgaccagttatctgaaaaactgcaagacacagag

SEQ ID NO: 299713 - DNA, 101 bp, Homo sapiens
cacagttaccaagaagacttatgagatctggcatcgacggcatgactactggctgctagccggcattataaactatacacagaatgggattttacatatgc

SEQ ID NO: 299714 - DNA, 74 bp, Homo sapiens
cctcctcctacacccaaaggctcccatggagagctcagggcattttgtcagtgatgctgatctttgccttcttc

SEQ ID NO: 299715 - DNA, 98 bp, Homo sapiens
cgacatggccagctccggagagagctgtggacctgatccgtcatggcgggaagaagatgcggttcctggtcgcgaagtccgacgtggaaacagccaag

SEQ ID NO: 299716 - DNA, 88 bp, Homo sapiens
ggtgccttgagagcttcaggggaaatggcttcagcgcagtatattactgcaggctcccttcacgtgggggatgagatcctagaaatca

SEQ ID NO: 299717 - DNA, 119 bp, Homo sapiens
tccccttccctgcccccttcccccacccccgactcgggcttggcgcggcggccagaggaaccccgaggttactcctggatggagcacctctgatagcaatccacaaagccaggtattac

SEQ ID NO: 299718 - DNA, 82 bp, Homo sapiens
gagctggccccgccgcccgccctaccccccaagcagcggcagctgatcagccaaatggccgatgacacagtggcagaactgg

SEQ ID NO: 299719 - DNA, 100 bp, Homo sapiens
tatggttatgggggacaaaaaagacctttagaagatggaggctttatcctgtggataaacgcagagtgaacgagtttggggagtcctacgaggagaaggc

SEQ ID NO: 299720 - DNA, 101 bp, Homo sapiens
ccaacgttgatgccattgttgtatcagtgggtgttgatgaagaaattgtttatgccaaatcaactgccttacagggagaagagaagtttacctttattgag

SEQ ID NO: 299721 - DNA, 90 bp, Homo sapiens
ccgccagccaccggcaccaagaccggccacatcccagcactgcccacctctggagcaggacatcgagactttacatggctctgttcacgt

SEQ ID NO: 299722 - DNA, 101 bp, Homo sapiens
tcccagggcggacagcagcctcgggtgcaatcctggagccccccagtgagggtgccacatcatctcacagttcaaccaaggcttctacgactgtgtcatag

SEQ ID NO: 299723 - DNA, 100 bp, Homo sapiens
cgacaaccccttcggagacaacaacctgctgggcaccttcatctggaataagatcaccggcgtaatcaacccagcgttggacaaatactttccgtcagac

SEQ ID NO: 299724 - DNA, 80 bp, Homo sapiens
atcctggaggcctgggaagccaacgaccacacgcaattgcagctgagaaggcgcgaagctgctggtccctgaaaagctgc

SEQ ID NO: 299725 - DNA, 119 bp, Homo sapiens
gtgcggcccagcgagttggtcggtcccggggtcacccgctacgggaagcaggcctcgccacaggtcagaggacatgccttttagccccaaagcatctgttgctgctatggaagcaaaag

SEQ ID NO: 299726 - DNA, 75 bp, Homo sapiens
agctgggccggagcagccgcgggcgcccgaggggccgagcgagagaggaggttcagatgagcccctgctgacttg

SEQ ID NO: 299727 - DNA, 103 bp, Homo sapiens
ctgggtttgaacggaatgctggagtcagtggaagacggagctggtcggcccgaaggaaggagtcaagactgagaacaacgatcatattaatttgaaggtggcg

SEQ ID NO: 299728 - DNA, 51 bp, Homo sapiens
ctcctggagatagactccgtaggcatccccacgctcatcatgctggacccg

SEQ ID NO: 299729 - DNA, 50 bp, Homo sapiens
ctgcacttccatcccacggtcagggtagtggtggtgcacgaagatccgca

SEQ ID NO: 299730 - DNA, 75 bp, Homo sapiens
ttcagcatccccaagcagggggagcttggattccttagcaccaccacagctcagccagaacagaaggcctcgaat

SEQ ID NO: 299731 - DNA, 83 bp, Homo sapiens
ctccggagccgctgcacatttcggtatttaccttgctgtggattgctgactggatggtccatcacttctggaggaaaggaaag

SEQ ID NO: 299732 - DNA, 83 bp, Homo sapiens
aaagtcatcacctcctgggatcagatgtgcattgagttgaggctaagacgtctgaagccaggccctttaatgattctactcat

SEQ ID NO: 299733 - DNA, 100 bp, Homo sapiens
ctgactgaaggcctgcatggattccatgttcatgagtttggagataatacagcaggctgaattcggtcagaagagaatccatctgaatagccagtttcca

SEQ ID NO: 299734 - DNA, 83 bp, Homo sapiens
agaagagatatataaagcatttgtgcattcagatgctgctaaacaaccaacaagtcccaaatttggaaaagctgactcatatg

SEQ ID NO: 299735 - DNA, 100 bp, Homo sapiens
caagtgtgtactaaatgaaggcatgccaatttatcgtagaccatatgaaaagggtcgcctaatcatcgaatttaaggaatcagagatcattgatttcttc

SEQ ID NO: 299736 - DNA, 98 bp, Homo sapiens
aaatttctgtctttgaagtaaatatacgctttgttggtggactactctcagcctactatctgtctggagaagaggagtacgagacccaatctagtgca

SEQ ID NO: 299737 - DNA, 100 bp, Homo sapiens
gcagctcctcgtgcctggcggcgtgggcccgggcgagcagccctgcctccggacggtgcttgtgaatgacttcttcttggtggcttgtcttgaggatttc

SEQ ID NO: 299738 - DNA, 100 bp, Homo sapiens
cttatggcggcgctggagagggggcgctgagctgttgggctttttggagaccacggcatatttcttcatgaaaccaaaacttggagagaaggaggtgtcc

SEQ ID NO: 299739 - DNA, 90 bp, Homo sapiens
cccgtggaacaattcatcttaccagagcacttttcaggattagaagaggctgtgtatagaaacatacaagcttgcaaggagcttgcccaa

SEQ ID NO: 299740 - DNA, 75 bp, Homo sapiens
aaccatcagtgtttgggaatgattctgatgatgatgatgaggttcagcagactgtacaggatctttttggcagag

SEQ ID NO: 299741 - DNA, 100 bp, Homo sapiens
gttgccggctcccctctcaggacaacccagatgtgcaacaaagtgcgatgatcaggcctttgtgacactaaccacaaacgatgcctacgccaaaggtgcc

SEQ ID NO: 299742 - DNA, 75 bp, Homo sapiens
cgacaagccgctggcagccgcggatctcaccgccgctcaggtctttcccagggaactccgatgaagtgttccaac

SEQ ID NO: 299743 - DNA, 100 bp, Homo sapiens
caacaacacaattatgtatgatcaagtgaagaagtcctgggccaagcagtctgtggctcttgatctgctggagccagttctgcttctcggcaaggagcga

SEQ ID NO: 299744 - DNA, 85 bp, Homo sapiens
aagctaatcctggcgttccaccagcaaccatgagtggttccatgatgggaagtgacatgatccccaagtaagcccttggcacgga

SEQ ID NO: 299745 - DNA, 75 bp, Homo sapiens
tgctgtccctggagcagcatcgaggcccgggaggttgggcccgaaggcatcctgcagaacggggctgtggacgac

SEQ ID NO: 299746 - DNA, 80 bp, Homo sapiens
aatatgtgccgccagtgtttccgtcagtacgcgaaggatatcggtttcattaagacggtatccaactgttgaaaaacgag

SEQ ID NO: 299747 - DNA, 100 bp, Homo sapiens
tggatctagaggcataattaggataataaatcctataacaatgcagtgtataaagactttgagaatcactacaagaaaaactccttgtggtgaaggttct

SEQ ID NO: 299748 - DNA, 75 bp, Homo sapiens
gtggatcgctgtgatcgtcacttgatgctggactgcagccttatctggatcagatcaatgtcattgaagagcagg

SEQ ID NO: 299749 - DNA, 75 bp, Homo sapiens
aagtcaagaaatttctagtaccggagggcctgaggctatggcaggaggagcaggagaggaaggtgcaagccctct

SEQ ID NO: 299750 - DNA, 75 bp, Homo sapiens
cataatttggggttcaagattccagagcaacagcgagctcgccatcctgtccaatgagcatggctcctacaggta

SEQ ID NO: 299751 - DNA, 75 bp, Homo sapiens
ggaagatccagcagggtttatttgatgtccacaatgagctatctctgaagggcacaaatcagaaggcaccatgcc

SEQ ID NO: 299752 - DNA, 75 bp, Homo sapiens
tgctcactccaaagtctcagcagctatcatggtgaacttacttcagattgtgcgggaccactgggttcatgttct

SEQ ID NO: 299753 - DNA, 90 bp, Homo sapiens
ttcactcggctggagcctgtctactcaccccctggcagccccccacctggggacccccgaatctttcagatggcaggaaatccagaccag

SEQ ID NO: 299754 - DNA, 100 bp, Homo sapiens
aaaacccagaacagaagatcattaagagagtgattgctcttgaaggagatattgtcagatctgaacagaattaagacgaacgagctttcacaattgcagc

SEQ ID NO: 299755 - DNA, 124 bp, Homo sapiens
gccgattttgattgatttccatgctctgaaagacatccttgggcccccgatgtatgaaatggagagagtgctagaagggagactgctgtccccacaatggctgcagccccattcctttttccaa

SEQ ID NO: 299756 - DNA, 100 bp, Homo sapiens
ggggcaactggccgcctatggatgacgcgcatcggacctggcccttccccgagttcttcacagaaggttgataagcaatacaaatcggtaacaaaaccaa

SEQ ID NO: 299757 - DNA, 101 bp, Homo sapiens
gctgccgactgcgacctgcagatcaccaatgcgcagacgaaagaagatggactagaggcttttaccagatttcttaaaactgaattcagtgaagaaaatat

SEQ ID NO: 299758 - DNA, 80 bp, Homo sapiens
ctttcacgaaggcaccgacgtcatcatgctgaccaccaatcagatccgtaagaggtgaccacagtgacagtggccaacgt

SEQ ID NO: 299759 - DNA, 99 bp, Homo sapiens
ggaatgggaatggaatgggaacgccaatgcaggaaggatgagaaggtacagagtgaagacagtgtcctcctgtttgttattgcatggacgatcacggaa

SEQ ID NO: 299760 - DNA, 99 bp, Homo sapiens
atctggaggagcagttgtctgatgaagagaaggcgcggatcaagaagatcatgcagacggacgaagagattgggaaggtggcggcggcggtgcctgtca

SEQ ID NO: 299761 - DNA, 100 bp, Homo sapiens
catacaccagtactaccaaggacagcttttttcctgcaagccgctgttgtgacaagaaaagctgtggcaaccgaaatgagactccctcagatccagtgat

SEQ ID NO: 299762 - DNA, 75 bp, Homo sapiens
ccatcgggcagtggctccgctgggataaggtctcacttgccctggaacctctgtcagaaacttacgacagctacc

SEQ ID NO: 299763 - DNA, 119 bp, Homo sapiens
ggaagatggcggatctggaggagcagttgtctgatgaagagaagccgagaccgacccgcccgcccgcggccccgcagcagctccaagaaggaaccaagagaccgaggccttcccgctgc

SEQ ID NO: 299764 - DNA, 90 bp, Homo sapiens
cgtgggcttctacggggccttctacagtgacggggagatcagcatttgcatggaacacatgttgaaggcacagttaaatgaaacactcac

SEQ ID NO: 299765 - DNA, 100 bp, Homo sapiens
ccaggaccagacagccatccaggaccaaccttccagttctgtctgtgaacgaggacaaggacattcctgtgcaggaagaagttgaacctgccccagttag

SEQ ID NO: 299766 - DNA, 100 bp, Homo sapiens
caggaaaggaagcattcagggaatttaggtgtagccagaagaaaatcaggtgctgtctgaggtctgtgggcaggacatcaccaccaagcacatgctaccc

SEQ ID NO: 299767 - DNA, 100 bp, Homo sapiens
ctgatattgaagaggaagaactgaccagagctgatcccgagcagcgtcatgtacccctgacatggatttgattgacatactttggaggcaagatatagat

SEQ ID NO: 299768 - DNA, 50 bp, Homo sapiens
caaggcagctcactttggacaaggtgaagacattcagtgaagcttgcctg

SEQ ID NO: 299769 - DNA, 75 bp, Homo sapiens
tggtgcagggcctgattgaggactgccagctggcgctgcagattactgattttgggcactccaagattttgggag

SEQ ID NO: 299770 - DNA, 82 bp, Homo sapiens
gcgacggccaaaaggagcggcgcggtcttcgtggtgttcgtggcaggtctatagtgagcgagagctgctactttttacttgg

SEQ ID NO: 299771 - DNA, 100 bp, Homo sapiens
aaagacttagcttttaaattaaaaaggaagctattcaccattgaggcaatgctggacgtggctgcaaaccagggctggctggtgactgtcctgaatatca

SEQ ID NO: 299772 - DNA, 80 bp, Homo sapiens
tggtcgaatccagtagaaaactggtcaaggaagctgtcgtgtacaacgtgggactctgcatttgtctgtttgatatcacc

SEQ ID NO: 299773 - DNA, 96 bp, Homo sapiens
tgaatatcgaagaaaggagaacggtatggagtttcactcttgttgcccaggctggagtgcaatggcgtgacctcggctggctgcaaccttcacctc

SEQ ID NO: 299774 - DNA, 87 bp, Homo sapiens
gaaagattgggcaagagaagaattcagaagaaacaaaagtgccaccgaagagcccttgaagaaagctgttaggatgatgggagcacc

SEQ ID NO: 299775 - DNA, 74 bp, Homo sapiens
agactattgtggaagaagcatccattaaggtcaatgagtggtcattgaagataagaaaggaaatgagagttgtt

SEQ ID NO: 299776 - DNA, 50 bp, Homo sapiens
tcagctagtatgcaggctaggcaaactgatccggatcacctgtttgaaac

SEQ ID NO: 299777 - DNA, 75 bp, Homo sapiens
tcaggacacacagacccagctggaactcggggttcatgtgtcacacaagtaggccttctggaaagcgtgtatgaa

SEQ ID NO: 299778 - DNA, 75 bp, Homo sapiens
cggggctgggcttcgtgtcctgcgttccgggagcgccaacccctccaggtggtcataatgtcacaatctccttgc

SEQ ID NO: 299779 - DNA, 100 bp, Homo sapiens
atttttattttgacatttctgctgtatgcaagttttcacttatctcgaaagcctatcagcatagttaagctgcaggcaccccagaaaacagcgcccccgt

SEQ ID NO: 299780 - DNA, 83 bp, Homo sapiens
gcttcatcaaaaatagtgatagctttgataacaccagcagaaccaaaatcgtgtgtggtggcagatcctcctcttcctgcaca

SEQ ID NO: 299781 - DNA, 97 bp, Homo sapiens
tccttgactgcagtgctgaatggcttgattttctagagaccccaacttcagagggtgcagcctctgaaagagactgtgaatctatatataccatttc

SEQ ID NO: 299782 - DNA, 75 bp, Homo sapiens
aaacatctggttggcaatatgatactcagtgttcactggcaggaggcactgcctccttacctgtgaggaatgcaa

SEQ ID NO: 299783 - DNA, 82 bp, Homo sapiens
agacgtgctccaggaggccagaaggaaatacgattatattccatcacaacaagatattctgcttgccagaagacccaccaaa

SEQ ID NO: 299784 - DNA, 82 bp, Homo sapiens
gcaggcgccgcacggagttgcgtcccggggacttggggccgcagggagggttgtgagtcccggcccagcccctccacccccc

SEQ ID NO: 299785 - DNA, 50 bp, Homo sapiens
tttggctcttaatatgcattatgtaggttaacacagaaatctgcctcctg

SEQ ID NO: 299786 - DNA, 51 bp, Homo sapiens
aaggattccaagtaactcttatttggatgaagtcattgctgtttccgaaaa

SEQ ID NO: 299787 - DNA, 78 bp, Homo sapiens
gttgggaaaggaattacctttgacagttcaggcccatgaagttcatcagaaaattctggcaactgatgttagttccaa

SEQ ID NO: 299788 - DNA, 95 bp, Homo sapiens
cacagagacagtgcctgccttttcagagcgtacctgtgccactgtcaccattggaggaattggtggtgaccgcggtggcttcaaaaattttggtg

SEQ ID NO: 299789 - DNA, 100 bp, Homo sapiens
aaccagaaactttaaatcttgagaaaagaagattgtctatcatgaaggaggtacatttccaattgatttaaccaagacacggctccagattcaaggccag

SEQ ID NO: 299790 - DNA, 96 bp, Homo sapiens
gtgttgagtggtcggcttggtgtggtgtgcggaggagctccaggcccgtcggcgcggagttgttgacctcctgtactggagagacattaagaagac

SEQ ID NO: 299791 - DNA, 98 bp, Homo sapiens
accagatgacccttacattgcagacctccttcaagtggctgataacaggtaaaaatgcatttgcaaagggagaaaatgaaggccaaacagaagcaggc

SEQ ID NO: 299792 - DNA, 100 bp, Homo sapiens
cgttccggaggcccggccacctctgagaagggagacgacgctgctgggtccgctgagcggggcgacccgagacccaagtcttggattgaggaacaggcaa

SEQ ID NO: 299793 - DNA, 75 bp, Homo sapiens
ctggcgagacgggggtgatgcccacccgggcgagaaagatcctcagccacagaaagccaccctcaagtctgggga

SEQ ID NO: 299794 - DNA, 92 bp, Homo sapiens
ttggagagcactgagtttagtaataggtgactgccggaaaaaagggaactttgaatattgtcaaggtgttggagcgggccggagagaagtag

SEQ ID NO: 299795 - DNA, 130 bp, Homo sapiens
tgaaagctagaagaaaaggtgtacttgcaagaaacctcaggacttgagtaacagcaacatgctccccaggtgtgtcctggtagacaactgctcccaggagctggcatagaagcaaacctgcaggaaaagc

SEQ ID NO: 299796 - DNA, 98 bp, Homo sapiens
cccaaggcagccactggaagcaaaaacggaaattcctggcagagactccccctaatgggccagattgtggctatggctcctttcaccagcagtactgg

SEQ ID NO: 299797 - DNA, 75 bp, Homo sapiens
aggatccccagtatgcatctcaagatgtgagaccccgcagatgtgtcttcagagagtgacagtgccatgacctcc

SEQ ID NO: 299798 - DNA, 83 bp, Homo sapiens
gttcaagttcattgttcggtcgaggacattattttcacacacaacaccatggagtctctgttagagcgaggtgagaagctaga

SEQ ID NO: 299799 - DNA, 102 bp, Homo sapiens
gggaaggagctgacatgctcatggtgaagccgggaatgccctacctggacatcgtgcgggaggtaaaggacaagatgaccctgatgatctgcaatgtaagcg

SEQ ID NO: 299800 - DNA, 98 bp, Homo sapiens
gcgccttctggatcccggactcgcgcgggatgccccacgtcatccggatcgtgctgaacgccttcaagtatcccttgctgatcggcgtcggtctgtcc

SEQ ID NO: 299801 - DNA, 100 bp, Homo sapiens
gtggccgaatcttccttcaggatatcaaggtaaaataccatgaagattttgaaaaaacaaaggggagaggctttactcccgtcgtggacgatcctgtgac

SEQ ID NO: 299802 - DNA, 98 bp, Homo sapiens
acagacgaggaatcagctttgaagtgggagcccagttggaagcccgggaccgtttaaaaaactgatttatcagcgatgctggttagtattcaagaaag

SEQ ID NO: 299803 - DNA, 82 bp, Homo sapiens
ggcggagaaagattctgccagaagaagaggttcaagaagacgtggaagctgcgggctctgaaggaaggcaagacaagcatgc

SEQ ID NO: 299804 - DNA, 83 bp, Homo sapiens
cggtgacagagtggagccatggctagagttacagaatgtctgaaggggacagtgtgggagaatccgtccatgggaaaccttcg

SEQ ID NO: 299805 - DNA, 100 bp, Homo sapiens
ccgccggccgggagaggcgcgcgccatggcttctggagccgaaaaacagacacatgaccctcattgagaactgcagcctgcagtacacgctgaagccaca

SEQ ID NO: 299806 - DNA, 100 bp, Homo sapiens
tcagcttgacccagcagggactccaaggggtggagctgggaacattcctcataaagcgagtcgtcaaggagttgcagcttgcttggctcaggaacaacag

SEQ ID NO: 299807 - DNA, 100 bp, Homo sapiens
cagaaagcagtggatgacttaaatctgcactcctattccaatttgcccatctgggtcaacaagcttgacatggagaggaactgtgagagtgacactgagg

SEQ ID NO: 299808 - DNA, 100 bp, Homo sapiens
actgtaagctggctgactgctggtgaagaaaatgctttatttttgtggcaggcatctgtgggatctgtaatagaaatgttaatgactccagagagtaaga

SEQ ID NO: 299809 - DNA, 76 bp, Homo sapiens
ggctcgggtgcagccactgagacggagctcactcctctacttgaaaaagaaagagatggattacggtgccgaggca

SEQ ID NO: 299810 - DNA, 99 bp, Homo sapiens
gctgctgctggccatccacctgtgcctcttcaccatgttcggaatgctgctgttcgctggtgggaaggtgatggtaatgcccgaaggagcagacacggt

SEQ ID NO: 299811 - DNA, 75 bp, Homo sapiens
aagtgcaatatttgagtatcactgcgagaatgatatggaacctagcaaagctgttccactgaatgcatctaagca

SEQ ID NO: 299812 - DNA, 98 bp, Homo sapiens
tctaagctgaataaagctgttttggaactgtcaggtacctcaaagcaaggcctttgagccctacttagagattttggaagtatactccacaaaagcca

SEQ ID NO: 299813 - DNA, 100 bp, Homo sapiens
gcccgggtgcccacactggccgtcccggccatctcgctgcccgacgatgtccgcaggcgacccgaccgcatgtctgtcatggacctcgccaatacttgct

SEQ ID NO: 299814 - DNA, 100 bp, Homo sapiens
caagcatagggagagccgccggaagtattgacggaaagcttgaattacctacatgattgtaaaccatggctgtgtggatacaagctcagcagctccaagg

SEQ ID NO: 299815 - DNA, 83 bp, Homo sapiens
ggtatgcaggtgccttgagagcttcaggggaaatggcttcagcgcagtatattactgcaggaaattgcaagacctaacatggc

SEQ ID NO: 299816 - DNA, 100 bp, Homo sapiens
agagctgctggatgtggtgcataagaacttcgacctccggccgggcgtcattgtcagggatggtgaagcatattacaggcagttacaaggtcacctacca

SEQ ID NO: 299817 - DNA, 100 bp, Homo sapiens
ggggaccatgactgcgttctggtgctgttgctcatgcctcgtctcatttgcaagttatctccagaagaagaagagaaaaggagaatccgaagggaaagga

SEQ ID NO: 299818 - DNA, 83 bp, Homo sapiens
gagattcttccaaggaaagactatgagccctaaccggcagccatttgttctctttggtaatcactccacacgagaaaacctga

SEQ ID NO: 299819 - DNA, 75 bp, Homo sapiens
aaccacattttgggtttgaagaatcttctacatgacggtcctaaaatctctacacttgccaaaaaacaacagtct

SEQ ID NO: 299820 - DNA, 76 bp, Homo sapiens
gttagcctttgcagtctcgacataagtgtatgcttgagaaataatcctctttatcatgctggagcagttgcatttt

SEQ ID NO: 299821 - DNA, 75 bp, Homo sapiens
acgatctgcttgttcatctgagtgtcggcacaacttccttcaaaatgtctactgttcacgaaatcctgtgcaagc

SEQ ID NO: 299822 - DNA, 100 bp, Homo sapiens
accgagtcttgaagattcatgaaaagtctgagcgggaaagttccgaagaataggagtggctgagttagctacggagttcatttggggccgggaagcagag

SEQ ID NO: 299823 - DNA, 58 bp, Homo sapiens
gcagaagcggcgggtgcccaacaagcattattttctgatgaagaattgaaaagaagag

SEQ ID NO: 299824 - DNA, 83 bp, Homo sapiens
ctgtgtcacccggcaactcagaaacatcaggtccaagaaaactgattgggaggtagctattaaaagtattaataaaaagaact

SEQ ID NO: 299825 - DNA, 50 bp, Homo sapiens
ccactattctagcatccgtgaaggagcagacctgtcatttactccatcct

SEQ ID NO: 299826 - DNA, 82 bp, Homo sapiens
tcctgttttcttcggagaagtcttcttggcgggattgttcagcaaatgcagccctgaggatttggctactgcatataacaac

SEQ ID NO: 299827 - DNA, 100 bp, Homo sapiens
gagccaagaaaatcaatctaaacatttgtgggaagttgtattcatcaataatgaaatgctgactaaggaacaagtgttttccaagcagtgaagcacttgc

SEQ ID NO: 299828 - DNA, 100 bp, Homo sapiens
agaatttcctgcgctgttccacctcattcaacttcaggactcctcctattttgaggacttctccaacatctccatcttctcctcgtccgtggactccctg

SEQ ID NO: 299829 - DNA, 98 bp, Homo sapiens
aggaacccaacagagatctcttctgttctccactgctaggtaaagtcagtgataaatcttttgtttgctgcatatactggagatgtgtctgcacttcg

SEQ ID NO: 299830 - DNA, 100 bp, Homo sapiens
catcctgcgcaaggccgtgcagaagtgggtaattccagaattgattggccataccattgtcactgtattactgctcatgtcattgcactggttcatcttc

SEQ ID NO: 299831 - DNA, 82 bp, Homo sapiens
cgagaaaaccatctccaaagccaaagactttggtttcgcacaacacatgtccccgtgggatgagaagcacgtgctccgtggc

SEQ ID NO: 299832 - DNA, 98 bp, Homo sapiens
aacaccacagtgattggtgaaaatgatcctattgatgaggttcaggggttcctctttggaaaattaaggagaagactgatatagaagggaccttattc

SEQ ID NO: 299833 - DNA, 88 bp, Homo sapiens
tctcgctaacaactgcccagctttgagtactactataattccttgacccagcagtacctttactgggatggggaaaaagagacctacg

SEQ ID NO: 299834 - DNA, 83 bp, Homo sapiens
gccgggcgcaatggagcggaagagaaaggacccaggagcgataacagtaaatcaaataagatatttgtcggtggaattcctca

SEQ ID NO: 299835 - DNA, 101 bp, Homo sapiens
tttagccggagtgagaagcaagaaggccctggacacagcaatatctctgggctttcacaggctagagtaccgtggcacaatctcagctcattgcaacctct

SEQ ID NO: 299836 - DNA, 82 bp, Homo sapiens
tgcaccagcaggaggtcctgccccctccactgctgctgctccagctgactcttttggtgatcccttcttcccccggactaca

SEQ ID NO: 299837 - DNA, 71 bp, Homo sapiens
ggagatccaagagattcagtatcactcgctcccttgatgatcttgagatgaagattatggaagagattcgg

SEQ ID NO: 299838 - DNA, 111 bp, Homo sapiens
ctgcctcccccgtcccaccactgaggctgttgggccaggccagtcatgctagaacgtcttcgccttgatcgtgttctcctgcatctatggtgagggctacagcaatgccca

SEQ ID NO: 299839 - DNA, 100 bp, Homo sapiens
catacggagattgacaatcaatgggccatcttggacgaagaatggttgagaccggtgatgagaaaagagaagcaagtgttagtgcattggggcttttacc

SEQ ID NO: 299840 - DNA, 90 bp, Homo sapiens
cgcgcttctggccgcgggaaggagaggagcagccaaaccaagtgaactatgggaatatctgcacgggcctagaagtgctgagcttcctgc

SEQ ID NO: 299841 - DNA, 50 bp, Homo sapiens
attggctcttctacattcattgccatcaacaagaagattctgtcactgag

SEQ ID NO: 299842 - DNA, 80 bp, Homo sapiens
caagcaggtccggacccactggctgctggagcttgtcaccaccaggtaactaggatttctacctcaaccgcgagacctat

SEQ ID NO: 299843 - DNA, 82 bp, Homo sapiens
gacctatgaatatccagtttgagccatcggatctaagatccaaaagaggatgccttctccgggacagattggatgttggaga

SEQ ID NO: 299844 - DNA, 100 bp, Homo sapiens
ggcgcaggaccggccgcagtgccacttcgacatcgagatcaaccgggagccgggtcccgtgggagtagggctgaatgaactgaaacgaaagctgctgatc

SEQ ID NO: 299845 - DNA, 100 bp, Homo sapiens
gagcggttgacgttgcctctcggcggcgcggcggcggtggacgagtacctggagtaccggaggtagtgaagctgattttagctcctcgagcagcacaggc

SEQ ID NO: 299846 - DNA, 82 bp, Homo sapiens
gccgacgacccagcagccgccatggctctgctccgagacaatgcagatcttcgtgaagactctgactggtaagaccatcacc

SEQ ID NO: 299847 - DNA, 75 bp, Homo sapiens
atggattgccagggcttcctggcccgaaaggagagcctgccatttatgccagtgttcttcctggagagttgatga

SEQ ID NO: 299848 - DNA, 51 bp, Homo sapiens
tctggaggagccttctcaagaacagaggttgaagcactggacaatgccaca

SEQ ID NO: 299849 - DNA, 83 bp, Homo sapiens
gacctgcaagctctttgacacacagcagttcttgtcaggaatgaatctgaagtctgctgcagtaaaacacagaaggctttaaa

SEQ ID NO: 299850 - DNA, 95 bp, Homo sapiens
actcaggcagtacgggaagaacttcttcagaattagaaaggagctgcttcccaataaggaaacaatggaagtggagaaagaggcgaaaaggatgc

SEQ ID NO: 299851 - DNA, 100 bp, Homo sapiens
tggttggccctgtgatccctcaagactggtccacggagtgtatgaccacaaacagccatcaagtgtactaatggtcacttgatgtgcgctggctgtttta

SEQ ID NO: 299852 - DNA, 75 bp, Homo sapiens
gagggctatggctatggctatggctatggccaggataacaccaccaactatggcctagactcaagtctgggtttc

SEQ ID NO: 299853 - DNA, 100 bp, Homo sapiens
ggcctctcgcgggacctgggccattttggtctccctttggtgaagcacaatcaggatcgaacctgcaagcacttatagacagtactcgggaaccaaatag

SEQ ID NO: 299854 - DNA, 82 bp, Homo sapiens
cttgacaaccaagggcctccgtctggatttccaaggaagaatttcctctgaagcaccggctgaccaactgactgaagagcag

SEQ ID NO: 299855 - DNA, 83 bp, Homo sapiens
atcggcttctgcctggtgctctgcgtcctcatcgggcttatgttcgagggtaatacctgcctggagaatggatctttcttact

SEQ ID NO: 299856 - DNA, 101 bp, Homo sapiens
agcgcatgcagctgctgctgaccctggccttcaaccccgagccgctggtgctacagatgacagtcatgtccctttccagggacctcaaggacgactttcac

SEQ ID NO: 299857 - DNA, 90 bp, Homo sapiens
ttcttccagcttctgctgtccttctttgtggagagcaagattagaagcccaggacccaggaaggagacacaggaaatttattcaaagtcc

SEQ ID NO: 299858 - DNA, 76 bp, Homo sapiens
gcatcaacatttggtcagctgtttggagacattgcagaaggctctcaaaggtgtttgagaagctgcagctgctcaa

SEQ ID NO: 299859 - DNA, 80 bp, Homo sapiens
agttgggaggacccgggacaccgcacagccgggaaatggtgctgaagcgccagggctacgatgaaggctgcgacatctgg

SEQ ID NO: 299860 - DNA, 100 bp, Homo sapiens
agcgggcggagctgtgcgagagcctcctcacttgggaggtgtgattgcctatatcagttcttccagctcagcctcaagccctgcctcttgtcacagtgag

SEQ ID NO: 299861 - DNA, 50 bp, Homo sapiens
cagctggctaaccagaccgtgggcagagtttatgtggccgaggcagacaa

SEQ ID NO: 299862 - DNA, 50 bp, Homo sapiens
taagaagtacaatagcattcgcggagctggccaagaggactcccggcaag

SEQ ID NO: 299863 - DNA, 75 bp, Homo sapiens
gtgggtggaaaagtgttcgccgaggtgccatttggattgtactttagtggcacgatgtactctgagtggaggtca

SEQ ID NO: 299864 - DNA, 100 bp, Homo sapiens
ctgctctgggggattcgtgcgcggaattttaaacagctatcaagtaaaatggaatttatgacaattaatggaacaacattaaggaatctggaaatcctac

SEQ ID NO: 299865 - DNA, 98 bp, Homo sapiens
ttccttccttactttgtcttggtatactacatggcaaaatgggaaaggggtgaagacatcttaaaccagaggaatgactctctagttgtggaatttca

SEQ ID NO: 299866 - DNA, 100 bp, Homo sapiens
cagaaactccaagaggaattagcctcaggaaaattagtggaacaggctattccaactccacagagtgaccagagagaggacgtggctgaagacaccaaag

SEQ ID NO: 299867 - DNA, 97 bp, Homo sapiens
ccggcgccgcggcgacctcggaggaaccggctccttgcgtcccgcctccctgggagctccgcacggactggtcgaattgacaaatcttaccctacag

SEQ ID NO: 299868 - DNA, 75 bp, Homo sapiens
ccgttgcagtcggccagcccccttctccacgattcatgcccgaaaccaaaatgaaataatttttgggctgaatga

SEQ ID NO: 299869 - DNA, 75 bp, Homo sapiens
cctcacggaggagaatgtcaaggactgcaagatggaggaaggcgggaacctaggaggcctgattaagatggtcca

SEQ ID NO: 299870 - DNA, 96 bp, Homo sapiens
ccgtgaccgagagcgtgaccgagagcgcgaatatcgtcatcgttagaaggggctgagcgggtgatcacgctgaagatggagatcccgggctccatg

SEQ ID NO: 299871 - DNA, 74 bp, Homo sapiens
caaacgctaggtggctgggtccaggcaatcttgctgccaatgatctctccccgtcccgaatagccagactacag

SEQ ID NO: 299872 - DNA, 75 bp, Homo sapiens
gctaaagcagcgtgcgttcagccctgggattcacaatgacatcctttcaagaagtcccattgcagacttccaact

SEQ ID NO: 299873 - DNA, 90 bp, Homo sapiens
gaagaaatggcggacttctacaaggaatttttaagtaaaaattttcagaagcacatgtattataacaggccacggcagagacaacgtgtg

SEQ ID NO: 299874 - DNA, 98 bp, Homo sapiens
agccttgcaaaatgtcactcagcagagcctgctgctgaaacgtgggagttgaaaaagctgatgcttatggctgttctgaactgtctcttcgactcatt

SEQ ID NO: 299875 - DNA, 100 bp, Homo sapiens
gctgctggaagacgaggagcgcgtcgtgcgcctgggggtgcgcgcctgcgacctgcccgcctggccacataaagaagatccctaatagtcatttctcaac

SEQ ID NO: 299876 - DNA, 100 bp, Homo sapiens
aagcagctgcggaaaatgctagaaggaatgtatcctgtcaggtataatgtcagtgaatggcaagaaagttcttcatatggatcgaaacccttactacgga

SEQ ID NO: 299877 - DNA, 100 bp, Homo sapiens
tggtactggatgatcaaggtcagctggtccacatgaacaggcttccaggaggaaatgaggtcacggaggtagtcatgatctatgacgccgagaagcagag

SEQ ID NO: 299878 - DNA, 90 bp, Homo sapiens
ccatgattgtgaggcctccccagccacgtgaaactgtctctgcttggggtggttatgtatttatcatcaatcttattccactgcatgtat

SEQ ID NO: 299879 - DNA, 100 bp, Homo sapiens
tcagtgggactagttcgaactatgtggaggagatgtactgtgcttggctggaaaaccccaaaagtgtacataagccacgacaagggacccgaggcggagg

SEQ ID NO: 299880 - DNA, 75 bp, Homo sapiens
aaggtgccacagcagagacgcgaaggagaggccctagaaccgtccacagagtccatgtgaacggacagatatcag

SEQ ID NO: 299881 - DNA, 90 bp, Homo sapiens
caaaaactcaggcttcgccacctgcgtgcaaagcctcatgcattgtgcgtcagcagcaatgtttatggtgaaaaatggcaacgggaccgc

SEQ ID NO: 299882 - DNA, 83 bp, Homo sapiens
ctagcagccagttccggcccgaggacaccgactaccagcagacctgcctagagctggaacgttacctccagagcgagccctgc

SEQ ID NO: 299883 - DNA, 83 bp, Homo sapiens
caacagcgaggaagaagaggacgacgacgacgaggaagaggaggtttctgaggaatgaaatggcttgggccataagaactgtt

SEQ ID NO: 299884 - DNA, 75 bp, Homo sapiens
gtgattaacaaagacctcgcggaggaaggatgccggctccaggagcagcagtggaggtcgggaacgcctcattgt

SEQ ID NO: 299885 - DNA, 100 bp, Homo sapiens
ttaaaggaaatctaaagcatgaacaggcatctaatgttcttagtgacattagtggatagctgggagtatggccaccctgctccacgatgcggtaatgaat

SEQ ID NO: 299886 - DNA, 75 bp, Homo sapiens
ctggaggaagcagtcccgcaggaaggccctgggctgcatcttgtacctgctgtgcttccggcagcacccttttga

SEQ ID NO: 299887 - DNA, 83 bp, Homo sapiens
catgtctgcgagccaggattcccgtgtggacgaatgtggaacctcgctctgtggctgtgttcccttggcactccttagtcccc

SEQ ID NO: 299888 - DNA, 108 bp, Homo sapiens
tcacagccatcatcttctgtgtggagctcagcggctacgacctgaaactctacgaggataaccagacaaacctgagagccagaagcaacaaagatgccaaggatccaa

SEQ ID NO: 299889 - DNA, 100 bp, Homo sapiens
gttgaccgcacactggatgaatggaagcgagaagttttcaggttgctggaggaagagggcgtctccctccccgacctggaaccagcccctctggacagcc

SEQ ID NO: 299890 - DNA, 98 bp, Homo sapiens
aaacggcaacgtgtaatcagaaggcacagattagaggaaggaagagttccatcaccgggacagcttcaacacagggtccacagcgtggggcatttccc

SEQ ID NO: 299891 - DNA, 100 bp, Homo sapiens
catacgttataagcaccgctacagttctgaatgcagtgatggggaatggtctgcttctttgcctcatcgattttctggtacagaaaaagatcaatcctca

SEQ ID NO: 299892 - DNA, 126 bp, Homo sapiens
ccctgaagcaaggactgcggctgtcacagactgctgaagagatggcggccaatctaacaggccatggttgcttgttatccgggcaatggaacgggttatgtacgtcatgttgataatccaaatgga

SEQ ID NO: 299893 - DNA, 100 bp, Homo sapiens
gagaatatctgtctacggatcattgatcttgttctgcagaaacatgtaattggattccatgataaagacagttcaggttggagttgcagcaaagataagg

SEQ ID NO: 299894 - DNA, 75 bp, Homo sapiens
caatggcgtgatctcggctcaccgcaacctccgcctcccaggttcaccgctgatgttcgttccgtgctgagccga

SEQ ID NO: 299895 - DNA, 75 bp, Homo sapiens
caggaattgtgtgctgatctgaaagccaagattgtgcttcaagaagaccatagggaagaacgcattttcatcttg

SEQ ID NO: 299896 - DNA, 100 bp, Homo sapiens
tggcagcaacaaggagggaaaaaagagcaggtggaaaaggaaagagcgggacaaggagaaccggcatcggaagcgcagccacagccgctctcggagccgg

SEQ ID NO: 299897 - DNA, 83 bp, Homo sapiens
cccagctctgcagccacatactatccgtttgttcaggaaccaccagtgacagaatcggcttcagctccccaggaatatgattg

SEQ ID NO: 299898 - DNA, 100 bp, Homo sapiens
ggaggctaagaaagtggtgaatcccctgtttgagaaaaggcctaagaattttggcattggggttgccctgctgtcagacgtctatcctgagaaaatcttg

SEQ ID NO: 299899 - DNA, 75 bp, Homo sapiens
catcacatggccactgcttttctttgaatatgaagggaacttcatccaggcagatggctcggtgagctgcaagag

SEQ ID NO: 299900 - DNA, 100 bp, Homo sapiens
gcaatattgtggatattggccccgacagcttaacaattgaacccttgaatcagaaaggcaaggctaaatgtgaacaataatgtcttggaagagaaattat

SEQ ID NO: 299901 - DNA, 100 bp, Homo sapiens
tccctagcctgctagttctccttgtttttccaagcagctgtttggctttccgaagcccactttctgtctttaagagatatgaagagcattttaagaggtg

SEQ ID NO: 299902 - DNA, 96 bp, Homo sapiens
cacccctgaagccgagaaatgggttttggccaaattgggcgagggcacaaaataaccacttaccccttctcaccgaggaagagcgggagaaagggt

SEQ ID NO: 299903 - DNA, 98 bp, Homo sapiens
ccgagacctcagttcccggcggctcttgcggggcacaggaattacatgaacgacagccttcgcaccgacgtcttcgtgcggttccagccagagagcat

SEQ ID NO: 299904 - DNA, 99 bp, Homo sapiens
tgcctgctctgaaaagatttcaaataccggacagtcattttgtttactcattcagccctgttgcaggtcccaataaactcttcataaggttgacagaag

SEQ ID NO: 299905 - DNA, 75 bp, Homo sapiens
caggtggccaggttcaacgaccttcgcttcgtgggccgcagtgggcgagactctggctcctcctcctcctcagaa

SEQ ID NO: 299906 - DNA, 75 bp, Homo sapiens
aagaaaaagaaagatgcgctctaagaaagaagattcctctgacagtgtggaaagaggccagaagatcagtgagca

SEQ ID NO: 299907 - DNA, 101 bp, Homo sapiens
accttcaagtttgatgttgatggtgatgcgccagaggatattgcagactatatggttcttcagatagatcctgaagttacagatgaagaaataaaaaagag

SEQ ID NO: 299908 - DNA, 75 bp, Homo sapiens
gaaaaagctgtggaaggctctggataaggaccagtacctgcccaggaaactgggaagacatgtaaggaatttgca

SEQ ID NO: 299909 - DNA, 75 bp, Homo sapiens
agttaatcctcaatttaagcctgatctaacccctagaaacagatggcccactgcgtgaccttggttcagctgtcc

SEQ ID NO: 299910 - DNA, 74 bp, Homo sapiens
gctgtctcctgcaagaactggctcaagaaatttgcctcgaaaaccaaccgcggcgagtcctttgcacatgttgg

SEQ ID NO: 299911 - DNA, 98 bp, Homo sapiens
agacgttagcgtgagtgatcactctcaatcccgggtggatggaaaggggtccatcaaagagctctttccaacaggaaaacagctggagcccttagttg

SEQ ID NO: 299912 - DNA, 100 bp, Homo sapiens
gcacatcgtggtggtcggatttcaccacaagaagggctgccaggacgtcttcctcatctgcttctccctcgtcagcccagcctcttatgagaacgtccgc

SEQ ID NO: 299913 - DNA, 80 bp, Homo sapiens
ctcaatatctgtcttcggtggactccttcggcagtccacccaccgccgccgcctcccagcccgcgggaggactcagactc

SEQ ID NO: 299914 - DNA, 100 bp, Homo sapiens
tgaaacttcgaaggaaacctcgggaaagtgattttgaaacgattaaattgattagcaatggagcctatggttctgtagaaaatattctcaaaacactcgt

SEQ ID NO: 299915 - DNA, 83 bp, Homo sapiens
ccgagacaccaatgggctgtgggctgaggaagaggtgtcagcacagcgggctactcctagggataagcccccggtcccctcat

SEQ ID NO: 299916 - DNA, 89 bp, Homo sapiens
gctgagtgaggccgaggccgggaggccgtgcccggagatttttcgtgaagctcgaagaacagtacctagtattgtttacatgcctcaca

SEQ ID NO: 299917 - DNA, 50 bp, Homo sapiens
cagcattttttccagaacacaaaaggagtctctaccacccgtccagtttg

SEQ ID NO: 299918 - DNA, 82 bp, Homo sapiens
agacgggcaggcccacatcaaagaggtggtgcggaagatgatcagccaggcacagaagggggatatgagactttctactcgg

SEQ ID NO: 299919 - DNA, 101 bp, Homo sapiens
gcactgtgacctacactagtcgcgggagccacgcagaggacgccggaacaccctggaagccgagaaatgacgatgttccacaggagcccgtgcccacgctg

SEQ ID NO: 299920 - DNA, 75 bp, Homo sapiens
ctcgccagcagccgtccggagccagccaacgagcgatgaccaggataaaaaggtggaaactctcatggtaccatc

SEQ ID NO: 299921 - DNA, 100 bp, Homo sapiens
aaatctcatcgccttcaccatggacctgcgcagcgatgaccaggtgtatcgcattaagttcaaggagagctttgctgagatgaacaggggctcgaacgag

SEQ ID NO: 299922 - DNA, 98 bp, Homo sapiens
tatgggatgttggtggtcaagatagaattaggcctctctggaagcattacttccagaatacccaggtaatggaaaaggtggagaatcaatttatggtg

SEQ ID NO: 299923 - DNA, 90 bp, Homo sapiens
cctggagaactacatcaccgctctgcaggctgttcctcctcgggaaaacgggccttactatacatcatatcccccatcaccagatttgtg

SEQ ID NO: 299924 - DNA, 99 bp, Homo sapiens
tcaattcggtgctccgccagccccagcttggcgtcctgagaaatgaaatgttcccactgccaggaggcaggcgccaccttgggctgctacaacaaaggc

SEQ ID NO: 299925 - DNA, 48 bp, Homo sapiens
tccaacacagatgtccaagctgccaaggtgtcctgatgtcagaagaag

SEQ ID NO: 299926 - DNA, 75 bp, Homo sapiens
ggcccaccctacatttagcgcatcatgtgatccgggttaaacccatccagagtaatggctgcggccttacccagg

SEQ ID NO: 299927 - DNA, 100 bp, Homo sapiens
aaaactctagaagtctggatgtcggtgggcctctgagatatgccgtttacggggtaatcactttgatcagtatgaggaaggacacttggaaattgaacaa

SEQ ID NO: 299928 - DNA, 71 bp, Homo sapiens
ttcagaggttcaccgccatcattggacccaatggctctgacattacaagaagcggtgccaaggccgcatgc

SEQ ID NO: 299929 - DNA, 75 bp, Homo sapiens
acctctgcaagctcatgaaagaaatcttagataagaaggttgagaagtgatgtgaactccatgtatctgtcttcc

SEQ ID NO: 299930 - DNA, 82 bp, Homo sapiens
ctccggagcacttgccgctgctcaggaacatcctccaccaggggcagaatgagtctgcaggtcttaaacgacaaaaatgtca

SEQ ID NO: 299931 - DNA, 75 bp, Homo sapiens
cagcagttcaggccagccccacatggagaccatactttgccttttaaaagaaatgccacccacattcagagacac

SEQ ID NO: 299932 - DNA, 75 bp, Homo sapiens
aacgaacttaaagagatgaatggtgagaccacaaaaacttgtggtggagaatgttgatgtgttaacacaaatgag

SEQ ID NO: 299933 - DNA, 109 bp, Homo sapiens
gctcctgccaccgccccggagcctcacagcctgggcatcctccatgcctcctacagcgtcaggggctcccacaggatcagaggctggggccaactggaaccattggcag

SEQ ID NO: 299934 - DNA, 82 bp, Homo sapiens
ccgccaccacccactccggacacaggtgaaagaaaatggcccgaaccaagcagactgctcgtaagtccaccggtgggaaagc

SEQ ID NO: 299935 - DNA, 101 bp, Homo sapiens
actgcattgacaggctaaaaaggattatgtcccttatgtcaatgctgttgattcaaggtggagttcatatggcaacgaggccacatcatcagcacactatg

SEQ ID NO: 299936 - DNA, 50 bp, Homo sapiens
gcctccccagccatgtggaactgagaaccagcagaaatccaccaatgtag

SEQ ID NO: 299937 - DNA, 51 bp, Homo sapiens
gcagacctggtggaggtgttaaatgaaagccctcgggaccaaggatcacgt

SEQ ID NO: 299938 - DNA, 82 bp, Homo sapiens
ggaagaagttggtacgggcactcttcatagttcctagacaaagaaatgattctggggaccattctgaccacatgcattacta

SEQ ID NO: 299939 - DNA, 100 bp, Homo sapiens
ggctagggcacggaccgcctaggccgagagtgtgaacatggctacgcctcttcattcccgtccatgccgagcccccgactgcagcattcaaagcccccac

SEQ ID NO: 299940 - DNA, 86 bp, Homo sapiens
tgttcagcaggagaaaatttcagagctgcaaaattatcaggccataggaaaaggatacagagtagagtttcatgaacctgaaactt

SEQ ID NO: 299941 - DNA, 75 bp, Homo sapiens
ccaagaccagcgcgagggccctgggcaaggcccgacaggtggacccaagtggagagattgtggaactggcgaaag

SEQ ID NO: 299942 - DNA, 100 bp, Homo sapiens
gccccgtctcgtactgtcgccgtcaccgccgcggctccggccctggccccgatggctctgtgcaacggagactccaaggcctccggtgtggctgtctctg

SEQ ID NO: 299943 - DNA, 100 bp, Homo sapiens
ggacacgcctagcgcgggctccagtttggaaattttagcattcaggtgccaggaatgcagatgggacagccagtgccagaaacaggcccagctatactcc

SEQ ID NO: 299944 - DNA, 49 bp, Homo sapiens
ctgccgcggtggccgggtgccggcttccaactgaatatgagaggaacgg

SEQ ID NO: 299945 - DNA, 75 bp, Homo sapiens
tatctaatattacagctggaaatagggcacagatccagattccagctaagaaagagtcttgtccaaacactggaa

SEQ ID NO: 299946 - DNA, 100 bp, Homo sapiens
ccgcctccttgaagctgccgctgtcgctgctgctcgttcgagtcgcagagttgggtatcagaaattaaaaaagaagaagataaaatgcactttcatgaaa

SEQ ID NO: 299947 - DNA, 98 bp, Homo sapiens
ggtcaattgccatgcacacttctggacatatctgaagagatggattaagaatgctttggattaaggattgtggagcacatttcaatcattttaggatt

SEQ ID NO: 299948 - DNA, 93 bp, Homo sapiens
cggagaggtggctccatggacacagacctgctgtgtgtgcttctgcgccccagggcgtgatggtgggcatgggtcagaaggattcctatgtgg

SEQ ID NO: 299949 - DNA, 50 bp, Homo sapiens
ccgatttcaaggaagccaaggggtaactaggatttctacctcaaccgcga

SEQ ID NO: 299950 - DNA, 90 bp, Homo sapiens
cgatccagcaccatggggaagcgggacaatcgggtggctggaggctcccaggtgattttcacaaatcctttagaaatcgtcaagatccgt

SEQ ID NO: 299951 - DNA, 90 bp, Homo sapiens
acatgtacagtatatggcagagctaatagaggttcacctaaggatcatgaacgtaatggatgcagattatgtaaaagtgataaatattgt

SEQ ID NO: 299952 - DNA, 88 bp, Homo sapiens
gcccggcgagtcgggctctggaggaaaagaaagatgccgctcctacgaggactgctgtggctccaggtgctgtgtgcgggccctctcc

SEQ ID NO: 299953 - DNA, 51 bp, Homo sapiens
gctgcttcctcctcctcggcctcaccgggttatggttttgtgaaattcaca

SEQ ID NO: 299954 - DNA, 75 bp, Homo sapiens
ctgcaggatggcgcggccgagtccccgtacggccacccggcggattgtctaaagccccaggaaaaatggtggaaa

SEQ ID NO: 299955 - DNA, 50 bp, Homo sapiens
attccttttgggacgccaatttcttactgttctgatccaaaccttgtgtt

SEQ ID NO: 299956 - DNA, 100 bp, Homo sapiens
ctcctgccacagctcctcaccccctgaaaatgttcgcctgctccaagtttgtctccactccctccttgctgaaactgatgtaaatgtggtcatgcttcag

SEQ ID NO: 299957 - DNA, 101 bp, Homo sapiens
gtgaagaagcacaagaaaaagagggttgtccccaaaaagcctcccccatcaccccaacctacagagagagcaggagattcggatgggtcagatggctatgg

SEQ ID NO: 299958 - DNA, 100 bp, Homo sapiens
aggcaaggtcttacctgaatcagacggaatcagtccccaatgcctggaaattcctcattggattactgtgttttaaacagaatttcgtgaacagcctttt

SEQ ID NO: 299959 - DNA, 51 bp, Homo sapiens
gagcttctctccagagtagaaagtttctgccactgccttctacaaagcaca

SEQ ID NO: 299960 - DNA, 75 bp, Homo sapiens
caggcgaacccgcggcgcaataacggaagatgttaccgagtacttcagtgaattccttagtgcaggggaacggag

SEQ ID NO: 299961 - DNA, 75 bp, Homo sapiens
ctttgaggtcactttccagcagtccagcacggccaagtcagccacctggacggttcgggtctggcggtacttgaa

SEQ ID NO: 299962 - DNA, 50 bp, Homo sapiens
gccctgggagctggaggaaccgcggtctcagccttagatccaaggacagt

SEQ ID NO: 299963 - DNA, 75 bp, Homo sapiens
caattacttgctaagagcaaacttgaaggatgaatgctatcaagtaagacaagtgtttgcccagaaacttcacaa

SEQ ID NO: 299964 - DNA, 108 bp, Homo sapiens
gacaaccaagggcctccgtctggatttccaaggaagaatttcctctgaagcaccgggcgaccattgacgaggtggagacggacgtggtggagattgaggccaaactgg

SEQ ID NO: 299965 - DNA, 80 bp, Homo sapiens
gcaacgacgttccatctgtggaaggacctaccaaccaggatgctccagaccttgtatgattacttctggtgggaacgtct

SEQ ID NO: 299966 - DNA, 140 bp, Homo sapiens
ctggcaggctggtggatgcctggagggtgcacatgctgcctggcacagatgcaacgtgggctggtgcgaatgggcatagaatgtcaagctaaccaggcgtccgctacttcagaagagtgtactgtcgcatggggagtctg

SEQ ID NO: 299967 - DNA, 90 bp, Homo sapiens
aacatacaaataccttgaagtccaatatgaatgtgtcccttacaatgccatggacaatattaccaggcagaaccaattctacgataccca

SEQ ID NO: 299968 - DNA, 80 bp, Homo sapiens
ccagttccaaggactccacgggttactggctgaccaacaaagttcctatcaaaagacccagcacaggtcttctcatgtat

SEQ ID NO: 299969 - DNA, 75 bp, Homo sapiens
ggaagacgccctggtgctcaccaagcaagatgttgcaagagcaattgaattactggaaaaactacaggaatctgg

SEQ ID NO: 299970 - DNA, 74 bp, Homo sapiens
tgagatgcgcaaattcactccccagtacaaaggagttggtccaggtagcaatgatgagacccttttatctgctg

SEQ ID NO: 299971 - DNA, 100 bp, Homo sapiens
aatcatgaagctactaaccagagccggctctttctcggtaaagtgttgagagaggagaaccagtgcattgctcctgtggtttccagccgcgtgagtccag

SEQ ID NO: 299972 - DNA, 51 bp, Homo sapiens
tacacgccaggtggtggtgcgctcaggtgattgaattactcagatatgaag

SEQ ID NO: 299973 - DNA, 100 bp, Homo sapiens
tgactttgagttcatggatgatgccagtcttatggaagtgtatttaaagcaatacacaaggaatccggtcaagttgtcgcaattaaacaagtacctgttg

SEQ ID NO: 299974 - DNA, 50 bp, Homo sapiens
cccttgggccgcgtctcctttgagcgagacggtcatctgttccagccggg

SEQ ID NO: 299975 - DNA, 83 bp, Homo sapiens
gcctcactatggcagcagcacggcacagcacgctcgacttcatgctcggcgccaaaggagccagcaccgctctttgaccttgc

SEQ ID NO: 299976 - DNA, 75 bp, Homo sapiens
acgacctgctgtcagagcccatcaagatgtcagtattgaatatggtggtgaggcgtgaccctggcaacactgaac

SEQ ID NO: 299977 - DNA, 98 bp, Homo sapiens
gaaaaaacttccagaacatctgggagaatatttaatggaaaatcgcttggttaaaacctgacacttttaacaggtgaatgaaatcctgtgccgttctt

SEQ ID NO: 299978 - DNA, 75 bp, Homo sapiens
ctggacgccgcgatcgtggggcccgcgaggcgggcagccggggcgtccaggaagaaggtagataatgactataat

SEQ ID NO: 299979 - DNA, 75 bp, Homo sapiens
gcgcatgtcagtgggtagtcgtggaagcctgagggaacggaaaacagttcttccttcaaagcatgcagtacctga

SEQ ID NO: 299980 - DNA, 98 bp, Homo sapiens
acacggcaggccaggagcggttccagagcatgcatgcctcctactaccacaaggcccacgcctgcatcatgatcctggtggctttgagacaccttcac

SEQ ID NO: 299981 - DNA, 96 bp, Homo sapiens
gcgagaggaaggcgcacaggcagaagagcagcagcgtcaggaaggtgctaaactaaaggtgggtcagtacctgaactgcattgttgaaaaggtgaa

SEQ ID NO: 299982 - DNA, 100 bp, Homo sapiens
tctccagaattactcaaataccgagctatccatcacactcctcagcagacatcaattccagtcttcctccgatgtccactttccatcgtagtggtacaaa

SEQ ID NO: 299983 - DNA, 76 bp, Homo sapiens
cctgacggcgtgaccgacccgagccgatcaggatcctcatgaccagccaaagagaagaagaattaggaagcataaa

SEQ ID NO: 299984 - DNA, 50 bp, Homo sapiens
caaggaagacccactggagagcacagagtaccaagacattgagactgaga

SEQ ID NO: 299985 - DNA, 82 bp, Homo sapiens
aggaggcagagcgcgagagatcccgtccgccccagccgcgtctgggccaggagaaaagggggatatgagactttctactcgg

SEQ ID NO: 299986 - DNA, 90 bp, Homo sapiens
tggcgggtgtggacgccactacagttcatcaacatcaactacgtccctctgaagtcccatgaagctgaggtcttgaagcagctggctgag

SEQ ID NO: 299987 - DNA, 74 bp, Homo sapiens
gaacgcccctccagccttcgagtcgttcttgctcttcgagggcgagaacaagcggctggattatgtgaaccatg

SEQ ID NO: 299988 - DNA, 90 bp, Homo sapiens
agcaccaactccgtgtcgggagtgcagaaaccaacaagagccagtctacttgatgacttatacaagtatttcttcttccatcactcccac

SEQ ID NO: 299989 - DNA, 100 bp, Homo sapiens
ctgcatggagtcttgtgaaatcgcgtggactgcaacacccagcagcgcggagcttactccacgggaacagcctctagataatctgagttgttgaaaatac

SEQ ID NO: 299990 - DNA, 50 bp, Homo sapiens
ggaacacttcagtgcattcaagacatatgtagagtgtgtcggtcagaagg

SEQ ID NO: 299991 - DNA, 102 bp, Homo sapiens
agatcgagcccagcgtcaacttcctcaagtcgcccaaagagatctaccgcatcgtgtcacagaaacagatcgcagaccgcgctgcccacgacgagtccccgg

SEQ ID NO: 299992 - DNA, 100 bp, Homo sapiens
gaggcccctgccgtgtggacccgtaaaataaaatgggtaaatcagaagactgaagcacggcatatactcaccttagtccataaacacttctgtactagac

SEQ ID NO: 299993 - DNA, 74 bp, Homo sapiens
gtgaatcccctgtttgagaaaaggcctaagaattttggcattgggaaagcaggcaggatgggagagtcgccgat

SEQ ID NO: 299994 - DNA, 75 bp, Homo sapiens
ccagtttgatagtgaaaaaggagtggactttgttctgaattactccaaagcgagataccccggctctgacaggat

SEQ ID NO: 299995 - DNA, 100 bp, Homo sapiens
gccccaggtcaacatttctgttcagggggaagttccacgcactttatcagatgattctgtgcagttgtcaaggttatgctacaactaccctgtaattcag

SEQ ID NO: 299996 - DNA, 117 bp, Homo sapiens
aggaatctatgctggagtctgtatttctgtcttggtgcttcttgctcttttgggtgtcatcattgccaaaaggtcctcagaagtggaatacagagcggaggtcggtcagaatgccta

SEQ ID NO: 299997 - DNA, 90 bp, Homo sapiens
gggtcttctgctggacaagctggccaaggagaaccaggacatccggctgctgcaggcccagctgcagctccaggagctgcaccgagctgg

SEQ ID NO: 299998 - DNA, 74 bp, Homo sapiens
aggatccctggctgtagcgaacaacaacccaaccattactgtcaagagaatccatcccattaaatgacctgaag

SEQ ID NO: 299999 - DNA, 100 bp, Homo sapiens
aagactcaggacggacaagcacagtcttcggaagcttctgcagaaagccgtcattacacctgattttgaaaaaaaccactgtgttccaccatatagtgaa

SEQ ID NO: 300000 - DNA, 82 bp, Homo sapiens
ctgtaaacctggccactggaaaacgaagctgtggaggaagatgcagagtcagaagatgaagaggaggaggatgtgaaactct

SEQ ID NO: 300001 - DNA, 76 bp, Homo sapiens
ttctgcccttgatgtcacaggatctcttgaaggagacggtggctcagggagtaaaggaaggccagttgagcaaaca

SEQ ID NO: 300002 - DNA, 83 bp, Homo sapiens
tttgggtttagcacgatgagctcaatcggcactgggactgattcttgctattccaaatcctcttccacgttgacagcccttca

SEQ ID NO: 300003 - DNA, 108 bp, Homo sapiens
agcccggcgggaccatgttcaccagcaccggctccagtgggctctgtgcagattcactttataggaacagcttcagcttcagtgatgaaaaactgaattctccaacag

SEQ ID NO: 300004 - DNA, 83 bp, Homo sapiens
cttgtccttgctggtgcatgcgtcgtcggcctctgggcagcagctatgtttccagtgtcctctgggtgtttccaagagcaaca

SEQ ID NO: 300005 - DNA, 50 bp, Homo sapiens
tggacagtcagcatttgcagactttgctgaagaaaaggtgactggtctca

SEQ ID NO: 300006 - DNA, 75 bp, Homo sapiens
caaaggaaaggggaaaatgtctcagtcgaaaggagccagtctacttgatgacttatacaagtatttcttcttcca

SEQ ID NO: 300007 - DNA, 50 bp, Homo sapiens
tggatgtgggaaccgaaaatgagcaatgggccacttttgctagaatatgg

SEQ ID NO: 300008 - DNA, 96 bp, Homo sapiens
ctttggcgttatcggcagccaaaaagagtacagttgtgaatttggctccgcgaagtattatgcactgtgtggctttggtggggtcttaagttgtgg

SEQ ID NO: 300009 - DNA, 82 bp, Homo sapiens
caggaatctcactctgttaaagctggtctgttctaactgagattttctggtctgactctggagagctagtctgtattgctac

SEQ ID NO: 300010 - DNA, 75 bp, Homo sapiens
cctaggcttagtcctagccctgcactgaagatcttcataaacaatgaatggcatgattcagtgagtggcaagaaa

SEQ ID NO: 300011 - DNA, 101 bp, Homo sapiens
agccctccttcgtgtcgtacgtacgccctgaggttttgacaagcttgcatcatgcgtgagtataagctagtcgttcttggctcaggaggcgttggaaagtc

SEQ ID NO: 300012 - DNA, 90 bp, Homo sapiens
agggctgctgatgcctgagaaggtgactcggttctgccccctcgaggtgccgcagaatggaattcggcattgttcctacacagcttctcg

SEQ ID NO: 300013 - DNA, 82 bp, Homo sapiens
gtgcctgaaggagtacatgccctttatgaagatattcttgaggtatatcctttcgggctctgatgacttcaacctgtacatg

SEQ ID NO: 300014 - DNA, 90 bp, Homo sapiens
caagcctcagggccatccccgcctgctgctctggtttaagagagccctaagctgccgtgtaaggcatctgactacgctgaagccactaca

SEQ ID NO: 300015 - DNA, 75 bp, Homo sapiens
gggaaactaggtcgatggtcggcggcgcccggatgggcagctgagatttgacaagatcaaagctgcaggaaaatg

SEQ ID NO: 300016 - DNA, 90 bp, Homo sapiens
gcggctctgctcggtcctcaaagatgtaaaaaaagattggtctgaccatgctctctggtgggaaaagaagagaacttggcttctgaagac

SEQ ID NO: 300017 - DNA, 139 bp, Homo sapiens
ctcggtgtagctgccgtggttgccaggagagctgcgccggcgagaagcggccgagccagcagcagagacgcattctcactatgttgcccaggctggtcttgaactccttccctcaagtgattcttctgcctaatcctcc

SEQ ID NO: 300018 - DNA, 75 bp, Homo sapiens
actactaggaaaactcaaatctttggcaaccaagagagacaagagagacacctccaacttcgacaaagagttcac

SEQ ID NO: 300019 - DNA, 86 bp, Homo sapiens
ttatgcaagaaactgttgaattagacccgtttcctatagatgagaaaccatacaagctgtgatgctgtctttgcatttcaactacg

SEQ ID NO: 300020 - DNA, 74 bp, Homo sapiens
ttagctcagcaattcttaccttgcagaggtggaggagacactgaagcgactgcagagccagaagggagtgcagg

SEQ ID NO: 300021 - DNA, 100 bp, Homo sapiens
cacgtgtaccagtgtgtgttgatcttggcttgattcagtctgccttgtaacagctggactgggcagcctttggggtcatgacccttccctccatcggcat

SEQ ID NO: 300022 - DNA, 75 bp, Homo sapiens
gtcgctagaactcagttgtgcgttgcggccagtcgccactgctgggcatggtctagtggcccagtcaggacgcgg

SEQ ID NO: 300023 - DNA, 97 bp, Homo sapiens
ttctcttaggctccaaccaaggctctgttcctccaactcctctgccaaccaatgatgttgatgtgtatttcgagacctctgcagatgataatgagca

SEQ ID NO: 300024 - DNA, 90 bp, Homo sapiens
ggaagacgccctggtgctcaccaagcaagagtgtgaacatggctacgcctcttcattcccgtccatgccgagcccccgactgcagcattc

SEQ ID NO: 300025 - DNA, 82 bp, Homo sapiens
acgagaagcctgaaaagtcgcagcgagctggagccgccggagcctgatgtgtgagaagcggatattggcggcagtgaccagt

SEQ ID NO: 300026 - DNA, 82 bp, Homo sapiens
gtcatcaccgtcatcgagggaaggctgaaggtgatgtggccgccctcaaccgacgcatccagctcgttgaggaggagttgga

SEQ ID NO: 300027 - DNA, 83 bp, Homo sapiens
tgttcctatggcctaatgaacaacttccagctgtcggaaaaggtaacagaagatggaactcgaaatcccaatgaaaaacctac

SEQ ID NO: 300028 - DNA, 97 bp, Homo sapiens
gatggaaaaccagttattgaatatcaagaggaggagttgttggaaaatcaggaaaatgtttccaacctggtgattgaggacacagagctgaaacagg

SEQ ID NO: 300029 - DNA, 100 bp, Homo sapiens
acacggaagatgagccccaggtccagaagtatgatgactcctttgacgacgttgaccgcacactggatgaatggaagcccccaggatgggtgagttcaac

SEQ ID NO: 300030 - DNA, 96 bp, Homo sapiens
cggagcttggctacgccaaggagtctagcagtgagcagtacgtgcctgatgtgttttataaggaaatagacagacggttggaaaaaaaactgaaga

SEQ ID NO: 300031 - DNA, 100 bp, Homo sapiens
aagcgcctccgctcggtgcccactaacaagggccaattcctgtccccccagcagcatggcatcgtgtgctgaaccctctgagccctctgccccactgccc

SEQ ID NO: 300032 - DNA, 100 bp, Homo sapiens
tccgcggccggcaggaccatgctgctgaaagagtaccggatctgcatgccgctcaccgtagacgagcactgagattatgaggctctggcctccactggcc

SEQ ID NO: 300033 - DNA, 82 bp, Homo sapiens
gttagcaggaatactttagcctggaagatgatggatgccaaccagcgctgggatgtgcctgaggcggtggagtggatgtcca

SEQ ID NO: 300034 - DNA, 85 bp, Homo sapiens
aatcacagctttgagtgagaaacagtggtgccagtgaagaagaggacacatgaaggcttgctacccccagtggaaaatcatcccc

SEQ ID NO: 300035 - DNA, 100 bp, Homo sapiens
gaagggtgaggaggatgagggtgaggagaagtatgaggtggtgaaactcaagatccccatggacaacaaggaggccgaatcccgccgccgctcttcctct

SEQ ID NO: 300036 - DNA, 75 bp, Homo sapiens
gaaagcaaggccaaagacagggagaaggtgaccaagaatatggcccaggtgaccaaagccctggacaaggccctg

SEQ ID NO: 300037 - DNA, 137 bp, Homo sapiens
accctcgccttgtgtcaatggaggcacctgtcggcagactggtgacttcacttttgagtgcaactgccttccaggtgtcatggagaaactccagctgggcccagagattctgcagcgggaaaatccaaggcttattt

SEQ ID NO: 300038 - DNA, 82 bp, Homo sapiens
cagcggaaaatgatccagtcacaggctcacagaacatttcctgcctgttgctcacactctgttgtccacagcatacccgcac

SEQ ID NO: 300039 - DNA, 82 bp, Homo sapiens
gaaattattttgggtcttcttcttaatcccatatctggacatctggaacatccatgttccagggtctccctccactgctgta

SEQ ID NO: 300040 - DNA, 88 bp, Homo sapiens
gctgccggaaggggtcccgaagccccctgcaggaactctacaacccaatccagtgaggagctggtttcacctgaggacctgctggagt

SEQ ID NO: 300041 - DNA, 100 bp, Homo sapiens
atctgaatcaaatccaaagagtgtctgacatttcttttgtgcaagatgagcctcaagtgcttctgcattacacttccagctgatcttaccaagatgcatc

SEQ ID NO: 300042 - DNA, 101 bp, Homo sapiens
ccactctccctacgagatcaccacagaccgtggtttgggaacattccatgcccttctaaatacagctgtacatgtagtcatgtattcctactatggacttt

SEQ ID NO: 300043 - DNA, 51 bp, Homo sapiens
ctgagaaccatgctcaccgaccctcgaggtgctcagtcccctctgatcttt

SEQ ID NO: 300044 - DNA, 82 bp, Homo sapiens
tcaggctagtctttggatgggaaggctcgtggtgcagagagcattatgttaaacctggcaggacagctcatcatgatgcaga

SEQ ID NO: 300045 - DNA, 98 bp, Homo sapiens
tgtaatcttgaaggaatggacctcaaagtggcttctggcacagcagcttaattgaccggaacctcattgattattttgttcccttcctccccctggaa

SEQ ID NO: 300046 - DNA, 75 bp, Homo sapiens
aaagaatgcctggttggcagaatggccattaaacctgctgttctgaaaggtcggagatgtccgcccagaggttaa

SEQ ID NO: 300047 - DNA, 153 bp, Homo sapiens
caaagatcaagtggattcttacagcttggaagcaaaagtagaacttccaaccaagagactcaagctggaatgggtacactatgataccctggcaactggaataatttattttcatcgcttctatatgtttcattccttcaagcaattcccaag

SEQ ID NO: 300048 - DNA, 75 bp, Homo sapiens
tcagattctaacagctttatggagagggagagtttgaaaagccctttcacagccagaagatacctgaaattcctg

SEQ ID NO: 300049 - DNA, 100 bp, Homo sapiens
taatgggccgggaccgaaacctagccccggacgagaagcgcagcaacgtgcggtgggaccacgagagcaatggtagataacgcagatcatctctggaaag

SEQ ID NO: 300050 - DNA, 75 bp, Homo sapiens
gaaaatgtagacaaaaggcaaattattttggaccttcagattagcgaagctgccgcccatgctgtcgccaccctg

SEQ ID NO: 300051 - DNA, 82 bp, Homo sapiens
gtgatccagcaaggtcggcagagcaaggggcttacgcagaaggacctggccacggcaccatgactcctgtgaggatgcagca

SEQ ID NO: 300052 - DNA, 100 bp, Homo sapiens
ggcagattcctccgggcagcaggaagcccccgagcgcccacagcatgaaggaggaggccttcctccggcgccgcttctccctgtgtccaccttcctccac

SEQ ID NO: 300053 - DNA, 90 bp, Homo sapiens
ctcaaactcccaggctcaagcaatcctaccatgtcagccttcccagtagctggaactacaggttgttcttcgtgggctcccgggagggcc

SEQ ID NO: 300054 - DNA, 96 bp, Homo sapiens
cagggccggggaactcctgcgaaaaaccacgggccggaggagcagcagccgcgcgggcccagacccaacatgagtgaagtttcctgcaagaaacgg

SEQ ID NO: 300055 - DNA, 100 bp, Homo sapiens
cagtcgttgaaggtttggggagcagctgatacagcaaggagggctcttgcaaggattcaagagagtgataatgaactctcaagtggaacaggtgatgtgt

SEQ ID NO: 300056 - DNA, 74 bp, Homo sapiens
caaagcattgccagaaaacgttaaggtgaaaattagttctgctgtgcttaaagctgcggcccatcactatggag

SEQ ID NO: 300057 - DNA, 75 bp, Homo sapiens
caagaacagagagagaggtggacagatctgagagatactgaggttctcgcaaccttgggattaatcttgctcact

SEQ ID NO: 300058 - DNA, 90 bp, Homo sapiens
caaacctgtttagaaaataaaccagggattaaagcctgtggtttccacagaagcaccacctatcatatttgccacaccaactaaactgac

SEQ ID NO: 300059 - DNA, 75 bp, Homo sapiens
gtaactgaaagatacatggcttgcaaaaagtaaaccacgatcgttatgctgagactatcggacaaaacctttctg

SEQ ID NO: 300060 - DNA, 90 bp, Homo sapiens
cgccggttccttgcggtcaagatgctgcaaaacgtgactccccacaataagtattgttgcagcatctggcagtgagactgaggatgagga

SEQ ID NO: 300061 - DNA, 100 bp, Homo sapiens
aggcccgctgcgcgcgtgcgtgagcgcgcctgcgccgccggggccgctgcaaggggaggagagaggccgcctcagatgatatcatcaagttgaatcgaaa

SEQ ID NO: 300062 - DNA, 100 bp, Homo sapiens
gaccagctccaacaggattccatggtagctgggatgttagggctcagtatctgatgaaaaggataccacagaacccaagataccagcatatcaaatcaag

SEQ ID NO: 300063 - DNA, 90 bp, Homo sapiens
cttacagccgctcgtcagactccagcagccaagatggtgaagcagatcgagagcaagaccaaatacacgctgatcgatgagcaggacatc

SEQ ID NO: 300064 - DNA, 100 bp, Homo sapiens
gagaattgctccagaactctatcataagagtgctgctgctacagctgctaccttagcactccctgcaggtgtgactcctgttcagcagatattaacaaat

SEQ ID NO: 300065 - DNA, 100 bp, Homo sapiens
tgctccccaggacctgagcaggaacctggagttttcaggctcacttaatcctgaaaatcctgttcaagtaagcataaaccaattaactgcagcaatttat

SEQ ID NO: 300066 - DNA, 95 bp, Homo sapiens
ccgccatggtaggaaaaggtgccaaagggatgctgtcttctcaagtcttaggattgcagcaacacgctcggctgcccaaacccaaggcgaagacc

SEQ ID NO: 300067 - DNA, 100 bp, Homo sapiens
aggagggcgagcgaggaggatggcggagtcggggctcctgacggagaatgcagttgaaactaattttgtggatagagaaactgttggaactgctttacaa

SEQ ID NO: 300068 - DNA, 99 bp, Homo sapiens
ggtcgcgatggttttcttgggaacacgatagacagcatattctggcaggttatgtgggtatgcaatttatgtcgaaagcaacaagaaatcttaaccaaa

SEQ ID NO: 300069 - DNA, 87 bp, Homo sapiens
ctcgggggccgctctgggatcccggccaccagcaattgtccgtgccgcagaatggaattcggcattgttcctacacagcttctcggc

SEQ ID NO: 300070 - DNA, 88 bp, Homo sapiens
aatcaatgtggatcgacgtggaaatattgtctatattcacataagtttattaggagtgctctctgaccacttaaatgcagagattgct

SEQ ID NO: 300071 - DNA, 100 bp, Homo sapiens
agacccccgggtgaagccaccgtcatcatgtctgaccagggtaaaccagacttgaatacaacattgccaattagacaaacagcatcaattttcaaacaac

SEQ ID NO: 300072 - DNA, 100 bp, Homo sapiens
ctggacacctttaaggattctcgcctcaggtcgccttcgtcagacgtcagaatgattccttgcagagccgcgctgacctttgcccgatgtctgatccgga

SEQ ID NO: 300073 - DNA, 98 bp, Homo sapiens
tcctggcccttgctactacaatgtattctcctgggggtgtcagtcaggtttatggggaagtgctcttggtaacactgaagtcattagggaatacattt

SEQ ID NO: 300074 - DNA, 80 bp, Homo sapiens
gtggtctctgaggcggcggcggcggcggggatcgtctccggcacctcgaagcggaggatccctgtgtcccagccgggcat

SEQ ID NO: 300075 - DNA, 50 bp, Homo sapiens
tgatgagccaagtgaaagcactttagctttagcgtcacctccctcactgg

SEQ ID NO: 300076 - DNA, 100 bp, Homo sapiens
ggaggatgagacgccacatgaagaagaaagaagacgccacagacagcagcgcagtaccaccttccagagattaaaatgtttattggaggcttgagctggg

SEQ ID NO: 300077 - DNA, 100 bp, Homo sapiens
actgtgagccgctcacagtgtctaagatgggaaaactgacaaccatgcctgcaggtctgatatatgcatctgtaagtgtacatgcagccaaacaagagga

SEQ ID NO: 300078 - DNA, 75 bp, Homo sapiens
ctcagctttaccatccctggaggagacctggcagcaggagtacaagcgcaagctagccagagtttccctggtgcg

SEQ ID NO: 300079 - DNA, 136 bp, Homo sapiens
agaccgcgcgcagggcctgcagcgggagctggacggcgagcgcgagcggcgcgagaaagtcatcatcagatttgaaatatttaaagtggatacaaaactatttcagcaatgcagacaattaagtgtgttgttgtgg

SEQ ID NO: 300080 - DNA, 82 bp, Homo sapiens
agtgatttgcctcagcttgtacttacttggaccatgagactgtttcagccactttcatcgacagcagtggacagtttgtttc

SEQ ID NO: 300081 - DNA, 82 bp, Homo sapiens
gctgctatcaacgaagagatatcacgatacaatgtctctttgctatatgaccttgaaaatcttccggcatccaaggattcca

SEQ ID NO: 300082 - DNA, 50 bp, Homo sapiens
gccttctccatcgcctcctcgctgctggcctgttgcagtctccaaggcac

SEQ ID NO: 300083 - DNA, 100 bp, Homo sapiens
ctggggccctgggtgaagtgctccgtcgcccttgcctccaggttgaaatcacaaagattagacacctttttagataggtgttcttcagcaccactgacaa

SEQ ID NO: 300084 - DNA, 75 bp, Homo sapiens
tcacgcacgggatccagagcgccgcgcacttcgtcatgttcttcgcgccctgggtttggaaatcccttgtctcca

SEQ ID NO: 300085 - DNA, 50 bp, Homo sapiens
atcaagttcaaggagtctcttgttaatgaaccgttttgattaaaagtaac

SEQ ID NO: 300086 - DNA, 100 bp, Homo sapiens
gtgaaacatgtgaacactcaagtgaagcaaaagccttccatgattacgacccagatgatgtggtaccagttggccaaagaagagcctggtgttggtgcat

SEQ ID NO: 300087 - DNA, 76 bp, Homo sapiens
aaaaagtcgatctggagcttttcccctccccggacccttcgcaggtgttacagtcgggtgaaagaacatggtgttg

SEQ ID NO: 300088 - DNA, 73 bp, Homo sapiens
cacgtttgaagccttcttcctccatgaggatgaatcttctgccctgcaggacctggagccgcagcagctgctg

SEQ ID NO: 300089 - DNA, 101 bp, Homo sapiens
atccgtttgttcaggaaccaccagtgacagaagcctgcattgattctaatgaagatggggacttgagtaaatctaccgtgttgagaaactacaaagaagcc

SEQ ID NO: 300090 - DNA, 100 bp, Homo sapiens
tttgaagttgatgtggaaattgccaaacaatctgtgactattaagaccatgttggaaggaatcccagtcagaagttccagcctgccactgttctctgatg

SEQ ID NO: 300091 - DNA, 83 bp, Homo sapiens
ctcacgaacctcaccccaagatcttcacattctggatctcagctgctcttgaaggtcagtttacgttgcgagacatgtatgag

SEQ ID NO: 300092 - DNA, 100 bp, Homo sapiens
agtgagcaccttttggcccaatgaatatcaggtggtttgtgatgaaaatggttccaagggctatggatttgtacactttgagacgcaggaagcagctgaa

SEQ ID NO: 300093 - DNA, 90 bp, Homo sapiens
caagttcattggatcaaacatgtcacaagagtcggacaatttgttgcatattctaaggacccagacataggcttggtggcccgtctcttg

SEQ ID NO: 300094 - DNA, 100 bp, Homo sapiens
ctctgcctctcaggttcaagcaattctcctgcctcagcctcccgactagctgggattacaggacggaaagacggcagaagatcttgctagatcggaacag

SEQ ID NO: 300095 - DNA, 80 bp, Homo sapiens
cactccatctggaaagttacgactctactgcaaaggagctgagtccaaaactacttacctggaagaccttccaccacccc

SEQ ID NO: 300096 - DNA, 75 bp, Homo sapiens
tcgaatgcgccaagaggagctcatgaggcagacaaaacctgctacaaccccctcttcaactacgaggacatgcag

SEQ ID NO: 300097 - DNA, 50 bp, Homo sapiens
ccagagctgaggactgcctgtttgcagaccatgtctgcaaaggagaagtc

SEQ ID NO: 300098 - DNA, 75 bp, Homo sapiens
gttacagtcatagcagtacccgagatggaagacgcgacaggagttcatgatcaagtgttgcccacaccaaatgct

SEQ ID NO: 300099 - DNA, 75 bp, Homo sapiens
cgctcaccggctgggtgggttcgagcaactaccgggaacttgatgggaaacctgcttctcctactccggttattg

SEQ ID NO: 300100 - DNA, 78 bp, Homo sapiens
gtatatattgcatcttcctctggctctacagcggtttccaatacttatctacaggaatcgccatgaccccagctctga

SEQ ID NO: 300101 - DNA, 83 bp, Homo sapiens
caatatctgtcttcggtggactccttcggcagtccacccaccgccgccgcctcccaggctggagtgcaatggcgtgatctcag

SEQ ID NO: 300102 - DNA, 101 bp, Homo sapiens
tgaaccaccaaaagtccattatgaaactgcagatataatttctacagtagaatttaatcattctggagaattactagcaacaggagataaaggtggtagag

SEQ ID NO: 300103 - DNA, 100 bp, Homo sapiens
gcctagcagtcgggaccgtactgaggcctagtaaatgacaaagactcaaaagattctatgacagaaggagaaaatcttgaagaggatgaagaagaagaag

SEQ ID NO: 300104 - DNA, 75 bp, Homo sapiens
aatggttctggcaaactgctcaagactgtttgtctgtgggatataaacgcaggaccaaaagaaggcaaaattgtg

SEQ ID NO: 300105 - DNA, 100 bp, Homo sapiens
acaggattccacagtgtcctctggaaaatggaaagaccacagcaagattctttcattcgtctcctcctagcctgggggaccaggctcgaactgaccctgg

SEQ ID NO: 300106 - DNA, 110 bp, Homo sapiens
ttctggcactggcacttgtcctcctgtttctatagaaactgggttggaagtcagagctgcacaaagggaaaggttttacctagccacacttgtggaaatcctggagaaat

SEQ ID NO: 300107 - DNA, 100 bp, Homo sapiens
tccgtagtgacgctggtttggaatcagacaccgcaatgaaaaaaggggagacactgcgaaagcaaaccgaggaggtcacactcagccggtaccagaggga

SEQ ID NO: 300108 - DNA, 98 bp, Homo sapiens
tgccgccgacgccgcgcacgagttcaccgtgtaccgcatgcagcagtacgacctgcagggccagccctacggcacttccgttccggcgcccctccggt

SEQ ID NO: 300109 - DNA, 100 bp, Homo sapiens
ggaacctcagaacatgggtccgtggtcgtttgtttctccaaggtttgaaaagcagctggcctgcaaggagccctctggcacaaatggaagaagaaagaag

SEQ ID NO: 300110 - DNA, 140 bp, Homo sapiens
ctttgcacctcatgaagacatatactgtgaacacactacagaccctcacaagtcagttactgaaaagggcttctccagggaaagtgaccgaggcagtgaaagaggccattgacgcagggtaccggcacttcgactgtgct

SEQ ID NO: 300111 - DNA, 83 bp, Homo sapiens
gctgggtaatgaggatttgactgtgaagagaggacatgtactcccaggattccatagatctccttgctaactcaggactacag

SEQ ID NO: 300112 - DNA, 51 bp, Homo sapiens
ggaagatggcgcctgttgtgacagggtacttgaagaagcagaagctcaaca

SEQ ID NO: 300113 - DNA, 50 bp, Homo sapiens
ctcacctctcaccgcgcatgtttggagggaaagacattcccggtcaggca

SEQ ID NO: 300114 - DNA, 100 bp, Homo sapiens
gtggtgaagaccgtggagatgcgggatggagaggtgatgtggaaacagctgtaaaatttgcaactcagcttattgacctgggagcagacattagtttgcg

SEQ ID NO: 300115 - DNA, 82 bp, Homo sapiens
cgcagaggaaaattcaggcaacgcctcgcgttgagaatgtgatcaatgggcaggactacgaagtgatgatgcagattgactg

SEQ ID NO: 300116 - DNA, 98 bp, Homo sapiens
cggcgggaaccgtgtccagccagggtcctgggccgcgacctggttctcccggagtctacaggcatttgcacgccaaaggcaaagaagaaaaaatgtcc

SEQ ID NO: 300117 - DNA, 82 bp, Homo sapiens
cagtactcgggcaagaccaccttcgtcaacgtgatcgcggtgaaatgacaatggatgctctgttggctcgattgaaacttct

SEQ ID NO: 300118 - DNA, 90 bp, Homo sapiens
cagctggacaagaagattatgacagattacgccccctatcctatccgcaaacagcgcatattaaatttcctattgactacccctattcac

SEQ ID NO: 300119 - DNA, 90 bp, Homo sapiens
ctggggccgccgccgcgggccggagccgagcagccgtcggcagggtgttcaaagctgaaacaggagagaaacttctagaaatcaaggctc

SEQ ID NO: 300120 - DNA, 100 bp, Homo sapiens
gatgatagctttagttgctcttttggttgaacagtctcgatcagaaaggagaaaaaccagaggctgatagaaatccgcctgtgctatatcacaatagccg

SEQ ID NO: 300121 - DNA, 83 bp, Homo sapiens
tgtccccgctggcgggcttccctgtcgccgttcgctgcgctgccgggattttttatcaagcagaaatgcatcgaacaacgaga

SEQ ID NO: 300122 - DNA, 75 bp, Homo sapiens
gtcgagaacggtgcttctatggcaggatatgtgctgaggaatgtaaacaagtttgctgggccttgcgagacttca

SEQ ID NO: 300123 - DNA, 73 bp, Homo sapiens
tctgggctctaggaaacattgcaggtggtctgagctcggcctatgggggcctcacaagccccggcctcagcta

SEQ ID NO: 300124 - DNA, 75 bp, Homo sapiens
ggtctcactgacttcaagaatgaagccgcagaccctcgtgggagatcttgtgcgaaaactcaaagaagataaagc

SEQ ID NO: 300125 - DNA, 101 bp, Homo sapiens
aggaggagacaacttactaccaaacagcacttcctggcaatgatagatacatcagtgtgggaagccaagcagatacaatgattcgcctttgccagtctcat

SEQ ID NO: 300126 - DNA, 101 bp, Homo sapiens
ctctgtggtattgttggaggaatcttttcaacaacagatgaccaggataaaaaggtggaaactctcatggtaccatcaaaaaggcaagaagcattgcccct

SEQ ID NO: 300127 - DNA, 83 bp, Homo sapiens
ctcctccgagggaggggggttgtgaccccagtcaagtatatgaaggacgtctcaccgtatttcaagaactctactggtgggac

SEQ ID NO: 300128 - DNA, 82 bp, Homo sapiens
tggcggccgaggtagaggcagtggcgcttgagttggtcgggggcagcggcagatcttatgccttcattcatccggcatggtc

SEQ ID NO: 300129 - DNA, 82 bp, Homo sapiens
ctgcgcccttcggccgcctacttcggggcgtgatggtgggcatgggtcagaaggattcctatgtgggcgacgaggcccagag

SEQ ID NO: 300130 - DNA, 100 bp, Homo sapiens
tgaaaaagctgtttctggaatcacccctagatctttcttgaagacttgaattagattacagcgatggggacacagaaggaattgaacaacacatgtgaac

SEQ ID NO: 300131 - DNA, 90 bp, Homo sapiens
cctctgggcggcctgcgggggcggcgcagttgcgaaactgacatacagaaactgctgtaaaagaagaagttgtgggtatttttttttttt

SEQ ID NO: 300132 - DNA, 51 bp, Homo sapiens
ccagcccggcccggcagcgacatggaaggaaacctgtaggaagtgtcaggg

SEQ ID NO: 300133 - DNA, 82 bp, Homo sapiens
gcccgggctacgctcctccatcacgtggttatggaaacaaaggacatgctttacatcgtcactgaatttgctaaaaatggag

SEQ ID NO: 300134 - DNA, 100 bp, Homo sapiens
agaaggtctctggagacatcttcagcagcgagacggtcatctgttccagccgggccactgtgatgctttatgatgatggcaacaagcgatggctccctgc

SEQ ID NO: 300135 - DNA, 100 bp, Homo sapiens
caccaaaaatgtaaagaggaaaaatgcacttatgctgataaatatacccaaacaccctggagacgaattcctgtcagataccaggcccaggttccatgat

SEQ ID NO: 300136 - DNA, 98 bp, Homo sapiens
cctcctccacctccggcttttgggggatcactgtcctctctcggcagcagtgtaaatgagcaaagatggatcaggaaggtgggggagatgggcagaag

SEQ ID NO: 300137 - DNA, 50 bp, Homo sapiens
tcaaggagaaggcagacctggataacgaaggaggcccaacttcattcaat

SEQ ID NO: 300138 - DNA, 98 bp, Homo sapiens
ggcgcttctgcatctgtgggccgagatttctcgaatgctggcagccaaaaccgttttggctatccgttatgatgcttttggtgaggattcaagttctg

SEQ ID NO: 300139 - DNA, 100 bp, Homo sapiens
gctttctgcgccatcctgcaccgccaccggcccgacctcatggttgtgagtcccggcccagcccctccacccccctgcccccccgatgcgaccatgggct

SEQ ID NO: 300140 - DNA, 98 bp, Homo sapiens
ctgacttcagcgtccgggcactcgtggacttgcagtacatcaaggcactccactgctggtgaggagaagcagtgacccagtgccaggcccacctgctg

SEQ ID NO: 300141 - DNA, 90 bp, Homo sapiens
gcggtttcaaacggcttagagcaggccgcttggttctgacccagctgagttcactgagacttttttgacggagagggacaaacaatccaa

SEQ ID NO: 300142 - DNA, 87 bp, Homo sapiens
agcctaaagattagactgtaagaaaagaaaatagaagccatgtttcgaagacctgtattacaggtatgtacaagctgtgaggacaac

SEQ ID NO: 300143 - DNA, 100 bp, Homo sapiens
aagctggtctgttctaactgagcacttttccagccattaactccaggctctcgagaatttgaagatgttgtaaatattctccattcttcttaccttgaac

SEQ ID NO: 300144 - DNA, 90 bp, Homo sapiens
gtaaatgttgagcctttttggcctggcttgtttgcaaagcctaccttatgttcagtattttggaggtgtctctgctctaagtaaacaaca

SEQ ID NO: 300145 - DNA, 50 bp, Homo sapiens
tcagcaagatggctttgattactttacagctgtgaagagggataccaagg

SEQ ID NO: 300146 - DNA, 50 bp, Homo sapiens
ccctaaggcagccatcaaaaggacccaagaagcttcgcttccacccaaag

SEQ ID NO: 300147 - DNA, 89 bp, Homo sapiens
cagacagatttgtcatgaagaaactcaatgatcgtgtcatgagaagcatggatcattttgatgacattggtcccagtgttgtaatggcc

SEQ ID NO: 300148 - DNA, 100 bp, Homo sapiens
agacgatctgcacttcgcattttggcattgacatttaattttagggtcctttatatagaagggagagtagaattttgaacagaaaatgctgaaaaaagga

SEQ ID NO: 300149 - DNA, 101 bp, Homo sapiens
acgcagtcagctgcgtgattcccgtgattgcgttacaagctttgtctccttcgacttggagtctttgtccaggacgaaactgccagaggcatgcagcattg

SEQ ID NO: 300150 - DNA, 73 bp, Homo sapiens
cgacgttgaggccgcgttgggcggttcagactcagggtgcatatcgcacggatgactgccatccctgggtttt

SEQ ID NO: 300151 - DNA, 75 bp, Homo sapiens
ggaacccggactccggcgtagcgatggctgagagctagcaaggaaaactcaggaccatgatggctcagtttccca

SEQ ID NO: 300152 - DNA, 98 bp, Homo sapiens
tgtagagctggcctaccaggaggcgatgatgaacatggcgaggctcaacaggacaggtgctcaggaacagcccatggaagaatcatatgaagaggtgg

SEQ ID NO: 300153 - DNA, 75 bp, Homo sapiens
aaatgcgtggcatctatgccaaagtggaccggctagagcactggatgtgtgtgagaagtggggagaaatgccacc

SEQ ID NO: 300154 - DNA, 100 bp, Homo sapiens
aaggtatttggtcccggaacaaagcttatcattacagctgaacaaaaggttcatcctcagttttctccatgcccatgggaagctgtttacccggattggg

SEQ ID NO: 300155 - DNA, 75 bp, Homo sapiens
gtggataataaactcaagcagcgagtcatccaggatattcaccttgcgaaacgtttttatgacatggcagctgaa

SEQ ID NO: 300156 - DNA, 100 bp, Homo sapiens
aagcagcaggcgccaagtgatgaagccacagacccctttgcttctgtttttgggaatgaatcatttggaggtggatttgctgacttcagcacattgtcaa

SEQ ID NO: 300157 - DNA, 96 bp, Homo sapiens
tttccttgcagtcgcctgctgctgtcgtcgggaggtggagccccctgagctgcccgctgatctgcagcactggatctcctacaacgaggccagcag

SEQ ID NO: 300158 - DNA, 100 bp, Homo sapiens
cacctggaggatacctgctaccttgtgtgctgtatttatggagtttaaagattaatcatcccaaaacattgtttctgcttcggggaaatcatgaatgcag

SEQ ID NO: 300159 - DNA, 100 bp, Homo sapiens
tggactgtggtgagccaagtgaaaatagcgaggaacccaaactgtggggaatgcatgaaaggcgtgatcaccgggcccccaggcctggactccatctcag

SEQ ID NO: 300160 - DNA, 75 bp, Homo sapiens
gctgctgcaggaggccaaggacggcgttctggatctcaaagcgttgctctaggtcgtaaccagcctttgaaaaag

SEQ ID NO: 300161 - DNA, 100 bp, Homo sapiens
ctaccccacggacagcatcctggaggaccagtcagaccagcgcgtcatcatcaaggtgagagtggaggtatgcagagtgctgccagtcacctggtttccc

SEQ ID NO: 300162 - DNA, 100 bp, Homo sapiens
tactgaagatgcactgttaaaaaaccaaagacgggcgcaaagattgcttgaagaaatccatgccatgaagagagcagtcatgatggcctgcactccacac

SEQ ID NO: 300163 - DNA, 83 bp, Homo sapiens
gaggagggcgactgtatgatcgtggatgtcccggatgctgcggacctcctgccccccgaggtctgcagtctcctgaacccagc

SEQ ID NO: 300164 - DNA, 101 bp, Homo sapiens
caggagaccaagctcaaactaatggcacgctatgggcggctggcggaccctgctgtcactgactttccagagcctcagcttaagggtatagttaccaagct

SEQ ID NO: 300165 - DNA, 100 bp, Homo sapiens
ctccaggttcacctcctcctcctccagactctaaaatagagctcaagcttgagaagagagaaccactaaagggcagagcaaagactccagtaacactcaa

SEQ ID NO: 300166 - DNA, 96 bp, Homo sapiens
tgcagaagctaacggagctgcagcgggacctggtgggcatagagaacctcattgctcctggcagggcatcacgtggggcaaggtggtgtccctgta

SEQ ID NO: 300167 - DNA, 83 bp, Homo sapiens
accctggagcctcagttggaagcagccgatccagcctgcggagcctgtggggcaggcctgccgaggaggaactgaagacgaag

SEQ ID NO: 300168 - DNA, 97 bp, Homo sapiens
tttgggaggagtatgccaaccagcatggccctggacaggaacaagtgtcattcaaggatgtatgtgtggacttcactcaggaagagtggtatctgct

SEQ ID NO: 300169 - DNA, 100 bp, Homo sapiens
cactacagccagcctcctggactatgacactgtggctggggcagacaagtttggcaacatatgtgtgatttcagaagaaagtggtagcttcctttccaag

SEQ ID NO: 300170 - DNA, 75 bp, Homo sapiens
agccaccatgagcaccaagcagatcacttgcagacgcaaacatgcagatctttgtgaagaccctcactggcaaaa

SEQ ID NO: 300171 - DNA, 76 bp, Homo sapiens
ctgggcttggcttccggctccccccatctggctggaacacacatcagtcacgtgctacagctcgagagggcagagc

SEQ ID NO: 300172 - DNA, 50 bp, Homo sapiens
tacaacctcgaggagctctaccagatctgggacatgagcgatgatgagac

SEQ ID NO: 300173 - DNA, 101 bp, Homo sapiens
ccaccggagaattcctggggcgcaccgccaagagctgggcaggtaattgctgccatggaaacacaactgtctaatgggccaacttgcaataacacagccaa

SEQ ID NO: 300174 - DNA, 78 bp, Homo sapiens
agcgaggcagctctgagccgcgcggattttttatcaagcagaaatgcatcgaacaacgagaatcaagatcactgagct

SEQ ID NO: 300175 - DNA, 100 bp, Homo sapiens
ctagagggtgaagctggcggagcaggaggatgggcggtacgaggaacagcaaattcaggaaaaagtggcgacctttcgactcatgttgctggagaaggat

SEQ ID NO: 300176 - DNA, 83 bp, Homo sapiens
gaaaaccctgctgatgtcagtgttatatcctccaggaatactggccagactgctgtgccctaatccgccggtgcctggccccc

SEQ ID NO: 300177 - DNA, 75 bp, Homo sapiens
ttaaaagatgattctattgtggatgtacaaaaattccaacagaatgggtttcctgaaacggatttgcaggaattc

SEQ ID NO: 300178 - DNA, 75 bp, Homo sapiens
gatccccctcatgctgcactcccaggacccctgctccaatgcagcccaagttacccgcctgctctatgggttcct

SEQ ID NO: 300179 - DNA, 100 bp, Homo sapiens
tctcatttttagttaatcacgatttctctcctcttgagaattatatccagatcgagagacagaagattctgaaagggttcaatgaaatgagagtcatctt

SEQ ID NO: 300180 - DNA, 75 bp, Homo sapiens
gacggcataaaagggcagaaccatagcagggtgcgtgggatcatgaaacctggtctcaacgccatcctgggaccc

SEQ ID NO: 300181 - DNA, 75 bp, Homo sapiens
cccgggtccccgcgttcacagccccagcgcaggacctatatccagactttgcctgacactgcagggtccaagaga

SEQ ID NO: 300182 - DNA, 82 bp, Homo sapiens
agaagtgcctttcacctcccaccatgaacctgaggcctcccaagtcatgtggaaatgttatcaatactctggctgaccatca

SEQ ID NO: 300183 - DNA, 75 bp, Homo sapiens
tcttcccgggtcccgagcactctgtgccggaggttacggcctccgctgccacagggccatcatcaccatctgccg

SEQ ID NO: 300184 - DNA, 94 bp, Homo sapiens
gagaggatctggtgtaccaggcgaagctggccgagcaggctgagcgatacgacgacctcctgccccccgaggtctgcagtctcctgaacccagc

SEQ ID NO: 300185 - DNA, 75 bp, Homo sapiens
tgactgagtcctccatgaagaattaagcctgatcaagatgacaacctcccaaaagcaccgagacttcgtggcaga

SEQ ID NO: 300186 - DNA, 75 bp, Homo sapiens
cagcaagcggggcgctgtgtccccaagctccccgtcctcgggtgaatgaaaactttgccattgatttgatagcag

SEQ ID NO: 300187 - DNA, 100 bp, Homo sapiens
agaaactcaaggagcggaaagactagatgccgatccaaaaggcccagaccgagccataattccagaaatggagtggacgagccaggccctgctgacagtg

SEQ ID NO: 300188 - DNA, 100 bp, Homo sapiens
tctcttatactgaccttgataatctcttcaattctgatgaagatgaactaacagcagactgccagattcacttacagccccagctaattccaccaaacat

SEQ ID NO: 300189 - DNA, 80 bp, Homo sapiens
cgcctaggtctcctacgtctgcccctgcccggctcccggcggccccagctgtcaccgaatgacatctctgaaaaggagca

SEQ ID NO: 300190 - DNA, 101 bp, Homo sapiens
tgcctcattcctgaagcaacacaaggaggcatttcctgcagatcaccctgtgcgtgtgcgagctgtatggctgctggatgaccttcctcccagagtggctc

SEQ ID NO: 300191 - DNA, 74 bp, Homo sapiens
ctgaggatgagctggaggaggggattcatgatgttgctatcaaaagttgagaaattgtcagaagaaatcatgga

SEQ ID NO: 300192 - DNA, 100 bp, Homo sapiens
ctggtcttgaatcctgaactcttgagctcaagtgattctccctcctcagcctcctaagctgggattatagaacctgtctgagaaactctctgaacaagaa

SEQ ID NO: 300193 - DNA, 48 bp, Homo sapiens
ggctccaagacctcatcaacaattaagtccaaggaacaccacccctta

SEQ ID NO: 300194 - DNA, 100 bp, Homo sapiens
gctcgcgctcgcgctcgcgctggtggcggtcgcctgggtccgcgccgagcattccatattggaagaagagatttctacacatgaaaaaaatgcctttgtt

SEQ ID NO: 300195 - DNA, 100 bp, Homo sapiens
agatgaggtgatggcaacggccaacttcggcaagatccagatcgggatttacgtggagatcaagcgcagcgatgataacggcaaaagcttctatcatttt

SEQ ID NO: 300196 - DNA, 142 bp, Homo sapiens
tgaaattttgcatttagtgccaaataaagaaacttttagactcaccctaagagctgtcaaattatgggcaaaacgtcagatgtaccaacagtaccagcaacaggccggctatggtgcacagcagccgcaggctccacctcag

SEQ ID NO: 300197 - DNA, 98 bp, Homo sapiens
tttcctgcctgcttctagcaagagcgattggttacatgggaacaagtgcctttgtccgaaaaatctatactaatgtgaaaattgactagagacccaag

SEQ ID NO: 300198 - DNA, 100 bp, Homo sapiens
ctcatctccactcagcgggcccagatgcctttggtgcttcatgaagaatatttccagatatctcacagacattaagcctttgcctcccaacataaaagac

SEQ ID NO: 300199 - DNA, 100 bp, Homo sapiens
gtgggacagcaggacctctccaactcccggggattttcctaagggtcttgtagccagagataacactgtttgcctgagaatacagatcaacccacagaac

SEQ ID NO: 300200 - DNA, 75 bp, Homo sapiens
aggatgacgacgatgtggtcattggaaaggtgttcatgcagccaccttttgtggtgacattggatgaggtagagc

SEQ ID NO: 300201 - DNA, 98 bp, Homo sapiens
tgcaagttctctccaggtgcaattgaagcctctcagcagagcagcccgacggccatggaggctgaagagacgatggaatgccttcaggagttccctga

SEQ ID NO: 300202 - DNA, 103 bp, Homo sapiens
aacgagctctttcagcccaccgtcagcgggatcatccagcacataggtgctggagaatctggtaaaagcaccattgtgaagcagatgaggatcctgcatgtta

SEQ ID NO: 300203 - DNA, 51 bp, Homo sapiens
atgcttgaggctccttacaagaagattagcctgaggcctgctcagtcgttc

SEQ ID NO: 300204 - DNA, 98 bp, Homo sapiens
tctggggtacacctggacaggtgtatgatgtggaggaggtggatgtgaaagatcctaactatgatgatgaccaggcatgtgggcacattccatgacag

SEQ ID NO: 300205 - DNA, 75 bp, Homo sapiens
cctgaagccagtgggctggggactcacggccgggacactcagggcaggttatcaatactctggctgaccatcatc

SEQ ID NO: 300206 - DNA, 118 bp, Homo sapiens
gcccttcgtactgggacgttggggagggggctgtgccgggcggagagaactcagcgaggattctgagataagctgtcattggaaggaatagtggtacaaagagctgaatgccgaccag

SEQ ID NO: 300207 - DNA, 99 bp, Homo sapiens
aagagacatgagatgattgccaaacccccagggtgctgctggtcctcctgggccacctggtgctgctggtactcctggtctgcaaggaatgcctggaga

SEQ ID NO: 300208 - DNA, 75 bp, Homo sapiens
aaatatcaggagttaatggaacacgagtgggaatagctttgcgaaaaatgggcgcaatggccaagccagattgta

SEQ ID NO: 300209 - DNA, 100 bp, Homo sapiens
atatcagagatattacagtttacaggctgactactggaagtatgtccgtggttcagaccctgtattaaagcttttggacgacaatgggaacattgctgaa

SEQ ID NO: 300210 - DNA, 53 bp, Homo sapiens
agttcgacgtcttcaccaggctctttcaggctcgccagagctaaagacagcgg

SEQ ID NO: 300211 - DNA, 100 bp, Homo sapiens
tcttctatttcttgtggatattatggctaataacacaacaagtttagggagtccatggccagaaaacttttgggactacacttgctgctttgaaggatga

SEQ ID NO: 300212 - DNA, 74 bp, Homo sapiens
tttttggacctgaaacagaaattctggaacacctatatgagaagaaatgttcccatgaagcctccagatgaagc

SEQ ID NO: 300213 - DNA, 98 bp, Homo sapiens
cccgccactacagagccctcactccagccccagctgcagtggccctcatggagcacagcaactgctcgtcggagcccggcttctgggcacaccctcct

SEQ ID NO: 300214 - DNA, 100 bp, Homo sapiens
tcagctttttgtgctgccagcaagaaatgatcagtagcaccagtgtttatggtgtatctacatcagcaatcaaaatggcatcaaccagacttccttcccc

SEQ ID NO: 300215 - DNA, 121 bp, Homo sapiens
ttttaaatcaagatttaacattccaacacataaaaattatttatccaacagctcctcccagcttgtacctccttttaaacctcaagtaacatctgagacagatactagatattttgatgaa

SEQ ID NO: 300216 - DNA, 83 bp, Homo sapiens
ggacaaagagcccctcatcgagctcttcgtcaaggtcagcccaaggccaaccccactgtcactctgttcccgccctcctctga

SEQ ID NO: 300217 - DNA, 115 bp, Homo sapiens
tgagtatgtgacggaacttcccgccttcaaggaccgcgtgcctgagtaccctgcattgtgacgatccaccaggagcccttcgtgtacgtcaagcccacgctgagtgatgggacat

SEQ ID NO: 300218 - DNA, 87 bp, Homo sapiens
cgggtgtgtgacaatgacaccgtgcctagcgtcagttccatcaacagggggcaggaacaaaggaccggaccctgattcgcatcatgg

SEQ ID NO: 300219 - DNA, 97 bp, Homo sapiens
agctggaggaggagccgccgccgccagagagagttcaagtggatggccttgaggacttgaaaagctgagatatgatgattttgaagtcatttcacat

SEQ ID NO: 300220 - DNA, 76 bp, Homo sapiens
accaacgagatcttccgccactacgagtattgttgcagcatctggcagtgagactgaggatgaggacagcatggac

SEQ ID NO: 300221 - DNA, 82 bp, Homo sapiens
cggagtttgagccccggaggcagagcggctgccatgcacaagcagcgctgccctgtgctggaggaccagttggtggatctgg

SEQ ID NO: 300222 - DNA, 75 bp, Homo sapiens
gaaagaagtgggaaggatctgcgcggtcctggaatcaagatgtgagaccaagaaattatttctgaagaaagaaat

SEQ ID NO: 300223 - DNA, 83 bp, Homo sapiens
tttgaattggattatcccaaaactcagtgttcctgaaagtacacctttcacagcagtcttaaagtttgcagcagaagaagtaa

SEQ ID NO: 300224 - DNA, 100 bp, Homo sapiens
aaaagcctggcagaccttcatcattgacttattattgcactgtccaagcaagcctccccatggccacccatggaccagtcggcattcacttcctcccttc

SEQ ID NO: 300225 - DNA, 80 bp, Homo sapiens
gaagaaaccaagtgtccgggattcagacctctctgcggccccaagtgttcgtgtctccaaaaaaagttggtgatgacatt

SEQ ID NO: 300226 - DNA, 138 bp, Homo sapiens
agcatctgaccctaaaccaaacttcacagactgtaataggcatacacaagtgtgcattaatgggcatgattatgatatgagggtggatgatttccttcgtcgcacacaagctgttgtcagtggccggagaagtagacc

SEQ ID NO: 300227 - DNA, 98 bp, Homo sapiens
tcaggatgggaaaccacgcaggcaaacgagaattaaatgccgagaaggccagtacggttggtttgttggaccttgaactcaatcggctgacgaaagcg

SEQ ID NO: 300228 - DNA, 50 bp, Homo sapiens
tatttagaggacattatcatggtaagagatgctaaaaaccttgtacctat

SEQ ID NO: 300229 - DNA, 125 bp, Homo sapiens
aaaagatccaaaaaatgagacttctagcaaagattatttgccttatgttatgggctatttgtgtagcagaaggatttttttcccaggaagccatcccgtcagaggggttcaagtgatgaaagttg

SEQ ID NO: 300230 - DNA, 98 bp, Homo sapiens
cgacaactgttaccactacggtgaccagcccagccaacagagacatggcatccatcgtgtctgagatcatgatgtatgtgctcattgtggtgttgacc

SEQ ID NO: 300231 - DNA, 80 bp, Homo sapiens
aggcgccgcacggagttgcgtcccggggacttggggccgcagggaggagctggtgagcaggctgctgcacctgcacttca

SEQ ID NO: 300232 - DNA, 75 bp, Homo sapiens
caccatgccgctcctaagcctgcacagccgcggcggcagcagcagtgagagaagatgctcatgaagcagcaggac

SEQ ID NO: 300233 - DNA, 100 bp, Homo sapiens
tcgtcactgaggttgcagttggcgtgaagaaccaagatccaattccctggagaatttttaacccctcccactccacccatcactttcctggctaacatca

SEQ ID NO: 300234 - DNA, 78 bp, Homo sapiens
ggacgcggaggccgcctggggtagcggcggcgggagtcctggcgctctgcagtgtggacgaatgtggaacctcgctct

SEQ ID NO: 300235 - DNA, 82 bp, Homo sapiens
acgagaacaagatgtacctgactcccagtgagaaacatatgctcctcaagatctcacgccacctgggcaagatgtatagtga

SEQ ID NO: 300236 - DNA, 82 bp, Homo sapiens
gacagtaagcgtctgattcttttccgtacaaaaccatggcaatgtctgagtgtcagacaatgcagatcttcgtgaagactct

SEQ ID NO: 300237 - DNA, 75 bp, Homo sapiens
ggcgtgcggcggcagacggagcctgggctcccagcggcaagtgggtaattccagaattgattggccataccattg

SEQ ID NO: 300238 - DNA, 121 bp, Homo sapiens
ccggccccggacggagcgccggccgcaccaccgccctctggccgttgcctcaccggaggctgtggccaggccagctgggctcggggagcgccagcctgagaggagcgcgtgagcgtcgcgg

SEQ ID NO: 300239 - DNA, 75 bp, Homo sapiens
cgcagcatgagcgaaagctacacgctggagtctgaagatgatgagaaactgaaaaagaggaaggagcgatttggg

SEQ ID NO: 300240 - DNA, 74 bp, Homo sapiens
agaaatcacattggaccctcctcccaactgtaggtatacaaaactaggatatgctggaaatacagaaccacagt

SEQ ID NO: 300241 - DNA, 100 bp, Homo sapiens
ttgggcctcgcgccggctatggccgtgccctggggctgagccctcagaccatggtgaatccgggcagcagctcgcagccgcccccggtgacggccggctc

SEQ ID NO: 300242 - DNA, 74 bp, Homo sapiens
attgccaagacaagagatgctggctgtaggccatacatggcagctgctgatactttggctgtgaggcaaaaaag

SEQ ID NO: 300243 - DNA, 75 bp, Homo sapiens
catttcattttcactgcagcctagagcgtaagctggcgcccatgcggctctacacgctctccaagcgccactttg

SEQ ID NO: 300244 - DNA, 100 bp, Homo sapiens
aattaaactggctgattttggccttgccagagcttttggaatacctatcagagtatatacacatgaggtcacagggattatggacccagaacagatgctg

SEQ ID NO: 300245 - DNA, 51 bp, Homo sapiens
ctcagctccgcggaagttgcggccatcgaggagggcacgctggaggagatc

SEQ ID NO: 300246 - DNA, 88 bp, Homo sapiens
ccgacggactgtgtccggcgatgggcacgggctcttgttcagcttctggaatttctgagcagccctcgtcagtacaagatggaccccg

SEQ ID NO: 300247 - DNA, 100 bp, Homo sapiens
tcaccagctcttcagatcaatatgcactgccagtgaaagatgtagaagataaacctgaacaacaaaccagaacaagagagactgacaaatcacccaccag

SEQ ID NO: 300248 - DNA, 124 bp, Homo sapiens
gtgcgacgccgagggcgggggagagcgcgccgctgctcccggaccgggccgcgcacgccgcctcagctcagcgacatgtcctcacctacatggaggatgcagtgtgccagctgctagaaaacag

SEQ ID NO: 300249 - DNA, 100 bp, Homo sapiens
ctgggggctgcggcctagaggtccgggcttggagttcgcctcagacgcggtggagccgccggagtctgagaaggatccagttcactatcctagccttgca

SEQ ID NO: 300250 - DNA, 100 bp, Homo sapiens
aggacaccaacagtgtggtggagaaagcaatggatgaaatcaaatcccaagggactaaataggaatagtttgccaactccacagctgaggagaagctcag

SEQ ID NO: 300251 - DNA, 50 bp, Homo sapiens
caagagtttgttatatagcagaggtgttcctgctcatatgtttggcgtga

SEQ ID NO: 300252 - DNA, 130 bp, Homo sapiens
caagatcatgcgttttctcttgttcttaaccacctggatttccatctggatgttgctgtgatcagtctgaaatacaatttgctgctgcttccaggagaagtggagcaggatgtaagcaccagcattcctt

SEQ ID NO: 300253 - DNA, 98 bp, Homo sapiens
ttcggtcctggaggtggggccgggcctgcgtagtgaaactgcgtaggaacctgggaagaagcttgccttgcgccatggactggcagccagacgagcag

SEQ ID NO: 300254 - DNA, 75 bp, Homo sapiens
agacaacaccctgatctggcatggacatgttgaatgcctttgagaacttgatgcataaaatttgcatgactcctc

SEQ ID NO: 300255 - DNA, 110 bp, Homo sapiens
cctgtacagcatcaactacctgcactttggggagcctaagtcctggatgggcgggatccccgctgtgaacggccgcggggagcggctgctgctgcacattggcatcatcg

SEQ ID NO: 300256 - DNA, 75 bp, Homo sapiens
ttgtgcacaaaagtgttgtgcatttaatgatggtatcagttagcagagcaatcaagccctttgcagaacctggcc

SEQ ID NO: 300257 - DNA, 75 bp, Homo sapiens
gaaggatgacaccggagtttgacgaagaggtggtttttgagaatgtgaaaacctttgcatcttctgatagtctag

SEQ ID NO: 300258 - DNA, 88 bp, Homo sapiens
tagattctcttgaccatgtgacatctgatgctgtggaacttgcaaatcgaaggtgatactgtgcttgtccaccgagttcacagttatt

SEQ ID NO: 300259 - DNA, 75 bp, Homo sapiens
ttttgtaataaacagagtgacaggtggcgggacaggcttcattgggacagccctaacccagctgctgaatgccag

SEQ ID NO: 300260 - DNA, 98 bp, Homo sapiens
cggattttgcggggttcgtcgggcctgtggaagaagcgccgcgcacggacttcggcagaggttctgtcatatgttgaagaatccatacaccattaaga

SEQ ID NO: 300261 - DNA, 109 bp, Homo sapiens
aacatgtctacaggctaccaccttggttcgcccactgctgaacaccatccagaagacacagagagaaagaccactgcaggtcagaagagcaggtctcaggacagcaggg

SEQ ID NO: 300262 - DNA, 75 bp, Homo sapiens
cagagcttgacccaggcactaaaagtcagaaacatggccctggatgatgtcgtgatcctgaatgtggacaccaac

SEQ ID NO: 300263 - DNA, 51 bp, Homo sapiens
ctttagaccctccacctaattgcagagccagtcttggtgctctgtgttcac

SEQ ID NO: 300264 - DNA, 55 bp, Homo sapiens
agatctcatgtccatcatggaaatgcaggatcctggaggtgatgggatagactgg

SEQ ID NO: 300265 - DNA, 90 bp, Homo sapiens
cgctcatggaggtgtctgtgtctgaggcagaggaggtggacacggtggacgtctccggcgtgcccgcagaggtgctgtgcaacatcgagg

SEQ ID NO: 300266 - DNA, 75 bp, Homo sapiens
ggcatttcagtcactggtttgcagagtccagatgctgagatgaatcgtcacctgtgtgtttggctttttagacat

SEQ ID NO: 300267 - DNA, 89 bp, Homo sapiens
gtgagcggcgccccgcggcatggcagcctcagcttagaccatgctcagcctccaagcagccttgtcatcgacaaagaatctgaagttta

SEQ ID NO: 300268 - DNA, 50 bp, Homo sapiens
actggttccatcgtatggctcatgaaacaggaagattggaatctgcctgg

SEQ ID NO: 300269 - DNA, 88 bp, Homo sapiens
aaacgggagagagtcagaatcaactaggtcctgcggtagactggtgggcacttggagtttgcttgtttgaatttctaacaggaattcc

SEQ ID NO: 300270 - DNA, 75 bp, Homo sapiens
cacagaggaaggacagtggagtctggcatcttattgaattggagcgttattcagtatattaatgtcttattgata

SEQ ID NO: 300271 - DNA, 111 bp, Homo sapiens
gaattacctggaacttcatcatcatctacttcacaggaattgccatttgaacttagtgatttggcccgtgaccctccagcacaatgttctgcaggtccagttggggatgat

SEQ ID NO: 300272 - DNA, 87 bp, Homo sapiens
ggatgccatccactacatgacggagcaggcccccgccgccgtggtcgagattccttatctaaggaaagttttaaaagccatctccag

SEQ ID NO: 300273 - DNA, 101 bp, Homo sapiens
gaacagcgggaaggaatcggcgcttggagtccagacatctggaacacggtctccgtgaggccgggtgacgctccagaatgggagacaagccaatttgggag

SEQ ID NO: 300274 - DNA, 90 bp, Homo sapiens
ctggtgaccaagagggattcaaagggtcctgtcatgccagggagtcattcagtggaaagatttgtaatagaagagaatcttcactgcatc

SEQ ID NO: 300275 - DNA, 100 bp, Homo sapiens
tcatcattaaggacggaggcacggcacctctgtgggcatatattgcttgtgcctgtggccttttcatttaccagtctttggatgctattgatgggaaaca

SEQ ID NO: 300276 - DNA, 100 bp, Homo sapiens
cggaaaactcccaacttcctgatggagaacttaatgttctggatgatattttaactgaagtaccagaacaagatgatgaactgtataatccagagagtga

SEQ ID NO: 300277 - DNA, 100 bp, Homo sapiens
cccatcactccaaggagagaagtgtatgggtttcgacagaccatgatgaaattgagaatgtggccaaacaatttggtgcacaagttcatcgaagaagttc

SEQ ID NO: 300278 - DNA, 75 bp, Homo sapiens
agcctggataatgattgagccacctgtccagggagaagccggagacccagggccccctggactacctgcctactc

SEQ ID NO: 300279 - DNA, 75 bp, Homo sapiens
accagtccctgtgaagtgcagtggagcacaagcttcttgaaacctgctcctccaaagccagagcccaagcctaaa

SEQ ID NO: 300280 - DNA, 85 bp, Homo sapiens
gttaatgtttacggcgaagtctactcaacgtttccaagggggatatgagactttctactcggaatatcctgagtgttgcgtggat

SEQ ID NO: 300281 - DNA, 100 bp, Homo sapiens
gccgaaattcagatcgatttgtctcaatgaaggttgatttcatcagactaaaaagttacaggtcgtcactgcggacgtcttctttgccataaatgctcga

SEQ ID NO: 300282 - DNA, 100 bp, Homo sapiens
agagagccaaagagcaagtcaggcaggggaaatggaaggtgatgcagtcgaagccattgtggaggagtccgaaacttttattaaaggaaaggagagaaag

SEQ ID NO: 300283 - DNA, 86 bp, Homo sapiens
ctctgccccagcctgtcttctggcccctcctgaaagctgtcacccacaagtgggctggtgtgtctgaccaccaggaccaactcgtc

SEQ ID NO: 300284 - DNA, 100 bp, Homo sapiens
gtggactaccatttggttgcagcaaagaggaaatagttcagttctttcaaggtctggtttgcctggacagtgctcaacatggaatccatctttgaagagg

SEQ ID NO: 300285 - DNA, 100 bp, Homo sapiens
ttcacttctagacgacaaaatgcaaaaaaggaggccaaagactttgaagcacgtttttttgttaggtcaatagaacacttgaagcaaatatttaatgcac

SEQ ID NO: 300286 - DNA, 97 bp, Homo sapiens
ccctacgccgtggacttccagcgcagaataactgaagtgaagtgatggactccgatttggagagtagtaagacgtgaaaggaatacacttgtgttta

SEQ ID NO: 300287 - DNA, 75 bp, Homo sapiens
tgctaacctactatgagggtcgagcagagatagtcaaagaggttggtcaactggcagaaacccaacgcttcgaat

SEQ ID NO: 300288 - DNA, 113 bp, Homo sapiens
cggcgtgggcgcggagcgggcggccgccaccgagcgtgctgagcaaccgcagcctccgcggccgagagtgcagcgaagaacatggcggcccagagggaatggaccccgatggt

SEQ ID NO: 300289 - DNA, 72 bp, Homo sapiens
catggaaccctccatcttcaacactctgaagagggtatttgaagtataccatacaactgttttgaaaatcca

SEQ ID NO: 300290 - DNA, 49 bp, Homo sapiens
ctcaacatctctcagagacgaaaggttttaccaattcttgagattctgt

SEQ ID NO: 300291 - DNA, 75 bp, Homo sapiens
ataagagcatcaaccctgatgaagctgttgcttatggtgcagctgcccagtcaggaatacttgataggacaattt

SEQ ID NO: 300292 - DNA, 80 bp, Homo sapiens
cccgcttcgatcgcctcgcgccggctgctctttccgggtgatgcaggttctgaatgctgatgccattgttgtgaagctga

SEQ ID NO: 300293 - DNA, 83 bp, Homo sapiens
cgaggccccagcgttgggggactaccgggtcagggaagtcaaagatgcatccctgagttcttcctagcaggcaagcagccgtg

SEQ ID NO: 300294 - DNA, 100 bp, Homo sapiens
ccagaagggcttcaagactgccccagatcagttcattggcatctttgctcaaaatagacctgaggacataagcagctctatgaccaatagcacagctgcc

SEQ ID NO: 300295 - DNA, 75 bp, Homo sapiens
aagctgggaagtttgtctttgaaatcattccaggtatataatctgtctcagaatattcaagaagatgatcttcaa

SEQ ID NO: 300296 - DNA, 50 bp, Homo sapiens
gatgtgcggcgtccgctgtataaggaagaagattccctccttaatatctg

SEQ ID NO: 300297 - DNA, 83 bp, Homo sapiens
tggaggaagcactgaaagctctgtcagttccccaaaacgtgtcactcctacctgggcaagtaattaaactgcatgaagtccta

SEQ ID NO: 300298 - DNA, 82 bp, Homo sapiens
caattcccagctacctgattacttgttacccatttgtgcaggaaaaccagtccaataggaatactctgaagatagtaactcc

SEQ ID NO: 300299 - DNA, 112 bp, Homo sapiens
gctaatttgatggagaaggttcgaggcctacagaacctagcctatcagctggggctggatgagtgtctctaattaacagaagatggcaaagcccagccacagcagctatgtc

SEQ ID NO: 300300 - DNA, 75 bp, Homo sapiens
ttgggaactgcctcacctgaaaatgaattcaacataccattaggatcttaccggaaaaaagtaatcctcttggaa

SEQ ID NO: 300301 - DNA, 83 bp, Homo sapiens
gaataagcttcgacacctctcagttgtcaccctggctgctaaagtaaaggaactgtggctgcaccatctgtcttcatcttccc

SEQ ID NO: 300302 - DNA, 51 bp, Homo sapiens
agagagagctgcttcagcttcccagcagaacaagaggaaagtatggggaag

SEQ ID NO: 300303 - DNA, 98 bp, Homo sapiens
gttgcagcctcccctgctgcatcaggtgggcatgacggctcccgggacccggcggcacatctatgataccaagctgggaaccgacaagtgtgacaact

SEQ ID NO: 300304 - DNA, 100 bp, Homo sapiens
gccaaactgtcggcttcaaagagaaaaggcaacatcctgtcacaggccatgctctggcaaaaacagaaaggagccgaaaggcgaggccagctcttccaac

SEQ ID NO: 300305 - DNA, 75 bp, Homo sapiens
cggaccaatgagcagatgcaccagctggtggcagcatacaaagatgggaaatcctcattgacgattcaatttgtt

SEQ ID NO: 300306 - DNA, 100 bp, Homo sapiens
gcgaagtgaagctgtgggacacgcggttcttctccagcgccctggcctccctcaccttggacacctcgcttggcctcccgcgacgatgcccctcaacgtt

SEQ ID NO: 300307 - DNA, 100 bp, Homo sapiens
tcatataaacgtacacctactgaatggattcaagacttcaaaacccattttcttgttaagtgggcagaccaacatccacctcagcaaaaacttcttcctg

SEQ ID NO: 300308 - DNA, 100 bp, Homo sapiens
caaaagccaagaggaggacagttcgctacacagcaatgcatcgaggctactgtggagccgatatcaaggccctgtgcactgaagccgccctgattgcact

SEQ ID NO: 300309 - DNA, 80 bp, Homo sapiens
gaaagaccatcaagtttaccacatcaaggcatgccatgggttgcctctcataaatggccaaagctgtgacccttatgcaa

SEQ ID NO: 300310 - DNA, 100 bp, Homo sapiens
cagatgtatgatcgtgtgattgactttgatgagaacactgctctggatgatgcagaagaggagtcctttaggaagatcatggaagggaagtggttgctgt

SEQ ID NO: 300311 - DNA, 100 bp, Homo sapiens
ctcaagagtcataggattagatgatccaagtcaccaagaaattactgtctcaagtgatacgagttgatctctctaatgtattagatcttcatgcctttga

SEQ ID NO: 300312 - DNA, 73 bp, Homo sapiens
ggatactcttgttaccagaattccaaaggttctgcaaaagatacagatattgtggatgaagccatctattact

SEQ ID NO: 300313 - DNA, 83 bp, Homo sapiens
gctttccactcggctcctgtcgtccgttctctcaggctcccgttcagggttacacatcattttggaatgactgtatatcatct

SEQ ID NO: 300314 - DNA, 100 bp, Homo sapiens
gatggcagccagtcagtggtggagaaagtattaatgaagcttagaaaacctagaattacagctacaatttggtcctcaggaaaaattatttgcactggag

SEQ ID NO: 300315 - DNA, 82 bp, Homo sapiens
ctgggaactccgccatgtcatccacttcgcccaacctccagaagatgggtgtgaacctgacacgcagcaacaaggagacggt

SEQ ID NO: 300316 - DNA, 100 bp, Homo sapiens
ctgtgtgccccttctccacccagaggcatcgttggcttcacagtatgactgatgatcctccaacaacaaaaccacttactgctcgtaaattcatttggac

SEQ ID NO: 300317 - DNA, 100 bp, Homo sapiens
gtattcagagattttttagtctaaatgatgggcagtcatggtcccagaaacgtcactatcaagaaggtagcaatgaagtgatgaggatactgatctctag

SEQ ID NO: 300318 - DNA, 136 bp, Homo sapiens
aagggcggcggtggcggcggcggcagctgcagtgacatgtccagcatgaatcccgaataattcaagatggaaaaggtgatgtaaccattacaaatgatggtgctaccattctgaaacaaatgcaagtattacatcc

SEQ ID NO: 300319 - DNA, 96 bp, Homo sapiens
gagagagaggctcggtcccactgctccctgcaccgcgagagtcaagccctacccgtcgagaagctgtgaagagaagaacagccgagtacctcatgc

SEQ ID NO: 300320 - DNA, 49 bp, Homo sapiens
cacgaaggtcgacgtgggccagcagatcgttagacacggtggcagtctg

SEQ ID NO: 300321 - DNA, 50 bp, Homo sapiens
atccttgactgttactacagaaaaatgcaatgcgtgttttactatctaaa

SEQ ID NO: 300322 - DNA, 96 bp, Homo sapiens
caaaaatgcacaattctatctcttgggcaatcttcacggggctggctgctctgtgtctcttccaagcccagcctgttctaccagagaacttgccca

SEQ ID NO: 300323 - DNA, 89 bp, Homo sapiens
cgcagccggcgctggggacgcgcgcggccgagactctggcctgcagtcgccgccgccgccgccagtgctcatcttcaaactctatcagc

SEQ ID NO: 300324 - DNA, 87 bp, Homo sapiens
acgcggcgttgccaccaggggccaattaagccttaccagcaggggcgacaacagcatcaggatattggtgctggaaaaggcaaatac

SEQ ID NO: 300325 - DNA, 89 bp, Homo sapiens
tgaaaagtgcctgcaatttgccatttatttgtaataagtttgaggtggtatcaacatcctacagaagaagaattaagaattcttgcagg

SEQ ID NO: 300326 - DNA, 83 bp, Homo sapiens
ccagcgtccgccgcgcctcggccaaggatgcctaaatcaaaggaacttgtttcttcaagctcttctggcagtgattctgacag

SEQ ID NO: 300327 - DNA, 90 bp, Homo sapiens
tttcattgagtgggctcggccaccccaaccttctggacagaactgtaccgctctctttttggccagctccaccctcccgacgaaggccac

SEQ ID NO: 300328 - DNA, 78 bp, Homo sapiens
agatcatagcagagtacgatactcaggtcaaagttctggcataaagcatgcttccattgcgagacctgcaagatgaca

SEQ ID NO: 300329 - DNA, 100 bp, Homo sapiens
ggagagggggcgctgagctgttgggactatagggtatgaccccatcatttccccagaggtctcggcctcctttggtgttcagcagctgcccctggaggag

SEQ ID NO: 300330 - DNA, 82 bp, Homo sapiens
tgtaatgatttattgatctttcaaacacagccttattcactactcaggtctttgcatctgtaatgaaggatattaaagaagg

SEQ ID NO: 300331 - DNA, 83 bp, Homo sapiens
tcaagattaaaagagcgaataaagtttatcacgccggggtgtggacactgccagcggctgcagccgacttggaatgacctggg

SEQ ID NO: 300332 - DNA, 100 bp, Homo sapiens
cgagccgacaccatgcgatccaaggcgagggcgaggaagctagccaaaaacaccattcgcttttcacccaagatgatttgatgtcttataaaactctgat

SEQ ID NO: 300333 - DNA, 100 bp, Homo sapiens
gttcaaacagcactgccaaatagcagaagaataccatgaggtcaaaaaggaaatcaccctgcttgagcaaaggaaggaaatgaggcaagttatcctttgg

SEQ ID NO: 300334 - DNA, 82 bp, Homo sapiens
agcgactgagtccgcgatggagggcatgaaaatcaacatggacaagaatcggaggcgaaagccagcaagcgactccgtgagc

SEQ ID NO: 300335 - DNA, 99 bp, Homo sapiens
acgctgacatcaatgtcacaaaagcggatgttgaaaaggtagtgtgccagtatttgaaaaatcccaatgtatctgattcactgctgctgcagaatattt

SEQ ID NO: 300336 - DNA, 51 bp, Homo sapiens
ggtggaggaatacacttatttatgaagtgtccctggccagtgtccttccac

SEQ ID NO: 300337 - DNA, 100 bp, Homo sapiens
attaaaagcagcgaacctcgagaccaacgtggaggagctgtgggtggaagttgatgaagaggatgagtatgaatgtgtcagtgttctcaactcccacaca

SEQ ID NO: 300338 - DNA, 51 bp, Homo sapiens
agacccggctttaccttatatcagaacgctgccaagaagagagaccaggag

SEQ ID NO: 300339 - DNA, 88 bp, Homo sapiens
tccacgacgactggctgttgaccctgttcaggcctcggtgaagggaacagaaagaacagcttcaaaagatgaaagacttcgggtctga

SEQ ID NO: 300340 - DNA, 101 bp, Homo sapiens
catcaaagacagctttcacagtttgcgggactcagtcccatcactccaaggagagaaggtgatgatgaacagtctacacagatggctgcaagttgggaaga

SEQ ID NO: 300341 - DNA, 98 bp, Homo sapiens
taaaatccattgctgctaagtactccggttcccagcttctgcaaaagagcagttcagagccccagttgcagacgacttgtcctgccaccaccatgagt

SEQ ID NO: 300342 - DNA, 82 bp, Homo sapiens
ccgcagcacccctaccagtgggcgaagcccaagcccctgtcccctacgtcctacatgagggggacagccgcgccgctgctgc

SEQ ID NO: 300343 - DNA, 90 bp, Homo sapiens
gctgggtcgggaagacatccatggaagtgaagatgcaaatgttccaggacacagcattgttggttttgccatgtactattttacctatga

SEQ ID NO: 300344 - DNA, 74 bp, Homo sapiens
tttctgggtggcaagaacttgaaactgcatttcttgagcataaagaacaggtgctaagtgtggtggctcacacc

SEQ ID NO: 300345 - DNA, 96 bp, Homo sapiens
agcatgtgtcttccccagctctgcagccacatactatccgtttgttcaggaaccaccagtgacagactattggaatcagatgcaaagatggtgttg

SEQ ID NO: 300346 - DNA, 90 bp, Homo sapiens
tggacagctccttcctcacgttctcaggcctccacgctgagtgtactatgaggggctgcaggacaagctggcacagatccgcgatgcccg

SEQ ID NO: 300347 - DNA, 83 bp, Homo sapiens
catcgcccggcccggccgcgcccgcggaaccagaccaggtgctgcagcagagaacatgttaggcagtttgctgtgcctcccag

SEQ ID NO: 300348 - DNA, 100 bp, Homo sapiens
gccatggccgccgccgatgccgagaggagaaggcagagcccccccaggctatgaatgccctgatgcggttgaaccagctgaagccagggctgcagtacaa

SEQ ID NO: 300349 - DNA, 82 bp, Homo sapiens
gactctttgggccgttatctcacggtggcccagttgaaatccttcccttcctctaccttggaagtgcctaccatgcatccaa

SEQ ID NO: 300350 - DNA, 83 bp, Homo sapiens
aaccacactaacgagattcaagattatttgcaacagctcacgggagcaagaacgcaccgaacaagatttgtgatgaaatggag

SEQ ID NO: 300351 - DNA, 125 bp, Homo sapiens
ggacgggaaggcgggagacgagaagcctgaaaagtcgcagcgagctggagccgccggagcctacttctgcttcctcctggccgctctgggtgtgacagctggtgcccatcgcttgtggagccaca

SEQ ID NO: 300352 - DNA, 100 bp, Homo sapiens
ccggtggctgtggcgacatgtcgacctgacgctctacacgttccatgccattgcagtgtcaactaggcctcagttacttttcagtttgcccaaattgagc

SEQ ID NO: 300353 - DNA, 82 bp, Homo sapiens
gccccttcccacaggctctctccgctcgattttgtcaccgttatgtgggaagcgaatccaaatctggccaacctatttgtgg

SEQ ID NO: 300354 - DNA, 80 bp, Homo sapiens
gcatttcgttagctttctggattatatcaatgactgcaagcacctattatgaggcagaagaggcctggaccttggcgcac

SEQ ID NO: 300355 - DNA, 50 bp, Homo sapiens
gagccgcagcacgagctcaaattccgaggctgatcagctgaccgaagaac

SEQ ID NO: 300356 - DNA, 76 bp, Homo sapiens
atatctgattgggacaacattcagacccatttccagtcatgacaagccagggctgagcaggaagaagaattcatta

SEQ ID NO: 300357 - DNA, 81 bp, Homo sapiens
cctgaacaacctgatggcccagctggaccccctttttgagcgatgtgttcagagcaacattgttttgttgacacaagcatt

SEQ ID NO: 300358 - DNA, 74 bp, Homo sapiens
ttaatcctcaatttaagcctgatctaacccctagaaacagaatcatgaggaaaacttgtgtcctgaatacccag

SEQ ID NO: 300359 - DNA, 75 bp, Homo sapiens
caaaaatgtgcatactcacagagttagagagagggatggtgctaatcttccagtaccaacaattgcagcaataga

SEQ ID NO: 300360 - DNA, 100 bp, Homo sapiens
gtcggagtctgggggttcgcgcccgccgacccgcgccctgctccctctcagcacctgggcggacgcgtacacagactttactaaaagagtacaaagaaag

SEQ ID NO: 300361 - DNA, 82 bp, Homo sapiens
gcaggaggtgccgcgcggctcggagccctggaagcagcagctcaccgaggacggggactcgaaggaagcagccaccctcgcc

SEQ ID NO: 300362 - DNA, 98 bp, Homo sapiens
cccgcggcccccgcatgacacccagcgacctgcgcaacctcgacgagctggtgtcccgacccaggctaagcttgagcatggctgagcaggagcccaca

SEQ ID NO: 300363 - DNA, 100 bp, Homo sapiens
ctcctccgaggaggagcgcaagattgtcagtggctgctatgcagcaggtgcagcctggtctctcactgagtctctactccacaaaggcaacgactggcca

SEQ ID NO: 300364 - DNA, 100 bp, Homo sapiens
cgtggacagcaacatttcccacaggacacgaagtttgtcggcccttgccttggcagagctgagggcgaactttctgaccaagtatacaactacccagagg

SEQ ID NO: 300365 - DNA, 50 bp, Homo sapiens
aggcctaagaattttggcattgggtgacatccagcagctgctctttgtct

SEQ ID NO: 300366 - DNA, 75 bp, Homo sapiens
ccgggccacccagcccgcccaactcccagcggagagcaagggacctgttgcaatgagagtggcaaaattagcaat

SEQ ID NO: 300367 - DNA, 51 bp, Homo sapiens
cctcaggtccctgcctgcacagggtccccagtcccaagcggaagttggaag

SEQ ID NO: 300368 - DNA, 83 bp, Homo sapiens
ctacatgaacgctgccctgcaggccctgtccaattggtttctacgataaagacagttcagggtggagttctagcaaagataag

SEQ ID NO: 300369 - DNA, 51 bp, Homo sapiens
cacatgccatggcctttttgggaaaggacagtcattttgtttactcattca

SEQ ID NO: 300370 - DNA, 100 bp, Homo sapiens
gacagaaccgtggacagcaacatttcccacaggacacgaagtttgtcggcccttgccttggcagagctgagaggaggccgtcaatgaggtgaagcgccag

SEQ ID NO: 300371 - DNA, 99 bp, Homo sapiens
taatgaagcaatacattgagtttgtggcagacagacttatgctggaactgggttttagcaagctgagatctgtatctgtggacctgaatgttgatccct

SEQ ID NO: 300372 - DNA, 75 bp, Homo sapiens
gaacatcctcagctttatgtcctacgacgaaattagccagctccgcctgtgggtaattccagaattgattggcca

SEQ ID NO: 300373 - DNA, 98 bp, Homo sapiens
aggaagttctcccacatgttactatatttgaaagaagccatattttcagattgtatgcaggcccagaggtagatatatggagcagtggggttattctc

SEQ ID NO: 300374 - DNA, 100 bp, Homo sapiens
tcccgggcctgaggctgatccagcaggaggatataaaaaagaaggagccatattgtaggactaaacttcagtggctctgtgaggaactgaaagagagaga

SEQ ID NO: 300375 - DNA, 75 bp, Homo sapiens
gcttgcatttgtttctgctgaccgcgggccctgccctgggctggaacgaccctgtttgacggtgagaacatgtat

SEQ ID NO: 300376 - DNA, 75 bp, Homo sapiens
cgaactcggcctatcgctaccctccgaagtccggaatagctattcagtcagacagaaccacttatcacgttttgc

SEQ ID NO: 300377 - DNA, 100 bp, Homo sapiens
ccttggccagaatgaggccaccctgacctgcgatgctcgcagcaacccagagcccacaggctataattggagcacgtacctcatggcagggccaggttcc

SEQ ID NO: 300378 - DNA, 100 bp, Homo sapiens
tcatttccgtttaagagaagctcaaggccgaagccgagcagaggatctaaatacaagagtggcctattgaatatgacagatacctagcatctagcaaaat

SEQ ID NO: 300379 - DNA, 100 bp, Homo sapiens
gtacatcttcttgatgacaggaagctggaactcctagtacaggcatgaatgctttacagttgcagaacctggcgacgctggctgctgctgcagctgcggc

SEQ ID NO: 300380 - DNA, 128 bp, Homo sapiens
agacccgttctccctccagaacatacacttacatctctagataacagtctgcactttcacccgtttcagaagtcatcaatgggcagcatgttccggcaacagtccatcgaggacaaggaggacaagcc

SEQ ID NO: 300381 - DNA, 90 bp, Homo sapiens
cagagccgcccatgcacttcggtcacgaaaactggacaaaacagagcgccaagtgtctcgctggtttgttcagtgccttcgggaacagtc

SEQ ID NO: 300382 - DNA, 100 bp, Homo sapiens
gactcgtcggcgaatgcaattaggaactgttctgccggaatttgaaaagtgcctgcagcggaggaggaaatggcaggtcctaatcaactctgcattcgcc

SEQ ID NO: 300383 - DNA, 100 bp, Homo sapiens
gcggaataacatcggaggagaaggtactactgagcgagtgtgcttgatccagggaacggttgaagcactgaatgcagttcatggattcattgcagaaaaa

SEQ ID NO: 300384 - DNA, 74 bp, Homo sapiens
catatttgagacaacatctggatggttggggagaacggcatcaacttctaactcatctcgccaggagaggcctc

SEQ ID NO: 300385 - DNA, 100 bp, Homo sapiens
cttgagcccagagcaggctgctcattacctaagtttttcacagcatatggtcctgattatgtgctggaaatcacgccaagctgccggccagaccgcaatg

SEQ ID NO: 300386 - DNA, 50 bp, Homo sapiens
ccttcccagtagctgggaccacagatccatttcactgggcttggcttcct

SEQ ID NO: 300387 - DNA, 75 bp, Homo sapiens
cgaggacggtcggactcccgcggcgggaggagcctgttcccctgagatgcagaagataaatgtgtaatagaaggc

SEQ ID NO: 300388 - DNA, 100 bp, Homo sapiens
gtcgccgaggagtggctggagtgccagaagaggatcgacgcctatgtcgacgagcagggagagctggtgacggcctccaaggccatcattgaaaaggagt

SEQ ID NO: 300389 - DNA, 83 bp, Homo sapiens
cggagaagtggcctaaaacttcggcgttggcaactgcctgacctaccgccgcatctacctgccgcccagccgccccgacgacc

SEQ ID NO: 300390 - DNA, 90 bp, Homo sapiens
aattgaagcctgctattgcaacatgggattttcaggaaatggtgtcacaatttgtgaagatacgatgaatggattaaagcagataaaata

SEQ ID NO: 300391 - DNA, 83 bp, Homo sapiens
cgtgcctttgaccttctgccatgattgtgaggcctccccagccacgtgaaactttctggtcctccccgctttgcagtttgttt

SEQ ID NO: 300392 - DNA, 100 bp, Homo sapiens
tcgaaacgtgataagaagcacctggatgagacatttgctacagcatcccacattaagtcaacggactaatggctgaaggataaatcaacatggcaactat

SEQ ID NO: 300393 - DNA, 100 bp, Homo sapiens
gggccagacaccagcatctccagccagatactccccagtttctaaagcagtacttggagatgatgaaattacaaggttggctgatcaagatgacactgag

SEQ ID NO: 300394 - DNA, 100 bp, Homo sapiens
cgcagaagttaatgcacctggtggttgaaagttttccttcttacagagatgtgactctgtttgagggtgtccgcaatgttgccagtgtctgtctgcagat

SEQ ID NO: 300395 - DNA, 75 bp, Homo sapiens
ctttaaccttgataaggtgccatgcttggcttcggtttcagcagccagggaagaggtacctggtcgacgaggttt

SEQ ID NO: 300396 - DNA, 75 bp, Homo sapiens
acctcggggacattattgcgcgtggaacggctgcttttggaaggttctccttactatgacaatgtccgccccctc

SEQ ID NO: 300397 - DNA, 50 bp, Homo sapiens
aggatgcagcctttggactcaaggggaaagtgcagtgttgcccttctgaa

SEQ ID NO: 300398 - DNA, 51 bp, Homo sapiens
caatggatgaacagagcgtggagtctgcgctcctcagaccaccggcaggtg

SEQ ID NO: 300399 - DNA, 98 bp, Homo sapiens
tctgcgtctgccagcccatctgctccatgcccagtaagactttgaccccgacgcaggcttcagtgattgccgcggatcagaagcctgagcactttggc

SEQ ID NO: 300400 - DNA, 80 bp, Homo sapiens
ggtcagtccgccgctcaccccgcggccgcaccttcccgccttctcaggttttgggatttgagattgacgcggtgaactct

SEQ ID NO: 300401 - DNA, 100 bp, Homo sapiens
agacgatctgcacttcgcattttggcattgacatttaattttagggtcctttatatagaagggagagtaggaccttgcctcatagtattcgatcagattc

SEQ ID NO: 300402 - DNA, 74 bp, Homo sapiens
ctgcgtcctccgacttttcatgttcctccgtgtcacaaagcagtacctgccccacgtggcgcgcctctgtctga

SEQ ID NO: 300403 - DNA, 75 bp, Homo sapiens
tcaagagtgtgtagagtgcttcgaacgctcggttaagattaatcccatgcaggaggcaagtgaggcctatctggt

SEQ ID NO: 300404 - DNA, 97 bp, Homo sapiens
ctggaactgtacacctattggaacccttaaggtgctaagagatgccgtttgcaggcctcatctctgcttgagaatcgggggctccaggcactagaag

SEQ ID NO: 300405 - DNA, 87 bp, Homo sapiens
catctcttgggtgagaagatcctgggcagcctccagcagggacctgtgacagtaatctatgccagcaattatgacaatgttagcaga

SEQ ID NO: 300406 - DNA, 100 bp, Homo sapiens
cctactcagcaaccggggctcctcgggggacagacccgaggcctccatgacccccgatgccaaacacctgtggctgaggaagtggcttttaggaagaaga

SEQ ID NO: 300407 - DNA, 96 bp, Homo sapiens
ggatcctgacttgccagctttctactttgaccctttgatcaacccaatctcccataggcactcagtcaagtgtctggtgaggtacattgactatgg

SEQ ID NO: 300408 - DNA, 87 bp, Homo sapiens
aacgaacctggagagagccaaagtaccatagctacactcataacattgaagctgtcagttgtgatgaagcgctggtagacattaccg

SEQ ID NO: 300409 - DNA, 96 bp, Homo sapiens
cggtattggagctgaaggcggcggcagagaacttgccggtgccagctgagattctgacaatggagatattaattatgattatgttcatgaattgtc

SEQ ID NO: 300410 - DNA, 103 bp, Homo sapiens
gctgctgctgctgctgctgctggcgctgtgcggctgcccggcccccgccgcgggtgaaaggtgtagcagtcactcggcctacacccacagcatcgaccttgtg

SEQ ID NO: 300411 - DNA, 100 bp, Homo sapiens
ggtgactacctcatcgtaggcgtgcacaccgatgggtggctgttgcaccacgccctccctcctgcccctgaggcccggaagccaggcgaggagcccagga

SEQ ID NO: 300412 - DNA, 50 bp, Homo sapiens
ctcctaagaaatctcaagcttcttttgtgctcgaattacatctttacaag

SEQ ID NO: 300413 - DNA, 95 bp, Homo sapiens
gaaagggccggttgagggatatgaggagaatgaggagtttctgaggaccatgcaccacctgctgctggagggagccaagaagggaccaagtatat

SEQ ID NO: 300414 - DNA, 91 bp, Homo sapiens
ggcaacatcctgtcacaggccatgctctggcaaaaacataacgaaggaggcccaacttcattcaataaggagcctgacggatttatcccag

SEQ ID NO: 300415 - DNA, 100 bp, Homo sapiens
ctttgagccttatccctctgtggtggaccccactgatcccaagactctggcctttaaccctaagcacagcctatgcccctgaggccaccgactacgatgt

SEQ ID NO: 300416 - DNA, 82 bp, Homo sapiens
gggaaatcgggctgaagcgactgagtccgcgatggagattacttctctaacaggatcaccagtttgctccacaaagcacaat

SEQ ID NO: 300417 - DNA, 80 bp, Homo sapiens
atggattgccagggcttcctggcccgaaaggagagcctgctcaacagtcactggagcttatccagtcaaaaatagtaaaa

SEQ ID NO: 300418 - DNA, 104 bp, Homo sapiens
gtattctttacctgcttcccaatcccactgatgaggatcagcccatgacagatctgagaacaattggcaagaaattcctccccagtgacatcaatagtggaaag

SEQ ID NO: 300419 - DNA, 75 bp, Homo sapiens
tccaagtcaaataccaagcaaaatagtgtgcctccttcacagagcgccaagcccatctttgtgtgcttgcatcca

SEQ ID NO: 300420 - DNA, 75 bp, Homo sapiens
cccgggagcaggagctgggcctaggtctgcgccctgggaaaagaagatctcccggagcagtgccctgaaagtgct

SEQ ID NO: 300421 - DNA, 75 bp, Homo sapiens
aacaggcgccttcaaaagcccacttggcgatgggttacagtaagagttatgcaaagggtgacctggacatatctt

SEQ ID NO: 300422 - DNA, 96 bp, Homo sapiens
ttggattttggacctctggatagtagatcagatgacaagagcacctcaaaggcagcagcctcaaggagcagccatggccccagacttgtcgcacgg

SEQ ID NO: 300423 - DNA, 50 bp, Homo sapiens
aggctatccatggacttttaaattatattttgctgagccgctgaccatgc

SEQ ID NO: 300424 - DNA, 100 bp, Homo sapiens
tccagcttcattttcgccttacattcttacgaggtgattcgcatctaggtggcggcagtcgagaaggctcgtttaaagaaacaataacattaaagtggtg

SEQ ID NO: 300425 - DNA, 138 bp, Homo sapiens
cgccgccgccgcggcccagcgagcggccctgatgcaggccatcaagtgtgtggtggtgggagacggagtaaagccaatcccagctgaaggaatcaagtcaaatccttccaagcggcatagagaccgacttaatacaga

SEQ ID NO: 300426 - DNA, 100 bp, Homo sapiens
gagttctacgtgtcccccgaggatctggaggcacagctgcagtctgacgagagggccggctcagttcggggaagctgcaggagttcggcgtgggtgatgg

SEQ ID NO: 300427 - DNA, 100 bp, Homo sapiens
cttgcccagcctttctggacaactggaagacagttacgcttcgtcctccacctctccctccaacggacttcaaggatgttgaagccgccttgcatgccat

SEQ ID NO: 300428 - DNA, 100 bp, Homo sapiens
ctggatgctgcggtgactcttctagaattttatgaggattatttcagcataccgtatcccctacccaaacaagagatggagtttcactgtgtcagccagg

SEQ ID NO: 300429 - DNA, 75 bp, Homo sapiens
tcgtggccaacacggtcttgctgaaagccagggaagctactgatctacttcttgcctggaatcccatttgtttgg

SEQ ID NO: 300430 - DNA, 83 bp, Homo sapiens
gagaaggcccagcgcttcctgcagaaggccgagaagctctacccactgccctcggcccgcgatctgactgcagccatgagcag

SEQ ID NO: 300431 - DNA, 100 bp, Homo sapiens
catcaattacgccaatgtggacggactcactgccctgcaccagagctttttagatgaggaatttcctcactatgattccctgtcctgcgcagatgcaatt

SEQ ID NO: 300432 - DNA, 58 bp, Homo sapiens
ttgaagtgcctttgatttctggaataatccagaatggctactctgatctatgttgata

SEQ ID NO: 300433 - DNA, 100 bp, Homo sapiens
ctccagggtgtcaggactaagagaagtcacaaaacagcagatttcccaagagcagcggaaaatgatccagtcacaggatgccaggccaaggtggagcaag

SEQ ID NO: 300434 - DNA, 100 bp, Homo sapiens
agagaggctgcagggggagcacagccagaatggggaggaggagcctgaggtgaagcaaatcatggaggaggctgtcaccaggaagtttgtgcatgaagac

SEQ ID NO: 300435 - DNA, 83 bp, Homo sapiens
ttagctgtgctcgcgctactctctctttctggcctggaggctatccagctcactattccaggtcctcaggatatagccgtgac

SEQ ID NO: 300436 - DNA, 75 bp, Homo sapiens
ccattgcagacccagatgatagagatttggagcaagaggtggtggtggccttcccccgaagaaatttggtaatcc

SEQ ID NO: 300437 - DNA, 98 bp, Homo sapiens
cggccctttctgcaccgtcatctcctgccccgccgaggcttgacccacccagcgcgtgtcctcaacatgccccctgtgatttacgtgcccgtggggat

SEQ ID NO: 300438 - DNA, 98 bp, Homo sapiens
cgccactttccccggagctgggccgcgaacacctcactattgatggtgtagcgctttaggggaagagattattttgcagaggatgatggggagatggt

SEQ ID NO: 300439 - DNA, 75 bp, Homo sapiens
aaacaatcgtgaaacttcagaatacttcaagaatagcagaggagcaggtacttaagagattatggcatcagaaac

SEQ ID NO: 300440 - DNA, 82 bp, Homo sapiens
ttgctgcaggcagagggagccacaggcctccggtgtggctgtctctgatggtgtcatcaaggtgttcaacgacatgaaggtg

SEQ ID NO: 300441 - DNA, 76 bp, Homo sapiens
ggaagatcctgcctgaggatttcatgacaggcaggatggggaagcagaatagcaaactggcccctgaagtgatgga

SEQ ID NO: 300442 - DNA, 100 bp, Homo sapiens
ttggtaatatcgcatcaattgggagttccgatgaagttaaattccgtcaagatttaatgaatattgcgggcacaacattatcctcaaaacttcttactca

SEQ ID NO: 300443 - DNA, 100 bp, Homo sapiens
ctcctctctccttggcctctcctgggatcggcccaaggccagttctccgcagctctagaggacaaaatcccagtccttggcacaaactcaggaaatggaa

SEQ ID NO: 300444 - DNA, 73 bp, Homo sapiens
gggagacagatgcgaggcggcggtcaggctcatcggaacctgtcccagctccctaattttgccttctctgttc

SEQ ID NO: 300445 - DNA, 95 bp, Homo sapiens
gagacggagctaagagatatctgcaatgatgtactggttgtaagaagatatatactgggttcagttgtcgacagtgaaaagaactacgtagatgc

SEQ ID NO: 300446 - DNA, 82 bp, Homo sapiens
gacatatggaccacatgttcctgagcttgagatgctaggaagacttgggcgccaagcccatctttgtgtgcttgcatccaac

SEQ ID NO: 300447 - DNA, 75 bp, Homo sapiens
gacaacacggcttttatggacgagttcttttctgagttaccttatcccatatcacacaactggtcctcagccata

SEQ ID NO: 300448 - DNA, 90 bp, Homo sapiens
agcagtcctaccatgtcagccttcccagtagctgggaccacagtttcggagcaacatcccctgtcacctggttgatatctcttgcggatt

SEQ ID NO: 300449 - DNA, 75 bp, Homo sapiens
gccagagcgagtgcgcctcctgcccgcggaccgcggcagcccagagcaggattaagcatgaaaatattgttgccc

SEQ ID NO: 300450 - DNA, 74 bp, Homo sapiens
acaaagttccagagctacaaaagtttttccaggtgttggggcgatgtttcctgactgtggtgcaagtccatttc

SEQ ID NO: 300451 - DNA, 101 bp, Homo sapiens
aaacaggacatgacggaaaagcttgctgatcgttaactgaagacaatatgcaaaattctcacatggatgaatacagaaattctagtaatggcagcacaggc

SEQ ID NO: 300452 - DNA, 100 bp, Homo sapiens
catttcactggccgcttctgtgaaaaagatccggagttaggtgttggcacgctaccagaacatgacagccaggatgcagggccgattgtccccaagatat

SEQ ID NO: 300453 - DNA, 75 bp, Homo sapiens
cttgcagccgctttttgaagggaaccgcgggctctgccaggagagaagactgaaagaagcttccggttctgaggt

SEQ ID NO: 300454 - DNA, 100 bp, Homo sapiens
gagaccagaggtgcggaaggaacagaaagagttgtggaaagtaaaaatgtagccctaccaaaaggaactattgtactggcttctccaggctggacaacgc

SEQ ID NO: 300455 - DNA, 101 bp, Homo sapiens
ctgctggaccagctcatgggcacggctcgggacggagccggtgaaacctgaagaaggcagagatatggcaaacaggattggcgcttttgggtacatggagt

SEQ ID NO: 300456 - DNA, 100 bp, Homo sapiens
ggatcaagaagatcatgcagacggacgaagagattgggaaggtggcggcggcggtgcctgtcatcatctctatacacagaatgggattttacatatgctg

SEQ ID NO: 300457 - DNA, 74 bp, Homo sapiens
ggcgggtggaggttcgagcgctgttctcgctccggagccgctgcacatttcggatatggtgactacagcttcta

SEQ ID NO: 300458 - DNA, 98 bp, Homo sapiens
ttgaggtgtccctttttgaacggctagtgaaagtaaacattccctttgtccgtctgaattaccagaaactggcgatggaatatgagaggagccctctg

SEQ ID NO: 300459 - DNA, 90 bp, Homo sapiens
tggggatgtggcgtcaggattccactatggagttcatgcttgcgaaggctgtaagaaagatgaccctgacgactgcccaatagaactcag

SEQ ID NO: 300460 - DNA, 74 bp, Homo sapiens
gcgcggcggggctgaggcggccgcggggcccgagcgcagaagccatgcagtgacacccgctaagacttgttggt

SEQ ID NO: 300461 - DNA, 100 bp, Homo sapiens
aatagacacttcattgttccagcttctcgcttcaagctcctgaagtactatactggcaattgctggagaagattttgcaattgttgcttctgatactcga

SEQ ID NO: 300462 - DNA, 100 bp, Homo sapiens
cgcagcctgtctgcctcgcccgccctggggagcaccaaggagttcaggacgtcccagtgatcgggaggagtgggaagagcttcagctacaaccaggacgt

SEQ ID NO: 300463 - DNA, 100 bp, Homo sapiens
gataaatcaggaatagattctcttgaccatgtgacatctgatgctgtggaacttgcaaatcgaaggggaaaaaagttgttccatgtagacatgactggca

SEQ ID NO: 300464 - DNA, 99 bp, Homo sapiens
aaggcatgcaagttaatactctatttgaaacaagccaggttccagactggagtgatcctcctcagctcctgagccagtcaaatatacagcagagtgact

SEQ ID NO: 300465 - DNA, 100 bp, Homo sapiens
cgtcatggctggctacgaatacgtgagcccggagcagctggctggctttgataagtacaagtggccataaaatgcagtaaaaacaaatccagttcccaag

SEQ ID NO: 300466 - DNA, 83 bp, Homo sapiens
tgccccagctgcttcgggctgccgaggaccttctgggcccccacattaatgagacctcctgccccccgaggtctgcagtctcc

SEQ ID NO: 300467 - DNA, 97 bp, Homo sapiens
tcgcccgaggcgaggaggagcgctggcgcccaataggggcacaaaacgtccccgggatgatgaagaggaggagcagaagatgcgtcggaaacaaact

SEQ ID NO: 300468 - DNA, 87 bp, Homo sapiens
gaaaactggacattataacattaataatctatgccagcaattatgacaatgttagcagaccatgcagctcgtcagctgcttgatttc

SEQ ID NO: 300469 - DNA, 100 bp, Homo sapiens
gaaaggagcaaagcaacagaagtttatcaaggctgtcacacatcaagttaaatttggtcaacaaaatccacgtcagcatcattctgaaaggctacaagcg

SEQ ID NO: 300470 - DNA, 82 bp, Homo sapiens
cagcagatggcggatgccctgcagtacctgcagaaggtctctggagacatcttcagcagacgttggacctctcgaacaacca

SEQ ID NO: 300471 - DNA, 98 bp, Homo sapiens
atgcctagaagaacttcgtgaagctctggagatctcccccttcttcaagacccacgagtccacaggtcctggctaccctgggaagagacaagaagtaa

SEQ ID NO: 300472 - DNA, 71 bp, Homo sapiens
agagttttctaaaatgcaagaagatctgtgtcatattgcccataaaggtgtaggagctgcacgatctggga

SEQ ID NO: 300473 - DNA, 75 bp, Homo sapiens
aagaattgttacctgtggatcagaaggcagtcctggtgacagggtggcagcacgcaaagggtgtccctgtccctc

SEQ ID NO: 300474 - DNA, 100 bp, Homo sapiens
tggccaagaatcagaggaagtggtttaaaattggtggtgaatggtggacatggatcgattataaccgcttccaggagctcatccaggaatatgaagatag

SEQ ID NO: 300475 - DNA, 134 bp, Homo sapiens
ctgagatagagattatgaagaagctgcgtgaggcctttgaaaatgatatgctggctgttaacctctgcgtacgtgtcctatgggggcctgctcatgaggctgcagggggatgccaacaacctgcatggattcga

SEQ ID NO: 300476 - DNA, 82 bp, Homo sapiens
cacattaccaccagtgacagcttcaatgacggtctcgtcagcctatctcggcccctctcttttcatgtcctgacaaaaacaa

SEQ ID NO: 300477 - DNA, 100 bp, Homo sapiens
cattgttgcattgttgtccgtggactttcatgctttagaacaagatgccagcaaagaacagcagcttagatgttcctcctgctgatcaagagaagctttt

SEQ ID NO: 300478 - DNA, 100 bp, Homo sapiens
agaaatgatcagtagcaccagtgtttatgcggatcctctggttggaagcatagccactcagtatttgaccaacagagcagaacacgacaggatagccaga

SEQ ID NO: 300479 - DNA, 90 bp, Homo sapiens
gtctcagatgagctcatgagtgaaagtgtttatccaacatatgattttgcctgccccatagttgacagcatcgaaggtgttacacatgcc

SEQ ID NO: 300480 - DNA, 80 bp, Homo sapiens
atccatatcataagtggaattttggagatattcaaagtaaaggcatgacttcctggcaccacagggaaaatcgggtgcaa

SEQ ID NO: 300481 - DNA, 95 bp, Homo sapiens
aaagatggaagactaccaggctgcggaggagggtaactaaggaagtggatgctacatctaaagaggccaaatccttcttcaagcagaatgagaaa

SEQ ID NO: 300482 - DNA, 51 bp, Homo sapiens
ctacgccgtggacttccagcgcagttcagacctagagccagtagaagctct

SEQ ID NO: 300483 - DNA, 98 bp, Homo sapiens
tgatgcagtggatcggattgttgcataccggttgggcatcaggcagattttcagctgaactctcatctctcaacactggcaaatattcataagatcta

SEQ ID NO: 300484 - DNA, 83 bp, Homo sapiens
aaaattttaaaaggaatcttggattataatcatgagggacagagcagaatgggctgatatagatccggtgccgcagaatgatg

SEQ ID NO: 300485 - DNA, 82 bp, Homo sapiens
ccgggctcggcgggggagcgactcatggagctgccgtaagatgcagacagacatgctgaactatctggaagtccactgaaaa

SEQ ID NO: 300486 - DNA, 82 bp, Homo sapiens
gaaagtattgcaggacaagagatttaagatgtggtggtacagtgggagctattctgacatgtccactggaagttgtaaaaac

SEQ ID NO: 300487 - DNA, 125 bp, Homo sapiens
accacgcaccgactatgtcgcctgccaccgagccgggcccacctccccaccaaggaagacctcctgccccccgaggtctgcagtctcctgaacccagcagccatctacgccaacaacgagatcag

SEQ ID NO: 300488 - DNA, 82 bp, Homo sapiens
actcagcccacatgcccgctcacctgcgctgtgatgcctgcagagctgtggcttaccagagctcaggccccggggcctccag

SEQ ID NO: 300489 - DNA, 100 bp, Homo sapiens
cgttctaaaaagaggcgaaaggaagcaagcagttcagaagagccaaggaataaacatgcaatgaacccaaaaggggtcttactacatattgcaacagaag

SEQ ID NO: 300490 - DNA, 82 bp, Homo sapiens
gctctcccagaaactgaagaccacttacaaggcttccaccagcaaggctttgaagacaagattcccaaaaggagattctctg

SEQ ID NO: 300491 - DNA, 101 bp, Homo sapiens
gcccagttggcccagaggatctcttctaacatccagaagatcacacagtgtttcgcagatatggccagtacactatgaaccaggaaagcaccaccatcaaa

SEQ ID NO: 300492 - DNA, 74 bp, Homo sapiens
acaaagcaggcgactacagccacgtgaaggaagggcctgtcccagtcggctttaccctatcgacgcagcgtccc

SEQ ID NO: 300493 - DNA, 75 bp, Homo sapiens
cgacgctgctcaaaacctcgctccggaaaggggacacctgaaaaagcagagagatcttgctaagatgagaaaatg

SEQ ID NO: 300494 - DNA, 88 bp, Homo sapiens
tttggaaagacccaggagaagccgcccaaagaactggtctcctccgggctggggctgagcaagccctcggagtgaccgtgggtgacag

SEQ ID NO: 300495 - DNA, 82 bp, Homo sapiens
cggccgagctgaggcggtcgcggccatgaaggtgaaatgacaatggatgctctgttggctcgattgaaacttctgaatccag

SEQ ID NO: 300496 - DNA, 100 bp, Homo sapiens
acgatctcaaagaaaactgtcaggagcatacaagaggctccagtgatggtgtctgggaccctgagaagtggcatgcctctctctacccagcttcagggcg

SEQ ID NO: 300497 - DNA, 74 bp, Homo sapiens
ataaatccaaatactgcatatcagaaacaacagctgctctgttaaaagcgaaaatgaaacaattgcctgcggca

SEQ ID NO: 300498 - DNA, 96 bp, Homo sapiens
gaggaactgaccaatgatagcctgaccctatctcaaagcaagagtaatgagggaagtcgagacaacatgagtgtgattttgatctgttttccaaat

SEQ ID NO: 300499 - DNA, 82 bp, Homo sapiens
tggagtttatctggagtgaggtggccggttcttggtgggatctgagcagatgacagtcatgtccctttccagggacctcaag

SEQ ID NO: 300500 - DNA, 100 bp, Homo sapiens
gtcagcaacgatcccgatgtcatcaagttgcaagagattccaaccttccagccccttttgaaaggatctatcttgggatcccatggctttctttactggg

SEQ ID NO: 300501 - DNA, 50 bp, Homo sapiens
gagccatgaagaacttggagagggattttacggagaaagatttggagagg

SEQ ID NO: 300502 - DNA, 82 bp, Homo sapiens
gtttcatcaacttccataccgggagatggagcatttgagacagatgtggaaacaacttctgtgcatctcatcgttatgcaga

SEQ ID NO: 300503 - DNA, 100 bp, Homo sapiens
ctcactttggaaaaatgggaagttactatatcaaccgtacatttttctttgatgtgcacccgcccctgggaaagcacatatttgttcttcgggagcgccc

SEQ ID NO: 300504 - DNA, 78 bp, Homo sapiens
ggctgctgctgctgctgctgctgctggtggcccctttgcagcgccgtgccgtccctgcagtgacaccgaggtgctcct

SEQ ID NO: 300505 - DNA, 97 bp, Homo sapiens
tggtcaagcgctgggtgaatgaggctcaggaggcagcatccagtgataacatcatggtccaggccctaggcgagcccctttaccgggtgagcaccgg

SEQ ID NO: 300506 - DNA, 75 bp, Homo sapiens
cctgcagtacctgcagaaggtctctggagacatcttcagcagatgaatgatttcggaatcaagaatatggaccag

SEQ ID NO: 300507 - DNA, 100 bp, Homo sapiens
acagtcattttggacccaccactggtagccctggataaagatgcaccggttccttttgcaggtgtcatggagaaactccagctgggcccagagattctgc

SEQ ID NO: 300508 - DNA, 74 bp, Homo sapiens
ggagatccaagaatcgagtaccagttttttgaagacagacacagtgccaaacccaagtctgaaatccacgtgtc

SEQ ID NO: 300509 - DNA, 75 bp, Homo sapiens
gtccctgaagagggaagacacgcggaaacaggttgaaatcacaaagattagacacctttttagataggtgttctt

SEQ ID NO: 300510 - DNA, 88 bp, Homo sapiens
gcggaggcagaggtggaggcgctttgaaagtaatctatgccagcaattatgacaatgttagcagaccatgcagctcgtcagctgcttg

SEQ ID NO: 300511 - DNA, 87 bp, Homo sapiens
aggtgaatttccatgtcaacatagtccagaacctgctaaggccatcaaacctattgatcggaagtcagtccatcagatttgctctgg

SEQ ID NO: 300512 - DNA, 90 bp, Homo sapiens
tgaatttgtcacattctcctgccctggcgctgacaagggtccagcctccgattgaaaatgcctcgtgtaaaagcagctcaagctggaaga

SEQ ID NO: 300513 - DNA, 83 bp, Homo sapiens
ccgaacgggggtcttcctcctccgccgttgacaggtgagaagccctaccactgcaactgggacggctgcggctggaagtttgc

SEQ ID NO: 300514 - DNA, 100 bp, Homo sapiens
gtgggatgtgaaaactctgttactgaaggactcacaccacccggcaagaactgctcactacggctccctgccccagaagtcacacggccggacccaagat

SEQ ID NO: 300515 - DNA, 87 bp, Homo sapiens
ccaggtctcgggagagagatcggagaaggagccgctcgcgatccccgcaccgaagacgctcccgtactaaggctcgtacgtctgcat

SEQ ID NO: 300516 - DNA, 80 bp, Homo sapiens
cagaagctatccacaacttcgcagagcttgaacacactcagctgtgaccccggtcacagtagggggttctgtggagcagg

SEQ ID NO: 300517 - DNA, 117 bp, Homo sapiens
atcttactgaggagctgccgcggccgggcgcccgcccgcctcccgccgccgcctcggtacaccgtcccgcggggccaggtcagagcagcccaccatgggatggggagggggtggagg

SEQ ID NO: 300518 - DNA, 100 bp, Homo sapiens
ccgggttgcacgaagagtccgagtcatttctcagaaggttttgataggtgggccttagaggagacgccgccgatgttctcaaatagtgatgaagctgtaa

SEQ ID NO: 300519 - DNA, 50 bp, Homo sapiens
ctacatggcatctaccatagggattggactggctaaggacgatcagctga

SEQ ID NO: 300520 - DNA, 100 bp, Homo sapiens
ccagagcctggagtctgcgaaggccgggacccggttccccggcccacagtgggggtgtgcaaacccgagagaactgggtccataacttagtggcaattga

SEQ ID NO: 300521 - DNA, 75 bp, Homo sapiens
cctgcggtgcctgagctgagtgaggccgaggccgggaggccgtgcccggagggatcatggcccaagttgcaatgt

SEQ ID NO: 300522 - DNA, 100 bp, Homo sapiens
gtgatgtccaggaaggaggaggaataatatttatggagcatatattatggaacacagcatcaagcatgatggaaccatgtgtgatacctgccgccagcaa

SEQ ID NO: 300523 - DNA, 100 bp, Homo sapiens
acacttggttattacaatgggaagctggaacctctgggctcctaccgatttcaagagatggacgcttgaggagccgaagtggagcccctttgcctgtctt

SEQ ID NO: 300524 - DNA, 90 bp, Homo sapiens
catgaaggagctggagcggcagcagaaggagcatttgacattgtgcagcaaagaaatggttatggagaagcccagtccgctgcttgtagg

SEQ ID NO: 300525 - DNA, 90 bp, Homo sapiens
gagttctacaacctggtgcgcttccggatcgggggcaagcggaaggtgatgcccaagatggaccagatgccatggacaatattaccaggc

SEQ ID NO: 300526 - DNA, 100 bp, Homo sapiens
ccctgtttcgccacagttcctaccttatgagctcggttttcttatgcttataagagtggaacagaagtcaatgaaaggattctattttgcaaagctgtat

SEQ ID NO: 300527 - DNA, 110 bp, Homo sapiens
ttcaacactagaagatatttgctgcagcctttagagaagcggtcagcaattttctcactgccctcagtttgcaaagaaagagcaggaatcagcagcaagttcctcatcct

SEQ ID NO: 300528 - DNA, 101 bp, Homo sapiens
tcgccgtccagagcaaggaacaggccgagcagtggctgaagactgggactcttcaattaatctgacatttcacaaatccaaaattgccgtggatgaactct

SEQ ID NO: 300529 - DNA, 83 bp, Homo sapiens
cgtaaagtggttggttgcagttgtgtagtagttaaggactattttaacaaagggaaaaatgagcctgaggacagtaagcttcg

SEQ ID NO: 300530 - DNA, 75 bp, Homo sapiens
cccaaatgtctgactctgactctcggactgagaaacgcaagtcttgactcgtctgctgaacaaatcctctgacct

SEQ ID NO: 300531 - DNA, 100 bp, Homo sapiens
ctccatcccgtgccctcgctctgagctgcgcctggacctggttctgccttctggacaatctttccgaataactgaagtgaagtgatggactccgatttgg

SEQ ID NO: 300532 - DNA, 100 bp, Homo sapiens
gctcctggcgctgctggctgcgctctgcccggcgagtcgggctctggaggaaaagaaaggagctgacatggacccaaatcctcgggccgccctggagcgc

SEQ ID NO: 300533 - DNA, 74 bp, Homo sapiens
ccgaggaagaggcgcggggctacatcgtgacagacagagaatggactcaccctgtcacccaggttggactgcac

SEQ ID NO: 300534 - DNA, 75 bp, Homo sapiens
cgaatatcgtcatcgttagaagggtggatctatgacatcacgcaaaaatatgatttttccttctacatatgtggt

SEQ ID NO: 300535 - DNA, 100 bp, Homo sapiens
gaaagagcaagacaggaaatagcagaaaaattaaaagaagtcaatctatttttacagtgaccaatggggctgaggctgtgtccactgaggctaagatgac

SEQ ID NO: 300536 - DNA, 75 bp, Homo sapiens
tcggcccgagtgcttcctcacgccgcaccgagtccccggcaccatgtttgggaagaggaagaagcgggtggagat

SEQ ID NO: 300537 - DNA, 82 bp, Homo sapiens
ggaaatcgggctgaagcgactgagtccgcgatggagatatgaggccccaggattcctggcgaggtcctcctccccttttcca

SEQ ID NO: 300538 - DNA, 75 bp, Homo sapiens
ggccagggccggttctgcaccatcttcaggtcctactccaggggcgctcagggtgagaactctgtctcagtcgac

SEQ ID NO: 300539 - DNA, 98 bp, Homo sapiens
cacaggaaaaacagccaccttcagtatctcagtcctccagtgtttggatattcaggtgtcgtgaaaactacccctaaaagccaaaatgggaaaggaaa

SEQ ID NO: 300540 - DNA, 100 bp, Homo sapiens
tccgggcggcgcgaagcgctggtggcgggcccgggctgcggcgtgtgcgcgcccgccagctgctccggagatacgtgccggtggtggtgtgcacattgag

SEQ ID NO: 300541 - DNA, 50 bp, Homo sapiens
cacagggctactgttttccaatcctcaggcgcatattaaatttcctattg

SEQ ID NO: 300542 - DNA, 90 bp, Homo sapiens
aaatagtgatagctttgataaagccagagcccagaggtggagcagttagggagggttgtggaactggacagtgacatggtagatatcacc

SEQ ID NO: 300543 - DNA, 100 bp, Homo sapiens
tgctgccctctggttccttaatggcctggcccaggggctgggctggcccccatgtgggaaggtcctgcggaagatcatggccgaacggcgtaatgcccgc

SEQ ID NO: 300544 - DNA, 51 bp, Homo sapiens
ctgactttgcagccacggagagttttctggatatgccgcagaaggatccgt

SEQ ID NO: 300545 - DNA, 100 bp, Homo sapiens
ctgccttgacgaagtggcagaggaacttagtatctcgggggagctttgtgccttgatggatcaagttcatcatatgcagcactcaaaatggcagcatcct

SEQ ID NO: 300546 - DNA, 101 bp, Homo sapiens
gcgcgaggtccgcgcagcccagcgcagccatgtatcgagaaccttccctgcgaacttcagaggaacttccagctgatgcgagagctggaccagaggacgga

SEQ ID NO: 300547 - DNA, 100 bp, Homo sapiens
tggatttgttgctcaggctcctgacgtgtatcgaacctccacagcccaggcaagatgtgctgaatggaatggccttaagtcttggagataaaatcaactt

SEQ ID NO: 300548 - DNA, 100 bp, Homo sapiens
gctgatggtgcagcaccgcatgatggtacccaaagtcaggggagtaggttgcatctttgttgaaatgatccaaggagttgctgcttttccaggaatgaaa

SEQ ID NO: 300549 - DNA, 100 bp, Homo sapiens
gttttaagcaaacttaccttgtctgtctttgtacatcatcaccaaatggaaagttaatcgaagagccaaatttgtatcctactgtggggcttcaaacacc

SEQ ID NO: 300550 - DNA, 50 bp, Homo sapiens
ctctgaagctcaccaaaaccatccagtgtttgcagtgaagctcttgccta

SEQ ID NO: 300551 - DNA, 51 bp, Homo sapiens
cgatgatcgtgtgtcggatgaggagaagaaagaagttttcccatttccaga

SEQ ID NO: 300552 - DNA, 87 bp, Homo sapiens
gcgagctgagtggttgtgtggtcgcgtctcggaaaccggtagcgcttgcagcatgctgccactgggcccaagagatgggtgctctcc

SEQ ID NO: 300553 - DNA, 82 bp, Homo sapiens
ggagtcagaaactcagccactggttgccttggtaggcaataaaagaaggatcgagatcgagaccgggatcgtgaagatcggt

SEQ ID NO: 300554 - DNA, 82 bp, Homo sapiens
aatggccgctgtgtggttgcaacggagataaattcccggaaccgcgattcggcgtgtcagtatggtttgaagtggtgaacat

SEQ ID NO: 300555 - DNA, 99 bp, Homo sapiens
ctttctggatctgactgttcagcaaattgaagtatcttgcggtaccgagtagatttccagggaatggaataccaaggaggagacgatgaattttttgac

SEQ ID NO: 300556 - DNA, 83 bp, Homo sapiens
ggaggaccggccaacaggatcgctcaggatggacgtcttctactcaagttctgggccggagaaggggcgacgttcgggcaccc

SEQ ID NO: 300557 - DNA, 99 bp, Homo sapiens
tccctttccagaagatgattccaacgccaccaattccaacctggctgaattgcatcatcagcagatggcggatccagacttgttggaagagtcctcatc

SEQ ID NO: 300558 - DNA, 100 bp, Homo sapiens
ctgttcttggaccgcacctatgtgctgcagaactccacgctgccctccatctggtgctcacccatgacagtctctgaatccaggccgttgggagatttcc

SEQ ID NO: 300559 - DNA, 101 bp, Homo sapiens
caaaggctccaccttccacagggtgatcccttccttcatgtgccagaccatgtctgcaaaggagaagtcgaagtttgaagatatggcaaaaagtgacaaag

SEQ ID NO: 300560 - DNA, 100 bp, Homo sapiens
gcagtggtcgcttcttctccttgccagaagatcagctgccatgttacttgactcacaccaaccctagagtggatgagattgtccttaagaaccttcacct

SEQ ID NO: 300561 - DNA, 50 bp, Homo sapiens
attcgcagtggtcgcttcttctccttgtgcacgtgccggaaggacatggt

SEQ ID NO: 300562 - DNA, 73 bp, Homo sapiens
gacaattcattttcctacagactaccccttcaaaccacctaaggtttattttaggacagtggaacttatagaa

SEQ ID NO: 300563 - DNA, 100 bp, Homo sapiens
gaccacaataaaagagacctctacttagctcagcaattcttaccttagccatgtccattggagcccgttcccaatcagctcgtacttacttggagagaca

SEQ ID NO: 300564 - DNA, 146 bp, Homo sapiens
tcccctaacccacccaacctcaccaagaagatgaagaagattgtggatgccgtgatcaagtacaaggacaggctacattggcgtggtgaaccgcagccagaaggatattgagggcaagaaggacatccgtgcagcactggcagctg

SEQ ID NO: 300565 - DNA, 75 bp, Homo sapiens
caggacgttggggcggcctggctccctcagccaccaaccgctaaaatgcacgccatcatcgagcgcacggccagc

SEQ ID NO: 300566 - DNA, 78 bp, Homo sapiens
tgtcctgaaggagttccaccaggccgggaagcccatcgggaccaagaatcgccttcagccctgtctggtgcatccttg

SEQ ID NO: 300567 - DNA, 90 bp, Homo sapiens
gaaatggggtctacaagatattgacactattattgatcatgctagtgttggcaccgtctgcgtcctgctgtccttccccttcatcttcag

SEQ ID NO: 300568 - DNA, 88 bp, Homo sapiens
tccagttgaaaatgtacctattgaacagattccacttgtgaagtcacccacaaaagctgtatataatgccagacattggaatcatcca

SEQ ID NO: 300569 - DNA, 96 bp, Homo sapiens
tggcttggagcacttcctattccactggattgggaaagaccatggcaggtatgctccgtatagtgattgtagctgttcctctggattcaccatctg

SEQ ID NO: 300570 - DNA, 75 bp, Homo sapiens
caaggagcactgctgaaacggctggcggaggccgactcagagaaagcgctacgagagtacaaggtagtgggtcgc

SEQ ID NO: 300571 - DNA, 75 bp, Homo sapiens
agattagagtcaagttgtgtgattaagacaggttgtctttgaagcttggtgatgctggaaaccccagaagtcttg

SEQ ID NO: 300572 - DNA, 135 bp, Homo sapiens
cagccacacgccagtgagccttgggaggccagagagataccgccggcatgggacccactcagtcaagatcacaggggaaccctcagagctgcaggggctgggagctctggaagcaactgcttgggcactaaaggt

SEQ ID NO: 300573 - DNA, 100 bp, Homo sapiens
gtttcctttgttcacgagaacattgagacatttctttcggaatggaagttggatacactttgtgacttgtacgagacactgaccattacacaggctgtta

SEQ ID NO: 300574 - DNA, 80 bp, Homo sapiens
cactgaagacgtctgcgtgagaatagagaccaccgagaaaacgttgtgtgacgtgatcctcatggtccaggaaagaaaga

SEQ ID NO: 300575 - DNA, 100 bp, Homo sapiens
atggctgggtcccatcatccccttcatcgttttatgccaccctgacaccatccggtctatcaccaatgcctcaggtgacgcatccaaagaagacattgac

SEQ ID NO: 300576 - DNA, 82 bp, Homo sapiens
tcggcggcatcttccctggcctcagtggccgagtacacaggcttgcctgtgttctccggctctccgcccatgaagagtcttt

SEQ ID NO: 300577 - DNA, 75 bp, Homo sapiens
actggaacgccaaccggctggacctgttcgagatcagccagccgaccgaggtacatgtcccagagcaagcacacg

SEQ ID NO: 300578 - DNA, 98 bp, Homo sapiens
agaatccagaatagccctcagaagaaagattctggaggaaaggtttacaagcaggccacgattgaatctctgaagacagggtctctctctgtcaccca

SEQ ID NO: 300579 - DNA, 82 bp, Homo sapiens
gccggctggacatctggaccgctggatccggagacaatgcagatcttcgtgaagactctgactggtaagaccatcaccctcg

SEQ ID NO: 300580 - DNA, 96 bp, Homo sapiens
gtcagatccctggcagagaacgcagatcaggactccctggaggaaaagcggaagcggcagcggtctgaacgcctggaacggattttccaacttagt

SEQ ID NO: 300581 - DNA, 100 bp, Homo sapiens
ctcagcctcccgagtggctgggattacagggcaaatgacacagctttgtgaactgatcaacaagagtggggaactccttgcgaagaacttatcccatctg

SEQ ID NO: 300582 - DNA, 75 bp, Homo sapiens
ggaaagagggcttgcatgaagaggatggatcttcttgtacactgccatgggggacgctatctagtctaaaattac

SEQ ID NO: 300583 - DNA, 100 bp, Homo sapiens
gctacctatcacagagcaattaaagttacagtagatggacctcgggaacccagaagagctgtggctaaaggaagtggaggggccgtgggatgcggagagc

SEQ ID NO: 300584 - DNA, 100 bp, Homo sapiens
ctggtgtcagatactgctgcttgtcaaccacaccgactaccgctggtgggcagaagtgcagcagaccccgaaagtggcagaatttagtgacatttggaag

SEQ ID NO: 300585 - DNA, 90 bp, Homo sapiens
ctgaagggggactacaggttcgagagtttttggaagaagctgaccgcctgaaaagaaattataaaacatgaaaatcgctttgaggtgacc

SEQ ID NO: 300586 - DNA, 100 bp, Homo sapiens
gaagcagagacaccaggacagaaaagacagtgttctgctttcatggagttcacagaagagtcgaggagatgagcagcaccagcagtaagagggctccgac

SEQ ID NO: 300587 - DNA, 48 bp, Homo sapiens
gagaagccgcatggatgaaaagtttggctctttaaccatggatggtgg

SEQ ID NO: 300588 - DNA, 88 bp, Homo sapiens
tcagagcctatcagatcctcaacagctacaagccacaggcaagaggcggggtttcaccatgttgcccagactggtcttgaactcctga

SEQ ID NO: 300589 - DNA, 75 bp, Homo sapiens
cccatttcgcccctcgcgtccggagtccccgtggccagcttcctgcctgacacagctcacttcaagaagtgcaca

SEQ ID NO: 300590 - DNA, 75 bp, Homo sapiens
ttcccgcaatgaggagggcccttcacagaaccgggatacagatgtcatcatgaagaggaaaagaggagggagccc

SEQ ID NO: 300591 - DNA, 82 bp, Homo sapiens
gcagccgcagccccctgctccggaggctggtgcaggacctgagagtcagtatactaagactgcccaggagattgtgaacgtc

SEQ ID NO: 300592 - DNA, 100 bp, Homo sapiens
aactgtttaaccggatcccattgtacccagagtgcagagccgcctttccagcatgcaggggctgctcagattcccaacttcttctggagcctggggatcg

SEQ ID NO: 300593 - DNA, 74 bp, Homo sapiens
aaagcagcaatttcacaactcaggataaaagcttcgatgatgaagaatcagtggatggaaataggccatcatca

SEQ ID NO: 300594 - DNA, 75 bp, Homo sapiens
tcgccggagccgcgccccaccccgccagctccagagccacgtacgagtaaacatcagtctccaaagataactaca

SEQ ID NO: 300595 - DNA, 80 bp, Homo sapiens
gcctggtgcagatcatctacgacgagaaccggagctcaggccccggggcctccagcggcaccagcggagaccacggtgag

SEQ ID NO: 300596 - DNA, 109 bp, Homo sapiens
tgtgacctctgtgcccctggctactatggctttggccccacaggctgtcaagcccgtcaccacttccccagcctccacaccaaggcccagctgccttctccccatgtac

SEQ ID NO: 300597 - DNA, 75 bp, Homo sapiens
cagcctgggggccacagctgcttcattgaggagctcaagcttgggaaaatggtgtgcattccttgtatcgtcatt

SEQ ID NO: 300598 - DNA, 89 bp, Homo sapiens
tgccttattttttctcatggatgttcttcttcgagtatttgtagaaggggagaagagtggcagttgcattggaaacctgattagaatgg

SEQ ID NO: 300599 - DNA, 73 bp, Homo sapiens
gattttgaagatgcagatacccaggatggagatgaagatgaggaagctgagtcagctacgggcaagcgggcag

SEQ ID NO: 300600 - DNA, 75 bp, Homo sapiens
atcattatggagcagagatcaggccaagtttggaatcactggatcatgcgcagggagaaactccttgcttgctct

SEQ ID NO: 300601 - DNA, 98 bp, Homo sapiens
caagagttttcatggattctaatggaatcaggcagttttgtgtccatgtgaacaactgtttggtgcacctcgatttggaggaagtagggcagggccct

SEQ ID NO: 300602 - DNA, 100 bp, Homo sapiens
ctggaatatccctcagcctggtgagggtgatgttcgggaggaggccttgtccacaggcacgtgggaaaaagcgccagataggctggttcccagctaatta

SEQ ID NO: 300603 - DNA, 100 bp, Homo sapiens
tgggctccatctttcagcagttggcacacatggttaaggaacaggaggaaaccattcagagagccgcagagcacacaacattgacctgaaggggacagtc

SEQ ID NO: 300604 - DNA, 98 bp, Homo sapiens
gcccccccttccccacgcaaccccagatccatttacactttacactgaataccactagaaacatacctgtaaccagagacagctgattatagctttct

SEQ ID NO: 300605 - DNA, 75 bp, Homo sapiens
tggagtattaagtctttcccggtatgagccagagcgggatgagtggcacttggtggccccaatgctgacacgaag

SEQ ID NO: 300606 - DNA, 101 bp, Homo sapiens
cgtcgcctggtgcctcccgcctccgtgtgccctggttgtgagaagacgtctgtgtcgtgcgtttgtcccatgaggagcacccccatagccatcctctctat

SEQ ID NO: 300607 - DNA, 100 bp, Homo sapiens
ggccccgagccccgtggatccgctggagcggagccggccgtacgcggtgctgcgagggcagaacctgggtgctggagaatctggtaaaagcaccattgtg

SEQ ID NO: 300608 - DNA, 73 bp, Homo sapiens
ttttgttctgctccagctgttcgaaggtgatccaggcttactgtggatttctccgtcctggagtttcttcaga

SEQ ID NO: 300609 - DNA, 98 bp, Homo sapiens
tccacaccatccttctcgctgcagggtaaagaagcttcttaataaagtagtgctccgtgaatcttgcttttaccggaaattaacagacacctcaaaag

SEQ ID NO: 300610 - DNA, 89 bp, Homo sapiens
ggtcaacaaggacaacaatgagatcgtggacaagatcatgggcaaaggacagatccagaaattccttgagctcataggcattgctcagg

SEQ ID NO: 300611 - DNA, 51 bp, Homo sapiens
gtgccaccggtgttccaactgtttaaaatggaatcagtgtgagtggctttc

SEQ ID NO: 300612 - DNA, 100 bp, Homo sapiens
ttgagaactactccttcaagatttcctacatcccggatgaagaggccagatgagcgtcgctttgctgtcttctccattgctgtctcctcagatggacgag

SEQ ID NO: 300613 - DNA, 75 bp, Homo sapiens
gggtggtcaccaaagtccagcacagaccctcgggcctcatcatggccaggaagagcctacctggacgtagacatt

SEQ ID NO: 300614 - DNA, 80 bp, Homo sapiens
tgctgtagtcacaggagctgtagagaggaccccggtacatctgaaagccgggaaatgaagtccattggaatattaagccc

SEQ ID NO: 300615 - DNA, 82 bp, Homo sapiens
ttcgttgtgccagcgactaaaaagagaatccacattcatctcaatggaaggatcctgccttaagtcaacttatttgtttttg

SEQ ID NO: 300616 - DNA, 75 bp, Homo sapiens
cccaattcctacttcatggatgtgaaatgcccagatttgaagaacccaagtgattcagcagtgcacagccccttt

SEQ ID NO: 300617 - DNA, 90 bp, Homo sapiens
atgaattggagaccattccaaatctgggaccagtctcggcaaatattacacttctctccttaatcgcctaccatttggtgcaagcaaaaa

SEQ ID NO: 300618 - DNA, 100 bp, Homo sapiens
aagatggtgactccactgatcaagaacttcttctgaggacagacaggccaccagcccctcgggttccaagatgcagctactggagacagagttctcacac

SEQ ID NO: 300619 - DNA, 90 bp, Homo sapiens
agatatgaagaaatccttgatgtatggcatttcaaatatagatacaaccattgaaggaacgtcagatgacctgactgttgtagatgcagc

SEQ ID NO: 300620 - DNA, 127 bp, Homo sapiens
gtgggcccaggacggtgctctgtggcttctgccagccttgcaggaggactctggcacctacgtctgcactactaggaaaagcaaaagtttctgggacaaaattattataaagaaggacctgaaggaa

SEQ ID NO: 300621 - DNA, 88 bp, Homo sapiens
ctcctatgttaccgccacctaaaaacaaagaggattttgagaagatgctacatttatgtgtgacaagcggtgtaacaagaaacggttg

SEQ ID NO: 300622 - DNA, 90 bp, Homo sapiens
ccggaagggcggacacctccacatcgccttttgccacctttccctttatttccggagggagtaactattcccagtcagaggcgctatgtg

SEQ ID NO: 300623 - DNA, 90 bp, Homo sapiens
ggagggcggggaggagccgccgcgtcccagtcccgagaatgtctacacaaggaagtacaggatttggcttttctagatgtcgtatccaaa

SEQ ID NO: 300624 - DNA, 100 bp, Homo sapiens
tgcctcaggagcggaacaacgtcggcgagcggggcaccatgactcctgtgaggatgcagcactccctggcaggtcagacctatgccgtgcccctcatcca

SEQ ID NO: 300625 - DNA, 75 bp, Homo sapiens
ggaaccctggtcaccgtctcctcagctctgtctgtagtgaggatcaggaagctattcaggcacagaaaatttgga

SEQ ID NO: 300626 - DNA, 83 bp, Homo sapiens
gtaggctccaccgctcggcagccggcttccctgctcggacgccgagcaccgccaaagcgccgccactggcttcaccacgcggt

SEQ ID NO: 300627 - DNA, 83 bp, Homo sapiens
cccagcaagcaggacatcttgaccatcttcaagcgcctccgctcggtgcccactaacaagccggcccgctggggctggaggca

SEQ ID NO: 300628 - DNA, 75 bp, Homo sapiens
cagcgcggagtgggcgatgccagcgtgccagacggcaccgaaagcgaaggaagctcctgctcctcctaaagccga

SEQ ID NO: 300629 - DNA, 83 bp, Homo sapiens
tgcacatcgaattaagagagcagaaggatgggaggaaggtcctcctacagcaataagagctaactgccatcaagagccatcag

SEQ ID NO: 300630 - DNA, 98 bp, Homo sapiens
tgaagtgctcaaagagtcacttactgccaaagaacagagggctgccatccttcagactgagggctgaccccacattggacaccgctgcatccatgtcc

SEQ ID NO: 300631 - DNA, 98 bp, Homo sapiens
tggcagcatgaaagttagcagttggtactaagaagtgcctttcctgacgtctctgctgcttggaaccgcttctagagcagtctctgcttttgccttgc

SEQ ID NO: 300632 - DNA, 100 bp, Homo sapiens
ctacgacctgatcgagcgcatcgaggatttggcgctgcagaaccagatccgggagcacgtcatctccatcgaggaaacgcttcgttaagggactcaggca

SEQ ID NO: 300633 - DNA, 50 bp, Homo sapiens
cgggatacaaagtctacatttgctgggtagaagtaaattctaattctgga

SEQ ID NO: 300634 - DNA, 100 bp, Homo sapiens
tcatggtatatttgcagccagtactctatatgaacaatccgtctggatcacggatgtaggaagtggttacttcttgctgcagattctgcgcaggatcgga

SEQ ID NO: 300635 - DNA, 75 bp, Homo sapiens
ttaatattggcatcctccactcatgcctgtaaaataaaggaaaatatatgcagatgatgaacattcttaagccaa

SEQ ID NO: 300636 - DNA, 74 bp, Homo sapiens
ccggaaccgcgattcggcgtgtcagccagcagaaaactgagcttccggtcacagagaacgtgcagacgattccc

SEQ ID NO: 300637 - DNA, 90 bp, Homo sapiens
gcctcatgtacaagatgtgttactatcgctttggacaggtttacacagaagccatgaagacgacccgggctttccaccgcttgcgcctgg

SEQ ID NO: 300638 - DNA, 100 bp, Homo sapiens
ggcctccgaagagctgccgcgacgcccggcccgcagggcagatggcccactgcgtgaccttggttcagctgtccatttcctgtgaccatctcattgacaa

SEQ ID NO: 300639 - DNA, 75 bp, Homo sapiens
ggcggcgccctgtaggctggagggactgtgagctctggacttattggacaaaatgttgacattcaacccacacaa

SEQ ID NO: 300640 - DNA, 100 bp, Homo sapiens
ctgagagaaacccactgaagacgtctgcgtgagaatagagaccaccgaggtcaaaatgcagatcttcgtgaaaacccttaccggcaagaccatcaccctt

SEQ ID NO: 300641 - DNA, 116 bp, Homo sapiens
cccgcttcccaggttcaagtaactgcctcagccttctgagtagctgggattacaggtgtgcaccaccacgcccagaccattactgggacttccacccccaccacgtgcacagcgag

SEQ ID NO: 300642 - DNA, 100 bp, Homo sapiens
acatgggttatgaatacagtgaaagaggagatgctgtatgcactgaatctggatggcgtccgttgccttcatgtgaagacacttcctgtgtgaatccgcc

SEQ ID NO: 300643 - DNA, 100 bp, Homo sapiens
acctctgtggttggaacaatcctgtattcttgacccttgcactgctgaaccagtttaaatctaaactcactcaagcaattgctgaaacgcctgaaaatga

SEQ ID NO: 300644 - DNA, 51 bp, Homo sapiens
taaggattccaagtaactcttatttggaaacaagctcacatcttcctgtgg

SEQ ID NO: 300645 - DNA, 74 bp, Homo sapiens
acagccgccaggcagtggaagaggcattcatgaaggagaacaagtgttacctggaatgtcagagagctgaaagc

SEQ ID NO: 300646 - DNA, 101 bp, Homo sapiens
ggcaagaactggattcgtggcgccacaagctcattcactgtgtagcaacatggccaacgccctggccagcgccacttgcgagcgctgcaagggcggctttg

SEQ ID NO: 300647 - DNA, 90 bp, Homo sapiens
gcctcagggcattcatttcaggctccttctaaatggccaagattttaggtgatgggcaagtcagaaagtcagatggatataactgatatc

SEQ ID NO: 300648 - DNA, 80 bp, Homo sapiens
cgtccgagacctggagcagccaccgccgcaatcatggaagtatatattcaagcccaggactgtatagtaaaacaatgacc

SEQ ID NO: 300649 - DNA, 100 bp, Homo sapiens
aatcgacttcggtttcagttggagttggaatttgtgcaatgtttagccaacccaaattaccttaattgaagaaatgttggctatttggcgatgagaggtg

SEQ ID NO: 300650 - DNA, 100 bp, Homo sapiens
tcagaagaaccagaccaacctggagaggaagttctcctacgacctgagatggacaaaccatgtgggtgccctccaggtgtgtgcgaccatgaaatgggag

SEQ ID NO: 300651 - DNA, 100 bp, Homo sapiens
agacagcccaaatatcctcggaagagcgctcccaggagaaacaaatggtaaacctatgctacgccagggagatacaggagactggattggaacatttttg

SEQ ID NO: 300652 - DNA, 100 bp, Homo sapiens
gagaagaagagaggccttcaccaatattgtgtatctgaatgatatgagcctgatggaaggggacaatgatctacagacagtcaatgtggatgagaactaa

SEQ ID NO: 300653 - DNA, 96 bp, Homo sapiens
ctcagacagatcgccggggaggcagcgcgggatcccagcctcaggcgtgcgcggacggtgtgcggggtgttgaaagcagcaggggcctagaagaca

SEQ ID NO: 300654 - DNA, 75 bp, Homo sapiens
cttcgctgtaacccaagaacaagttcatttatatgaggatcttatggttggtgatgaggcaagtgaattacgatc

SEQ ID NO: 300655 - DNA, 90 bp, Homo sapiens
ccaagttccccaacggctccccgtcgtcctggtgctgcagcgatggccctgctgtggcaccagtgaccaacgggaacacaacggtgccac

SEQ ID NO: 300656 - DNA, 100 bp, Homo sapiens
cttttcctcctgcagcccaccgtctacttgcagggaggagagagcgatggcttttttcacccagaaggccagccccagcggcttccccagcctccggaag

SEQ ID NO: 300657 - DNA, 100 bp, Homo sapiens
atatatctgggatccacataatggagacattctgatggaatttgggctaaagtaaataatgccagcctgattggactgggttatactcagacccttcgac

SEQ ID NO: 300658 - DNA, 100 bp, Homo sapiens
gaccaaggagctcttacagatggacctgtacgcgctgctaggcattgaggagaaggcagcggacaaagagattatggattggatatgtctacttctggat

SEQ ID NO: 300659 - DNA, 101 bp, Homo sapiens
tgactcggagacggacgaggatgaggaggagggggacgagcagcagcggctcctcaacacccctcgaagctagaaagagacatgtccaatgtcagcctggg

SEQ ID NO: 300660 - DNA, 90 bp, Homo sapiens
ggaatcaggcagttttgtgtccatgtgaacaactgcttggtggagccagtgaacgtggtggacaatggagatggcacacacacagtaacc

SEQ ID NO: 300661 - DNA, 75 bp, Homo sapiens
tcaactgtggccttaatgagcatgttgacagcatcgatgctagacagacaagtggcagaatttagtgacatttgg

SEQ ID NO: 300662 - DNA, 74 bp, Homo sapiens
gttcagaagagccaaggaataaacatgcaatgaacccaaaaggagcaaggtccgtggtcctgtcagtggaagcc

SEQ ID NO: 300663 - DNA, 101 bp, Homo sapiens
gaaggaagctctttatgccttaacggtcagaatggcggcagtggagcatcgtcattcttcaggattgccctactggccctacctcacagctgaaactttaa

SEQ ID NO: 300664 - DNA, 82 bp, Homo sapiens
tcgcctttgagctgatgctggacggaggcctcaagaaacccaaggctcgtcctgaaggaatggtcctcgtccgaagtgagaa

SEQ ID NO: 300665 - DNA, 100 bp, Homo sapiens
ctggaatgaggtggatccttatcttttagggacaagctgtggggggtctgtgtctccatcctggctctcttgcctcgagtcctcaggttgatgctgcaga

SEQ ID NO: 300666 - DNA, 100 bp, Homo sapiens
attggaaaaagtgcagattggatttgccagggcatgtagctctccaggcttgcaagcgattaccaggacatggatttgattgacatactttggaggcaag

SEQ ID NO: 300667 - DNA, 87 bp, Homo sapiens
gggattgagtgggccccaaacggctgtgtgctggcagtgtgggacacctgcttggagggctattcacgaaaagcagcagctctagag

SEQ ID NO: 300668 - DNA, 83 bp, Homo sapiens
gcttgatcagcccagattgtgtacttaaggtagttggattaaactcccatcggtcacatccttcatcctggacaccgaagccg

SEQ ID NO: 300669 - DNA, 82 bp, Homo sapiens
ccgggggaagctggctgaacgcgacatcgtccaggctgctccagttacagcaccacccggccgctgcacccggctgctccca

SEQ ID NO: 300670 - DNA, 112 bp, Homo sapiens
ctgtttactacaaatgcttgctctactagtggaaattctaatctttcacagacacaggcatgggcagcagtgacgagtggtctgatgttcaagacattattgactccacgcc

SEQ ID NO: 300671 - DNA, 100 bp, Homo sapiens
ccgtgaaattcagcccgaatggagagtggctggcaagttcatgacagtcattttgtttactcattcagccctgttgcaggtcccaataaactcttcataa

SEQ ID NO: 300672 - DNA, 98 bp, Homo sapiens
aaaggaacgcaagaacagaatgaagaaagtcagggggactgcaaaggccaatgttggtgctggcaaaaagttcattgactggctattcagcatcatgg

SEQ ID NO: 300673 - DNA, 82 bp, Homo sapiens
tcatcaagaactgtaatacttctggaatccagacagaatgggaactctaatgatccaggacaaagaagttaccctggagtat

SEQ ID NO: 300674 - DNA, 90 bp, Homo sapiens
gggcgtcatgaataacatgcggaaacaggatttaagtgccctgtatgctcaaaatttgtatcctcagatgaaatggatttgcatcttgta

SEQ ID NO: 300675 - DNA, 75 bp, Homo sapiens
cagagggcgaagtttcaagcagacttcacttgctcttgtacatgagcaactttcatcctttgaaacgtgtgctga

SEQ ID NO: 300676 - DNA, 74 bp, Homo sapiens
ggaaaacaaaagctgctacttatggaagatacaaaggccacattgctgtgaggaagcctgggctacatggagaa

SEQ ID NO: 300677 - DNA, 75 bp, Homo sapiens
cttggcctatggaaaacggggatttccaccatctgtcccaggttgcctgtggctggagaaaggaatgtgctcatc

SEQ ID NO: 300678 - DNA, 101 bp, Homo sapiens
actgaccagcgcgcaggacagcgccttcctcaacgacgcggacatggtcatgagctttgtgaacctggagggtgatgagacaggagtgatggataatctgc

SEQ ID NO: 300679 - DNA, 50 bp, Homo sapiens
ccgccatcacccacgctctgacctctggttcaactccaatttgtgaagat

SEQ ID NO: 300680 - DNA, 98 bp, Homo sapiens
ctaagcatgaggcctggctgctgctaccattcttcaaggtcgaggtggtgcatctatctatggcaaacagtttgaagatgaacttcatccagacttga

SEQ ID NO: 300681 - DNA, 126 bp, Homo sapiens
gctgacagaggcagggtttgagagtgccgagaaagcatccgtggaaacgctgacagagatgctgcagagctgaaagatatgatccgccaaatgatgattaaaatatttcgctgcattgagccagag

SEQ ID NO: 300682 - DNA, 75 bp, Homo sapiens
gtgcactgctacaggactctactatggaggaatagccaggtctggctgggtcggcacaacctgtttgagcctgaa

SEQ ID NO: 300683 - DNA, 97 bp, Homo sapiens
tggcatccgaggagctgtggtccagcctgcgcggcgggaagcggcggcggcggctccagcgtcctaagagaaaatccattcctcgctgccgaagaat

SEQ ID NO: 300684 - DNA, 75 bp, Homo sapiens
tacgtcatcttcgattagctaataaccaactgcaattcctacctccagatgagattgtggggaacctgggtgaag

SEQ ID NO: 300685 - DNA, 87 bp, Homo sapiens
tgtgcaccggctggctgaggaaatcgcctcccgagaagaagttgaggcgctataaacatgccaagggacaagtgttatttgacaaag

SEQ ID NO: 300686 - DNA, 100 bp, Homo sapiens
gtaagaactactacaaactgcgcacagaaggagatgactatgtgaaagggtttggaggaaaatttggtgtgcagacagacagacaagacaaatgtgccct

SEQ ID NO: 300687 - DNA, 98 bp, Homo sapiens
ggagtttcgggtccgaggagcctcgcgcggcgctggagagagacaagatgtccgccagagctgcggccgccaaggtttgtggaatcttgcttcccttt

SEQ ID NO: 300688 - DNA, 75 bp, Homo sapiens
cgctctccgagctcgatccgctgctcgcacgggagccagctgggtggtggccttgggggacttgcaggtctgagt

SEQ ID NO: 300689 - DNA, 75 bp, Homo sapiens
ccctggtcttgctcggccgatgaagtgcagaggtttttttctggtgtctcaaaggctgttgagcacatcaataaa

SEQ ID NO: 300690 - DNA, 105 bp, Homo sapiens
gaagaagattccactcgtggtatgagagtggataatataatcaactcctctgcctggtgaccaagaatatggcccaggtgaccaaagccctggacaaggccctga

SEQ ID NO: 300691 - DNA, 75 bp, Homo sapiens
gcatcgacaagttcggcttcatcgtgggctcgcagggcgccgagggcgcgagaactacgatgacccgcacaaaac

SEQ ID NO: 300692 - DNA, 97 bp, Homo sapiens
gtcgcctccaggccaagagggatccttcacccgtgtctggttggatggcaagcatgtggtgtttggcaaagtgaaagaaggcatgaatattgtggag

SEQ ID NO: 300693 - DNA, 75 bp, Homo sapiens
agatgactccttttcccacccagggtcctccaggaggtggagggccaccaggaacacccatcatgcctagtccag

SEQ ID NO: 300694 - DNA, 100 bp, Homo sapiens
gatgagaaggacccacggcgtctgttcgaagacaaattcctgtcccttgtgccgctatgagctgcccactgatgacgacacttatgaggagcacagacga

SEQ ID NO: 300695 - DNA, 100 bp, Homo sapiens
ggcgatggaagatggaaggaaggagcgcagcggtacaacagctttccaagaaagaaatagaggatcttctacgaaaaggggcctatggtgcactcatgga

SEQ ID NO: 300696 - DNA, 100 bp, Homo sapiens
agaaaaccgggaactcagagtcaaagaagaaaccgtgctcagaaactagccagattgaagatgccaattctcggaagcaagaagcagagtggaaagaaaa

SEQ ID NO: 300697 - DNA, 83 bp, Homo sapiens
catttaacagccctaccgtgcatgctttcacagtgaagatgcctgtgaggagccaccaacatttgaagctatggagctcattg

SEQ ID NO: 300698 - DNA, 60 bp, Homo sapiens
tttgcggaaaagcggttgagatgaaatggtgggatgctatggaatatgatgagaagctgg

SEQ ID NO: 300699 - DNA, 98 bp, Homo sapiens
agccagtcttctatgtttccacatcggtcagaaaaagatgaaatgggtcctgatgaatatgaagagatggaagaagaggaggaggaggaagaggagga

SEQ ID NO: 300700 - DNA, 75 bp, Homo sapiens
tcaaccccgcgtccctcggggagcggagaaaggacaggccataaaattttgagtagaaaaatccagaaatttgaa

SEQ ID NO: 300701 - DNA, 100 bp, Homo sapiens
tttgactagacggtatgaatttctaagtaagcattaaagggcagtatttaaagtcagttggcaagcagtggaataagatttttgtaaagaaaccttgtgc

SEQ ID NO: 300702 - DNA, 85 bp, Homo sapiens
cggagctgacggtggaggttcgcggctctaacggggctttctacaaggagaagatggtataaactggtccatcagtgacaaagac

SEQ ID NO: 300703 - DNA, 96 bp, Homo sapiens
gttttaaaaaatacatatctggttttggcattcgtccctacaaatgcaacgtctgcaataaagccttcacccagcgctgctctctggagtcccacc

SEQ ID NO: 300704 - DNA, 75 bp, Homo sapiens
gccccggacccgggcggacgagcacgaacacacggtcctgtctgcagtctctgtgtctcatcttttggagcaaga

SEQ ID NO: 300705 - DNA, 74 bp, Homo sapiens
tatacaacaatctggactaacaccagtacaagcccaagggagattacagattactgacagccctgtcctaggag

SEQ ID NO: 300706 - DNA, 100 bp, Homo sapiens
cagaacctccacagtcaagaggacgggagtaccctgacttctaccggaagctctacggcctcttggacccctctgtctttcacgtcaagtaccgcgcccg

SEQ ID NO: 300707 - DNA, 100 bp, Homo sapiens
ggcagcggcccgggaggccggagccaagccagcgacccaccatggagacccgctacaacctgaagagtccgggggtctcctgctgccagctaagtgtggg

SEQ ID NO: 300708 - DNA, 75 bp, Homo sapiens
gaatccagaaaccagcacagactgtgacggaatatacagatgttgccacaggaatctaatctgaaatcgtacaaa

SEQ ID NO: 300709 - DNA, 82 bp, Homo sapiens
ctgggtcctcaaagaggaacaaagtcatcaagctagtggacatcacggacatccagaaggattttttatcaagcagaaatgc

SEQ ID NO: 300710 - DNA, 76 bp, Homo sapiens
agaccatgttccgagcggcggctccggggcagctccggcgggcgaacccttaggagaaatcttgagagtggacagc

SEQ ID NO: 300711 - DNA, 83 bp, Homo sapiens
ctatggttctgacaaagatgaaggaaattgcagaagcctaccttgggaaggccttggacaagattcgctatgagagcctgaca

SEQ ID NO: 300712 - DNA, 75 bp, Homo sapiens
aggaggcggaggtccaagcggaaagacctcctgccccccgaggtctgcagtctcctgaacccagcagccatctac

SEQ ID NO: 300713 - DNA, 90 bp, Homo sapiens
ccccatcgcggtgctcatagacgaactccgcaatgaggacgttcagacatgaagaggagcatcggcggcgtgaggaagaaatgatccgac

SEQ ID NO: 300714 - DNA, 90 bp, Homo sapiens
cgtccgaggctcgcgggcggcgggcccgggctttgtccagggatctgaaaccactttgcagtcgacatactcggataccagcgctcagcc

SEQ ID NO: 300715 - DNA, 107 bp, Homo sapiens
agtctgagcttgtgagcggctgtggcgccccaactcttcgccagcatatcatcccggcagggagaaacacatctcatctttcctaaaaaagcttcagtggagcagct

SEQ ID NO: 300716 - DNA, 100 bp, Homo sapiens
cgcaggcaaacgagaattaaatgccgagaaggccagtacgatgccttcaattaagttgcagagttctgatggagagatatttgaagttgatgtggaaatt

SEQ ID NO: 300717 - DNA, 90 bp, Homo sapiens
ctcctcgccagcagccgtccggagccagccaacgagcgcgttgtagaatgaatgaagacactggcactgattatataacaccttggcagc

SEQ ID NO: 300718 - DNA, 75 bp, Homo sapiens
tgatttcatgtgcgatgatgaggaggactacgacctggtgatgacacatctccacgtgattgaagaaaggaggaa

SEQ ID NO: 300719 - DNA, 75 bp, Homo sapiens
cgctatgtacgccctcttcctcctggccagcctcctgggcgcgggtgccaggggagagcaagaaacagtggaaac

SEQ ID NO: 300720 - DNA, 75 bp, Homo sapiens
ctcagctccacattgagagcaaaatctacaagatgatgcagggaggagtgtactaatggtcacttgatgtgcgct

SEQ ID NO: 300721 - DNA, 75 bp, Homo sapiens
acttacgtgtactttaccaacgagctgaagcagattgagaggatccagaatccagatctctggaatagctaccag

SEQ ID NO: 300722 - DNA, 50 bp, Homo sapiens
aaaggggagatggcccaatcttttccacctatttccctggatattttgat

SEQ ID NO: 300723 - DNA, 117 bp, Homo sapiens
cctctgtctgcctgtgtccctgaccatggctccctgcagtaccctttaacgacaggtgatttggcttctgcacagttaggaggagcaccaaaccgatgggaggttttgtcagccaca

SEQ ID NO: 300724 - DNA, 101 bp, Homo sapiens
tcccagtcccagcagaggtaccagccgcagcagttgtattccctgaatgactataaaccacccatttcgaaagcgaaaatgacccaaattactaaggcagc

SEQ ID NO: 300725 - DNA, 100 bp, Homo sapiens
gaaacagctatatgggaacaacatacagtgacgcttcacagggtgtgcaactgaggaacatggctcaagaaactaatcacagccaagtgcctatgctttg

SEQ ID NO: 300726 - DNA, 90 bp, Homo sapiens
cggacgtgtccgcgaagatggcgggccgggtcctcttcctgatggatgggaacaagccatgactcaggatggagaaatttactatataaa

SEQ ID NO: 300727 - DNA, 95 bp, Homo sapiens
ttctctatcactacgtggccgtcaacaatcccaagaagcaggaatgaaagtggcgctttctccgccccaggctggagtgcaatggcgcgatctcg

SEQ ID NO: 300728 - DNA, 50 bp, Homo sapiens
acggattgccagagaattggcagaaggttggattagcttttcaaaacaga

SEQ ID NO: 300729 - DNA, 100 bp, Homo sapiens
agactgaggacttaaatgaagccactgattagcaatttaaagatcctctccaaggagtccaggcatgataaagaaaagatagaaaagaaagagaaacggg

SEQ ID NO: 300730 - DNA, 76 bp, Homo sapiens
gagggtgagtgccgggagctctgagggtcctgggaactccaacaagggagcaaatcagagaaatgaacccaaacta

SEQ ID NO: 300731 - DNA, 99 bp, Homo sapiens
cttagtaagccccatggaactgtgaaagccatatgtatccctgaaggagcagattcagagactgtttttgatattcagaatgacagaaatagtatactt

SEQ ID NO: 300732 - DNA, 96 bp, Homo sapiens
ggctaaattacatattccagtaatggtggatgaagttgttcattgtttgtcaccacaaaaaggacaggttgaattgctggaaatggaaaagtcaca

SEQ ID NO: 300733 - DNA, 74 bp, Homo sapiens
aaaactcgtgaggggaacgtgcgcgtgagtcgtgagctggcaggacacacaggactcagaattcatgattgaag

SEQ ID NO: 300734 - DNA, 98 bp, Homo sapiens
gcggatctcagcgcgggagcagtgcttctgcggcaggcacgtctgagaatggtggatgtggtggagaaagaagatgtgaatgaagccatcaggctaat

SEQ ID NO: 300735 - DNA, 115 bp, Homo sapiens
gatcacctgtctggagcaagaaaaagagcctttgactgtgaagagacatgagatggtgaatgaacccccaggagccaaaaacctgtatatcatctccgtgaaggggatcaaggga

SEQ ID NO: 300736 - DNA, 101 bp, Homo sapiens
ccggcgaaaggagctggtgcctgtgcaagttgttgagtggccaatccgccatggtatagttgaagattgggacttaatggaaaggtttatggagcaagtga

SEQ ID NO: 300737 - DNA, 100 bp, Homo sapiens
aaaattctaacttttcctgagaagctggagaagcgactggaggagtggttggggaggacattgcctggcagtgactggacacccaatgcccagtttatca

SEQ ID NO: 300738 - DNA, 101 bp, Homo sapiens
gctccggaaaggggacacctggttatcttatgatgaggcttttgctatggctaatgatcccttggaaggcttccatgaagtaaaccttgcttcacctactt

SEQ ID NO: 300739 - DNA, 82 bp, Homo sapiens
ttggtaaagaacgatcgtccagtggagtggctgacaagattttgaaaaagaaagaataccctctttatataaatcaaacctg

SEQ ID NO: 300740 - DNA, 75 bp, Homo sapiens
tggaggaggccgcgccgatgaacctgaccgagactgccttccgggaaaatctggatgcttgccgtttaaaagcca

SEQ ID NO: 300741 - DNA, 100 bp, Homo sapiens
gccgctcccaagatgtcgcagacggccatgtccgaaacctacggtgaccaaaagccagccccactgtgagttgaactctttcgtgttgaccggccactct

SEQ ID NO: 300742 - DNA, 50 bp, Homo sapiens
gtttgttcaaaacaagtggctgattgagtgactgcgtcagatgagctgtg

SEQ ID NO: 300743 - DNA, 75 bp, Homo sapiens
cggggacagcagccggccagccggggggcactgcccgcccgggctctggactggaatgtcacgtggaataccagc

SEQ ID NO: 300744 - DNA, 83 bp, Homo sapiens
cagcatttcgatggcttcgtggtggaggtctggaaccagctgctaagccagaagcgcgtgttgtgaccgagattcccgacgag

SEQ ID NO: 300745 - DNA, 80 bp, Homo sapiens
agtttctaggaaaggccggacaccagttgagccccatatgggggttggcaggcagcagagaggcccctttcaaggtgttc

SEQ ID NO: 300746 - DNA, 100 bp, Homo sapiens
ccggaattgtcctttccaacatccagagctgcatcattccttggggcaaaatgtggacaaggaagctgcatataccctcctcttatatgacgagctactg

SEQ ID NO: 300747 - DNA, 101 bp, Homo sapiens
cagatctgtgggactggtttgaatccttccttgatgatgaagagagtgcacatttggccatgatcgataccctcatgatggcttatactgtagaaatggtc

SEQ ID NO: 300748 - DNA, 75 bp, Homo sapiens
gctgtccaatatttggaagaaaactagtctgaagaagaagtagaggaacctgaagaaagacagcaaacacctgag

SEQ ID NO: 300749 - DNA, 90 bp, Homo sapiens
gaatatacagaaccagatgctgcagaggaagaagccattagatggtggagaaagactactgttttccaaagtgaagttgcagtcactctg

SEQ ID NO: 300750 - DNA, 101 bp, Homo sapiens
gagagaattatcactttggctggacccactaatgccatcttcaaagcctttgctatgatcattgacaaactggaagaggactgcagtgtgctagcttttgt

SEQ ID NO: 300751 - DNA, 75 bp, Homo sapiens
cttacctggggctgctgcaggccgagtacaccgagggccacgacgtttttccaccacatcaacctgcagtatagc

SEQ ID NO: 300752 - DNA, 75 bp, Homo sapiens
ctgggagaagcagcagagaaagctatccccttttccagggcacagtgaggccagcagatattgagtaaaccggag

SEQ ID NO: 300753 - DNA, 101 bp, Homo sapiens
ttgggttctgatgtgtgctttggccatgtggttccccagaaggtatctaccaaagatctttcggaatgaccggtcccctcttgctgttggctgcacatcag

SEQ ID NO: 300754 - DNA, 80 bp, Homo sapiens
cgacaagccgctggcagccgcggatctcaccgccgctcaggtaatctcaggggcgatataatcaatgaggtggtcctaaa

SEQ ID NO: 300755 - DNA, 100 bp, Homo sapiens
aaaactttcacttatctcttctttaacttatcgtggaaataaaacagctgttttgcagattggactacaaggtcctctcagggtgcgccatcattgtccg

SEQ ID NO: 300756 - DNA, 98 bp, Homo sapiens
gcgcacctggtgcgggccctctggaccctggagtacaccccgcagcacagccgcgacttcaagatatgccctgcgtccaagcccaatatagcccttcc

SEQ ID NO: 300757 - DNA, 100 bp, Homo sapiens
caggaggcggagggagagcaggagccactgagatgaggaggcgtcgcgcgcgcctgtagctcgcgggcctcgcagatgatatcatcaagttgaatcgaaa

SEQ ID NO: 300758 - DNA, 75 bp, Homo sapiens
cgccttcccttttgcacccccggcagccgccgctgattctggaaaccaaaatggaggaaatgatgataagactaa

SEQ ID NO: 300759 - DNA, 83 bp, Homo sapiens
ggcgctggagctgggtcagtccgccgctcaccccgcggccgcaccttcccgccttctcaggtgcagagcattgtagaccaagg

SEQ ID NO: 300760 - DNA, 74 bp, Homo sapiens
gggaagaatgaaaaaaccaaaattatcgccaagattcagcaagaagtgctctctggcgtggtggtcatatcgag

SEQ ID NO: 300761 - DNA, 100 bp, Homo sapiens
atttcaagagtcacttctttacttggtgcaggaaggcagtctttgctacgtacagcaaaagatagaggaaagggtcgccagagacaagccattttgggag

SEQ ID NO: 300762 - DNA, 88 bp, Homo sapiens
gggccgtgctgcttatggcggcgctggagagggggcgctgagctgttgggggaaactgaacagccaagactcctataacaattttacc

SEQ ID NO: 300763 - DNA, 83 bp, Homo sapiens
cgcaggcccgccagacttaagggacctggtcaccacgctcgggctgatcccttatccaacatggttctaaccttcagtactaa

SEQ ID NO: 300764 - DNA, 75 bp, Homo sapiens
cagcccgccctccccaagtcgacgccgcaacccggggaaagcagggtgggagggatgaaggaaattatctggacg

SEQ ID NO: 300765 - DNA, 101 bp, Homo sapiens
aaagcctgcaagtgacgagaggagacttccttgcttctttggagaatgatatcaaaccaatcatcaatgctgtggtactgttgattttattgagtgccctg

SEQ ID NO: 300766 - DNA, 74 bp, Homo sapiens
gcatactggacagattggaggactgaagctgctatcgatctgtgaagtcctggaacgctcccactctccacccc

SEQ ID NO: 300767 - DNA, 96 bp, Homo sapiens
ggcggcgggagcccaggagcctgccccgccctggggacgaagagctgcagctcctcctgtgcggttgttgacctcctgtactggagagacattaag

SEQ ID NO: 300768 - DNA, 111 bp, Homo sapiens
ccgacaaacaccacgagaattccgcagcccacacggttccgtggggaccccactgcctggagtacaggtgcgcattgtctcagaaaacccacagagggaagcctgctccta

SEQ ID NO: 300769 - DNA, 101 bp, Homo sapiens
ggctttccagctctcacagaaccttcagcatccccagctgccggtcttggcatcttcgaagtaaggagagtctcttcaagaaaatgaggaggaggagattg

SEQ ID NO: 300770 - DNA, 80 bp, Homo sapiens
gtcaaaggagagcacaaccatcgcagttggaagcccatggggcagtttgtttcgacgccggaccgcgtaagagacgatga

SEQ ID NO: 300771 - DNA, 75 bp, Homo sapiens
ctcatcccgcagctgaaggagagtctacaggatctgctgtatatccttccaactcacattcaggcagcaagagcc

SEQ ID NO: 300772 - DNA, 74 bp, Homo sapiens
gcgaggaaaacgagggcgtgtataatggaagctggggaggccggggagaggctatcttagcggcacagagacga

SEQ ID NO: 300773 - DNA, 98 bp, Homo sapiens
cgctacggaccttaaaatacccgcaacagccccttcgtcccaagtttttcttcccccagtccctcagctgctgctgctgctcaggaggtcagatctgc

SEQ ID NO: 300774 - DNA, 98 bp, Homo sapiens
ctcggaccagctctgtaaaagccccgcctctgccttcggatagtgtaaacaggaacatcgataagtagtgtaaaaacttgcacaatgaaatccgaagc

SEQ ID NO: 300775 - DNA, 82 bp, Homo sapiens
ggcgcctcggccggggcgctcacggccacggcgctggtcaccggggtctgcctggtagccacgatggaggtgatgaacctga

SEQ ID NO: 300776 - DNA, 101 bp, Homo sapiens
cttcaaggacccgggactagtggaccagctggtgaaggcagacagcgagtggcgacgatgtgtcatcggactggtggccttgtacctggtgttcggttatg

SEQ ID NO: 300777 - DNA, 90 bp, Homo sapiens
tggcatttacagaaagagtcaacagcagtggcaacagggcaaacttgaagataaatcttttgactccagctctttagaggatctaaagtg

SEQ ID NO: 300778 - DNA, 100 bp, Homo sapiens
caagcttccagattgaagccttcggctccaaattcattcttgacctcatactgaacaaggatccatatggctttggagacagtcgagattcaaggcgtga

SEQ ID NO: 300779 - DNA, 82 bp, Homo sapiens
gagaccggctacttctcggcgctgccgtctctggaggagtactggcaacagacaacagtgattgactacgtgaagccctcgg

SEQ ID NO: 300780 - DNA, 100 bp, Homo sapiens
gcaaaagtctatcaaacagcaagcactgacaagcagcacattctcaagagcacacaggaagtttcagctgatcctactgccacactcacagcagcagaag

SEQ ID NO: 300781 - DNA, 100 bp, Homo sapiens
gccgctgctcgagctgctgctggattgaactcagagaagccgggagagaagaagaaggaggttcctgctgtgccagaaacccttaagaaaaagcgaagga

SEQ ID NO: 300782 - DNA, 110 bp, Homo sapiens
tacagtgacagcacaggtcacagtaaggccaaaaatgtgcatactcacagagttagagagagggatggtgattcagaccaggatgtagcactcaaacttgcccaggagcg

SEQ ID NO: 300783 - DNA, 90 bp, Homo sapiens
ctaagaaagaatcttgtcactttagccactgctactacaggtgagagatgctgcaatattggctatagtggagatttatagacatgtggg

SEQ ID NO: 300784 - DNA, 71 bp, Homo sapiens
aagaacagctgtggaaagaagttgcaaaacactggagccatccaaaactctgtttgtcaaaggcctgtctg

SEQ ID NO: 300785 - DNA, 82 bp, Homo sapiens
gatcccctatgagagtcccatcttcagcagaggcatgccagatttcctggagaagctgcacatggccactctgaaagccaag

SEQ ID NO: 300786 - DNA, 132 bp, Homo sapiens
tgtttgttaggaccaaacctcaaagcatggctaagagtgttcagtagaaatgggaagactatgaccgtctgaggcctttatcttacccaatgaccgatgtcttccttatatgcttctcggtggtaaatccag

SEQ ID NO: 300787 - DNA, 75 bp, Homo sapiens
ttagaagacttgactggtcttacattgctgcatcaagaaacccaagctgctgagtgttccttgcctgtatctccc

SEQ ID NO: 300788 - DNA, 98 bp, Homo sapiens
tccaatacttacagtaatctcatattaacaggtgattttacaacgagatgctgctctccatagggatgctcatgctgtcagccacacaagtctacacc

SEQ ID NO: 300789 - DNA, 100 bp, Homo sapiens
cgccgcccggcgcgcacaggctgtagcaggttccggcggacggcgttgcgaaggatctaacttggcaagatgagcactctgcccctttctcctgggaaac

SEQ ID NO: 300790 - DNA, 101 bp, Homo sapiens
tcgagccagccggcaagacgaatgtccgggttgtcacttttgagaaatcccagccagccagagcagacacgatgaggcgagtggtacgacagagcaagttt

SEQ ID NO: 300791 - DNA, 90 bp, Homo sapiens
gatgtcgcagacggccatgtccgaaacctacgctccaatactgttggcactagtggcaggagaagctgctggtatcatggaaaacataag

SEQ ID NO: 300792 - DNA, 82 bp, Homo sapiens
agcgtgaccgagagcgcgaatatcgtcatcgttagaagtccagaacacatattacataatggagccgggagacagactaggg

SEQ ID NO: 300793 - DNA, 100 bp, Homo sapiens
cgattatccggaggagctggaagatgacgacgaggacgccagttactccacggaaagcagcttcagcagcactccagaccgagcgtgtgccactggacct

SEQ ID NO: 300794 - DNA, 102 bp, Homo sapiens
gcatccgcacccgctctaagtcagccaaaagtgcatgtgagggaaccctggcttgttcaacctgtcacctcatctttgaagatcacatatatgagaagttag

SEQ ID NO: 300795 - DNA, 95 bp, Homo sapiens
taacattccaacacataaaaattatttatccaacagctcctcccagaactctaagaaggagctgatgtggaggagcagctgagacagttcaagat

SEQ ID NO: 300796 - DNA, 100 bp, Homo sapiens
tgatgatcacgcagctggctggcttcagtggaccattttctggatatgccgcagaaggatccgtgccagaagcaagcctgtgagatacagaaatgtttac

SEQ ID NO: 300797 - DNA, 100 bp, Homo sapiens
atgatacttgtctgctggctaccatggggctgcagctgaacatcactcaggataaggatgcaatgcagtatgcttctgaatctaaagatactgaattggc

SEQ ID NO: 300798 - DNA, 75 bp, Homo sapiens
caagctcatattttgaagtgtttacgggaagctgaagagggaactacccttttcattccgatcaattaatacgag

SEQ ID NO: 300799 - DNA, 100 bp, Homo sapiens
tcgcctgcacagatcagctccggagaggggaaaaccacgctcctcggaccaagcctcgggagctaagatgcagccgctctctgctccctgccccaatgaa

SEQ ID NO: 300800 - DNA, 75 bp, Homo sapiens
atgagaaagccctgaagcagaagggcatcaccgtgaagcagaagaggtcagagtggtgctgggaacaactgggcc

SEQ ID NO: 300801 - DNA, 100 bp, Homo sapiens
ctcccgagtagctgggaccacagacggcaactctgtaccctggtgtggtttttggcatctgcttcgtattgaattgcttcatttggggaaagcactcatc

SEQ ID NO: 300802 - DNA, 90 bp, Homo sapiens
gaaagctgcctcaagcctacagacttccagatggaatttcgtttccctctcaggactttgagcagcctctgaagagccaatccattcagg

SEQ ID NO: 300803 - DNA, 100 bp, Homo sapiens
tttcaatcgaatatctcatggcctacagggactttctgcagtgcctctgagaacttacgcagatcagccgagatatcttcaagaagcctacttatggacc

SEQ ID NO: 300804 - DNA, 97 bp, Homo sapiens
ctgctgatgctgaagctgtgcaccgaggtccgtgtggccaacgagctcaacgccaggcgccgctcctttacagcggagctggagtttgttcagatca

SEQ ID NO: 300805 - DNA, 100 bp, Homo sapiens
tttaggagagttagagaagtgccttgaagatccagaaaaactaggatccctttttgttaaacaccgtgagtgcatctccatccacgttggccaggctggt

SEQ ID NO: 300806 - DNA, 75 bp, Homo sapiens
cagggatcacttcatccgaaccctcagcctcaagccgctgctcttcggctatgtcttgcccagccacgtgactga

SEQ ID NO: 300807 - DNA, 142 bp, Homo sapiens
ggaagattcaaacaaccaaccctgatttcctgcttctccttttcatgagtgttcctgtggtctctgcacctcctttctagaatggatcttggagaatgtctgaaagtccatgacctggctttaagagcggattatgaaattg

SEQ ID NO: 300808 - DNA, 80 bp, Homo sapiens
ggagctcatcggcactctgaacgcggccaaggtgccggccgacaccgggggatatgagactttctactcggaatatcctg

SEQ ID NO: 300809 - DNA, 100 bp, Homo sapiens
ctctcgactcagaagattatagccttagtgaagaaggacaagaactctcagatgaagatgatgaggaccctgatgctcccataagacagaaaatgcccct

SEQ ID NO: 300810 - DNA, 75 bp, Homo sapiens
tactgaaactcagtgcactctagctaatagagaagccgatgtactatttgaagtattatttgatgaagaatttcc

SEQ ID NO: 300811 - DNA, 49 bp, Homo sapiens
gttctgatcactactgacttgttgctgtaccgacctcttgacacttcct

SEQ ID NO: 300812 - DNA, 75 bp, Homo sapiens
gtgcaccgtatcctgtcacttctggatgtgagttatggctgattgtcctcacacaattggtgttgaatttggtac

SEQ ID NO: 300813 - DNA, 50 bp, Homo sapiens
aatacatcatatcctccttgaaacaacagattagttggagtcccgacagc

SEQ ID NO: 300814 - DNA, 76 bp, Homo sapiens
agggtctggaggagccttctcaagaacagagagccctaatttgtttagaactgtaatatgcacagttaaaacaact

SEQ ID NO: 300815 - DNA, 74 bp, Homo sapiens
gggcagctcgggaacatggccctggagcggctctgctcggtcctcaaaggatcaacttgcagcagacatgtaca

SEQ ID NO: 300816 - DNA, 98 bp, Homo sapiens
ctggagtctgcgaaggccgggacccggttccccggcccacagtgggggtgtgcaaacccgagagaactggattcaattagcagagcctcacagacaat

SEQ ID NO: 300817 - DNA, 100 bp, Homo sapiens
ggcgcccggatgggcagctgaggtgatgacaatgggaagaaggccaacaaccccaaccactgcaactgcatcatagaccagatcttcacaggcgggttgc

SEQ ID NO: 300818 - DNA, 75 bp, Homo sapiens
atgcagctgttgtcggcctcctgctgattgtaaaccatggctgtgtggatacaagctcagcagctccaaggagaa

SEQ ID NO: 300819 - DNA, 74 bp, Homo sapiens
tgtggcgactgtgtggagaaggaatatcccaaccgggattggccatttgatgatggagctccaccccctaatca

SEQ ID NO: 300820 - DNA, 100 bp, Homo sapiens
gctgaatttggcaggaaataatcttaagggttatgtggtccgaatcagtggtgggaacgacaaacaaggtttccccatgaagcagggtgtcttgacccat

SEQ ID NO: 300821 - DNA, 75 bp, Homo sapiens
cagctgaacctggtgttttagaggataccttggtcccagagtcatcatgaaggtgaatatgagaagggcgtagac

SEQ ID NO: 300822 - DNA, 100 bp, Homo sapiens
tgtacaaagtggaatttcctactgtatcatgatcatcataggagtggagaacatgcacaatgtgcaccaagggtcaggtagtaagtggccagtaccggat

SEQ ID NO: 300823 - DNA, 76 bp, Homo sapiens
ttggggattccactctccagtgtaatgattattgacaacagcaacacagtcactcctggcggcaaaccaaacaaaa

SEQ ID NO: 300824 - DNA, 100 bp, Homo sapiens
atatatttgtactggagatttccctcctggaaccaaaggaaatacatttgtacacgatcccaagagctccactggttcaacagcctctcctccagtttcg

SEQ ID NO: 300825 - DNA, 83 bp, Homo sapiens
tgtacgccgagcacccaggcgactgcctcatcttcaagttactggggcttccggatgcagatgacgatgcgtttgaagagtac

SEQ ID NO: 300826 - DNA, 83 bp, Homo sapiens
acttaatacagcaagaaagaccatcaagtttaccagagcttgaagaaatccgcaaatgtgggatgaaaaacttccgtaacatc

SEQ ID NO: 300827 - DNA, 51 bp, Homo sapiens
caacagagtcattgatcttagggtacgagtgcttccatatccatttaccca

SEQ ID NO: 300828 - DNA, 88 bp, Homo sapiens
tggagcggcgcagccggagtggggccgtgaggtgaagtgaaactgctgctgtcctccgagacacccattgaggggaagaacatgtcct

SEQ ID NO: 300829 - DNA, 75 bp, Homo sapiens
ccgctggagaaggatggcatcaccgttgtggccaccagcttgggctccccacggagggcagcaagtgggacttgg

SEQ ID NO: 300830 - DNA, 91 bp, Homo sapiens
ctctttggatacctaacattttacggtcctgatgaagttgtagggccagaaggaatggaaaaattttgtgaagacattggtgttgaacctg

SEQ ID NO: 300831 - DNA, 125 bp, Homo sapiens
ggagatgggcctactcgcccgccaccctgcgctgccgccgctctgaggagttaaaggagcaaattcaggacctgacacataagaactggtggagaattacctgcagaatagatgctgaatctttg

SEQ ID NO: 300832 - DNA, 100 bp, Homo sapiens
tcgaaggccctcagcctgcggatgtgaggctgatgaagaggaaaacaggtcaataactgggagatggacaaactagagatggaagatgcagtcacatttt

SEQ ID NO: 300833 - DNA, 83 bp, Homo sapiens
caccaggctaaggactgtatcgactcctttgttactcactgtgttcggtgggaatgtaagacggacttagatattgcatacaa

SEQ ID NO: 300834 - DNA, 50 bp, Homo sapiens
ggcgaaaaaggtggatttgctagagtgcacggcctggagatagagggcag

SEQ ID NO: 300835 - DNA, 110 bp, Homo sapiens
cggccccccgcgcccccgcgcgccgcggctcctgttgacccggtccgcccgtcggtctgcagcgcggctgagccaagctctactccaggaagtgaaaatgtgctgcctcg

SEQ ID NO: 300836 - DNA, 100 bp, Homo sapiens
cagctgaataacccttttaacgagtattccaaatttgatggcaaggcaaaggaaggatgaactggagcagaggatgtcggccctgcaggagagcaggcgg

SEQ ID NO: 300837 - DNA, 82 bp, Homo sapiens
gacgggccgagcctgccactgcaccatgactcctgtgaggatgcagcactccctggcaggtcagacctatgccgtgcccctc

SEQ ID NO: 300838 - DNA, 82 bp, Homo sapiens
cagcgacagagccaaaatcagagctggaacctgaggagagagagcactacaaacaccactggtttcccgaaaagccgtccaa

SEQ ID NO: 300839 - DNA, 100 bp, Homo sapiens
tggatacgttggagcagacttgaaagtcttgtgtaatgaagcaggtggatctccttacgtagcagccaaaataaatgaagcaaaagacttgctagaaaca

SEQ ID NO: 300840 - DNA, 96 bp, Homo sapiens
aagaactggctcaagaaatttgcctcgaaaaccaaatgccacacgctggcagctctgaccagccccacccctccatacaacaaggtttgcacgtac

SEQ ID NO: 300841 - DNA, 100 bp, Homo sapiens
cactggctttgctactgacatactcaggcacagagaaatttcccgagctctgtggctgtgggtgagcgtggaggatgctcagatgcacaccgtcaccatc

SEQ ID NO: 300842 - DNA, 90 bp, Homo sapiens
tgagtcccacgaattcagttcccacgccaaaccagaccccatggcctgctcagcctcagcgtttgcagaaaaaacttcagcatgtgccag

SEQ ID NO: 300843 - DNA, 90 bp, Homo sapiens
acttaatacagcaagaaagaccatcaagtttaccaaaccttcaacaactagtactgcttcaaattatccagatgtgttaacaaggccttc

SEQ ID NO: 300844 - DNA, 98 bp, Homo sapiens
tggaggctgctggcaatggcctacgtcgtcataccgggcttccttgccctgtccggggtttgccaagatggtggataagaatatttacatcattcaag

SEQ ID NO: 300845 - DNA, 90 bp, Homo sapiens
agctggccatgggctttctgggcagcagacttcagcaggaaatcctagatgtccagtctcgtctctttgaatgttccaataagaccggcc

SEQ ID NO: 300846 - DNA, 97 bp, Homo sapiens
gttgtagcaggtctaaaagttcaggtccagatggcagtggcagcaccatgatgcaaaccaagaccttctcctcttcctcctcatccaagaagatggg

SEQ ID NO: 300847 - DNA, 101 bp, Homo sapiens
cgggctcccagggcaggtgccgcgggctgcgggcaggtggcggcgcggcgcgggctggcggtggctccacgctggggtatggccgtcaatgtgtactccac

SEQ ID NO: 300848 - DNA, 98 bp, Homo sapiens
aaacatctgctgagaaagtacttcattgaagccagtcccttgcccagcagttatccgggaaaaacaataaaccgagaaaactggtgtacaatagagcc

SEQ ID NO: 300849 - DNA, 100 bp, Homo sapiens
ggctgagaggaatcttctggagtactcttattttgaaaagttgtgagtacagaggtggtcagagcccaagaagaatgggaagctgtggacaccatccagc

SEQ ID NO: 300850 - DNA, 100 bp, Homo sapiens
tgtgcctggatgcagctcacctccgccatcactgctgtgaggaccaatgttgctaacctcagcgatgcagccttatggaagatcaagagagctcgctttg

SEQ ID NO: 300851 - DNA, 83 bp, Homo sapiens
cagcggccgggatagccccggcggagcccgcagcttccctgccggatggtgattgctcacaccaaagccttggacccctccca

SEQ ID NO: 300852 - DNA, 83 bp, Homo sapiens
agtaccgcctccttcccagccgcgcggcttcctccagacctctcggcgcggggacatcgataaagttgatgagttaatgcagg

SEQ ID NO: 300853 - DNA, 99 bp, Homo sapiens
ggcgaccgagggaatgatccttactaaccacgaccatcaaatccgtgtcggagtccttacagcatgatgccttcttctgtagagtgggcgctttgcaga

SEQ ID NO: 300854 - DNA, 87 bp, Homo sapiens
cgatggtcggcggcgcccggatgggcagctgagctcttcctaaggaatggaagcccagactgcctgggaggcaggagacctcgtttc

SEQ ID NO: 300855 - DNA, 100 bp, Homo sapiens
gcgccacgctcagcagcatcagacacatgatccgcaagaacaagtaccgccccgacctgcgcatgatccaagagctcctgtctccccaggagccccccag

SEQ ID NO: 300856 - DNA, 75 bp, Homo sapiens
tcaaagggtactttttagaaccaaaggtgttaactaaggaccttgaaaggcatgcagctgagttacaagcccagg

SEQ ID NO: 300857 - DNA, 90 bp, Homo sapiens
gtcttcctcaaggtggggttcggggggccaccgaatcgctgtcacgccggcagggtttggacagaggagccaaaggccaaatttccactt

SEQ ID NO: 300858 - DNA, 100 bp, Homo sapiens
cccactccggaaatgtcactcccaccgccccaccgtacttgcaagaaagcagccccagagagataatagtagcagaatttcacaaaaaaatcaaagaggc

SEQ ID NO: 300859 - DNA, 83 bp, Homo sapiens
gagcgcccgaggcgtctgggatggtgtgggaccggaacatccagtcatggataaaaatgagctggttcagaaggccaaactgg

SEQ ID NO: 300860 - DNA, 98 bp, Homo sapiens
ggctgtgcgcgctggcgctgagcctgcagccggccctgccggaacttgctactaccagcaccatgccctaccaatatccagcactgaccccggagcag

SEQ ID NO: 300861 - DNA, 100 bp, Homo sapiens
tcaatgagatccgacggccaaatggagagaattatgcacctgacagcatctattacctttgccttggaatacaggagatcctgtttgaccaaactcagag

SEQ ID NO: 300862 - DNA, 90 bp, Homo sapiens
cgagtctgtatctggatagtcgtaaacttcctatgataattgtagaaggcatgaaacaaaaaatgtggagtattgaaaatattgccttcg

SEQ ID NO: 300863 - DNA, 83 bp, Homo sapiens
aacagggtgatttcaagagacacgaaatacaactggagcacgcaaagcaagcctttgtgcaacgggacaatgctaggactggg

SEQ ID NO: 300864 - DNA, 75 bp, Homo sapiens
ctggcttggtgacgctcacagtgctgggaaggaatctatccaaggttggattcagatgccgaggacacagtactt

SEQ ID NO: 300865 - DNA, 75 bp, Homo sapiens
cgcttcatcatgggcatagatggaggtcggatcatgctaaaaggagataatattactctgctacaaagtgtctcc

SEQ ID NO: 300866 - DNA, 90 bp, Homo sapiens
gtcacatgactagcacatggcaagaaagtttcctacactactgaggtttaggggcactgtgaagcaaaagccacgcctcagaatcccagg

SEQ ID NO: 300867 - DNA, 51 bp, Homo sapiens
cgcagtggtcgcttcttctccttggtggagattctggacgcaaagacaagg

SEQ ID NO: 300868 - DNA, 100 bp, Homo sapiens
tttcggcttccatcccttcgcagtacagatgacagggacatccaacgggctcatagagtggtagctgagcttcaggctgggacgtgcttcattaacaact

SEQ ID NO: 300869 - DNA, 100 bp, Homo sapiens
tggactccagttatgcaaaaagaggacagtcattttgtttactcattcagccctgttgcaggtcccaataaactcttcataaggttgacagaagcaccct

SEQ ID NO: 300870 - DNA, 83 bp, Homo sapiens
caaggtggggttggcatcccccacatacgttgtcgagatgtccacagaaggaggatttggtggtactagcagcagtgatgccc

SEQ ID NO: 300871 - DNA, 100 bp, Homo sapiens
cgcaaactgggcgtctgttccggcgccggacccctatttgcaaaggccttgcactgtccctgtcatataatagatgctcaatacatgtcttttgaactga

SEQ ID NO: 300872 - DNA, 50 bp, Homo sapiens
cagtgtatccagttgtttatggttccaagaatatttgtcaatggtacttt

SEQ ID NO: 300873 - DNA, 100 bp, Homo sapiens
atagtcctggatcttctggggttccctatgcaaatgccaaaggaattggttatccaggtcacagttacctggagaggctcctgaatgttgaggtgcccca

SEQ ID NO: 300874 - DNA, 78 bp, Homo sapiens
cctcaggggcaagtacagttactctggggaggctgtaacagaggaggaaatgattttgaatagcctctctctgtgtta

SEQ ID NO: 300875 - DNA, 100 bp, Homo sapiens
ccggcttcattcagacagcctccaggagacagacattctttgccctggaggctgcccgaatttgtgccaataagtacatggtaaaaagttgtggcaaaga

SEQ ID NO: 300876 - DNA, 51 bp, Homo sapiens
gactggaagagaggacgcggtcgagtaggttgcccccaagtttcctggcag

SEQ ID NO: 300877 - DNA, 101 bp, Homo sapiens
cggacactttgttattggagaaacatgcagattatatcgcatcctatggctcaaagaaagatgattatgacttcagggccacaggtgctgccaagatgctc

SEQ ID NO: 300878 - DNA, 50 bp, Homo sapiens
accaagctccttacttcggtgcttctcccatcaaaggacgtgcacagcct

SEQ ID NO: 300879 - DNA, 74 bp, Homo sapiens
ccagactcggcctttccaacagacttgctatggagagactctatgcagtttttacagattacgagcatgacaaa

SEQ ID NO: 300880 - DNA, 100 bp, Homo sapiens
ttaatccaggtgagactttcacaataagagcagaggatggaacacttcagtgcattcaagaaatgggacgtcggtcatcagatactgaagaagaaagcag

SEQ ID NO: 300881 - DNA, 74 bp, Homo sapiens
acacaaatgaattctataagaccattccccggttttattataggacccttatagttgcctggatcaaagcaaac

SEQ ID NO: 300882 - DNA, 82 bp, Homo sapiens
gcagaaggtgcacagccacagcgccgagatggagaaacttcagtgctctcaagaaggaaaatatttatgaaaacaataaact

SEQ ID NO: 300883 - DNA, 83 bp, Homo sapiens
gggatccttcacccgtgtctgctggtcagtgagaaggtcggaggggccgaggggaccaagctggatgatgacttcaaagagat

SEQ ID NO: 300884 - DNA, 83 bp, Homo sapiens
cttgttccgaggcggccccagaggttgaaaggattgttgacaaaaggaaaaataaaaaagggaagacagagtatttggttcgg

SEQ ID NO: 300885 - DNA, 83 bp, Homo sapiens
ccccaacatgcctcaccctcatctatatcctttggcagctcacagctgttaaacgtttaatgaaagaagcggcagaattgaaa

SEQ ID NO: 300886 - DNA, 82 bp, Homo sapiens
tggaattttctgtaaacttatcactattagatttcattaggtggtgtaaattggtccaatgtaacttgccaggcaactcaga

SEQ ID NO: 300887 - DNA, 100 bp, Homo sapiens
ggagagggggcgctgagctgttggggaagaaatctttcctgttttctgctctgtatgctgcctttatattcggtggtcggcacctaatgaataaacgagc

SEQ ID NO: 300888 - DNA, 80 bp, Homo sapiens
gtttcatgctctttcgaaccctgtcagctgcgggaattacatgaacgacagccttcgcaccgacgtcttcgtgcggttcc

SEQ ID NO: 300889 - DNA, 74 bp, Homo sapiens
atggacggtttcgccggcagtctcgatgagggttactaccagggtggaaaatttcagtttgaaactgaagttcc

SEQ ID NO: 300890 - DNA, 82 bp, Homo sapiens
cgtggcctgcgcaccgacatcgatgcgacctgcacgccccgccgcgcaattgacttgatgcacaacatcacaaaggcgattt

SEQ ID NO: 300891 - DNA, 100 bp, Homo sapiens
ctttagaaaatctcatcatggaaatcacagcacctgattcccaaggcaagacagagcaaatttttcagaacataaaacaagaatatagtcgttatcagag

SEQ ID NO: 300892 - DNA, 113 bp, Homo sapiens
gggcggcggcagcgggtcctacgaggagggctgtcagagcctcatggagtacggaaaaccagtagattcccagacatcgcgaagtgaatctgaaattgtgccaaaagttgcta

SEQ ID NO: 300893 - DNA, 110 bp, Homo sapiens
tgcagttaatgcacgtattttaaactcccgggcctgcggacgctatgcacaggtgatgggcagaatctgtttacgaaagacgtgacagtgatcgagggagaggttgcgac

SEQ ID NO: 300894 - DNA, 99 bp, Homo sapiens
atcccggagctgagtgttcggccaagttggaagtgttgctgtggaagaccagccagatgtcagtgccgtgttgtcagcctacaaccaacaaggagatcc

SEQ ID NO: 300895 - DNA, 82 bp, Homo sapiens
caacatacagacccacagagacagcttggatttgctgctatcatggtgaacttacttcagattgtgcgggaccactgggttc

SEQ ID NO: 300896 - DNA, 89 bp, Homo sapiens
caattccggacacataacaagcagcagtgaggacaccaaagagattcgtcagcgaactgcagctcaaagaaacctttctccaacaccag

SEQ ID NO: 300897 - DNA, 74 bp, Homo sapiens
cctggacaccaacatgatcgagtcgtccaacatgctgggtgtggtatctgtgcgctttgaagaagatgaagaca

SEQ ID NO: 300898 - DNA, 50 bp, Homo sapiens
tccagaggctcggtggatcaatggtcacgagcccgggctggtacagttgg

SEQ ID NO: 300899 - DNA, 108 bp, Homo sapiens
gccggaagcgccaggacaatggggacccgggacgacgagtacgactacctattcaaaggaggctactcacagtcgaactacaactccccggggtccggccagaactac

SEQ ID NO: 300900 - DNA, 83 bp, Homo sapiens
ccggcttgaggggctgcgtgaggcgcggaggcaggagaactcctggaagccccgtcttcctcctcatgcccattgcctgacca

SEQ ID NO: 300901 - DNA, 82 bp, Homo sapiens
gggatcgtgaaggacgccagcatcatacaccggctgttcgaggccttgactgtaggctgagcagtccaaagtcctgagcgcc

SEQ ID NO: 300902 - DNA, 98 bp, Homo sapiens
gcggacagtgaaccggacagtcatcaccatgggccgggatcacattctgattaaacctgtggatttttgtatctaagtttactgaatttgatgcaaga

SEQ ID NO: 300903 - DNA, 82 bp, Homo sapiens
tgcccgtggaccacaggccctcgttgcccagatgcattgaagttgatatcgatgtggagcacggagggaaaagaagccgcct

SEQ ID NO: 300904 - DNA, 82 bp, Homo sapiens
acgagaagtatatgtccctcacactgtgtacagacatgaagccattattatatcaggaaccgaaatggccaagcatatccag

SEQ ID NO: 300905 - DNA, 101 bp, Homo sapiens
attgttggtctgctggtgggactcaatgttctcgatgccaatctctgcttgaaaggagaagacttggattctcagtgaagcgctatgtccggaaaggggtc

SEQ ID NO: 300906 - DNA, 100 bp, Homo sapiens
aacctcctctggcccccggaaaacctaaccatgaagacttgaacttaatacagcaagaaagaccatcaagtttaccaccgccaccggcaactaacctatg

SEQ ID NO: 300907 - DNA, 95 bp, Homo sapiens
gccacctacagaaacaaaatgtcaacaaattgatgggcaaagaggccatgctgcgacagaaggactatgagaccgccaccctctcggagatcaag

SEQ ID NO: 300908 - DNA, 90 bp, Homo sapiens
tcatgacccaggcgggggtcgccgccgtcgccgccgccaccgcggccgagaccgcgcagccggcgggtgacagccgtgagggtgtatgtg

SEQ ID NO: 300909 - DNA, 80 bp, Homo sapiens
ccatctccatcacccaccaacaacaccacaataatccacagccaagggatcgcttacacctgagacgaactacagaacag

SEQ ID NO: 300910 - DNA, 98 bp, Homo sapiens
ctgaaatgattctccagaatttctcctcataaaaaaggggtattccctcagcggatactacacccatccatttcaaggctatgagcacagacagctca

SEQ ID NO: 300911 - DNA, 100 bp, Homo sapiens
cttcagattcgtttctgagatttccttcgtccctgacatcatctctgtgcactgataataaccctgcaggatatgtgatggcgtccagtttggagctggg

SEQ ID NO: 300912 - DNA, 99 bp, Homo sapiens
cccagaggtcgtggaggtggccgtggaggcagaggtggcatggggaaactggagcacccatcctaactgatgatgttagcctgcaggtgttcatggacc

SEQ ID NO: 300913 - DNA, 100 bp, Homo sapiens
ggagcaggagcggggccggaactggagccgaggcgcaggtggcgctggggtcctggcggcagagaccacgtcccagcaggagcggctgcaggccatcgca

SEQ ID NO: 300914 - DNA, 100 bp, Homo sapiens
gcctctgacagctcttgctcaaaatatgcaagaagcatcgactcagctggaagactctctcctggggaggagatgttaaagtaacccatcttgcaggacg

SEQ ID NO: 300915 - DNA, 50 bp, Homo sapiens
ccaagatctgccagaaaattaaattcaataggagtgaaacatccacatct

SEQ ID NO: 300916 - DNA, 97 bp, Homo sapiens
ttacgtgcggcagggctgtgaggcccgccgctcgcatgagcacctcatacggctgcttctggagaaggtattatacctgaagaaccttagccctcgg

SEQ ID NO: 300917 - DNA, 87 bp, Homo sapiens
aaaccctgctgatgtcagtgttatatcctccaggaatactggccagaccatggcaaaagttataaccaccgtactgaagttccctga

SEQ ID NO: 300918 - DNA, 76 bp, Homo sapiens
cggacaggctgcagctcgtgtgcaacgcgctactggcccagttcctgtgccttaagaacattagaaccttcctgtc

SEQ ID NO: 300919 - DNA, 100 bp, Homo sapiens
cggtggagccgccggagtctgagaaggctggccagctaaactatgtggatccagctactggctatgtggtgctcacacagattgcccacttgcaaagagg

SEQ ID NO: 300920 - DNA, 83 bp, Homo sapiens
gataacaccctgtaacagctgagctaactatatgtcagaaagcatcagcttttctcgatggacccattcatctaatgaaatat

SEQ ID NO: 300921 - DNA, 100 bp, Homo sapiens
cttcaggagtctgtcaaagagaaagtaacaagaatcattcttgcagcatttcgtttttctgagtttaaccagtaatgccattcagttgccaatctcaagc

SEQ ID NO: 300922 - DNA, 101 bp, Homo sapiens
cgacaagccgctggcagccgcggatctcaccgccgctcagggctactgcagcactggggtgtcagttgttggtccgacccagaacgcttcagttctgctct

SEQ ID NO: 300923 - DNA, 97 bp, Homo sapiens
aaatcccactttagatcttacagctaactgtgtgccttagaaaccaggagaaccagcagaaatccaccaatgtagtctatcaggcccaccatgtgag

SEQ ID NO: 300924 - DNA, 90 bp, Homo sapiens
agatctgtttcccaacattgagctgcctgtcattgactatggcaagctaacaacctgagagaagattacaaatttcaccacactttcagc

SEQ ID NO: 300925 - DNA, 100 bp, Homo sapiens
ctgcatgcagagatgctgtggttcggggggtgctcgtgcctggagaagttccctgtgatccagcacttcaagttcgggagcctgctgcccatccatcctg

SEQ ID NO: 300926 - DNA, 75 bp, Homo sapiens
tccccgggacccgcctgctgagtggacccgggtgcagcacgctggctcttctcctgaacttcctcgcctgcctgg

SEQ ID NO: 300927 - DNA, 90 bp, Homo sapiens
ttttctttggtccagtttcccttatgggagtccttaaaaattagaagcccaggacccaggaaggagacacaggaaatttattcaaagtcc

SEQ ID NO: 300928 - DNA, 82 bp, Homo sapiens
actgagctgccatcttttttgtgtgtggccagtccacgactttcaccaacaatcaccagtggtttacacaacattgcaagga

SEQ ID NO: 300929 - DNA, 74 bp, Homo sapiens
gaaagagagcaaggggaaggatcgggagtacacagacatcatccggacactcatgaggaccatgatacttccac

SEQ ID NO: 300930 - DNA, 87 bp, Homo sapiens
cctggccttctgtatcttcatggtgcggctcatcttcgagaggttgcaaatgtttggcccactaaatatggattgctgtttgaacga

SEQ ID NO: 300931 - DNA, 100 bp, Homo sapiens
aagtttagtagtgctcctattaaggtttggttacaaaagtacggctaccttccaccgactgaccccagaatgtcagtgctgcgctctgcagagaccatgc

SEQ ID NO: 300932 - DNA, 83 bp, Homo sapiens
gcactgccctttttgcaccccagggagctgctgctgagctggagataagatgggtagactgctacttcccttttacacatcct

SEQ ID NO: 300933 - DNA, 90 bp, Homo sapiens
gcggttcttctccagcgccctggcctccctcaccttggacacctcgcttgggtctcctctgagcctccggcctccataagacccaaaaca

SEQ ID NO: 300934 - DNA, 100 bp, Homo sapiens
gcaccttttgattgagacttggcaagcacatgaaccaaagagaaccctgtacagtaagaaatatggtgtggacctcatcagatacactcatgcagcaaac

SEQ ID NO: 300935 - DNA, 89 bp, Homo sapiens
gaggatctggtgtaccaggcgaagctggccgagcaggctgagcgatacgacggaagctcttcgtgggcggtcttgactggagcacgacc

SEQ ID NO: 300936 - DNA, 96 bp, Homo sapiens
caattcattttcctacagactaccccttcaaaccacctaagctcctgaccaaggatcctgagagccgcgtgtccagccttcatgacatacagagcg

SEQ ID NO: 300937 - DNA, 75 bp, Homo sapiens
taaaaatgattcgggaatatcggcaaatggttcctaaaagtaaagctttagaggccaccaaattggcaattgaag

SEQ ID NO: 300938 - DNA, 51 bp, Homo sapiens
ccccagcccactgggctacgcagatataagagttcggaccgcccagcacac

SEQ ID NO: 300939 - DNA, 100 bp, Homo sapiens
cgacagccgacgcgcagatagcagagccatccttgggggaagacactgatcaaggtggcagaagctgaaaagcaactgggagccgcggagagggatttta

SEQ ID NO: 300940 - DNA, 100 bp, Homo sapiens
ctcatgcctcgaaatctcctgacagtgttaatggaagtgaaccaagcattcctcaggacaaatcccaatctgctgaaatatgggaaaaattgaattttgg

SEQ ID NO: 300941 - DNA, 96 bp, Homo sapiens
ggttttatattcatccgttctggaaactgagaagcgagggtgacaatcttcaggggccctgtcaaagttaacccgtggattgaaagatgaatcgct

SEQ ID NO: 300942 - DNA, 75 bp, Homo sapiens
tgcagcagcacaagctgaagatgtccgcaaccatccctctgttcatgcgaaacaaagatgtcgctgcagaagcgg

SEQ ID NO: 300943 - DNA, 74 bp, Homo sapiens
gccacagagtaatggagggatgcgcctgcatgactttgtttctaagacgcactatcctgaggagcgacatgtgg

SEQ ID NO: 300944 - DNA, 73 bp, Homo sapiens
gagaatgtaagacaggaaaataattaaatattcttaccgaggaagcatctcgaagaacagccctgccacactc

SEQ ID NO: 300945 - DNA, 100 bp, Homo sapiens
ggagacgcacaacttcaagctgccccaggacgatctccagggcatccagaagatctatgcaggggacctcctcgcccacgacctgccccagcagttggag

SEQ ID NO: 300946 - DNA, 94 bp, Homo sapiens
gccgacagaggcagacacagaaggccgacaccctgcacctgatcacagattctgctggccatattctctactccaaagaggatgcaaccaaggg

SEQ ID NO: 300947 - DNA, 98 bp, Homo sapiens
cagagtacgatactcaggtcaaagggattcctggtcacctcccttgctcttttcttcctggatgaaacaagaagataatcagggtgtctgtgcacacc

SEQ ID NO: 300948 - DNA, 151 bp, Homo sapiens
cacgagagtctgcggcttcgttcttgaagttagtgagaccaaaaacccaccaattctggacacattgggattaaagaattaaatgtgagggagtctgacgtaagagtttgtgatgagtcatcatgtaaatatggaggagtctgtaaagaag

SEQ ID NO: 300949 - DNA, 82 bp, Homo sapiens
tcgagctgtgcgggcgggcggtgagcgcccatatgggggttctggagagcggggtgtgggcgctgataaagcagtttgtgtc

SEQ ID NO: 300950 - DNA, 74 bp, Homo sapiens
acacaatgtcggggatggacctccagatttccttactggtgtcagctgtgatgcatgtttaaaaggaaattttc

SEQ ID NO: 300951 - DNA, 90 bp, Homo sapiens
cggatcgggtggagtgtaggtcatatcgccgcggctatggagttactagtagagaaagcaatcagcagtgcttctagccctcagagccct

SEQ ID NO: 300952 - DNA, 82 bp, Homo sapiens
gcggaggcctctaggcagccgcgcagcttccgtgtttgctgcgcccgcactgcggcatgttatttgaaagcaattgagacgc

SEQ ID NO: 300953 - DNA, 75 bp, Homo sapiens
ctgctgagtattacaggcatttttttctaatacaaagtcttgtagtgtggcaatggcaccagcatgatatcattg

SEQ ID NO: 300954 - DNA, 98 bp, Homo sapiens
ttggagtatccattcccccaaagaagaaacaagttatttcttgtaatgtctgtcagcttcgctttaactcagatgacaaaactttcggtttgaagaat

SEQ ID NO: 300955 - DNA, 90 bp, Homo sapiens
taaacaaagagtctgtgagcccataatgctcacggaagccctcaatctagaagagtagaggtccaaaggtgccatatgttcacactgtga

SEQ ID NO: 300956 - DNA, 85 bp, Homo sapiens
gccttcagggagcgtggagacagaaagtgaagtcactgcttttgctgtcttggatcaagaccagaaagaaattattgataccaat

SEQ ID NO: 300957 - DNA, 100 bp, Homo sapiens
gagtcggcgtaaagcacccgggcgcagccggagccggtgccgcagctgcgatggccgtggccgtggggagaccgtctactgagagtaatcatgacacggc

SEQ ID NO: 300958 - DNA, 76 bp, Homo sapiens
ggcggattccagccccgagcgggacagcgcggcggggagcgacgagttctcaggaatcagatagctcgcagtcggc

SEQ ID NO: 300959 - DNA, 101 bp, Homo sapiens
ggcagttgaaccgaccatcagcttatacaatggagtacgacaaggagttctcccctcgtcagcgacaccacaaagagttcaagttcaacttatcccagatt

SEQ ID NO: 300960 - DNA, 98 bp, Homo sapiens
ctgctcccgccctttcgctcctcggccgcgcaatgggcacccgcgacgacgagtacgactacctctttaaaggtttgtgggggagagaaaccttattt

SEQ ID NO: 300961 - DNA, 89 bp, Homo sapiens
gcgtgggtgagcggcgcagcggcggcagcggagagcgagagaggggagcagaccttagctggatctccaaaatacaagtgaatcacccg

SEQ ID NO: 300962 - DNA, 83 bp, Homo sapiens
caggatcgcctcacagtgggggtgtacgagtcggccaagttgatgaatgtgtgtggtgctggaggctgtggcatggctagcag

SEQ ID NO: 300963 - DNA, 98 bp, Homo sapiens
atgaaaatatcactacgattcagtgctactcccttagtaactatgcagttttaatggtacagcagggaagaactggaaactcagagaaagaaactgcc

SEQ ID NO: 300964 - DNA, 74 bp, Homo sapiens
gttccactgaaatcacaatggaaagtcttgacttgactgctggagaatgctggaggagaccttaaggatggcca

SEQ ID NO: 300965 - DNA, 100 bp, Homo sapiens
cttgaatgacatccgagcgaaagagaaagagatagtagctgtagatccaaaatgacctctgatctgctcagtctgggccacaagaaaggcctggcatctc

SEQ ID NO: 300966 - DNA, 100 bp, Homo sapiens
ttatcagcaggttgcaggtgaacatggccttgaggactactgttcgaagatttttggaagaatactgagaacggcataaagtgaagatcgacatttaaaa

SEQ ID NO: 300967 - DNA, 83 bp, Homo sapiens
agccttggtctgagtggactgtcctgcagtggagacctttggcgacttggcctttggcgacatcttcctccacctgctcacgg

SEQ ID NO: 300968 - DNA, 83 bp, Homo sapiens
aagaggaagaggaaagcaaaggagtcagggatggctcttcctcaggaccctttgtggaggagttgtttgaagtgacatcctgt

SEQ ID NO: 300969 - DNA, 101 bp, Homo sapiens
agccgccggaggaggagccgcgggcaacgagcgcgggtccaagcctgtagccccaaatcggataatctctgcagctgataacaagcaaaagagaagccagg

SEQ ID NO: 300970 - DNA, 98 bp, Homo sapiens
ggagacctcgctgcgctcatggcgtcgcccggggttgttatgaggctcaaaggaacggctgctgtgaaaaaacatgctttgcaatttatgaagcactg

SEQ ID NO: 300971 - DNA, 87 bp, Homo sapiens
gataatcgcagcaccaacctgctggtcaaaatgcagatcttcgtgaaaacccttaccggcaagaccatcacccttgaggtggagccc

SEQ ID NO: 300972 - DNA, 75 bp, Homo sapiens
gtcgggttattcgagtgaccgagaccgcggccgggaccgagggtaccccaagaagctagtgcagacttattcagt

SEQ ID NO: 300973 - DNA, 83 bp, Homo sapiens
cgaacccctctgggatccccgccgctctgtctacaacccgagccccattggatgagaatgacctagaggaagatgtggactca

SEQ ID NO: 300974 - DNA, 80 bp, Homo sapiens
taggaaaccggtaccaggcagacatcaccgacttgttaaaagaaggtgagaagccctaccactgcaactgggacggctgc

SEQ ID NO: 300975 - DNA, 75 bp, Homo sapiens
ccctaagggtcctaaccgggggaccttgcctcatagtattcgatcagattcagaagatatctgtttatttacgaa

SEQ ID NO: 300976 - DNA, 80 bp, Homo sapiens
gcaggaagcagctcaccttccaccggagtacgagagggcctccaaagtggaccagtttgtgacgcgcttcctgctgcggg

SEQ ID NO: 300977 - DNA, 83 bp, Homo sapiens
gcagttcatcacatcattcatgattttcaggctttccttaaagtttcccatgtctcaatggactcctgaatataacgagctct

SEQ ID NO: 300978 - DNA, 100 bp, Homo sapiens
caacatcaccatgctggtcagcttggtcatgatctaccagttcattgttcagagtggtggacatgacaacagagtcaactgcatacagtggcatcaagac

SEQ ID NO: 300979 - DNA, 83 bp, Homo sapiens
aaactccagcgtgtctccagccgtgacctgcctagagctggaacgttacctccagagcgagccctgctatgtttcagcctcag

SEQ ID NO: 300980 - DNA, 83 bp, Homo sapiens
cgctgcctggtgccgagagcttcccagggtcgcagtgcctccggagccagcgtggtggccatagacaacaagatcgaacaggc

SEQ ID NO: 300981 - DNA, 75 bp, Homo sapiens
ccttggtcgccgcgtccttggctggcgtacgactgcaagaacattgccaacatcatgaagacactcgcctatcga

SEQ ID NO: 300982 - DNA, 82 bp, Homo sapiens
caaagggtaaatgtaccctggaagagggatactggacctgtgatagtttcagaagaggagccccgccgaggcatgagggccg

SEQ ID NO: 300983 - DNA, 100 bp, Homo sapiens
atgaaactgaaagagcgagtgctgatacctgtcaagcagtatcccaaggattggccatttgatgatggagctccaccccctaatcagatagtagatgatt

SEQ ID NO: 300984 - DNA, 100 bp, Homo sapiens
catgaactagtgacctggaaagctcttcttggatccctcgtggaaactacatagaatctaatcgtgatgactgcacggtgtctttgatctatgctgtgca

SEQ ID NO: 300985 - DNA, 100 bp, Homo sapiens
gtttcccacttgattacccgttaagtcccccaaagatgagatttacctgtgagatgtttcatcccaacaggtcatccgcacagaatggcagcgcattaaa

SEQ ID NO: 300986 - DNA, 51 bp, Homo sapiens
cccccatgggccttcctcgacccaaaagtaattacaagtagtggctacagc

SEQ ID NO: 300987 - DNA, 100 bp, Homo sapiens
gttctctaggccttttagaaaacatggtatgcttcagaagtgtccttctgttgatgacttcgtaagtgccctcgtttccgacttggatctggacttcgaa

SEQ ID NO: 300988 - DNA, 101 bp, Homo sapiens
caagtgacgctgacattaaggaccagccagaaaatggaccctatgtactcggaactgggcttatcttgtacgctttatccaaagaaatatatgtgattagc

SEQ ID NO: 300989 - DNA, 82 bp, Homo sapiens
ccagatcaacacaattgatagtttgtggtaaatatgccagctctagaacacatgaatcagattttacacatcttgtttgtat

SEQ ID NO: 300990 - DNA, 82 bp, Homo sapiens
tcctgaggaggacccagagcaggacagcggcccggaggacctgcctctcgtcagccacggagaccgcccagcagttgaagcg

SEQ ID NO: 300991 - DNA, 101 bp, Homo sapiens
tgaaattaccaactgctttcctttccctcagcacacagaggatgatgctgactttgatgaagttaaacacagtgggaatatcacttttgatgagattgtca

SEQ ID NO: 300992 - DNA, 100 bp, Homo sapiens
ctcctggggtcccgccgttgttgcctaatccgtatattatggctccagggctgttacatgcctacccgctatcagttgagggatttgcagttgataaaat

SEQ ID NO: 300993 - DNA, 100 bp, Homo sapiens
cagaaaatacgtggttggagagctcatctggaattttgccgatttcatgactaaccagtgcactcaaggagttgcccctggtcctgtaattggacttcag

SEQ ID NO: 300994 - DNA, 82 bp, Homo sapiens
cagaagtccagagctgaggactgcctgtttgcaggcttcaacggaccacaccaaaatgccatctcaaatggaacacgccatg

SEQ ID NO: 300995 - DNA, 80 bp, Homo sapiens
tttgtatatgtgtaaacccaaaaggagcatgaaacgagacgacaccaagggccgttgctccagggagaactgcaaatatc

SEQ ID NO: 300996 - DNA, 90 bp, Homo sapiens
gagtccagcccaggaaaatggagagggaccggaccaccacggtggtgaatgtggaaggggatgccctgggtgcaggcattctccaccacc

SEQ ID NO: 300997 - DNA, 82 bp, Homo sapiens
gtcccaatcccccactctttccgccctaatggaggtctccagtttcgtgaaaaatgtactctgacctgaatcctgaattttc

SEQ ID NO: 300998 - DNA, 50 bp, Homo sapiens
gtcggcccttgccttggcagagctgagacataccagaaggtagttttgct

SEQ ID NO: 300999 - DNA, 75 bp, Homo sapiens
ggggccaagggacaatggtcaccgtctcttcagaaaactgattgggaggtagctattaaaagtattaataaaaag

SEQ ID NO: 301000 - DNA, 100 bp, Homo sapiens
ctctgctgctgtgtggtgcgaggctgtgagcagatgggctttccttctaaaacagacagccctagctgtgaatattctcggtttgattttgatagcgatg

SEQ ID NO: 301001 - DNA, 122 bp, Homo sapiens
cggcgcgggcactgctttccactcggctcctgtcgtccgttctctcaggctcccgttcagaatcttgtggaagaagaatgaagttgctgattatgaagctacaacattttccatcttctata

SEQ ID NO: 301002 - DNA, 90 bp, Homo sapiens
gcgggttgcctccgctccccatacggcggccccaggtggatctccttacgtagcagccaaaataaatgaagcaaaagacttgctagaaac

SEQ ID NO: 301003 - DNA, 102 bp, Homo sapiens
cagaggtgccggcaggaattcaaagcagcagctttcggcagaggagctggatgcccagctggacgcctataatgcgagagcctatgttgtccttggccagtt

SEQ ID NO: 301004 - DNA, 82 bp, Homo sapiens
taaatgtcagtggaaaggagagctaccatcactaagttttcggctttgtgagaaaccttaccatcaaacacgatggccagca

SEQ ID NO: 301005 - DNA, 83 bp, Homo sapiens
acaaaccccaagtcctccttgccaggccttcaaccactatctcagtgcaatggggggatatgagactttctactcggaatatc

SEQ ID NO: 301006 - DNA, 102 bp, Homo sapiens
catggacacagatgctccacaagttagtcacaagcctggtggagagccaaagatcaaagtgtgatccctcacatccacaaatctctgattggaaagaaggga

SEQ ID NO: 301007 - DNA, 50 bp, Homo sapiens
cctgaagatgaggaagattacacagaaacagattgtctcagtttacctag

SEQ ID NO: 301008 - DNA, 50 bp, Homo sapiens
cgcgagtccacgcagctccccaggtaaagaagctaagtggaagagtgttt

SEQ ID NO: 301009 - DNA, 90 bp, Homo sapiens
cactgaaggggttgccgcagccttgttgctcttaaagttgtcagtggctgactcacaggctgactcagatgccactgcatcatcagataa

SEQ ID NO: 301010 - DNA, 83 bp, Homo sapiens
gcagcgcgtcgtggggcgagcggcaggtggtctttgggaagaagcttcctgcctttgccaccatccccatccaccagctgcag

SEQ ID NO: 301011 - DNA, 88 bp, Homo sapiens
aggattccaagtaactcttatttgggtccaaattccaagcctgtagtgtccttcattgctggtttaactgctcctcctgggagaagaa

SEQ ID NO: 301012 - DNA, 101 bp, Homo sapiens
ggtgaaaatcgtggccgggcgccatttgccagtgatggaccgtgctagtgacctgactgatgccttcgtggagaattcccgtactgattagtcaacagtgg

SEQ ID NO: 301013 - DNA, 82 bp, Homo sapiens
cctgtgctcacgccgggttctttacctccgagccaggccgccgcaaagcaggtcaaaatgcagatcttcgtgaaaaccctta

SEQ ID NO: 301014 - DNA, 75 bp, Homo sapiens
ggcataggatccggcaaagtcctgaagaggtgtggacactgccagcggctgcagccgacttggaatgacctggga

SEQ ID NO: 301015 - DNA, 90 bp, Homo sapiens
caaaatctgcatgtggtgtgtgcccaggcagacttcgaggggtaatggatgtgaagaacagaaaccccagagctataaataaactgattg

SEQ ID NO: 301016 - DNA, 89 bp, Homo sapiens
gaaataatgggcaatcaggggacaatgtagtaaaggatggacatgtagaggtggcacgtttgcttttggatagtggtgctcaagtgaac

SEQ ID NO: 301017 - DNA, 78 bp, Homo sapiens
tgggagctgtagaccagagctgttcctattcggccatcttggctcctccctcgaatgtgaaagatgttgcagaagtgt

SEQ ID NO: 301018 - DNA, 100 bp, Homo sapiens
taaaatttcatggagaagaaggccttgactacggaggggttgccagaagctagatgtggaagagccagacagcgccaactcatcgttctacagcacgcgg

SEQ ID NO: 301019 - DNA, 96 bp, Homo sapiens
cggccacagcatgaccgctcgcggcctggcccttggcctcctcctgctgctactgtgtccagcgcagggggccgaaggccagagaccaggatttgg

SEQ ID NO: 301020 - DNA, 123 bp, Homo sapiens
cgccgggtgatgaaaccacttctctacatcccatctcaatcagaattactagattttctctcaaactacgagatgccttcaattaagttgcagagttctgatggagagatatttgaagttgat

SEQ ID NO: 301021 - DNA, 76 bp, Homo sapiens
tccaggaccctctggaagcctagaaatgagttttggccagtggtcgtgcagtccaaggggctggatggcatgctgg

SEQ ID NO: 301022 - DNA, 119 bp, Homo sapiens
tcaaggcctttggctatgtcgagatcccctgtgtggccaagaagctggtgtgcggagatgaagggtcatctagtagcaggcacccaaatcaggcaactcccaagaaaagtggtttaaag

SEQ ID NO: 301023 - DNA, 75 bp, Homo sapiens
ccggggcttgccctggtcttgctcggccgatgaagtgcagaggtttttttctgaagatgcttataagatcaggat

SEQ ID NO: 301024 - DNA, 75 bp, Homo sapiens
ctttgatccagaacttgcagcaacaatagaaacctgctcctccaaagccagagcccaagcctaaaaaggcccctg

SEQ ID NO: 301025 - DNA, 74 bp, Homo sapiens
cgacctcatccagccttatggcgaatggtttttggaaaatttctaccttgaaccgtatctgaaagaggttattc

SEQ ID NO: 301026 - DNA, 99 bp, Homo sapiens
gcccccaacaccacgacaatccagtttcctgctaatttgcagcttcctccaggccccttcacagatgtagtcactacaaatcttaaattgcgaaatcca

SEQ ID NO: 301027 - DNA, 100 bp, Homo sapiens
caaagtaatggttattatcactgtgaatcttccattgtgattgaatccagttcggacctatggttatgcgttccttttttccctcactggatattttgga

SEQ ID NO: 301028 - DNA, 95 bp, Homo sapiens
ttaaagccctttggggaatctggcctcataccttgtccacacagagttcctgtacaaggttcctgacctgtgagtttcgctgttgttgcccaggc

SEQ ID NO: 301029 - DNA, 100 bp, Homo sapiens
ggacgggctttaggctggaagcgccttagaggagccatttttccaggcgtgtgctcgcccactgatatcggtgtactccgaaaagggggagtcatctggc

SEQ ID NO: 301030 - DNA, 100 bp, Homo sapiens
tgcgagagagtcagctgcaacaggaagacccaatggatagatacaagccagatgacgtgtactactgtggaataaagtacatcaaagatgatgtcatctt

SEQ ID NO: 301031 - DNA, 72 bp, Homo sapiens
tgaacttcaccttttggctttcttggcctgatgctgaactctcgaggaatcctgctgcatcacagaagctgg

SEQ ID NO: 301032 - DNA, 90 bp, Homo sapiens
cacttacgcctctcaaggagggaccaatgagtagctttccacagccccaccaccaggatcaagaaggagccccagagtccccgcacagac

SEQ ID NO: 301033 - DNA, 104 bp, Homo sapiens
cggaatcggggagcgtccggagctagctggatcctctaggcaggtctacttccccagcaggacagcatcattctcctatatcttctagacatcactcatcttcc

SEQ ID NO: 301034 - DNA, 51 bp, Homo sapiens
cagattcgcagtggtcgcttcttctccttgattgatgtacagctatatatt

SEQ ID NO: 301035 - DNA, 75 bp, Homo sapiens
ggacaggcagagtgctgatgtgaaaaataccacgacaaaaccaccctaattcaagatggaaaaggtgatgtaacc

SEQ ID NO: 301036 - DNA, 82 bp, Homo sapiens
agctgttgggccaactacacagaccttactccccttagaacaggccagctgcgggccgtccagcggctgtgccacttctaca

SEQ ID NO: 301037 - DNA, 97 bp, Homo sapiens
tgttcagccacaggccgagagaagcccactattaagtgggaacgggcaggtgctggaaacgtgcgtagcaacagtaggccgagtatccaacgttgat

SEQ ID NO: 301038 - DNA, 50 bp, Homo sapiens
tgggcctcgtggagttcagagacgccagcggaagcctgccacctcctatg

SEQ ID NO: 301039 - DNA, 156 bp, Homo sapiens
cgtgttcgtccgcggagatctctctcatctcgctcggctgcgggaaatcgggctgaagcgactgagtccgcgatggaggaagatgagaatgtgcctactgctcctgatcctccaagtcaacatttacgtgggcatgggacaggcttttgctttgat

SEQ ID NO: 301040 - DNA, 100 bp, Homo sapiens
gtcatgagaggcctggacaagatggagtcagacctggaggtggcggacaggaggcagtggagaaggtgacacagcacatccacggcctgtctgggaagaa

SEQ ID NO: 301041 - DNA, 90 bp, Homo sapiens
ctacaagggctgcttcgacggcaacgtcaccttgacggcaggggctgaggaagctgccctcgaaaccctccagaagacatctgtcctgca

SEQ ID NO: 301042 - DNA, 75 bp, Homo sapiens
acccttgtattcttgtgaaaatgaacagagtggaaaaggattattcatacctgaaggagatatgtgatcaccaag

SEQ ID NO: 301043 - DNA, 125 bp, Homo sapiens
gcccgcaaagccttcgacagagccaccaagctggagcaggagttcacagagtgcttctcagactcccagctgcaggaggagctgcggggcctgagagagacgttcagcaacttcacagcgagcac

SEQ ID NO: 301044 - DNA, 50 bp, Homo sapiens
gggggagcccagcccagccagcctccagaaatctatgacaagttcaagca

SEQ ID NO: 301045 - DNA, 100 bp, Homo sapiens
atccaaccttcttccacacgtgcccgaatctgctgtgacctggatgtcttggccagcaagaaggtggtcttcaagctgacagagaagctgacggaacaga

SEQ ID NO: 301046 - DNA, 74 bp, Homo sapiens
atatttgtgggccaggataatggagctgtaatgactgacaatcacctgaaacattatttacatatcattgaaaa

SEQ ID NO: 301047 - DNA, 50 bp, Homo sapiens
cttctcttccctcgggtgacttgagttgccaccttccagagaagaggtac

SEQ ID NO: 301048 - DNA, 82 bp, Homo sapiens
ggatgccctgcagtacctgcagaaggtctctggagacatcttcagcaggaaggtgctcgggtcttcggggcactgggtccca

SEQ ID NO: 301049 - DNA, 51 bp, Homo sapiens
gccatcgtgaaggagctcctggagctggatgtatcctccactcctcgctgg

SEQ ID NO: 301050 - DNA, 88 bp, Homo sapiens
gctggtgcatctgtttgccggaggtaacaaatgtggcaattattttggatctatcacctgtcatcataactggcttctgcttgtcatc

SEQ ID NO: 301051 - DNA, 101 bp, Homo sapiens
cccggacggtacttctgccactgctgctccgtggagatcgtcccgcgcctgccgtcgggcgcctccagcttcggggagaagttctcccgagtcaagttctc

SEQ ID NO: 301052 - DNA, 49 bp, Homo sapiens
cgacacccttgaagctgagaaatgattacctaaaacctcgggcagaaga

SEQ ID NO: 301053 - DNA, 100 bp, Homo sapiens
ctgggattcaaatgaaagtgaaaatgttagaagaactcgtgagccggattgatgttgtaggacagtcccatctggacagcaacattgagaatcaagagat

SEQ ID NO: 301054 - DNA, 110 bp, Homo sapiens
tcataccaacgccatggcccccagcatgggctcctctgtcaatgacgctttaaagagagataaagatgccatttatgggctcaggcagctgtccaaggacctgttggtac

SEQ ID NO: 301055 - DNA, 75 bp, Homo sapiens
aaaatcgagcagaaagaatgtctttcaggtaattaataaaatgtctccaacatctctaaagatcacactaaggca

SEQ ID NO: 301056 - DNA, 75 bp, Homo sapiens
gccggccgcaccaccgccctctggccgttgcctcaccggttttcggctttgtgagaaaccttaccatcaaacacg

SEQ ID NO: 301057 - DNA, 82 bp, Homo sapiens
gcctgtgtcccacttgttcgcggcctatagtatttgcaaccacgtggcttcacgagtccgccaaaccatcaggtgaataaac

SEQ ID NO: 301058 - DNA, 100 bp, Homo sapiens
gctggacaaggaccctgacctgcctgtcgtcgtggtggccaacaagcagatcggtcgcttggttatcggacagaatggaatcctctccacccctgctgta

SEQ ID NO: 301059 - DNA, 100 bp, Homo sapiens
tactacctcaggaccaacctcagaaaagccaactcgaagtcatccatggacccctgatgattccacaggtgtgtgcagtggcctcagggatccggaaagt

SEQ ID NO: 301060 - DNA, 82 bp, Homo sapiens
tgggaacagctgtgcgtagaccagaccagtgacttataagtgtactggttctgcctgtctggagggccatggagaagaggct

SEQ ID NO: 301061 - DNA, 100 bp, Homo sapiens
gccagagggcgggggtcctcgccgggaccctcctgtgggcccagggacctccaatggaagtccgggcacatggcggagagcctcaccaacatgccacggc

SEQ ID NO: 301062 - DNA, 100 bp, Homo sapiens
gatcgccgcgctcagcgacaaacaagtattagaaaactactcggatgctccaatgacaccaaaacagattctgcaggtcatagaggcagaaggactaaag

SEQ ID NO: 301063 - DNA, 98 bp, Homo sapiens
tattttctagtgctgagatcctgagacaatgatcatacatctgtcggtggcctgggagacagtttttatgaatacttactgaaagcatggttgatgtc

SEQ ID NO: 301064 - DNA, 100 bp, Homo sapiens
cgaccgcctgtgctttgtgatggagtatgccaacgggggtgagtgtctgtgtttcactgatggcaagactgtggcccccatgcccccagcacaggaccat

SEQ ID NO: 301065 - DNA, 98 bp, Homo sapiens
ctgtcccgggcagcgcagccccggccgcaggacgctgtgcagagctgcaagtccgtatcactgaggctgtggccacagccactgagcagagagagctg

SEQ ID NO: 301066 - DNA, 100 bp, Homo sapiens
ggggtaacgccttttggaggtgcatcttcctcattttcagtggtgccaagttcatatcctgctggtttaacaggaattaaatcaaaggtggatgagctaa

SEQ ID NO: 301067 - DNA, 102 bp, Homo sapiens
ttggacattgtgatacaggaactgtttccagagctcaataaggtaaaagtgctgtttgtacgcaaccttgccaatactgtaacagaagagattttagaaaag

SEQ ID NO: 301068 - DNA, 83 bp, Homo sapiens
cctgggcctcccggtccgcaagcaggtggatgaaaatactaggaaaagtttatttaagttacgttctacatgggatgaaatat

SEQ ID NO: 301069 - DNA, 74 bp, Homo sapiens
tcttcggtggactccttcggcagtccacccaccgccgccgcctcccagccagatctcggtgctcagcggcggca

SEQ ID NO: 301070 - DNA, 100 bp, Homo sapiens
ctgattaccgagccattcaactagccaaggaaaaaaagcagagaggagcggggagcaatgcagttttagaaagagcgttttcgctacgtaaagcacattc

SEQ ID NO: 301071 - DNA, 97 bp, Homo sapiens
agcagctcagtgcaacggtgtgaactcagcctgtttcagagcctccacaccatgagttttttgatgcagaaggaagtgaggtagatttgaactttgg

SEQ ID NO: 301072 - DNA, 100 bp, Homo sapiens
cccagcctggccgtcagggagactgcagccggcgcgctgaggttttgaacgaagaatgtgatcagaactggtacaaggcagagcttaatggaaaagacgg

SEQ ID NO: 301073 - DNA, 76 bp, Homo sapiens
gcacagactcaggcggccccttacccctgccataccagcgacctaagctttgaggaagagccataactacctggag

SEQ ID NO: 301074 - DNA, 75 bp, Homo sapiens
agaagtaagcatttttcctgtggaagaacagcaggaagtaccaccagatgcagacagacatgctgaactatctgg

SEQ ID NO: 301075 - DNA, 75 bp, Homo sapiens
attgtcgcactgaagaaggtgcggatggacaaggagaaggatggtggacccaagtggagagattgtggaactggc

SEQ ID NO: 301076 - DNA, 83 bp, Homo sapiens
ctgaaatggctgcctcccagtgtctctgctgctcaaaatttctcttccagaagtttccaagggtcacttgtgtctcgtccgtg

SEQ ID NO: 301077 - DNA, 98 bp, Homo sapiens
acaggccctggcctgccttgggccggggatttaacacagcctgtgggagctcggaggcctcagcctacctggatgagctgcgtttggctgtggcttgg

SEQ ID NO: 301078 - DNA, 98 bp, Homo sapiens
tctatattttttgactgctctgctcctctatgctggacatcaaatttccagattagccgatgaattacatatgccatctctccctgaaatgatgtttg

SEQ ID NO: 301079 - DNA, 100 bp, Homo sapiens
tattgagcccatgcgtagccttttatttgagttaaactcaccaaggacacttgaagaagtcacgtccagggatcactgtcatcacaaatggagaaaaggc

SEQ ID NO: 301080 - DNA, 50 bp, Homo sapiens
aatttccttctactgatctccaatttgggagagcccatggtgactgcgtg

SEQ ID NO: 301081 - DNA, 100 bp, Homo sapiens
tttctgaagcaggaagtagttcagaggttcttgcgtctcctttctactctgcaaggggtagtaaaaagaatcattcctgcagtagcttccacaaatgcag

SEQ ID NO: 301082 - DNA, 100 bp, Homo sapiens
ttggaggaagtcattatgttatacagcctcatgatgattttcctgagagaactgatttcaaatgcttctgatgctttagataagataaggctaatatcac

SEQ ID NO: 301083 - DNA, 75 bp, Homo sapiens
ggggggctcggctgcagacttggccaaatggacgggactattaagttatttctcaaactctgaggctgcggagtt

SEQ ID NO: 301084 - DNA, 75 bp, Homo sapiens
gccgccctgttccccgcgctgcggcctggcggcttccaggcgcactaccgcggctcttgtcaggatggtgaagct

SEQ ID NO: 301085 - DNA, 100 bp, Homo sapiens
tgggcaccgcggatctggggccgtcctcagcaaaaatagatcctccagtcatgaatataacccaagtcaatggctctttgttggtaattctccatgctcc

SEQ ID NO: 301086 - DNA, 83 bp, Homo sapiens
catcacctctcagcacgattttcccgagagttcacagcattccacgcctacgggaaggcaggcaagatgctggtggagaccag

SEQ ID NO: 301087 - DNA, 109 bp, Homo sapiens
cccgaggcagcatggagaggggccgtggcccctgcagcggaaccggacccagtccctgagccgcccctacacccacagatctgtgccatcattggcgggaccttcaccg

SEQ ID NO: 301088 - DNA, 90 bp, Homo sapiens
ctactaactttgaaatggaataaggggataaattccaaaactgccagtgaatggctgaaaccacagatactactgaacccaagtactgcg

SEQ ID NO: 301089 - DNA, 82 bp, Homo sapiens
tgaatttgaaggtggaaaatcaacagtgaattgtagagcattgatattcacttaaaaaaagacattcggagaggagttgtca

SEQ ID NO: 301090 - DNA, 75 bp, Homo sapiens
attgatttgctcttacgtatttgtgtgacttgactcttcaaacacaaagggaaaccatctgccgtgtgactggtg

SEQ ID NO: 301091 - DNA, 83 bp, Homo sapiens
ggagtacagggaagtctataagctttgcaacagaattacagagtatgatcaattctgtggtgttcttggtcacacatttatgg

SEQ ID NO: 301092 - DNA, 74 bp, Homo sapiens
ctcgcctttgccgatccgccgcccgtccacacccgccgccagataccggggagaccacgacgctgcctcctggg

SEQ ID NO: 301093 - DNA, 97 bp, Homo sapiens
gctggcctccctggccaagattgtttaccgtggtttctgggcagtcctgatgctcctgggggtagttgctgtagtcatcgcaagctttttgatcatc

SEQ ID NO: 301094 - DNA, 82 bp, Homo sapiens
cagagccagaaaagcaagagtttctgtttagatgaccagtctcctgcctcgatgacttacgagccctcaaggggaagcattt

SEQ ID NO: 301095 - DNA, 83 bp, Homo sapiens
ggagctcaactccaaccacgacggggccgacgagacctcagagtgaagacatttccacctggacacctgaccatgtgcctgcc

SEQ ID NO: 301096 - DNA, 101 bp, Homo sapiens
ggaaaaagagaaaagaaatgaaccagtattcttaaattgatttcaagtttgaacaaggtgctggagaatctggtaaaagcaccattgtgaagcagatgagg

SEQ ID NO: 301097 - DNA, 101 bp, Homo sapiens
cgccgagccgggccgcggcgccgagtcgaacggggagccgagctggagctgccgcggcgcagccagcaatggctgccatccggaagaaactggtgattgtt

SEQ ID NO: 301098 - DNA, 100 bp, Homo sapiens
aaagaatgatgatggcaagaaggcccttgtgttggactgtcattatccagaggatgaggttctagagcacaagttgaaagaagctgatgaaatgcacaca

SEQ ID NO: 301099 - DNA, 101 bp, Homo sapiens
cctggcagcaatgggcaagacaaagaaactggcgatggaatatgagaggagccctctggaaagaaaaggacagaccctgtgctttcatgaaagtgaagatc

SEQ ID NO: 301100 - DNA, 100 bp, Homo sapiens
atttcagcctgcccttgccagtgcctgggccgctgggagccgttattggctgccgttaaggaccgttacgtttcccggtaacaaatgtggcaattatttt

SEQ ID NO: 301101 - DNA, 73 bp, Homo sapiens
tgaagaaagctgctgatggggctgctgagcacaacattctgaaattttttggttattgtaatgatgttgatcg

SEQ ID NO: 301102 - DNA, 74 bp, Homo sapiens
cgccggccgcaccaccgccctctggccgttgcctcaccggtgtactaatggtcacttgatgtgcgctggctgtt

SEQ ID NO: 301103 - DNA, 101 bp, Homo sapiens
ggagccaaagcctcggcgctcacctaagccgcagggagatacacccaactgggagaggtccagtgctttgtgtggtaatgagcagcaatggtgagcagtgt

SEQ ID NO: 301104 - DNA, 100 bp, Homo sapiens
cagagacttgatggccgccagcgtcggcctagcaccattgctgagcaaacagttgccaagatgaagttgcggagaataatgaacatgatgtcacttctac

SEQ ID NO: 301105 - DNA, 100 bp, Homo sapiens
ccaagatgtgactgtacctggtcctcttccaaatacatgaagatgagaatgtgcctactgctcctgatcctccaagtcaacatttacgtgggcatgggac

SEQ ID NO: 301106 - DNA, 82 bp, Homo sapiens
cgccgtgagccggctgagcaggaagcggccgccgtcagaattaaacaaccaccatgtcgagcaaaaaggcaaagaccaagac

SEQ ID NO: 301107 - DNA, 102 bp, Homo sapiens
gcctcagcttgaagattttgtagaccagtttgtggaactacaaggcactgggatgtctactctataaactttgtttcttcactcttccttttggtgagagtc

SEQ ID NO: 301108 - DNA, 75 bp, Homo sapiens
attcaagttcatgtcacgctgggtaatgaggatttgactgtgaagatttcccagtttgaatggaactctatggca

SEQ ID NO: 301109 - DNA, 83 bp, Homo sapiens
aggatgcgtgttcgcgggtgtgtgctgcgttcacaggtgtttctgcggcagatttggtcgtattgggcgcctggtcaccaggg

SEQ ID NO: 301110 - DNA, 100 bp, Homo sapiens
aggaactcttggttgggataaaacaccttccaccatgaccacctcagcaagttcccacttaaataaaggcatcaagcaggtgtacatgtccctgcctcag

SEQ ID NO: 301111 - DNA, 78 bp, Homo sapiens
taatcatgggacaagctgatgtctccagaccggtaaatccagatgcagttggccagaaatgtacacacaggagagctg

SEQ ID NO: 301112 - DNA, 100 bp, Homo sapiens
ctgaagctgtaacctccatttcaaacttgtggttctgcatcatggaagggaagtggttgctgtgtatgttactggtgcttggaactgctattgttgaggc

SEQ ID NO: 301113 - DNA, 112 bp, Homo sapiens
ctgagtggttgtgtggtcgcgtctcggaaaccggtagcgcttgcagcatggaaaatgtttataggaggccttagctgggacactacaaagaaagatctgaaggactactttt

SEQ ID NO: 301114 - DNA, 83 bp, Homo sapiens
cggagctccacgacgagctggaaaaggatgaatctggttatagatggacaagagacgatcattctgcaagcaggcaacctgaa

SEQ ID NO: 301115 - DNA, 50 bp, Homo sapiens
ggacttcccagcctctagaactactcggaatccaagccggaccaggaggc

SEQ ID NO: 301116 - DNA, 100 bp, Homo sapiens
gaattttaatgtctggaatatcaaagagatgctcagtattccttcaggctctggattagcctgaggcctgctcagtcgttcctaatgaataaaaatcaag

SEQ ID NO: 301117 - DNA, 100 bp, Homo sapiens
aaaaagcaaaggacaaaagatctttctcgggtgtttcattcttacagtccatatgatcacaaggcaaagcgaaggctggagctaggagaaagcggtcatc

SEQ ID NO: 301118 - DNA, 88 bp, Homo sapiens
cggcgatcgagaaagtgcgcaaatggcgagaaccactgtctctgatcaacgtgcggaagaggaacgtggaatctggggaagaagagct

SEQ ID NO: 301119 - DNA, 100 bp, Homo sapiens
aatagcatgcagaatttcttacggggtcgtcctaaaaccttcaagtctctggagaatgctattgaatggagggggccccactgcacccaggtcatccctg

SEQ ID NO: 301120 - DNA, 90 bp, Homo sapiens
gtcgcttgaaaagactgggcttgtccttgctggtgcatgcgtcgtcggcctctgggcagcaggtggcagtgctccttttggacttttctc

SEQ ID NO: 301121 - DNA, 96 bp, Homo sapiens
caggatggcatccaggagagcccatggcaggaccggcacggcgaaaccttcaccttcaggattttttatcaagcagaaatgcatcgaacaacgaga

SEQ ID NO: 301122 - DNA, 100 bp, Homo sapiens
aaaacagagcgaagggggagtgtccggttgatcccagtttgtcaggcaggccactattatgtttgagaccttcaacaccccggccatgtacgtggccatc

SEQ ID NO: 301123 - DNA, 87 bp, Homo sapiens
gtgccttttccccgagactcccggcacctcttcagcgcaaaggttcgacgaggtgctttataaatcatctcaggactttcaacccag

SEQ ID NO: 301124 - DNA, 98 bp, Homo sapiens
cggagaggagcatgaatggagcaaaatggcggatcatgtgcagtttaaggaagaaatctctaaacgttttaaatcacatactgaccaacttgtgttga

SEQ ID NO: 301125 - DNA, 99 bp, Homo sapiens
taggccgagcagaggagaagacagaagacctgaagaacagcgcccagcagtttgcagaaactgcgcacaagaaaatttcccaggaacgagaaaaatttg

SEQ ID NO: 301126 - DNA, 100 bp, Homo sapiens
ctgtctccgtcggaagggagcccaagctttgcagaggcttgtgacatcacgggaggactgtacctgaaggtgcctcagatgccttctcttctgcagtatt

SEQ ID NO: 301127 - DNA, 51 bp, Homo sapiens
tctgcttttaaggcaatccagtgtacaagaaaaagcttgtggtgaaggggg

SEQ ID NO: 301128 - DNA, 75 bp, Homo sapiens
cgggtacctgcggccaattcggtggaacgaggacgcggactgcgaaggcaggtcatgatgatgggcagcgcccga

SEQ ID NO: 301129 - DNA, 100 bp, Homo sapiens
ttgctgaaggagccaatatcaacaagtcccttgtgactctaggaattgtcatctccaccttaggatattgggagtgtgtggcatgcatcctcatcatcag

SEQ ID NO: 301130 - DNA, 100 bp, Homo sapiens
gttccagcttggcgtgtcccatgtttttgagtatatccgttctgagacatacaaatagaaggagctcattgccaagttagatcaggcagaaaaggagaag

SEQ ID NO: 301131 - DNA, 97 bp, Homo sapiens
ctcagctccaggctacagggagaccgggaggatcacagagccagcatgtgccaggtcatgctggccgactggtgtttgggttcctgaatggcagggc

SEQ ID NO: 301132 - DNA, 51 bp, Homo sapiens
tcaccaggatgaagaagtgttcaagcaggggcaccaccacgaggcgatttg

SEQ ID NO: 301133 - DNA, 83 bp, Homo sapiens
ccagcctctgcttggcatccccttgctggacagtggctgtgaatggccaacagaaagggagaaggtgaagaaagctgcagatc

SEQ ID NO: 301134 - DNA, 82 bp, Homo sapiens
aagccggtgcagcagccttcagcttttggcagcatgaaagttagcacttaccctgaaagaagcagatcccagttcaaaagta

SEQ ID NO: 301135 - DNA, 90 bp, Homo sapiens
gcgggagaggcatcgggcgtcagctcgcccgcgagttcgcggagcgcggcgccagaaaggatgaatcaatgagacacatttctgagggct

SEQ ID NO: 301136 - DNA, 75 bp, Homo sapiens
cggagaaccattaatcatctctaagagcatcttcaagaaagcaatggacatttgatttctaagaccaaagacctt

SEQ ID NO: 301137 - DNA, 100 bp, Homo sapiens
cctctgtgagcaggaccaggcccatgccatcacagatcctggtggacctctcaaaccccggtggccggcctgccctggcctacgagagcgtcgtggccca

SEQ ID NO: 301138 - DNA, 97 bp, Homo sapiens
gacgctggaaagtcggccaagaaagacaaagacccagtgaacaaatccgggggcaaggccaaaaagaaggcccagtactacggggagattggcatcg

SEQ ID NO: 301139 - DNA, 90 bp, Homo sapiens
tgttggtgcatgctacaaaaagagaaaagagtagttgaacagctacggaagaacctgatagtaaagcaagaacaaccggacaagttccaa

SEQ ID NO: 301140 - DNA, 83 bp, Homo sapiens
cgctgcgggcccgggccatggccgccgccgatgccgagtttttcagctggtggaatagctacaataaggcaatcagctaccta

SEQ ID NO: 301141 - DNA, 82 bp, Homo sapiens
gcgctgcagccagctggcccccagggccctgcaggcatctgcatctgggaccgacctcctgggctggctgatcaaagaggaa

SEQ ID NO: 301142 - DNA, 100 bp, Homo sapiens
atctgctttttgtaacaagctcttcttcagtatggtggactatgatgaggggacagacgtttttcagcagtgcaggtcgtaatctgaaggagtggctgag

SEQ ID NO: 301143 - DNA, 90 bp, Homo sapiens
ggaggcttgggcttgcgccgttgaagaacaccttccaccatgaccacctcagcaagttcccacttaaataaaggcatcaagcaggtgtac

SEQ ID NO: 301144 - DNA, 123 bp, Homo sapiens
gacttcgagctgattcagcgcatcggcagcggcacctacggcgacgtctacaaggtattgcgcagcgatgcacggccatcaagtaccacttttctcagcccatccgcttgcgaaacattcctt

SEQ ID NO: 301145 - DNA, 82 bp, Homo sapiens
tttactccttttagacaagggagtatatgattgatgcctgggctcagctgaactctattcctggccagttcacaggaagtac

SEQ ID NO: 301146 - DNA, 101 bp, Homo sapiens
ccctcacctcgatgcagccagtagcttggatccttgtgggcatgatccataatcggtttcaagcatgtcaatccaaagaagcaaacaataggtaattcttg

SEQ ID NO: 301147 - DNA, 100 bp, Homo sapiens
aaaaaaagagaaacctgggtgaactttcacggacaacctcagaggacaacgaagtgttcggtattctttaggtgatgctagaaggcctcttcatgaaaca

SEQ ID NO: 301148 - DNA, 128 bp, Homo sapiens
cagatgaccggcaaattgtggacactccaccgcatgtagcagctgggctgaagggtgaaaatcctatttataagagtgccgtaacaactgtggtcaatccgaagtatgagggaaaatgagtactgccc

SEQ ID NO: 301149 - DNA, 83 bp, Homo sapiens
aaaacttcagccttggacaaaaacactagcagaactatttatcctgataacttaagtgactctctcttttccggtgatgaaga

SEQ ID NO: 301150 - DNA, 74 bp, Homo sapiens
atctagaggaaaacccagagaaaagtgaaacaattcaggacactgccttggacaagattcgctatgagagcctg

SEQ ID NO: 301151 - DNA, 100 bp, Homo sapiens
tctgtactatgtcgattcgacagggtaatactgaacaacctgtccaaactagcaagattggacttggaagaagagagtatcagagtttacaacatcgcca

SEQ ID NO: 301152 - DNA, 75 bp, Homo sapiens
cctcagcggccgcgaccgagtcatggctgagacctacgacatcaacgagtgtgatgaggccgaggctgcctcccc

SEQ ID NO: 301153 - DNA, 75 bp, Homo sapiens
ctgcaaaagatgattttacatccattattgggaaatgtcaagctgacgaagaatttgatgaactatgttttgaat

SEQ ID NO: 301154 - DNA, 101 bp, Homo sapiens
ggggaactgctggggaaggcgattggcatcgatctctccatcccttccgaggcccgacttcgtgcctccggagccagcgtggtggccatagacaacaagat

SEQ ID NO: 301155 - DNA, 82 bp, Homo sapiens
ttcacggtcaaggcccagcccagggagaggctgtcgatgctgaggcacgagagaatttgctcctgctcctccagagaaaatg

SEQ ID NO: 301156 - DNA, 82 bp, Homo sapiens
ccgtccccgggagacaggcggccttccgagagggactggagcaggccgtgcggtgctgtccttattcccagcccagtcaaga

SEQ ID NO: 301157 - DNA, 74 bp, Homo sapiens
cagattcgcagtggtcgcttcttctccttgtgcatttgcccagtataacatggatcagttcacgcctgtgaaga

SEQ ID NO: 301158 - DNA, 100 bp, Homo sapiens
cagtataaagccctaaaacctgaagtggataagctgaacattatggcagccaaaagacaacagcatgcaatgatgctacctgttctgacccatcatatcc

SEQ ID NO: 301159 - DNA, 98 bp, Homo sapiens
tttccttaataagccgatgcttgccgatgttgtcttcgaaattcaagctttcttggactccgtactgttggtgtaaccaaggcctggaggtctgggtg

SEQ ID NO: 301160 - DNA, 80 bp, Homo sapiens
atgttcacactgggtgaaggaagctgaaaccacagacatgactgagtcctccatgaagactctattaccaggttttaaac

SEQ ID NO: 301161 - DNA, 100 bp, Homo sapiens
acaccagtatttatccttaacactcttgcaccttctgaaagtggcccgaacctgtaacttgatcttgattgttctggatgtcctgaaacctttgggacat

SEQ ID NO: 301162 - DNA, 80 bp, Homo sapiens
gttgcatcatcaaagaaggagacgtggggtcactggtgtatgtcatggaaggtcacggtctagatcacattctcgatcca

SEQ ID NO: 301163 - DNA, 100 bp, Homo sapiens
ggtgttgacgccgcatgtctactgggctcagcgacaccgcgagctatatctgcgcgtggagctgagtgacgtacagacatcattcagtcgaggtttcaca

SEQ ID NO: 301164 - DNA, 101 bp, Homo sapiens
catctggaattttgccgatttcatgactaaccagttcatagtataacatcagtaacaaaaatgagcatctcccttgccccagaaggctgccaaaagaatgg

SEQ ID NO: 301165 - DNA, 82 bp, Homo sapiens
gcgggatcgacgcggacagcgggctggagcctgacgagctggcggcggaatcggacatgtccaaaccaccgtgttacgaaga

SEQ ID NO: 301166 - DNA, 100 bp, Homo sapiens
ccggaagtcaccattggagctcatcagactgaccgtgtcttacatcagttcagagagggatagctgggagtatggccaccctgctccacgatgcggtaat

SEQ ID NO: 301167 - DNA, 82 bp, Homo sapiens
gcgaagtatctcgctagccctgcgcccgactagcggatttattgctaaacatgggtgcatttttggataaacccaaaactga

SEQ ID NO: 301168 - DNA, 100 bp, Homo sapiens
cagaaaagcaaggccgcgtccatactagcaccatgactgtagcaatattaccccagcctactgagcaattcacgtgcttctgagataaatttgaagaaac

SEQ ID NO: 301169 - DNA, 99 bp, Homo sapiens
caaattcatgacaggattattgagctggactacttactactgatccacgtgtgagggaacggaagaagccaggccaagagggagcccgcagaaagttta

SEQ ID NO: 301170 - DNA, 75 bp, Homo sapiens
ggcgaaacgaggaggagataacgcggccttgggctctggaggagccgaggaaggtctgcttcacctacgacctgt

SEQ ID NO: 301171 - DNA, 51 bp, Homo sapiens
acagtctctgcacctcgcgccccagcagcagtaagccgaaaggatgaagag

SEQ ID NO: 301172 - DNA, 82 bp, Homo sapiens
gtgcctttgaccttctgccatgattgtgaggcctccccagccacgtgaaactatgaggtggaaagtgagaaatggtacctgt

SEQ ID NO: 301173 - DNA, 97 bp, Homo sapiens
ggaaagcggcgttatgacaggaagcagagtggctatggtgggcaaactaagccgattttccggaaaaaggcatcaacttctaactcatctcgccagg

SEQ ID NO: 301174 - DNA, 83 bp, Homo sapiens
cgatctcagagctcagacacagagcagcagtcccctacaaggcacaagaatagccgcccagtgactgccaagtgagtgaacca

SEQ ID NO: 301175 - DNA, 97 bp, Homo sapiens
catgctcgcccagccacccccaggacgccttctgcaactccgacatcgttagggcctagtcaaaattttgaagctgagtcaattcaagataatgcgc

SEQ ID NO: 301176 - DNA, 100 bp, Homo sapiens
cgccaacattaacctgttctgtgtggtcagatggcttctttacctaaaaagactcttctggcagatagaagcatggaattgaaaaatagcctcagactgg

SEQ ID NO: 301177 - DNA, 100 bp, Homo sapiens
ccaacctcagtgcagccaaccatgatgctgccatctttccaggaggctttggagcggctaaaaacctgtacatgtcccagagcaagcacacggaggcccg

SEQ ID NO: 301178 - DNA, 74 bp, Homo sapiens
attggagtgtgtgaaaaaaaatatgcccgtggaagggtcagcagcctctggacccgtgaaagagctggtcggtt

SEQ ID NO: 301179 - DNA, 75 bp, Homo sapiens
gggaagacacattttatgttgtctctttccgaaggggctgtgtggtctttgaggatgtgtttgtatacttctctc

SEQ ID NO: 301180 - DNA, 75 bp, Homo sapiens
atcccataatcacagaagaaatgccactgttggaggtttacaagtaaaagtaaccaagctaaaacaggaacgaat

SEQ ID NO: 301181 - DNA, 75 bp, Homo sapiens
tgtcattaaaaattaagcgtggcttttgaggaagatgtgacaactaccggaggttttgacaagcttgcatcatgc

SEQ ID NO: 301182 - DNA, 100 bp, Homo sapiens
acacctaccaggtggacggcacggacgacagaagcgactttggtgagactctggttccaatgattcttgttggtaataagtgtgacttggaagatgaaag

SEQ ID NO: 301183 - DNA, 100 bp, Homo sapiens
cttcttccacagcaatcaatcaataagaacaagtcccaggacttcagactaggctcagaatctatgacacagtcatattggaatgcttcaagcaactcaa

SEQ ID NO: 301184 - DNA, 100 bp, Homo sapiens
gggttcggtgcgtgccccgacggggcgcgcgcgaagcgagcgagaaggcacggagtcgccgcggagcgcaggatgcagttccaaaatgccaagcttttac

SEQ ID NO: 301185 - DNA, 75 bp, Homo sapiens
ttaagggactcccaggaatatcaggtgaccaagaatatggcccaggtgaccaaagccctggacaaggccctgagc

SEQ ID NO: 301186 - DNA, 50 bp, Homo sapiens
ggctcaacgagaacaagctatcagtgcatctgggggaggtgttgtagcca

SEQ ID NO: 301187 - DNA, 75 bp, Homo sapiens
cccggtgcccgaggaggcagccaagctcgtggcctgcctctgcgtgcgggaaggaggagtttgagaagacccaga

SEQ ID NO: 301188 - DNA, 129 bp, Homo sapiens
aggcatggcctccctgatgatcaccaccaagggtagccccagaggggagctccgagggcaggccccatggcgggtgccagaaaatggacacgaccttcaccgagggtgctgtaccggggcagttcagca

SEQ ID NO: 301189 - DNA, 78 bp, Homo sapiens
atccatgtttctggacgcggatttttggcctcatactctgttatagataaacaagtacttcgggatgacttcagacaa

SEQ ID NO: 301190 - DNA, 82 bp, Homo sapiens
ggacaacccagatgtgcaacaaagtgcgatgacaatgcagatcttcgtgaagactctgactggtaagaccatcaccctcgag

SEQ ID NO: 301191 - DNA, 100 bp, Homo sapiens
cgctgcacttccatcccacggtcagttgatattcactgatggactccaaagaatcattaactcctggtagagaagaaaaccccagcagtgtgcttgctca

SEQ ID NO: 301192 - DNA, 74 bp, Homo sapiens
gatataatcttcacttccgggggcactgaggatctagtttgaagcactaagaagaataagacatcagtttgaaa

SEQ ID NO: 301193 - DNA, 71 bp, Homo sapiens
tggccatcactatacacaacgttccaggatcctaagcacttcaagtcagagaagacaggacggggacagtt

SEQ ID NO: 301194 - DNA, 76 bp, Homo sapiens
tgatgatgtacagcagagcttttttcttgctgaaacattaaatgacttctgacagctctctccatggaaggaggcg

SEQ ID NO: 301195 - DNA, 75 bp, Homo sapiens
accaggaggaggttttcaggaccaaaattgtggaaaagtcactctggagcacagggatcagttgtccttgttttt

SEQ ID NO: 301196 - DNA, 98 bp, Homo sapiens
ttcctattccactggattgggaaagaccatggcagacatagacgagtgcactgcagggacgcacaactgtagagcagaccaagtgtgcatcaatttac

SEQ ID NO: 301197 - DNA, 102 bp, Homo sapiens
caggaaatgatccatttgccaatatataggcatctccgaagatttattttgtcagtggaacaggatctggacttggcacatttcttttaaaggtgcttgaag

SEQ ID NO: 301198 - DNA, 80 bp, Homo sapiens
cgggacacctggaagccgagaaatggttttaaaatcaaagatgggaaaatcggagaaaattgcccttccccatggccagc

SEQ ID NO: 301199 - DNA, 100 bp, Homo sapiens
tcgtgactgacctgcgcgcccgcctcggcccgcacgccaagcacgtggtgggctatggccaccttggtgccctacgagacgctgaacaaacgctttcgcg

SEQ ID NO: 301200 - DNA, 81 bp, Homo sapiens
ctatgaaactcaagtcagactaactgcagatggttgctgtactttgccaacaagatcttcccagacccgtcagattttgac

SEQ ID NO: 301201 - DNA, 87 bp, Homo sapiens
cggcggcgctggaggagcgaggcagctgtactaggactgggaacggatggtagtgaaaacctttatggatatggatcaggactcaga

SEQ ID NO: 301202 - DNA, 100 bp, Homo sapiens
atccgatttggaaaatatgaatgctgaggaacttagcagtgattcggatagtgaatacagcaaagtgaatcattgaaaaatggctctgctacaggtggtg

SEQ ID NO: 301203 - DNA, 100 bp, Homo sapiens
gggtgctcggcgccagcagcccggaggcccggcccgcgcaggaggcgctcctccttcccaccgattagatcctgtgctgaaagagaaaccaagaaaaaag

SEQ ID NO: 301204 - DNA, 98 bp, Homo sapiens
tttcccctggctcacagtctgggttggttctggacattacacagcatacgcaactcacgaaggccgctggttccacttcaatgacagtactgtaacac

SEQ ID NO: 301205 - DNA, 82 bp, Homo sapiens
ttcatattgaagaacttcaaccccacagtgtatccttttcaagacactggccaaaagaagaccctagacaagaaagatggaa

SEQ ID NO: 301206 - DNA, 75 bp, Homo sapiens
caaagggccaatacctggatatggttctgagatggggtctcaccacctgcccacgctggtcttcaactcctggcc

SEQ ID NO: 301207 - DNA, 82 bp, Homo sapiens
ttagaattgacttgtgatcagttcacctttgaatttatgataagactttgaccccgacgcaggcttcagtgattgccgcgga

SEQ ID NO: 301208 - DNA, 90 bp, Homo sapiens
gtccgagccttcctgctcatctccaccctgaaggacaagcgcgggacccgctatgagagcagcccgacggccatggaggctgaagagacg

SEQ ID NO: 301209 - DNA, 100 bp, Homo sapiens
gccgccgacatgaagaaagacgtgcggatcctgctggtgggagaacgcactaccacagcatggaggtgttcacccactatgacctgctgaacctcaatgg

SEQ ID NO: 301210 - DNA, 98 bp, Homo sapiens
ctcatttgatgaagaggataccaaagggattaagaggagctcatgggcatttcacccatatctccaaaagaggcaaaggttcctgtggccaaaatttc

SEQ ID NO: 301211 - DNA, 83 bp, Homo sapiens
tttgtggatcgctgtgatcgtcacttgaaaaggttaagaagttcttacaagagttctaccaggatgatgaactcgggaagaag

SEQ ID NO: 301212 - DNA, 106 bp, Homo sapiens
ctccgccggagcatccgggccgggcggcctccggggctgccagagcagcaggggggggccctcagcctcttggccttgaacgggctgttcatcttgattcacaaac

SEQ ID NO: 301213 - DNA, 100 bp, Homo sapiens
aactccctcaagtttcatttgtgaagaacgacactgactccaacgtctcagaacagcagtcatttctcgtggtggtggccgtcgactttgggaccacatc

SEQ ID NO: 301214 - DNA, 100 bp, Homo sapiens
ctgcgcgcctgatgggtcgaggcggacgcgcggctgcgtcagatgcaaccaaacagctttccgtggcagtcccctttaccatgcagcaatagcctccctg

SEQ ID NO: 301215 - DNA, 76 bp, Homo sapiens
aacaatgagtacaactaccgctgctggaccacaaaccgctgccagaaaagagtcattgcagttttcagtagaggtg

SEQ ID NO: 301216 - DNA, 95 bp, Homo sapiens
ctcagaggaggagttccagaagcatgaaggtacctggcctcattaccttctcacgtgttgaaaaatgaccatgtcaggaggtttctcagcacttc

SEQ ID NO: 301217 - DNA, 74 bp, Homo sapiens
attccagcttcggaacaagagaccctgacccctcttcagtgaatgaaaagaagaggagggagcgggaagaaagg

SEQ ID NO: 301218 - DNA, 75 bp, Homo sapiens
ctacgcctggccattcggcttctccggagagaagagatcagtgctcagttagtaacaggagtatgggaaggcaaa

SEQ ID NO: 301219 - DNA, 100 bp, Homo sapiens
agggcccctacctgcccctggagctggggttggagcagctgtttcaggagctggctggagagtactacgagatgtcctacggcttgaacatcgagatgca

SEQ ID NO: 301220 - DNA, 51 bp, Homo sapiens
cgccgaggcaccgaggcactcagaggagccccctcggaaaaccacactgag

SEQ ID NO: 301221 - DNA, 87 bp, Homo sapiens
cgggatcgtgaccgagaccgtgaccgagagcgtgaccgagagcgcgaatatcgtcatcgttagaagagtctcactctgttgcccagg

SEQ ID NO: 301222 - DNA, 155 bp, Homo sapiens
aaaagatgccctctgaatctttgtgtttggctgcccaggctcgcctcgactccaaatggttgaaaacagatatacaggccaggagtggtggctcacacctgtaatcccagctctgggaggccaaggccagtggattgcttgagcccaggagtttg

SEQ ID NO: 301223 - DNA, 100 bp, Homo sapiens
gattcccttgcaaatttacatacgagaatggcttgtgaaatcatgcctctgcaaagggccaattcctgtccccccagcagcatggcatcgtgtgctgaac

SEQ ID NO: 301224 - DNA, 75 bp, Homo sapiens
tgggccagttcggaagcctctgagcagtggccgccgccgacagcggcatcagccctcgggccgtgtggcagttcc

SEQ ID NO: 301225 - DNA, 82 bp, Homo sapiens
gggcggccagagcgccggcaagagctcggtgctggagaacttcgtgggccgaatagcctaacatggcagaccagagacagcg

SEQ ID NO: 301226 - DNA, 75 bp, Homo sapiens
cccggggtgcgagaggtggtgtgcatgacactcctggaaaacaggtttggtgatggttatacagtcaaagtttgg

SEQ ID NO: 301227 - DNA, 87 bp, Homo sapiens
gctgaacaggccaaagccagactacagctggttcttgaagctgctggatgtatcaggaatgccagctctgtgctctccaatttccca

SEQ ID NO: 301228 - DNA, 100 bp, Homo sapiens
aaatttgctggatattgatgcgccagtcactgatattgatgatgttaagaagttcaaaccgggttacctggaagctactcttaattggtttagattatat

SEQ ID NO: 301229 - DNA, 85 bp, Homo sapiens
cacttctgggacgcacagagaccgtgaagattccaagttcaggagaactcgaccggtgcagtagacattgttgcaatcatgatcg

SEQ ID NO: 301230 - DNA, 51 bp, Homo sapiens
gaaacaactcggagaaaatgagtatggaggctggagtgtagtggcatgatc

SEQ ID NO: 301231 - DNA, 100 bp, Homo sapiens
ccaggacttggatcaacacctttaacttcaagaagacaggctagcatcccattctctgtggttggatccaatcagttgattgaagccaaaggaaagaagg

SEQ ID NO: 301232 - DNA, 82 bp, Homo sapiens
cactcccaggagctacagtatgccacccccgtgttccaggaggtggcaccaagagagcaagatggagtctcactctgtcgcc

SEQ ID NO: 301233 - DNA, 98 bp, Homo sapiens
agaactcgaagaaggaaaagctgcatacctaacctaatccaccaatagatcaagttatacagaaaccaggagttgtacagagatttgtgaaatttctt

SEQ ID NO: 301234 - DNA, 75 bp, Homo sapiens
ctccttctcaatcttggaacagcacccccttctttaagacaccaactctacaacattacctgtcatatactgaag

SEQ ID NO: 301235 - DNA, 75 bp, Homo sapiens
gtcgaatccagtagaaaactggtcaaggaagctaacggaaagatgctgaaggatgggagaccgttcagagaggaa

SEQ ID NO: 301236 - DNA, 99 bp, Homo sapiens
gaagagaagaaaagtaggccagagccggaaatgggtcctgatgaatatgaagagatggaagaagaggaggaggaggaagaggaggaagacgaggatgat

SEQ ID NO: 301237 - DNA, 99 bp, Homo sapiens
gttttaatgaagagacagatgctgctcatatacagctgagtccagattggcaggtggactacgagtcatacacatggcggaaactggatcctggcagcg

SEQ ID NO: 301238 - DNA, 82 bp, Homo sapiens
cgccggttgccaggccaaggagtggactagggtcgccggggaagcggggactggctggcttcgagcagggcatcggaaccag

SEQ ID NO: 301239 - DNA, 100 bp, Homo sapiens
ggaacttattgatgacattgagggttatgtggtccgaatcagtggtgggaacgacaaacaaggtttccccatgaagcagggtgtcttgacccatggccgt

SEQ ID NO: 301240 - DNA, 49 bp, Homo sapiens
gaattttccagtgccctgaaaaataatttgaaagttgagagcagcatgt

SEQ ID NO: 301241 - DNA, 83 bp, Homo sapiens
gagaaggtggagctcacggcactcagacaatgcagatcttcgtgaagactctgactggtaagaccatcaccctcgaggttgag

SEQ ID NO: 301242 - DNA, 82 bp, Homo sapiens
tcgataaagacaggagtggagtgatatcagacaccgagcttcagcaagctctctccaacggctggttgaactcatggacctg

SEQ ID NO: 301243 - DNA, 74 bp, Homo sapiens
tcttctacagtggctgttgaagaggctgaaggaccctgatgcttggtgtgacctgagtaaatttgacctccctg

SEQ ID NO: 301244 - DNA, 100 bp, Homo sapiens
gccgaccacgcttgatccccggccgcggggccaggaagtcggagtttgagccccggaggcagagcggctgccatgagacggtgctgagataggatcatga

SEQ ID NO: 301245 - DNA, 100 bp, Homo sapiens
ccgagtggacggccctgccgaccttggcgagagccccctcgcctttctcaccagcaacccagcttccctattccctgagacacaacaatattgaaattag

SEQ ID NO: 301246 - DNA, 83 bp, Homo sapiens
cccagccctggcggggcgggcagcatggttcactccagcatgggggctccaggcgggagacactatattcaatcgtgctaagc

SEQ ID NO: 301247 - DNA, 100 bp, Homo sapiens
caaagtgccatgtctttaatgtgtgatgaatgcagactctgctaccattttggctgtttggatcctcctttgaaaaagtctcctaaacagacaggctacg

SEQ ID NO: 301248 - DNA, 74 bp, Homo sapiens
gcctgaaggagttgttgtctcggcagcgcccgcggagacgtgaagagttcctccgtgtcacaaagcagtacctg

SEQ ID NO: 301249 - DNA, 82 bp, Homo sapiens
cttctggaagctactactacgtggtgcttggaaaggaaccacgtgaatgttgagggggcgacacacaagcaggtggtggacc

SEQ ID NO: 301250 - DNA, 98 bp, Homo sapiens
cttagaggaattaaactttggccctgcgcctcgtccagcctaggttccacccttttctgggaacgggcaagattcttgccaagagaattaatgtgcgt

SEQ ID NO: 301251 - DNA, 96 bp, Homo sapiens
aaatacaaacatcacctaaaagagcacttaagaattcacagtgctcagttgaagaggaaaattcgcaaaaagtcaaactggtacttaggcaccata

SEQ ID NO: 301252 - DNA, 75 bp, Homo sapiens
ggatgatacaccttttccacagggaattgagttggtgacagttcgtgatgctataaatcagggtatggatgagga

SEQ ID NO: 301253 - DNA, 101 bp, Homo sapiens
ttccctgcccccttcccccacccccgactcgggcttggcgcggcggccagaggaaccccgaggagttgatccctgaattttattatctccctgagatgttt

SEQ ID NO: 301254 - DNA, 100 bp, Homo sapiens
ccgacggcagccggcacctgacggcgtgaccgacccgagccggctgaactccagtgcacccagttagacttggagcggaaactcaagttgaatgaaaatg

SEQ ID NO: 301255 - DNA, 75 bp, Homo sapiens
gctggccaccttgaagtacgccctcaggagcgtgaagcaggtgaaaggctgtgaaggcggcttcccataccttat

SEQ ID NO: 301256 - DNA, 50 bp, Homo sapiens
attgtttgtcaccacaaaaaggacaggctgaagagattctgcagacatac

SEQ ID NO: 301257 - DNA, 100 bp, Homo sapiens
cgggcgggcccccggagacgcgcaggatgccacacgaagagctgccgtcgctgcagagaccccgctatggcttaagagatgctaaaaaccttgtacctat

SEQ ID NO: 301258 - DNA, 78 bp, Homo sapiens
ctggaaaagagggtggaaaaagcagggaggttatgaggcttaataaagaaggtactccaaagattcaggtttactcac

SEQ ID NO: 301259 - DNA, 82 bp, Homo sapiens
cccttccccacgcaaccccagatccatttacactttacactaagcgactggagaccccaaaggagctggactcagatggtga

SEQ ID NO: 301260 - DNA, 75 bp, Homo sapiens
gggaagtggaaccggatatttaagtacaatggtgggcttaattttaggaattttggagagtaaaaggctgaacct

SEQ ID NO: 301261 - DNA, 48 bp, Homo sapiens
gcagttagcacactggtggaagccacccgcgagtcggccttcgttcac

SEQ ID NO: 301262 - DNA, 80 bp, Homo sapiens
attgagattatacggaaccagaagcagattgccaacattgaccgtattacaaaggttgcttttgtaatgaagaagcactt

SEQ ID NO: 301263 - DNA, 100 bp, Homo sapiens
aaccaacactcctagccaatggtggtcatggagtagaagggagcgatactacagcggccctccaggcactgaagcgtaagaagaggtatgagaagcagct

SEQ ID NO: 301264 - DNA, 75 bp, Homo sapiens
gtcggctccttcgtgtgtacctcctgctccggcagcctatttctggacttcaagaaacattgaagaaactgcaaa

SEQ ID NO: 301265 - DNA, 82 bp, Homo sapiens
acgaggcgcaccagatgtaccggaccctgttcttcagacatctgaatgggactccgagtgccttacatccctgcagcccctt

SEQ ID NO: 301266 - DNA, 75 bp, Homo sapiens
ggaagttcggaaaactagcatcaaaattcccagcaacagatacaatgaggctgaccaactgactgaagagcagat

SEQ ID NO: 301267 - DNA, 100 bp, Homo sapiens
ctaaaatgtcaaataacctacggagggtcttcctgaaacccgcagaggaaaattcaggcaacgcctcgcgttgatgatcatagcagggttaagctagcac

SEQ ID NO: 301268 - DNA, 89 bp, Homo sapiens
gccgagaaggactcgctcgacccgtccttcactcacgccatgcagctgctgacggcaggtatctcgggggagctttgtgccttgatgga

SEQ ID NO: 301269 - DNA, 88 bp, Homo sapiens
gctggagaattataggaacctggtctccctgggctgctttgctggctctgcaagaaaatggactagacgcaactacagtgaaacaaga

SEQ ID NO: 301270 - DNA, 87 bp, Homo sapiens
cccaccatggacagcttcgacttagccctgctccaggaatgggacctcgagtcactgtggctgagtcatcactagagagtgggaagg

SEQ ID NO: 301271 - DNA, 100 bp, Homo sapiens
tgtagaatacttgggtgacatctgcctgagagatctccaagaattacagttgaacaaggccttccaggccgaggagtcgccgggcgtcatctactgcatc

SEQ ID NO: 301272 - DNA, 100 bp, Homo sapiens
ggaccctgagatcgtcaagtctcccagcgaccccaagcaataccgagtctcattctgttaccaggctggaatgcagtggcgtgacctcagctcactgcaa

SEQ ID NO: 301273 - DNA, 100 bp, Homo sapiens
tcaaggaggccttccagctgtttgaccgaacagcggtcagatagcatcagacctgcattgaacagtcctgtggaaaggccaagcagtgaccaggaagagg

SEQ ID NO: 301274 - DNA, 100 bp, Homo sapiens
acacccccaaagagcaactgaagattcatacgcagctggcagatattatcatagttgctgcaggggctgcgatttatccagttgaaaaatccttggagtc

SEQ ID NO: 301275 - DNA, 75 bp, Homo sapiens
tgccagaaagaggatttggccagagcgttttgtgtactccaaagattcaggtttactcacgtcatccagcagaga

SEQ ID NO: 301276 - DNA, 75 bp, Homo sapiens
cccgcctccctcccgcgcgtgctgcgggtctgctcgggggtctacttcgagggttgcccccaagtttcctggcag

SEQ ID NO: 301277 - DNA, 75 bp, Homo sapiens
ggaagtggctttcttattgcagcaaaaattcccgtaccaatgtcagtgctagggagaacggcccttccagtgcaa

SEQ ID NO: 301278 - DNA, 80 bp, Homo sapiens
agcctcctgaggagctgggattacaggacccctaccatggaggagaccatcaaagatccccccacatcagctgtcttgct

SEQ ID NO: 301279 - DNA, 96 bp, Homo sapiens
tggactgcagcctcggcggtcagcagagttggccaccctgttcaagggcttaggagaaagtcaacacacttcgcaacttgaattggtcccagctgc

SEQ ID NO: 301280 - DNA, 100 bp, Homo sapiens
cgcggaaggagctggagacggtcgtagctgcggtcgcgccgagaaaggactgttgggaaagatcctgatggctatccgagatgcaggttttgaaatctca

SEQ ID NO: 301281 - DNA, 78 bp, Homo sapiens
gccgaggaggctttcctgctggtggcaaccgcctacgagacactcaaggaattgaaagatgttggccatcgtgatcag

SEQ ID NO: 301282 - DNA, 88 bp, Homo sapiens
ttaatggaaaatcgcttggttaaaacctgacacttttaacagcgggcagttgcaggagatgcctctgagtcagcactcttaaagtgca

SEQ ID NO: 301283 - DNA, 100 bp, Homo sapiens
ccaagctaaccacgctggtggatgccgacgccgaggccttcaccgcctacctggtgctgtccctggacaccaacatcacaaaccaggtgaataagctgaa

SEQ ID NO: 301284 - DNA, 50 bp, Homo sapiens
cattctcatcagcaacggctcaaggtcagaatggcggcagtggagcatcg

SEQ ID NO: 301285 - DNA, 99 bp, Homo sapiens
ccgcccgcggcaaacatggcggtggactcggcgatggagctgttatttttagatacttttaaacacccgagcgctgagtccaatatcagatggaaatga

SEQ ID NO: 301286 - DNA, 88 bp, Homo sapiens
ctaagccagaatcctgaccttgctgcacaggtggcaaatggtaggatccaaagccttgaggccaccattgagaagctcctgagcagtg

SEQ ID NO: 301287 - DNA, 75 bp, Homo sapiens
cggggcgggaggctccgcggagccgaggcgtggagatgaggagcgggaaggcctcctgcaccctggagaccgtgt

SEQ ID NO: 301288 - DNA, 83 bp, Homo sapiens
cgaccctagtgctcgtcgccgtggcgccatgggtgttgtccgcagccgcaggcgcagacggggaagcggagccaacatgccag

SEQ ID NO: 301289 - DNA, 75 bp, Homo sapiens
tactttgccctcagcatctcccttcatgtctgggtcatggtggttgtgtcaaaccgattggtgacatctccatgc

SEQ ID NO: 301290 - DNA, 131 bp, Homo sapiens
tttgagccttacggagccgtctaccagatcaacgtcctccgggaccggagtcagaaccctccgcagagtaaaggtactccaaagattcaggtttactcacgtcatccagcagagaatggaaagtcaaattt

SEQ ID NO: 301291 - DNA, 100 bp, Homo sapiens
acacagtgtccagatacgaggcttgagatcttcttagcccagagagcagtggagttgagtgaggaggcagatgtcctgtctgtgagccagttccagctgg

SEQ ID NO: 301292 - DNA, 98 bp, Homo sapiens
ttcaagttggtggcgctgaagctggtgcagtacgaggatgtcgtccaggaaagattgtgcagatgactgaagcagaagttcgaggcttatgtatcaag

SEQ ID NO: 301293 - DNA, 95 bp, Homo sapiens
gctcatgtttctgacttggaatatcgaattcgtcagcaaacagacatttacaaacagatacgtgctaataagtactatactggcaattgctggag

SEQ ID NO: 301294 - DNA, 82 bp, Homo sapiens
gtccgagccagccgctgttttgccggaggagcccctcaggccgactttgtgttttatgccccacgtctgagaatcaacaagc

SEQ ID NO: 301295 - DNA, 100 bp, Homo sapiens
cccccgcgggcgcagccctttgcgcagccgccgggaccctggcccctgtcgagaaaactgtcgctgaaaagcaggagaagagaaatcaggatcgcttgag

SEQ ID NO: 301296 - DNA, 100 bp, Homo sapiens
gccgggatgagggactgtggcggcgcggcccgcgcgcagccggccggtgctggagaatctggtaaaagcaccattgtgaagcagatgaggatcctgcatg

SEQ ID NO: 301297 - DNA, 100 bp, Homo sapiens
cggaaaattgaggataatgaatttcattaccaagaacaggaattgaaatgcaccagcggttgtctaacatagaaaggaattggccttactactttgggtt

SEQ ID NO: 301298 - DNA, 90 bp, Homo sapiens
tggagagaaaggggtgcgcatcaaggagaagtctcaggggatccagaactgcagccagtccttgctgggctgttcctgtccatgtgcctg

SEQ ID NO: 301299 - DNA, 50 bp, Homo sapiens
gtggtggagtccaccccgctgtggaacaagatcactcaaggtgaaggata

SEQ ID NO: 301300 - DNA, 82 bp, Homo sapiens
agcaggactgcgccgcgtcttcctcaagtggacatcctcatcatggatgatgacgacgtccccagctggcctcccaccaagc

SEQ ID NO: 301301 - DNA, 75 bp, Homo sapiens
aaactgaggaatttgaagtgaccaaaacagcagatcctgaggaggatgaaggggctggccctggaggccgagagt

SEQ ID NO: 301302 - DNA, 71 bp, Homo sapiens
aagtttgatgagcagagaactgctactgtgacatcccggaaccgagataatgaccccaatgactacgtgga

SEQ ID NO: 301303 - DNA, 96 bp, Homo sapiens
aagtttaagagaagtcgtttaaagctcaaagatggacatcgaatcagtttaccttcaggtgtcatggagaaactccagctgggcccagagattctg

SEQ ID NO: 301304 - DNA, 95 bp, Homo sapiens
gcggaagcggcctggcaggggaaggatcgagtgccggtggtggtgtgcacattgagccccggtatagacagttcccccagctgaccagatcccag

SEQ ID NO: 301305 - DNA, 100 bp, Homo sapiens
ggaacataggacgacagttagctatggaagaccaacactgtcatctgaagttggaatcatcatctgtgatattgctaatccagcctcgcttgatgaaatg

SEQ ID NO: 301306 - DNA, 90 bp, Homo sapiens
ccccagtcggtgctccggggaggtcacctgacgaggagccatgccagtgacggtaacccgcaccaccatcacaaccaccacgacgtcatc

SEQ ID NO: 301307 - DNA, 78 bp, Homo sapiens
gaagtgttgtgtaaaggctacccttgtgtgatgttagctgttgatgctgtaattgctgaacttaaaaagcagtctaaa

SEQ ID NO: 301308 - DNA, 100 bp, Homo sapiens
caccatgctgaacatcctggcactggtctatcgggtgatgacccaggaaaggtgagtgagaaggtgtcggcacacacgcctctggatccacccatgcgag

SEQ ID NO: 301309 - DNA, 100 bp, Homo sapiens
cgacgttcacagaggaacactgccggggcccaaccacaagacgactcaataggaggaaggaagaggcagaaatccaggcagaacttgaacgtttggaaag

SEQ ID NO: 301310 - DNA, 75 bp, Homo sapiens
gtctgcaaacctggagccagaaacattaccgtcatattccacccattactaagacatattactgatgccacactt

SEQ ID NO: 301311 - DNA, 100 bp, Homo sapiens
gctggaccaacctggctttcccgactgctccatcgaggcagccatggtgaaggttatctgtgctacaattgcatttggaatggggattgacaaaccggac

SEQ ID NO: 301312 - DNA, 75 bp, Homo sapiens
gtctttgttgtaggtttatctcagcgcctagcagacccagaggtgatctgtgaaaatggttcgctattcacttga

SEQ ID NO: 301313 - DNA, 97 bp, Homo sapiens
ccatgccacatattaagacatatatgaggccttctccagacttcagtaaaattgcttggttccttgtcacaaggtccttatgtcgtcagaagatcga

SEQ ID NO: 301314 - DNA, 100 bp, Homo sapiens
tgatggaagtgtcttggcaagttatggcaatgtgatcgtcatcacagtcaactatcgacttggagtactcggtgccttagctggaccaattattgtggag

SEQ ID NO: 301315 - DNA, 75 bp, Homo sapiens
cttttacaagaaaccaaacaagcctttgaaagatgtcatagggcatccgtgtacaagatttgcagagaaatgtat

SEQ ID NO: 301316 - DNA, 100 bp, Homo sapiens
tcacattgagctgcaggttgaatccggggtgcctttaggattccatatggctctcatatcattccattccatctctgccaagatttggataccgcaaaaa

SEQ ID NO: 301317 - DNA, 100 bp, Homo sapiens
ccaggtcttcagcacccacccaccgtggtacaggtgagcacctgcggatctgtccccagggctacacctgctgcaccagcgagatggaggagaacctggc

SEQ ID NO: 301318 - DNA, 82 bp, Homo sapiens
ggaaaacctggccctcttcaatttctgacaaaagcaatggctgccatccggaagaaactggtgattgttggtgatggagcct

SEQ ID NO: 301319 - DNA, 82 bp, Homo sapiens
atcagagctggaacctgaggagagagttactatgcgagtcagaagaaaacatttgaaattaatcccagacacccgctgatca

SEQ ID NO: 301320 - DNA, 97 bp, Homo sapiens
cagaaaagactgctgctccctcgccgtcactgttgtataaatttcacacaaaagatgttggacaatttctacaattttgcttcatcatttgctgtct

SEQ ID NO: 301321 - DNA, 73 bp, Homo sapiens
ctgactaccagtggctctgcagagcgccgggtttatttccgcctctggaatgcagcactggggggattcctgg

SEQ ID NO: 301322 - DNA, 83 bp, Homo sapiens
cacagacgtggtcacagaggagatgcttcaagaggctgccagcctggagaccagtccttcagtgaatctacagacctattttc

SEQ ID NO: 301323 - DNA, 100 bp, Homo sapiens
cgcgagtgaggaaaggaggtactgtagatctacggaatccagaggcagcattgtctccaaccttccgtagtgacagcccagtgcctactgcacccacctc

SEQ ID NO: 301324 - DNA, 98 bp, Homo sapiens
agagccgctgggcgccggagccgaggcgagcgccgcgcgcaccactggccacctccacaactcctacctggacctccagcgcaggtatgggagaccct

SEQ ID NO: 301325 - DNA, 96 bp, Homo sapiens
ataaaggatgggttttaactacagacccagtctctgccaagtagatttcgggcagacaacttgaacaagctgaagaacctatgcagcaagacaatc

SEQ ID NO: 301326 - DNA, 75 bp, Homo sapiens
taggcatgtgatgttagagaactacagaaacctggttttcttgggtgaccaagaatatggcccaggtgaccaaag

SEQ ID NO: 301327 - DNA, 51 bp, Homo sapiens
tgtgatgcctgcagagctgtggcttaccagagaattcggtcaacagtggat

SEQ ID NO: 301328 - DNA, 100 bp, Homo sapiens
ctcgccgcgctcttcttcttttctctctcgtcctcgctgctgtacttcgtctatgtggcgcccggcatagagataatcattcaggtcttcgtgagctaag

SEQ ID NO: 301329 - DNA, 74 bp, Homo sapiens
tgaggaagccagccaggctctcatcgaggttcaggagtttgaacatgttaatgggcgctggagcatgcctgaac

SEQ ID NO: 301330 - DNA, 82 bp, Homo sapiens
gagcgacagcggcgagcagaactacggcgagcgggtgtcgtgaaaactacccctaaaagccaaaatgggaaaggaaaagact

SEQ ID NO: 301331 - DNA, 100 bp, Homo sapiens
caagccctgcaagctgatgctgcaagtggtcaagatcctggtggtcacggtgcaggttgcccccaagtttcctggcagtgtgtgatactgaggaggtgag

SEQ ID NO: 301332 - DNA, 50 bp, Homo sapiens
cttcctcaaatgttagcattacaacgctttcatgagaaggacaagaagcc

SEQ ID NO: 301333 - DNA, 75 bp, Homo sapiens
catgaaagcacaagcgtaccaaacgggcaaggacatctctacaaagtaaccgtacttttcccaaaatgctatatt

SEQ ID NO: 301334 - DNA, 75 bp, Homo sapiens
gccacgtggagctgctggaggtgagtgagatcattggccgagacctgagtggcttccctgcacctcctggagaag

SEQ ID NO: 301335 - DNA, 97 bp, Homo sapiens
gttaaagatggagaaattgtatacactggaacagaatcaacccagaacggatagctccctcctggaaaaggttctagtaaataccgcttgctgtgtt

SEQ ID NO: 301336 - DNA, 82 bp, Homo sapiens
cctccccctggctgtgggtttcttatagatggcttttattacattgaggagcatctttccttgaagaagtacattattgaca

SEQ ID NO: 301337 - DNA, 100 bp, Homo sapiens
agtggaggggtgaatcagtatgttgtgcaagaggtactgtccatcaaacatcttccaccacagcttagagggagaactaatgccgacgtgatgaccgccc

SEQ ID NO: 301338 - DNA, 90 bp, Homo sapiens
aaaggtccagagcattcagctgtctcaaatgcagatggttggaatccattttcgtacccatacaaaaaactggattatggaaaatgggag

SEQ ID NO: 301339 - DNA, 95 bp, Homo sapiens
ggcctgctcttccttggggccgggctgttcatctacttcaggaatcagaaagaggttcctgaggtcacagtgttttccaagtctcccgtgacact

SEQ ID NO: 301340 - DNA, 75 bp, Homo sapiens
ggctcaagccttcctcccacctgaacctcccaagtagcgggactgcagggacgtccagatcggtgacatcgtcac

SEQ ID NO: 301341 - DNA, 80 bp, Homo sapiens
gcagcattgttgctgaaaaattaaaaggcatctcgtccccggtgaagaagacagagatggacaagtcaccattcaacagc

SEQ ID NO: 301342 - DNA, 74 bp, Homo sapiens
atcagaaaccaaggaagatcggaaattagcctaaattacctacttgaggtgaccaagaatatggcccaggtgac

SEQ ID NO: 301343 - DNA, 75 bp, Homo sapiens
ggatgagtccactctggccttccagcaggccaatgaaacctgtaagtgtaatggctggaaaaaccccaagccccc

SEQ ID NO: 301344 - DNA, 80 bp, Homo sapiens
ggtgtctcttctcgccctggcggggaaggatcccatgacagattctgttgtcacgtctccttacagagtttgagcggtgc

SEQ ID NO: 301345 - DNA, 82 bp, Homo sapiens
cggccgcatccccatgcgcttctcggtgctggtacctgccgtgggcagatctgagctttcttcttggacaccccatacccac

SEQ ID NO: 301346 - DNA, 100 bp, Homo sapiens
tgagactgtaatacttcgaggcgaacctgaaaagttaggtcaggcgttgactgaagtctatgccaagggtttttaatgaccacaacaagcaagcatgcag

SEQ ID NO: 301347 - DNA, 97 bp, Homo sapiens
agtagttgttgagcagagggaaagggataggagaaggatgtggactgcagtgctgcagtgccaggcacgagatgtgcgtaccaatgaagtggtggcc

SEQ ID NO: 301348 - DNA, 98 bp, Homo sapiens
ccgctactacgccatgaagatcctgcggaaggaagtcatcattgccaagacgctgcaggagctgaagatggcgagctccgtggcgccctacgagcagc

SEQ ID NO: 301349 - DNA, 96 bp, Homo sapiens
acatgtatggagacctggtcatggacacagtccctgaaaagattgatctggatactattgatgtaagcaacctcaacagacagtttttgtttcaaa

SEQ ID NO: 301350 - DNA, 74 bp, Homo sapiens
tcttcagctacatattctgccttttcaacactacacaggtcagaggaatcgtgagaagactggagagagtaatt

SEQ ID NO: 301351 - DNA, 75 bp, Homo sapiens
ctataagaaatttggtggtcctctggaaagccaaatttgtatcctactgtggggcttcaaacaccaggagaagtg

SEQ ID NO: 301352 - DNA, 83 bp, Homo sapiens
cttcaggtcgtggcagagaaaaccagctgagacagggcgccacttactaggtttttcgttggaatatacgttgcacatttatg

SEQ ID NO: 301353 - DNA, 80 bp, Homo sapiens
cgccacttccggaagactcctggcccgggattatgccaagaaaccaggtctcagcggcggtggcagccgaggtgcaggat

SEQ ID NO: 301354 - DNA, 100 bp, Homo sapiens
accttacaagtatccccgttcgccaccaattatgggagggctggccaacttctgctacagacgactcagaatgcaccatatgtcctcatctgaaagtctc

SEQ ID NO: 301355 - DNA, 102 bp, Homo sapiens
tgaccattttggcagctactaaccgtccagataggatagacaaggtgtgttctactccctcttctgggaatgaagcctccccagcaaagcctatacctgctt

SEQ ID NO: 301356 - DNA, 74 bp, Homo sapiens
gcggcggcgccatggcagggcttgcagatgtgcacccccgccaatacccctgctacaccccccaacttccctga

SEQ ID NO: 301357 - DNA, 75 bp, Homo sapiens
gaagccggtacaggtgccctgcggacacgtccagtcagaggaggaggaggaggtgtttggcatcccaaggagaag

SEQ ID NO: 301358 - DNA, 73 bp, Homo sapiens
aaggcgtctcatggcgttggaataccggctctcagcggctcagttggaaaaatgcattgatgatgctttaaga

SEQ ID NO: 301359 - DNA, 90 bp, Homo sapiens
tgagggaagaaacaagaggagagtgtacaggttcttgggtgtctctggggagtccctgggccagaccttcctccagactccagcccacct

SEQ ID NO: 301360 - DNA, 97 bp, Homo sapiens
ccaccagttcgcccgtccccctgccccgttcacaatgtctccaattgagaaacatggcactgtttttcctgcactctacccacctattgctggactt

SEQ ID NO: 301361 - DNA, 100 bp, Homo sapiens
cgtgctcccaacgtcgccccggtttgacgcacacggcaccaaactgtaatagttaacctcttctgtgagaagtcagaaggtgatctctttaatgctttct

SEQ ID NO: 301362 - DNA, 51 bp, Homo sapiens
ctggcctctgaggagcctcctgatgatgagtgccatcagacaagatcagtt

SEQ ID NO: 301363 - DNA, 100 bp, Homo sapiens
gctggagtacctgtccctaacgttcttgatctctgtgaagattcaagttcaaacgatatgtcaataaacttcgaagcaagagtacagttttcaaaaagaa

SEQ ID NO: 301364 - DNA, 75 bp, Homo sapiens
aaggacacggtctacaccgacttcgacgatgctcagccagcattgggcagcccccgcttcctgctcccctacccc

SEQ ID NO: 301365 - DNA, 97 bp, Homo sapiens
tgaaggtgatgaggttgaagatctctatgagcttttgaaacttgttaagtgaaagctggtggaatgcgaattgtgcagaaacacccacatacaggag

SEQ ID NO: 301366 - DNA, 75 bp, Homo sapiens
tgacttcccagcagcatgcgattcttattgaccttgactattgcagatatcatccgaacatgtttgggacccaag

SEQ ID NO: 301367 - DNA, 100 bp, Homo sapiens
cgtgggcaagggcgagatcctggcgagcctgcaggatggcgcggccgagtccccgtacggccacccggcggcgctgtgcttcgccgtgagccgctcgctg

SEQ ID NO: 301368 - DNA, 51 bp, Homo sapiens
gagagcgcgaatatcgtcatcgttagaagccataaaatctcgacctgtttc

SEQ ID NO: 301369 - DNA, 98 bp, Homo sapiens
ccagtgcttaggctttggaagtggtcatttcagatgtgattcatctacctcgatgacttacgagccctcaaggggaagcattttctcctggacccctt

SEQ ID NO: 301370 - DNA, 96 bp, Homo sapiens
tatcctagaggataaaggaaatctttgggaaagtcagtattttatatagcaagggatgttcgtctaaccccagaagactttgctagagctcagaag

SEQ ID NO: 301371 - DNA, 100 bp, Homo sapiens
gctgcccttcaccgcgggcgccaatggggagcagaaggactcggacacaggtctactggggttcatcccatctgagccaggcctggcttttcttggctgc

SEQ ID NO: 301372 - DNA, 75 bp, Homo sapiens
tttcctgcatggattgggagatactggaggaagttattgtcccaaagttgtgtgtcatgcccgaagtgtctggga

SEQ ID NO: 301373 - DNA, 82 bp, Homo sapiens
tatgcatgctgcttttgatgtctgacaacgtggatcgttgttttgaaacgatttccatttaaacagggttaatttggaagaa

SEQ ID NO: 301374 - DNA, 51 bp, Homo sapiens
atccgccgcccgtccacacccgccgccagtaatctatgccagcaattatga

SEQ ID NO: 301375 - DNA, 95 bp, Homo sapiens
caggaagaacccatcgggcagctacacatcttgaaagagaagctcttcctgtgagatgccttacggtcaagtgcttccagtttaaacagattctc

SEQ ID NO: 301376 - DNA, 97 bp, Homo sapiens
ttcatcttccttctcaacttacctgttgccacttggaatatatatcggtgattgatgagatttatcgtgtgttgagatatgtcaattctaccagagc

SEQ ID NO: 301377 - DNA, 51 bp, Homo sapiens
gcatcatgtcttacgcgttgcaagatgtgtcgaccctgcagaatgactcag

SEQ ID NO: 301378 - DNA, 95 bp, Homo sapiens
caaccaaatctttcttcaggaatatgtggctaatctccttaagtcggccttccctcacctacaagaagacatagtcttgctctgttacccatgct

SEQ ID NO: 301379 - DNA, 83 bp, Homo sapiens
attccaacaacaattccgatggcaaagccgttgccaagggggatatgagactttctactcggaatatcctgagtgttgcgtgg

SEQ ID NO: 301380 - DNA, 98 bp, Homo sapiens
ccggatggcacaaagagaagtgggcaagttctggaagttagtggttccaaggcagtagttcagttttcagggcaatagacaaagacagataatctaca

SEQ ID NO: 301381 - DNA, 75 bp, Homo sapiens
cgtgggcatgttctttgtcatgtgctcggcctttgctgcagacgagatgatgcctattggccagaaggaaagcgt

SEQ ID NO: 301382 - DNA, 74 bp, Homo sapiens
caagaagcaggaatgaaagtggcgctttctccgccccagccttatgccagcctggaccatcttggaggcagtgt

SEQ ID NO: 301383 - DNA, 90 bp, Homo sapiens
aagcccagctgcccaaagaggaactggaaattgtggtcatcctagaaggaatggtggaagccacaggaagtggccagggatcaaacccac

SEQ ID NO: 301384 - DNA, 87 bp, Homo sapiens
ttggacctcctgggaggcgaggacggtctctgccagtataaatgcagtgacggttttcctcctccaccaggcgctccacctccatct

SEQ ID NO: 301385 - DNA, 100 bp, Homo sapiens
tggaaaacctgctttcatgggacgagcagataagacctgatggccaaaagaaaggaagaaaatttttcctctcctaaaaatgccaaaaggccaagacaag

SEQ ID NO: 301386 - DNA, 82 bp, Homo sapiens
atagggttaaataaggagcgactcttacatgatgaacaaagtactgatgacagggaattggctcgggaaaaggtaatgcgag

SEQ ID NO: 301387 - DNA, 123 bp, Homo sapiens
gagtggtctgccgagaagccagtcacgccgggagctggtacacagcctcagattcctgaagtcatgggctggccaggacattggtgacccgccaatccggtatggacgactggaagcccagcc

SEQ ID NO: 301388 - DNA, 112 bp, Homo sapiens
gacatgttcacgcacgggatccagagcgccgcgcacttcgtcatgttcttcgcgccctggtgtcgtgaaaactacccctaaaagccaaaatgggaaaggaaaagactcatat

SEQ ID NO: 301389 - DNA, 51 bp, Homo sapiens
tgaatattacccttgtgcttgccgctggagctgtgaagttaaaccgacaac

SEQ ID NO: 301390 - DNA, 74 bp, Homo sapiens
ctggggctcacggacatcaacgaggcctacgtggagacgctgaaggtctcctccgggctggggctgagcaagcc

SEQ ID NO: 301391 - DNA, 50 bp, Homo sapiens
ccgacggccagaagttcgactccagatgctgagccccacttataagcagc

SEQ ID NO: 301392 - DNA, 100 bp, Homo sapiens
agagaccggggaactctactcttcctacgattcagtggtcccaatttaaaggctattttattttcaaactggagaaagtgatggatgatttcagaacttc

SEQ ID NO: 301393 - DNA, 100 bp, Homo sapiens
cttaaagttacgttgttagaatgtagcaggcagtttgaagagaacacatgaagaagaggatgattttggaaccatgcaagtggcgactgcacagaatggc

SEQ ID NO: 301394 - DNA, 75 bp, Homo sapiens
ggatcaggtgttttcaggttaaccgtcagagctccatgaacctgcctccagacaaggcccggctcctgcggcagt

SEQ ID NO: 301395 - DNA, 75 bp, Homo sapiens
cgctgggcagaggcttgggccgccgagctggacccggaccggttttggcctggcctggaagccctcagccccaac

SEQ ID NO: 301396 - DNA, 100 bp, Homo sapiens
ggtggaatatgccaaggaaaaactggagagcttcatcaaaaatagtgatagctttgataagtggaatgaggtaccatctactgtctccagaggaccgaga

SEQ ID NO: 301397 - DNA, 82 bp, Homo sapiens
gcggctggactaaacaggtcacctgcaggcaagtatatcgcgtcaacacagcgacctgacgggacctggcgcaagcagcgga

SEQ ID NO: 301398 - DNA, 71 bp, Homo sapiens
acgagggttcccgggattggaccgacgcagccatggtgacagcagagctagacgcctggaatgaagacttg

SEQ ID NO: 301399 - DNA, 75 bp, Homo sapiens
acaactgaaatgagacatgcacataatataggtcttgggcgtctttggtactggcttttttaggggtctgcctgg

SEQ ID NO: 301400 - DNA, 83 bp, Homo sapiens
tcacgggagagcgcacaccgcgccccgagaaccaatcagcagccgcgttagggacctcaagagagatgtggccaagaagctgg

SEQ ID NO: 301401 - DNA, 76 bp, Homo sapiens
atggaggataacgctttccggaccgataatggtaacaatctgttgccatttcagcctgtgcctactacactggcac

SEQ ID NO: 301402 - DNA, 100 bp, Homo sapiens
ccattcactcactggaatattgacccttatttatccagaagattgatcatcatatgggttgacagtgtgcagttaaaagacctgtggaaaaaaatctgcc

SEQ ID NO: 301403 - DNA, 100 bp, Homo sapiens
ctgtgtcccacttgttcgcggcctataggttggtaggaggagaggattggagctgttttctccttgatgccaagatacgccaagctaggagcattctgcc

SEQ ID NO: 301404 - DNA, 97 bp, Homo sapiens
gatttaatcaccttattggagcaaggaaaagagccatggatgattgtgagggaagaaacaagaggagagtgtacagacagggtctcgctctgttgcc

SEQ ID NO: 301405 - DNA, 100 bp, Homo sapiens
cttgtgcccatcaagatggaggacaccacccaagggttattcaaatgctcagaagactattcttctgcaggtggatcagaactgtgttcgcaattcttac

SEQ ID NO: 301406 - DNA, 98 bp, Homo sapiens
ctagactttcagcctgacactgtggccaacattcagcagcgtcagaagacctgtcatttactccatcctttatagtgatgctacaggacgaagaggaa

SEQ ID NO: 301407 - DNA, 100 bp, Homo sapiens
cccccttgttctccagtacaaccttcaaaacaactggaatatttagcaaggattcaaggctttcagtgtttgaaagatgtatggtgatcttgaaacctcc

SEQ ID NO: 301408 - DNA, 100 bp, Homo sapiens
gtggctatgaacccagaggtcgtggaggtggccgtggaggcagaggtggcatggggttatgaagacagtatggagtttccagaccatagtagacatttgc

SEQ ID NO: 301409 - DNA, 75 bp, Homo sapiens
ggatactcgtgatgatccctacagaccaggagattgtgaagacctttgagatttcagagcctgtgattactccaa

SEQ ID NO: 301410 - DNA, 75 bp, Homo sapiens
aggaactgtgtgtctagatgtaattaatcaaacttggacagctctctatgtactatactggcaattgctggagaa

SEQ ID NO: 301411 - DNA, 75 bp, Homo sapiens
ctgaagggaggaaatagtggcaggtgacagtctgcatgtgcagttttcagtttatgaccagccgtgtgaattggg

SEQ ID NO: 301412 - DNA, 100 bp, Homo sapiens
cactccagaaactttccctccttcaggttacgactatggctatgtctgcgtggagttttcactcttggaagatgccatcggatgcatggaggccaaccag

SEQ ID NO: 301413 - DNA, 74 bp, Homo sapiens
cattcccagaaagaggggcaagaaccccatgaaagctgtgggactggcctgtttctcttcagcaacgggtagca

SEQ ID NO: 301414 - DNA, 82 bp, Homo sapiens
tgactttcagctatggaatcgaaactatgttccaacttcctgtcaacaatcttggcagtttaagaaaagcccggaaaactgt

SEQ ID NO: 301415 - DNA, 100 bp, Homo sapiens
agaacgaccacgtcacacaggaaggcctggatgaggccaccgctttgagagagaaaagaaccacagtggttgcacaactgaaacagcttcaggcagaaac

SEQ ID NO: 301416 - DNA, 50 bp, Homo sapiens
cgtcgccgctcccgaagcttttccagggtgaggtggctttgaccccgggt

SEQ ID NO: 301417 - DNA, 97 bp, Homo sapiens
tgtgggccgacatgaagagctgccagatccaacagccgggtgggcttggactgggcgtgctccatggcagagatcctgcggtcactcaacagtgccc

SEQ ID NO: 301418 - DNA, 100 bp, Homo sapiens
cggcgtgggggccgttggctccagacaaataaacatggagtccatcttccacgagaaaacgctgaccggaaaggagattgagattgacattgaacctaca

SEQ ID NO: 301419 - DNA, 50 bp, Homo sapiens
gcggaggtcgataagctggaactgatgctgggaaaactcttcagattttt

SEQ ID NO: 301420 - DNA, 100 bp, Homo sapiens
aaattcaggaaaaattacaagaaagcgtcacctggaaagaggctcctgaagcacaaatgcaggtagtttatgccaacgtgacttcattcatacagatgaa

SEQ ID NO: 301421 - DNA, 75 bp, Homo sapiens
gcggtggtggtggcggccgctggccagtgttttaaaatcaaagatgggaaaatcggagaaaattgcccttcccca

SEQ ID NO: 301422 - DNA, 99 bp, Homo sapiens
tgagggcagatctcagtaaaaaaggattgccacagtcccgctgtggatttctttaaccagatcaacatgttatatggaactattacagaattctgcact

SEQ ID NO: 301423 - DNA, 98 bp, Homo sapiens
ctccgggcacccccgagggccccgagcccgagcgccccagcccgggtgctggagaatctggtaaaagcaccattgtgaagcagatgaggatcctgcat

SEQ ID NO: 301424 - DNA, 50 bp, Homo sapiens
gaagaagttgagcctgatgaagaagaagacctggaggaacttgctttgta

SEQ ID NO: 301425 - DNA, 100 bp, Homo sapiens
ccccaacacacggtccacagctcatcatgatggacttggagctgccgccgccgggactcccgtcccagcaggcgactgataacgttcaatgaagcggacg

SEQ ID NO: 301426 - DNA, 98 bp, Homo sapiens
aagtgggaatcctggctatatagttgggaagccactcttggctctgactgatgatataagttactcagaggtaggaaaagtaattggaattgctatta

SEQ ID NO: 301427 - DNA, 75 bp, Homo sapiens
gcggagttgctgggtccaccgacccttaccctcagcgagagaagtaaccgatcgaatcatcaatttagttgttgg

SEQ ID NO: 301428 - DNA, 100 bp, Homo sapiens
gccgggtcgagggctgagttgtccgcgaggccccgcgctcaagccgccttctcctgccggttatatgcagaggaacccccagatgccccagtacagttcc

SEQ ID NO: 301429 - DNA, 83 bp, Homo sapiens
accccgcgtgcgccttgctcgcccgcagccccgagaccgcaggagcatcagatccatgctgctgctgactcggagccccacag

SEQ ID NO: 301430 - DNA, 103 bp, Homo sapiens
gttaaggattccaagtaactcttatttgccaagaagtatgatgcgtttttggcctcagagtctctgatcaagcagattccacgaatcctcggcccaggtttaa

SEQ ID NO: 301431 - DNA, 100 bp, Homo sapiens
accggaagaaactgtccgagaagcccaaaagcacctggtgaatggccggatggactttgccttcccgggcagcaccaactccctgcacaggatgaccacg

SEQ ID NO: 301432 - DNA, 90 bp, Homo sapiens
tgaaggacatgaaagtgctgtacaccaaccgagcccagatggggtcacagtggttataaagagttataccctgaagaatttgaaacagac

SEQ ID NO: 301433 - DNA, 75 bp, Homo sapiens
ttaaatagaccactggaagatgactgtcaagttttagaagaggatgactcactggttgtgtggaaggaagtcgat

SEQ ID NO: 301434 - DNA, 100 bp, Homo sapiens
acattcccagatcctcaaactatcgaaggcttattgtgtaacagaacctggagcaggctctgatgtagctggtataaagaccaaagcagaaaagaaagga

SEQ ID NO: 301435 - DNA, 90 bp, Homo sapiens
tcctgagtagctgggactgcaggctaccaacctggctcctgcagaccccaatggcaaagcagacccttacgtggtggtgagcgctggccg

SEQ ID NO: 301436 - DNA, 78 bp, Homo sapiens
cgggaagcaagaggcaaagagaatcggttgtgtaaggcaaacattggtgggcaccgatcttcctgttcattctgcaag

SEQ ID NO: 301437 - DNA, 100 bp, Homo sapiens
ccactccccacaacatactcaaaggaacggagagaaccgggacccccctgcggggacccggaactggtattaccagagaaacggagtctgaaactcttga

SEQ ID NO: 301438 - DNA, 100 bp, Homo sapiens
ccgagttccagaggctgctcggcttccagctcaatcctgccggttgcgccttcttcctggacatgaccaactgggacagtatgatttggtgaaatgcctg

SEQ ID NO: 301439 - DNA, 100 bp, Homo sapiens
ggagaagatgcaattaaaaacttcagagcaaaacatcactgtaattcttgctgtagaaagcttaaacttccagaatgtcaagctgtcagctgaggtggag

SEQ ID NO: 301440 - DNA, 100 bp, Homo sapiens
accttttaatcccctggccgaaagtcatcctttaatagacgagcacatcccgctctgggctttaaacgtgacccctcgcctcgactcgccctgccctgtg

SEQ ID NO: 301441 - DNA, 75 bp, Homo sapiens
tttatggcagcctcactcccagtagtttctgcatttagtgagataaggggggacacagcgattgccacgcgccat

SEQ ID NO: 301442 - DNA, 100 bp, Homo sapiens
tctgagttggatgataatgcaggactatcaagaagtgaaactggatcaacgatatcaatgagttctttagaggtgactgtggggatcatgttgttataat

SEQ ID NO: 301443 - DNA, 108 bp, Homo sapiens
gcggcgcccgcgggtggtataaaatggcggatttcgaagagttgaggacaatgcagatcttcgtgaagactctgactggtaagaccatcaccctcgaggttgagccca

SEQ ID NO: 301444 - DNA, 87 bp, Homo sapiens
tgaacaccaattaatgctaatgaggcaagatgtgagaagggtgttatgtctctagtgaatgtcaggaactgtattcgcttctaccag

SEQ ID NO: 301445 - DNA, 51 bp, Homo sapiens
aaagctttaggagttcacagtcctttgcttctacatactggaatgggacgg

SEQ ID NO: 301446 - DNA, 75 bp, Homo sapiens
ggaagaccataaaccagtgggtcaaaggacagacagaagttttgcaggctttggaggtactcccagtagcaccac

SEQ ID NO: 301447 - DNA, 76 bp, Homo sapiens
tctgatgcagaatttgatgctgtggttggatatttagaggacattatcatggccttgcaccagaatagagagatga

SEQ ID NO: 301448 - DNA, 75 bp, Homo sapiens
ttaggcccagaagaacaattagggtgacgtgtgcattgagtaaacacttgtgcaccatggacaattttgctgagg

SEQ ID NO: 301449 - DNA, 75 bp, Homo sapiens
ggccgtgtccgccgcggccctgcgaggtccgagggatgtgtatatctcatgattgatatggagaaactagtcatg

SEQ ID NO: 301450 - DNA, 48 bp, Homo sapiens
ctttacaaaccctgaatttataactgatttaatgagtggtgttaagaa

SEQ ID NO: 301451 - DNA, 100 bp, Homo sapiens
caggggatgctccgaatgtcttgtgaagccatgaacgagctctttcagcccaccgtcagcgggatcatccagcacatagtgctggctgaagatgcaatca

SEQ ID NO: 301452 - DNA, 75 bp, Homo sapiens
acccacggcacaggagcctcctggaggcagcagacaaatttacatgtattggagaccagaccagaagcccttctg

SEQ ID NO: 301453 - DNA, 76 bp, Homo sapiens
tgaagagggaagacacgcggaaacagacatatctgaagagatggattaagaatgctttggattaaggattgtggag

SEQ ID NO: 301454 - DNA, 100 bp, Homo sapiens
ttgcagctgacctacatctcgaaggcctttggacaagcacacacaaaccacaagaaggtggctgctgacggagagagccgggaggagagcctgatccagg

SEQ ID NO: 301455 - DNA, 80 bp, Homo sapiens
agactgtgacaacgaccacgtctccaaaatgagtcgcatcttcaacccccatctgaggggattgtagcatattcctaatg

SEQ ID NO: 301456 - DNA, 78 bp, Homo sapiens
gaaactcactgcagaatctttcacagagagacaagagagacacctccaacttcgacaaagagttcaccagacagcctg

SEQ ID NO: 301457 - DNA, 75 bp, Homo sapiens
ctggcgggtgccctggctaccatggaccatcctgctggtcagcactgcggctgttcatagccctgatgaagcaag

SEQ ID NO: 301458 - DNA, 100 bp, Homo sapiens
cctggggcatcgacgatctccatatttcattgcaaggagtcccgacctctacatgttgtgctgggaaatgaagcctgtgatttggactccacagtgtctg

SEQ ID NO: 301459 - DNA, 96 bp, Homo sapiens
tcgttttgcctccggttggggctgctgtttctcttcgccgacgctgcaggacaaattcgagcatcttaaaatgattcaacaggaggagataaggaa

SEQ ID NO: 301460 - DNA, 100 bp, Homo sapiens
tggctcctgttgcgtctgggctgtggaggattcctctaaacaggcacagccaccctctgggtatgtacagaaggcagactgatcttggagttcacctttg

SEQ ID NO: 301461 - DNA, 100 bp, Homo sapiens
ggactacaaattttggaaaatgtgataaaaacaaggtggaagattcttccaaggaaccagtgcgaaggtcaccatatcatcagccaacctcttacaggcc

SEQ ID NO: 301462 - DNA, 100 bp, Homo sapiens
gggcagcatatgaaagtggattatgggtgtacattccaagcagagtggccctcatccttcagaatgtggatctgccgaattgaagaggcctgatttcagc

SEQ ID NO: 301463 - DNA, 101 bp, Homo sapiens
caccatcctgggttgacaattctacacaaggagacaaatcttcctattttcaagctgaaagaatctactgttagaagaagatacagtgactttgaatggct

SEQ ID NO: 301464 - DNA, 101 bp, Homo sapiens
ctcccgagtatctgggattacagggtgcagagcctccagctccaccatgagctgcacgccgcccacctcctctccagcacagacctgaaggagggccgagc

SEQ ID NO: 301465 - DNA, 100 bp, Homo sapiens
ctcgaattgctacaaatacaatcccccagaccacgaggttgtggccatggcccggaagctccaggtagatgatgagctggagatcaaggcctactatgca

SEQ ID NO: 301466 - DNA, 100 bp, Homo sapiens
gaagaggaaggaacaaaaggtcccggaccccccggatctgacggggcgggacctggcgccaccttgcagtgccgcagaatggaattcggcattgttccta

SEQ ID NO: 301467 - DNA, 75 bp, Homo sapiens
cccgtctgcgcgagtccacgcagctccccaggtaactaggatttctacctcaaccgcgagacctatgcaaggacg

SEQ ID NO: 301468 - DNA, 100 bp, Homo sapiens
tttaattctacccagcaaaatgaaactgagcctaatcagcaacatagggcctgattacattccaacagaggaagaaaggagagtcttcgcagaatgcaat

SEQ ID NO: 301469 - DNA, 100 bp, Homo sapiens
cctcacagcctgggcatcctccatgcctcctacagcgtcagggatgcccgctgtctgtagccccggcatggtgcccgtggccctgcccccggccgccgtg

SEQ ID NO: 301470 - DNA, 71 bp, Homo sapiens
tggcagccagtcagtggtggaggagaagtacagcatcggggagcccacagtgccatccaccctggcagagg

SEQ ID NO: 301471 - DNA, 73 bp, Homo sapiens
ggcggcctgcgcagccacctcaaggaaacccagcgtttgctggcagaaccagttcctggcatcaaagccgaac

SEQ ID NO: 301472 - DNA, 100 bp, Homo sapiens
ggcagcaagagaccttggccttctccctgggattgcggtcgcagcttcactcattgatgcccatgcaggaggactagaattaaacaaccaccatgtcgag

SEQ ID NO: 301473 - DNA, 73 bp, Homo sapiens
ttgggatcagttataaactctagagtgatctcttgtgaaatcccatggaaggttgtgctcagcctgtcgggtc

SEQ ID NO: 301474 - DNA, 80 bp, Homo sapiens
aaattcatcaaggagctcatcaaggacgggaagtcactcataagcgcgctcaagaacaatgcagatcttcgtgaagactc

SEQ ID NO: 301475 - DNA, 100 bp, Homo sapiens
atacggaagaaagaaaaggacactgattctacgtgggagagttcagagcacacgctgctgagtggacagccaacgtcacagccgaattcaaagaaaccag

SEQ ID NO: 301476 - DNA, 50 bp, Homo sapiens
tttgaatccttccttgatgatgaagaggattccagtggaatgacactggt

SEQ ID NO: 301477 - DNA, 51 bp, Homo sapiens
tctgtttcccaatgcagaaaagaagggcctcagttttatgaccctgtggag

SEQ ID NO: 301478 - DNA, 83 bp, Homo sapiens
cttctgcctcttgatctccgccaccgtcttcaggccagccatcactggtgcaagctatatttaacggagatcctgatgaagtt

SEQ ID NO: 301479 - DNA, 75 bp, Homo sapiens
gtccccgctcagctcctggggctcctgctactctggctccgaggaaccctaaggactctgcaatatgaataattc

SEQ ID NO: 301480 - DNA, 83 bp, Homo sapiens
cgccgagcagcccctcccgcagccggtgtgacctgtcccttcaggtgacttaagagattaaaattaatttggttgctgttggt

SEQ ID NO: 301481 - DNA, 48 bp, Homo sapiens
acagacagaatccctgctaccactgcgcagttggacagcattggcttc

SEQ ID NO: 301482 - DNA, 128 bp, Homo sapiens
cgaacttgcgacaagttgccggagccgcggggcgcgggcggcggacagattgaccttcagagcgagagagacaagagagacacctccaacttcgacaaagagttcaccagacagcctgtggaactgac

SEQ ID NO: 301483 - DNA, 99 bp, Homo sapiens
atctgaagcggctcccagtccctgaaagcattaccgggttcgctaggctcacagcggccctccaggcactgaagcgtaagaagaggtatgagaagcagc

SEQ ID NO: 301484 - DNA, 75 bp, Homo sapiens
tatgaagcaacatgagatggtggatgaacccacaggagagaagatgactgaggaggaggtggagaccgttctggc

SEQ ID NO: 301485 - DNA, 100 bp, Homo sapiens
tgataccattcagattgatttggagactggcaagattactgatttcatcaagttcgacactgttgcaggaagaggcagaggaagaggaagaggaagagga

SEQ ID NO: 301486 - DNA, 75 bp, Homo sapiens
atggggaaaatctccccggtgactttcaggagccagatgaccaggatgccccagatgagcatgagccctctccat

SEQ ID NO: 301487 - DNA, 100 bp, Homo sapiens
cctccttcttcctcaactatctcgctgacacgcagttacatggacacagaacagtatgaagaagcagtacgagactatgaaaaagtataccagacagaga

SEQ ID NO: 301488 - DNA, 82 bp, Homo sapiens
cgcatagaagccgggattgagcgcatcaagactcggtgaaatacctggagtgctcagctctcacccagagaggcctgaaaac

SEQ ID NO: 301489 - DNA, 100 bp, Homo sapiens
tgcagtggtctaagcccacctcagatggagtttcactcttgtctcccaggctggagtacaatggcatgatctcagcttactgcaacctccgtctcctggg

SEQ ID NO: 301490 - DNA, 98 bp, Homo sapiens
tgttgccgtgtgtgctggaaacaaaatattcatgctggatattgagtgtgtgctgtatttgtgggccttgaaaattctctaccccaaaacactgtttt

SEQ ID NO: 301491 - DNA, 75 bp, Homo sapiens
cattttctataagaactccttgttccgacatcccaaacaggttcttcatggagagcagtacttagagttatataa

SEQ ID NO: 301492 - DNA, 75 bp, Homo sapiens
ttcaaatgctgtttgtattccagagactagaatagactgccatcggataaagagtggtccctagcttctattttt

SEQ ID NO: 301493 - DNA, 101 bp, Homo sapiens
ggaaatgtttgttcaaggcaaaaaattatttctcagtaaccatcatagctaacatttataaggtctcgatgtcttagttccagtaaaaatactttgaaaga

SEQ ID NO: 301494 - DNA, 100 bp, Homo sapiens
gatgtgcattccaggtacagaactgaggcccatcaggatgtggtgggaagatttaatgaaagagccatccaaaactctgtttgtcaaaggcctgtctgag

SEQ ID NO: 301495 - DNA, 98 bp, Homo sapiens
gagaggatcacagagttctgccaccgcttcctggagggcaaaatcaaggtttgcggggccaagtgttgcggcgacgcacctcacgtcgagaatcggga

SEQ ID NO: 301496 - DNA, 74 bp, Homo sapiens
aggcacaggagagagcaggactggcatggctggcagagttttccgtctgatgaaggttggccatttgcaaagta

SEQ ID NO: 301497 - DNA, 88 bp, Homo sapiens
gcaatcagcgagactccgtgggcgtaggaccctccgagccagaatactacaacacatctttgcaggattctttgcaaattctgccatt

SEQ ID NO: 301498 - DNA, 83 bp, Homo sapiens
ctcagcccacatgcccgctcacctgcgctgtgatgcctgcagagctgtggcttaccaggtcctctcagggtgcgccatcattg

SEQ ID NO: 301499 - DNA, 75 bp, Homo sapiens
ctgtaacccagcctgtttcacttcttgatggagtcatcagaacccactgtgaggaagtgacttctccttgaggtc

SEQ ID NO: 301500 - DNA, 75 bp, Homo sapiens
ctggaaacggttcacaaggaagccgagtcccaagtctacaaataagaaacctcgaaaatctccaggtgagaagag

SEQ ID NO: 301501 - DNA, 80 bp, Homo sapiens
cggggcgggcgccgcgggacctctccgggccatggtacctggagtagaacagaaaaattattatgtctgtgttcccttgg

SEQ ID NO: 301502 - DNA, 74 bp, Homo sapiens
ggaaaatcgcttggttaaaacctgacacttttaacaggttcgatacaagaggctgttttcctagcgtggcttgc

SEQ ID NO: 301503 - DNA, 82 bp, Homo sapiens
gacgtgtatggaaactcatcaggacggaagcacaggggccactcagagtcgcccgagaagactggagactgatgcatgaggg

SEQ ID NO: 301504 - DNA, 100 bp, Homo sapiens
cttcctggcgctttcctgggttgcttctggcggccatggtgttgctgctgtactccttctccggtacatgtcccagagcaagcacacggaggcccgggag

SEQ ID NO: 301505 - DNA, 83 bp, Homo sapiens
tccacatcgccttttgccacctttccctttatttccggagcaattctgtggtgttcttggtcacacatttatggagtttctga

SEQ ID NO: 301506 - DNA, 100 bp, Homo sapiens
gaaattgaagctcaagaaggtgaagatgatacctttctaacagcccaagggctgggaaccgacgaggactctctcattgagatcatctgctccagaacca

SEQ ID NO: 301507 - DNA, 90 bp, Homo sapiens
ctcacttacacagtattgggaaatctgtgaaaggtttgatggatgagtttagcaaatggctttccaaaagcagaaacaatctacctggac

SEQ ID NO: 301508 - DNA, 100 bp, Homo sapiens
ttttggtattccatgccgacgctattcttacaaaggacaacaatattagagtaattggagttcacatggatgcagtggagccaaccacaccagcatcaca

SEQ ID NO: 301509 - DNA, 87 bp, Homo sapiens
caacaagaagagcagttcccaggatctgcataaagatcaaacagatgatggaggcagcaacacgacaaatcgaggagaggaaaaaac

SEQ ID NO: 301510 - DNA, 50 bp, Homo sapiens
aatgccgcagaagaggttgaagagctgtatgcaggagctattcttgaagt

SEQ ID NO: 301511 - DNA, 100 bp, Homo sapiens
cgatgttgtacctagaagactatctggaaaggtccacgaggctggtgtcagacctattgggagaccctctgcgttagtgagaaaaacggcaagaaatggg

SEQ ID NO: 301512 - DNA, 83 bp, Homo sapiens
actccgctcccgcccgggccccgctcccccgcgccgccttgcccgccgccgccatgcccttctccaacagccacaacgcactg

SEQ ID NO: 301513 - DNA, 100 bp, Homo sapiens
caggaccccaagtgggggtcccggagccagagacgcaaacatgcagatctttgtgaagaccctcactggcaaaaccatcacccttgaggtcgagcccagt

SEQ ID NO: 301514 - DNA, 100 bp, Homo sapiens
tggtgccacagcagctgagtgcgcatcaaatctgaagaaaatctacacagtacagacagtacagaccagcaaagccaaggacagagaggtcttcagggaa

SEQ ID NO: 301515 - DNA, 83 bp, Homo sapiens
ctgcctgtgtccctgaccatggctccctgcagtaccctttaacgggggatatgagactttctactcggaatatcctgagtgtt

SEQ ID NO: 301516 - DNA, 100 bp, Homo sapiens
gctgtggaaagtgaagaaggcattgaagatgactattttttggagaggcctgatgcccgaatttcaggtgaaaattagttctgctgtgcttaaagctgcg

SEQ ID NO: 301517 - DNA, 80 bp, Homo sapiens
ggaggtggtcgtggcgaacctggcagctgcgaattcagaaggagctggcggacatcactttagaccctccacctaattgc

SEQ ID NO: 301518 - DNA, 106 bp, Homo sapiens
agaagggcaacccggtgtttaacacacggctttcaggcgctctcagctgttcctgttccagctgctccgtggcctggcctactgccaccggcagaaggtgctacac

SEQ ID NO: 301519 - DNA, 101 bp, Homo sapiens
tgattatgctgggaaaaacaaagttccagagctacaaaagtttttccaggaagccattaatttgctagaaccaatgacaaacgaccccgtgaactacgtga

SEQ ID NO: 301520 - DNA, 99 bp, Homo sapiens
gggcaccgaggaccagctcaatgacaggtgtgaaatctaagaatcccctgccaactcttgagggctcaatccagaatgttgaattgaagtactgcagca

SEQ ID NO: 301521 - DNA, 80 bp, Homo sapiens
tcttggcgacattgacaatgatggctttgaagaccgcaacagatgaccaaggaagtttgggattatgttttcttcaagga

SEQ ID NO: 301522 - DNA, 96 bp, Homo sapiens
ggccgtgtccaagggggacgggatgcggggcctggcggtcttcatctcggatatccgcaactgtacatccagacactgaaggaccacaggccccgg

SEQ ID NO: 301523 - DNA, 75 bp, Homo sapiens
gtttaaggttccatacccatgtacactgaggaggggacggctccgtcttcacattgtgcacagatctgaggatgg

SEQ ID NO: 301524 - DNA, 90 bp, Homo sapiens
agcgtgtgaaggacctgtgtcagcgtgctgagtaccagacggcgtgtgagcagctgggacaggcttttatcttgagaacatggtgtctgg

SEQ ID NO: 301525 - DNA, 108 bp, Homo sapiens
agcggggagagctgtttgtgggccagctgccctctgaggagatggtcatgacaggcgagaaccactgtctctgatcaacgtgcggaagaggaacgtggaatctgggga

SEQ ID NO: 301526 - DNA, 83 bp, Homo sapiens
ccgcgcgcctgggagacgctgcctcggcccggacgcgcccgcgcccccgcggctggagggtgctgctgatgcaaggaatcccc

SEQ ID NO: 301527 - DNA, 75 bp, Homo sapiens
attcgccgcctccaaggaccccacggactccatccccgtgtctacctccctccttggagacacttccgacacgac

SEQ ID NO: 301528 - DNA, 83 bp, Homo sapiens
gcctcccgggttcaagcaattctcctgcctcagcctcctaagtagctgggactacagaacatccagtcatggataaaaatgag

SEQ ID NO: 301529 - DNA, 100 bp, Homo sapiens
agtggcacctgcgcgaagctggccaaagcctgcccagacggctcacctgtgcgggatggaacaaaagagaggagtctgcaatgccgagtggaggaaggag

SEQ ID NO: 301530 - DNA, 82 bp, Homo sapiens
caccgccaccatggggaagggggttagctttatacgtctacgaatatttactgcacgtaggagcacagaaatctgcacagac

SEQ ID NO: 301531 - DNA, 75 bp, Homo sapiens
gtcaggccgatccgctccgctcacgcctccgggaggagttcctgggacacagccattgctgcccaattctatgga

SEQ ID NO: 301532 - DNA, 100 bp, Homo sapiens
caccggctggctgggcacacagacactgtcactggagtggccttcaacccatcagcgccccaggttgaaaggattgttgacaaaaggaaaaataaaaaag

SEQ ID NO: 301533 - DNA, 74 bp, Homo sapiens
ttcagcgaggaagctacacttttcaccaaggaactggtgctgcagcgagagcaatgcagcaagtcttggaaaac

SEQ ID NO: 301534 - DNA, 75 bp, Homo sapiens
cgcagggcctgcagcgggagctggacggcgagcgcgagcggcgcgagaaacccccaaatacatcaagatgtttgt

SEQ ID NO: 301535 - DNA, 100 bp, Homo sapiens
aaatctgctctgagcctgtggcagcctcccctgcaccggcaggtgagaggcggatctacagacataggttcccgtgtcagtggctatgatgacacctcaa

SEQ ID NO: 301536 - DNA, 100 bp, Homo sapiens
ggggccgtcaggcggggatacagcctggaagatgccatggacaatattaccaggcagaaccaattctacgatacccaagtcatcaaacaagaaaacgagt

SEQ ID NO: 301537 - DNA, 83 bp, Homo sapiens
ctttctgctgctgaagtaatgcaatggtctcaatctctggaaaaacttcttgccaaccaaagaattgattcggaaggccatgc

SEQ ID NO: 301538 - DNA, 90 bp, Homo sapiens
cagagcggaagcggcggcgggagcttccgggagggcggctcgcaggagtgggaatagctttgcgaaaaatgggcgcaatggccaagccag

SEQ ID NO: 301539 - DNA, 90 bp, Homo sapiens
agagtaccaaccattgtgtgctgtgaggtaaaggcaatggtggcttgctatccgggaaatggaacaggttatgttcgccacgtggacaac

SEQ ID NO: 301540 - DNA, 83 bp, Homo sapiens
cttcgccgctgtttaaatcctgctggacagcttaagagttggacagtggaggaccttcagaagaggctcttggccctggaccc

SEQ ID NO: 301541 - DNA, 98 bp, Homo sapiens
taaccgccttgaagagctgatgaagggaccagttactctccacaagaaaattcacacaaccacagtgctcttcatagttcaaattcacattcttctaa

SEQ ID NO: 301542 - DNA, 96 bp, Homo sapiens
cttccctgtggctgttggcttcacccttggagcggcttttgtctacttggctgacctcctgatgcctcacttgccttatgatctcctcattgcgtc

SEQ ID NO: 301543 - DNA, 91 bp, Homo sapiens
gaaatttggagtgtgcgtgcgcgccgagcggagcatcagatccatgctgctgctgactcggagccccacagcttggcacaggctctctcag

SEQ ID NO: 301544 - DNA, 75 bp, Homo sapiens
tcaccaggttgtttcgatagctcacactcctgcactgtgcctgtcacccagctcctaaaagacgacggcctgcac

SEQ ID NO: 301545 - DNA, 100 bp, Homo sapiens
cgggatcccagcctcaggcgtgcgcggacggtgtgcggggcaatgaaacgcttggaagaggcccgactccataaggagattcctgagacaacaaggacct

SEQ ID NO: 301546 - DNA, 100 bp, Homo sapiens
ggcaaccaccccgtctgagaagtgaggagcccctccgcccggcagctgccccgtctgagaaaggctgacccgcggctgattgagtccctctcccagatgc

SEQ ID NO: 301547 - DNA, 50 bp, Homo sapiens
tttcacggccatagcttccaatacaagggcaaactctttgattctacaat

SEQ ID NO: 301548 - DNA, 110 bp, Homo sapiens
ccttttgtcagagggaactgtatgaagacagcttgctggatcattgtattactcatcacagatcggaacggaggcctgtgattgaggaaacttgaatatttttgtatcct

SEQ ID NO: 301549 - DNA, 75 bp, Homo sapiens
aggcgctgaagcacatggatggaggacatgaggattctcaacctgataaaaatgagctttcctaataactcaaga

SEQ ID NO: 301550 - DNA, 100 bp, Homo sapiens
cttgtctaaggagctgggcatagagacttacaaagtgaatgtcagtgagcgtctcgttcaatatgtcaaggccataggaaaaggatacagagtagagttt

SEQ ID NO: 301551 - DNA, 75 bp, Homo sapiens
catcaccttgatttttaatcccacgggtatcagcatggaagccatgagtgagaataaaatggtgccctctgagtt

SEQ ID NO: 301552 - DNA, 101 bp, Homo sapiens
gatcacaaccgccagagaggatgctgtggtgacaaagttgttgtcacgtactccaaaggttatccgtgtggtggaaataagaccgcatcctccgtgataga

SEQ ID NO: 301553 - DNA, 100 bp, Homo sapiens
tatgtatcataggtactgggaagaatacagcaagggtgcagactatatggactgcttatataggagcagtgaggagaatgaataccttccaagaccagag

SEQ ID NO: 301554 - DNA, 75 bp, Homo sapiens
gatctccggcgaattgaaagcagtgatctctcaggtcgttccaggggtagaggaggcatgaaggatgaccgtcgg

SEQ ID NO: 301555 - DNA, 100 bp, Homo sapiens
ggaactttctcttcgtgggagtcatgaccgcccagaaatacctgcagactcgggccgtggccgcctacagttcaaatctgaacatcaatgatgtactagg

SEQ ID NO: 301556 - DNA, 82 bp, Homo sapiens
ctctgcagtgtcttccacaacctggttggtagctggcagtgttgtgatggcttttgaagaagtatgcccggacagaatagat

SEQ ID NO: 301557 - DNA, 74 bp, Homo sapiens
cggggtcacccgctacgggaagcaggcctcgccacaggtaccaggatcatctatgaccggaaattcctgatgga

SEQ ID NO: 301558 - DNA, 51 bp, Homo sapiens
ccgtggaaatccccagctcccctctgggggagaacaaggaggaggacagca

SEQ ID NO: 301559 - DNA, 50 bp, Homo sapiens
ccccactcctgggccgtccctgaagattgctagtgcaactactgctccat

SEQ ID NO: 301560 - DNA, 101 bp, Homo sapiens
gtcggtgaccgcgcgactcggcgcccgcccgcgaacattgacatcaccaatttcagcagcagctggagcgatggcctggccttctgtgctctgctccacac

SEQ ID NO: 301561 - DNA, 97 bp, Homo sapiens
tggaggctgaggcggcggccgaggcggcgacggaggaaacagaagatggacatggtctgctatacagctcagactctcgtccgaatcctctcacatg

SEQ ID NO: 301562 - DNA, 100 bp, Homo sapiens
gtgggccccaacttccgcgtcggcaagaagatcggctgcggcaacttcggggagctccgcctagagtccgaaattgaagttcagaggaagaattgccttc

SEQ ID NO: 301563 - DNA, 90 bp, Homo sapiens
ccaccacgtcacgcacacgctcggcgctgcgatccgcgcatataacgcaaatccagtttgctgatgacatgcaggagttcaccaaattcc

SEQ ID NO: 301564 - DNA, 83 bp, Homo sapiens
gcgagttcaaggagttcaccacacgcacgcaggccccgtccgggctatgcacccctgcgcgaggaggcggtgcggctgttctt

SEQ ID NO: 301565 - DNA, 90 bp, Homo sapiens
cttcctttccatgaaagcagcaaggattcttgtaaaaatggagtggaaacaaaatgtcagtcagtgtgcatgagaaccgcaagtccaggg

SEQ ID NO: 301566 - DNA, 83 bp, Homo sapiens
aggtgatccagcaaggtcggcagagcaaggggcttacgcagaaggacctggccacgtgatcagggccaaagcggtcagtgaga

SEQ ID NO: 301567 - DNA, 100 bp, Homo sapiens
aagaggaggaagtctatgaacccaaccctttcagtaaatacttggaagataacagcgacctcttttctgaacaggtgccaatgggtcatgtttggttaga

SEQ ID NO: 301568 - DNA, 90 bp, Homo sapiens
ctggtatctatgaggccctagagctccgggacaatgataagactcgctatatggggaaggtaatagctcttcaagtctgcaataaaaaat

SEQ ID NO: 301569 - DNA, 115 bp, Homo sapiens
actagttcccattttaattacttaaaacaccacgatgaaaagaaatacctgtgatttgctttctcggagcaaaagtatacttaggaacttcaagcagtcgtcccagatataaaag

SEQ ID NO: 301570 - DNA, 110 bp, Homo sapiens
ccaagctctgcgacaagatggcgctctttatggtggaggggaccaagttccggagcctgctcctcaacatgctgcagaacaactctgctcatggtgattacatgcaaaat

SEQ ID NO: 301571 - DNA, 100 bp, Homo sapiens
ttatccaaagattaaaacttgaagcaacccttaatgtgcatgatggttgtatggtgctggatctttgccttggccagggggttccgcagcaaaacctgga

SEQ ID NO: 301572 - DNA, 83 bp, Homo sapiens
gagagattgaagcatgctctggaaatgttcccagaacattgcacgatgcctcctggtctgctgagaacagacccagtccctga

SEQ ID NO: 301573 - DNA, 75 bp, Homo sapiens
ctcccaggtagctgggattacaggttgtgaccgagattcccgacgagagagactgaggggaagagaggaaggagg

SEQ ID NO: 301574 - DNA, 100 bp, Homo sapiens
ggggaggaagaggaggaggaagaagaaggtgatggtgaaactgatggtaaatccatttgcttatgaagaatataggaaagataaaatacgacagaaaata

SEQ ID NO: 301575 - DNA, 74 bp, Homo sapiens
tcttttaagtgcaaacagttttttattcaacttagaaaagaattggtgctgtgcctgaggaacaataccatttt

SEQ ID NO: 301576 - DNA, 108 bp, Homo sapiens
gccctcagccgcccgctggccgggagcggagcccctgtgggtactccaaagattcaggtttactcacgtcatccagcagagaatggaaagtcaaatttcctgaattgc

SEQ ID NO: 301577 - DNA, 101 bp, Homo sapiens
cagctgatgacaaaaagcttcagagttctctaaaaaaactggctgtgaataatatagctggtattgaagagttaattggccttggtcctcacagctccaaa

SEQ ID NO: 301578 - DNA, 71 bp, Homo sapiens
accgccggccgggggacgagctcggagcagcagccagatttgggaatggatgatgaaggagatgatgaccc

SEQ ID NO: 301579 - DNA, 76 bp, Homo sapiens
gctctccgccgtccccagccctgcctctccctgggctctggtttctggtcctcataccgtgtggttgagtgaaatc

SEQ ID NO: 301580 - DNA, 120 bp, Homo sapiens
ccggtacccatccggggaggagcgttgcattgcctgcaagctctgcgaggccatctgccccgcccaggtgctaaaatgatgtattttctggacaagtcaaggcaggagaaagcaattgct

SEQ ID NO: 301581 - DNA, 98 bp, Homo sapiens
ttttccgttgccggtgccggcctagcgtcctggaattacttcaatcaaaacattgacatcaccaatttcagcagcagctggagcgatggcctggcctt

SEQ ID NO: 301582 - DNA, 76 bp, Homo sapiens
gtactcgctgagtgtggaccctaacacctggcagactctgctccatgagaggagcctgctgcagtcggtccaggag

SEQ ID NO: 301583 - DNA, 97 bp, Homo sapiens
tggaatgctgtcctgtcctcctggggccaccacttttaggcacagaaaactgaatctgtagataacgagggagaatgaattgtcatgaaaaattggg

SEQ ID NO: 301584 - DNA, 50 bp, Homo sapiens
ctgagcgccccaggtagaatttcaaatgagaaagatcagtctaaagaaaa

SEQ ID NO: 301585 - DNA, 100 bp, Homo sapiens
cctcgccccttgcaacaaaggcagactgagcgccagagaggacgtttccaactcaaagctcggggaccagttctacaaggaagccattgagcactgccgg

SEQ ID NO: 301586 - DNA, 100 bp, Homo sapiens
ataaactctgcacattcattctcaaaaacccacctggtcagctgattagccaccttagttccatctgcaactttagttcccactggctgtgtaacctaac

SEQ ID NO: 301587 - DNA, 110 bp, Homo sapiens
gagcctcatctgctgctccaggctactttgcagaatatgcattgggaaatgatcttcatcaagattcctcatgtccataacatgttggatgaggctctgcagctcacccc

SEQ ID NO: 301588 - DNA, 130 bp, Homo sapiens
ctgcacttcgcattttggcattgacatttaattttagggtcctttatatagaagggagagtagtcaagtgcttctgctcctgatgtggatgacccagaggcattcccagctctggcttaactggatgcca

SEQ ID NO: 301589 - DNA, 90 bp, Homo sapiens
ctcccgagtaactgggactacaggtctctaattaacagaagatggcaaagcccagccacagcagctatgtccttcagcagctaaacaacc

SEQ ID NO: 301590 - DNA, 100 bp, Homo sapiens
aagagcattatgggcagacagcggcatacagaatgcctatgaccggcgtcgagaatttcaactgcaaaagtactttgactcaggagactacaacatggcc

SEQ ID NO: 301591 - DNA, 75 bp, Homo sapiens
ccaaagtgaaagtggcggtgcggatacgacccatgaaccggcgagacatatctgaagagatggattaagaatgct

SEQ ID NO: 301592 - DNA, 51 bp, Homo sapiens
cactcagagtcgcccgagaaagagatcgatgtcttattgtgatgagtctcg

SEQ ID NO: 301593 - DNA, 98 bp, Homo sapiens
ccggagcttcacaagggagcgaacgagatggccctgctgtggcaccagtgaccaacgggaacacaacggtgccacccctgaacgatgatctggacatc

SEQ ID NO: 301594 - DNA, 76 bp, Homo sapiens
cctcacatcaacttctaccagctgatccgggatcagttgaaggaagaggagatccacatctaccagttccccgaat

SEQ ID NO: 301595 - DNA, 101 bp, Homo sapiens
accaggctcatcctgtccatcgtgtgcctgatgatcacgcagctggctggcttcagtggaccacctccaaaggaattcaaaatatggaagtcaaattatgt

SEQ ID NO: 301596 - DNA, 99 bp, Homo sapiens
ttgagaactgtaaataccaagccttgaaagggaccatggtgcggcctgtgaggactcaaatggatgctaaaaagccaaggaaatgtgatttgactccct

SEQ ID NO: 301597 - DNA, 75 bp, Homo sapiens
gcagcagcagagatgataacatgtttcaggccttgagaatttcaaaagaggtaatcaggaaaagagagagagaaa

SEQ ID NO: 301598 - DNA, 100 bp, Homo sapiens
attctacaaactttaaacttatttacagatatgcgtttgactttgcacggaaaatatttacaccagcagctccagttcataccaataaagaagatcctgc

SEQ ID NO: 301599 - DNA, 75 bp, Homo sapiens
aagcacaataacaagaaaattgaaagatgggaaattagtggtgatcaagcttcaggagtctccggaagacatgcc

SEQ ID NO: 301600 - DNA, 83 bp, Homo sapiens
tacaactgctccgcctggtggaatctgagaccattaaaaatctcaagtgacgactttgggaaactctggttatccttcgcaaa

SEQ ID NO: 301601 - DNA, 100 bp, Homo sapiens
gggaaagccactgttcggttaaaggagcctcctgtggatatctgtctaagtaaggcgttgaccctgcactatcagatcctgtgttggcccggcgccttcg

SEQ ID NO: 301602 - DNA, 82 bp, Homo sapiens
cttgggagttttccatatgtgaccatggatataaaatcacagggtcagaagaggccaagtgatggaaatagtggattaatgg

SEQ ID NO: 301603 - DNA, 75 bp, Homo sapiens
cagaagccgagttcaacatcctcctggccaccgactcctacaagctcagattgggacaggggcgtctgctgacag

SEQ ID NO: 301604 - DNA, 83 bp, Homo sapiens
atacagaactacgatataagccagatgatgattctgataccgagacgtcaaatgacttgccaaaatttgcagatggaatcaag

SEQ ID NO: 301605 - DNA, 82 bp, Homo sapiens
tttgtgggccagctgccctctgaggagatggtcatgacaggcccagcgcttgagaagtcggaggccaaggccgggccggtgc

SEQ ID NO: 301606 - DNA, 74 bp, Homo sapiens
ctgctgctgaccaaagaggactttcgctatcgatctcctcattcaggtgatggtgtttcttagagagaagatca

SEQ ID NO: 301607 - DNA, 76 bp, Homo sapiens
gtctcaaagcgcatattatgctacatgaaaaggaagaggaggcaagtgaggcctatctggttggcctttttgaaga

SEQ ID NO: 301608 - DNA, 100 bp, Homo sapiens
gaggaagactggatgccaatgatccttgtcctgctatagactatactagacacacacttgatggtgctgcatgtcttctgaatagcaataaatattttcc

SEQ ID NO: 301609 - DNA, 100 bp, Homo sapiens
agaaaaatatctatttgaatagtggtttgacgagcacaaagaattatggtaaaaccatccttacaaagtgcaggaggggacggctccctggagaatgtga

SEQ ID NO: 301610 - DNA, 100 bp, Homo sapiens
ggctgaagtcgctccgagcctatttgttcagctgccgggcagcggtggcagaggatctccgccgcagccaggctatgatgaccttaatcctgattggagg

SEQ ID NO: 301611 - DNA, 75 bp, Homo sapiens
aacactgttattgtaaacaaaggtgaagcagactgtggtgaatttagcaacacttatgaagtttcttaaagtggc

SEQ ID NO: 301612 - DNA, 80 bp, Homo sapiens
ttaacacttcctagataacggactccatcaagaatgctggaggaagggtgtttgtccactgccaggcaggcatttcccgg

SEQ ID NO: 301613 - DNA, 100 bp, Homo sapiens
ccgagggcggggaccggcggcgctggaggagcgaggcagctgtactaggactgggaacggtattgaatttgaccgggattgtgactattttgcgattgct

SEQ ID NO: 301614 - DNA, 100 bp, Homo sapiens
cgcgaactgacactcggctgggccgggcaggagagtctcggatgtcgaaccgcttcggaaccaaaaagaagcttcccagagccggggccaggagccccaa

SEQ ID NO: 301615 - DNA, 100 bp, Homo sapiens
ctagagatcacctcagcagcccccaccacggccggaccgaaggtgcggcggcggaggggagccagggcgccccagcagacatgcacatgatggtgtccaa

SEQ ID NO: 301616 - DNA, 50 bp, Homo sapiens
tacagaaagtcaccagaggaaggctgaccggttccctgatgtgttacctg

SEQ ID NO: 301617 - DNA, 75 bp, Homo sapiens
tgttagcctttgcagtctcgacataagtgtgttggtaaatcatgcttattgctacagtttacagacaagaggttt

SEQ ID NO: 301618 - DNA, 88 bp, Homo sapiens
cgagaacaccggcacaaagaacacaagaaggagaaggaccgggaaaagtccaagcatagcaacaggaaacgttttgatggtaaattac

SEQ ID NO: 301619 - DNA, 100 bp, Homo sapiens
cagtatgtttcagaagtggaaataattaatgaccgaacagaaacccctcctcccctagcttcactcaatgttagtaagatggctgccgcacgcctctgcc

SEQ ID NO: 301620 - DNA, 100 bp, Homo sapiens
ccggccccgagcaggtcacgaggacggagggccatgtgttgggtcagcaccatcagagagcatcagtgatgtcacgtttggagcaggggtcagttacatc

SEQ ID NO: 301621 - DNA, 130 bp, Homo sapiens
acaagcagatctactactcggacaagtacttcgacgaacactacgagtaccgatgaaggatttgggggcagagcacttggcaggtcatgaaggggtccaacttctcgggttgttgaacgtctacctggaa

SEQ ID NO: 301622 - DNA, 82 bp, Homo sapiens
gaaaaaaccaaaattatcgccaagattcagcaaaagaatgcagatgtgctgttttcctcatttcagaaaccgaaacagaaac

SEQ ID NO: 301623 - DNA, 75 bp, Homo sapiens
cacagctaagactccaggaccctctggaagcctagaaatggagaaccaggtgcatcagcgcattgcggagctgag

SEQ ID NO: 301624 - DNA, 100 bp, Homo sapiens
tacttctcggcgctgccgtctctggaggagtactggcaacagggtggcccagttgaaatccttcccttcctctaccttggaagtgcctaccatgcatcca

SEQ ID NO: 301625 - DNA, 96 bp, Homo sapiens
tctgtgccgacaagatggcggacggggagctgaacgtggacagcctcatcacccggctgctggaggactccactgagatacacaaagacattattg

SEQ ID NO: 301626 - DNA, 75 bp, Homo sapiens
aaaaaatctggagggactccaacttcaatgtatgacatgatgggaagaaatcagactgctgtgagagaagagatg

SEQ ID NO: 301627 - DNA, 90 bp, Homo sapiens
agcagtggcagctgcagtagcggcagcagccccagcctcaaggccagctccaggtttacaccctgtacctggtggagtgttcccagtccc

SEQ ID NO: 301628 - DNA, 75 bp, Homo sapiens
cacgttcgtgctacagaagaagggcatcgtgcgtgccaagcggcgagatgtatgtccctgggaagctgcatgatg

SEQ ID NO: 301629 - DNA, 75 bp, Homo sapiens
tgacggctccctgctgttcgagtacctgcccagaggggcccactcgctgtcccagatggagtttcgccatgttgc

SEQ ID NO: 301630 - DNA, 75 bp, Homo sapiens
gtcagatcggcattgctggacccgagagaaaaggaacagttccgtaagctctttattggtggcttaagctttgaa

SEQ ID NO: 301631 - DNA, 100 bp, Homo sapiens
tatatttctgccactgccaaatctgcacctggctgaggtgtggagaatgctgtcggtggagcttcccagcacgacctggattctgtggaggctcctgagg

SEQ ID NO: 301632 - DNA, 100 bp, Homo sapiens
cacgtcccagctctctctgggcatctggaaaggaccaagccatatgtccttctatgttcgagcccacaaagggtcaacactttctcagtggtctcttggc

SEQ ID NO: 301633 - DNA, 99 bp, Homo sapiens
ctgaagatggctactctggagttgagcaaatcaatgaggacacgggaacagcacgtgccattcagagaaaacctaacccgttagccaatagtaacacta

SEQ ID NO: 301634 - DNA, 98 bp, Homo sapiens
gagtccacaccgacttcactcccagcccctatgaccacgactcgctgaaactgcagtgatggcctgtggtcggccccagggcactgctgtgtacaagg

SEQ ID NO: 301635 - DNA, 100 bp, Homo sapiens
aaacagcacggccacaggccccagccacagtggggctggccttccgggcagcatggcacattacacttctgtggatttaaagtccttgcccctcagatca

SEQ ID NO: 301636 - DNA, 101 bp, Homo sapiens
ccacatcccagcttctcataataaatactacatgctggttgctcgtggattgttgggaattggagcagatcagttggccttatttcctcagtggaaatcta

SEQ ID NO: 301637 - DNA, 83 bp, Homo sapiens
atcacggtcaagtacacagagagacggcagccgctgtacagattcatcaccacggtggttatcactaggctaaaactggacaa

SEQ ID NO: 301638 - DNA, 100 bp, Homo sapiens
caccactttcagaggtacagtgacgtccgggtcaaagaaagccaagacgaacttgaccattatatcaaccaccttctgcaaagcacatcgttgaggtcct

SEQ ID NO: 301639 - DNA, 101 bp, Homo sapiens
ggagaaggaggaactaatcagcactttgcaagcccagcttactcaggcacaggcagaacaacctgcacagttattcaagcggagaaatgttgctacagcag

SEQ ID NO: 301640 - DNA, 83 bp, Homo sapiens
cacagagcctcgcctttgccgatccgccgcccgtccacacccgccgccaggcagaggtggaggagacactgaagcgactgcag

SEQ ID NO: 301641 - DNA, 144 bp, Homo sapiens
ccttccagtggatttccttgcggaaaggatgttggcggtccctgtgacctgtggagacacggccagatctgccctccacagcctcccgcgacgatgcccctcaacgttagcttcaccaacaggaactatgacctcgactacgac

SEQ ID NO: 301642 - DNA, 74 bp, Homo sapiens
ttttcagacctaaaaaaaaggacagtgctgtgaagccagacagatcgcaagcaggactggtcagaccatgctat

SEQ ID NO: 301643 - DNA, 75 bp, Homo sapiens
ccggtacatctgaaagccgggaaatgctcactgaaaactgaagctaatttggaagttttgaagtcaattcctagt

SEQ ID NO: 301644 - DNA, 96 bp, Homo sapiens
ctccctcgcttgtcttctcgggcttctcgccccggccgcggccgggtcctcagaagcatgcaacagttactggattatccagaagatgacatagag

SEQ ID NO: 301645 - DNA, 92 bp, Homo sapiens
aggaactgcagtacaaagaaaagggggtggagaccctgcaagagagtgctcccaccccagcccgttgctgcccagctattggaacactgtat

SEQ ID NO: 301646 - DNA, 82 bp, Homo sapiens
cgcagtttctcacgacgggccgagcctgccactaggctgacccgcggctgattgagtccctctcccagatgctgtccatggg

SEQ ID NO: 301647 - DNA, 100 bp, Homo sapiens
catttctacccaagtttaaatgacctgctatgcccacagagcttgatccagaagtgcacaggtacaggtttgcagattccgccagcagcacagcaagctc

SEQ ID NO: 301648 - DNA, 75 bp, Homo sapiens
caatgctgcgaaagctgccaaaagtgacatgcaggctcctgggtagaactgcacttcagcaataatgggaacggg

SEQ ID NO: 301649 - DNA, 100 bp, Homo sapiens
cagcacgtaccagaggtggaagtccaagtcaaacgcagaaggactgcctcactgagcaaccaagaggttggggtgctggaggactgcttcaccttcctgg

SEQ ID NO: 301650 - DNA, 119 bp, Homo sapiens
tgtcatgttggtagtgacaatcattactctgcctccactaccatggtaactctgggtgcctttgggcatgaagaagaagttatctctaatcctttgtctccaagagtgattcaaaacat

SEQ ID NO: 301651 - DNA, 122 bp, Homo sapiens
tggagaggttaaagagacccgttcagagtcctacagtggcaggtaatggagccagtactttgacagcaggttgcaaagaaccagtgaccttccgggatgtggctgtggactttacccaggag

SEQ ID NO: 301652 - DNA, 98 bp, Homo sapiens
gcgagacccattcggcggcgcccgggacggcggcggacctgtcgcgatgtcagggctgcgcctctctgcagcagggtttcgaaaaaacgatgaaatga

SEQ ID NO: 301653 - DNA, 50 bp, Homo sapiens
tggacggtcactcagcctatggagcgcttctctgaagtagctttggaaag

SEQ ID NO: 301654 - DNA, 71 bp, Homo sapiens
aacatttcagcaaactatgctgccttcaataaggaattgactttaaaattaggaccatagagctcgatggc

SEQ ID NO: 301655 - DNA, 75 bp, Homo sapiens
tgcgaaaaagtggatcaatattcggaagtcatatggaaatttttacaagtcgactcctttacatctagcagcggg

SEQ ID NO: 301656 - DNA, 112 bp, Homo sapiens
gcagagctacgcgaccatcgtgcacaacagtcgctcctccaggccacactgtatcgtcagcgtcaactatgtcctcacgagtatgctgctgctgttccgctttgcgtcctcg

SEQ ID NO: 301657 - DNA, 90 bp, Homo sapiens
aaaccaccgtggaagtcgcctggtgtgaactgcaggtattgttgcagcatctggcagtgagactgaggatgaggacagcatggacattcc

SEQ ID NO: 301658 - DNA, 71 bp, Homo sapiens
tcgctgcccagaagaagggaaggcgcgagtgaggaaaggaggtactgtagggagaaaactggttgtcctgg

SEQ ID NO: 301659 - DNA, 98 bp, Homo sapiens
tgaatcctgcggcagaagccgagttcaacatcctcctggccaccgactcctacaaggtgtggccgacgacgatgccctcgctgaggagcgcatgcgga

SEQ ID NO: 301660 - DNA, 96 bp, Homo sapiens
aatttttacaccactgggatgtaacagagataaatttgcgcctcattttggtaagcggaaaaacaaaagagttcctgttttctcctaacgattctg

SEQ ID NO: 301661 - DNA, 50 bp, Homo sapiens
cagcaacagctcggcgggctggaagctcaccatggatgatgatatcgccg

SEQ ID NO: 301662 - DNA, 76 bp, Homo sapiens
agggggaagtagagagataacaaaagctgctcagagtctcaatgaacttgctccttgggagaggcgtgggcccagg

SEQ ID NO: 301663 - DNA, 100 bp, Homo sapiens
cagaaacagaggagttggagttgctactaaaaagagaggtgcctttatctgatgatgatgaaagttacacaggaagaagaagaattttcagttcttgcca

SEQ ID NO: 301664 - DNA, 89 bp, Homo sapiens
gccgccgagcagcagaaggcgcagtttactgcacaggttgaaactgataaagccactgttggatttgagagcctggaggagtgttatat

SEQ ID NO: 301665 - DNA, 100 bp, Homo sapiens
atgtatctgtggcccttccaaataagcggcataaagcaattgagaattcaggaaactggagcacccatcctaactgatgatgttagcctgcaggtgttca

SEQ ID NO: 301666 - DNA, 82 bp, Homo sapiens
gaccctggagcctcagttggaagcagccgatccagcctgcggagcctgtggggcagaatgaggacctaatttgcttcaaaga

SEQ ID NO: 301667 - DNA, 121 bp, Homo sapiens
agagtggaaaaaagagaggatttgcttttgtaacttttgatgatcatgatacagttgataaaattgttggtaaacgccctgcagaagatatggaagaggaacaagcatttaaaagatctag

SEQ ID NO: 301668 - DNA, 108 bp, Homo sapiens
gggatagtggagctgcccactctagaggagctgaaagtagatgaggaggaggaagccaagaatctggtgagcgaagccatcgcagctggcatcttcaacgacctgggc

SEQ ID NO: 301669 - DNA, 75 bp, Homo sapiens
atggcacttcattggccacctacagaaacaaaatgtcaacaaattgatggataccccatcagcctgagtctctta

SEQ ID NO: 301670 - DNA, 101 bp, Homo sapiens
ggcggaagcggagggggaccaccgtggagagcgcggtcccagcccggccactgcggatccctgaaaccaagtaatagcctgcagctggtgttttgagaagc

SEQ ID NO: 301671 - DNA, 100 bp, Homo sapiens
tcgccgccgcctctgcagtcctcagcgcagctctcaaaaatctatggccctgtgttcactctgtattttggcctggaacgcatggtggtgctgcatggat

SEQ ID NO: 301672 - DNA, 75 bp, Homo sapiens
gtgttcactttttacacactcgtgatgtagttcatcttgatttgaagaaaacgttgtgtgacgtgatcctcatgg

SEQ ID NO: 301673 - DNA, 95 bp, Homo sapiens
actctgaagatgatcagacaaggcaaagcgaaattggtcattctcgctaacaactgcccagctttgaggttgtgggctgcacactgcagaaagat

SEQ ID NO: 301674 - DNA, 100 bp, Homo sapiens
agaagaagcagaatagacacttcattgttccagcttctcgcttcaagctcctgaaggcagcaattccatttccgtgagggcgtttctagatgaagatgac

SEQ ID NO: 301675 - DNA, 100 bp, Homo sapiens
ttgtgctgctcacagtcaccgctgtcattgtggttgcacctggacttgatatgaaagtaaccatcagaaaatcaacagagatcttaaacttgcctaccac

SEQ ID NO: 301676 - DNA, 101 bp, Homo sapiens
tggccagggaactcaaacagcagatgcagagacttgcagccaatacaggaagcaaacagcgtagtcgcctctctgttatggctcagtacctctgcaatgtt

SEQ ID NO: 301677 - DNA, 80 bp, Homo sapiens
cctgcgccgagtggacgcctaccgcatctacttgattctcattcagattgtggatgcctcgtcagtcatcacttgggatt

SEQ ID NO: 301678 - DNA, 98 bp, Homo sapiens
gaaagcagctggtcagcgatggcctgctagactctgtccccggcgtgaagaggaggcggctgatccccgaggggaggagtggggccagttaaaagctc

SEQ ID NO: 301679 - DNA, 100 bp, Homo sapiens
cccggtgcaagaggcgcaaacaagccaatcccaggaggaaaaacggtatcttcaaagaacagtaaaacatccaactttactacaggatcctgatttaagg

SEQ ID NO: 301680 - DNA, 73 bp, Homo sapiens
gctgagatccatctgcaccacggtgctggtggaaaaccatgaattccttgtaaaaccttcatttgatcctaat

SEQ ID NO: 301681 - DNA, 101 bp, Homo sapiens
tgggttcagttttcttcagaagaaggacttcggaatgcactacaacaggaaaatcatattatagatggagtaaagaaaattccttgacatactccaagaat

SEQ ID NO: 301682 - DNA, 90 bp, Homo sapiens
agaaactttgctacctgggaactgaagactacttagaatgaagagcttcgaaacttgtctttgtctggccatgtgggatttgacagcctc

SEQ ID NO: 301683 - DNA, 83 bp, Homo sapiens
tgaggctccagtcaaaaaccattaaggtgagaagccctaccactgcaactgggacggctgcggctggaagtttgcgcgctcag

SEQ ID NO: 301684 - DNA, 90 bp, Homo sapiens
cagcagagacagcaccaggggtcagcagggggccagctcaggacacacagacccagctggaactcggtcatggaggcggagcagaccaag

SEQ ID NO: 301685 - DNA, 51 bp, Homo sapiens
aaatttcctttgtcatctggtgcatagcagaggagatgctgaagaagaaac

SEQ ID NO: 301686 - DNA, 115 bp, Homo sapiens
agccgcaccatgccgctcctaagcctgcacagccgcggcggcagcagcagtgagaggcaagagcggtgagcggggcgcctatgcctccttcgggagagacgcaggcgtgggcggc

SEQ ID NO: 301687 - DNA, 82 bp, Homo sapiens
gcagattcagtgtcatgtgaggacgtgcttcctgcttcatagataagagtgcccctctcagctgaggaggaaccgagagcgg

SEQ ID NO: 301688 - DNA, 88 bp, Homo sapiens
ggaagttaatgtttacggcgaagtctactcaacgtttccaagagactctacaggggcaggtaattcactggtccacaagcggtctcct

SEQ ID NO: 301689 - DNA, 80 bp, Homo sapiens
aggcgcaaacaagccaatcccaggaggaaaaacgacctgcgaccgcatcaagcagtccgccagcggaaccaagcggcgcg

SEQ ID NO: 301690 - DNA, 83 bp, Homo sapiens
agctggcgctggggatccctgctcttcgctctcttcctggctgcgtccctagcttgcgcgatctctggcctcttcaactgcat

SEQ ID NO: 301691 - DNA, 82 bp, Homo sapiens
caggagtgtggtttgctcagatgtggagcaacaagtggagtgggaatagctttgcgaaaaatgggcgcaatggccaagccag

SEQ ID NO: 301692 - DNA, 100 bp, Homo sapiens
attttgccaattttggtgttctcaggttatcgggtcatctttctgaaggattggttactaaatggtacagatctccacgtcttttactttctcctaataa

SEQ ID NO: 301693 - DNA, 75 bp, Homo sapiens
gcacattcattctcaaaaacccacctggtttcatggacccaggcactacggaccatagttaaaaactgttataaa

SEQ ID NO: 301694 - DNA, 100 bp, Homo sapiens
aaagcgctggcagtcctgcctggcccccagccagttccctgctgaagatggccagatccccttgtctggtccaccttctccaatccctgcctgctgggag

SEQ ID NO: 301695 - DNA, 101 bp, Homo sapiens
gatcatcattaaggacggaggcacggaatttatcatggcatccagcattgaccactacaagtaaaatgcgaattccacattctcatgcatttattgatctg

SEQ ID NO: 301696 - DNA, 74 bp, Homo sapiens
ggcaaaccagatatatgacttggtgtgccattatctacacaatggggacctcaaggctatttctatccaatcca

SEQ ID NO: 301697 - DNA, 98 bp, Homo sapiens
aagaacagaatgaagaaagtcagggggactgcaaaggccaatgttggtgctggcaaaaagctgattggggccctggtcctgtctgtgggcatctatgc

SEQ ID NO: 301698 - DNA, 82 bp, Homo sapiens
ggaagcagctctccaagactagtctcttccaaggaagatcttgcagacctgcctagagctggaacgttacctccagagcgag

SEQ ID NO: 301699 - DNA, 75 bp, Homo sapiens
tgactatgtggacagaggctatttcagtatagaggaagatgagaatgtgcctactgctcctgatcctccaagtca

SEQ ID NO: 301700 - DNA, 75 bp, Homo sapiens
ctttgaactactgccggagcttctgccagggagtgattgattcggaaagaatggattttgagctgttgccagatg

SEQ ID NO: 301701 - DNA, 98 bp, Homo sapiens
tcaagattcaccatgtacaccacatcatctaagtcctgtcagccctcctgttgtggatctcagaactatcatggaaatagaagaaagtagacaaaaat

SEQ ID NO: 301702 - DNA, 85 bp, Homo sapiens
tactcaggcgctggagaaatacaacatagagaaggacattgcggctcatatcaagaaggtcagctccgccgaaggcgccgccaag

SEQ ID NO: 301703 - DNA, 100 bp, Homo sapiens
tgcgtatccgcactgtccagcccaagcctgactatggtcagaatggcggcagtggagcatcgtcattcttcaggattgccctactggccctacctcacag

SEQ ID NO: 301704 - DNA, 75 bp, Homo sapiens
aagaaggtgatggcggccatcgagaaagtgcggaaatgatacctagagatgctgcttgagtaccttcaggattac

SEQ ID NO: 301705 - DNA, 100 bp, Homo sapiens
ggagatatggcgcaactgcggcgcgaataattctgctacaaggctgatttcaaggacatgaattgttgacctcatcccaacatcagaacctcagatgttc

SEQ ID NO: 301706 - DNA, 97 bp, Homo sapiens
ctcacctgggttttcttagccctctacttttcaagacaccaagtgagaggccaaccaggttttgagcaaaattttggactgtgaagcaaggcattgg

SEQ ID NO: 301707 - DNA, 100 bp, Homo sapiens
tgaatttccatgtcaacatagtcctgaaaatatttacaccagcagctccagttcataccaataaagaagatcctgctacccaaactaatttgggatttat

SEQ ID NO: 301708 - DNA, 74 bp, Homo sapiens
acttctgccactgctgctccgtggagatcgtcccgcgcctgccgacgaaggccttcatccaccacgagctgctg

SEQ ID NO: 301709 - DNA, 96 bp, Homo sapiens
gggaaagtccctaaaaatcacgagttcaggcgtctgagacttggtgggaacggaccttcctcttaggcaaaggccggcgtgtgcagccccagtggt

SEQ ID NO: 301710 - DNA, 102 bp, Homo sapiens
cctactggggacgtacaccttgaccaagctgtttgagggcatgaaggcgttcaaaggcaaagaccagcaggtgcgcctcttccgcccctggctcaacatgga

SEQ ID NO: 301711 - DNA, 90 bp, Homo sapiens
gtgtctcgggcgttcagccgctcgctctccgccttccagaagtcaagtaagggagaattgactacgcttatacatcagcttcaagaaaag

SEQ ID NO: 301712 - DNA, 75 bp, Homo sapiens
gtggatgcctgcatggcctgcctgcggtccccaaacactgatcgagaggtgctgggcctggtgcgagtgcccctg

SEQ ID NO: 301713 - DNA, 83 bp, Homo sapiens
gccgggatttgggtcgcagttcttgtttgtggatcgctgtgatcgtcacttggtcccaggtgtgacaccttcagcaggtctca

SEQ ID NO: 301714 - DNA, 75 bp, Homo sapiens
cagtgattctacatctcaagctcatattttgaagtgtttacggcctccagtctgtggactttgaagctgtggcaa

SEQ ID NO: 301715 - DNA, 100 bp, Homo sapiens
cttcggtttcctggctttcatgatattcatgtgctgggtgggggacgtgtaccctgtctaccagcctgtgggcttccgagtggacctgccaatcaagtcg

SEQ ID NO: 301716 - DNA, 75 bp, Homo sapiens
ggaacgaggcaaggagctaaagcagcgtgcgttcagccctgggatccatgttcactagcggccttacagaaagta

SEQ ID NO: 301717 - DNA, 75 bp, Homo sapiens
ctataggagtcatggtaacagcgtcccacaatcctgaggtggaatatgtgatcaagtgtgacatgtcagctctgc

SEQ ID NO: 301718 - DNA, 100 bp, Homo sapiens
ttattgctgagacctccactggctgtttgtttgctggatcatcgcttggtaaacgaggcttattgtgtaacagaacctggagcaggctctgatgtagctg

SEQ ID NO: 301719 - DNA, 75 bp, Homo sapiens
gggcacctggaaaacaacccagctctggagaatttctagcatggacaatccagataatgaaatagtgttgtactt

SEQ ID NO: 301720 - DNA, 75 bp, Homo sapiens
cctctggatggcttcgacgtgtggaaaaccatcaggttagcactctacgtatatgaatatctgctccatgtagga

SEQ ID NO: 301721 - DNA, 108 bp, Homo sapiens
gtacgataccgaagcgggctgtgtgccccttctccacccagagattcagaatggacagtttagaagaacctcagaaaaaagtctttaaggctcgaaaaacgatgagag

SEQ ID NO: 301722 - DNA, 50 bp, Homo sapiens
gccggaggagtctcagagctgtcagaaagctgtgcaaccatattgcttct

SEQ ID NO: 301723 - DNA, 100 bp, Homo sapiens
ggctacgatgagcacaccggccgtgccccaggacctgcagctgcccccgagtcagagggcgcagtccgcattcaaagctttgtgtccctggtgatgttgg

SEQ ID NO: 301724 - DNA, 75 bp, Homo sapiens
ggaacgtggatcatgcggccactcatattaccaaccgcagagaggttgcagaggcagtgttaacatcccaactga

SEQ ID NO: 301725 - DNA, 89 bp, Homo sapiens
acccctatgatgaagagggcgtccactggaggactctggattgatttggaaatgtcctacaatgggtcctttctgatgactctcgagac

SEQ ID NO: 301726 - DNA, 50 bp, Homo sapiens
tgatacttctgtctccattgaggaaaagagctgtttttatcttgttattg

SEQ ID NO: 301727 - DNA, 151 bp, Homo sapiens
gagaccccacctactttgggcctgtgctgaactacctgagacacggcaagctggtgattaacaaagacctcgcggaggaaggtttatcagtaaagagatcctgaccatccgggaggccgtatggctcacggacaacacttacaagtacgag

SEQ ID NO: 301728 - DNA, 82 bp, Homo sapiens
ttcaatttcacattgcccacttatatgaaacccagtttgaaattggcacaatggaagaagctggaatttgtgggctaggggt

SEQ ID NO: 301729 - DNA, 90 bp, Homo sapiens
gggcagcccgctgtgtggcaccgtctggaggagctctacacgaagaacctcacagaatgaggttcctgcggcacccctggaagaactggc

SEQ ID NO: 301730 - DNA, 97 bp, Homo sapiens
gaaaacggcgaggaagctgtggctctggttgaggatgtacagagagctcctggacaacaggaatatattaaaggaatctgtgaacctgaactagaag

SEQ ID NO: 301731 - DNA, 85 bp, Homo sapiens
cacccagaggccggggaccttgccaaccctcccaagaagttcagaggcacagttggcgggcagctcccaggtctccatgagtacg

SEQ ID NO: 301732 - DNA, 75 bp, Homo sapiens
ggaatgctcttttaccgatgctttaacatacagccactagtttttttgaagaagcaggatgctgatctaaacgtg

SEQ ID NO: 301733 - DNA, 83 bp, Homo sapiens
gttggagttttgcccacgcgttgtaattaagcctcgcacaatatgccatcactggtgcaagctatatttaacggagatcctga

SEQ ID NO: 301734 - DNA, 90 bp, Homo sapiens
gtgcaatgaggacggactcacagccctacaccaggtgtattccagagcaaatgaaaaagagccttgctgttggtggttagctaaagtgag

SEQ ID NO: 301735 - DNA, 75 bp, Homo sapiens
atgcggaggctgcctcggcggagcagaggaaccacacgctgatcatgatttgaggcttaagcaacttcttccggg

SEQ ID NO: 301736 - DNA, 101 bp, Homo sapiens
tctaaaggagctgtcagatggagaaataaaagtggccattagtactgtgagcatgaaccttgaggattcctacaggaagcaagtagtaattgatggagaaa

SEQ ID NO: 301737 - DNA, 88 bp, Homo sapiens
ccatgctggaggagttcaagaaggaacctgcacttgttgccaagtcttccatcttactagatgtgaaaccttgggatgatgagacaga

SEQ ID NO: 301738 - DNA, 145 bp, Homo sapiens
ttttgggctttcctgtaccgaacagatttgcttgttgggtcgaacttgtggctattcatttattctcaccagggcgaggattaaatccaccacacagggtgaaatctatctccatgacaacattcacacaacaggaaattgaatt

SEQ ID NO: 301739 - DNA, 101 bp, Homo sapiens
tgattttttgcctttgttgattaactggacaaattcaggaacttacaatgtctcagaaaaatggtgggaatgttcttcagatgatgtatgagaaacctgaa

SEQ ID NO: 301740 - DNA, 100 bp, Homo sapiens
gagcagtcctctcagcccacttgcacgagtttcgtaaaaaggagcaacaaattaaacaatgcaagggcacagcaggacaagcactcattaaggaatgagg

SEQ ID NO: 301741 - DNA, 100 bp, Homo sapiens
aacaagacgtgtgaagactcaggcctcattgctacgatttcagagtaccctggtaatagctgagcatgcaaatgattccctagcacccattactttaaat

SEQ ID NO: 301742 - DNA, 100 bp, Homo sapiens
gctcagaaaagtcaaagcctctgtggacatgtttgatcagcttttgcaagcagcaaagtggaagatgctttctacaaaggtgaactcaggctgaatgagg

SEQ ID NO: 301743 - DNA, 75 bp, Homo sapiens
ggcagctgaggcggaggctgacgaggaggcggatcccccggcgtcagtgtgtttcctgtaacaaatcgttcaaga

SEQ ID NO: 301744 - DNA, 75 bp, Homo sapiens
tcccatgaattcacctttgattccagtgtgaactgtcaatcataagaagaaattgcttcagagaattcagattgc

SEQ ID NO: 301745 - DNA, 100 bp, Homo sapiens
ggcgcagcgggcagtgtggctcataagccacgaaccgggaactccactttgtggcaccgtgagattctccaggatgaaacgaggaggaagagatagtgac

SEQ ID NO: 301746 - DNA, 85 bp, Homo sapiens
ctggcaaaagcacaaggattctcgctgtgacagagacaacaccgagtatgagaagctggtccattcaggtccaggaaagggatca

SEQ ID NO: 301747 - DNA, 75 bp, Homo sapiens
ttcaggccccatatgatcgaggacatccagatcagccggcagtccattgatgcactcaaagactggttcagagat

SEQ ID NO: 301748 - DNA, 82 bp, Homo sapiens
aagctcctgggcaaggggacgtctgcagctgaggcctgctttcttccccgggcgatgtgcagagatctttgccaggggtcaa

SEQ ID NO: 301749 - DNA, 75 bp, Homo sapiens
tacgtccaggacagcttcctgaccaatgacatccttcacgagatgcgctagtcctgctgatgggcaaagaaggtg

SEQ ID NO: 301750 - DNA, 83 bp, Homo sapiens
cacagagagggcctgggagcttgctgcagcttcaggtgaccagcgccatgtccagccaggtggtgggcattgagcctctctac

SEQ ID NO: 301751 - DNA, 141 bp, Homo sapiens
cgtctctgagactactttcagagaagatccttgggctccaggtccagcaggcggagcactgttcactccactcgcgccggacacagggagcagcgagcacgcgtttcccgcaacccgataccatcggacaggatttctccg

SEQ ID NO: 301752 - DNA, 50 bp, Homo sapiens
acaacaaggcggcggtggactggtataagtgtgctagcggagtgtctaga

SEQ ID NO: 301753 - DNA, 100 bp, Homo sapiens
gattaggcatcttggctggcttgcagaaaagctcatttagaggcgagttttgaggaggtagagaacaacctgctgcatctggaagacttatgtgggcagt

SEQ ID NO: 301754 - DNA, 75 bp, Homo sapiens
tttccctctccctttccctaaggtcccttcaccgatgttgtcaccaccaacctaaagcttggcaacccgacagac

SEQ ID NO: 301755 - DNA, 75 bp, Homo sapiens
caccttggctctcccacccaatggagatggctctaatggccaaatttgagtttcatcatggtgactatgaaaaac

SEQ ID NO: 301756 - DNA, 100 bp, Homo sapiens
tgagctgatggaagatctgtttgaaactcagaacagccctgtggcccccacagcccagcccaaagccccaccctcaagaactccccagtcgggatcagcc

SEQ ID NO: 301757 - DNA, 98 bp, Homo sapiens
cagcatttgtggagcaatcttttctacagaaggttaaaagcatcttgactcctgaagatagtttctaatggtgatgaacaattggaaaaagccatgga

SEQ ID NO: 301758 - DNA, 82 bp, Homo sapiens
agatggggatggcatcaacctgaatgacatcgagaaggtccttccagcctggcagttcaaagcagtattcagcgatttcaag

SEQ ID NO: 301759 - DNA, 96 bp, Homo sapiens
agccatgtggatacctacggagcacgagaaatacggcgtgggagtttatattgtcagaagattataacaagatgactcctgtgaaaaactatcaag

SEQ ID NO: 301760 - DNA, 100 bp, Homo sapiens
ttcttctctttaaatatttgatgaaattcaccagtgaagccgtgacatcctgggatattctttgttgagaggtacgtcagcctgtcatatgcatcaacaa

SEQ ID NO: 301761 - DNA, 74 bp, Homo sapiens
ccaataaaccagagtttgaggacagatatatttttgccatcatggatcagtttggagatatattagaaggtgaa

SEQ ID NO: 301762 - DNA, 100 bp, Homo sapiens
cacaaccttccctgagagccatcttcggactcctcagatgccaccaacaactccatccagcagtttcttcaccaagttgcacactgacaagaaacagatc

SEQ ID NO: 301763 - DNA, 98 bp, Homo sapiens
ttgtctggaagctgccaatccttggacaggtcagcagacagccgtactctgacagctgtgcacgatgccatccttgaggacttggtcttcccaagcga

SEQ ID NO: 301764 - DNA, 83 bp, Homo sapiens
cccggcgcggcccagcgccctcaggactgaatgtgggcccagttggcgtcattctgctttgacctaaacattcccatctgatt

SEQ ID NO: 301765 - DNA, 83 bp, Homo sapiens
ggcccttgttcccccaaatgtctgactctgactctcggactgagaaacgcaagaagtttccaagggtcacttgtgtctcgtcc

SEQ ID NO: 301766 - DNA, 83 bp, Homo sapiens
ggagattctggggcagtatcaacggagtctccgggcccccttacccaggaatggaacaacctccacaccatccttactatcag

SEQ ID NO: 301767 - DNA, 75 bp, Homo sapiens
ttgtaagaagtgtgctcaaaatgtgaagcaatttgggacggttagaaaatggatttctgactggaatctcaccac

SEQ ID NO: 301768 - DNA, 75 bp, Homo sapiens
ctgtcctccacatattgaaagtctaggacttctctcaaacttgtgtgctgaggagactcagatgttggcctcagc

SEQ ID NO: 301769 - DNA, 100 bp, Homo sapiens
ccggaccctggaagagaagagggtggctaatgattaagggaagcaaaggtgtctaccagtaccactggcaaagccacaatgtcaagcacagtggtgtgga

SEQ ID NO: 301770 - DNA, 97 bp, Homo sapiens
tgcccgccggggggctagtggccacgctgcagagcctcggcatctgtggctcttgtgcaatgaacatcaatggaggcaacactctagcttgcacccg

SEQ ID NO: 301771 - DNA, 75 bp, Homo sapiens
gtgtgacaatggcgtgctgacctatcatcccagtttacattcatatttgatcagaaattggatgaaccttcggga

SEQ ID NO: 301772 - DNA, 90 bp, Homo sapiens
acgcgggctgctcatcgtcagcagggagaggctggtcctgatccggttccccatgcagaggaacttggtggtgatccccaagtctgtgac

SEQ ID NO: 301773 - DNA, 100 bp, Homo sapiens
caatacaataccaatgtggtgtataatacagaaggaaaactcgtggcacgttaccataagatttcaagagatggacgcttgaggagccgaagtggagccc

SEQ ID NO: 301774 - DNA, 75 bp, Homo sapiens
aaaatatggattacaggttgatgtgggaggccataaagaatgctgatgggagaaccattttcctaattttcaaat

SEQ ID NO: 301775 - DNA, 90 bp, Homo sapiens
caaaaagcagagtgtctatttgatgaatttgaggaaatctggaactttgggccacccaggatggaagggatggatgatgaccccgaagac

SEQ ID NO: 301776 - DNA, 74 bp, Homo sapiens
aggaggaggggctccggctggtctgtggtgagctctatggcctgttcctgactgcggctgcacagcccctgaag

SEQ ID NO: 301777 - DNA, 75 bp, Homo sapiens
agaatgaacactgtccttcaaaacgaagagctatttgtccaagaactctgaagatgatgagctagctaaagaatc

SEQ ID NO: 301778 - DNA, 100 bp, Homo sapiens
tccatatgtagaagcaggcaatccccaggcaagacctctcaggtacttggattatggagaagagaattggaagaaacagacatctcagtgcttgaagaac

SEQ ID NO: 301779 - DNA, 75 bp, Homo sapiens
aaagaggccacagaggcagccaagtgtaacctgctggcagaaaagatgtataagcattccaataataaggccatg

SEQ ID NO: 301780 - DNA, 83 bp, Homo sapiens
cgctgagccgtcgcggagccgcgcagccctcggagcacgcgggctgacgcacgaggcacacaggaaggaggtggagcaggtgt

SEQ ID NO: 301781 - DNA, 96 bp, Homo sapiens
gaaacctcagacagatcgccggggaggcagcgcgggatcccagcctcaggcgtgcgcggacggtgtgcggactgaacattcttcacgatctgaaag

SEQ ID NO: 301782 - DNA, 51 bp, Homo sapiens
gaagagagagcagagacagctcgtctgcaccctcatcacatgtgtggattc

SEQ ID NO: 301783 - DNA, 125 bp, Homo sapiens
tcgctatacccgatcgcggttttaatcgacgagctccgcaatgaagacgtgcaggtactgaacgacacctgggtctccttcccttcctggtctgaggactccacgttcgtcagctccaagaagac

SEQ ID NO: 301784 - DNA, 75 bp, Homo sapiens
gctggcgcgcagcctcagctaggttaccagccagtcttgtctggtcaacagggattccaaggcctaataggagtg

SEQ ID NO: 301785 - DNA, 100 bp, Homo sapiens
tgagccgtgaccatgagggccatcccgaaactgtgattgttttctgttctgggaagtcatcagtgatgagcatggcatcgaccccagcggcaactacgtg

SEQ ID NO: 301786 - DNA, 83 bp, Homo sapiens
aggcgaacccgcggcgcaataacggtgtaccttccggtttcccagcacggccatcaagatccagttcacgtcgctctatcaca

SEQ ID NO: 301787 - DNA, 100 bp, Homo sapiens
gatgtgcagcctgcagccctggaggacggctgggacagcgagcccttcaccctggtggagcgagacggatcttcctgtgaatatcaaattcatcattgag

SEQ ID NO: 301788 - DNA, 101 bp, Homo sapiens
actagcggcggcgggagcggcgccgagaggccgtgcgggacgcgggcgccaggaccggccgaacgcagaggaaggttgtgcaggaccagcgttccctgtgc

SEQ ID NO: 301789 - DNA, 82 bp, Homo sapiens
cagcccccggagtgcggagccgaccagatgaaggatttgggggcagagcacttggcaggtcatgaaggggtccaacttctcg

SEQ ID NO: 301790 - DNA, 100 bp, Homo sapiens
gcagtggaccacagcattcctgaaatacatccaggaaagacatggagattctcttaaaaaggtagtgggcagcagtcagtgacaggtgtaacctctgtgg

SEQ ID NO: 301791 - DNA, 90 bp, Homo sapiens
ctgcaattcataatggagctactgtactggctattggaaggaggagattctgaagataaggaggaatatcgttcagaaaaatctcttgaa

SEQ ID NO: 301792 - DNA, 75 bp, Homo sapiens
ggccaattcgtcgcggcggcggtggagatcgcaggtcgctcagctcattgctgggatggatatggtgagttttca

SEQ ID NO: 301793 - DNA, 90 bp, Homo sapiens
ctcacgggacgcgacgcgccccgcctcccccgtccggtccctctctccacggtaagggtttctgtaacctaacagctatgtttgcaatag

SEQ ID NO: 301794 - DNA, 83 bp, Homo sapiens
ggcaagatggtgttggaaagcactatggtgtgacaatgcagatcttcgtgaagactctgactggtaagaccatcaccctcgag

SEQ ID NO: 301795 - DNA, 75 bp, Homo sapiens
tcaatgaccatggcaagaactggcgtcacgtttacaaggtccaagggcagccattaatggtgcaggtcagtggag

SEQ ID NO: 301796 - DNA, 100 bp, Homo sapiens
atccgtaaccacaaggaggacgaggaaccatcactgttgctggaggcacctgacaaatcctagcgaatttttggagcatctccacccaggaacctcgcca

SEQ ID NO: 301797 - DNA, 97 bp, Homo sapiens
cggcagccaccccatctgggaaatcctggtgaagtccatgctgaggaagcgttcctttgggaacccgtttgagccccaagcacggagggaagagcga

SEQ ID NO: 301798 - DNA, 90 bp, Homo sapiens
atttttctgtctccaaactagattggcagccgttttttgagagcagtatggctgtgacccgatccaaagacgctcctcctttcggccccc

SEQ ID NO: 301799 - DNA, 100 bp, Homo sapiens
ttaaaatcctgctctggccggattccagactcgtgggggaaaggctggaagatgagaatgtgcctactgctcctgatcctccaagtcaacatttacgtgg

SEQ ID NO: 301800 - DNA, 88 bp, Homo sapiens
tgatggagattttgatgtggatgatgccaaagttttattaggtgttggtaaatcatgcttattgctacagtttacagacaagaggttt

SEQ ID NO: 301801 - DNA, 88 bp, Homo sapiens
ggggatggagaaccggtgtccagcggggctgcgggctacggctgttgtcctgaagattatatagacacagaatctcctgtccctccag

SEQ ID NO: 301802 - DNA, 100 bp, Homo sapiens
acgctgcacctcccgcgccgcacggtggacgaggtgcgagtactccagaaggaactggctgcatccacctctgaagacacgcacccttacaaggaggagc

SEQ ID NO: 301803 - DNA, 75 bp, Homo sapiens
tcccggccggccgaggccattgcaggtgctgccacgggacctggagaaggaggatgccccccaggagaaggagcg

SEQ ID NO: 301804 - DNA, 102 bp, Homo sapiens
tcggaagtggtgccttcagcacagacaactgggcggagttaatggaagtcaaccatgatgacaaagtggtcaccaccgaacgcttcgacctttcccaagaaa

SEQ ID NO: 301805 - DNA, 100 bp, Homo sapiens
atggaaaactgttgaaattgtccatatagatattgcagatagaagtcaagttgaaccagcagcagcttcatcagccttgagcagtctgggccacgtgtac

SEQ ID NO: 301806 - DNA, 75 bp, Homo sapiens
aagagcccagctagcaccttcgccctctccagccagaattctatgattgaagcctctaaatgaattgtgcaggag

SEQ ID NO: 301807 - DNA, 82 bp, Homo sapiens
ttagcactttacaagcccagctcagccagacacaggcagagcaagctgcacagagtatcctgagaatctgcccaccatgaag

SEQ ID NO: 301808 - DNA, 101 bp, Homo sapiens
aactgagtcatatcaaggtggaaggcagctgaagaatctccctggaaaaggagacatgaatgtctgcaatgatacttcctgacaagaagttgatacaagaa

SEQ ID NO: 301809 - DNA, 74 bp, Homo sapiens
ggtggatttgcagcagctcatcagagactctgccgagagattcccaacttcttctggagcctggggatcggtca

SEQ ID NO: 301810 - DNA, 82 bp, Homo sapiens
gacagcaccaggaatcctccatcatcaatgaggacacagaacaatgcagatcttcgtgaagactctgactggtaagaccatc

SEQ ID NO: 301811 - DNA, 98 bp, Homo sapiens
agcgcctgagcccgcccttgatcttcgctgtggcatggcggacgaggggaagtcgtacagcgatctcacattcttgaaggtggcattgaagagcacta

SEQ ID NO: 301812 - DNA, 82 bp, Homo sapiens
aggtcctgccgtccatgcggaagatcgtcgccacctggatgctggagggatcaagcatgaattgcaagcaaactgctacgag

SEQ ID NO: 301813 - DNA, 95 bp, Homo sapiens
gctcgcgcttcagcgtcccggcgccgtcgcgccactcctccgatgcagaatacagaaactgcagccatgaccacgcacgtcaccctggaagatgc

SEQ ID NO: 301814 - DNA, 97 bp, Homo sapiens
ctgccctcatccacgatggcctagcacgtggaattcgcgaagctgccaaagccttagacaagttgggagccacgtgtaccagtgtgtgttgatcttg

SEQ ID NO: 301815 - DNA, 88 bp, Homo sapiens
ttgaaacaaggaattgccccatagccttcacagtgctccttccaggacctggacctctgccctctggatggcggcatccagctacgaa

SEQ ID NO: 301816 - DNA, 100 bp, Homo sapiens
gaacagagccgggagttcaagaagaacactccagagaaagatgttctcgtccgtggcgcacctggcgcgggcgaaccccttcaacacgccacatctgcag

SEQ ID NO: 301817 - DNA, 83 bp, Homo sapiens
gctgggtttcccgggagatcccaggcggtgacagagtggagccatggctagagcacttgcacctcctgcgccgccgcccccca

SEQ ID NO: 301818 - DNA, 71 bp, Homo sapiens
catctcattctccagggatcagtggccacctgggggccccgaagtgcacccgctgcctcatcaccttcgca

SEQ ID NO: 301819 - DNA, 100 bp, Homo sapiens
cttgtgattgagcagtttgaagacttgctagttaggattttattactggcagcatgtatatcttttatggtcctagaacaattggagattcatacgcaca

SEQ ID NO: 301820 - DNA, 100 bp, Homo sapiens
atccagtatcacaggaagtgctgcaggcaacagatattgacagggtgtttgactggatcgcatataaaaaggctcttgagatctgtcaacagagaaactt

SEQ ID NO: 301821 - DNA, 75 bp, Homo sapiens
cctggaaacattctttgaattggattatcccaaagtgtgttccagagaacaagccttcagacatttgctatattg

SEQ ID NO: 301822 - DNA, 75 bp, Homo sapiens
gaagaaacaattcttcgacatactctccagcttcaagacattggctccctggattatcaagagtttgtagttgac

SEQ ID NO: 301823 - DNA, 100 bp, Homo sapiens
tattactttcatctatacacttccagtgtcgaaggctggacagagtacaggggctcaggtccaggtggcaggggatatgctacccaactcaactgagcgg

SEQ ID NO: 301824 - DNA, 74 bp, Homo sapiens
tccaatgggagccgtgaggaatgctactggggccacgtcttctgggaccagctcatcgacaggaccgagtccct

SEQ ID NO: 301825 - DNA, 75 bp, Homo sapiens
ccttctcaattttctttctcagaaagcagaggctcagagcttggagacagacgcctcgtcacgtgttcaatatgc

SEQ ID NO: 301826 - DNA, 50 bp, Homo sapiens
ccgggagttacaccgccaccgccagatatttggatttgacctgcattttg

SEQ ID NO: 301827 - DNA, 83 bp, Homo sapiens
tcctgcagatggccaatgagaaagccctgaagcagaagggcatcaccgtgaagcagaagagggcgaccattgacgaggtggag

SEQ ID NO: 301828 - DNA, 100 bp, Homo sapiens
tgcgggcgcagctggcggagctggagctggagctctcggagggcatgtcagagcgggagcgacaggtgatgaagaagctgaaggaggtggtggacaaaca

SEQ ID NO: 301829 - DNA, 100 bp, Homo sapiens
ctgttgaaacaggaacagtctcttcaagtgatgctttcaacagacctcacatctttcttcttatgaaattataactccttggagattaactagagaaaga

SEQ ID NO: 301830 - DNA, 75 bp, Homo sapiens
cttttgtgcaagatgagcctcaagtgcttctgcattacatgtaaacaggaacatcgataagtagtgtaaaaactt

SEQ ID NO: 301831 - DNA, 89 bp, Homo sapiens
ttttcagctgtgacagtactgagagtgttgatagtgtcaatcgttcagttttaatgattttaccagtgtacattccaagcagagtggcc

SEQ ID NO: 301832 - DNA, 100 bp, Homo sapiens
gatgatgtgcttggtggagcagctgcctgggagaatgttgactctactgcagtacatccagcagtggtcattcgacaacgaaagtcataccgtagaaaag

SEQ ID NO: 301833 - DNA, 100 bp, Homo sapiens
tgcaggcgatgtcgccgaaaccgggctgcaggcgggcatgtcaacatcgctctaattcagagataatctgttgtaccactccttccctgcaacagctgaa

SEQ ID NO: 301834 - DNA, 83 bp, Homo sapiens
tgattacaagaatcctatagaccagtgtaataccctgaatcccgaatcccacggcctccgcaccctccagatatatccccgta

SEQ ID NO: 301835 - DNA, 97 bp, Homo sapiens
aattttagcacaactccggacacttgttttccagtgtgatcttacccttaaagctgatttttttcccaggaagccatcccgtcagaggggttcaagt

SEQ ID NO: 301836 - DNA, 82 bp, Homo sapiens
ctcagttggaagcagccgatccagcctgcggagcctgtggggcaggccaagaataaaatctttatgaactaacaagatgaat

SEQ ID NO: 301837 - DNA, 49 bp, Homo sapiens
gtgttaaagtggctgtttcgggtacttgttttggctccaacaagggaac

SEQ ID NO: 301838 - DNA, 98 bp, Homo sapiens
cagaatccaccgaccgcagccctggacacattttacaggagagccgaccattttcagttgactttttcaggaaaatgattcagtttgaaaaggagcaa

SEQ ID NO: 301839 - DNA, 75 bp, Homo sapiens
ggacttcatgaaggatgtgatgaagaaactcagcaacacttcgtaccagatccgggatcagttgaaggaagagga

SEQ ID NO: 301840 - DNA, 87 bp, Homo sapiens
agcgtagagtcgctggagcgggcggagctgtgcgagagcctcctcacttggctgtgagccgtgagctttgaggcggtgggatgtgtc

SEQ ID NO: 301841 - DNA, 75 bp, Homo sapiens
gcgagctgcagctgcgatctctgtggtaggcccagaatatccaagggactgagtgaaaagatatttgcaaaacct

SEQ ID NO: 301842 - DNA, 119 bp, Homo sapiens
gcggggttcgtcgggcctgtggaagaagcgccgcgcacggacttcggcagagtggatcgcagctccaagaggaggcaggtgaagcctttggcagcttctctgctggaagctcttgatta

SEQ ID NO: 301843 - DNA, 100 bp, Homo sapiens
cagcgattggacagaatttgtgaagatgccttcaattaagttgcagagttctgatggagagatatttgaagttgatgtggaaattgccaaacaatctgtg

SEQ ID NO: 301844 - DNA, 75 bp, Homo sapiens
aagagagcagtaccctgatggagtcccttgcagggactggtgattgcagctggaagtgcccatgaccgagctggc

SEQ ID NO: 301845 - DNA, 100 bp, Homo sapiens
tagctcttcactcctcagcgcgacgtcgtgtcgagttcccaaaaagctccgcaggggctgtagggagatcttgtggaagccctgaagccagagtatgtgg

SEQ ID NO: 301846 - DNA, 75 bp, Homo sapiens
cactggagttgcttcacttagctctacaatcaacccatgtgatatgcctgaatattcagtcacaaatgaattttg

SEQ ID NO: 301847 - DNA, 51 bp, Homo sapiens
tttacagcccttccagatacagctaccaggattcctagatgaggttatgaa

SEQ ID NO: 301848 - DNA, 83 bp, Homo sapiens
cgtccaggttcaccagctgctcgccgggagcggcggcgcccggacgccgaaacaaattggagctctggcagatcagcatatca

SEQ ID NO: 301849 - DNA, 83 bp, Homo sapiens
cagaaacactggcaacatttacaaaggatggaggtttgcttctgaataacccttcggcattagctatgcatgagtgtaaatgt

SEQ ID NO: 301850 - DNA, 100 bp, Homo sapiens
gataccccagttatcttttccatttctgcagcaccaatgccttcagactgtggcctttgaactggccacaggtgactatttgtttgaacctcattcaggg

SEQ ID NO: 301851 - DNA, 83 bp, Homo sapiens
gaggattcactgggtgagttcatgcaaagcgctgagaacaggaccccccgcccccgacacagcattgttggttttgccatgta

SEQ ID NO: 301852 - DNA, 110 bp, Homo sapiens
gtcagattgtggccatcaagaagtttctggaatcagaagatgaccctgtcataaagaaaattgcccttcgggaaatccgaatgctcaagagcatgaataatctttcattt

SEQ ID NO: 301853 - DNA, 100 bp, Homo sapiens
aagccagacagctgggccggagcagccgcgggcgcccgaggggccgagcgagagcgcatcagcgaggaggtggggctgctgcagctccttggggaccccc

SEQ ID NO: 301854 - DNA, 100 bp, Homo sapiens
ttccttgacctttaggtgcttttatattcatctcaaaaacaaaattctgaactcaggacttggcaaagttgatcaagaacttaatggaaaacaagatgaa

SEQ ID NO: 301855 - DNA, 100 bp, Homo sapiens
tgaaggaaggataacatggaagcaacatgcctatcatagtgctttgtgtatggtaatggtttttacaaaggaccaaacagaaaaggaaatagatgaaatc

SEQ ID NO: 301856 - DNA, 90 bp, Homo sapiens
tcattcaaagtcagcatgatccacagactgcgattcacaaccgacgtacagctaggaccagcaacggagcgaggagctggctcgaatcat

SEQ ID NO: 301857 - DNA, 90 bp, Homo sapiens
gtggttgagctgcagcagagggagcttgccttgaaggacaagaacagcgccgtcaccagcagttgatattcactgatggactccaaagaa

SEQ ID NO: 301858 - DNA, 51 bp, Homo sapiens
cagagccctgcgatactattatgacaagatcgccaaactgaggcagcaact

SEQ ID NO: 301859 - DNA, 83 bp, Homo sapiens
cggcggctcagttgtccatgaccctgaaggtccaggagtacccgaccctcaaggatattagaaatggctactccccagtcaat

SEQ ID NO: 301860 - DNA, 100 bp, Homo sapiens
cgtaatactccactgtgcgacagggactgctgagatgtcctctattcttgaagagcgtattcttggagctgatacctctgttgatcttgaagaaactggg

SEQ ID NO: 301861 - DNA, 100 bp, Homo sapiens
aaccaccaactgttaggtttttatccaaaatgtttcatccaaatggcctgaattattggaacaactttggaaagccagagctgaaaaaaagaaactacgc

SEQ ID NO: 301862 - DNA, 90 bp, Homo sapiens
agcaatccaatccatctatggtattggacatagagatcactactcttggaatcaaagataaatccaaatactgcatatcagaaacaacag

SEQ ID NO: 301863 - DNA, 82 bp, Homo sapiens
ttaccaggaattactatgttcgggccgtcctgcatctcctggaaagcaggcaggatgggagagtcgccgatagaaccacctc

SEQ ID NO: 301864 - DNA, 101 bp, Homo sapiens
cgctctcccaacacagaggagatcttcaatatgttaaccaaagaaacaccagagaccttctacattgataccccagaatcttccatgctccgtcacactgc

SEQ ID NO: 301865 - DNA, 98 bp, Homo sapiens
tacctcagttcattgccagagagccatacttaattcagtgcacaaatgagatgaatgtgaacatcccacagttggcagacagtttatttgaaagaact

SEQ ID NO: 301866 - DNA, 98 bp, Homo sapiens
aagatcatggaatatctatttgaatcctggatgtatttttctcacagtcttcttgcttcctgaaatttcctctgggtcagttaaatgaaagcatggac

SEQ ID NO: 301867 - DNA, 50 bp, Homo sapiens
cgtcaatcagagcgtcctgtgcggagggtgaggacaaaatcttcttaatc

SEQ ID NO: 301868 - DNA, 75 bp, Homo sapiens
gaccccggcccggaggaggctcatgcgggatttcaagcgggggatatgagactttctactcggaatatcctgagt

SEQ ID NO: 301869 - DNA, 98 bp, Homo sapiens
acacccctgcactatgcagctacatcagacacagatggcaatgcaaggaaggtggcttccctcaggaactctggttgggtgtcagcgcggacgccgtc

SEQ ID NO: 301870 - DNA, 98 bp, Homo sapiens
acaactggatgaacattaacctgcgagaagtcatctgcacgtccaggagagctacagtccatggccgaccaagaaaagatctccccagctgcccttaa

SEQ ID NO: 301871 - DNA, 124 bp, Homo sapiens
caacgaccggggcgtcggcatgctcacccgcctctacaacatcaagaagggtgcctgtgcagcagtattcactgtgataggaagtgagaagcagtctgagtgttcattgctgagggaatcaagg

SEQ ID NO: 301872 - DNA, 98 bp, Homo sapiens
aaaggattgtaatttgaaaaaagtatctattccatctccacaaaccggaggactacccccagactgcagtaagtgttgtcatggagactacagctttc

SEQ ID NO: 301873 - DNA, 83 bp, Homo sapiens
gatgatccacaagcccaggagaaattccaggatctgggtgctgcttatgaggtacaggtttgcagattccgccagcagcacag

SEQ ID NO: 301874 - DNA, 101 bp, Homo sapiens
atcccttcatcaaggagtaccaggccaagtcctcaaccactgaagaagaagcttgatgcttggctgtcagaagacatgaattacgcacggttcatcacggc

SEQ ID NO: 301875 - DNA, 98 bp, Homo sapiens
tcccacggattctacattatgtggtgatcatgtgtgcgagcagtgacaccatccggagcatcatgctggtggcgcacaggcatggcatgaccagtgga

SEQ ID NO: 301876 - DNA, 100 bp, Homo sapiens
gccatctgatctataaatgcggtggcatcgacaaaagaaccattgaaaaatttgagaaggaggctgctgagatcaaccaagatttgaacatccagctgct

SEQ ID NO: 301877 - DNA, 100 bp, Homo sapiens
ctcctgagtagctgggactgcagaaagaacattggagctatcatgtctggaagtgtgtttgcaatctaattttacctattcactctcctccttaaatttt

SEQ ID NO: 301878 - DNA, 82 bp, Homo sapiens
gcgcgtttcagcgaagtcgcacgtgaaggatagcagtggcctgagaaagactcggtgaaatacctggagtgctcagctctca

SEQ ID NO: 301879 - DNA, 83 bp, Homo sapiens
cttggagccaggcgccggggtctgagggaccagttactctccacaagaaaattcacacaaccacagtgctcttcatagttcaa

SEQ ID NO: 301880 - DNA, 51 bp, Homo sapiens
gaggatggggctcctcacaaggaggatgagagacagggtctcactctgttg

SEQ ID NO: 301881 - DNA, 100 bp, Homo sapiens
ctgctcagtcggccaagaagccctgcccaggacgggctctacgagtgcattctctgtgcctgctgtagcaccagctgccccagctactggtggaacggag

SEQ ID NO: 301882 - DNA, 96 bp, Homo sapiens
gaaggcagaacttatgctgactacgaatctgtgaatgaatgcatggaaggtgcccagcctggagaaggttctggagttcaaagcccacgaagggga

SEQ ID NO: 301883 - DNA, 100 bp, Homo sapiens
ctgctgggccctgcctgcattttcctgcgcaagggcttcgctgagaacaggcagcctaacatgaacgattggatgcccatcgccaaggagtatgatccac

SEQ ID NO: 301884 - DNA, 82 bp, Homo sapiens
cagctgagccagtaccagcagccagatcggaggaccggtaccggaatcccaaagggcagccccgagaaccacaggtgtacac

SEQ ID NO: 301885 - DNA, 100 bp, Homo sapiens
tgactatttttcatgacctttctcatctgactcgtgatctgcccatcttgttactccctagcagtgtggtaaggaaacagagcaaatgcagcgttacaat

SEQ ID NO: 301886 - DNA, 100 bp, Homo sapiens
atggtgtttactacctgcactcccttcaaatcgcccactttgatcttaagctggggtgaagaatggggcatgggtggctacgtaaagatggccaaagacc

SEQ ID NO: 301887 - DNA, 87 bp, Homo sapiens
agagcactagtgtctagaaggcactaaggatggactcaccctgtcacccaggttggactgcactggcctcaacctcctgagttcaag

SEQ ID NO: 301888 - DNA, 74 bp, Homo sapiens
aaaatctgggctaagtgctggcaagagcgatgtctactacttcagtacctggagtagaacagaaaaattattat

SEQ ID NO: 301889 - DNA, 100 bp, Homo sapiens
cgagctggagagcgtggacaagagcgcggggcaagtggctcggaacacagacatatctgaagagatggattaagaatgctttggattaaggattgtggag

SEQ ID NO: 301890 - DNA, 100 bp, Homo sapiens
cctcagaggacaacgaagtgttcgtatgcagatctcaatcgccacgtggatgccttgaatgcgtggagaaatgccaccgtgctgaaaccagagcacagcc

SEQ ID NO: 301891 - DNA, 100 bp, Homo sapiens
gatgcggaaaaagaatgaagaattcaagaaacttgctctggctggaatagcccttagagatttgtttgattccatggataaaacttcttccagtattcca

SEQ ID NO: 301892 - DNA, 83 bp, Homo sapiens
tttaactgaagatagtgcctttcagccctaccagcgccaaatcttaaaggcagaccacgcaaaaagaaaccatgcccacaaag

SEQ ID NO: 301893 - DNA, 75 bp, Homo sapiens
gattcaaacttcaacagaatgtggcaaccagtgctgattcctaaagaaaagcccccaatcacggttgtgggtgat

SEQ ID NO: 301894 - DNA, 50 bp, Homo sapiens
gcagttggaagcccatggggcaggtgcagttacctttagcagccaaggac

SEQ ID NO: 301895 - DNA, 75 bp, Homo sapiens
tggttatagatggacaagagacgatcattctgcaagcaggcaacctgaatacagcaggtggtccattatggctga

SEQ ID NO: 301896 - DNA, 75 bp, Homo sapiens
ggaagaatgaggtgttcttggacgtcatcgagtctgtcaacctcttggagggcatcctggctgtttcacccgtgg

SEQ ID NO: 301897 - DNA, 99 bp, Homo sapiens
ctccgcctcgccgcagtcggggcagccgctcgcccctcttttccatgtatccgtccaggggcctagaagacagttcccaggaggccgaggacgaggcat

SEQ ID NO: 301898 - DNA, 73 bp, Homo sapiens
gaaacctggaggcatcattgtacgatggtgtaagggtcaacatatttcactggcacctattcacaagcttgaa

SEQ ID NO: 301899 - DNA, 100 bp, Homo sapiens
tataaaagcagcaaatctacttttgggttacaaaaatccagaccagatattgcaattgctgctccatatgggggtgaagataaaaaaggaattgtttata

SEQ ID NO: 301900 - DNA, 100 bp, Homo sapiens
cctctacttagctcagcaattcttaccttaatggccacatctgttgctcagtggatccacagtgccttcaggaactgtgaagttaactgtctcatgggag

SEQ ID NO: 301901 - DNA, 80 bp, Homo sapiens
agagacgtatctgccgtgccaggggtctaggctccagaaacagggatggagttttaacattgaatgcggagaacactaat

SEQ ID NO: 301902 - DNA, 75 bp, Homo sapiens
gtgtcccacttgttcgcggcctatagatatcagttttagagaatgtggcgtggagaaattctcaaggaaagagta

SEQ ID NO: 301903 - DNA, 75 bp, Homo sapiens
gaggaggacaaagagcccctcatcgagctcttcgtcaagtgacactctgaacatcgtggcatcagatcaccggcc

SEQ ID NO: 301904 - DNA, 74 bp, Homo sapiens
ccgtttccagaagctgcgttgccaacgtcacatcccaaaataggaatgggtaccacagaccatgtcatcgtcct

SEQ ID NO: 301905 - DNA, 75 bp, Homo sapiens
tggatgatgatggatccatttctcctattgaggagtcaacctctgggttcccttcattatcctgtggaagtagcg

SEQ ID NO: 301906 - DNA, 100 bp, Homo sapiens
agtagaaaactggtcaaggaagctttaagtgggcagaccaacatccacctcagcaaaaacttcttcctgacgaatcgcgccagggagcgctcagacacct

SEQ ID NO: 301907 - DNA, 74 bp, Homo sapiens
ggaagtctgcaagaatatctccaaatttggaccagaaaatccctttaggacacagcaaatggctgcccctagaa

SEQ ID NO: 301908 - DNA, 104 bp, Homo sapiens
gggaatgaaggttctacagaaagtcaccagaggaagatgtttctttctcagcaaaatagaggagaagcttacccctcttccagaagataatagtatgaatgtgg

SEQ ID NO: 301909 - DNA, 100 bp, Homo sapiens
aaagtcaatggatcccacgaagccaatatgttaaaactcttgatgtttcagtgagctttaatggaggaaaatctgtcatttcaggatcattaattgtcac

SEQ ID NO: 301910 - DNA, 75 bp, Homo sapiens
gggcccccaggccgaccgcacgctcggctgctacgtggaaatcctcaagctgctacacgatgaggcgagtggtac

SEQ ID NO: 301911 - DNA, 50 bp, Homo sapiens
tcatggcctacccgggatacggaggagggcggaagatccatccaaaagct

SEQ ID NO: 301912 - DNA, 88 bp, Homo sapiens
cgtgtagcgtcgccgttactccgaggagataccagtcggtagaggcacctacaggacttgggctgcttcaggctgaacgctgggagac

SEQ ID NO: 301913 - DNA, 50 bp, Homo sapiens
aatgggcaacaggccagcagccaaatacctttgtgttggatgaatttaag

SEQ ID NO: 301914 - DNA, 100 bp, Homo sapiens
agggacctggagcttttccggaaaaaggtgctgtgactatctaagaacattaaccaggtggtatttgttggaaatttcttgagaattaatacgatcgcca

SEQ ID NO: 301915 - DNA, 75 bp, Homo sapiens
ccatgagtggttccatgatgggaagtgacatgggacacttagtcggtctggatgaaccagcttcgggagctgggc

SEQ ID NO: 301916 - DNA, 100 bp, Homo sapiens
gtcggaggtctcatctttgaactactgccggagcttctgccaggatttttttcccaggaagccatcccgtcagaggggttcaagtgatgaaagttggcaa

SEQ ID NO: 301917 - DNA, 100 bp, Homo sapiens
attacccaaggtgaacaaaaccaagtcagagaagccggctggagctgatttagccaagctgagaaaggaggacgaatccatgaaccaaccaggaccaatc

SEQ ID NO: 301918 - DNA, 100 bp, Homo sapiens
gtgtggaaggactcctgaaccagctcgtcctggagcacctgcagctggcgcctctgcagtggggctgcccttccaaaggccaccatcctggatctgtctt

SEQ ID NO: 301919 - DNA, 82 bp, Homo sapiens
actaacgagattcaagattatttgcaacagctcacgggagcaagaacggagttaaagaggattgcactgcctccatggaacc

SEQ ID NO: 301920 - DNA, 88 bp, Homo sapiens
gtatggtcctgatgccttttttaactttccaggaaagagtgctgcaggaagtgttcgccagttactacatgaaaagataagagatgct

SEQ ID NO: 301921 - DNA, 74 bp, Homo sapiens
gaggtggtgaaactcaagatccccatggacaacaaggagaagtctggaacgttttttcttagagttccagaatt

SEQ ID NO: 301922 - DNA, 102 bp, Homo sapiens
gcttcctggagttcacgactctgagtgctggtgctggagaatctggtaaaagcaccattgtgaagcagatgaggatcctgcatgttaatgggtttaatggag

SEQ ID NO: 301923 - DNA, 100 bp, Homo sapiens
gaggctctttgctgctgtcagtatcaccactggtcaagcagacagatttgaccagttttgggccatcaatcggaaactcatggaatatcctgcagaagaa

SEQ ID NO: 301924 - DNA, 75 bp, Homo sapiens
acgaggccacagacacttctgatagtgaaggtggagccgccaccaaaatgcagattttcgtgaaaacccttacgg

SEQ ID NO: 301925 - DNA, 82 bp, Homo sapiens
agaagtccagggctaggagcctcagccggcggacgccaggaaacagggctgccaggcgcccagctgtgcccagatggatggg

SEQ ID NO: 301926 - DNA, 75 bp, Homo sapiens
ggcagcgaaagcggtgcagacgggaggaagatctttgtggagttcacctctgtgtttgactgccagaaagccatg

SEQ ID NO: 301927 - DNA, 102 bp, Homo sapiens
ccaagatcccagtcacaattatcaccgggtatttagagtgcctggaagagctgggatgtctggttgagtcctatggcatgaatgtttgccaaccaaccccag

SEQ ID NO: 301928 - DNA, 87 bp, Homo sapiens
aatacaggatgcctctcagctgccacctgcctttgacctttttgaagcctttgcaaaatcaccaggtgtcaagatgctgcaagtaca

SEQ ID NO: 301929 - DNA, 100 bp, Homo sapiens
caaggcaccttccagaggctttgtggtgcgggacgcaccctggaccgccagcagcagtgagaaggcttttaaggataccggaaaaacacccgtggagccg

SEQ ID NO: 301930 - DNA, 75 bp, Homo sapiens
cggggtcgctgtaggcgctgaggctgcagcatcatggcagaacaggatgtggaaaacgatcttttggattacgat

SEQ ID NO: 301931 - DNA, 98 bp, Homo sapiens
tgatgatgaccctgctttgaaatctcgacccaagaaaaagaagaattcagatgatgctccatggagtcctaaagagttgatctctctaatgtattaga

SEQ ID NO: 301932 - DNA, 100 bp, Homo sapiens
caccaatacttgggtattacacatggatggtgagaactttagaattgttttggagtcgaggtggaaaaaagtttcttcctgtattgaaagaaatcttgga

SEQ ID NO: 301933 - DNA, 100 bp, Homo sapiens
gcgggtgtgtgggcgcccagcacgactcctcgggcagcctcaacgagaactcggagggcaccggagatgccttcaattaagttgcagagttctgatggag

SEQ ID NO: 301934 - DNA, 74 bp, Homo sapiens
ttggctcactgaggaggtttgaatttaagcagaacggtgggaagccctatttgtctgtgattacggggagagga

SEQ ID NO: 301935 - DNA, 82 bp, Homo sapiens
cgaaccccttcatgcccaaatcccggaaactccagcgtgtctccagccgtgaagctccaccatgaggcgaggtggatggagg

SEQ ID NO: 301936 - DNA, 96 bp, Homo sapiens
cgctgacagctgaggaagtctgcatccacattgcacataaagttggtgaagtcatgggcattgggcgttcatttgaggaggccttccagaaggccc

SEQ ID NO: 301937 - DNA, 100 bp, Homo sapiens
catcgatggcaccccctgtgaccagaacggcacggccatctgtgtgtctgggcagtgcaagctgtatgccactgggtatggtgcaggtggcagactaggc

SEQ ID NO: 301938 - DNA, 90 bp, Homo sapiens
cagggtctctggaaatttgacacagagtgctataaaaagtatggaaaaatgtggggggagctcgaggagcagcacggcatccactgcaac

SEQ ID NO: 301939 - DNA, 75 bp, Homo sapiens
cttcagggatgagtcatgtggtggtgaaaaatgaccctgaactggaccagcagtctgatcatcggatatcatgga

SEQ ID NO: 301940 - DNA, 100 bp, Homo sapiens
aaatgaaggggagaatcctgaagacactaaaacccaagtgattttgcagttacagcctgtgcaacaaggtgatgtccttgcattgcccatttttaagcaa

SEQ ID NO: 301941 - DNA, 78 bp, Homo sapiens
gagcgtgctgcggacggcgctgcggtacatccaggtcgcaatggaagaagagatcgccgcgctggtcattgacaatgg

SEQ ID NO: 301942 - DNA, 51 bp, Homo sapiens
ttggagattctgcggcgaatacgccaggttatcaagttatacccaaccagc

SEQ ID NO: 301943 - DNA, 100 bp, Homo sapiens
tcaggatctgatctgaatgctgtgaaatcactaggaactccagagatgtacgagatcaaagcaggaggcagcattgcaaagaagttcagcgcggctctgc

SEQ ID NO: 301944 - DNA, 107 bp, Homo sapiens
ccacacgcgtacccccgtagcggaaaaacgctgaagccgacgtagcttctctgaacagacgcatccagctggttgaggaagagttggatcgtgcccaggagcgtctg

SEQ ID NO: 301945 - DNA, 87 bp, Homo sapiens
tgatagacttaaaatatttcccatattatgggaaaaaactgcatgttacacgacagatccatgagcatgagcaggagaacgagttgc

SEQ ID NO: 301946 - DNA, 80 bp, Homo sapiens
cctgcaacaaatatcactgaaatgattcatttctggaagcattctactagggctacttctccaggagaacagcaggtttg
